United States Patent Application Publication US 2022/0213167 A1 - sequence listing, part 25

SEQ ID NO: 524577 - protein, 17 aa, Homo sapiens
  CDR3 for alpha chain variable domain of TCR clone 262289 (TRAV8-3, TRAJ50)
CAVGAVDTETSYDKVIF

SEQ ID NO: 524578 - protein, 13 aa, Homo sapiens
  CDR3 for beta chain variable domain of TCR clone 262289 (TRBV7-9, TRBJ2-2)
CASSSAGTGEPFF

SEQ ID NO: 524579 - protein, 13 aa, Homo sapiens
  CDR3 for alpha chain variable domain of TCR clone 262290 (TRAV8-4, TRAJ20)
CAVSRSNDYKPSF

SEQ ID NO: 524580 - protein, 15 aa, Homo sapiens
  CDR3 for beta chain variable domain of TCR clone 262290 (TRBV6-1, TRBJ2-2)
CASIVTSGITGELFF

SEQ ID NO: 524581 - protein, 13 aa, Homo sapiens
  CDR3 for alpha chain variable domain of TCR clone 262291 (TRAV12-3, TRAJ13)
CAMSSGGYQKVTF

SEQ ID NO: 524582 - protein, 13 aa, Homo sapiens
  CDR3 for beta chain variable domain of TCR clone 262291 (TRBV7-8, TRBJ2-1)
CASTRDAVDEQFF

SEQ ID NO: 524583 - protein, 14 aa, Homo sapiens
  CDR3 for alpha chain variable domain of TCR clone 262292 (TRAV12-2, TRAJ13)
CAVKKTGGYQNVTF

SEQ ID NO: 524584 - protein, 15 aa, Homo sapiens
  CDR3 for beta chain variable domain of TCR clone 262292 (TRBV7-9, TRBJ1-5)
CASSQGHQPNQPQHF

SEQ ID NO: 524585 - protein, 12 aa, Homo sapiens
  CDR3 for alpha chain variable domain of TCR clone 262293 (TRAV12-3, TRAJ17)
CAMKLTGNKLTF

SEQ ID NO: 524586 - protein, 12 aa, Homo sapiens
  CDR3 for beta chain variable domain of TCR clone 262293 (TRBV2, TRBJ2-1)
CAYGPPGNEQFF

SEQ ID NO: 524587 - protein, 16 aa, Homo sapiens
  CDR3 for alpha chain variable domain of TCR clone 262294 (TRAV3, TRAJ10)
CAVRDMRAGGGNKLTF

SEQ ID NO: 524588 - protein, 14 aa, Homo sapiens
  CDR3 for beta chain variable domain of TCR clone 262294 (TRBV27, TRBJ2-1)
CASRHLGGGKEQFF

SEQ ID NO: 524589 - protein, 16 aa, Homo sapiens
  CDR3 for alpha chain variable domain of TCR clone 262295 (TRAV8-6, TRAJ28)
CAVTSKPGSGSYQLTF

SEQ ID NO: 524590 - protein, 16 aa, Homo sapiens
  CDR3 for beta chain variable domain of TCR clone 262295 (TRBV12-4, TRBJ2-5)
CASSWRPSGDLETQYF

SEQ ID NO: 524591 - protein, 14 aa, Homo sapiens
  CDR3 for alpha chain variable domain of TCR clone 262296 (TRAV9-2, TRAJ39)
CALYIYNAGNMLTF

SEQ ID NO: 524592 - protein, 13 aa, Homo sapiens
  CDR3 for beta chain variable domain of TCR clone 262296 (TRBV4-1, TRBJ2-2)
CASSPENTGELFF

SEQ ID NO: 524593 - protein, 18 aa, Homo sapiens
  CDR3 for alpha chain variable domain of TCR clone 262297 (TRAV26-2, TRAJ45)
CILRVDKYSVGGADGLTF

SEQ ID NO: 524594 - protein, 17 aa, Homo sapiens
  CDR3 for beta chain variable domain of TCR clone 262297 (TRBV25-1, TRBJ2-1)
CASSAYGQGRGVYEQFF

SEQ ID NO: 524595 - protein, 15 aa, Homo sapiens
  CDR3 for alpha chain variable domain of TCR clone 262298 (TRAV12-3, TRAJ6)
CAMSATTGGSYIPTF

SEQ ID NO: 524596 - protein, 15 aa, Homo sapiens
  CDR3 for beta chain variable domain of TCR clone 262298 (TRBV4-1, TRBJ2-5)
CASSQASGEYETQYF

SEQ ID NO: 524597 - protein, 15 aa, Homo sapiens
  CDR3 for alpha chain variable domain of TCR clone 262299 (TRAV8-6, TRAJ23)
GAVRLIYNQGGTLIF

SEQ ID NO: 524598 - protein, 13 aa, Homo sapiens
  CDR3 for beta chain variable domain of TCR clone 262299 (TRBV11-2, TRBJ2-2)
CASSLQNTGELLF

SEQ ID NO: 524599 - protein, 13 aa, Homo sapiens
  CDR3 for alpha chain variable domain of TCR clone 262300 (TRAV8-3, TRAJ28)
CAVGAVGSYQLTF

SEQ ID NO: 524600 - protein, 14 aa, Homo sapiens
  CDR3 for beta chain variable domain of TCR clone 262300 (TRBV19, TRBJ2-2)
CATTGHANTGELFF

SEQ ID NO: 524601 - protein, 12 aa, Homo sapiens
  CDR3 for alpha chain variable domain of TCR clone 262301 (TRAV12-1, TRAJ11)
CVVKAGYSTLTF

SEQ ID NO: 524602 - protein, 16 aa, Homo sapiens
  CDR3 for beta chain variable domain of TCR clone 262301 (TRBV6-1, TRBJ2-5)
CASSETLDRGAETQYF

SEQ ID NO: 524603 - protein, 11 aa, Homo sapiens
  CDR3 for alpha chain variable domain of TCR clone 262302 (TRAV1-2, TRAJ20)
CAVANDYKLSF

SEQ ID NO: 524604 - protein, 16 aa, Homo sapiens
  CDR3 for beta chain variable domain of TCR clone 262302 (TRBV4-3, TRBJ1-6)
CASSQDPGVYNSPFHF

SEQ ID NO: 524605 - protein, 16 aa, Homo sapiens
  CDR3 for alpha chain variable domain of TCR clone 262303 (TRAV3, TRAJ10)
CAVRDMNAGGGNKLTF

SEQ ID NO: 524606 - protein, 15 aa, Homo sapiens
  CDR3 for beta chain variable domain of TCR clone 262303 (TRBV20-1, TRBJ2-7)
CSARDRVSGMDEPYF

SEQ ID NO: 524607 - protein, 14 aa, Homo sapiens
  CDR3 for alpha chain variable domain of TCR clone 262304 (TRAV17, TRAJ40)
CATALTSGTYKYIF

SEQ ID NO: 524608 - protein, 16 aa, Homo sapiens
  CDR3 for beta chain variable domain of TCR clone 262304 (TRBV6-6, TRBJ2-1)
CASSYSFSGSYNEQFF

SEQ ID NO: 524609 - protein, 14 aa, Homo sapiens
  CDR3 for alpha chain variable domain of TCR clone 262305 (TRAV35, TRAJ42)
CAGRYGGSQGNLIF

SEQ ID NO: 524610 - protein, 15 aa, Homo sapiens
  CDR3 for beta chain variable domain of TCR clone 262305 (TRBV12-4, TRBJ2-5)
CASSPPTGLQETQYF

SEQ ID NO: 524611 - protein, 12 aa, Homo sapiens
  CDR3 for alpha chain variable domain of TCR clone 262306 (TRAV1-1, TRAJ39)
CAVPVVGNMLTF

SEQ ID NO: 524612 - protein, 18 aa, Homo sapiens
  CDR3 for beta chain variable domain of TCR clone 262306 (TRBV6-3, TRBJ2-5)
CTSVPAVTGDSSGKTQYF

SEQ ID NO: 524613 - protein, 15 aa, Homo sapiens
  CDR3 for alpha chain variable domain of TCR clone 262307 (TRAV38-2/DV8, TRAJ45)
CAYWDAGGGADGLTF

SEQ ID NO: 524614 - protein, 14 aa, Homo sapiens
  CDR3 for beta chain variable domain of TCR clone 262307 (TRBV7-2, TRBJ2-7)
CASRSQGAAYEQYF

SEQ ID NO: 524615 - protein, 14 aa, Homo sapiens
  CDR3 for alpha chain variable domain of TCR clone 262308 (TRAV16, TRAJ15)
CALSGPQAGTALIF

SEQ ID NO: 524616 - protein, 12 aa, Homo sapiens
  CDR3 for beta chain variable domain of TCR clone 262308 (TRBV18, TRBJ2-5)
CASSTSKETQYF

SEQ ID NO: 524617 - protein, 13 aa, Homo sapiens
  CDR3 for alpha chain variable domain of TCR clone 262309 (TRAV12-3, TRAJ13)
CAMSSGGYQKVTF

SEQ ID NO: 524618 - protein, 13 aa, Homo sapiens
  CDR3 for beta chain variable domain of TCR clone 262309 (TRBV7-9, TRBJ2-3)
CASSPGSTDTQYF

SEQ ID NO: 524619 - protein, 14 aa, Homo sapiens
  CDR3 for alpha chain variable domain of TCR clone 262310 (TRAV2, TRAJ9)
CAVEDRSGGFKTIF

SEQ ID NO: 524620 - protein, 17 aa, Homo sapiens
  CDR3 for beta chain variable domain of TCR clone 262310 (TRBV4-1, TRBJ2-7)
CASSRGPLGVRGGEQYF

SEQ ID NO: 524621 - protein, 15 aa, Homo sapiens
  CDR3 for alpha chain variable domain of TCR clone 262311 (TRAV26-1, TRAJ44)
CIVRANTGTASKLTF

SEQ ID NO: 524622 - protein, 16 aa, Homo sapiens
  CDR3 for beta chain variable domain of TCR clone 262311 (TRBV4-3, TRBJ2-2)
CASSHLQGSGTGELFF

SEQ ID NO: 524623 - protein, 13 aa, Homo sapiens
  CDR3 for alpha chain variable domain of TCR clone 262312 (TRAV12-2, TRAJ24)
CAVSTESWGKLQF

SEQ ID NO: 524624 - protein, 17 aa, Homo sapiens
  CDR3 for beta chain variable domain of TCR clone 262312 (TRBV4-1, TRBJ2-3)
CASSQSATGGPVDTQYF

SEQ ID NO: 524625 - protein, 13 aa, Homo sapiens
  CDR3 for alpha chain variable domain of TCR clone 262313 (TRAV20, TRAJ21)
CAFEGYNFNKFYF

SEQ ID NO: 524626 - protein, 14 aa, Homo sapiens
  CDR3 for beta chain variable domain of TCR clone 262313 (TRBV12-5, TRBJ2-5)
CASGSRTHQETQYF

SEQ ID NO: 524627 - protein, 14 aa, Homo sapiens
  CDR3 for alpha chain variable domain of TCR clone 262314 (TRAV3, TRAJ28)
CAVRRGAGSYQLTF

SEQ ID NO: 524628 - protein, 13 aa, Homo sapiens
  CDR3 for beta chain variable domain of TCR clone 262314 (TRBV4-2, TRBJ1-1)
CASSQAGNTEAFF

SEQ ID NO: 524629 - protein, 12 aa, Homo sapiens
  CDR3 for alpha chain variable domain of TCR clone 262315 (TRAV1-1, TRAJ8)
CAGGTGFQKLVF

SEQ ID NO: 524630 - protein, 13 aa, Homo sapiens
  CDR3 for beta chain variable domain of TCR clone 262315 (TRBV15, TRBJ1-2)
CATSRGQLYGYTF

SEQ ID NO: 524631 - protein, 15 aa, Homo sapiens
  CDR3 for alpha chain variable domain of TCR clone 262316 (TRAV12-1, TRAJ44)
CVVDEYTGTASKLTF

SEQ ID NO: 524632 - protein, 16 aa, Homo sapiens
  CDR3 for beta chain variable domain of TCR clone 262316 (TRBV6-4, TRBJ1-2)
CASSEAVGDPNYGYTF

SEQ ID NO: 524633 - protein, 14 aa, Homo sapiens
  CDR3 for alpha chain variable domain of TCR clone 262317 (TRAV8-1, TRAJ5)
CAVRTDTGRRALTF

SEQ ID NO: 524634 - protein, 12 aa, Homo sapiens
  CDR3 for beta chain variable domain of TCR clone 262317 (TRBV11-2, TRBJ2-2)
CASSLGGGEPFF

SEQ ID NO: 524635 - protein, 11 aa, Homo sapiens
  CDR3 for alpha chain variable domain of TCR clone 262318 (TRAV2, TRAJ13)
CASAGYQKVTF

SEQ ID NO: 524636 - protein, 14 aa, Homo sapiens
  CDR3 for beta chain variable domain of TCR clone 262318 (TRBV6-3, TRBJ1-1)
CAGSNLLPGAEAFF

SEQ ID NO: 524637 - protein, 13 aa, Homo sapiens
  CDR3 for alpha chain variable domain of TCR clone 262319 (TRAV8-6, TRAJ16)
CAVSSPDGQKLLF

SEQ ID NO: 524638 - protein, 16 aa, Homo sapiens
  CDR3 for beta chain variable domain of TCR clone 262319 (TRBV5-7, TRBJ2-3)
CASSSVGGAITDTQYF

SEQ ID NO: 524639 - protein, 13 aa, Homo sapiens
  CDR3 for alpha chain variable domain of TCR clone 262320 (TRAV4, TRAJ13)
CLVESGGYQKVTF

SEQ ID NO: 524640 - protein, 14 aa, Homo sapiens
  CDR3 for beta chain variable domain of TCR clone 262320 (TRBV4-1, TRBJ1-1)
CASSRSGQSFEAFF

SEQ ID NO: 524641 - protein, 15 aa, Homo sapiens
  CDR3 for alpha chain variable domain of TCR clone 262321 (TRAV8-4, TRAJ36)
CAVRKSGTGANNLFF

SEQ ID NO: 524642 - protein, 17 aa, Homo sapiens
  CDR3 for beta chain variable domain of TCR clone 262321 (TRBV3-1, TRBJ2-2)
CASSQDSQGPNTGELFF

SEQ ID NO: 524643 - protein, 14 aa, Homo sapiens
  CDR3 for alpha chain variable domain of TCR clone 262322 (TRAV27, TRAJ36)
CAGPPKRGANNLFF

SEQ ID NO: 524644 - protein, 14 aa, Homo sapiens
  CDR3 for beta chain variable domain of TCR clone 262322 (TRBV18, TRBJ2-7)
RRPPSSTPNYEQYF

SEQ ID NO: 524645 - protein, 14 aa, Homo sapiens
  CDR3 for alpha chain variable domain of TCR clone 262323 (TRAV12-3, TRAJ10)
SHLPLTGGGNKLTF

SEQ ID NO: 524646 - protein, 12 aa, Homo sapiens
  CDR3 for beta chain variable domain of TCR clone 262323 (TRBV7-9, TRBJ2-7)
CATRTDAYERYF

SEQ ID NO: 524647 - protein, 13 aa, Homo sapiens
  CDR3 for alpha chain variable domain of TCR clone 262324 (TRAV26-2, TRAJ54)
CIPRVGGAQKLVF

SEQ ID NO: 524648 - protein, 17 aa, Homo sapiens
  CDR3 for beta chain variable domain of TCR clone 262324 (TRBV4-1, TRBJ1-1)
CASSQECDTTLKLSLDK

SEQ ID NO: 524649 - protein, 15 aa, Homo sapiens
  CDR3 for alpha chain variable domain of TCR clone 262325 (TRAV2, TRAJ15)
CAVEDRGQAGTALIF

SEQ ID NO: 524650 - protein, 13 aa, Homo sapiens
  CDR3 for beta chain variable domain of TCR clone 262325 (TRBV10-2, TRBJ2-7)
CASGASGGYEQCF

SEQ ID NO: 524651 - protein, 15 aa, Homo sapiens
  CDR3 for alpha chain variable domain of TCR clone 262326 (TRAV3, TRAJ20)
CAVRDIKLSDYKLSF

SEQ ID NO: 524652 - protein, 15 aa, Homo sapiens
  CDR3 for beta chain variable domain of TCR clone 262326 (TRBV7-9, TRBJ1-6)
CASSSPGRGKSTLHF

SEQ ID NO: 524653 - protein, 16 aa, Homo sapiens
  CDR3 for alpha chain variable domain of TCR clone 262327 (TRAV12-2, TRAJ56)
CAVRRVDTGANIKLTF

SEQ ID NO: 524654 - protein, 11 aa, Homo sapiens
  CDR3 for beta chain variable domain of TCR clone 262327 (TRBV3-1, TRBJ2-7)
CASSQVREQYF

SEQ ID NO: 524655 - protein, 15 aa, Homo sapiens
  CDR3 for alpha chain variable domain of TCR clone 262328 (TRAV3, TRAJ3)
CAVRDRRSSASKIIF

SEQ ID NO: 524656 - protein, 14 aa, Homo sapiens
  CDR3 for beta chain variable domain of TCR clone 262328 (TRBV7-2, TRBJ1-2)
CASSQTGSTYGYTF

SEQ ID NO: 524657 - protein, 14 aa, Homo sapiens
  CDR3 for alpha chain variable domain of TCR clone 262329 (TRAV12-2, TRAJ13)
CAVKKTGGYQKVTF

SEQ ID NO: 524658 - protein, 14 aa, Homo sapiens
  CDR3 for beta chain variable domain of TCR clone 262329 (TRBV11-2, TRBJ2-3)
CASSLGGGANTQYF

SEQ ID NO: 524659 - protein, 15 aa, Homo sapiens
  CDR3 for alpha chain variable domain of TCR clone 262330 (TRAV35, TRAJ20)
CAGQLVGSNDYNLSF

SEQ ID NO: 524660 - protein, 13 aa, Homo sapiens
  CDR3 for beta chain variable domain of TCR clone 262330 (TRBV19, TRBJ2-7)
CASSKTGTHEQYF

SEQ ID NO: 524661 - protein, 13 aa, Homo sapiens
  CDR3 for alpha chain variable domain of TCR clone 262331 (TRAV3, TRAJ21)
CAVREPDFNKFYF

SEQ ID NO: 524662 - protein, 15 aa, Homo sapiens
  CDR3 for beta chain variable domain of TCR clone 262331 (TRBV29-1, TRBJ2-7)
CSVEFFDRGSYEQYF

SEQ ID NO: 524663 - protein, 12 aa, Homo sapiens
  CDR3 for alpha chain variable domain of TCR clone 262332 (TRAV12-3, TRAJ17)
CAMTLTGNKLTF

SEQ ID NO: 524664 - protein, 14 aa, Homo sapiens
  CDR3 for beta chain variable domain of TCR clone 262332 (TRBV3-1, TRBJ2-7)
CASSQPGLLDEQYF

SEQ ID NO: 524665 - protein, 13 aa, Homo sapiens
  CDR3 for alpha chain variable domain of TCR clone 262333 (TRAV20, TRAJ20)
CAVQAGSGYKLSL

SEQ ID NO: 524666 - protein, 16 aa, Homo sapiens
  CDR3 for beta chain variable domain of TCR clone 262333 (TRBV3-1, TRBJ2-3)
CISVPAAKGGGDTQYF

SEQ ID NO: 524667 - protein, 13 aa, Homo sapiens
  CDR3 for alpha chain variable domain of TCR clone 262334 (TRAV29/DV5, TRAJ31)
CAASRNNTARLLF

SEQ ID NO: 524668 - protein, 15 aa, Homo sapiens
  CDR3 for beta chain variable domain of TCR clone 262334 (TRBV2, TRBJ2-1)
CASSELAGSYNEQFF

SEQ ID NO: 524669 - protein, 13 aa, Homo sapiens
  CDR3 for alpha chain variable domain of TCR clone 262335 (TRAV1-2, TRAJ9)
CAALNTGGFKTIF

SEQ ID NO: 524670 - protein, 15 aa, Homo sapiens
  CDR3 for beta chain variable domain of TCR clone 262335 (TRBV10-2, TRBJ2-6)
CASSEQGTGANVLTF

SEQ ID NO: 524671 - protein, 16 aa, Homo sapiens
  CDR3 for alpha chain variable domain of TCR clone 262336 (TRAV12-2, TRAJ45)
CAVKRNPGGGTDGLTF

SEQ ID NO: 524672 - protein, 12 aa, Homo sapiens
  CDR3 for beta chain variable domain of TCR clone 262336 (TRBV6-1, TRBJ2-5)
CASSEGRETQYF

SEQ ID NO: 524673 - protein, 14 aa, Homo sapiens
  CDR3 for alpha chain variable domain of TCR clone 262337 (TRAV16, TRAJ33)
FALSAMDSNYQLIW

SEQ ID NO: 524674 - protein, 12 aa, Homo sapiens
  CDR3 for beta chain variable domain of TCR clone 262337 (TRBV28, TRBJ2-6)
CAIQAGANVLTF

SEQ ID NO: 524675 - protein, 14 aa, Homo sapiens
  CDR3 for alpha chain variable domain of TCR clone 262338 (TRAV12-3, TRAJ10)
SHLPLTGGGNTLTF

SEQ ID NO: 524676 - protein, 14 aa, Homo sapiens
  CDR3 for beta chain variable domain of TCR clone 262338 (TRBV5-1, TRBJ2-3)
CASSLERDLGPQYF

SEQ ID NO: 524677 - protein, 17 aa, Homo sapiens
  CDR3 for alpha chain variable domain of TCR clone 262339 (TRAV3, TRAJ6)
CAVGDGPRAGGSYIPTF

SEQ ID NO: 524678 - protein, 13 aa, Homo sapiens
  CDR3 for beta chain variable domain of TCR clone 262339 (TRBV10-3, TRBJ1-2)
CAISERDSYGYTF

SEQ ID NO: 524679 - protein, 18 aa, Homo sapiens
  CDR3 for alpha chain variable domain of TCR clone 262340 (TRAV21, TRAJ53)
CAVKGGENSGGSNYKLTF

SEQ ID NO: 524680 - protein, 16 aa, Homo sapiens
  CDR3 for beta chain variable domain of TCR clone 262340 (TRBV7-3, TRBJ2-1)
CASSLEGYRSYNEQFF

SEQ ID NO: 524681 - protein, 14 aa, Homo sapiens
  CDR3 for alpha chain variable domain of TCR clone 262341 (TRAV25, TRAJ6)
CAGRESGGSYIHTS

SEQ ID NO: 524682 - protein, 13 aa, Homo sapiens
  CDR3 for beta chain variable domain of TCR clone 262341 (TRBV12-4, TRBJ2-7)
CASSLSGVYEQYF

SEQ ID NO: 524683 - protein, 12 aa, Homo sapiens
  CDR3 for alpha chain variable domain of TCR clone 262342 (TRAV13-2, TRAJ8)
CAPWLGFQKLVF

SEQ ID NO: 524684 - protein, 14 aa, Homo sapiens
  CDR3 for beta chain variable domain of TCR clone 262342 (TRBV19, TRBJ2-5)
YASSMTGQQETQYF

SEQ ID NO: 524685 - protein, 14 aa, Homo sapiens
  CDR3 for alpha chain variable domain of TCR clone 262343 (TRAV12-2, TRAJ5)
CAVKGDTGRRALTF

SEQ ID NO: 524686 - protein, 15 aa, Homo sapiens
  CDR3 for beta chain variable domain of TCR clone 262343 (TRBV7-3, TRBJ2-1)
CASSPTGGGEVEQFF

SEQ ID NO: 524687 - protein, 14 aa, Homo sapiens
  CDR3 for alpha chain variable domain of TCR clone 262344 (TRAV12-1, TRAJ34)
CVVNLDYNTDKPIF

SEQ ID NO: 524688 - protein, 20 aa, Homo sapiens
  CDR3 for beta chain variable domain of TCR clone 262344 (TRBV7-3, TRBJ2-7)
CASSPRGLAGMVAVLRAGHQ

SEQ ID NO: 524689 - protein, 15 aa, Homo sapiens
  CDR3 for alpha chain variable domain of TCR clone 262345 (TRAV8-6, TRAJ38)
CAVSSNAGNNRKLTW

SEQ ID NO: 524690 - protein, 14 aa, Homo sapiens
  CDR3 for beta chain variable domain of TCR clone 262345 (TRBV14, TRBJ2-1)
CASSQVQGRGEQFF

SEQ ID NO: 524691 - protein, 11 aa, Homo sapiens
  CDR3 for alpha chain variable domain of TCR clone 262346 (TRAV21, TRAJ34)
CAVTNTDKLIF

SEQ ID NO: 524692 - protein, 16 aa, Homo sapiens
  CDR3 for beta chain variable domain of TCR clone 262346 (TRBV12-4, TRBJ2-2)
CASSFWIVGNTGELFF

SEQ ID NO: 524693 - protein, 12 aa, Homo sapiens
  CDR3 for alpha chain variable domain of TCR clone 262347 (TRAV17, TRAJ57)
CATDGGSEKLVF

SEQ ID NO: 524694 - protein, 13 aa, Homo sapiens
  CDR3 for beta chain variable domain of TCR clone 262347 (TRBV7-9, TRBJ2-7)
CASSFSQGYEQYF

SEQ ID NO: 524695 - protein, 13 aa, Homo sapiens
  CDR3 for alpha chain variable domain of TCR clone 262348 (TRAV30, TRAJ24)
CGTVTDIWGKLQF

SEQ ID NO: 524696 - protein, 15 aa, Homo sapiens
  CDR3 for beta chain variable domain of TCR clone 262348 (TRBV4-1, TRBJ2-1)
CASSQDPGNYNEQFF

SEQ ID NO: 524697 - protein, 11 aa, Homo sapiens
  CDR3 for alpha chain variable domain of TCR clone 262349 (TRAV12-2, TRAJ31)
CAVTRWARLMF

SEQ ID NO: 524698 - protein, 15 aa, Homo sapiens
  CDR3 for beta chain variable domain of TCR clone 262349 (TRBV2, TRBJ2-5)
CASRIAGVGGETQYF

SEQ ID NO: 524699 - protein, 10 aa, Homo sapiens
  CDR3 for alpha chain variable domain of TCR clone 262350 (TRAV8-4, TRAJ43)
CAVSADDVRF

SEQ ID NO: 524700 - protein, 14 aa, Homo sapiens
  CDR3 for beta chain variable domain of TCR clone 262350 (TRBV9, TRBJ1-2)
CASSVSTRSYGYTF

SEQ ID NO: 524701 - protein, 13 aa, Homo sapiens
  CDR3 for alpha chain variable domain of TCR clone 262351 (TRAV3, TRAJ40)
CAVRGSGAYKYIF

SEQ ID NO: 524702 - protein, 18 aa, Homo sapiens
  CDR3 for beta chain variable domain of TCR clone 262351 (TRBV18, TRBJ1-3)
CASSPRGGAGPSGNTIYF

SEQ ID NO: 524703 - protein, 13 aa, Homo sapiens
  CDR3 for alpha chain variable domain of TCR clone 262352 (TRAV3, TRAJ20)
CAVRSLNDYKLSF

SEQ ID NO: 524704 - protein, 13 aa, Homo sapiens
  CDR3 for beta chain variable domain of TCR clone 262352 (TRBV6-1, TRBJ2-1)
CPGMDPTNNEQFF

SEQ ID NO: 524705 - protein, 14 aa, Homo sapiens
  CDR3 for alpha chain variable domain of TCR clone 262353 (TRAV12-1, TRAJ26)
CVVKGSNYGQNFVF

SEQ ID NO: 524706 - protein, 15 aa, Homo sapiens
  CDR3 for beta chain variable domain of TCR clone 262353 (TRBV7-8, TRBJ2-1)
CASSLADSLYNEQFF

SEQ ID NO: 524707 - protein, 13 aa, Homo sapiens
  CDR3 for alpha chain variable domain of TCR clone 262354 (TRAV21, TRAJ27)
CAARPGNAGKSTF

SEQ ID NO: 524708 - protein, 17 aa, Homo sapiens
  CDR3 for beta chain variable domain of TCR clone 262354 (TRBV3-1, TRBJ2-5)
CASSLGLAGEDQETQYF

SEQ ID NO: 524709 - protein, 17 aa, Homo sapiens
  CDR3 for alpha chain variable domain of TCR clone 262355 (TRAV3, TRAJ6)
CAVRYGPRAGGSYIPTF

SEQ ID NO: 524710 - protein, 14 aa, Homo sapiens
  CDR3 for beta chain variable domain of TCR clone 262355 (TRBV7-2, TRBJ2-7)
CASSHKTSFYEQYF

SEQ ID NO: 524711 - protein, 13 aa, Homo sapiens
  CDR3 for alpha chain variable domain of TCR clone 262356 (TRAV1-1, TRAJ9)
CAAKNTGGFKTIF

SEQ ID NO: 524712 - protein, 13 aa, Homo sapiens
  CDR3 for beta chain variable domain of TCR clone 262356 (TRBV7-2, TRBJ1-1)
CASNLKGAKVAFF

SEQ ID NO: 524713 - protein, 14 aa, Homo sapiens
  CDR3 for alpha chain variable domain of TCR clone 262357 (TRAV12-2, TRAJ6)
CASKGGGGSYLPTF

SEQ ID NO: 524714 - protein, 13 aa, Homo sapiens
  CDR3 for beta chain variable domain of TCR clone 262357 (TRBV2, TRBJ1-1)
CASSEGGNTEAFF

SEQ ID NO: 524715 - protein, 14 aa, Homo sapiens
  CDR3 for alpha chain variable domain of TCR clone 262358 (TRAV12-2, TRAJ40)
CAVKIPSGTYRYIF

SEQ ID NO: 524716 - protein, 13 aa, Homo sapiens
  CDR3 for beta chain variable domain of TCR clone 262358 (TRBV20-1, TRBJ1-3)
CSARVQGRDTIYF

SEQ ID NO: 524717 - protein, 10 aa, Homo sapiens
  CDR3 for alpha chain variable domain of TCR clone 262359 (TRAV12-1, TRAJ33)
CVASNYQLIW

SEQ ID NO: 524718 - protein, 15 aa, Homo sapiens
  CDR3 for beta chain variable domain of TCR clone 262359 (TRBV5-4, TRBJ1-4)
CGSSHGDGENEKLFF

SEQ ID NO: 524719 - protein, 13 aa, Homo sapiens
  CDR3 for alpha chain variable domain of TCR clone 262360 (TRAV8-3, TRAJ44)
CAVVPGTASKLTF

SEQ ID NO: 524720 - protein, 15 aa, Homo sapiens
  CDR3 for beta chain variable domain of TCR clone 262360 (TRBV27, TRBJ2-3)
CASSLGLAATDTQYF

SEQ ID NO: 524721 - protein, 12 aa, Homo sapiens
  CDR3 for alpha chain variable domain of TCR clone 262361 (TRAV21, TRAJ11)
CAVRGGNSTLTF

SEQ ID NO: 524722 - protein, 13 aa, Homo sapiens
  CDR3 for beta chain variable domain of TCR clone 262361 (TRBV20-1, TRBJ1-5)
CSATAAGGQPQHF

SEQ ID NO: 524723 - protein, 15 aa, Homo sapiens
  CDR3 for alpha chain variable domain of TCR clone 262362 (TRAV29/DV5, TRAJ53)
CAASASGGSHYKLTF

SEQ ID NO: 524724 - protein, 19 aa, Homo sapiens
  CDR3 for beta chain variable domain of TCR clone 262362 (TRBV5-1, TRBJ2-3)
CASSLWLAGGITTTDTQYF

SEQ ID NO: 524725 - protein, 12 aa, Homo sapiens
  CDR3 for alpha chain variable domain of TCR clone 262363 (TRAV16, TRAJ56)
CAPTGANSKLTF

SEQ ID NO: 524726 - protein, 17 aa, Homo sapiens
  CDR3 for beta chain variable domain of TCR clone 262363 (TRBV27, TRBJ2-6)
CASSLTGLASGANVLTF

SEQ ID NO: 524727 - protein, 19 aa, Homo sapiens
  CDR3 for alpha chain variable domain of TCR clone 262364 (TRAV8-3, TRAJ34)
LSTSVLWVWGLRNTDKLIF

SEQ ID NO: 524728 - protein, 19 aa, Homo sapiens
  CDR3 for beta chain variable domain of TCR clone 262364 (TRBV7-2, TRBJ2-3)
CASSFLSRNWGGGTDTQYF

SEQ ID NO: 524729 - protein, 16 aa, Homo sapiens
  CDR3 for alpha chain variable domain of TCR clone 262365 (TRAV1-2, TRAJ33)
CAVRAISMDSNYQLIW

SEQ ID NO: 524730 - protein, 13 aa, Homo sapiens
  CDR3 for beta chain variable domain of TCR clone 262365 (TRBV5-5, TRBJ1-2)
CANSFWRGEDYTV

SEQ ID NO: 524731 - protein, 15 aa, Homo sapiens
  CDR3 for alpha chain variable domain of TCR clone 262366 (TRAV13-1, TRAJ5)
CAASPRGHGQESTYF

SEQ ID NO: 524732 - protein, 12 aa, Homo sapiens
  CDR3 for beta chain variable domain of TCR clone 262366 (TRBV12-4, TRBJ2-3)
CASSTLPDTQYF

SEQ ID NO: 524733 - protein, 16 aa, Homo sapiens
  CDR3 for alpha chain variable domain of TCR clone 262367 (TRAV12-3, TRAJ53)
CAMSPGSGGSNYKLTF

SEQ ID NO: 524734 - protein, 13 aa, Homo sapiens
  CDR3 for beta chain variable domain of TCR clone 262367 (TRBV11-3, TRBJ2-7)
CASSLDKLYEQYF

SEQ ID NO: 524735 - protein, 10 aa, Homo sapiens
  CDR3 for alpha chain variable domain of TCR clone 262368 (TRAV1-1, TRAJ27)
CAAPAGKSTF

SEQ ID NO: 524736 - protein, 18 aa, Homo sapiens
  CDR3 for beta chain variable domain of TCR clone 262368 (TRBV11-2, TRBJ2-3)
CASSLGGASRGAPNTQYF

SEQ ID NO: 524737 - protein, 13 aa, Homo sapiens
  CDR3 for alpha chain variable domain of TCR clone 262369 (TRAV35, TRAJ57)
CWSPPGGSAKLVF

SEQ ID NO: 524738 - protein, 18 aa, Homo sapiens
  CDR3 for beta chain variable domain of TCR clone 262369 (TRBV6-6, TRBJ1-3)
CASSYSKWDSISGNTIYF

SEQ ID NO: 524739 - protein, 13 aa, Homo sapiens
  CDR3 for alpha chain variable domain of TCR clone 262370 (TRAV27, TRAJ41)
CAGDGNSGDALNF

SEQ ID NO: 524740 - protein, 16 aa, Homo sapiens
  CDR3 for beta chain variable domain of TCR clone 262370 (TRBV29-1, TRBJ2-7)
CSVEVVGTSGSYEQYF

SEQ ID NO: 524741 - protein, 14 aa, Homo sapiens
  CDR3 for alpha chain variable domain of TCR clone 262371 (TRAV35, TRAJ33)
CAGSSQDSNYQLIW

SEQ ID NO: 524742 - protein, 17 aa, Homo sapiens
  CDR3 for beta chain variable domain of TCR clone 262371 (TRBV18, TRBJ2-1)
CASSKGLSGGADNEQFF

SEQ ID NO: 524743 - protein, 12 aa, Homo sapiens
  CDR3 for alpha chain variable domain of TCR clone 262372 (TRAV36/DV7, TRAJ54)
CAVVRGAQKLVF

SEQ ID NO: 524744 - protein, 16 aa, Homo sapiens
  CDR3 for beta chain variable domain of TCR clone 262372 (TRBV2, TRBJ2-1)
CASSVGGSLSYNEQFF

SEQ ID NO: 524745 - protein, 13 aa, Homo sapiens
  CDR3 for alpha chain variable domain of TCR clone 262373 (TRAV8-4, TRAJ10)
CLLSREEETNSPL

SEQ ID NO: 524746 - protein, 15 aa, Homo sapiens
  CDR3 for beta chain variable domain of TCR clone 262373 (TRBV2, TRBJ2-3)
CASSDFEKATDTQYF

SEQ ID NO: 524747 - protein, 16 aa, Homo sapiens
  CDR3 for alpha chain variable domain of TCR clone 262374 (TRAV30, TRAJ24)
CGTEIVDDDSWGQFQF

SEQ ID NO: 524748 - protein, 14 aa, Homo sapiens
  CDR3 for beta chain variable domain of TCR clone 262374 (TRBV12-5, TRBJ2-5)
CASGSRTHQETQYF

SEQ ID NO: 524749 - protein, 14 aa, Homo sapiens
  CDR3 for alpha chain variable domain of TCR clone 262375 (TRAV38-1, TRAJ35)
CAFLTIGFGNVLHC

SEQ ID NO: 524750 - protein, 11 aa, Homo sapiens
  CDR3 for beta chain variable domain of TCR clone 262375 (TRBV12-4, TRBJ2-3)
CASTATDTQYF

SEQ ID NO: 524751 - protein, 16 aa, Homo sapiens
  CDR3 for alpha chain variable domain of TCR clone 262376 (TRAV30, TRAJ24)
CGTEIVDADSWGKFQF

SEQ ID NO: 524752 - protein, 16 aa, Homo sapiens
  CDR3 for beta chain variable domain of TCR clone 262376 (TRBV4-1, TRBJ2-7)
CASSQEGTAGSYEQYF

SEQ ID NO: 524753 - protein, 13 aa, Homo sapiens
  CDR3 for alpha chain variable domain of TCR clone 262377 (TRAV27, TRAJ11)
CAGARSGYSTLPF

SEQ ID NO: 524754 - protein, 13 aa, Homo sapiens
  CDR3 for beta chain variable domain of TCR clone 262377 (TRBV24-1, TRBJ2-1)
CATSAGPYNEQFF

SEQ ID NO: 524755 - protein, 13 aa, Homo sapiens
  CDR3 for alpha chain variable domain of TCR clone 262378 (TRAV8-1, TRAJ28)
CAVSGAGSYQLTF

SEQ ID NO: 524756 - protein, 14 aa, Homo sapiens
  CDR3 for beta chain variable domain of TCR clone 262378 (TRBV7-2, TRBJ2-2)
CASRGQRAAGELFF

SEQ ID NO: 524757 - protein, 14 aa, Homo sapiens
  CDR3 for alpha chain variable domain of TCR clone 262379 (TRAV13-1, TRAJ44)
CAAKATGTASKLTF

SEQ ID NO: 524758 - protein, 17 aa, Homo sapiens
  CDR3 for beta chain variable domain of TCR clone 262379 (TRBV7-2, TRBJ2-7)
CASSLVGAGGARNEQYF

SEQ ID NO: 524759 - protein, 13 aa, Homo sapiens
  CDR3 for alpha chain variable domain of TCR clone 262380 (TRAV20, TRAJ31)
CAVQAWNNARLMF

SEQ ID NO: 524760 - protein, 13 aa, Homo sapiens
  CDR3 for beta chain variable domain of TCR clone 262380 (TRBV12-4, TRBJ1-2)
CASSLRQGKGYAF

SEQ ID NO: 524761 - protein, 15 aa, Homo sapiens
  CDR3 for alpha chain variable domain of TCR clone 262381 (TRAV3, TRAJ3)
CAVRDGHSSASKIIF

SEQ ID NO: 524762 - protein, 13 aa, Homo sapiens
  CDR3 for beta chain variable domain of TCR clone 262381 (TRBV19, TRBJ2-7)
CASSIRSSYEQYF

SEQ ID NO: 524763 - protein, 10 aa, Homo sapiens
  CDR3 for alpha chain variable domain of TCR clone 262382 (TRAV16, TRAJ26)
CAPEELWSEF

SEQ ID NO: 524764 - protein, 15 aa, Homo sapiens
  CDR3 for beta chain variable domain of TCR clone 262382 (TRBV7-2, TRBJ2-3)
CARSLTGTSTDTQYF

SEQ ID NO: 524765 - protein, 15 aa, Homo sapiens
  CDR3 for alpha chain variable domain of TCR clone 262383 (TRAV17, TRAJ54)
CATEKLGQGAQKLVF

SEQ ID NO: 524766 - protein, 14 aa, Homo sapiens
  CDR3 for beta chain variable domain of TCR clone 262383 (TRBV6-6, TRBJ2-7)
CASSDSGAGYEQYF

SEQ ID NO: 524767 - protein, 14 aa, Homo sapiens
  CDR3 for alpha chain variable domain of TCR clone 262384 (TRAV14/DV4, TRAJ26)
CAMREGTYGQNFVF

SEQ ID NO: 524768 - protein, 16 aa, Homo sapiens
  CDR3 for beta chain variable domain of TCR clone 262384 (TRBV13, TRBJ2-3)
CQQPLQGSGGRNTQYF

SEQ ID NO: 524769 - protein, 15 aa, Homo sapiens
  CDR3 for alpha chain variable domain of TCR clone 262385 (TRAV3, TRAJ9)
CAVRDINTGGFKTIF

SEQ ID NO: 524770 - protein, 15 aa, Homo sapiens
  CDR3 for beta chain variable domain of TCR clone 262385 (TRBV27, TRBJ2-1)
CASSNGGGSSNEQFF

SEQ ID NO: 524771 - protein, 15 aa, Homo sapiens
  CDR3 for alpha chain variable domain of TCR clone 262386 (TRAV8-3, TRAJ45)
CASSYSGGGADGLTF

SEQ ID NO: 524772 - protein, 15 aa, Homo sapiens
  CDR3 for beta chain variable domain of TCR clone 262386 (TRBV5-1, TRBJ2-7)
CASSLDLTSSYEQYF

SEQ ID NO: 524773 - protein, 11 aa, Homo sapiens
  CDR3 for alpha chain variable domain of TCR clone 262387 (TRAV3, TRAJ21)
CAVGNFNKFYF

SEQ ID NO: 524774 - protein, 14 aa, Homo sapiens
  CDR3 for beta chain variable domain of TCR clone 262387 (TRBV25-1, TRBJ1-1)
CASTHLGGNPEAFF

SEQ ID NO: 524775 - protein, 16 aa, Homo sapiens
  CDR3 for alpha chain variable domain of TCR clone 262388 (TRAV12-1, TRAJ42)
CEATPYYGGSQGNLIF

SEQ ID NO: 524776 - protein, 18 aa, Homo sapiens
  CDR3 for beta chain variable domain of TCR clone 262388 (TRBV24-1, TRBJ2-3)
CATSDLPRLAGGADTQYF

SEQ ID NO: 524777 - protein, 11 aa, Homo sapiens
  CDR3 for alpha chain variable domain of TCR clone 262389 (TRAV12-3, TRAJ27)
CAMANAGKSTF

SEQ ID NO: 524778 - protein, 15 aa, Homo sapiens
  CDR3 for beta chain variable domain of TCR clone 262389 (TRBV7-8, TRBJ2-5)
CASSYAGGEQETQYF

SEQ ID NO: 524779 - protein, 12 aa, Homo sapiens
  CDR3 for alpha chain variable domain of TCR clone 262390 (TRAV8-4, TRAJ43)
CAVSVNNNDMRF

SEQ ID NO: 524780 - protein, 15 aa, Homo sapiens
  CDR3 for beta chain variable domain of TCR clone 262390 (TRBV7-2, TRBJ2-5)
CASTPRGASGETQYF

SEQ ID NO: 524781 - protein, 14 aa, Homo sapiens
  CDR3 for alpha chain variable domain of TCR clone 262391 (TRAV38-1, TRAJ40)
CALRPTSGTYKYIF

SEQ ID NO: 524782 - protein, 13 aa, Homo sapiens
  CDR3 for beta chain variable domain of TCR clone 262391 (TRBV4-1, TRBJ2-2)
CASSQENTGELFF

SEQ ID NO: 524783 - protein, 15 aa, Homo sapiens
  CDR3 for alpha chain variable domain of TCR clone 262392 (TRAV25, TRAJ52)
CAGTSGGTSYGKLTF

SEQ ID NO: 524784 - protein, 13 aa, Homo sapiens
  CDR3 for beta chain variable domain of TCR clone 262392 (TRBV7-9, TRBJ2-1)
CASSLDVGNEQFF

SEQ ID NO: 524785 - protein, 12 aa, Homo sapiens
  CDR3 for alpha chain variable domain of TCR clone 262393 (TRAV13-1, TRAJ3)
CAPRGDASKILF

SEQ ID NO: 524786 - protein, 13 aa, Homo sapiens
  CDR3 for beta chain variable domain of TCR clone 262393 (TRBV5-7, TRBJ1-2)
CASSLGTGYGYTF

SEQ ID NO: 524787 - protein, 14 aa, Homo sapiens
  CDR3 for alpha chain variable domain of TCR clone 262394 (TRAV23/DV6, TRAJ40)
CAASLTSGTYKYIF

SEQ ID NO: 524788 - protein, 13 aa, Homo sapiens
  CDR3 for beta chain variable domain of TCR clone 262394 (TRBV18, TRBJ2-2)
CASSPTRGGELFF

SEQ ID NO: 524789 - protein, 14 aa, Homo sapiens
  CDR3 for alpha chain variable domain of TCR clone 262395 (TRAV8-3, TRAJ39)
CAVGANNAGNMLTF

SEQ ID NO: 524790 - protein, 12 aa, Homo sapiens
  CDR3 for beta chain variable domain of TCR clone 262395 (TRBV28, TRBJ1-3)
CASVSSGNTKYF

SEQ ID NO: 524791 - protein, 15 aa, Homo sapiens
  CDR3 for alpha chain variable domain of TCR clone 262396 (TRAV23/DV6, TRAJ44)
CAARTLTGTASKLTF

SEQ ID NO: 524792 - protein, 17 aa, Homo sapiens
  CDR3 for beta chain variable domain of TCR clone 262396 (TRBV24-1, TRBJ2-1)
CAASDVSTSGTYNEQFF

SEQ ID NO: 524793 - protein, 16 aa, Homo sapiens
  CDR3 for alpha chain variable domain of TCR clone 262397 (TRAV30, TRAJ24)
CGTEIVDADSWGKFQV

SEQ ID NO: 524794 - protein, 14 aa, Homo sapiens
  CDR3 for beta chain variable domain of TCR clone 262397 (TRBV5-1, TRBJ1-2)
CASSLEPVNYGYTF

SEQ ID NO: 524795 - protein, 13 aa, Homo sapiens
  CDR3 for alpha chain variable domain of TCR clone 262398 (TRAV2, TRAJ40)
CAVVTSGTYKYIF

SEQ ID NO: 524796 - protein, 15 aa, Homo sapiens
  CDR3 for beta chain variable domain of TCR clone 262398 (TRBV19, TRBJ1-2)
CASSVGQVLNDGYTF

SEQ ID NO: 524797 - protein, 15 aa, Homo sapiens
  CDR3 for alpha chain variable domain of TCR clone 262399 (TRAV13-2, TRAJ53)
CAERGSRGSNYKMTF

SEQ ID NO: 524798 - protein, 14 aa, Homo sapiens
  CDR3 for beta chain variable domain of TCR clone 262399 (TRBV4-1, TRBJ2-2)
CASSQYPDTGELFF

SEQ ID NO: 524799 - protein, 14 aa, Homo sapiens
  CDR3 for alpha chain variable domain of TCR clone 262400 (TRAV12-3, TRAJ54)
CALRGIQGAQKLVF

SEQ ID NO: 524800 - protein, 13 aa, Homo sapiens
  CDR3 for beta chain variable domain of TCR clone 262400 (TRBV19, TRBJ1-1)
CASSPSNGGEAFF

SEQ ID NO: 524801 - protein, 13 aa, Homo sapiens
  CDR3 for alpha chain variable domain of TCR clone 262401 (TRAV13-1, TRAJ11)
CAAVLAGYSTLTF

SEQ ID NO: 524802 - protein, 15 aa, Homo sapiens
  CDR3 for beta chain variable domain of TCR clone 262401 (TRBV7-2, TRBJ2-2)
CASRRPGQNTGELFF

SEQ ID NO: 524803 - protein, 16 aa, Homo sapiens
  CDR3 for alpha chain variable domain of TCR clone 262402 (TRAV16, TRAJ42)
CSRKMNYGGSQGNLIF

SEQ ID NO: 524804 - protein, 15 aa, Homo sapiens
  CDR3 for beta chain variable domain of TCR clone 262402 (TRBV20-1, TRBJ2-7)
CSAREGRDSLYEQYF

SEQ ID NO: 524805 - protein, 12 aa, Homo sapiens
  CDR3 for alpha chain variable domain of TCR clone 262403 (TRAV8-6, TRAJ4)
CAVSDHPNKLIF

SEQ ID NO: 524806 - protein, 14 aa, Homo sapiens
  CDR3 for beta chain variable domain of TCR clone 262403 (TRBV6-5, TRBJ1-1)
CASSYGQGDTEAVF

SEQ ID NO: 524807 - protein, 15 aa, Homo sapiens
  CDR3 for alpha chain variable domain of TCR clone 262404 (TRAV21, TRAJ32)
CAVNSYGGATNKLIF

SEQ ID NO: 524808 - protein, 15 aa, Homo sapiens
  CDR3 for beta chain variable domain of TCR clone 262404 (TRBV20-1, TRBJ2-2)
CSASPGHSNTGELFF

SEQ ID NO: 524809 - protein, 14 aa, Homo sapiens
  CDR3 for alpha chain variable domain of TCR clone 262405 (TRAV12-1, TRAJ17)
CVVNYKTAGNKLTF

SEQ ID NO: 524810 - protein, 12 aa, Homo sapiens
  CDR3 for beta chain variable domain of TCR clone 262405 (TRBV7-2, TRBJ2-5)
CASSQYQETQYF

SEQ ID NO: 524811 - protein, 12 aa, Homo sapiens
  CDR3 for alpha chain variable domain of TCR clone 262406 (TRAV12-3, TRAJ17)
CAMTLTGNKPTF

SEQ ID NO: 524812 - protein, 15 aa, Homo sapiens
  CDR3 for beta chain variable domain of TCR clone 262406 (TRBV20-1, TRBJ2-7)
CSARDRVSGMDEQYC

SEQ ID NO: 524813 - protein, 14 aa, Homo sapiens
  CDR3 for alpha chain variable domain of TCR clone 262407 (TRAV17, TRAJ4)
CATAPLGGYNKLIF

SEQ ID NO: 524814 - protein, 15 aa, Homo sapiens
  CDR3 for beta chain variable domain of TCR clone 262407 (TRBV5-1, TRBJ2-1)
CASSPPRAPYNEQFF

SEQ ID NO: 524815 - protein, 11 aa, Homo sapiens
  CDR3 for alpha chain variable domain of TCR clone 262408 (TRAV21, TRAJ34)
CAVTNTDKLIF

SEQ ID NO: 524816 - protein, 14 aa, Homo sapiens
  CDR3 for beta chain variable domain of TCR clone 262408 (TRBV7-2, TRBJ2-7)
CASSGLAGRGEQYF

SEQ ID NO: 524817 - protein, 13 aa, Homo sapiens
  CDR3 for alpha chain variable domain of TCR clone 262409 (TRAV29/DV5, TRAJ31)
CAASRNNNARIMF

SEQ ID NO: 524818 - protein, 12 aa, Homo sapiens
  CDR3 for beta chain variable domain of TCR clone 262409 (TRBV11-2, TRBJ2-2)
CASSLGGGELFF

SEQ ID NO: 524819 - protein, 15 aa, Homo sapiens
  CDR3 for alpha chain variable domain of TCR clone 262410 (TRAV3, TRAJ45)
CAVRTPWGGADGLTF

SEQ ID NO: 524820 - protein, 15 aa, Homo sapiens
  CDR3 for beta chain variable domain of TCR clone 262410 (TRBV7-3, TRBJ2-2)
CASSETGQGTGELFF

SEQ ID NO: 524821 - protein, 13 aa, Homo sapiens
  CDR3 for alpha chain variable domain of TCR clone 262411 (TRAV21, TRAJ27)
CAARPGNAGKSTF

SEQ ID NO: 524822 - protein, 14 aa, Homo sapiens
  CDR3 for beta chain variable domain of TCR clone 262411 (TRBV7-6, TRBJ2-3)
CASSLGRVTDAQYF

SEQ ID NO: 524823 - protein, 14 aa, Homo sapiens
  CDR3 for alpha chain variable domain of TCR clone 262412 (TRAV8-4, TRAJ27)
CAVSKGTNAGKSTL

SEQ ID NO: 524824 - protein, 16 aa, Homo sapiens
  CDR3 for beta chain variable domain of TCR clone 262412 (TRBV2, TRBJ2-7)
CASSSTRRGSSYEQYF

SEQ ID NO: 524825 - protein, 13 aa, Homo sapiens
  CDR3 for alpha chain variable domain of TCR clone 262413 (TRAV26-1, TRAJ20)
CIVRVGKDYKLSF

SEQ ID NO: 524826 - protein, 16 aa, Homo sapiens
  CDR3 for beta chain variable domain of TCR clone 262413 (TRBV7-9, TRBJ2-3)
CASSLIPTSLTDTQYF

SEQ ID NO: 524827 - protein, 13 aa, Homo sapiens
  CDR3 for alpha chain variable domain of TCR clone 262414 (TRAV13-2, TRAJ13)
CADLSGGYQKVTF

SEQ ID NO: 524828 - protein, 15 aa, Homo sapiens
  CDR3 for beta chain variable domain of TCR clone 262414 (TRBV19, TRBJ1-1)
CASSIGRGRNTEAFF

SEQ ID NO: 524829 - protein, 15 aa, Homo sapiens
  CDR3 for alpha chain variable domain of TCR clone 262415 (TRAV4, TRAJ36)
CLVGDGQTGANNLFF

SEQ ID NO: 524830 - protein, 15 aa, Homo sapiens
  CDR3 for beta chain variable domain of TCR clone 262415 (TRBV7-6, TRBJ2-1)
CASSSLAGEGNEQFF

SEQ ID NO: 524831 - protein, 13 aa, Homo sapiens
  CDR3 for alpha chain variable domain of TCR clone 262416 (TRAV1-2, TRAJ9)
CAALNTGGFKTIF

SEQ ID NO: 524832 - protein, 13 aa, Homo sapiens
  CDR3 for beta chain variable domain of TCR clone 262416 (TRBV27, TRBJ2-7)
CTSSFAQGYEQYF

SEQ ID NO: 524833 - protein, 11 aa, Homo sapiens
  CDR3 for alpha chain variable domain of TCR clone 262417 (TRAV3, TRAJ21)
CAVGNFNKFYF

SEQ ID NO: 524834 - protein, 16 aa, Homo sapiens
  CDR3 for beta chain variable domain of TCR clone 262417 (TRBV9, TRBJ2-7)
CVSSVGLGGGTYEQYF

SEQ ID NO: 524835 - protein, 13 aa, Homo sapiens
  CDR3 for alpha chain variable domain of TCR clone 262418 (TRAV9-2, TRAJ49)
CALIQIGGNQFYF

SEQ ID NO: 524836 - protein, 13 aa, Homo sapiens
  CDR3 for beta chain variable domain of TCR clone 262418 (TRBV5-5, TRBJ1-2)
CASSFWRGEDYAF

SEQ ID NO: 524837 - protein, 17 aa, Homo sapiens
  CDR3 for alpha chain variable domain of TCR clone 262419 (TRAV3, TRAJ6)
CAVRGGPRAGGSYVPTF

SEQ ID NO: 524838 - protein, 14 aa, Homo sapiens
  CDR3 for beta chain variable domain of TCR clone 262419 (TRBV7-2, TRBJ2-7)
CASSPKTSFYEQYF

SEQ ID NO: 524839 - protein, 16 aa, Homo sapiens
  CDR3 for alpha chain variable domain of TCR clone 262420 (TRAV30, TRAJ24)
CGTEIVDSDSWGKLQF

SEQ ID NO: 524840 - protein, 14 aa, Homo sapiens
  CDR3 for beta chain variable domain of TCR clone 262420 (TRBV12-5, TRBJ2-5)
CASGSRTHQETQYF

SEQ ID NO: 524841 - protein, 18 aa, Homo sapiens
  CDR3 for alpha chain variable domain of TCR clone 262421 (TRAV13-1, TRAJ52)
CAASKRSAGGTSYGRLTF

SEQ ID NO: 524842 - protein, 13 aa, Homo sapiens
  CDR3 for beta chain variable domain of TCR clone 262421 (TRBV12-4, TRBJ1-2)
CASSLRQGKGDTF

SEQ ID NO: 524843 - protein, 15 aa, Homo sapiens
  CDR3 for alpha chain variable domain of TCR clone 262422 (TRAV27, TRAJ50)
CAGVGRGTSYDKVIF

SEQ ID NO: 524844 - protein, 14 aa, Homo sapiens
  CDR3 for beta chain variable domain of TCR clone 262422 (TRBV7-2, TRBJ1-1)
CASSFYGLNTEAFF

SEQ ID NO: 524845 - protein, 14 aa, Homo sapiens
  CDR3 for alpha chain variable domain of TCR clone 262423 (TRAV1-2, TRAJ8)
CAVREDTGFQKLVF

SEQ ID NO: 524846 - protein, 17 aa, Homo sapiens
  CDR3 for beta chain variable domain of TCR clone 262423 (TRBV6-3, TRBJ2-7)
CTSVPAVPPTVFYEQYF

SEQ ID NO: 524847 - protein, 12 aa, Homo sapiens
  CDR3 for alpha chain variable domain of TCR clone 262424 (TRAV12-1, TRAJ40)
CVFYSGTYKYIF

SEQ ID NO: 524848 - protein, 12 aa, Homo sapiens
  CDR3 for beta chain variable domain of TCR clone 262424 (TRBV7-3, TRBJ2-1)
CASSFINNEQFS

SEQ ID NO: 524849 - protein, 17 aa, Homo sapiens
  CDR3 for alpha chain variable domain of TCR clone 262425 (TRAV12-1, TRAJ32)
CVVTGPYYGGATNKLIF

SEQ ID NO: 524850 - protein, 15 aa, Homo sapiens
  CDR3 for beta chain variable domain of TCR clone 262425 (TRBV27, TRBJ1-5)
CASSPGGYGNQPQHF

SEQ ID NO: 524851 - protein, 14 aa, Homo sapiens
  CDR3 for alpha chain variable domain of TCR clone 262426 (TRAV12-3, TRAJ10)
SHLPLTGGGNKLTF

SEQ ID NO: 524852 - protein, 15 aa, Homo sapiens
  CDR3 for beta chain variable domain of TCR clone 262426 (TRBV7-9, TRBJ1-4)
CASSRTGGFNERLFF

SEQ ID NO: 524853 - protein, 16 aa, Homo sapiens
  CDR3 for alpha chain variable domain of TCR clone 262427 (TRAV1-1, TRAJ28)
CAVRDDSGAGSDQLTF

SEQ ID NO: 524854 - protein, 12 aa, Homo sapiens
  CDR3 for beta chain variable domain of TCR clone 262427 (TRBV11-2, TRBJ2-5)
CASSLDTQTQYF

SEQ ID NO: 524855 - protein, 14 aa, Homo sapiens
  CDR3 for alpha chain variable domain of TCR clone 262428 (TRAV16, TRAJ32)
CALKSGGAINKLIF

SEQ ID NO: 524856 - protein, 13 aa, Homo sapiens
  CDR3 for beta chain variable domain of TCR clone 262428 (TRBV15, TRBJ1-6)
CATSGGLNSPLHF

SEQ ID NO: 524857 - protein, 12 aa, Homo sapiens
  CDR3 for alpha chain variable domain of TCR clone 262429 (TRAV13-1, TRAJ21)
CAAKECFNKFYF

SEQ ID NO: 524858 - protein, 13 aa, Homo sapiens
  CDR3 for beta chain variable domain of TCR clone 262429 (TRBV7-9, TRBJ2-1)
CASSLGTVNEQFF

SEQ ID NO: 524859 - protein, 14 aa, Homo sapiens
  CDR3 for alpha chain variable domain of TCR clone 262430 (TRAV26-1, TRAJ21)
CIVRVVYNFNKFYF

SEQ ID NO: 524860 - protein, 16 aa, Homo sapiens
  CDR3 for beta chain variable domain of TCR clone 262430 (TRBV19, TRBJ2-2)
CASRSPGTGATGELFF

SEQ ID NO: 524861 - protein, 15 aa, Homo sapiens
  CDR3 for alpha chain variable domain of TCR clone 262431 (TRAV17, TRAJ35)
CATAFVIGFGNVLHC

SEQ ID NO: 524862 - protein, 13 aa, Homo sapiens
  CDR3 for beta chain variable domain of TCR clone 262431 (TRBV24-1, TRBJ2-2)
CATSDWSTGELFF

SEQ ID NO: 524863 - protein, 16 aa, Homo sapiens
  CDR3 for alpha chain variable domain of TCR clone 262432 (TRAV38-2/DV8, TRAJ12)
CAYRSVPMDSSYKLIF

SEQ ID NO: 524864 - protein, 14 aa, Homo sapiens
  CDR3 for beta chain variable domain of TCR clone 262432 (TRBV7-3, TRBJ1-1)
CASSLKGGNTEAFF

SEQ ID NO: 524865 - protein, 15 aa, Homo sapiens
  CDR3 for alpha chain variable domain of TCR clone 262433 (TRAV12-1, TRAJ44)
CVADLPTGTASKLTF

SEQ ID NO: 524866 - protein, 16 aa, Homo sapiens
  CDR3 for beta chain variable domain of TCR clone 262433 (TRBV7-9, TRBJ2-1)
CASSDVAGGSYNEQFF

SEQ ID NO: 524867 - protein, 14 aa, Homo sapiens
  CDR3 for alpha chain variable domain of TCR clone 262434 (TRAV8-6, TRAJ29)
CAVSRASGSTPLVF

SEQ ID NO: 524868 - protein, 13 aa, Homo sapiens
  CDR3 for beta chain variable domain of TCR clone 262434 (TRBV19, TRBJ1-5)
CASSEGSNQPQHF

SEQ ID NO: 524869 - protein, 21 aa, Homo sapiens
  CDR3 for alpha chain variable domain of TCR clone 262435 (TRAV8-3, TRAJ10)
CAVGHTHWRRKQTHLWDRHSA

SEQ ID NO: 524870 - protein, 10 aa, Homo sapiens
  CDR3 for beta chain variable domain of TCR clone 262435 (TRBV20-1, TRBJ2-5)
CSARFETQYF

SEQ ID NO: 524871 - protein, 14 aa, Homo sapiens
  CDR3 for alpha chain variable domain of TCR clone 262436 (TRAV12-1, TRAJ10)
CVVNSAGGGNKLTF

SEQ ID NO: 524872 - protein, 14 aa, Homo sapiens
  CDR3 for beta chain variable domain of TCR clone 262436 (TRBV12-4, TRBJ1-1)
CASSLGTGGNEAFF

SEQ ID NO: 524873 - protein, 14 aa, Homo sapiens
  CDR3 for alpha chain variable domain of TCR clone 262437 (TRAV20, TRAJ20)
FAVRRGYNDYKLSF

SEQ ID NO: 524874 - protein, 13 aa, Homo sapiens
  CDR3 for beta chain variable domain of TCR clone 262437 (TRBV19, TRBJ2-5)
CASSETAPETQYF

SEQ ID NO: 524875 - protein, 16 aa, Homo sapiens
  CDR3 for alpha chain variable domain of TCR clone 262438 (TRAV16, TRAJ4)
CALSRMFSGGYNKLIF

SEQ ID NO: 524876 - protein, 16 aa, Homo sapiens
  CDR3 for beta chain variable domain of TCR clone 262438 (TRBV7-2, TRBJ2-5)
CASSPGGARRGETQYF

SEQ ID NO: 524877 - protein, 15 aa, Homo sapiens
  CDR3 for alpha chain variable domain of TCR clone 262439 (TRAV3, TRAJ22)
CAVRDRGGSARQLTF

SEQ ID NO: 524878 - protein, 17 aa, Homo sapiens
  CDR3 for beta chain variable domain of TCR clone 262439 (TRBV10-3, TRBJ1-2)
CAISETRDRGLEYGYTF

SEQ ID NO: 524879 - protein, 10 aa, Homo sapiens
  CDR3 for alpha chain variable domain of TCR clone 262440 (TRAV12-3, TRAJ49)
CAMNDDQCYF

SEQ ID NO: 524880 - protein, 15 aa, Homo sapiens
  CDR3 for beta chain variable domain of TCR clone 262440 (TRBV7-2, TRBJ1-2)
CASSPRAGWNYGYTF

SEQ ID NO: 524881 - protein, 15 aa, Homo sapiens
  CDR3 for alpha chain variable domain of TCR clone 262441 (TRAV9-2, TRAJ9)
CALSLTNTGGFKTIF

SEQ ID NO: 524882 - protein, 18 aa, Homo sapiens
  CDR3 for beta chain variable domain of TCR clone 262441 (TRBV7-3, TRBJ2-5)
CASSFRGGGDPVLRARHA

SEQ ID NO: 524883 - protein, 14 aa, Homo sapiens
  CDR3 for alpha chain variable domain of TCR clone 262442 (TRAV12-2, TRAJ17)
CAVNIKAAGNKLTF

SEQ ID NO: 524884 - protein, 15 aa, Homo sapiens
  CDR3 for beta chain variable domain of TCR clone 262442 (TRBV6-3, TRBJ2-7)
CASSSPGTVFYEQYF

SEQ ID NO: 524885 - protein, 12 aa, Homo sapiens
  CDR3 for alpha chain variable domain of TCR clone 262443 (TRAV8-6, TRAJ43)
CAVSHNNNDMRF

SEQ ID NO: 524886 - protein, 14 aa, Homo sapiens
  CDR3 for beta chain variable domain of TCR clone 262443 (TRBV10-3, TRBJ1-1)
CVISDGSGVTEAFF

SEQ ID NO: 524887 - protein, 14 aa, Homo sapiens
  CDR3 for alpha chain variable domain of TCR clone 262444 (TRAV8-2, TRAJ4)
CVVSLSGGYNKLIF

SEQ ID NO: 524888 - protein, 13 aa, Homo sapiens
  CDR3 for beta chain variable domain of TCR clone 262444 (TRBV10-3, TRBJ2-7)
CASKLAVNYEQYF

SEQ ID NO: 524889 - protein, 18 aa, Homo sapiens
  CDR3 for alpha chain variable domain of TCR clone 262445 (TRAV13-1, TRAJ52)
CAASKRSAGGTSYGKLTF

SEQ ID NO: 524890 - protein, 12 aa, Homo sapiens
  CDR3 for beta chain variable domain of TCR clone 262445 (TRBV7-3, TRBJ2-1)
CASSFINNEQFF

SEQ ID NO: 524891 - protein, 17 aa, Homo sapiens
  CDR3 for alpha chain variable domain of TCR clone 262446 (TRAV3, TRAJ6)
CAVRDGPGAGGSYIPTF

SEQ ID NO: 524892 - protein, 14 aa, Homo sapiens
  CDR3 for beta chain variable domain of TCR clone 262446 (TRBV25-1, TRBJ1-1)
CASTHLGGNTEAFF

SEQ ID NO: 524893 - protein, 13 aa, Homo sapiens
  CDR3 for alpha chain variable domain of TCR clone 262447 (TRAV27, TRAJ29)
CAEAHSGNTPLVF

SEQ ID NO: 524894 - protein, 13 aa, Homo sapiens
  CDR3 for beta chain variable domain of TCR clone 262447 (TRBV20-1, TRBJ1-1)
CSPRGGGNTEAFF

SEQ ID NO: 524895 - protein, 12 aa, Homo sapiens
  CDR3 for alpha chain variable domain of TCR clone 262448 (TRAV27, TRAJ35)
CAEQTLGMCCIA

SEQ ID NO: 524896 - protein, 13 aa, Homo sapiens
  CDR3 for beta chain variable domain of TCR clone 262448 (TRBV7-3, TRBJ1-1)
CASSQDWGAEAFF

SEQ ID NO: 524897 - protein, 12 aa, Homo sapiens
  CDR3 for alpha chain variable domain of TCR clone 262449 (TRAV21, TRAJ56)
YAVGVNRSKLTF

SEQ ID NO: 524898 - protein, 11 aa, Homo sapiens
  CDR3 for beta chain variable domain of TCR clone 262449 (TRBV12-4, TRBJ2-3)
CASTATDTQYF

SEQ ID NO: 524899 - protein, 23 aa, Homo sapiens
  CDR3 for alpha chain variable domain of TCR clone 262450 (TRAV26-1, TRAJ38)
CIADNAGNNHIQNPDPAVYQLRD

SEQ ID NO: 524900 - protein, 12 aa, Homo sapiens
  CDR3 for beta chain variable domain of TCR clone 262450 (TRBV11-2, TRBJ2-2)
CANSLGGGELFF

SEQ ID NO: 524901 - protein, 14 aa, Homo sapiens
  CDR3 for alpha chain variable domain of TCR clone 262451 (TRAV38-1, TRAJ40)
CALRPTSGTYKYIF

SEQ ID NO: 524902 - protein, 13 aa, Homo sapiens
  CDR3 for beta chain variable domain of TCR clone 262451 (TRBV28, TRBJ2-5)
CASSFAGGGTQYF

SEQ ID NO: 524903 - protein, 15 aa, Homo sapiens
  CDR3 for alpha chain variable domain of TCR clone 262452 (TRAV8-3, TRAJ11)
CAVGLLNSGYSTLTF

SEQ ID NO: 524904 - protein, 15 aa, Homo sapiens
  CDR3 for beta chain variable domain of TCR clone 262452 (TRBV28, TRBJ2-4)
CAAGSGTLLMGIQYF

SEQ ID NO: 524905 - protein, 11 aa, Homo sapiens
  CDR3 for alpha chain variable domain of TCR clone 262453 (TRAV17, TRAJ39)
CATNPYNMLTF

SEQ ID NO: 524906 - protein, 13 aa, Homo sapiens
  CDR3 for beta chain variable domain of TCR clone 262453 (TRBV7-8, TRBJ2-1)
WASTRDAVDEQFF

SEQ ID NO: 524907 - protein, 14 aa, Homo sapiens
  CDR3 for alpha chain variable domain of TCR clone 262454 (TRAV1-2, TRAJ8)
CAVREDTGFQKLAF

SEQ ID NO: 524908 - protein, 18 aa, Homo sapiens
  CDR3 for beta chain variable domain of TCR clone 262454 (TRBV11-2, TRBJ2-3)
CASSVRTSGSKKTDTQYF

SEQ ID NO: 524909 - protein, 15 aa, Homo sapiens
  CDR3 for alpha chain variable domain of TCR clone 262455 (TRAV8-3, TRAJ11)
CAVGLLNSGYSTLTF

SEQ ID NO: 524910 - protein, 13 aa, Homo sapiens
  CDR3 for beta chain variable domain of TCR clone 262455 (TRBV7-9, TRBJ1-2)
CASSLGFSSGEMA

SEQ ID NO: 524911 - protein, 14 aa, Homo sapiens
  CDR3 for alpha chain variable domain of TCR clone 262456 (TRAV16, TRAJ26)
CITVLSAYGQNFVF

SEQ ID NO: 524912 - protein, 14 aa, Homo sapiens
  CDR3 for beta chain variable domain of TCR clone 262456 (TRBV7-2, TRBJ2-7)
CASRSQVAAYEQYF

SEQ ID NO: 524913 - protein, 16 aa, Homo sapiens
  CDR3 for alpha chain variable domain of TCR clone 262457 (TRAV8-3, TRAJ52)
CAVQPAGGTSYGKLTF

SEQ ID NO: 524914 - protein, 14 aa, Homo sapiens
  CDR3 for beta chain variable domain of TCR clone 262457 (TRBV7-2, TRBJ2-7)
CASSGLAGRGEQYF

SEQ ID NO: 524915 - protein, 13 aa, Homo sapiens
  CDR3 for alpha chain variable domain of TCR clone 262458 (TRAV12-1, TRAJ34)
CVVTGYNTNKLIF

SEQ ID NO: 524916 - protein, 13 aa, Homo sapiens
  CDR3 for beta chain variable domain of TCR clone 262458 (TRBV28, TRBJ2-7)
CASKAGGVYEQYF

SEQ ID NO: 524917 - protein, 15 aa, Homo sapiens
  CDR3 for alpha chain variable domain of TCR clone 262459 (TRAV21, TRAJ56)
CAVTKYTGANSKLTF

SEQ ID NO: 524918 - protein, 14 aa, Homo sapiens
  CDR3 for beta chain variable domain of TCR clone 262459 (TRBV20-1, TRBJ2-3)
CSARVRGSTDTQDF

SEQ ID NO: 524919 - protein, 13 aa, Homo sapiens
  CDR3 for alpha chain variable domain of TCR clone 262460 (TRAV8-3, TRAJ40)
CAVDPSGTYKYIF

SEQ ID NO: 524920 - protein, 12 aa, Homo sapiens
  CDR3 for beta chain variable domain of TCR clone 262460 (TRBV11-2, TRBJ2-2)
CASSLGGGELFF

SEQ ID NO: 524921 - protein, 11 aa, Homo sapiens
  CDR3 for alpha chain variable domain of TCR clone 262461 (TRAV3, TRAJ21)
CAVGNFNKFYF

SEQ ID NO: 524922 - protein, 13 aa, Homo sapiens
  CDR3 for beta chain variable domain of TCR clone 262461 (TRBV3-1, TRBJ1-1)
CASSPWVITEAFF

SEQ ID NO: 524923 - protein, 12 aa, Homo sapiens
  CDR3 for alpha chain variable domain of TCR clone 262462 (TRAV2, TRAJ24)
CAATDSWGKFQF

SEQ ID NO: 524924 - protein, 17 aa, Homo sapiens
  CDR3 for beta chain variable domain of TCR clone 262462 (TRBV6-5, TRBJ2-1)
CASRKNPRTGGHNEQFF

SEQ ID NO: 524925 - protein, 14 aa, Homo sapiens
  CDR3 for alpha chain variable domain of TCR clone 262463 (TRAV12-2, TRAJ15)
CAPHTGQAGTALIF

SEQ ID NO: 524926 - protein, 14 aa, Homo sapiens
  CDR3 for beta chain variable domain of TCR clone 262463 (TRBV19, TRBJ2-1)
CASGKSTQYNEQFF

SEQ ID NO: 524927 - protein, 16 aa, Homo sapiens
  CDR3 for alpha chain variable domain of TCR clone 262464 (TRAV30, TRAJ24)
CGTEIVDADSWGQFQF

SEQ ID NO: 524928 - protein, 13 aa, Homo sapiens
  CDR3 for beta chain variable domain of TCR clone 262464 (TRBV20-1, TRBJ1-1)
CSAPPGGHTEAVF

SEQ ID NO: 524929 - protein, 11 aa, Homo sapiens
  CDR3 for alpha chain variable domain of TCR clone 262465 (TRAV12-2, TRAJ43)
CAAYNSNDMRF

SEQ ID NO: 524930 - protein, 14 aa, Homo sapiens
  CDR3 for beta chain variable domain of TCR clone 262465 (TRBV7-8, TRBJ1-2)
CASSAGTAIYGYAF

SEQ ID NO: 524931 - protein, 11 aa, Homo sapiens
  CDR3 for alpha chain variable domain of TCR clone 262466 (TRAV12-3, TRAJ43)
CAMSVSNDMRF

SEQ ID NO: 524932 - protein, 15 aa, Homo sapiens
  CDR3 for beta chain variable domain of TCR clone 262466 (TRBV18, TRBJ1-2)
CASSPGNGLGYGYTF

SEQ ID NO: 524933 - protein, 12 aa, Homo sapiens
  CDR3 for alpha chain variable domain of TCR clone 262467 (TRAV12-1, TRAJ40)
CVVYSGTYKYIF

SEQ ID NO: 524934 - protein, 13 aa, Homo sapiens
  CDR3 for beta chain variable domain of TCR clone 262467 (TRBV6-5, TRBJ2-2)
CASSLPGVGDLFF

SEQ ID NO: 524935 - protein, 14 aa, Homo sapiens
  CDR3 for alpha chain variable domain of TCR clone 262468 (TRAV3, TRAJ21)
CAVRDAYNVNKFYF

SEQ ID NO: 524936 - protein, 15 aa, Homo sapiens
  CDR3 for beta chain variable domain of TCR clone 262468 (TRBV6-5, TRBJ1-5)
CASSYSWDSNQPQHF

SEQ ID NO: 524937 - protein, 12 aa, Homo sapiens
  CDR3 for alpha chain variable domain of TCR clone 262469 (TRAV2, TRAJ33)
CAVEDSNYQLIW

SEQ ID NO: 524938 - protein, 13 aa, Homo sapiens
  CDR3 for beta chain variable domain of TCR clone 262469 (TRBV7-3, TRBJ1-1)
CASSQDWGAEAFF

SEQ ID NO: 524939 - protein, 11 aa, Homo sapiens
  CDR3 for alpha chain variable domain of TCR clone 262470 (TRAV23/DV6, TRAJ48)
CAPRWGEKLTF

SEQ ID NO: 524940 - protein, 13 aa, Homo sapiens
  CDR3 for beta chain variable domain of TCR clone 262470 (TRBV12-4, TRBJ2-5)
FASSPGTEETQYF

SEQ ID NO: 524941 - protein, 16 aa, Homo sapiens
  CDR3 for alpha chain variable domain of TCR clone 262471 (TRAV30, TRAJ24)
CGTEIVDADSWGKFQF

SEQ ID NO: 524942 - protein, 15 aa, Homo sapiens
  CDR3 for beta chain variable domain of TCR clone 262471 (TRBV6-3, TRBJ2-7)
CASSSPGTVFYKQYF

SEQ ID NO: 524943 - protein, 14 aa, Homo sapiens
  CDR3 for alpha chain variable domain of TCR clone 262472 (TRAV8-4, TRAJ54)
CAVSEVLGAQKLVF

SEQ ID NO: 524944 - protein, 16 aa, Homo sapiens
  CDR3 for beta chain variable domain of TCR clone 262472 (TRBV18, TRBJ2-2)
CASSRARESNTGELFF

SEQ ID NO: 524945 - protein, 13 aa, Homo sapiens
  CDR3 for alpha chain variable domain of TCR clone 262473 (TRAV8-3, TRAJ48)
CAVVRFGNEKLTF

SEQ ID NO: 524946 - protein, 16 aa, Homo sapiens
  CDR3 for beta chain variable domain of TCR clone 262473 (TRBV20-1, TRBJ2-5)
CSARDFASGIQETRYF

SEQ ID NO: 524947 - protein, 23 aa, Homo sapiens
  CDR3 for alpha chain variable domain of TCR clone 262474 (TRAV13-1, )
CAASTRRAQIPDIQNPDPAVYQL

SEQ ID NO: 524948 - protein, 16 aa, Homo sapiens
  CDR3 for beta chain variable domain of TCR clone 262474 (TRBV12-5, TRBJ2-5)
CASGPRTSGNQETQYF

SEQ ID NO: 524949 - protein, 12 aa, Homo sapiens
  CDR3 for alpha chain variable domain of TCR clone 262475 (TRAV2, TRAJ31)
CAVEDNNARLMF

SEQ ID NO: 524950 - protein, 16 aa, Homo sapiens
  CDR3 for beta chain variable domain of TCR clone 262475 (TRBV10-3, TRBJ2-1)
CAISGVGDGGGGEQFC

SEQ ID NO: 524951 - protein, 15 aa, Homo sapiens
  CDR3 for alpha chain variable domain of TCR clone 262476 (TRAV8-4, TRAJ10)
CAVSDQMGGGNKLTF

SEQ ID NO: 524952 - protein, 16 aa, Homo sapiens
  CDR3 for beta chain variable domain of TCR clone 262476 (TRBV20-1, TRBJ2-1)
CSARGVTPPPYNEQFF

SEQ ID NO: 524953 - protein, 17 aa, Homo sapiens
  CDR3 for alpha chain variable domain of TCR clone 262477 (TRAV3, TRAJ6)
CAVRDCPRAGGSYIPTF

SEQ ID NO: 524954 - protein, 14 aa, Homo sapiens
  CDR3 for beta chain variable domain of TCR clone 262477 (TRBV7-2, TRBJ2-7)
CASSPKTSFYERYF

SEQ ID NO: 524955 - protein, 15 aa, Homo sapiens
  CDR3 for alpha chain variable domain of TCR clone 262478 (TRAV4, TRAJ39)
CLVGPNNNAGNMLTF

SEQ ID NO: 524956 - protein, 15 aa, Homo sapiens
  CDR3 for beta chain variable domain of TCR clone 262478 (TRBV2, TRBJ1-5)
CASAPPGGSNQPQHF

SEQ ID NO: 524957 - protein, 13 aa, Homo sapiens
  CDR3 for alpha chain variable domain of TCR clone 262479 (TRAV23/DV6, TRAJ15)
CVALPAGRNCSDL

SEQ ID NO: 524958 - protein, 14 aa, Homo sapiens
  CDR3 for beta chain variable domain of TCR clone 262479 (TRBV7-9, TRBJ1-2)
CASSRQGANYGYTF

SEQ ID NO: 524959 - protein, 12 aa, Homo sapiens
  CDR3 for alpha chain variable domain of TCR clone 262480 (TRAV23/DV6, TRAJ16)
CAATGTGQKLLF

SEQ ID NO: 524960 - protein, 12 aa, Homo sapiens
  CDR3 for beta chain variable domain of TCR clone 262480 (TRBV29-1, TRBJ2-2)
CSVDKYTGELFF

SEQ ID NO: 524961 - protein, 16 aa, Homo sapiens
  CDR3 for alpha chain variable domain of TCR clone 262481 (TRAV26-1, TRAJ38)
CIVRPLNAGNNRKLIL

SEQ ID NO: 524962 - protein, 13 aa, Homo sapiens
  CDR3 for beta chain variable domain of TCR clone 262481 (TRBV18, TRBJ1-1)
CASSPNGDTEAFF

SEQ ID NO: 524963 - protein, 19 aa, Homo sapiens
  CDR3 for alpha chain variable domain of TCR clone 262482 (TRAV26-1, TRAJ52)
CIVRAHRNAGGTSYGKLTF

SEQ ID NO: 524964 - protein, 15 aa, Homo sapiens
  CDR3 for beta chain variable domain of TCR clone 262482 (TRBV29-1, TRBJ2-1)
CSGRDRKSCYNEQFF

SEQ ID NO: 524965 - protein, 10 aa, Homo sapiens
  CDR3 for alpha chain variable domain of TCR clone 262483 (TRAV8-2, TRAJ29)
CTGGNTPLVL

SEQ ID NO: 524966 - protein, 13 aa, Homo sapiens
  CDR3 for beta chain variable domain of TCR clone 262483 (TRBV20-1, TRBJ1-1)
CSARGGGNTEAFF

SEQ ID NO: 524967 - protein, 15 aa, Homo sapiens
  CDR3 for alpha chain variable domain of TCR clone 262484 (TRAV20, TRAJ50)
CAVRQMKTSYDKVIF

SEQ ID NO: 524968 - protein, 17 aa, Homo sapiens
  CDR3 for beta chain variable domain of TCR clone 262484 (TRBV28, TRBJ2-7)
CAISPLHRASGVYEQYF

SEQ ID NO: 524969 - protein, 14 aa, Homo sapiens
  CDR3 for alpha chain variable domain of TCR clone 262485 (TRAV35, TRAJ22)
RAGLRPGSARQLTF

SEQ ID NO: 524970 - protein, 15 aa, Homo sapiens
  CDR3 for beta chain variable domain of TCR clone 262485 (TRBV12-4, TRBJ2-5)
CGSSPPTGLQETQYF

SEQ ID NO: 524971 - protein, 11 aa, Homo sapiens
  CDR3 for alpha chain variable domain of TCR clone 262486 (TRAV17, TRAJ9)
CATTGGFKTIF

SEQ ID NO: 524972 - protein, 13 aa, Homo sapiens
  CDR3 for beta chain variable domain of TCR clone 262486 (TRBV10-3, TRBJ2-7)
CASKLAVNYEQYF

SEQ ID NO: 524973 - protein, 14 aa, Homo sapiens
  CDR3 for alpha chain variable domain of TCR clone 262487 (TRAV1-2, TRAJ16)
CAVNRFSDGQKLLF

SEQ ID NO: 524974 - protein, 15 aa, Homo sapiens
  CDR3 for beta chain variable domain of TCR clone 262487 (TRBV11-2, TRBJ2-7)
CASSLNYEGVDEQYF

SEQ ID NO: 524975 - protein, 14 aa, Homo sapiens
  CDR3 for alpha chain variable domain of TCR clone 262488 (TRAV9-2, TRAJ39)
CALYIYNAGNMLTF

SEQ ID NO: 524976 - protein, 14 aa, Homo sapiens
  CDR3 for beta chain variable domain of TCR clone 262488 (TRBV12-5, TRBJ2-5)
CASGSRTHQETQYV

SEQ ID NO: 524977 - protein, 12 aa, Homo sapiens
  CDR3 for alpha chain variable domain of TCR clone 262489 (TRAV12-3, TRAJ5)
CAMDTGRRAITF

SEQ ID NO: 524978 - protein, 14 aa, Homo sapiens
  CDR3 for beta chain variable domain of TCR clone 262489 (TRBV20-1, TRBJ2-1)
CSAQIGGSANEQFF

SEQ ID NO: 524979 - protein, 10 aa, Homo sapiens
  CDR3 for alpha chain variable domain of TCR clone 262490 (TRAV13-1, TRAJ5)
CAASRRALTF

SEQ ID NO: 524980 - protein, 15 aa, Homo sapiens
  CDR3 for beta chain variable domain of TCR clone 262490 (TRBV7-9, TRBJ2-7)
CASSPGGGLTYEQYF

SEQ ID NO: 524981 - protein, 15 aa, Homo sapiens
  CDR3 for alpha chain variable domain of TCR clone 262491 (TRAV12-1, TRAJ5)
CVVNMLETGSRALTF

SEQ ID NO: 524982 - protein, 13 aa, Homo sapiens
  CDR3 for beta chain variable domain of TCR clone 262491 (TRBV14, TRBJ1-5)
CASSQDRRGPQHF

SEQ ID NO: 524983 - protein, 16 aa, Homo sapiens
  CDR3 for alpha chain variable domain of TCR clone 262492 (TRAV25, TRAJ53)
CAGPKGSRGSNYKLTF

SEQ ID NO: 524984 - protein, 17 aa, Homo sapiens
  CDR3 for beta chain variable domain of TCR clone 262492 (TRBV11-3, TRBJ2-6)
CASKWGQGLSGANVLTF

SEQ ID NO: 524985 - protein, 16 aa, Homo sapiens
  CDR3 for alpha chain variable domain of TCR clone 262493 (TRAV3, TRAJ21)
CAVRDRSASTNFTLDV

SEQ ID NO: 524986 - protein, 16 aa, Homo sapiens
  CDR3 for beta chain variable domain of TCR clone 262493 (TRBV7-2, TRBJ2-5)
CASSLESAGGRETQYF

SEQ ID NO: 524987 - protein, 16 aa, Homo sapiens
  CDR3 for alpha chain variable domain of TCR clone 262494 (TRAV1-2, TRAJ10)
CAVRGVLTGGGNKLTF

SEQ ID NO: 524988 - protein, 18 aa, Homo sapiens
  CDR3 for beta chain variable domain of TCR clone 262494 (TRBV7-2, TRBJ2-7)
CASSLAQGLRDSSYEQYF

SEQ ID NO: 524989 - protein, 15 aa, Homo sapiens
  CDR3 for alpha chain variable domain of TCR clone 262495 (TRAV27, TRAJ42)
CAGPNYGGSQGNLIF

SEQ ID NO: 524990 - protein, 15 aa, Homo sapiens
  CDR3 for beta chain variable domain of TCR clone 262495 (TRBV5-1, TRBJ2-1)
CASSPPRAPYNEQFF

SEQ ID NO: 524991 - protein, 11 aa, Homo sapiens
  CDR3 for alpha chain variable domain of TCR clone 262496 (TRAV2, TRAJ13)
CASGGSQKVTF

SEQ ID NO: 524992 - protein, 16 aa, Homo sapiens
  CDR3 for beta chain variable domain of TCR clone 262496 (TRBV6-1, TRBJ2-5)
CASSETLDRGAETQYY

SEQ ID NO: 524993 - protein, 14 aa, Homo sapiens
  CDR3 for alpha chain variable domain of TCR clone 262497 (TRAV1-2, TRAJ16)
CAVNRFSDGQKLLF

SEQ ID NO: 524994 - protein, 16 aa, Homo sapiens
  CDR3 for beta chain variable domain of TCR clone 262497 (TRBV7-8, TRBJ2-6)
CQQRRDRGRWGNVLTF

SEQ ID NO: 524995 - protein, 14 aa, Homo sapiens
  CDR3 for alpha chain variable domain of TCR clone 262498 (TRAV1-2, TRAJ16)
CAVNRFSDGQKLLF

SEQ ID NO: 524996 - protein, 16 aa, Homo sapiens
  CDR3 for beta chain variable domain of TCR clone 262498 (TRBV3-1, TRBJ2-7)
CASSQGATGVAYEQYF

SEQ ID NO: 524997 - protein, 12 aa, Homo sapiens
  CDR3 for alpha chain variable domain of TCR clone 262499 (TRAV12-1, TRAJ40)
CVVPSGTYKYIF

SEQ ID NO: 524998 - protein, 18 aa, Homo sapiens
  CDR3 for beta chain variable domain of TCR clone 262499 (TRBV4-1, TRBJ1-4)
CASSPRTGGAWTNDKLFF

SEQ ID NO: 524999 - protein, 14 aa, Homo sapiens
  CDR3 for alpha chain variable domain of TCR clone 262500 (TRAV35, TRAJ33)
CAGSSQDSNYQLIW

SEQ ID NO: 525000 - protein, 15 aa, Homo sapiens
  CDR3 for beta chain variable domain of TCR clone 262500 (TRBV20-1, TRBJ2-7)
CCAESGTSGAYEQYF

SEQ ID NO: 525001 - protein, 15 aa, Homo sapiens
  CDR3 for alpha chain variable domain of TCR clone 262501 (TRAV13-1, TRAJ52)
SYYNAGGTSYGKLTF

SEQ ID NO: 525002 - protein, 17 aa, Homo sapiens
  CDR3 for beta chain variable domain of TCR clone 262501 (TRBV25-1, TRBJ2-1)
CASSAYGQGRGVYEQFF

SEQ ID NO: 525003 - protein, 14 aa, Homo sapiens
  CDR3 for alpha chain variable domain of TCR clone 262502 (TRAV13-1, TRAJ44)
CAAKATGTASKLTF

SEQ ID NO: 525004 - protein, 16 aa, Homo sapiens
  CDR3 for beta chain variable domain of TCR clone 262502 (TRBV12-4, TRBJ1-5)
CASSRPVGGSNQPQHF

SEQ ID NO: 525005 - protein, 13 aa, Homo sapiens
  CDR3 for alpha chain variable domain of TCR clone 262503 (TRAV20, TRAJ29)
CAVQAVGNTPLVC

SEQ ID NO: 525006 - protein, 15 aa, Homo sapiens
  CDR3 for beta chain variable domain of TCR clone 262503 (TRBV10-2, TRBJ2-5)
CASRGSGGPQETQYF

SEQ ID NO: 525007 - protein, 17 aa, Homo sapiens
  CDR3 for alpha chain variable domain of TCR clone 262504 (TRAV4, TRAJ18)
CLVGERSVGSTLGRLYL

SEQ ID NO: 525008 - protein, 14 aa, Homo sapiens
  CDR3 for beta chain variable domain of TCR clone 262504 (TRBV6-5, TRBJ1-2)
CASSYDGTGGGYTF

SEQ ID NO: 525009 - protein, 18 aa, Homo sapiens
  CDR3 for alpha chain variable domain of TCR clone 262505 (TRAV26-1, TRAJ23)
CIVRVGLEVWNQGGKLIF

SEQ ID NO: 525010 - protein, 15 aa, Homo sapiens
  CDR3 for beta chain variable domain of TCR clone 262505 (TRBV10-3, TRBJ2-3)
CAISDWHRDTDTQYF

SEQ ID NO: 525011 - protein, 15 aa, Homo sapiens
  CDR3 for alpha chain variable domain of TCR clone 262506 (TRAV1-2, TRAJ9)
CAVRDDGPGGFKTIF

SEQ ID NO: 525012 - protein, 16 aa, Homo sapiens
  CDR3 for beta chain variable domain of TCR clone 262506 (TRBV7-2, TRBJ1-6)
CASSSFESSYNSPLHF

SEQ ID NO: 525013 - protein, 14 aa, Homo sapiens
  CDR3 for alpha chain variable domain of TCR clone 262507 (TRAV1-1, TRAJ27)
CAVIYNTNAGKSTF

SEQ ID NO: 525014 - protein, 14 aa, Homo sapiens
  CDR3 for beta chain variable domain of TCR clone 262507 (TRBV13, TRBJ2-5)
CASYRRLAEETQYF

SEQ ID NO: 525015 - protein, 14 aa, Homo sapiens
  CDR3 for alpha chain variable domain of TCR clone 262508 (TRAV12-2, TRAJ40)
CAVKIPSGTYKYIF

SEQ ID NO: 525016 - protein, 16 aa, Homo sapiens
  CDR3 for beta chain variable domain of TCR clone 262508 (TRBV6-1, TRBJ2-2)
CASRRDGGTNTGELFF

SEQ ID NO: 525017 - protein, 12 aa, Homo sapiens
  CDR3 for alpha chain variable domain of TCR clone 262509 (TRAV3, TRAJ13)
CAVSGGYQKVTF

SEQ ID NO: 525018 - protein, 13 aa, Homo sapiens
  CDR3 for beta chain variable domain of TCR clone 262509 (TRBV7-9, TRBJ1-2)
CASSLKQNYGYTF

SEQ ID NO: 525019 - protein, 12 aa, Homo sapiens
  CDR3 for alpha chain variable domain of TCR clone 262510 (TRAV17, TRAJ57)
RAPPRGSEKLVF

SEQ ID NO: 525020 - protein, 16 aa, Homo sapiens
  CDR3 for beta chain variable domain of TCR clone 262510 (TRBV12-4, TRBJ1-5)
CASSRPVGGSNQPQHF

SEQ ID NO: 525021 - protein, 18 aa, Homo sapiens
  CDR3 for alpha chain variable domain of TCR clone 262511 (TRAV13-1, TRAJ52)
CAASKRSAGGTSYGKLTF

SEQ ID NO: 525022 - protein, 13 aa, Homo sapiens
  CDR3 for beta chain variable domain of TCR clone 262511 (TRBV12-4, TRBJ1-2)
CASSLRQGKGDIF

SEQ ID NO: 525023 - protein, 17 aa, Homo sapiens
  CDR3 for alpha chain variable domain of TCR clone 262512 (TRAV20, TRAJ28)
CAVQGGYSGAGSYQRTF

SEQ ID NO: 525024 - protein, 15 aa, Homo sapiens
  CDR3 for beta chain variable domain of TCR clone 262512 (TRBV7-2, TRBJ2-7)
CASSLSSGRTYEQYF

SEQ ID NO: 525025 - protein, 14 aa, Homo sapiens
  CDR3 for alpha chain variable domain of TCR clone 262513 (TRAV8-3, TRAJ4)
CAVGAAGGYNKLIF

SEQ ID NO: 525026 - protein, 15 aa, Homo sapiens
  CDR3 for beta chain variable domain of TCR clone 262513 (TRBV7-2, TRBJ2-1)
CASSSGLAGGNEQFF

SEQ ID NO: 525027 - protein, 19 aa, Homo sapiens
  CDR3 for alpha chain variable domain of TCR clone 262514 (TRAV29/DV5, TRAJ49)
CSVLLCSKLTVDTGNQFYF

SEQ ID NO: 525028 - protein, 17 aa, Homo sapiens
  CDR3 for beta chain variable domain of TCR clone 262514 (TRBV13, TRBJ2-3)
CASSLSRVAGGMNTQYF

SEQ ID NO: 525029 - protein, 11 aa, Homo sapiens
  CDR3 for alpha chain variable domain of TCR clone 262515 (TRAV12-3, TRAJ49)
CAANTGNQFYF

SEQ ID NO: 525030 - protein, 12 aa, Homo sapiens
  CDR3 for beta chain variable domain of TCR clone 262515 (TRBV6-3, TRBJ2-7)
CASSEPGFVQYF

SEQ ID NO: 525031 - protein, 17 aa, Homo sapiens
  CDR3 for alpha chain variable domain of TCR clone 262516 (TRAV3, TRAJ42)
CAVRGREYGGSQGNLIF

SEQ ID NO: 525032 - protein, 14 aa, Homo sapiens
  CDR3 for beta chain variable domain of TCR clone 262516 (TRBV5-4, TRBJ1-1)
CASSLDSRRDEAFF

SEQ ID NO: 525033 - protein, 14 aa, Homo sapiens
  CDR3 for alpha chain variable domain of TCR clone 262517 (TRAV12-3, TRAJ29)
CAMILLSGNTPLGF

SEQ ID NO: 525034 - protein, 16 aa, Homo sapiens
  CDR3 for beta chain variable domain of TCR clone 262517 (TRBV28, TRBJ2-7)
CASSSGTSGRGYEQYF

SEQ ID NO: 525035 - protein, 17 aa, Homo sapiens
  CDR3 for alpha chain variable domain of TCR clone 262518 (TRAV38-1, TRAJ28)
CAFMKPTSGAGSYQLTF

SEQ ID NO: 525036 - protein, 15 aa, Homo sapiens
  CDR3 for beta chain variable domain of TCR clone 262518 (TRBV5-1, TRBJ2-4)
CAGSLGGGGSHIQYF

SEQ ID NO: 525037 - protein, 14 aa, Homo sapiens
  CDR3 for alpha chain variable domain of TCR clone 262519 (TRAV17, TRAJ10)
CATTITGGGNKLTF

SEQ ID NO: 525038 - protein, 14 aa, Homo sapiens
  CDR3 for beta chain variable domain of TCR clone 262519 (TRBV19, TRBJ2-1)
CASPTFVLSGEQFF

SEQ ID NO: 525039 - protein, 12 aa, Homo sapiens
  CDR3 for alpha chain variable domain of TCR clone 262520 (TRAV12-3, TRAJ40)
CAMSSGTYKYIF

SEQ ID NO: 525040 - protein, 15 aa, Homo sapiens
  CDR3 for beta chain variable domain of TCR clone 262520 (TRBV7-3, TRBJ2-2)
CASSETGQRTGELFF

SEQ ID NO: 525041 - protein, 14 aa, Homo sapiens
  CDR3 for alpha chain variable domain of TCR clone 262521 (TRAV12-2, TRAJ13)
CAVKKTGGYQKVTF

SEQ ID NO: 525042 - protein, 15 aa, Homo sapiens
  CDR3 for beta chain variable domain of TCR clone 262521 (TRBV27, TRBJ2-1)
CASSNVGGSSKAQFF

SEQ ID NO: 525043 - protein, 15 aa, Homo sapiens
  CDR3 for alpha chain variable domain of TCR clone 262522 (TRAV35, TRAJ52)
CAGPRGGTSYGKLTF

SEQ ID NO: 525044 - protein, 12 aa, Homo sapiens
  CDR3 for beta chain variable domain of TCR clone 262522 (TRBV11-2, TRBJ2-2)
CASSLGGGELFF

SEQ ID NO: 525045 - protein, 14 aa, Homo sapiens
  CDR3 for alpha chain variable domain of TCR clone 262523 (TRAV12-2, TRAJ52)
CAVPGGTSYGKLTF

SEQ ID NO: 525046 - protein, 12 aa, Homo sapiens
  CDR3 for beta chain variable domain of TCR clone 262523 (TRBV18, TRBJ2-1)
CASSPGTIEGFF

SEQ ID NO: 525047 - protein, 15 aa, Homo sapiens
  CDR3 for alpha chain variable domain of TCR clone 262524 (TRAV38-1, TRAJ37)
CAFIFGSGNTGKLIF

SEQ ID NO: 525048 - protein, 13 aa, Homo sapiens
  CDR3 for beta chain variable domain of TCR clone 262524 (TRBV29-1, TRBJ1-1)
CSVGDSRNTEAFF

SEQ ID NO: 525049 - protein, 16 aa, Homo sapiens
  CDR3 for alpha chain variable domain of TCR clone 262525 (TRAV30, TRAJ24)
CGTDIVDADSWGKIQV

SEQ ID NO: 525050 - protein, 14 aa, Homo sapiens
  CDR3 for beta chain variable domain of TCR clone 262525 (TRBV12-5, TRBJ2-5)
CASGSRTHQETQYF

SEQ ID NO: 525051 - protein, 14 aa, Homo sapiens
  CDR3 for alpha chain variable domain of TCR clone 262526 (TRAV26-1, TRAJ21)
CIVRPPYNSNKFYF

SEQ ID NO: 525052 - protein, 14 aa, Homo sapiens
  CDR3 for beta chain variable domain of TCR clone 262526 (TRBV19, TRBJ2-1)
CASPTFVLSGEQFF

SEQ ID NO: 525053 - protein, 13 aa, Homo sapiens
  CDR3 for alpha chain variable domain of TCR clone 262527 (TRAV21, TRAJ20)
CAVGVFADYKLSF

SEQ ID NO: 525054 - protein, 16 aa, Homo sapiens
  CDR3 for beta chain variable domain of TCR clone 262527 (TRBV20-1, TRBJ1-4)
CSAPGQGLLTNEKLFF

SEQ ID NO: 525055 - protein, 10 aa, Homo sapiens
  CDR3 for alpha chain variable domain of TCR clone 262528 (TRAV12-3, TRAJ49)
CAMNDDQFYF

SEQ ID NO: 525056 - protein, 14 aa, Homo sapiens
  CDR3 for beta chain variable domain of TCR clone 262528 (TRBV7-2, TRBJ2-3)
CASRRGLAADTQYF

SEQ ID NO: 525057 - protein, 11 aa, Homo sapiens
  CDR3 for alpha chain variable domain of TCR clone 262529 (TRAV25, TRAJ5)
CAGGGQESTYF

SEQ ID NO: 525058 - protein, 12 aa, Homo sapiens
  CDR3 for beta chain variable domain of TCR clone 262529 (TRBV29-1, TRBJ2-3)
CSVTGGADTQYF

SEQ ID NO: 525059 - protein, 20 aa, Homo sapiens
  CDR3 for alpha chain variable domain of TCR clone 262530 (TRAV26-1, TRAJ42)
CCVLLHGQTYYGGSQGNLIF

SEQ ID NO: 525060 - protein, 16 aa, Homo sapiens
  CDR3 for beta chain variable domain of TCR clone 262530 (TRBV7-3, TRBJ2-2)
CASSLKRGTLSGELFF

SEQ ID NO: 525061 - protein, 15 aa, Homo sapiens
  CDR3 for alpha chain variable domain of TCR clone 262531 (TRAV17, TRAJ57)
CATGPSQGGSEKLVF

SEQ ID NO: 525062 - protein, 15 aa, Homo sapiens
  CDR3 for beta chain variable domain of TCR clone 262531 (TRBV28, TRBJ2-5)
CASSQTSGSLETQYF

SEQ ID NO: 525063 - protein, 13 aa, Homo sapiens
  CDR3 for alpha chain variable domain of TCR clone 262532 (TRAV12-3, TRAJ50)
CARGGTSYYKVIF

SEQ ID NO: 525064 - protein, 14 aa, Homo sapiens
  CDR3 for beta chain variable domain of TCR clone 262532 (TRBV6-5, TRBJ1-1)
CASSYGQGDTEAFF

SEQ ID NO: 525065 - protein, 13 aa, Homo sapiens
  CDR3 for alpha chain variable domain of TCR clone 262533 (TRAV12-1, TRAJ40)
CVVPTSGTYKYIF

SEQ ID NO: 525066 - protein, 16 aa, Homo sapiens
  CDR3 for beta chain variable domain of TCR clone 262533 (TRBV4-1, TRBJ1-2)
CASSQDAGQVLYGYTF

SEQ ID NO: 525067 - protein, 18 aa, Homo sapiens
  CDR3 for alpha chain variable domain of TCR clone 262534 (TRAV21, TRAJ52)
CAVRPSPAGGTSYGKLTF

SEQ ID NO: 525068 - protein, 17 aa, Homo sapiens
  CDR3 for beta chain variable domain of TCR clone 262534 (TRBV19, TRBJ2-1)
CASSPRTSGGPYNEQFF

SEQ ID NO: 525069 - protein, 12 aa, Homo sapiens
  CDR3 for alpha chain variable domain of TCR clone 262535 (TRAV22, TRAJ29)
CAPPSGNTPLVF

SEQ ID NO: 525070 - protein, 13 aa, Homo sapiens
  CDR3 for beta chain variable domain of TCR clone 262535 (TRBV4-2, TRBJ1-1)
CASSQAGNTEAFF

SEQ ID NO: 525071 - protein, 11 aa, Homo sapiens
  CDR3 for alpha chain variable domain of TCR clone 262536 (TRAV1-1, TRAJ16)
CAAGDGQKLLF

SEQ ID NO: 525072 - protein, 14 aa, Homo sapiens
  CDR3 for beta chain variable domain of TCR clone 262536 (TRBV7-8, TRBJ2-3)
CASSLEAGTDTQYF

SEQ ID NO: 525073 - protein, 14 aa, Homo sapiens
  CDR3 for alpha chain variable domain of TCR clone 262537 (TRAV1-1, TRAJ5)
CAVRDGAGRRALTF

SEQ ID NO: 525074 - protein, 15 aa, Homo sapiens
  CDR3 for beta chain variable domain of TCR clone 262537 (TRBV11-2, TRBJ1-6)
CASTLRGTGNSPLHF

SEQ ID NO: 525075 - protein, 17 aa, Homo sapiens
  CDR3 for alpha chain variable domain of TCR clone 262538 (TRAV26-1, TRAJ22)
CIVRVPSPSGSARQLTF

SEQ ID NO: 525076 - protein, 16 aa, Homo sapiens
  CDR3 for beta chain variable domain of TCR clone 262538 (TRBV28, TRBJ2-1)
CASRRSGRVVGNEQFF

SEQ ID NO: 525077 - protein, 16 aa, Homo sapiens
  CDR3 for alpha chain variable domain of TCR clone 262539 (TRAV30, TRAJ24)
CCTEIVDADSWGKFQF

SEQ ID NO: 525078 - protein, 15 aa, Homo sapiens
  CDR3 for beta chain variable domain of TCR clone 262539 (TRBV7-9, TRBJ1-4)
CASSARTGGNEKLFF

SEQ ID NO: 525079 - protein, 13 aa, Homo sapiens
  CDR3 for alpha chain variable domain of TCR clone 262540 (TRAV17, TRAJ20)
CATDAVGDHKLSF

SEQ ID NO: 525080 - protein, 15 aa, Homo sapiens
  CDR3 for beta chain variable domain of TCR clone 262540 (TRBV9, TRBJ1-3)
CASSARAGGGNTIYF

SEQ ID NO: 525081 - protein, 13 aa, Homo sapiens
  CDR3 for alpha chain variable domain of TCR clone 262541 (TRAV8-1, TRAJ23)
CAVTGGQGGKLIF

SEQ ID NO: 525082 - protein, 14 aa, Homo sapiens
  CDR3 for beta chain variable domain of TCR clone 262541 (TRBV20-1, TRBJ1-1)
SAVHKHGLGTEAFF

SEQ ID NO: 525083 - protein, 13 aa, Homo sapiens
  CDR3 for alpha chain variable domain of TCR clone 262542 (TRAV30, TRAJ34)
CGTVGYNTDELIF

SEQ ID NO: 525084 - protein, 16 aa, Homo sapiens
  CDR3 for beta chain variable domain of TCR clone 262542 (TRBV11-2, TRBJ2-7)
CASSLDAGTGVYEQYF

SEQ ID NO: 525085 - protein, 11 aa, Homo sapiens
  CDR3 for alpha chain variable domain of TCR clone 262543 (TRAV2, TRAJ33)
CAVDSNYQLIW

SEQ ID NO: 525086 - protein, 14 aa, Homo sapiens
  CDR3 for beta chain variable domain of TCR clone 262543 (TRBV28, TRBJ1-2)
CASSRDRKNYGYTF

SEQ ID NO: 525087 - protein, 15 aa, Homo sapiens
  CDR3 for alpha chain variable domain of TCR clone 262544 (TRAV17, TRAJ56)
CATEPFTGANSKLTF

SEQ ID NO: 525088 - protein, 15 aa, Homo sapiens
  CDR3 for beta chain variable domain of TCR clone 262544 (TRBV28, TRBJ1-5)
CASSRTGGYVQPEHF

SEQ ID NO: 525089 - protein, 17 aa, Homo sapiens
  CDR3 for alpha chain variable domain of TCR clone 262545 (TRAV3, TRAJ6)
CAVRDGPSAGGSYIPTF

SEQ ID NO: 525090 - protein, 14 aa, Homo sapiens
  CDR3 for beta chain variable domain of TCR clone 262545 (TRBV7-2, TRBJ2-7)
CARSPKTSFYEQYF

SEQ ID NO: 525091 - protein, 15 aa, Homo sapiens
  CDR3 for alpha chain variable domain of TCR clone 262546 (TRAV16, TRAJ20)
CALKGGLRADYKLSF

SEQ ID NO: 525092 - protein, 16 aa, Homo sapiens
  CDR3 for beta chain variable domain of TCR clone 262546 (TRBV11-3, TRBJ2-2)
CASSSRTSPGTVELFF

SEQ ID NO: 525093 - protein, 17 aa, Homo sapiens
  CDR3 for alpha chain variable domain of TCR clone 262547 (TRAV8-3, TRAJ50)
CAGGAVDTETSYDKVIF

SEQ ID NO: 525094 - protein, 13 aa, Homo sapiens
  CDR3 for beta chain variable domain of TCR clone 262547 (TRBV7-9, TRBJ2-2)
CASSSAGTGELFF

SEQ ID NO: 525095 - protein, 14 aa, Homo sapiens
  CDR3 for alpha chain variable domain of TCR clone 262548 (TRAV8-4, TRAJ4)
CAVSPSGGYNKLIF

SEQ ID NO: 525096 - protein, 15 aa, Homo sapiens
  CDR3 for beta chain variable domain of TCR clone 262548 (TRBV7-8, TRBJ2-3)
CASSLAADSGGAQYF

SEQ ID NO: 525097 - protein, 14 aa, Homo sapiens
  CDR3 for alpha chain variable domain of TCR clone 262549 (TRAV12-3, TRAJ10)
SHLALTGGGNKLTF

SEQ ID NO: 525098 - protein, 15 aa, Homo sapiens
  CDR3 for beta chain variable domain of TCR clone 262549 (TRBV7-9, TRBJ1-6)
CASSSPGRGNSPLHF

SEQ ID NO: 525099 - protein, 17 aa, Homo sapiens
  CDR3 for alpha chain variable domain of TCR clone 262550 (TRAV3, TRAJ6)
CAVRDGPRAGGSYIPTF

SEQ ID NO: 525100 - protein, 14 aa, Homo sapiens
  CDR3 for beta chain variable domain of TCR clone 262550 (TRBV7-2, TRBJ2-7)
CDSSPKTSFYEQYI

SEQ ID NO: 525101 - protein, 13 aa, Homo sapiens
  CDR3 for alpha chain variable domain of TCR clone 262551 (TRAV13-1, TRAJ37)
CAAVSGNTGKIIF

SEQ ID NO: 525102 - protein, 17 aa, Homo sapiens
  CDR3 for beta chain variable domain of TCR clone 262551 (TRBV10-2, TRBJ1-6)
CASSENRGSSYNSPLHF

SEQ ID NO: 525103 - protein, 14 aa, Homo sapiens
  CDR3 for alpha chain variable domain of TCR clone 262552 (TRAV1-2, TRAJ16)
CAVNRFADGQKLLF

SEQ ID NO: 525104 - protein, 16 aa, Homo sapiens
  CDR3 for beta chain variable domain of TCR clone 262552 (TRBV20-1, TRBJ1-4)
CSAPGQGLLTNEKLFF

SEQ ID NO: 525105 - protein, 14 aa, Homo sapiens
  CDR3 for alpha chain variable domain of TCR clone 262553 (TRAV17, TRAJ15)
CSTGPNQAGTALIF

SEQ ID NO: 525106 - protein, 15 aa, Homo sapiens
  CDR3 for beta chain variable domain of TCR clone 262553 (TRBV11-2, TRBJ2-2)
CASSSDRVNAGELFF

SEQ ID NO: 525107 - protein, 16 aa, Homo sapiens
  CDR3 for alpha chain variable domain of TCR clone 262554 (TRAV3, TRAJ22)
CAVRDMGSGSARQLTF

SEQ ID NO: 525108 - protein, 14 aa, Homo sapiens
  CDR3 for beta chain variable domain of TCR clone 262554 (TRBV20-1, TRBJ2-3)
CSAGGRRGTDTQYF

SEQ ID NO: 525109 - protein, 10 aa, Homo sapiens
  CDR3 for alpha chain variable domain of TCR clone 262555 (TRAV8-4, TRAJ39)
CAVAGNMLTF

SEQ ID NO: 525110 - protein, 14 aa, Homo sapiens
  CDR3 for beta chain variable domain of TCR clone 262555 (TRBV25-1, TRBJ1-1)
CASTHLGGNTEAFF

SEQ ID NO: 525111 - protein, 14 aa, Homo sapiens
  CDR3 for alpha chain variable domain of TCR clone 262556 (TRAV1-2, TRAJ16)
CAVNRFSDGQKLPF

SEQ ID NO: 525112 - protein, 14 aa, Homo sapiens
  CDR3 for beta chain variable domain of TCR clone 262556 (TRBV12-4, TRBJ1-1)
CASSLGTGGTEAFF

SEQ ID NO: 525113 - protein, 15 aa, Homo sapiens
  CDR3 for alpha chain variable domain of TCR clone 262557 (TRAV2, TRAJ9)
CAVEDRGTGGFKTIF

SEQ ID NO: 525114 - protein, 13 aa, Homo sapiens
  CDR3 for beta chain variable domain of TCR clone 262557 (TRBV7-9, TRBJ2-1)
CASRPNLSDEQFF

SEQ ID NO: 525115 - protein, 15 aa, Homo sapiens
  CDR3 for alpha chain variable domain of TCR clone 262558 (TRAV23/DV6, TRAJ18)
CAARYRGSTLGRLYF

SEQ ID NO: 525116 - protein, 13 aa, Homo sapiens
  CDR3 for beta chain variable domain of TCR clone 262558 (TRBV7-2, TRBJ2-7)
CATSSPSGSEQYF

SEQ ID NO: 525117 - protein, 13 aa, Homo sapiens
  CDR3 for alpha chain variable domain of TCR clone 262559 (TRAV2, TRAJ40)
CAVVTSGTYKYIF

SEQ ID NO: 525118 - protein, 15 aa, Homo sapiens
  CDR3 for beta chain variable domain of TCR clone 262559 (TRBV18, TRBJ1-5)
CASSETGGNNQPQHF

SEQ ID NO: 525119 - protein, 13 aa, Homo sapiens
  CDR3 for alpha chain variable domain of TCR clone 262560 (TRAV27, TRAJ18)
CAGRGSTLGRLYF

SEQ ID NO: 525120 - protein, 15 aa, Homo sapiens
  CDR3 for beta chain variable domain of TCR clone 262560 (TRBV5-1, TRBJ2-5)
CASSFKGGDQETQYF

SEQ ID NO: 525121 - protein, 12 aa, Homo sapiens
  CDR3 for alpha chain variable domain of TCR clone 262561 (TRAV27, TRAJ13)
CAGVRGYQKDTF

SEQ ID NO: 525122 - protein, 16 aa, Homo sapiens
  CDR3 for beta chain variable domain of TCR clone 262561 (TRBV28, TRBJ2-1)
CASSSSYSGGLNEQFF

SEQ ID NO: 525123 - protein, 17 aa, Homo sapiens
  CDR3 for alpha chain variable domain of TCR clone 262562 (TRAV3, TRAJ13)
CAVRDIRRTGGYQKVTF

SEQ ID NO: 525124 - protein, 14 aa, Homo sapiens
  CDR3 for beta chain variable domain of TCR clone 262562 (TRBV5-1, TRBJ2-7)
CASSLTGSGYEQYF

SEQ ID NO: 525125 - protein, 14 aa, Homo sapiens
  CDR3 for alpha chain variable domain of TCR clone 262563 (TRAV8-3, TRAJ4)
CAGGAAGGYSKLIF

SEQ ID NO: 525126 - protein, 15 aa, Homo sapiens
  CDR3 for beta chain variable domain of TCR clone 262563 (TRBV6-5, TRBJ2-1)
CASSYDAGAGNEQFF

SEQ ID NO: 525127 - protein, 14 aa, Homo sapiens
  CDR3 for alpha chain variable domain of TCR clone 262564 (TRAV12-3, TRAJ39)
SATYLSTAGNMLTF

SEQ ID NO: 525128 - protein, 13 aa, Homo sapiens
  CDR3 for beta chain variable domain of TCR clone 262564 (TRBV28, TRBJ1-2)
CASSPGNRNGYTF

SEQ ID NO: 525129 - protein, 14 aa, Homo sapiens
  CDR3 for alpha chain variable domain of TCR clone 262565 (TRAV13-1, TRAJ35)
CAASKGGFGNVLHC

SEQ ID NO: 525130 - protein, 16 aa, Homo sapiens
  CDR3 for beta chain variable domain of TCR clone 262565 (TRBV7-3, TRBJ2-2)
CASSVKRGTLSGELFF

SEQ ID NO: 525131 - protein, 16 aa, Homo sapiens
  CDR3 for alpha chain variable domain of TCR clone 262566 (TRAV3, TRAJ10)
CAVRDMRAGGGNKLTF

SEQ ID NO: 525132 - protein, 15 aa, Homo sapiens
  CDR3 for beta chain variable domain of TCR clone 262566 (TRBV12-4, TRBJ2-1)
CASSLSTGVSNEQFF

SEQ ID NO: 525133 - protein, 16 aa, Homo sapiens
  CDR3 for alpha chain variable domain of TCR clone 262567 (TRAV23/DV6, TRAJ9)
CAARIGGNTGGFKTIF

SEQ ID NO: 525134 - protein, 13 aa, Homo sapiens
  CDR3 for beta chain variable domain of TCR clone 262567 (TRBV7-3, TRBJ1-1)
CASSQDWGAEAFF

SEQ ID NO: 525135 - protein, 16 aa, Homo sapiens
  CDR3 for alpha chain variable domain of TCR clone 262568 (TRAV26-1, TRAJ56)
CIVRVAETGANSKLTF

SEQ ID NO: 525136 - protein, 13 aa, Homo sapiens
  CDR3 for beta chain variable domain of TCR clone 262568 (TRBV3-1, TRBJ1-1)
CASSPGVITEAFF

SEQ ID NO: 525137 - protein, 11 aa, Homo sapiens
  CDR3 for alpha chain variable domain of TCR clone 262569 (TRAV8-4, TRAJ54)
CAVSEVWEPRS

SEQ ID NO: 525138 - protein, 13 aa, Homo sapiens
  CDR3 for beta chain variable domain of TCR clone 262569 (TRBV27, TRBJ2-7)
CASSFVSSYEQYF

SEQ ID NO: 525139 - protein, 13 aa, Homo sapiens
  CDR3 for alpha chain variable domain of TCR clone 262570 (TRAV17, TRAJ4)
CATKSGGYNKLIF

SEQ ID NO: 525140 - protein, 16 aa, Homo sapiens
  CDR3 for beta chain variable domain of TCR clone 262570 (TRBV12-5, TRBJ2-5)
CASGPRTSGNQETQYF

SEQ ID NO: 525141 - protein, 14 aa, Homo sapiens
  CDR3 for alpha chain variable domain of TCR clone 262571 (TRAV25, TRAJ35)
CARRMEGFGNVLHC

SEQ ID NO: 525142 - protein, 16 aa, Homo sapiens
  CDR3 for beta chain variable domain of TCR clone 262571 (TRBV7-2, TRBJ2-6)
CASSLAGRSGANVLTF

SEQ ID NO: 525143 - protein, 15 aa, Homo sapiens
  CDR3 for alpha chain variable domain of TCR clone 262572 (TRAV3, TRAJ5)
CAVRDLYTGRRALTF

SEQ ID NO: 525144 - protein, 16 aa, Homo sapiens
  CDR3 for beta chain variable domain of TCR clone 262572 (TRBV20-1, TRBJ1-4)
CSAAGQGLLTNEKLFF

SEQ ID NO: 525145 - protein, 11 aa, Homo sapiens
  CDR3 for alpha chain variable domain of TCR clone 262573 (TRAV23/DV6, TRAJ43)
CAASSGNDMRF

SEQ ID NO: 525146 - protein, 19 aa, Homo sapiens
  CDR3 for beta chain variable domain of TCR clone 262573 (TRBV25-1, TRBJ2-2)
CAILVYRVDRGRKTGELFF

SEQ ID NO: 525147 - protein, 13 aa, Homo sapiens
  CDR3 for alpha chain variable domain of TCR clone 262574 (TRAV8-3, TRAJ21)
CAVGAYIFNKFYF

SEQ ID NO: 525148 - protein, 16 aa, Homo sapiens
  CDR3 for beta chain variable domain of TCR clone 262574 (TRBV19, TRBJ2-1)
CASSMGGGSSYNEQFF

SEQ ID NO: 525149 - protein, 16 aa, Homo sapiens
  CDR3 for alpha chain variable domain of TCR clone 262575 (TRAV30, TRAJ24)
CGTEIVDADSWGKFQF

SEQ ID NO: 525150 - protein, 13 aa, Homo sapiens
  CDR3 for beta chain variable domain of TCR clone 262575 (TRBV7-3, TRBJ1-1)
CASSLDWGAEAFF

SEQ ID NO: 525151 - protein, 14 aa, Homo sapiens
  CDR3 for alpha chain variable domain of TCR clone 262576 (TRAV1-1, TRAJ27)
CAVIYNTNAGKSTF

SEQ ID NO: 525152 - protein, 15 aa, Homo sapiens
  CDR3 for beta chain variable domain of TCR clone 262576 (TRBV9, TRBJ1-6)
CASSVAGTGDSALYF

SEQ ID NO: 525153 - protein, 16 aa, Homo sapiens
  CDR3 for alpha chain variable domain of TCR clone 262577 (TRAV35, TRAJ28)
CAGQRYSGAGSYQLTS

SEQ ID NO: 525154 - protein, 13 aa, Homo sapiens
  CDR3 for beta chain variable domain of TCR clone 262577 (TRBV19, TRBJ1-2)
CASSQGQVYGYTF

SEQ ID NO: 525155 - protein, 13 aa, Homo sapiens
  CDR3 for alpha chain variable domain of TCR clone 262578 (TRAV8-3, TRAJ43)
CAVGPDTNNDMRF

SEQ ID NO: 525156 - protein, 14 aa, Homo sapiens
  CDR3 for beta chain variable domain of TCR clone 262578 (TRBV19, TRBJ2-1)
CASPTFVLSGEQFF

SEQ ID NO: 525157 - protein, 13 aa, Homo sapiens
  CDR3 for alpha chain variable domain of TCR clone 262579 (TRAV8-3, TRAJ20)
CAVGRPNDYKTSF

SEQ ID NO: 525158 - protein, 14 aa, Homo sapiens
  CDR3 for beta chain variable domain of TCR clone 262579 (TRBV12-5, TRBJ2-5)
CASGSRTHQETQYF

SEQ ID NO: 525159 - protein, 17 aa, Homo sapiens
  CDR3 for alpha chain variable domain of TCR clone 262580 (TRAV3, TRAJ6)
CAVRDGPRAGGSDIPTF

SEQ ID NO: 525160 - protein, 15 aa, Homo sapiens
  CDR3 for beta chain variable domain of TCR clone 262580 (TRBV7-6, TRBJ2-3)
CASSPIIYSTDTQYF

SEQ ID NO: 525161 - protein, 11 aa, Homo sapiens
  CDR3 for alpha chain variable domain of TCR clone 262581 (TRAV1-1, TRAJ20)
CAVFNGYKLSF

SEQ ID NO: 525162 - protein, 16 aa, Homo sapiens
  CDR3 for beta chain variable domain of TCR clone 262581 (TRBV29-1, TRBJ2-2)
CSVEKTSEGNTGDLFF

SEQ ID NO: 525163 - protein, 13 aa, Homo sapiens
  CDR3 for alpha chain variable domain of TCR clone 262582 (TRAV13-1, TRAJ8)
CAASIRGFQKLVF

SEQ ID NO: 525164 - protein, 14 aa, Homo sapiens
  CDR3 for beta chain variable domain of TCR clone 262582 (TRBV25-1, TRBJ1-1)
CASTHLGGNTEAFF

SEQ ID NO: 525165 - protein, 13 aa, Homo sapiens
  CDR3 for alpha chain variable domain of TCR clone 262583 (TRAV30, TRAJ24)
CGTVTDSWGKLKF

SEQ ID NO: 525166 - protein, 16 aa, Homo sapiens
  CDR3 for beta chain variable domain of TCR clone 262583 (TRBV7-3, TRBJ2-2)
CASSLKRGTLSGELFF

SEQ ID NO: 525167 - protein, 12 aa, Homo sapiens
  CDR3 for alpha chain variable domain of TCR clone 262584 (TRAV20, TRAJ39)
CAVGNAGNMLTF

SEQ ID NO: 525168 - protein, 15 aa, Homo sapiens
  CDR3 for beta chain variable domain of TCR clone 262584 (TRBV5-1, TRBJ2-7)
CASSLNGGPAREQYF

SEQ ID NO: 525169 - protein, 14 aa, Homo sapiens
  CDR3 for alpha chain variable domain of TCR clone 262585 (TRAV1-2, TRAJ8)
CAVREDTGFQELVF

SEQ ID NO: 525170 - protein, 15 aa, Homo sapiens
  CDR3 for beta chain variable domain of TCR clone 262585 (TRBV6-3, TRBJ2-7)
YASSSPGTVFYEQYF

SEQ ID NO: 525171 - protein, 14 aa, Homo sapiens
  CDR3 for alpha chain variable domain of TCR clone 262586 (TRAV1-2, TRAJ16)
CAVNRFSDGQKLLS

SEQ ID NO: 525172 - protein, 14 aa, Homo sapiens
  CDR3 for beta chain variable domain of TCR clone 262586 (TRBV7-3, TRBJ1-1)
CASSLKGGNTEAFF

SEQ ID NO: 525173 - protein, 13 aa, Homo sapiens
  CDR3 for alpha chain variable domain of TCR clone 262587 (TRAV12-1, TRAJ29)
CVVDTSGNTPLVF

SEQ ID NO: 525174 - protein, 11 aa, Homo sapiens
  CDR3 for beta chain variable domain of TCR clone 262587 (TRBV10-3, TRBJ2-7)
CAIREGLEQYF

SEQ ID NO: 525175 - protein, 15 aa, Homo sapiens
  CDR3 for alpha chain variable domain of TCR clone 262588 (TRAV8-3, TRAJ44)
CAVSAGAGTASKLTF

SEQ ID NO: 525176 - protein, 12 aa, Homo sapiens
  CDR3 for beta chain variable domain of TCR clone 262588 (TRBV7-8, TRBJ2-4)
CASSLGGNIQYF

SEQ ID NO: 525177 - protein, 14 aa, Homo sapiens
  CDR3 for alpha chain variable domain of TCR clone 262589 (TRAV8-4, TRAJ45)
CASGGGGGADGLNF

SEQ ID NO: 525178 - protein, 20 aa, Homo sapiens
  CDR3 for beta chain variable domain of TCR clone 262589 (TRBV4-3, TRBJ2-3)
CASSPRVEMRASGRPDTQYF

SEQ ID NO: 525179 - protein, 11 aa, Homo sapiens
  CDR3 for alpha chain variable domain of TCR clone 262590 (TRAV12-3, TRAJ27)
CAMANAGKSTF

SEQ ID NO: 525180 - protein, 17 aa, Homo sapiens
  CDR3 for beta chain variable domain of TCR clone 262590 (TRBV13, TRBJ2-3)
CASSRSRVAGGRNTQYF

SEQ ID NO: 525181 - protein, 14 aa, Homo sapiens
  CDR3 for alpha chain variable domain of TCR clone 262591 (TRAV14/DV4, TRAJ58)
CAMRARTSGPRLTF

SEQ ID NO: 525182 - protein, 18 aa, Homo sapiens
  CDR3 for beta chain variable domain of TCR clone 262591 (TRBV12-4, TRBJ1-5)
CASSLFLVGVGAYQPQHF

SEQ ID NO: 525183 - protein, 18 aa, Homo sapiens
  CDR3 for alpha chain variable domain of TCR clone 262592 (TRAV21, TRAJ52)
CAVRPSPAGGTSSGKLTF

SEQ ID NO: 525184 - protein, 12 aa, Homo sapiens
  CDR3 for beta chain variable domain of TCR clone 262592 (TRBV29-1, TRBJ2-3)
CSVVLGADTQYF

SEQ ID NO: 525185 - protein, 14 aa, Homo sapiens
  CDR3 for alpha chain variable domain of TCR clone 262593 (TRAV17, TRAJ56)
CATVPAGANSKLTF

SEQ ID NO: 525186 - protein, 13 aa, Homo sapiens
  CDR3 for beta chain variable domain of TCR clone 262593 (TRBV12-4, TRBJ2-2)
CASSITGSGELFF

SEQ ID NO: 525187 - protein, 14 aa, Homo sapiens
  CDR3 for alpha chain variable domain of TCR clone 262594 (TRAV8-2, TRAJ4)
CVVSPSGGYNKLIF

SEQ ID NO: 525188 - protein, 16 aa, Homo sapiens
  CDR3 for beta chain variable domain of TCR clone 262594 (TRBV13, TRBJ2-3)
CAISLSRVAGEEYAVF

SEQ ID NO: 525189 - protein, 14 aa, Homo sapiens
  CDR3 for alpha chain variable domain of TCR clone 262595 (TRAV1-2, TRAJ6)
CAVGLSGGSYIPTF

SEQ ID NO: 525190 - protein, 15 aa, Homo sapiens
  CDR3 for beta chain variable domain of TCR clone 262595 (TRBV28, TRBJ2-7)
CASSPGGGGFYEQYF

SEQ ID NO: 525191 - protein, 16 aa, Homo sapiens
  CDR3 for alpha chain variable domain of TCR clone 262596 (TRAV16, TRAJ57)
CAPYLITQGRSEKLVF

SEQ ID NO: 525192 - protein, 17 aa, Homo sapiens
  CDR3 for beta chain variable domain of TCR clone 262596 (TRBV24-1, TRBJ2-4)
CATSDAEARGVRNIQYF

SEQ ID NO: 525193 - protein, 13 aa, Homo sapiens
  CDR3 for alpha chain variable domain of TCR clone 262597 (TRAV2, TRAJ40)
CAVVTSGTYKYIF

SEQ ID NO: 525194 - protein, 16 aa, Homo sapiens
  CDR3 for beta chain variable domain of TCR clone 262597 (TRBV4-2, TRBJ2-3)
CASSQEAGPSTDTQYF

SEQ ID NO: 525195 - protein, 13 aa, Homo sapiens
  CDR3 for alpha chain variable domain of TCR clone 262598 (TRAV12-1, TRAJ16)
CVVNGPDGQKLLF

SEQ ID NO: 525196 - protein, 13 aa, Homo sapiens
  CDR3 for beta chain variable domain of TCR clone 262598 (TRBV2, TRBJ1-1)
CARNPTGGCRAFF

SEQ ID NO: 525197 - protein, 12 aa, Homo sapiens
  CDR3 for alpha chain variable domain of TCR clone 262599 (TRAV23/DV6, TRAJ26)
CAASKFVQNFVF

SEQ ID NO: 525198 - protein, 13 aa, Homo sapiens
  CDR3 for beta chain variable domain of TCR clone 262599 (TRBV11-2, TRBJ1-5)
CASSLDRNQPQHF

SEQ ID NO: 525199 - protein, 13 aa, Homo sapiens
  CDR3 for alpha chain variable domain of TCR clone 262600 (TRAV12-2, TRAJ15)
CAVFNQAGTALIF

SEQ ID NO: 525200 - protein, 23 aa, Homo sapiens
  CDR3 for beta chain variable domain of TCR clone 262600 (TRBV7-8, TRBJ1-5)
RRTPPGISVPAAGGGGAGQPQHF

SEQ ID NO: 525201 - protein, 12 aa, Homo sapiens
  CDR3 for alpha chain variable domain of TCR clone 262601 (TRAV21, TRAJ15)
CPVNQAGTALIF

SEQ ID NO: 525202 - protein, 13 aa, Homo sapiens
  CDR3 for beta chain variable domain of TCR clone 262601 (TRBV11-3, TRBJ2-5)
CASSSTGEETQYF

SEQ ID NO: 525203 - protein, 14 aa, Homo sapiens
  CDR3 for alpha chain variable domain of TCR clone 262602 (TRAV12-2, TRAJ45)
CAVYSGGGADGLPF

SEQ ID NO: 525204 - protein, 13 aa, Homo sapiens
  CDR3 for beta chain variable domain of TCR clone 262602 (TRBV7-7, TRBJ2-3)
CASSLSRADTQYF

SEQ ID NO: 525205 - protein, 14 aa, Homo sapiens
  CDR3 for alpha chain variable domain of TCR clone 262603 (TRAV26-1, TRAJ39)
CIVRGSRAGNMLTF

SEQ ID NO: 525206 - protein, 14 aa, Homo sapiens
  CDR3 for beta chain variable domain of TCR clone 262603 (TRBV7-9, TRBJ1-5)
CQSQGHQPNQPQHF

SEQ ID NO: 525207 - protein, 16 aa, Homo sapiens
  CDR3 for alpha chain variable domain of TCR clone 262604 (TRAV1-2, TRAJ6)
CAVRDQGTGGSYIPTF

SEQ ID NO: 525208 - protein, 14 aa, Homo sapiens
  CDR3 for beta chain variable domain of TCR clone 262604 (TRBV5-1, TRBJ2-7)
CASSRGESLYEQYF

SEQ ID NO: 525209 - protein, 15 aa, Homo sapiens
  CDR3 for alpha chain variable domain of TCR clone 262605 (TRAV13-1, TRAJ17)
CAASIERAAVKKLTF

SEQ ID NO: 525210 - protein, 12 aa, Homo sapiens
  CDR3 for beta chain variable domain of TCR clone 262605 (TRBV5-7, TRBJ1-1)
CASSLGRGKAFF

SEQ ID NO: 525211 - protein, 14 aa, Homo sapiens
  CDR3 for alpha chain variable domain of TCR clone 262606 (TRAV8-1, TRAJ34)
CALPRGTTSSSLGL

SEQ ID NO: 525212 - protein, 13 aa, Homo sapiens
  CDR3 for beta chain variable domain of TCR clone 262606 (TRBV19, TRBJ2-2)
CASSIWSTGELFF

SEQ ID NO: 525213 - protein, 14 aa, Homo sapiens
  CDR3 for alpha chain variable domain of TCR clone 262607 (TRAV8-6, TRAJ36)
CAVSEKDGANNLFF

SEQ ID NO: 525214 - protein, 14 aa, Homo sapiens
  CDR3 for beta chain variable domain of TCR clone 262607 (TRBV7-2, TRBJ2-7)
CASRSQGASYEQYF

SEQ ID NO: 525215 - protein, 14 aa, Homo sapiens
  CDR3 for alpha chain variable domain of TCR clone 262608 (TRAV2, TRAJ9)
CAVEYRSGGFKTIF

SEQ ID NO: 525216 - protein, 14 aa, Homo sapiens
  CDR3 for beta chain variable domain of TCR clone 262608 (TRBV2, TRBJ2-1)
CASSEALIYNEQFF

SEQ ID NO: 525217 - protein, 15 aa, Homo sapiens
  CDR3 for alpha chain variable domain of TCR clone 262609 (TRAV12-1, TRAJ8)
CVVNVENTGSQKLVF

SEQ ID NO: 525218 - protein, 16 aa, Homo sapiens
  CDR3 for beta chain variable domain of TCR clone 262609 (TRBV7-2, TRBJ2-7)
CASSLEAGGPWYEQYF

SEQ ID NO: 525219 - protein, 17 aa, Homo sapiens
  CDR3 for alpha chain variable domain of TCR clone 262610 (TRAV3, TRAJ42)
CAVRDRDYGGSQGNLIF

SEQ ID NO: 525220 - protein, 15 aa, Homo sapiens
  CDR3 for beta chain variable domain of TCR clone 262610 (TRBV6-6, TRBJ2-7)
CASSYSYGGYYEQHF

SEQ ID NO: 525221 - protein, 20 aa, Homo sapiens
  CDR3 for alpha chain variable domain of TCR clone 262611 (TRAV12-1, TRAJ42)
SSVIQPPTSVKGGSQGNLIF

SEQ ID NO: 525222 - protein, 16 aa, Homo sapiens
  CDR3 for beta chain variable domain of TCR clone 262611 (TRBV7-3, TRBJ2-2)
CASSLKRGTLSGELFF

SEQ ID NO: 525223 - protein, 16 aa, Homo sapiens
  CDR3 for alpha chain variable domain of TCR clone 262612 (TRAV17, TRAJ52)
CATSNAGGTSYGKLTF

SEQ ID NO: 525224 - protein, 14 aa, Homo sapiens
  CDR3 for beta chain variable domain of TCR clone 262612 (TRBV11-2, TRBJ2-5)
CASSRTGGIETQYF

SEQ ID NO: 525225 - protein, 16 aa, Homo sapiens
  CDR3 for alpha chain variable domain of TCR clone 262613 (TRAV12-2, TRAJ6)
CAAPLAGSGGSYLPTF

SEQ ID NO: 525226 - protein, 10 aa, Homo sapiens
  CDR3 for beta chain variable domain of TCR clone 262613 (TRBV28, TRBJ1-2)
CASSSDRAVF

SEQ ID NO: 525227 - protein, 14 aa, Homo sapiens
  CDR3 for alpha chain variable domain of TCR clone 262614 (TRAV2, TRAJ21)
CAVEDLNNFNKFYF

SEQ ID NO: 525228 - protein, 11 aa, Homo sapiens
  CDR3 for beta chain variable domain of TCR clone 262614 (TRBV10-3, TRBJ2-1)
CAVSDRGLQFF

SEQ ID NO: 525229 - protein, 11 aa, Homo sapiens
  CDR3 for alpha chain variable domain of TCR clone 262615 (TRAV13-1, TRAJ6)
CATLGSYIPTI

SEQ ID NO: 525230 - protein, 12 aa, Homo sapiens
  CDR3 for beta chain variable domain of TCR clone 262615 (TRBV11-2, TRBJ2-1)
CASSPGNNEQFF

SEQ ID NO: 525231 - protein, 12 aa, Homo sapiens
  CDR3 for alpha chain variable domain of TCR clone 262616 (TRAV1-2, TRAJ42)
CVAGGSQGNLIF

SEQ ID NO: 525232 - protein, 15 aa, Homo sapiens
  CDR3 for beta chain variable domain of TCR clone 262616 (TRBV12-4, TRBJ1-2)
CASSPITGGGYGYTF

SEQ ID NO: 525233 - protein, 11 aa, Homo sapiens
  CDR3 for alpha chain variable domain of TCR clone 262617 (TRAV13-1, TRAJ52)
PSGTSYGKLTF

SEQ ID NO: 525234 - protein, 16 aa, Homo sapiens
  CDR3 for beta chain variable domain of TCR clone 262617 (TRBV28, TRBJ2-7)
CASSPWVATGDLSQYF

SEQ ID NO: 525235 - protein, 12 aa, Homo sapiens
  CDR3 for alpha chain variable domain of TCR clone 262618 (TRAV13-1, TRAJ22)
CAVSGSARQLTF

SEQ ID NO: 525236 - protein, 12 aa, Homo sapiens
  CDR3 for beta chain variable domain of TCR clone 262618 (TRBV11-2, TRBJ2-1)
CASSPGNNEQFF

SEQ ID NO: 525237 - protein, 14 aa, Homo sapiens
  CDR3 for alpha chain variable domain of TCR clone 262619 (TRAV3, TRAJ34)
CAVRAPGNTDKLIF

SEQ ID NO: 525238 - protein, 15 aa, Homo sapiens
  CDR3 for beta chain variable domain of TCR clone 262619 (TRBV20-1, TRBJ2-7)
CSARDRVSGMDEQYF

SEQ ID NO: 525239 - protein, 14 aa, Homo sapiens
  CDR3 for alpha chain variable domain of TCR clone 262620 (TRAV16, TRAJ42)
CALLAGGSQGNLIF

SEQ ID NO: 525240 - protein, 15 aa, Homo sapiens
  CDR3 for beta chain variable domain of TCR clone 262620 (TRBV4-3, TRBJ2-3)
CASSLGTRSSDTQYF

SEQ ID NO: 525241 - protein, 13 aa, Homo sapiens
  CDR3 for alpha chain variable domain of TCR clone 262621 (TRAV13-1, TRAJ21)
CAASINNFNKFYF

SEQ ID NO: 525242 - protein, 20 aa, Homo sapiens
  CDR3 for beta chain variable domain of TCR clone 262621 (TRBV7-8, TRBJ2-2)
CASSHLFPGPTIHITGELFF

SEQ ID NO: 525243 - protein, 12 aa, Homo sapiens
  CDR3 for alpha chain variable domain of TCR clone 262622 (TRAV12-3, TRAJ17)
CAMTLTGNKLTF

SEQ ID NO: 525244 - protein, 12 aa, Homo sapiens
  CDR3 for beta chain variable domain of TCR clone 262622 (TRBV6-1, TRBJ2-7)
CASSEPLYEQYF

SEQ ID NO: 525245 - protein, 15 aa, Homo sapiens
  CDR3 for alpha chain variable domain of TCR clone 262623 (TRAV8-4, TRAJ47)
CAVSDPEEYGKKLGF

SEQ ID NO: 525246 - protein, 15 aa, Homo sapiens
  CDR3 for beta chain variable domain of TCR clone 262623 (TRBV11-2, TRBJ2-1)
CASSLGPDSYNEQFF

SEQ ID NO: 525247 - protein, 14 aa, Homo sapiens
  CDR3 for alpha chain variable domain of TCR clone 262624 (TRAV23/DV6, TRAJ8)
CAASKNTGFQKLVF

SEQ ID NO: 525248 - protein, 16 aa, Homo sapiens
  CDR3 for beta chain variable domain of TCR clone 262624 (TRBV4-1, TRBJ2-6)
CASSKVGDPGANVLTF

SEQ ID NO: 525249 - protein, 12 aa, Homo sapiens
  CDR3 for alpha chain variable domain of TCR clone 262625 (TRAV1-1, TRAJ39)
CAVPVVGNMLTS

SEQ ID NO: 525250 - protein, 16 aa, Homo sapiens
  CDR3 for beta chain variable domain of TCR clone 262625 (TRBV28, TRBJ2-7)
CASSPWVATGDLSQYF

SEQ ID NO: 525251 - protein, 14 aa, Homo sapiens
  CDR3 for alpha chain variable domain of TCR clone 262626 (TRAV27, TRAJ49)
CAGRPEGTGNQFYC

SEQ ID NO: 525252 - protein, 14 aa, Homo sapiens
  CDR3 for beta chain variable domain of TCR clone 262626 (TRBV18, TRBJ2-5)
CASSPGVSQETQYF

SEQ ID NO: 525253 - protein, 13 aa, Homo sapiens
  CDR3 for alpha chain variable domain of TCR clone 262627 (TRAV35, TRAJ42)
CAGFPGSQGNLIF

SEQ ID NO: 525254 - protein, 14 aa, Homo sapiens
  CDR3 for beta chain variable domain of TCR clone 262627 (TRBV19, TRBJ2-1)
CASPTVVLSGKQFF

SEQ ID NO: 525255 - protein, 14 aa, Homo sapiens
  CDR3 for alpha chain variable domain of TCR clone 262628 (TRAV6, TRAJ17)
CALDIEAAGNKLTF

SEQ ID NO: 525256 - protein, 17 aa, Homo sapiens
  CDR3 for beta chain variable domain of TCR clone 262628 (TRBV2, TRBJ1-5)
CASSVGTGMRGYQHQHF

SEQ ID NO: 525257 - protein, 11 aa, Homo sapiens
  CDR3 for alpha chain variable domain of TCR clone 262629 (TRAV12-1, TRAJ26)
CVVAYGQNFVF

SEQ ID NO: 525258 - protein, 15 aa, Homo sapiens
  CDR3 for beta chain variable domain of TCR clone 262629 (TRBV12-4, TRBJ2-5)
CASSETGQAQETQYF

SEQ ID NO: 525259 - protein, 14 aa, Homo sapiens
  CDR3 for alpha chain variable domain of TCR clone 262630 (TRAV1-2, TRAJ16)
CAVKRFSDGQKLLF

SEQ ID NO: 525260 - protein, 15 aa, Homo sapiens
  CDR3 for beta chain variable domain of TCR clone 262630 (TRBV29-1, TRBJ2-7)
CSVEFFDRGSYEQYF

SEQ ID NO: 525261 - protein, 16 aa, Homo sapiens
  CDR3 for alpha chain variable domain of TCR clone 262631 (TRAV12-3, TRAJ53)
CAMSPGSGGSNYNLTF

SEQ ID NO: 525262 - protein, 14 aa, Homo sapiens
  CDR3 for beta chain variable domain of TCR clone 262631 (TRBV2, TRBJ2-7)
CASSLTSGGYEQYF

SEQ ID NO: 525263 - protein, 14 aa, Homo sapiens
  CDR3 for alpha chain variable domain of TCR clone 262632 (TRAV35, TRAJ22)
CAGLRPCSARQLTS

SEQ ID NO: 525264 - protein, 13 aa, Homo sapiens
  CDR3 for beta chain variable domain of TCR clone 262632 (TRBV20-1, TRBJ2-7)
CSATHTSGYEQYF

SEQ ID NO: 525265 - protein, 14 aa, Homo sapiens
  CDR3 for alpha chain variable domain of TCR clone 262633 (TRAV16, TRAJ32)
CALKSGGVTNRPIF

SEQ ID NO: 525266 - protein, 13 aa, Homo sapiens
  CDR3 for beta chain variable domain of TCR clone 262633 (TRBV15, TRBJ1-6)
CATSGGLNSPLHF

SEQ ID NO: 525267 - protein, 14 aa, Homo sapiens
  CDR3 for alpha chain variable domain of TCR clone 262634 (TRAV16, TRAJ17)
CALSGRAAGNKLTF

SEQ ID NO: 525268 - protein, 13 aa, Homo sapiens
  CDR3 for beta chain variable domain of TCR clone 262634 (TRBV20-1, TRBJ2-5)
CSARGDYQETQYF

SEQ ID NO: 525269 - protein, 12 aa, Homo sapiens
  CDR3 for alpha chain variable domain of TCR clone 262635 (TRAV3, TRAJ43)
CAVRGPNNDMRF

SEQ ID NO: 525270 - protein, 17 aa, Homo sapiens
  CDR3 for beta chain variable domain of TCR clone 262635 (TRBV13, TRBJ2-3)
CASSLSRVAGGRNTQYF

SEQ ID NO: 525271 - protein, 14 aa, Homo sapiens
  CDR3 for alpha chain variable domain of TCR clone 262636 (TRAV23/DV6, TRAJ57)
CAASNQGGSDKLVF

SEQ ID NO: 525272 - protein, 13 aa, Homo sapiens
  CDR3 for beta chain variable domain of TCR clone 262636 (TRBV11-2, TRBJ2-7)
CASSSYPSYEQYF

SEQ ID NO: 525273 - protein, 12 aa, Homo sapiens
  CDR3 for alpha chain variable domain of TCR clone 262637 (TRAV13-1, TRAJ20)
CAASMGDYKLSF

SEQ ID NO: 525274 - protein, 15 aa, Homo sapiens
  CDR3 for beta chain variable domain of TCR clone 262637 (TRBV11-3, TRBJ2-3)
CASNGGLDSTDTQYS

SEQ ID NO: 525275 - protein, 13 aa, Homo sapiens
  CDR3 for alpha chain variable domain of TCR clone 262638 (TRAV8-1, TRAJ30)
CAVIMNRDDKIIF

SEQ ID NO: 525276 - protein, 14 aa, Homo sapiens
  CDR3 for beta chain variable domain of TCR clone 262638 (TRBV7-2, TRBJ1-6)
CASSLQGANSPIHF

SEQ ID NO: 525277 - protein, 18 aa, Homo sapiens
  CDR3 for alpha chain variable domain of TCR clone 262639 (TRAV29/DV5, TRAJ52)
CAAGFRGAGGTNYGKLTF

SEQ ID NO: 525278 - protein, 16 aa, Homo sapiens
  CDR3 for beta chain variable domain of TCR clone 262639 (TRBV7-3, TRBJ2-2)
YASSLKRGTLSGELFF

SEQ ID NO: 525279 - protein, 18 aa, Homo sapiens
  CDR3 for alpha chain variable domain of TCR clone 262640 (TRAV21, TRAJ52)
CAVRPSPAGVTSYGKLTF

SEQ ID NO: 525280 - protein, 17 aa, Homo sapiens
  CDR3 for beta chain variable domain of TCR clone 262640 (TRBV20-1, TRBJ2-2)
CSASGSGQGGLTGELFF

SEQ ID NO: 525281 - protein, 10 aa, Homo sapiens
  CDR3 for alpha chain variable domain of TCR clone 262641 (TRAV26-1, TRAJ22)
CIVSINFFWF

SEQ ID NO: 525282 - protein, 15 aa, Homo sapiens
  CDR3 for beta chain variable domain of TCR clone 262641 (TRBV4-2, TRBJ1-2)
CASSQRTGGRDGYTF

SEQ ID NO: 525283 - protein, 20 aa, Homo sapiens
  CDR3 for alpha chain variable domain of TCR clone 262642 (TRAV25, TRAJ21)
TATQTTDVGTYPLSFNKFYF

SEQ ID NO: 525284 - protein, 16 aa, Homo sapiens
  CDR3 for beta chain variable domain of TCR clone 262642 (TRBV20-1, TRBJ1-2)
CSASMGQGVANYGYTF

SEQ ID NO: 525285 - protein, 13 aa, Homo sapiens
  CDR3 for alpha chain variable domain of TCR clone 262643 (TRAV3, TRAJ21)
CAVATSTNFTLDL

SEQ ID NO: 525286 - protein, 16 aa, Homo sapiens
  CDR3 for beta chain variable domain of TCR clone 262643 (TRBV19, TRBJ2-1)
CASSKAGPSSHNEQFF

SEQ ID NO: 525287 - protein, 13 aa, Homo sapiens
  CDR3 for alpha chain variable domain of TCR clone 262644 (TRAV2, TRAJ40)
CAVVTSRTYKYIF

SEQ ID NO: 525288 - protein, 14 aa, Homo sapiens
  CDR3 for beta chain variable domain of TCR clone 262644 (TRBV19, TRBJ2-1)
CASLTFVLSGEQFF

SEQ ID NO: 525289 - protein, 14 aa, Homo sapiens
  CDR3 for alpha chain variable domain of TCR clone 262645 (TRAV30, TRAJ26)
CGTEIVSYGQNFVF

SEQ ID NO: 525290 - protein, 11 aa, Homo sapiens
  CDR3 for beta chain variable domain of TCR clone 262645 (TRBV7-8, TRBJ2-7)
CASSLSLEQYF

SEQ ID NO: 525291 - protein, 12 aa, Homo sapiens
  CDR3 for alpha chain variable domain of TCR clone 262646 (TRAV12-3, TRAJ17)
CAMTLTGNKLTF

SEQ ID NO: 525292 - protein, 20 aa, Homo sapiens
  CDR3 for beta chain variable domain of TCR clone 262646 (TRBV19, TRBJ2-1)
CASSISQTVTSTRLSNEQFF

SEQ ID NO: 525293 - protein, 14 aa, Homo sapiens
  CDR3 for alpha chain variable domain of TCR clone 262647 (TRAV8-2, TRAJ23)
CVVSDDNQGGKLIF

SEQ ID NO: 525294 - protein, 12 aa, Homo sapiens
  CDR3 for beta chain variable domain of TCR clone 262647 (TRBV7-8, TRBJ2-7)
CASEGGPHGQYF

SEQ ID NO: 525295 - protein, 14 aa, Homo sapiens
  CDR3 for alpha chain variable domain of TCR clone 262648 (TRAV34, TRAJ44)
CGADGTGTASKLTF

SEQ ID NO: 525296 - protein, 15 aa, Homo sapiens
  CDR3 for beta chain variable domain of TCR clone 262648 (TRBV5-1, TRBJ2-1)
CASSPLRAPYNEQFF

SEQ ID NO: 525297 - protein, 16 aa, Homo sapiens
  CDR3 for alpha chain variable domain of TCR clone 262649 (TRAV3, TRAJ37)
CAVRQHGSGNTGKLIF

SEQ ID NO: 525298 - protein, 17 aa, Homo sapiens
  CDR3 for beta chain variable domain of TCR clone 262649 (TRBV5-1, TRBJ2-5)
CASSPVALGQNQETQYF

SEQ ID NO: 525299 - protein, 16 aa, Homo sapiens
  CDR3 for alpha chain variable domain of TCR clone 262650 (TRAV12-2, TRAJ50)
CAVGTATKTSYDQVLF

SEQ ID NO: 525300 - protein, 12 aa, Homo sapiens
  CDR3 for beta chain variable domain of TCR clone 262650 (TRBV12-4, TRBJ1-5)
CASSLGRQPQHF

SEQ ID NO: 525301 - protein, 15 aa, Homo sapiens
  CDR3 for alpha chain variable domain of TCR clone 262651 (TRAV23/DV6, TRAJ30)
CSASSQESRDDKNIF

SEQ ID NO: 525302 - protein, 17 aa, Homo sapiens
  CDR3 for beta chain variable domain of TCR clone 262651 (TRBV4-3, TRBJ2-1)
CASSQFSSGRASGEQFF

SEQ ID NO: 525303 - protein, 12 aa, Homo sapiens
  CDR3 for alpha chain variable domain of TCR clone 262652 (TRAV17, TRAJ47)
CAPAVRGNKLVF

SEQ ID NO: 525304 - protein, 13 aa, Homo sapiens
  CDR3 for beta chain variable domain of TCR clone 262652 (TRBV7-2, TRBJ2-4)
CASSLAEGGIQYF

SEQ ID NO: 525305 - protein, 12 aa, Homo sapiens
  CDR3 for alpha chain variable domain of TCR clone 262653 (TRAV13-1, TRAJ21)
CAAFFNFNKFYF

SEQ ID NO: 525306 - protein, 13 aa, Homo sapiens
  CDR3 for beta chain variable domain of TCR clone 262653 (TRBV13, TRBJ2-5)
CASSPEVGETQYF

SEQ ID NO: 525307 - protein, 10 aa, Homo sapiens
  CDR3 for alpha chain variable domain of TCR clone 262654 (TRAV16, TRAJ20)
CALKRLQAQL

SEQ ID NO: 525308 - protein, 14 aa, Homo sapiens
  CDR3 for beta chain variable domain of TCR clone 262654 (TRBV19, TRBJ2-1)
CASPTFVLSGEQFF

SEQ ID NO: 525309 - protein, 14 aa, Homo sapiens
  CDR3 for alpha chain variable domain of TCR clone 262655 (TRAV1-2, TRAJ8)
CAVREDTGFQKLVF

SEQ ID NO: 525310 - protein, 15 aa, Homo sapiens
  CDR3 for beta chain variable domain of TCR clone 262655 (TRBV7-9, TRBJ1-1)
CASSLRGTVNTEAFS

SEQ ID NO: 525311 - protein, 12 aa, Homo sapiens
  CDR3 for alpha chain variable domain of TCR clone 262656 (TRAV8-3, TRAJ20)
CAVGTNDYKISF

SEQ ID NO: 525312 - protein, 16 aa, Homo sapiens
  CDR3 for beta chain variable domain of TCR clone 262656 (TRBV19, TRBJ2-2)
CASRSPGTGATGELFF

SEQ ID NO: 525313 - protein, 11 aa, Homo sapiens
  CDR3 for alpha chain variable domain of TCR clone 262657 (TRAV3, TRAJ32)
NYGGATTKLIF

SEQ ID NO: 525314 - protein, 15 aa, Homo sapiens
  CDR3 for beta chain variable domain of TCR clone 262657 (TRBV4-1, TRBJ2-7)
CASSQNTGRLYEQYF

SEQ ID NO: 525315 - protein, 15 aa, Homo sapiens
  CDR3 for alpha chain variable domain of TCR clone 262658 (TRAV3, TRAJ15)
CAVRPANQAGTALIF

SEQ ID NO: 525316 - protein, 16 aa, Homo sapiens
  CDR3 for beta chain variable domain of TCR clone 262658 (TRBV4-1, TRBJ2-3)
CASSQSTSGAEDTQYF

SEQ ID NO: 525317 - protein, 12 aa, Homo sapiens
  CDR3 for alpha chain variable domain of TCR clone 262659 (TRAV8-3, TRAJ26)
FAGDNYGQNFVF

SEQ ID NO: 525318 - protein, 12 aa, Homo sapiens
  CDR3 for beta chain variable domain of TCR clone 262659 (TRBV11-2, TRBJ2-1)
CASSPGNNEQFF

SEQ ID NO: 525319 - protein, 13 aa, Homo sapiens
  CDR3 for alpha chain variable domain of TCR clone 262660 (TRAV12-1, TRAJ9)
CVVLNTGGFETIF

SEQ ID NO: 525320 - protein, 17 aa, Homo sapiens
  CDR3 for beta chain variable domain of TCR clone 262660 (TRBV20-1, TRBJ2-1)
CSASSSGLAGSYNEQFF

SEQ ID NO: 525321 - protein, 15 aa, Homo sapiens
  CDR3 for alpha chain variable domain of TCR clone 262661 (TRAV2, TRAJ36)
CAVQGAQTGANNLFF

SEQ ID NO: 525322 - protein, 15 aa, Homo sapiens
  CDR3 for beta chain variable domain of TCR clone 262661 (TRBV2, TRBJ2-1)
CASSELAGSYNEQFF

SEQ ID NO: 525323 - protein, 14 aa, Homo sapiens
  CDR3 for alpha chain variable domain of TCR clone 262662 (TRAV1-2, TRAJ8)
CAVREDTGFQKLVF

SEQ ID NO: 525324 - protein, 13 aa, Homo sapiens
  CDR3 for beta chain variable domain of TCR clone 262662 (TRBV6-4, TRBJ2-3)
CASSVAWADTQYF

SEQ ID NO: 525325 - protein, 18 aa, Homo sapiens
  CDR3 for alpha chain variable domain of TCR clone 262663 (TRAV21, TRAJ52)
CAVRPSPAGGTSYGKLTF

SEQ ID NO: 525326 - protein, 16 aa, Homo sapiens
  CDR3 for beta chain variable domain of TCR clone 262663 (TRBV7-3, TRBJ2-1)
CASSVEGYRSYNEQFF

SEQ ID NO: 525327 - protein, 12 aa, Homo sapiens
  CDR3 for alpha chain variable domain of TCR clone 262664 (TRAV16, TRAJ26)
CALRSYGQNFVF

SEQ ID NO: 525328 - protein, 14 aa, Homo sapiens
  CDR3 for beta chain variable domain of TCR clone 262664 (TRBV10-3, TRBJ2-1)
CAISSDRAYNEQFF

SEQ ID NO: 525329 - protein, 11 aa, Homo sapiens
  CDR3 for alpha chain variable domain of TCR clone 262665 (TRAV2, TRAJ13)
CASVGCQKVTF

SEQ ID NO: 525330 - protein, 16 aa, Homo sapiens
  CDR3 for beta chain variable domain of TCR clone 262665 (TRBV6-1, TRBJ2-5)
CASSETLDRGAETQYF

SEQ ID NO: 525331 - protein, 13 aa, Homo sapiens
  CDR3 for alpha chain variable domain of TCR clone 262666 (TRAV12-1, TRAJ6)
CVVFPGGSYIPTF

SEQ ID NO: 525332 - protein, 16 aa, Homo sapiens
  CDR3 for beta chain variable domain of TCR clone 262666 (TRBV7-8, TRBJ2-4)
CASSAERTLAKNIQYF

SEQ ID NO: 525333 - protein, 13 aa, Homo sapiens
  CDR3 for alpha chain variable domain of TCR clone 262667 (TRAV12-1, TRAJ21)
CVVIGDNFNKFYF

SEQ ID NO: 525334 - protein, 14 aa, Homo sapiens
  CDR3 for beta chain variable domain of TCR clone 262667 (TRBV7-3, TRBJ2-2)
CASSLSPLTGELFF

SEQ ID NO: 525335 - protein, 14 aa, Homo sapiens
  CDR3 for alpha chain variable domain of TCR clone 262668 (TRAV12-2, TRAJ13)
CAVKKTGGYQKVTF

SEQ ID NO: 525336 - protein, 13 aa, Homo sapiens
  CDR3 for beta chain variable domain of TCR clone 262668 (TRBV7-9, TRBJ2-3)
RASSPGSTDTQYF

SEQ ID NO: 525337 - protein, 12 aa, Homo sapiens
  CDR3 for alpha chain variable domain of TCR clone 262669 (TRAV27, TRAJ35)
CAGADFGNVLHC

SEQ ID NO: 525338 - protein, 16 aa, Homo sapiens
  CDR3 for beta chain variable domain of TCR clone 262669 (TRBV4-2, TRBJ1-1)
CASSQAGFGMNTEAFF

SEQ ID NO: 525339 - protein, 14 aa, Homo sapiens
  CDR3 for alpha chain variable domain of TCR clone 262670 (TRAV3, TRAJ40)
CAVRDRRGTYKYIF

SEQ ID NO: 525340 - protein, 15 aa, Homo sapiens
  CDR3 for beta chain variable domain of TCR clone 262670 (TRBV28, TRBJ2-1)
CASSVIAGGRSEQFF

SEQ ID NO: 525341 - protein, 15 aa, Homo sapiens
  CDR3 for alpha chain variable domain of TCR clone 262671 (TRAV25, TRAJ52)
CAGRPGGTSYGELTF

SEQ ID NO: 525342 - protein, 14 aa, Homo sapiens
  CDR3 for beta chain variable domain of TCR clone 262671 (TRBV5-5, TRBJ1-2)
CASSLETGNYGYTF

SEQ ID NO: 525343 - protein, 15 aa, Homo sapiens
  CDR3 for alpha chain variable domain of TCR clone 262672 (TRAV3, TRAJ17)
CAVRDTGAAGTKLPF

SEQ ID NO: 525344 - protein, 14 aa, Homo sapiens
  CDR3 for beta chain variable domain of TCR clone 262672 (TRBV6-3, TRBJ1-1)
CASSNLLPGAEAFF

SEQ ID NO: 525345 - protein, 14 aa, Homo sapiens
  CDR3 for alpha chain variable domain of TCR clone 262673 (TRAV12-2, TRAJ40)
CAVKIPSGTYKYIF

SEQ ID NO: 525346 - protein, 20 aa, Homo sapiens
  CDR3 for beta chain variable domain of TCR clone 262673 (TRBV28, TRBJ2-1)
CASTPIGRSPGLAGGNEQFS

SEQ ID NO: 525347 - protein, 17 aa, Homo sapiens
  CDR3 for alpha chain variable domain of TCR clone 262674 (TRAV26-1, TRAJ37)
CIVRVITVSSNTGKPIF

SEQ ID NO: 525348 - protein, 13 aa, Homo sapiens
  CDR3 for beta chain variable domain of TCR clone 262674 (TRBV4-1, TRBJ2-2)
CASSQENTGELFF

SEQ ID NO: 525349 - protein, 11 aa, Homo sapiens
  CDR3 for alpha chain variable domain of TCR clone 262675 (TRAV12-2, TRAJ39)
CAVNNMLTFGG

SEQ ID NO: 525350 - protein, 16 aa, Homo sapiens
  CDR3 for beta chain variable domain of TCR clone 262675 (TRBV7-3, TRBJ2-3)
CASSPTGYQSTDTQYF

SEQ ID NO: 525351 - protein, 11 aa, Homo sapiens
  CDR3 for alpha chain variable domain of TCR clone 262676 (TRAV3, TRAJ21)
CAVGNFNKFYF

SEQ ID NO: 525352 - protein, 19 aa, Homo sapiens
  CDR3 for beta chain variable domain of TCR clone 262676 (TRBV6-1, TRBJ2-5)
CASSRFGAGGPGLEETQYF

SEQ ID NO: 525353 - protein, 15 aa, Homo sapiens
  CDR3 for alpha chain variable domain of TCR clone 262677 (TRAV34, TRAJ38)
CGADFTPGNNRKLIW

SEQ ID NO: 525354 - protein, 11 aa, Homo sapiens
  CDR3 for beta chain variable domain of TCR clone 262677 (TRBV5-6, TRBJ2-1)
CASSTNNEQFF

SEQ ID NO: 525355 - protein, 17 aa, Homo sapiens
  CDR3 for alpha chain variable domain of TCR clone 262678 (TRAV3, TRAJ6)
CAVRDGPRPGGSYIPTF

SEQ ID NO: 525356 - protein, 16 aa, Homo sapiens
  CDR3 for beta chain variable domain of TCR clone 262678 (TRBV4-1, TRBJ2-7)
CASSLTAGQATYEQYF

SEQ ID NO: 525357 - protein, 16 aa, Homo sapiens
  CDR3 for alpha chain variable domain of TCR clone 262679 (TRAV30, TRAJ24)
CGTEIVDADSWGKFQF

SEQ ID NO: 525358 - protein, 15 aa, Homo sapiens
  CDR3 for beta chain variable domain of TCR clone 262679 (TRBV20-1, TRBJ2-7)
CSARDRVSGMDERYF

SEQ ID NO: 525359 - protein, 14 aa, Homo sapiens
  CDR3 for alpha chain variable domain of TCR clone 262680 (TRAV29/DV5, TRAJ36)
CAARRKTGANHLFF

SEQ ID NO: 525360 - protein, 12 aa, Homo sapiens
  CDR3 for beta chain variable domain of TCR clone 262680 (TRBV12-4, TRBJ1-2)
CASSFIWLHLRF

SEQ ID NO: 525361 - protein, 14 aa, Homo sapiens
  CDR3 for alpha chain variable domain of TCR clone 262681 (TRAV2, TRAJ41)
CAVVTSNSVYALHF

SEQ ID NO: 525362 - protein, 13 aa, Homo sapiens
  CDR3 for beta chain variable domain of TCR clone 262681 (TRBV4-1, TRBJ2-1)
CASSQEVQYEQFF

SEQ ID NO: 525363 - protein, 14 aa, Homo sapiens
  CDR3 for alpha chain variable domain of TCR clone 262682 (TRAV8-3, TRAJ10)
CAVGNAGGGNKLTF

SEQ ID NO: 525364 - protein, 18 aa, Homo sapiens
  CDR3 for beta chain variable domain of TCR clone 262682 (TRBV23-1, TRBJ2-3)
CASSLTFGLAVFTDTQYF

SEQ ID NO: 525365 - protein, 14 aa, Homo sapiens
  CDR3 for alpha chain variable domain of TCR clone 262683 (TRAV13-1, TRAJ17)
LSSRSKAAGNKLTF

SEQ ID NO: 525366 - protein, 13 aa, Homo sapiens
  CDR3 for beta chain variable domain of TCR clone 262683 (TRBV7-9, TRBJ2-1)
CQQLDVGFGEQFF

SEQ ID NO: 525367 - protein, 13 aa, Homo sapiens
  CDR3 for alpha chain variable domain of TCR clone 262684 (TRAV1-2, TRAJ9)
CAALNTGGFKTIF

SEQ ID NO: 525368 - protein, 14 aa, Homo sapiens
  CDR3 for beta chain variable domain of TCR clone 262684 (TRBV20-1, TRBJ1-3)
CSASPTGAGNTIYF

SEQ ID NO: 525369 - protein, 15 aa, Homo sapiens
  CDR3 for alpha chain variable domain of TCR clone 262685 (TRAV8-4, TRAJ52)
CAVSDGGTSYGKLTF

SEQ ID NO: 525370 - protein, 12 aa, Homo sapiens
  CDR3 for beta chain variable domain of TCR clone 262685 (TRBV29-1, TRBJ2-3)
CSVTSGGDTKYF

SEQ ID NO: 525371 - protein, 14 aa, Homo sapiens
  CDR3 for alpha chain variable domain of TCR clone 262686 (TRAV8-3, TRAJ4)
CAVGAAGGYNKLIF

SEQ ID NO: 525372 - protein, 16 aa, Homo sapiens
  CDR3 for beta chain variable domain of TCR clone 262686 (TRBV11-2, TRBJ2-1)
CASARGSYSHHNEQFF

SEQ ID NO: 525373 - protein, 14 aa, Homo sapiens
  CDR3 for alpha chain variable domain of TCR clone 262687 (TRAV20, TRAJ10)
CAVRVEVGGNKLTF

SEQ ID NO: 525374 - protein, 13 aa, Homo sapiens
  CDR3 for beta chain variable domain of TCR clone 262687 (TRBV13, TRBJ2-2)
CASSPGLTGELFF

SEQ ID NO: 525375 - protein, 13 aa, Homo sapiens
  CDR3 for alpha chain variable domain of TCR clone 262688 (TRAV1-2, TRAJ36)
CAVDQTGANNLFF

SEQ ID NO: 525376 - protein, 14 aa, Homo sapiens
  CDR3 for beta chain variable domain of TCR clone 262688 (TRBV20-1, TRBJ2-5)
CSAREMTRQETQYF

SEQ ID NO: 525377 - protein, 14 aa, Homo sapiens
  CDR3 for alpha chain variable domain of TCR clone 262689 (TRAV21, TRAJ35)
CAVMPIGFGNVLHC

SEQ ID NO: 525378 - protein, 15 aa, Homo sapiens
  CDR3 for beta chain variable domain of TCR clone 262689 (TRBV15, TRBJ2-1)
CATSRPGQGLHEQFF

SEQ ID NO: 525379 - protein, 14 aa, Homo sapiens
  CDR3 for alpha chain variable domain of TCR clone 262690 (TRAV1-2, TRAJ8)
CAVREDTGFHKLVF

SEQ ID NO: 525380 - protein, 13 aa, Homo sapiens
  CDR3 for beta chain variable domain of TCR clone 262690 (TRBV13, TRBJ2-7)
CASSLERGWKKYF

SEQ ID NO: 525381 - protein, 15 aa, Homo sapiens
  CDR3 for alpha chain variable domain of TCR clone 262691 (TRAV25, TRAJ53)
CAATGGGGSNYKLTF

SEQ ID NO: 525382 - protein, 13 aa, Homo sapiens
  CDR3 for beta chain variable domain of TCR clone 262691 (TRBV4-1, TRBJ2-2)
CASSQENTGELFF

SEQ ID NO: 525383 - protein, 14 aa, Homo sapiens
  CDR3 for alpha chain variable domain of TCR clone 262692 (TRAV12-2, TRAJ13)
CAVKKTGGYQKVTF

SEQ ID NO: 525384 - protein, 13 aa, Homo sapiens
  CDR3 for beta chain variable domain of TCR clone 262692 (TRBV10-3, TRBJ2-7)
CSSKLAVNYEQYF

SEQ ID NO: 525385 - protein, 15 aa, Homo sapiens
  CDR3 for alpha chain variable domain of TCR clone 262693 (TRAV1-2, TRAJ26)
CAVRDLITMVRILSL

SEQ ID NO: 525386 - protein, 13 aa, Homo sapiens
  CDR3 for beta chain variable domain of TCR clone 262693 (TRBV3-1, TRBJ2-5)
CASSPVLSETQYF

SEQ ID NO: 525387 - protein, 13 aa, Homo sapiens
  CDR3 for alpha chain variable domain of TCR clone 262694 (TRAV30, TRAJ24)
CGTVTDSWGKLQF

SEQ ID NO: 525388 - protein, 16 aa, Homo sapiens
  CDR3 for beta chain variable domain of TCR clone 262694 (TRBV7-3, TRBJ2-1)
CASSLEGYRSYNEQFF

SEQ ID NO: 525389 - protein, 11 aa, Homo sapiens
  CDR3 for alpha chain variable domain of TCR clone 262695 (TRAV2, TRAJ13)
CASGGYQKVTF

SEQ ID NO: 525390 - protein, 15 aa, Homo sapiens
  CDR3 for beta chain variable domain of TCR clone 262695 (TRBV4-2, TRBJ2-1)
CASSQDVGLAGEQFF

SEQ ID NO: 525391 - protein, 12 aa, Homo sapiens
  CDR3 for alpha chain variable domain of TCR clone 262696 (TRAV27, TRAJ33)
CAGEDSNYQLIW

SEQ ID NO: 525392 - protein, 15 aa, Homo sapiens
  CDR3 for beta chain variable domain of TCR clone 262696 (TRBV20-1, TRBJ2-7)
CSTRGPLAGGREQYF

SEQ ID NO: 525393 - protein, 15 aa, Homo sapiens
  CDR3 for alpha chain variable domain of TCR clone 262697 (TRAV8-3, TRAJ45)
CASSYSGGGADGLTF

SEQ ID NO: 525394 - protein, 17 aa, Homo sapiens
  CDR3 for beta chain variable domain of TCR clone 262697 (TRBV27, TRBJ1-4)
CASSPRHATNEKLFLAV

SEQ ID NO: 525395 - protein, 14 aa, Homo sapiens
  CDR3 for alpha chain variable domain of TCR clone 262698 (TRAV12-3, TRAJ10)
SHLPLTGGGNKLTF

SEQ ID NO: 525396 - protein, 15 aa, Homo sapiens
  CDR3 for beta chain variable domain of TCR clone 262698 (TRBV27, TRBJ1-5)
CASSVGTGFDQPQHF

SEQ ID NO: 525397 - protein, 11 aa, Homo sapiens
  CDR3 for alpha chain variable domain of TCR clone 262699 (TRAV1-2, TRAJ40)
CAVPGTYKYIF

SEQ ID NO: 525398 - protein, 13 aa, Homo sapiens
  CDR3 for beta chain variable domain of TCR clone 262699 (TRBV27, TRBJ1-4)
CASSLMGDEKLSF

SEQ ID NO: 525399 - protein, 16 aa, Homo sapiens
  CDR3 for alpha chain variable domain of TCR clone 262700 (TRAV16, TRAJ42)
FALSGYYGGSQGNLIF

SEQ ID NO: 525400 - protein, 14 aa, Homo sapiens
  CDR3 for beta chain variable domain of TCR clone 262700 (TRBV3-1, TRBJ2-5)
CASSQAVRQETQYF

SEQ ID NO: 525401 - protein, 15 aa, Homo sapiens
  CDR3 for alpha chain variable domain of TCR clone 262701 (TRAV21, TRAJ53)
CATLNRGGSNYKLTF

SEQ ID NO: 525402 - protein, 13 aa, Homo sapiens
  CDR3 for beta chain variable domain of TCR clone 262701 (TRBV12-5, TRBJ2-1)
CASGLGRGNEQFF

SEQ ID NO: 525403 - protein, 15 aa, Homo sapiens
  CDR3 for alpha chain variable domain of TCR clone 262702 (TRAV16, TRAJ17)
CALSGQEAAGKQLTF

SEQ ID NO: 525404 - protein, 15 aa, Homo sapiens
  CDR3 for beta chain variable domain of TCR clone 262702 (TRBV12-4, TRBJ1-5)
CASTQETGPLQPQHF

SEQ ID NO: 525405 - protein, 23 aa, Homo sapiens
  CDR3 for alpha chain variable domain of TCR clone 262703 (TRAV26-1, TRAJ38)
CIADNAGNNHIQHPDPAAYQLRD

SEQ ID NO: 525406 - protein, 13 aa, Homo sapiens
  CDR3 for beta chain variable domain of TCR clone 262703 (TRBV20-1, TRBJ1-1)
CSARGGGNTEAFF

SEQ ID NO: 525407 - protein, 13 aa, Homo sapiens
  CDR3 for alpha chain variable domain of TCR clone 262704 (TRAV21, TRAJ27)
FAVRPGNAGKSTF

SEQ ID NO: 525408 - protein, 13 aa, Homo sapiens
  CDR3 for beta chain variable domain of TCR clone 262704 (TRBV7-3, TRBJ1-1)
CASSQDWGAEAFF

SEQ ID NO: 525409 - protein, 15 aa, Homo sapiens
  CDR3 for alpha chain variable domain of TCR clone 262705 (TRAV8-3, TRAJ27)
CAVGPSKTNAGKSTF

SEQ ID NO: 525410 - protein, 14 aa, Homo sapiens
  CDR3 for beta chain variable domain of TCR clone 262705 (TRBV28, TRBJ1-5)
CASSLFPGVQPQHF

SEQ ID NO: 525411 - protein, 12 aa, Homo sapiens
  CDR3 for alpha chain variable domain of TCR clone 262706 (TRAV12-2, TRAJ16)
CAVNLDGQKLLF

SEQ ID NO: 525412 - protein, 16 aa, Homo sapiens
  CDR3 for beta chain variable domain of TCR clone 262706 (TRBV7-9, TRBJ2-1)
CASSVVLTGQGNEQFF

SEQ ID NO: 525413 - protein, 13 aa, Homo sapiens
  CDR3 for alpha chain variable domain of TCR clone 262707 (TRAV23/DV6, TRAJ47)
CAASMTRGNKLVF

SEQ ID NO: 525414 - protein, 13 aa, Homo sapiens
  CDR3 for beta chain variable domain of TCR clone 262707 (TRBV10-3, TRBJ2-7)
CASKLAVNYEQYF

SEQ ID NO: 525415 - protein, 14 aa, Homo sapiens
  CDR3 for alpha chain variable domain of TCR clone 262708 (TRAV29/DV5, TRAJ36)
CAARRKTGANNLFF

SEQ ID NO: 525416 - protein, 15 aa, Homo sapiens
  CDR3 for beta chain variable domain of TCR clone 262708 (TRBV4-1, TRBJ2-5)
CASSRKAGPQETQYF

SEQ ID NO: 525417 - protein, 15 aa, Homo sapiens
  CDR3 for alpha chain variable domain of TCR clone 262709 (TRAV8-3, TRAJ45)
CASSYSGGGADGLTF

SEQ ID NO: 525418 - protein, 12 aa, Homo sapiens
  CDR3 for beta chain variable domain of TCR clone 262709 (TRBV5-1, TRBJ2-7)
CASSLDSYEQYF

SEQ ID NO: 525419 - protein, 14 aa, Homo sapiens
  CDR3 for alpha chain variable domain of TCR clone 262710 (TRAV20, TRAJ44)
CAVQETGTASKLTF

SEQ ID NO: 525420 - protein, 13 aa, Homo sapiens
  CDR3 for beta chain variable domain of TCR clone 262710 (TRBV29-1, TRBJ1-3)
CSAGTGRGNTIYF

SEQ ID NO: 525421 - protein, 11 aa, Homo sapiens
  CDR3 for alpha chain variable domain of TCR clone 262711 (TRAV27, TRAJ23)
CRPPCKGKLIF

SEQ ID NO: 525422 - protein, 14 aa, Homo sapiens
  CDR3 for beta chain variable domain of TCR clone 262711 (TRBV20-1, TRBJ1-1)
CSAQTRIGGTEAFF

SEQ ID NO: 525423 - protein, 12 aa, Homo sapiens
  CDR3 for alpha chain variable domain of TCR clone 262712 (TRAV12-3, TRAJ17)
CAMTLTGNKLTF

SEQ ID NO: 525424 - protein, 15 aa, Homo sapiens
  CDR3 for beta chain variable domain of TCR clone 262712 (TRBV7-2, TRBJ2-2)
CASSLAGGLTGELFF

SEQ ID NO: 525425 - protein, 13 aa, Homo sapiens
  CDR3 for alpha chain variable domain of TCR clone 262713 (TRAV16, TRAJ26)
CALSGSEFCLCSR

SEQ ID NO: 525426 - protein, 12 aa, Homo sapiens
  CDR3 for beta chain variable domain of TCR clone 262713 (TRBV11-2, TRBJ2-1)
CASSPGNNEQFF

SEQ ID NO: 525427 - protein, 15 aa, Homo sapiens
  CDR3 for alpha chain variable domain of TCR clone 262714 (TRAV1-2, TRAJ35)
CAVRDPGGFGNVLHC

SEQ ID NO: 525428 - protein, 17 aa, Homo sapiens
  CDR3 for beta chain variable domain of TCR clone 262714 (TRBV28, TRBJ2-3)
CASSPTPAGGRVDTQYF

SEQ ID NO: 525429 - protein, 12 aa, Homo sapiens
  CDR3 for alpha chain variable domain of TCR clone 262715 (TRAV12-3, TRAJ17)
CAMTLTSNKLTF

SEQ ID NO: 525430 - protein, 15 aa, Homo sapiens
  CDR3 for beta chain variable domain of TCR clone 262715 (TRBV29-1, TRBJ2-6)
CSFTGGRSGANVLTF

SEQ ID NO: 525431 - protein, 16 aa, Homo sapiens
  CDR3 for alpha chain variable domain of TCR clone 262716 (TRAV12-2, TRAJ32)
CAVNMNYGGATNKLIF

SEQ ID NO: 525432 - protein, 16 aa, Homo sapiens
  CDR3 for beta chain variable domain of TCR clone 262716 (TRBV7-8, TRBJ2-3)
CASSTEGQRETDTQYV

SEQ ID NO: 525433 - protein, 18 aa, Homo sapiens
  CDR3 for alpha chain variable domain of TCR clone 262717 (TRAV21, TRAJ52)
CAVMPSPAGGTSYGKLTF

SEQ ID NO: 525434 - protein, 17 aa, Homo sapiens
  CDR3 for beta chain variable domain of TCR clone 262717 (TRBV20-1, TRBJ2-2)
CSASGSGQGGLTGELFF

SEQ ID NO: 525435 - protein, 10 aa, Homo sapiens
  CDR3 for alpha chain variable domain of TCR clone 262718 (TRAV23/DV6, TRAJ9)
CASKYWRLQN

SEQ ID NO: 525436 - protein, 15 aa, Homo sapiens
  CDR3 for beta chain variable domain of TCR clone 262718 (TRBV6-1, TRBJ2-7)
CASTRTGDYYEQYFG

SEQ ID NO: 525437 - protein, 13 aa, Homo sapiens
  CDR3 for alpha chain variable domain of TCR clone 262719 (TRAV8-3, TRAJ43)
CAVGPDNNNDMRF

SEQ ID NO: 525438 - protein, 19 aa, Homo sapiens
  CDR3 for beta chain variable domain of TCR clone 262719 (TRBV25-1, TRBJ2-2)
CAILVYRVDRGRKAGELFF

SEQ ID NO: 525439 - protein, 12 aa, Homo sapiens
  CDR3 for alpha chain variable domain of TCR clone 262720 (TRAV12-3, TRAJ20)
CAMVRGDYKLSF

SEQ ID NO: 525440 - protein, 13 aa, Homo sapiens
  CDR3 for beta chain variable domain of TCR clone 262720 (TRBV7-3, TRBJ2-1)
CASSPVAYNEQFF

SEQ ID NO: 525441 - protein, 13 aa, Homo sapiens
  CDR3 for alpha chain variable domain of TCR clone 262721 (TRAV36/DV7, TRAJ37)
CAVFSSNTGKLIF

SEQ ID NO: 525442 - protein, 18 aa, Homo sapiens
  CDR3 for beta chain variable domain of TCR clone 262721 (TRBV11-2, TRBJ2-3)
CASSLGGASRGGPNTQYF

SEQ ID NO: 525443 - protein, 11 aa, Homo sapiens
  CDR3 for alpha chain variable domain of TCR clone 262722 (TRAV21, TRAJ48)
GAVDGNEKLTF

SEQ ID NO: 525444 - protein, 13 aa, Homo sapiens
  CDR3 for beta chain variable domain of TCR clone 262722 (TRBV12-4, TRBJ2-2)
CASSITGSGELFF

SEQ ID NO: 525445 - protein, 12 aa, Homo sapiens
  CDR3 for alpha chain variable domain of TCR clone 262723 (TRAV12-2, TRAJ10)
WGVTGGGNKLTF

SEQ ID NO: 525446 - protein, 15 aa, Homo sapiens
  CDR3 for beta chain variable domain of TCR clone 262723 (TRBV28, TRBJ2-7)
CASSPGGRSFYEQYF

SEQ ID NO: 525447 - protein, 13 aa, Homo sapiens
  CDR3 for alpha chain variable domain of TCR clone 262724 (TRAV13-2, TRAJ48)
CAEMDFGNEKLTF

SEQ ID NO: 525448 - protein, 13 aa, Homo sapiens
  CDR3 for beta chain variable domain of TCR clone 262724 (TRBV10-3, TRBJ2-7)
YASKLAVNYEQYF

SEQ ID NO: 525449 - protein, 15 aa, Homo sapiens
  CDR3 for alpha chain variable domain of TCR clone 262725 (TRAV8-4, TRAJ9)
CAVSDLGGGGFKTIF

SEQ ID NO: 525450 - protein, 14 aa, Homo sapiens
  CDR3 for beta chain variable domain of TCR clone 262725 (TRBV6-1, TRBJ1-3)
CASVQGGGGNTIYF

SEQ ID NO: 525451 - protein, 18 aa, Homo sapiens
  CDR3 for alpha chain variable domain of TCR clone 262726 (TRAV12-3, TRAJ52)
CAMSVGVAGGTSYGKLTF

SEQ ID NO: 525452 - protein, 16 aa, Homo sapiens
  CDR3 for beta chain variable domain of TCR clone 262726 (TRBV7-9, TRBJ1-2)
CASSISLDRGGYGYTF

SEQ ID NO: 525453 - protein, 13 aa, Homo sapiens
  CDR3 for alpha chain variable domain of TCR clone 262727 (TRAV39, TRAJ33)
CAANPDSHYQLIW

SEQ ID NO: 525454 - protein, 13 aa, Homo sapiens
  CDR3 for beta chain variable domain of TCR clone 262727 (TRBV18, TRBJ1-1)
CASSGGRNTEAFF

SEQ ID NO: 525455 - protein, 15 aa, Homo sapiens
  CDR3 for alpha chain variable domain of TCR clone 262728 (TRAV3, TRAJ13)
CAVRVYSGGYQKVTF

SEQ ID NO: 525456 - protein, 16 aa, Homo sapiens
  CDR3 for beta chain variable domain of TCR clone 262728 (TRBV19, TRBJ2-1)
CASSKAGPSSYNEQFF

SEQ ID NO: 525457 - protein, 13 aa, Homo sapiens
  CDR3 for alpha chain variable domain of TCR clone 262729 (TRAV1-1, TRAJ11)
CAVLNSGYSTLTF

SEQ ID NO: 525458 - protein, 17 aa, Homo sapiens
  CDR3 for beta chain variable domain of TCR clone 262729 (TRBV6-3, TRBJ2-2)
CASSYAGQGINTGELSF

SEQ ID NO: 525459 - protein, 15 aa, Homo sapiens
  CDR3 for alpha chain variable domain of TCR clone 262730 (TRAV3, TRAJ5)
CAVRDLDTGRRALTF

SEQ ID NO: 525460 - protein, 14 aa, Homo sapiens
  CDR3 for beta chain variable domain of TCR clone 262730 (TRBV25-1, TRBJ1-1)
CSSTHLGGNTEAFF

SEQ ID NO: 525461 - protein, 14 aa, Homo sapiens
  CDR3 for alpha chain variable domain of TCR clone 262731 (TRAV38-1, TRAJ40)
CALRPTSGTYKYIF

SEQ ID NO: 525462 - protein, 15 aa, Homo sapiens
  CDR3 for beta chain variable domain of TCR clone 262731 (TRBV7-3, TRBJ2-1)
CASSLSSGSFDEQFF

SEQ ID NO: 525463 - protein, 13 aa, Homo sapiens
  CDR3 for alpha chain variable domain of TCR clone 262732 (TRAV20, TRAJ37)
CAGCSSNTGKLIF

SEQ ID NO: 525464 - protein, 16 aa, Homo sapiens
  CDR3 for beta chain variable domain of TCR clone 262732 (TRBV12-4, TRBJ2-5)
CASGPRTSGNQETQYF

SEQ ID NO: 525465 - protein, 15 aa, Homo sapiens
  CDR3 for alpha chain variable domain of TCR clone 262733 (TRAV8-3, TRAJ45)
CASSSSGGGADGLTL

SEQ ID NO: 525466 - protein, 13 aa, Homo sapiens
  CDR3 for beta chain variable domain of TCR clone 262733 (TRBV10-3, TRBJ2-7)
CASKLAVNYEQYF

SEQ ID NO: 525467 - protein, 10 aa, Homo sapiens
  CDR3 for alpha chain variable domain of TCR clone 262734 (TRAV23/DV6, TRAJ43)
CAAAVSALEQ

SEQ ID NO: 525468 - protein, 13 aa, Homo sapiens
  CDR3 for beta chain variable domain of TCR clone 262734 (TRBV12-4, TRBJ1-2)
CASSLRQGKGYTF

SEQ ID NO: 525469 - protein, 13 aa, Homo sapiens
  CDR3 for alpha chain variable domain of TCR clone 262735 (TRAV17, TRAJ5)
CATGDTGRRALTF

SEQ ID NO: 525470 - protein, 13 aa, Homo sapiens
  CDR3 for beta chain variable domain of TCR clone 262735 (TRBV19, TRBJ1-5)
CASSIEPVQPHHF

SEQ ID NO: 525471 - protein, 13 aa, Homo sapiens
  CDR3 for alpha chain variable domain of TCR clone 262736 (TRAV3, TRAJ20)
CAVRDIGDYKLSF

SEQ ID NO: 525472 - protein, 12 aa, Homo sapiens
  CDR3 for beta chain variable domain of TCR clone 262736 (TRBV3-1, TRBJ1-2)
CASISGLYGYTF

SEQ ID NO: 525473 - protein, 15 aa, Homo sapiens
  CDR3 for alpha chain variable domain of TCR clone 262737 (TRAV8-3, TRAJ15)
CAVGAPNQAGTALIF

SEQ ID NO: 525474 - protein, 14 aa, Homo sapiens
  CDR3 for beta chain variable domain of TCR clone 262737 (TRBV12-4, TRBJ2-7)
CASSPAGLKYEQYF

SEQ ID NO: 525475 - protein, 14 aa, Homo sapiens
  CDR3 for alpha chain variable domain of TCR clone 262738 (TRAV38-1, TRAJ45)
CASHTGGGADGLTF

SEQ ID NO: 525476 - protein, 13 aa, Homo sapiens
  CDR3 for beta chain variable domain of TCR clone 262738 (TRBV10-3, TRBJ1-2)
CAISERDSYGYTF

SEQ ID NO: 525477 - protein, 15 aa, Homo sapiens
  CDR3 for alpha chain variable domain of TCR clone 262739 (TRAV17, TRAJ54)
CATEKLGKGAQKLVF

SEQ ID NO: 525478 - protein, 14 aa, Homo sapiens
  CDR3 for beta chain variable domain of TCR clone 262739 (TRBV7-3, TRBJ1-1)
CQQLRGQMNTEAFF

SEQ ID NO: 525479 - protein, 13 aa, Homo sapiens
  CDR3 for alpha chain variable domain of TCR clone 262740 (TRAV12-1, TRAJ16)
CVVNGPDGQQLLF

SEQ ID NO: 525480 - protein, 15 aa, Homo sapiens
  CDR3 for beta chain variable domain of TCR clone 262740 (TRBV6-3, TRBJ2-7)
CASSSPGTVFYEQYF

SEQ ID NO: 525481 - protein, 15 aa, Homo sapiens
  CDR3 for alpha chain variable domain of TCR clone 262741 (TRAV12-1, TRAJ8)
CVVNVENTGIRKLVF

SEQ ID NO: 525482 - protein, 16 aa, Homo sapiens
  CDR3 for beta chain variable domain of TCR clone 262741 (TRBV7-2, TRBJ2-7)
CASSLEAGGPWYEQYF

SEQ ID NO: 525483 - protein, 12 aa, Homo sapiens
  CDR3 for alpha chain variable domain of TCR clone 262742 (TRAV8-2, TRAJ5)
CVVSVIGRALTF

SEQ ID NO: 525484 - protein, 14 aa, Homo sapiens
  CDR3 for beta chain variable domain of TCR clone 262742 (TRBV19, TRBJ2-7)
CASNFRDTFTGMYF

SEQ ID NO: 525485 - protein, 19 aa, Homo sapiens
  CDR3 for alpha chain variable domain of TCR clone 262743 (TRAV1-2, TRAJ26)
CLLPLCCERPDNYGQNFVF

SEQ ID NO: 525486 - protein, 16 aa, Homo sapiens
  CDR3 for beta chain variable domain of TCR clone 262743 (TRBV27, TRBJ1-6)
CASSPGTGLMGSPLHF

SEQ ID NO: 525487 - protein, 12 aa, Homo sapiens
  CDR3 for alpha chain variable domain of TCR clone 262744 (TRAV5, TRAJ3)
CAEDSSASKIIF

SEQ ID NO: 525488 - protein, 17 aa, Homo sapiens
  CDR3 for beta chain variable domain of TCR clone 262744 (TRBV20-1, TRBJ2-1)
CSASSSGLAGSYNEQFF

SEQ ID NO: 525489 - protein, 15 aa, Homo sapiens
  CDR3 for alpha chain variable domain of TCR clone 262745 (TRAV3, TRAJ22)
CAVRDRGGSARQLTF

SEQ ID NO: 525490 - protein, 14 aa, Homo sapiens
  CDR3 for beta chain variable domain of TCR clone 262745 (TRBV19, TRBJ1-5)
CASSLGLIGQLQHF

SEQ ID NO: 525491 - protein, 15 aa, Homo sapiens
  CDR3 for alpha chain variable domain of TCR clone 262746 (TRAV35, TRAJ23)
CAGPLGNNQGGKLIF

SEQ ID NO: 525492 - protein, 14 aa, Homo sapiens
  CDR3 for beta chain variable domain of TCR clone 262746 (TRBV7-9, TRBJ1-1)
CASTPLQSYTEVFF

SEQ ID NO: 525493 - protein, 15 aa, Homo sapiens
  CDR3 for alpha chain variable domain of TCR clone 262747 (TRAV3, TRAJ5)
CAVRDLNTGRRALTF

SEQ ID NO: 525494 - protein, 13 aa, Homo sapiens
  CDR3 for beta chain variable domain of TCR clone 262747 (TRBV12-3, TRBJ2-7)
CASSPTETYEQYF

SEQ ID NO: 525495 - protein, 12 aa, Homo sapiens
  CDR3 for alpha chain variable domain of TCR clone 262748 (TRAV8-6, TRAJ43)
CAVRYNNNDIRF

SEQ ID NO: 525496 - protein, 17 aa, Homo sapiens
  CDR3 for beta chain variable domain of TCR clone 262748 (TRBV13, TRBJ2-3)
CASSLSRVAGGRNTQYF

SEQ ID NO: 525497 - protein, 14 aa, Homo sapiens
  CDR3 for alpha chain variable domain of TCR clone 262749 (TRAV1-1, TRAJ27)
CAVIYNTNAGKSTF

SEQ ID NO: 525498 - protein, 14 aa, Homo sapiens
  CDR3 for beta chain variable domain of TCR clone 262749 (TRBV7-8, TRBJ2-3)
CASSVEAGTDTQYF

SEQ ID NO: 525499 - protein, 14 aa, Homo sapiens
  CDR3 for alpha chain variable domain of TCR clone 262750 (TRAV9-2, TRAJ39)
CALYIYNAGNMLTY

SEQ ID NO: 525500 - protein, 16 aa, Homo sapiens
  CDR3 for beta chain variable domain of TCR clone 262750 (TRBV7-3, TRBJ2-2)
CASSLKRGTLSGELFF

SEQ ID NO: 525501 - protein, 11 aa, Homo sapiens
  CDR3 for alpha chain variable domain of TCR clone 262751 (TRAV17, TRAJ43)
CATDNNNDVRF

SEQ ID NO: 525502 - protein, 15 aa, Homo sapiens
  CDR3 for beta chain variable domain of TCR clone 262751 (TRBV20-1, TRBJ1-2)
CSAIRTGAFNYGYTF

SEQ ID NO: 525503 - protein, 13 aa, Homo sapiens
  CDR3 for alpha chain variable domain of TCR clone 262752 (TRAV12-2, TRAJ4)
CAGFSGGYNKLIF

SEQ ID NO: 525504 - protein, 16 aa, Homo sapiens
  CDR3 for beta chain variable domain of TCR clone 262752 (TRBV2, TRBJ1-3)
CASIRTGGSTGNNIYF

SEQ ID NO: 525505 - protein, 13 aa, Homo sapiens
  CDR3 for alpha chain variable domain of TCR clone 262753 (TRAV12-2, TRAJ47)
CAVTMEYGNKLVF

SEQ ID NO: 525506 - protein, 15 aa, Homo sapiens
  CDR3 for beta chain variable domain of TCR clone 262753 (TRBV9, TRBJ1-6)
CASSVAGTGDSPLHF

SEQ ID NO: 525507 - protein, 12 aa, Homo sapiens
  CDR3 for alpha chain variable domain of TCR clone 262754 (TRAV12-3, TRAJ17)
CAMTLTGNKLTF

SEQ ID NO: 525508 - protein, 16 aa, Homo sapiens
  CDR3 for beta chain variable domain of TCR clone 262754 (TRBV19, TRBJ2-1)
CASSKGGASSYNEQFF

SEQ ID NO: 525509 - protein, 12 aa, Homo sapiens
  CDR3 for alpha chain variable domain of TCR clone 262755 (TRAV36/DV7, TRAJ48)
CAGNFGNEKLTF

SEQ ID NO: 525510 - protein, 14 aa, Homo sapiens
  CDR3 for beta chain variable domain of TCR clone 262755 (TRBV19, TRBJ2-1)
CASPTFVLSGEQFF

SEQ ID NO: 525511 - protein, 18 aa, Homo sapiens
  CDR3 for alpha chain variable domain of TCR clone 262756 (TRAV26-2, TRAJ45)
CILRVDKYSGGGADGLTF

SEQ ID NO: 525512 - protein, 16 aa, Homo sapiens
  CDR3 for beta chain variable domain of TCR clone 262756 (TRBV7-3, TRBJ2-1)
CASSLEGYRSYNEQFF

SEQ ID NO: 525513 - protein, 17 aa, Homo sapiens
  CDR3 for alpha chain variable domain of TCR clone 262757 (TRAV26-1, TRAJ58)
CIVRVGAEETSSSRLTF

SEQ ID NO: 525514 - protein, 18 aa, Homo sapiens
  CDR3 for beta chain variable domain of TCR clone 262757 (TRBV7-9, TRBJ2-7)
CASSLTTSGSRTWYEQYF

SEQ ID NO: 525515 - protein, 14 aa, Homo sapiens
  CDR3 for alpha chain variable domain of TCR clone 262758 (TRAV12-2, TRAJ40)
CSVKIPSGTYKYIF

SEQ ID NO: 525516 - protein, 16 aa, Homo sapiens
  CDR3 for beta chain variable domain of TCR clone 262758 (TRBV10-3, TRBJ2-3)
CAISVSRLALTDTQYF

SEQ ID NO: 525517 - protein, 11 aa, Homo sapiens
  CDR3 for alpha chain variable domain of TCR clone 262759 (TRAV16, TRAJ31)
CALFNNARLMF

SEQ ID NO: 525518 - protein, 13 aa, Homo sapiens
  CDR3 for beta chain variable domain of TCR clone 262759 (TRBV7-9, TRBJ1-2)
CASSLKQNYGYTF

SEQ ID NO: 525519 - protein, 11 aa, Homo sapiens
  CDR3 for alpha chain variable domain of TCR clone 262760 (TRAV1-1, TRAJ23)
CAVRQGGKLSF

SEQ ID NO: 525520 - protein, 20 aa, Homo sapiens
  CDR3 for beta chain variable domain of TCR clone 262760 (TRBV7-8, TRBJ2-2)
CASSHLFPGPNIHITGELFF

SEQ ID NO: 525521 - protein, 14 aa, Homo sapiens
  CDR3 for alpha chain variable domain of TCR clone 262761 (TRAV29/DV5, TRAJ49)
CAASAQNTGNQFYF

SEQ ID NO: 525522 - protein, 16 aa, Homo sapiens
  CDR3 for beta chain variable domain of TCR clone 262761 (TRBV12-4, TRBJ1-5)
CASRQPVEGSNQHQHF

SEQ ID NO: 525523 - protein, 13 aa, Homo sapiens
  CDR3 for alpha chain variable domain of TCR clone 262762 (TRAV13-2, TRAJ13)
CAERPGGYQKVTS

SEQ ID NO: 525524 - protein, 14 aa, Homo sapiens
  CDR3 for beta chain variable domain of TCR clone 262762 (TRBV23-1, TRBJ2-5)
CASSFLRSQETQYF

SEQ ID NO: 525525 - protein, 14 aa, Homo sapiens
  CDR3 for alpha chain variable domain of TCR clone 262763 (TRAV27, TRAJ22)
CAGVVPGSSRQLTF

SEQ ID NO: 525526 - protein, 16 aa, Homo sapiens
  CDR3 for beta chain variable domain of TCR clone 262763 (TRBV9, TRBJ2-7)
CASSVGLGGGTYEQYF

SEQ ID NO: 525527 - protein, 15 aa, Homo sapiens
  CDR3 for alpha chain variable domain of TCR clone 262764 (TRAV4, TRAJ17)
CLVGDIGAAGNKLTF

SEQ ID NO: 525528 - protein, 14 aa, Homo sapiens
  CDR3 for beta chain variable domain of TCR clone 262764 (TRBV6-3, TRBJ2-7)
CASSYSVTVYEQYF

SEQ ID NO: 525529 - protein, 12 aa, Homo sapiens
  CDR3 for alpha chain variable domain of TCR clone 262765 (TRAV21, TRAJ29)
CAVTSGNTPLVF

SEQ ID NO: 525530 - protein, 15 aa, Homo sapiens
  CDR3 for beta chain variable domain of TCR clone 262765 (TRBV12-4, TRBJ1-2)
CASRLGLAGNYGYTF

SEQ ID NO: 525531 - protein, 13 aa, Homo sapiens
  CDR3 for alpha chain variable domain of TCR clone 262766 (TRAV13-1, TRAJ20)
CAARVSNDYKLSF

SEQ ID NO: 525532 - protein, 16 aa, Homo sapiens
  CDR3 for beta chain variable domain of TCR clone 262766 (TRBV12-5, TRBJ2-5)
CASGPRTSGNQETQYF

SEQ ID NO: 525533 - protein, 13 aa, Homo sapiens
  CDR3 for alpha chain variable domain of TCR clone 262767 (TRAV3, TRAJ20)
CAVRSLNDYKLSF

SEQ ID NO: 525534 - protein, 13 aa, Homo sapiens
  CDR3 for beta chain variable domain of TCR clone 262767 (TRBV7-9, TRBJ2-5)
CASLSPGQETQYF

SEQ ID NO: 525535 - protein, 13 aa, Homo sapiens
  CDR3 for alpha chain variable domain of TCR clone 262768 (TRAV8-3, TRAJ4)
WVFYSGGYNKLIF

SEQ ID NO: 525536 - protein, 15 aa, Homo sapiens
  CDR3 for beta chain variable domain of TCR clone 262768 (TRBV3-1, TRBJ2-1)
CASSQVVDDGEEQFF

SEQ ID NO: 525537 - protein, 11 aa, Homo sapiens
  CDR3 for alpha chain variable domain of TCR clone 262769 (TRAV23/DV6, TRAJ48)
CAPRWGEKLTF

SEQ ID NO: 525538 - protein, 17 aa, Homo sapiens
  CDR3 for beta chain variable domain of TCR clone 262769 (TRBV5-1, TRBJ2-5)
CASSFNPERGDQETQYF

SEQ ID NO: 525539 - protein, 14 aa, Homo sapiens
  CDR3 for alpha chain variable domain of TCR clone 262770 (TRAV12-2, TRAJ44)
CAVNKAGTASKLTF

SEQ ID NO: 525540 - protein, 13 aa, Homo sapiens
  CDR3 for beta chain variable domain of TCR clone 262770 (TRBV7-9, TRBJ2-3)
CASSPGSTDTQYF

SEQ ID NO: 525541 - protein, 15 aa, Homo sapiens
  CDR3 for alpha chain variable domain of TCR clone 262771 (TRAV27, TRAJ38)
CAGRFNSGNNRKLIW

SEQ ID NO: 525542 - protein, 14 aa, Homo sapiens
  CDR3 for beta chain variable domain of TCR clone 262771 (TRBV23-1, TRBJ2-5)
CASSFLRSQETQYF

SEQ ID NO: 525543 - protein, 15 aa, Homo sapiens
  CDR3 for alpha chain variable domain of TCR clone 262772 (TRAV3, TRAJ36)
CAVRASQTGANNLFF

SEQ ID NO: 525544 - protein, 14 aa, Homo sapiens
  CDR3 for beta chain variable domain of TCR clone 262772 (TRBV7-2, TRBJ1-6)
CASSLQGANSPLHF

SEQ ID NO: 525545 - protein, 16 aa, Homo sapiens
  CDR3 for alpha chain variable domain of TCR clone 262773 (TRAV3, TRAJ37)
CAVRGKGSGNTGKLIF

SEQ ID NO: 525546 - protein, 12 aa, Homo sapiens
  CDR3 for beta chain variable domain of TCR clone 262773 (TRBV12-4, TRBJ2-1)
CASSLVRVEQVF

SEQ ID NO: 525547 - protein, 14 aa, Homo sapiens
  CDR3 for alpha chain variable domain of TCR clone 262774 (TRAV13-1, TRAJ35)
CAARKGGFGNVLHC

SEQ ID NO: 525548 - protein, 14 aa, Homo sapiens
  CDR3 for beta chain variable domain of TCR clone 262774 (TRBV7-2, TRBJ2-7)
CASSPKTSFYEQYF

SEQ ID NO: 525549 - protein, 12 aa, Homo sapiens
  CDR3 for alpha chain variable domain of TCR clone 262775 (TRAV13-1, TRAJ48)
CAANFGNEKLTF

SEQ ID NO: 525550 - protein, 15 aa, Homo sapiens
  CDR3 for beta chain variable domain of TCR clone 262775 (TRBV7-2, TRBJ2-1)
CASSSGLAGGNEQFF

SEQ ID NO: 525551 - protein, 13 aa, Homo sapiens
  CDR3 for alpha chain variable domain of TCR clone 262776 (TRAV12-2, TRAJ26)
CAVTDPYGPNFVF

SEQ ID NO: 525552 - protein, 12 aa, Homo sapiens
  CDR3 for beta chain variable domain of TCR clone 262776 (TRBV18, TRBJ2-7)
CASADVGGEQYF

SEQ ID NO: 525553 - protein, 14 aa, Homo sapiens
  CDR3 for alpha chain variable domain of TCR clone 262777 (TRAV1-2, TRAJ16)
CAVNRFSDGQKLLF

SEQ ID NO: 525554 - protein, 16 aa, Homo sapiens
  CDR3 for beta chain variable domain of TCR clone 262777 (TRBV20-1, TRBJ1-4)
CSARPYGGELNENLFF

SEQ ID NO: 525555 - protein, 11 aa, Homo sapiens
  CDR3 for alpha chain variable domain of TCR clone 262778 (TRAV12-3, TRAJ6)
CAMSGSYIPTF

SEQ ID NO: 525556 - protein, 12 aa, Homo sapiens
  CDR3 for beta chain variable domain of TCR clone 262778 (TRBV24-1, TRBJ1-1)
CATLYPDTEAFF

SEQ ID NO: 525557 - protein, 13 aa, Homo sapiens
  CDR3 for alpha chain variable domain of TCR clone 262779 (TRAV27, TRAJ41)
CAGEGNSGYALNF

SEQ ID NO: 525558 - protein, 12 aa, Homo sapiens
  CDR3 for beta chain variable domain of TCR clone 262779 (TRBV5-1, TRBJ2-5)
CASSLGLETQYF

SEQ ID NO: 525559 - protein, 15 aa, Homo sapiens
  CDR3 for alpha chain variable domain of TCR clone 262780 (TRAV3, TRAJ9)
CAVRDKNPRGFKTIF

SEQ ID NO: 525560 - protein, 15 aa, Homo sapiens
  CDR3 for beta chain variable domain of TCR clone 262780 (TRBV5-1, TRBJ2-5)
CASSETAGAQETQYF

SEQ ID NO: 525561 - protein, 14 aa, Homo sapiens
  CDR3 for alpha chain variable domain of TCR clone 262781 (TRAV17, TRAJ6)
CATDERRGSYIPKF

SEQ ID NO: 525562 - protein, 13 aa, Homo sapiens
  CDR3 for beta chain variable domain of TCR clone 262781 (TRBV27, TRBJ2-1)
CASSLGRIWGQFF

SEQ ID NO: 525563 - protein, 23 aa, Homo sapiens
  CDR3 for alpha chain variable domain of TCR clone 262782 (TRAV12-1, TRAJ26)
CVVAYGQNFVLVPEPACPCCPIS

SEQ ID NO: 525564 - protein, 15 aa, Homo sapiens
  CDR3 for beta chain variable domain of TCR clone 262782 (TRBV12-4, TRBJ2-5)
CASSGTGQAQETQYF

SEQ ID NO: 525565 - protein, 16 aa, Homo sapiens
  CDR3 for alpha chain variable domain of TCR clone 262783 (TRAV3, TRAJ10)
CAVRDMNAGGGNKLTF

SEQ ID NO: 525566 - protein, 13 aa, Homo sapiens
  CDR3 for beta chain variable domain of TCR clone 262783 (TRBV19, TRBJ2-7)
CASSIRSSYEQYF

SEQ ID NO: 525567 - protein, 11 aa, Homo sapiens
  CDR3 for alpha chain variable domain of TCR clone 262784 (TRAV12-3, TRAJ27)
CAMANACRSTF

SEQ ID NO: 525568 - protein, 13 aa, Homo sapiens
  CDR3 for beta chain variable domain of TCR clone 262784 (TRBV20-1, TRBJ1-1)
CSARVGGNTEAFF

SEQ ID NO: 525569 - protein, 13 aa, Homo sapiens
  CDR3 for alpha chain variable domain of TCR clone 262785 (TRAV13-2, TRAJ48)
CAEMDFGNEKLTF

SEQ ID NO: 525570 - protein, 13 aa, Homo sapiens
  CDR3 for beta chain variable domain of TCR clone 262785 (TRBV7-9, TRBJ1-2)
CASSLKQNYGYTL

SEQ ID NO: 525571 - protein, 13 aa, Homo sapiens
  CDR3 for alpha chain variable domain of TCR clone 262786 (TRAV21, TRAJ20)
CAVGLRVDYKLSF

SEQ ID NO: 525572 - protein, 14 aa, Homo sapiens
  CDR3 for beta chain variable domain of TCR clone 262786 (TRBV6-1, TRBJ2-1)
CASAKDGFYNEQFF

SEQ ID NO: 525573 - protein, 12 aa, Homo sapiens
  CDR3 for alpha chain variable domain of TCR clone 262787 (TRAV12-3, TRAJ17)
CAMTLTGNKLTF

SEQ ID NO: 525574 - protein, 13 aa, Homo sapiens
  CDR3 for beta chain variable domain of TCR clone 262787 (TRBV27, TRBJ2-1)
CASRTRGVGEQFF

SEQ ID NO: 525575 - protein, 12 aa, Homo sapiens
  CDR3 for alpha chain variable domain of TCR clone 262788 (TRAV17, TRAJ20)
CATDGDDYKLSF

SEQ ID NO: 525576 - protein, 23 aa, Homo sapiens
  CDR3 for beta chain variable domain of TCR clone 262788 (TRBV6-5, TRBJ2-5)
CASSYSQAGGVLPRDPVLRARHA

SEQ ID NO: 525577 - protein, 14 aa, Homo sapiens
  CDR3 for alpha chain variable domain of TCR clone 262789 (TRAV27, TRAJ22)
CAGVVPGSARQLTF

SEQ ID NO: 525578 - protein, 15 aa, Homo sapiens
  CDR3 for beta chain variable domain of TCR clone 262789 (TRBV5-1, TRBJ2-3)
CASSSTSGSTDTQYF

SEQ ID NO: 525579 - protein, 13 aa, Homo sapiens
  CDR3 for alpha chain variable domain of TCR clone 262790 (TRAV21, TRAJ27)
CAALNTNAGKSTF

SEQ ID NO: 525580 - protein, 14 aa, Homo sapiens
  CDR3 for beta chain variable domain of TCR clone 262790 (TRBV27, TRBJ1-1)
CASSSLSGLSEAFF

SEQ ID NO: 525581 - protein, 14 aa, Homo sapiens
  CDR3 for alpha chain variable domain of TCR clone 262791 (TRAV17, TRAJ22)
CATSPSGSARQLTF

SEQ ID NO: 525582 - protein, 15 aa, Homo sapiens
  CDR3 for beta chain variable domain of TCR clone 262791 (TRBV4-1, TRBJ2-5)
CASSQWDLNQETQYF

SEQ ID NO: 525583 - protein, 16 aa, Homo sapiens
  CDR3 for alpha chain variable domain of TCR clone 262792 (TRAV14/DV4, TRAJ53)
CAMREGGGGSNYKLTF

SEQ ID NO: 525584 - protein, 15 aa, Homo sapiens
  CDR3 for beta chain variable domain of TCR clone 262792 (TRBV28, TRBJ2-3)
CASTPRGENTDTQYF

SEQ ID NO: 525585 - protein, 15 aa, Homo sapiens
  CDR3 for alpha chain variable domain of TCR clone 262793 (TRAV12-2, TRAJ9)
CAVNGGYTGGFKTIF

SEQ ID NO: 525586 - protein, 14 aa, Homo sapiens
  CDR3 for beta chain variable domain of TCR clone 262793 (TRBV18, TRBJ2-3)
CASSRNRGTDTQYF

SEQ ID NO: 525587 - protein, 14 aa, Homo sapiens
  CDR3 for alpha chain variable domain of TCR clone 262794 (TRAV12-2, TRAJ17)
CAVLFKAAGNKLTF

SEQ ID NO: 525588 - protein, 17 aa, Homo sapiens
  CDR3 for beta chain variable domain of TCR clone 262794 (TRBV20-1, TRBJ2-2)
CSASGSGQGGFPGELFF

SEQ ID NO: 525589 - protein, 15 aa, Homo sapiens
  CDR3 for alpha chain variable domain of TCR clone 262795 (TRAV21, TRAJ53)
CATLNSGGSNYKLTL

SEQ ID NO: 525590 - protein, 15 aa, Homo sapiens
  CDR3 for beta chain variable domain of TCR clone 262795 (TRBV11-3, TRBJ2-3)
CASSAGTVVTNTQYF

SEQ ID NO: 525591 - protein, 14 aa, Homo sapiens
  CDR3 for alpha chain variable domain of TCR clone 262796 (TRAV26-1, TRAJ39)
CIVRGSRAGNMLTV

SEQ ID NO: 525592 - protein, 13 aa, Homo sapiens
  CDR3 for beta chain variable domain of TCR clone 262796 (TRBV7-9, TRBJ1-2)
CASSLKQNYGYTF

SEQ ID NO: 525593 - protein, 13 aa, Homo sapiens
  CDR3 for alpha chain variable domain of TCR clone 262797 (TRAV39, TRAJ48)
CAAVNFGNEKLTF

SEQ ID NO: 525594 - protein, 16 aa, Homo sapiens
  CDR3 for beta chain variable domain of TCR clone 262797 (TRBV7-3, TRBJ2-2)
CASSLKRGTLSGELFF

SEQ ID NO: 525595 - protein, 20 aa, Homo sapiens
  CDR3 for alpha chain variable domain of TCR clone 262798 (TRAV1-1, TRAJ39)
CLLLLRCESSAYNVGNMLTF

SEQ ID NO: 525596 - protein, 13 aa, Homo sapiens
  CDR3 for beta chain variable domain of TCR clone 262798 (TRBV12-4, TRBJ1-5)
CASSPDRAQPQHF

SEQ ID NO: 525597 - protein, 14 aa, Homo sapiens
  CDR3 for alpha chain variable domain of TCR clone 262799 (TRAV1-2, TRAJ16)
CAVNRFSDGQKLPF

SEQ ID NO: 525598 - protein, 15 aa, Homo sapiens
  CDR3 for beta chain variable domain of TCR clone 262799 (TRBV27, TRBJ2-3)
CASSSLAGVIDTQYF

SEQ ID NO: 525599 - protein, 15 aa, Homo sapiens
  CDR3 for alpha chain variable domain of TCR clone 262800 (TRAV12-3, TRAJ6)
CAVSATTGGSYIPTF

SEQ ID NO: 525600 - protein, 16 aa, Homo sapiens
  CDR3 for beta chain variable domain of TCR clone 262800 (TRBV20-1, TRBJ1-2)
CSASMGQGVANYGYTF

SEQ ID NO: 525601 - protein, 13 aa, Homo sapiens
  CDR3 for alpha chain variable domain of TCR clone 262801 (TRAV16, TRAJ10)
CALLTGGGNKRTF

SEQ ID NO: 525602 - protein, 12 aa, Homo sapiens
  CDR3 for beta chain variable domain of TCR clone 262801 (TRBV28, TRBJ2-7)
CASTGNHYEQYF

SEQ ID NO: 525603 - protein, 16 aa, Homo sapiens
  CDR3 for alpha chain variable domain of TCR clone 262802 (TRAV21, TRAJ35)
CAVMPIGFGNVLHCVS

SEQ ID NO: 525604 - protein, 12 aa, Homo sapiens
  CDR3 for beta chain variable domain of TCR clone 262802 (TRBV7-9, TRBJ2-7)
CASSIKREEQYF

SEQ ID NO: 525605 - protein, 14 aa, Homo sapiens
  CDR3 for alpha chain variable domain of TCR clone 262803 (TRAV12-3, TRAJ10)
SHLPLTGGGNKLTF

SEQ ID NO: 525606 - protein, 16 aa, Homo sapiens
  CDR3 for beta chain variable domain of TCR clone 262803 (TRBV19, TRBJ2-1)
CASSKAGPSSCNEQFF

SEQ ID NO: 525607 - protein, 15 aa, Homo sapiens
  CDR3 for alpha chain variable domain of TCR clone 262804 (TRAV26-1, TRAJ58)
CIVRIQETSGSRLNF

SEQ ID NO: 525608 - protein, 13 aa, Homo sapiens
  CDR3 for beta chain variable domain of TCR clone 262804 (TRBV6-5, TRBJ2-1)
CASIGETSKREFF

SEQ ID NO: 525609 - protein, 12 aa, Homo sapiens
  CDR3 for alpha chain variable domain of TCR clone 262805 (TRAV13-1, TRAJ53)
AASGGSIYKLTF

SEQ ID NO: 525610 - protein, 15 aa, Homo sapiens
  CDR3 for beta chain variable domain of TCR clone 262805 (TRBV5-1, TRBJ2-1)
CASSPPRAPYNEQFF

SEQ ID NO: 525611 - protein, 13 aa, Homo sapiens
  CDR3 for alpha chain variable domain of TCR clone 262806 (TRAV12-3, TRAJ33)
CAMSVNSNYQLIW

SEQ ID NO: 525612 - protein, 16 aa, Homo sapiens
  CDR3 for beta chain variable domain of TCR clone 262806 (TRBV7-3, TRBJ2-3)
CASSLSGYRPEYTQYF

SEQ ID NO: 525613 - protein, 17 aa, Homo sapiens
  CDR3 for alpha chain variable domain of TCR clone 262807 (TRAV8-6, TRAJ58)
CAVSSWVGETSGSRFTF

SEQ ID NO: 525614 - protein, 17 aa, Homo sapiens
  CDR3 for beta chain variable domain of TCR clone 262807 (TRBV11-2, TRBJ2-1)
CASSLYPPGVEYNEQFF

SEQ ID NO: 525615 - protein, 13 aa, Homo sapiens
  CDR3 for alpha chain variable domain of TCR clone 262808 (TRAV1-2, TRAJ31)
CAVRGYNNARLMF

SEQ ID NO: 525616 - protein, 16 aa, Homo sapiens
  CDR3 for beta chain variable domain of TCR clone 262808 (TRBV19, TRBJ2-1)
CASSKAGPSSYNEQFF

SEQ ID NO: 525617 - protein, 11 aa, Homo sapiens
  CDR3 for alpha chain variable domain of TCR clone 262809 (TRAV25, TRAJ41)
CARNSGYALNF

SEQ ID NO: 525618 - protein, 16 aa, Homo sapiens
  CDR3 for beta chain variable domain of TCR clone 262809 (TRBV19, TRBJ1-6)
CASSVAPVAGNSPLHF

SEQ ID NO: 525619 - protein, 11 aa, Homo sapiens
  CDR3 for alpha chain variable domain of TCR clone 262810 (TRAV21, TRAJ48)
CAVDGNEKLTF

SEQ ID NO: 525620 - protein, 16 aa, Homo sapiens
  CDR3 for beta chain variable domain of TCR clone 262810 (TRBV12-4, TRBJ1-5)
CASSSGPRGSNKPQHV

SEQ ID NO: 525621 - protein, 14 aa, Homo sapiens
  CDR3 for alpha chain variable domain of TCR clone 262811 (TRAV14/DV4, TRAJ20)
CAMRESLNDYKPSF

SEQ ID NO: 525622 - protein, 14 aa, Homo sapiens
  CDR3 for beta chain variable domain of TCR clone 262811 (TRBV4-1, TRBJ2-2)
CASSQAVNTGELFF

SEQ ID NO: 525623 - protein, 23 aa, Homo sapiens
  CDR3 for alpha chain variable domain of TCR clone 262812 (TRAV30, TRAJ43)
CTLRPPSSVTQEPTSAALSDMRF

SEQ ID NO: 525624 - protein, 13 aa, Homo sapiens
  CDR3 for beta chain variable domain of TCR clone 262812 (TRBV12-4, TRBJ2-2)
CARSITGSGELFF

SEQ ID NO: 525625 - protein, 10 aa, Homo sapiens
  CDR3 for alpha chain variable domain of TCR clone 262813 (TRAV23/DV6, TRAJ57)
CAASSTLSQG

SEQ ID NO: 525626 - protein, 13 aa, Homo sapiens
  CDR3 for beta chain variable domain of TCR clone 262813 (TRBV27, TRBJ1-4)
CASSLMGDEKLFF

SEQ ID NO: 525627 - protein, 14 aa, Homo sapiens
  CDR3 for alpha chain variable domain of TCR clone 262814 (TRAV12-2, TRAJ9)
CAVNALEGGFKTIF

SEQ ID NO: 525628 - protein, 16 aa, Homo sapiens
  CDR3 for beta chain variable domain of TCR clone 262814 (TRBV19, TRBJ1-6)
CASSVAPVAGNSPLHV

SEQ ID NO: 525629 - protein, 14 aa, Homo sapiens
  CDR3 for alpha chain variable domain of TCR clone 262815 (TRAV12-1, TRAJ4)
CVVPLKSGYNKLIF

SEQ ID NO: 525630 - protein, 13 aa, Homo sapiens
  CDR3 for beta chain variable domain of TCR clone 262815 (TRBV27, TRBJ2-7)
CASGRGGAYEQYV

SEQ ID NO: 525631 - protein, 13 aa, Homo sapiens
  CDR3 for alpha chain variable domain of TCR clone 262816 (TRAV2, TRAJ15)
CAVASQAGTALIF

SEQ ID NO: 525632 - protein, 20 aa, Homo sapiens
  CDR3 for beta chain variable domain of TCR clone 262816 (TRBV7-9, TRBJ2-1)
CASSSPRAPRTRSSYNEQFF

SEQ ID NO: 525633 - protein, 11 aa, Homo sapiens
  CDR3 for alpha chain variable domain of TCR clone 262817 (TRAV29/DV5, TRAJ49)
CAAVPGNQFYF

SEQ ID NO: 525634 - protein, 17 aa, Homo sapiens
  CDR3 for beta chain variable domain of TCR clone 262817 (TRBV4-2, TRBJ1-1)
CASTPFGGGSGNTEAFF

SEQ ID NO: 525635 - protein, 13 aa, Homo sapiens
  CDR3 for alpha chain variable domain of TCR clone 262818 (TRAV12-2, TRAJ10)
CAVPTGGGNKLTF

SEQ ID NO: 525636 - protein, 13 aa, Homo sapiens
  CDR3 for beta chain variable domain of TCR clone 262818 (TRBV20-1, TRBJ2-7)
CSARAGGTYEQYF

SEQ ID NO: 525637 - protein, 12 aa, Homo sapiens
  CDR3 for alpha chain variable domain of TCR clone 262819 (TRAV26-1, TRAJ34)
CILRISSDKLIF

SEQ ID NO: 525638 - protein, 15 aa, Homo sapiens
  CDR3 for beta chain variable domain of TCR clone 262819 (TRBV18, TRBJ2-7)
CASSPRGGKGYEQYF

SEQ ID NO: 525639 - protein, 12 aa, Homo sapiens
  CDR3 for alpha chain variable domain of TCR clone 262820 (TRAV17, TRAJ12)
CATLRSSYKLIF

SEQ ID NO: 525640 - protein, 12 aa, Homo sapiens
  CDR3 for beta chain variable domain of TCR clone 262820 (TRBV28, TRBJ2-7)
CASSLRSYEQYF

SEQ ID NO: 525641 - protein, 12 aa, Homo sapiens
  CDR3 for alpha chain variable domain of TCR clone 262821 (TRAV16, TRAJ26)
CALTRWSEFFLW

SEQ ID NO: 525642 - protein, 13 aa, Homo sapiens
  CDR3 for beta chain variable domain of TCR clone 262821 (TRBV4-1, TRBJ2-2)
CASSQENTGELFF

SEQ ID NO: 525643 - protein, 20 aa, Homo sapiens
  CDR3 for alpha chain variable domain of TCR clone 262822 (TRAV26-1, TRAJ42)
CYVLLHRQTYYGGSQGNLIF

SEQ ID NO: 525644 - protein, 16 aa, Homo sapiens
  CDR3 for beta chain variable domain of TCR clone 262822 (TRBV7-3, TRBJ2-2)
CASSLKRGTLAGELFF

SEQ ID NO: 525645 - protein, 14 aa, Homo sapiens
  CDR3 for alpha chain variable domain of TCR clone 262823 (TRAV16, TRAJ17)
CALSGRAAGNKLTF

SEQ ID NO: 525646 - protein, 15 aa, Homo sapiens
  CDR3 for beta chain variable domain of TCR clone 262823 (TRBV3-1, TRBJ1-2)
CSSSPTRLPEGGYTF

SEQ ID NO: 525647 - protein, 15 aa, Homo sapiens
  CDR3 for alpha chain variable domain of TCR clone 262824 (TRAV8-3, TRAJ11)
CAVGMLNSGYSTLTF

SEQ ID NO: 525648 - protein, 15 aa, Homo sapiens
  CDR3 for beta chain variable domain of TCR clone 262824 (TRBV13, TRBJ2-1)
CASSLLSGLNNEQFF

SEQ ID NO: 525649 - protein, 15 aa, Homo sapiens
  CDR3 for alpha chain variable domain of TCR clone 262825 (TRAV13-2, TRAJ16)
CAENDRFSDGQKLLF

SEQ ID NO: 525650 - protein, 14 aa, Homo sapiens
  CDR3 for beta chain variable domain of TCR clone 262825 (TRBV7-2, TRBJ2-7)
CASRSQGAAYEQYF

SEQ ID NO: 525651 - protein, 18 aa, Homo sapiens
  CDR3 for alpha chain variable domain of TCR clone 262826 (TRAV2, TRAJ32)
CCLLLCLHSGGATNKLIF

SEQ ID NO: 525652 - protein, 16 aa, Homo sapiens
  CDR3 for beta chain variable domain of TCR clone 262826 (TRBV7-9, TRBJ2-7)
CASSYPDREGGYEQYF

SEQ ID NO: 525653 - protein, 15 aa, Homo sapiens
  CDR3 for alpha chain variable domain of TCR clone 262827 (TRAV17, TRAJ52)
CATEAGGTSYGRLTF

SEQ ID NO: 525654 - protein, 16 aa, Homo sapiens
  CDR3 for beta chain variable domain of TCR clone 262827 (TRBV20-1, TRBJ2-1)
CSAGRPAGGPYNEQFF

SEQ ID NO: 525655 - protein, 16 aa, Homo sapiens
  CDR3 for alpha chain variable domain of TCR clone 262828 (TRAV20, TRAJ10)
CHVLRGLTGGGNKLTF

SEQ ID NO: 525656 - protein, 14 aa, Homo sapiens
  CDR3 for beta chain variable domain of TCR clone 262828 (TRBV19, TRBJ1-5)
CASRAPDSFLSQHF

SEQ ID NO: 525657 - protein, 13 aa, Homo sapiens
  CDR3 for alpha chain variable domain of TCR clone 262829 (TRAV2, TRAJ40)
CAVVTSGTYKYIF

SEQ ID NO: 525658 - protein, 14 aa, Homo sapiens
  CDR3 for beta chain variable domain of TCR clone 262829 (TRBV7-6, TRBJ2-7)
CASSFRQGADEQYF

SEQ ID NO: 525659 - protein, 12 aa, Homo sapiens
  CDR3 for alpha chain variable domain of TCR clone 262830 (TRAV26-1, TRAJ13)
CIVSRGYRKVTF

SEQ ID NO: 525660 - protein, 14 aa, Homo sapiens
  CDR3 for beta chain variable domain of TCR clone 262830 (TRBV7-2, TRBJ2-7)
CASSSKTSFYEQYF

SEQ ID NO: 525661 - protein, 15 aa, Homo sapiens
  CDR3 for alpha chain variable domain of TCR clone 262831 (TRAV12-3, TRAJ6)
CAMSTTTGGSYIPTF

SEQ ID NO: 525662 - protein, 16 aa, Homo sapiens
  CDR3 for beta chain variable domain of TCR clone 262831 (TRBV20-1, TRBJ1-2)
CSASMGQGVANYGYIF

SEQ ID NO: 525663 - protein, 11 aa, Homo sapiens
  CDR3 for alpha chain variable domain of TCR clone 262832 (TRAV13-2, TRAJ29)
CAENNGTPLVF

SEQ ID NO: 525664 - protein, 13 aa, Homo sapiens
  CDR3 for beta chain variable domain of TCR clone 262832 (TRBV7-6, TRBJ1-2)
CASSLVADYGYTF

SEQ ID NO: 525665 - protein, 15 aa, Homo sapiens
  CDR3 for alpha chain variable domain of TCR clone 262833 (TRAV12-1, TRAJ47)
CVVTNRLKGGNKLFF

SEQ ID NO: 525666 - protein, 19 aa, Homo sapiens
  CDR3 for beta chain variable domain of TCR clone 262833 (TRBV20-1, TRBJ2-5)
CSARPQGLAGTSKSGTQYF

SEQ ID NO: 525667 - protein, 12 aa, Homo sapiens
  CDR3 for alpha chain variable domain of TCR clone 262834 (TRAV8-3, TRAJ20)
CAVGGGDYKLSF

SEQ ID NO: 525668 - protein, 17 aa, Homo sapiens
  CDR3 for beta chain variable domain of TCR clone 262834 (TRBV11-2, TRBJ2-1)
CASSLYPPGVEYNEQFF

SEQ ID NO: 525669 - protein, 15 aa, Homo sapiens
  CDR3 for alpha chain variable domain of TCR clone 262835 (TRAV38-2/DV8, TRAJ31)
CAYRTATRNNARLMF

SEQ ID NO: 525670 - protein, 13 aa, Homo sapiens
  CDR3 for beta chain variable domain of TCR clone 262835 (TRBV28, TRBJ2-1)
CASSPLPSSEQFF

SEQ ID NO: 525671 - protein, 15 aa, Homo sapiens
  CDR3 for alpha chain variable domain of TCR clone 262836 (TRAV12-1, TRAJ47)
CVVTNRLKGGNKLVF

SEQ ID NO: 525672 - protein, 14 aa, Homo sapiens
  CDR3 for beta chain variable domain of TCR clone 262836 (TRBV20-1, TRBJ2-5)
CSARPQGLAGTSKS

SEQ ID NO: 525673 - protein, 14 aa, Homo sapiens
  CDR3 for alpha chain variable domain of TCR clone 262837 (TRAV26-1, TRAJ5)
CIVRVRCNRRALTF

SEQ ID NO: 525674 - protein, 17 aa, Homo sapiens
  CDR3 for beta chain variable domain of TCR clone 262837 (TRBV29-1, TRBJ2-3)
CSVEVLAGETSTDTQYF

SEQ ID NO: 525675 - protein, 15 aa, Homo sapiens
  CDR3 for alpha chain variable domain of TCR clone 262838 (TRAV2, TRAJ9)
CAVEDRGTGGCKTIF

SEQ ID NO: 525676 - protein, 19 aa, Homo sapiens
  CDR3 for beta chain variable domain of TCR clone 262838 (TRBV28, TRBJ2-7)
CASSYSGTSRLGWVYEQYF

SEQ ID NO: 525677 - protein, 13 aa, Homo sapiens
  CDR3 for alpha chain variable domain of TCR clone 262839 (TRAV12-3, TRAJ40)
CAMSDSGTYKYIF

SEQ ID NO: 525678 - protein, 22 aa, Homo sapiens
  CDR3 for beta chain variable domain of TCR clone 262839 (TRBV14, TRBJ1-5)
CASSQDGVTPYLPPIGNQPKHF

SEQ ID NO: 525679 - protein, 16 aa, Homo sapiens
  CDR3 for alpha chain variable domain of TCR clone 262840 (TRAV4, TRAJ9)
CLVGDPNRPGGFKTIF

SEQ ID NO: 525680 - protein, 20 aa, Homo sapiens
  CDR3 for beta chain variable domain of TCR clone 262840 (TRBV28, TRBJ2-1)
CASTPIGRSPGLAGGNEQFF

SEQ ID NO: 525681 - protein, 13 aa, Homo sapiens
  CDR3 for alpha chain variable domain of TCR clone 262841 (TRAV12-1, TRAJ9)
CVVLNTGGFKTIF

SEQ ID NO: 525682 - protein, 13 aa, Homo sapiens
  CDR3 for beta chain variable domain of TCR clone 262841 (TRBV20-1, TRBJ1-1)
CSARGGGNTEAFF

SEQ ID NO: 525683 - protein, 14 aa, Homo sapiens
  CDR3 for alpha chain variable domain of TCR clone 262842 (TRAV8-4, TRAJ54)
CAVSEVLGAQKLVF

SEQ ID NO: 525684 - protein, 13 aa, Homo sapiens
  CDR3 for beta chain variable domain of TCR clone 262842 (TRBV27, TRBJ2-7)
CASSCVSSYEQYF

SEQ ID NO: 525685 - protein, 14 aa, Homo sapiens
  CDR3 for alpha chain variable domain of TCR clone 262843 (TRAV12-2, TRAJ13)
CAVKTTGGYQKVTF

SEQ ID NO: 525686 - protein, 15 aa, Homo sapiens
  CDR3 for beta chain variable domain of TCR clone 262843 (TRBV27, TRBJ2-1)
CASRNGGGSSNEQFF

SEQ ID NO: 525687 - protein, 14 aa, Homo sapiens
  CDR3 for alpha chain variable domain of TCR clone 262844 (TRAV12-3, TRAJ9)
CAKSVETGGFKTIF

SEQ ID NO: 525688 - protein, 14 aa, Homo sapiens
  CDR3 for beta chain variable domain of TCR clone 262844 (TRBV7-2, TRBJ2-7)
CASRSQGAAYEQYF

SEQ ID NO: 525689 - protein, 12 aa, Homo sapiens
  CDR3 for alpha chain variable domain of TCR clone 262845 (TRAV2, TRAJ9)
CAVGDGGFKTIF

SEQ ID NO: 525690 - protein, 14 aa, Homo sapiens
  CDR3 for beta chain variable domain of TCR clone 262845 (TRBV6-1, TRBJ1-3)
CASVQGGGGNTIYF

SEQ ID NO: 525691 - protein, 17 aa, Homo sapiens
  CDR3 for alpha chain variable domain of TCR clone 262846 (TRAV27, TRAJ36)
SLVIQPSTPAGANNLFF

SEQ ID NO: 525692 - protein, 13 aa, Homo sapiens
  CDR3 for beta chain variable domain of TCR clone 262846 (TRBV7-9, TRBJ2-3)
CASSPGSTDTQYF

SEQ ID NO: 525693 - protein, 14 aa, Homo sapiens
  CDR3 for alpha chain variable domain of TCR clone 262847 (TRAV1-2, TRAJ15)
CAVRDRQAGTALIF

SEQ ID NO: 525694 - protein, 15 aa, Homo sapiens
  CDR3 for beta chain variable domain of TCR clone 262847 (TRBV7-3, TRBJ2-2)
CASSETGQGTGELFF

SEQ ID NO: 525695 - protein, 13 aa, Homo sapiens
  CDR3 for alpha chain variable domain of TCR clone 262848 (TRAV3, TRAJ21)
CAVREPAFNKFYF

SEQ ID NO: 525696 - protein, 13 aa, Homo sapiens
  CDR3 for beta chain variable domain of TCR clone 262848 (TRBV7-2, TRBJ2-5)
CASSQTSVETQYF

SEQ ID NO: 525697 - protein, 16 aa, Homo sapiens
  CDR3 for alpha chain variable domain of TCR clone 262849 (TRAV13-1, TRAJ37)
CAASPLGSSNTVKLIF

SEQ ID NO: 525698 - protein, 12 aa, Homo sapiens
  CDR3 for beta chain variable domain of TCR clone 262849 (TRBV6-1, TRBJ2-5)
CASSEGRETQYF

SEQ ID NO: 525699 - protein, 12 aa, Homo sapiens
  CDR3 for alpha chain variable domain of TCR clone 262850 (TRAV13-1, TRAJ21)
RAAKEGFNKFYF

SEQ ID NO: 525700 - protein, 17 aa, Homo sapiens
  CDR3 for beta chain variable domain of TCR clone 262850 (TRBV20-1, TRBJ2-2)
CSASGSGQGGLTGELFF

SEQ ID NO: 525701 - protein, 13 aa, Homo sapiens
  CDR3 for alpha chain variable domain of TCR clone 262851 (TRAV2, TRAJ40)
CAVVTSGTYKYIF

SEQ ID NO: 525702 - protein, 15 aa, Homo sapiens
  CDR3 for beta chain variable domain of TCR clone 262851 (TRBV18, TRBJ2-1)
CASSPPSASYNAQFF

SEQ ID NO: 525703 - protein, 13 aa, Homo sapiens
  CDR3 for alpha chain variable domain of TCR clone 262852 (TRAV12-2, TRAJ42)
CAVKRGSQGNLIF

SEQ ID NO: 525704 - protein, 15 aa, Homo sapiens
  CDR3 for beta chain variable domain of TCR clone 262852 (TRBV28, TRBJ1-3)
CASSMGWASGNTIYF

SEQ ID NO: 525705 - protein, 15 aa, Homo sapiens
  CDR3 for alpha chain variable domain of TCR clone 262853 (TRAV8-4, TRAJ3)
CAVTGENLVQQCFQD

SEQ ID NO: 525706 - protein, 15 aa, Homo sapiens
  CDR3 for beta chain variable domain of TCR clone 262853 (TRBV7-9, TRBJ1-6)
CASSSPGRGNSPLHF

SEQ ID NO: 525707 - protein, 14 aa, Homo sapiens
  CDR3 for alpha chain variable domain of TCR clone 262854 (TRAV1-2, TRAJ29)
CVVRELTSATPLVF

SEQ ID NO: 525708 - protein, 14 aa, Homo sapiens
  CDR3 for beta chain variable domain of TCR clone 262854 (TRBV3-1, TRBJ2-5)
CASSQGPDQETQYF

SEQ ID NO: 525709 - protein, 12 aa, Homo sapiens
  CDR3 for alpha chain variable domain of TCR clone 262855 (TRAV20, TRAJ37)
CAIPSNTGKLIF

SEQ ID NO: 525710 - protein, 16 aa, Homo sapiens
  CDR3 for beta chain variable domain of TCR clone 262855 (TRBV28, TRBJ1-2)
CASSHGQGVYKDGYTF

SEQ ID NO: 525711 - protein, 13 aa, Homo sapiens
  CDR3 for alpha chain variable domain of TCR clone 262856 (TRAV1-2, TRAJ9)
CAALNTGGFKTIF

SEQ ID NO: 525712 - protein, 14 aa, Homo sapiens
  CDR3 for beta chain variable domain of TCR clone 262856 (TRBV12-5, TRBJ2-7)
CASGQTGNSYEQYF

SEQ ID NO: 525713 - protein, 15 aa, Homo sapiens
  CDR3 for alpha chain variable domain of TCR clone 262857 (TRAV3, TRAJ5)
CAVRDLDTGRRALTF

SEQ ID NO: 525714 - protein, 13 aa, Homo sapiens
  CDR3 for beta chain variable domain of TCR clone 262857 (TRBV7-9, TRBJ1-2)
CASSPSNFWGYTF

SEQ ID NO: 525715 - protein, 16 aa, Homo sapiens
  CDR3 for alpha chain variable domain of TCR clone 262858 (TRAV3, TRAJ37)
CAVRGKGSGNTGKLIF

SEQ ID NO: 525716 - protein, 14 aa, Homo sapiens
  CDR3 for beta chain variable domain of TCR clone 262858 (TRBV7-7, TRBJ2-2)
CASSRDRSTGELVF

SEQ ID NO: 525717 - protein, 18 aa, Homo sapiens
  CDR3 for alpha chain variable domain of TCR clone 262859 (TRAV21, TRAJ52)
CAVRPSPAGGTSYGKLTF

SEQ ID NO: 525718 - protein, 15 aa, Homo sapiens
  CDR3 for beta chain variable domain of TCR clone 262859 (TRBV10-3, TRBJ2-3)
CAISLTSGGTDTQYF

SEQ ID NO: 525719 - protein, 14 aa, Homo sapiens
  CDR3 for alpha chain variable domain of TCR clone 262860 (TRAV26-1, TRAJ45)
CIEVTRGGADGLTF

SEQ ID NO: 525720 - protein, 13 aa, Homo sapiens
  CDR3 for beta chain variable domain of TCR clone 262860 (TRBV7-6, TRBJ1-2)
CASSLVADYGYTF

SEQ ID NO: 525721 - protein, 14 aa, Homo sapiens
  CDR3 for alpha chain variable domain of TCR clone 262861 (TRAV13-2, TRAJ43)
CAEIPTYNNNDMRF

SEQ ID NO: 525722 - protein, 15 aa, Homo sapiens
  CDR3 for beta chain variable domain of TCR clone 262861 (TRBV20-1, TRBJ2-5)
CSAPPRTGFGETQYF

SEQ ID NO: 525723 - protein, 14 aa, Homo sapiens
  CDR3 for alpha chain variable domain of TCR clone 262862 (TRAV8-4, TRAJ54)
CAVSEVLGAQKLVF

SEQ ID NO: 525724 - protein, 12 aa, Homo sapiens
  CDR3 for beta chain variable domain of TCR clone 262862 (TRBV11-2, TRBJ2-1)
CASSPGNNEQFF

SEQ ID NO: 525725 - protein, 12 aa, Homo sapiens
  CDR3 for alpha chain variable domain of TCR clone 262863 (TRAV29/DV5, TRAJ43)
CAASGVDNDMRF

SEQ ID NO: 525726 - protein, 15 aa, Homo sapiens
  CDR3 for beta chain variable domain of TCR clone 262863 (TRBV24-1, TRBJ2-2)
CATSERLSNTGELFF

SEQ ID NO: 525727 - protein, 13 aa, Homo sapiens
  CDR3 for alpha chain variable domain of TCR clone 262864 (TRAV21, TRAJ27)
CAARPGNAGKSTF

SEQ ID NO: 525728 - protein, 12 aa, Homo sapiens
  CDR3 for beta chain variable domain of TCR clone 262864 (TRBV12-4, TRBJ1-1)
CASRLAGLEAFF

SEQ ID NO: 525729 - protein, 23 aa, Homo sapiens
  CDR3 for alpha chain variable domain of TCR clone 262865 (TRAV8-6, TRAJ38)
CAVRNAGNNHIQNPDPAVYQLID

SEQ ID NO: 525730 - protein, 18 aa, Homo sapiens
  CDR3 for beta chain variable domain of TCR clone 262865 (TRBV6-6, TRBJ1-3)
CASSYSKWDSISGNTIYF

SEQ ID NO: 525731 - protein, 13 aa, Homo sapiens
  CDR3 for alpha chain variable domain of TCR clone 262866 (TRAV8-2, TRAJ11)
CVVSDLGYSTLTF

SEQ ID NO: 525732 - protein, 12 aa, Homo sapiens
  CDR3 for beta chain variable domain of TCR clone 262866 (TRBV11-2, TRBJ2-2)
CASSLGGGELFF

SEQ ID NO: 525733 - protein, 13 aa, Homo sapiens
  CDR3 for alpha chain variable domain of TCR clone 262867 (TRAV30, TRAJ24)
CGTVTDSWGKLQF

SEQ ID NO: 525734 - protein, 16 aa, Homo sapiens
  CDR3 for beta chain variable domain of TCR clone 262867 (TRBV7-3, TRBJ2-2)
CASSLKRGTLAGELFF

SEQ ID NO: 525735 - protein, 11 aa, Homo sapiens
  CDR3 for alpha chain variable domain of TCR clone 262868 (TRAV12-2, TRAJ23)
CARGRGGKLIS

SEQ ID NO: 525736 - protein, 14 aa, Homo sapiens
  CDR3 for beta chain variable domain of TCR clone 262868 (TRBV28, TRBJ2-5)
CASSLGDRAETQYF

SEQ ID NO: 525737 - protein, 15 aa, Homo sapiens
  CDR3 for alpha chain variable domain of TCR clone 262869 (TRAV8-3, TRAJ11)
CAVGLLNSGYRTLTL

SEQ ID NO: 525738 - protein, 23 aa, Homo sapiens
  CDR3 for beta chain variable domain of TCR clone 262869 (TRBV7-9, TRBJ1-2)
EAQLEKSRLLSDRFSSGEDGYTF

SEQ ID NO: 525739 - protein, 16 aa, Homo sapiens
  CDR3 for alpha chain variable domain of TCR clone 262870 (TRAV12-2, TRAJ13)
CAVKKTGGLPESYLWN

SEQ ID NO: 525740 - protein, 13 aa, Homo sapiens
  CDR3 for beta chain variable domain of TCR clone 262870 (TRBV10-3, TRBJ2-7)
CASKLAVNYEQYF

SEQ ID NO: 525741 - protein, 14 aa, Homo sapiens
  CDR3 for alpha chain variable domain of TCR clone 262871 (TRAV8-2, TRAJ4)
CVVSPSVGYNKLIF

SEQ ID NO: 525742 - protein, 15 aa, Homo sapiens
  CDR3 for beta chain variable domain of TCR clone 262871 (TRBV2, TRBJ2-1)
CASSELAGSYNEQFF

SEQ ID NO: 525743 - protein, 14 aa, Homo sapiens
  CDR3 for alpha chain variable domain of TCR clone 262872 (TRAV38-1, TRAJ40)
CALRPTPGTYKYIF

SEQ ID NO: 525744 - protein, 13 aa, Homo sapiens
  CDR3 for beta chain variable domain of TCR clone 262872 (TRBV7-9, TRBJ1-2)
CASSLKQNYGYTF

SEQ ID NO: 525745 - protein, 13 aa, Homo sapiens
  CDR3 for alpha chain variable domain of TCR clone 262873 (TRAV30, TRAJ49)
CGTESQPVTSSIL

SEQ ID NO: 525746 - protein, 14 aa, Homo sapiens
  CDR3 for beta chain variable domain of TCR clone 262873 (TRBV13, TRBJ2-5)
CASSLDYPQETQYF

SEQ ID NO: 525747 - protein, 17 aa, Homo sapiens
  CDR3 for alpha chain variable domain of TCR clone 262874 (TRAV3, TRAJ42)
CAVRDRDYGGSQGKLIF

SEQ ID NO: 525748 - protein, 14 aa, Homo sapiens
  CDR3 for beta chain variable domain of TCR clone 262874 (TRBV25-1, TRBJ1-1)
CASTHLGGNTEAFF

SEQ ID NO: 525749 - protein, 10 aa, Homo sapiens
  CDR3 for alpha chain variable domain of TCR clone 262875 (TRAV1-2, TRAJ31)
CAFFDARLMF

SEQ ID NO: 525750 - protein, 15 aa, Homo sapiens
  CDR3 for beta chain variable domain of TCR clone 262875 (TRBV27, TRBJ2-1)
CASSNGGGSSNEQFF

SEQ ID NO: 525751 - protein, 18 aa, Homo sapiens
  CDR3 for alpha chain variable domain of TCR clone 262876 (TRAV29/DV5, TRAJ53)
CSVLLCSKRGGSNYKLTF

SEQ ID NO: 525752 - protein, 13 aa, Homo sapiens
  CDR3 for beta chain variable domain of TCR clone 262876 (TRBV19, TRBJ2-7)
CASSKQGGYEQYF

SEQ ID NO: 525753 - protein, 12 aa, Homo sapiens
  CDR3 for alpha chain variable domain of TCR clone 262877 (TRAV16, TRAJ9)
CALRPGGFKTIF

SEQ ID NO: 525754 - protein, 13 aa, Homo sapiens
  CDR3 for beta chain variable domain of TCR clone 262877 (TRBV4-3, TRBJ1-1)
CASSQVEGSMAFF

SEQ ID NO: 525755 - protein, 12 aa, Homo sapiens
  CDR3 for alpha chain variable domain of TCR clone 262878 (TRAV16, TRAJ10)
CSRTGGGNKLTF

SEQ ID NO: 525756 - protein, 13 aa, Homo sapiens
  CDR3 for beta chain variable domain of TCR clone 262878 (TRBV15, TRBJ2-7)
CATSTTGNYEQYF

SEQ ID NO: 525757 - protein, 12 aa, Homo sapiens
  CDR3 for alpha chain variable domain of TCR clone 262879 (TRAV12-1, TRAJ40)
CVVYSGTYKYIF

SEQ ID NO: 525758 - protein, 14 aa, Homo sapiens
  CDR3 for beta chain variable domain of TCR clone 262879 (TRBV19, TRBJ1-2)
CASSSLFARDVYTF

SEQ ID NO: 525759 - protein, 14 aa, Homo sapiens
  CDR3 for alpha chain variable domain of TCR clone 262880 (TRAV26-2, TRAJ31)
CIPIPGNNNARPMF

SEQ ID NO: 525760 - protein, 16 aa, Homo sapiens
  CDR3 for beta chain variable domain of TCR clone 262880 (TRBV7-3, TRBJ2-1)
CASSLVSGSSNNEQFF

SEQ ID NO: 525761 - protein, 14 aa, Homo sapiens
  CDR3 for alpha chain variable domain of TCR clone 262881 (TRAV1-2, TRAJ16)
CAVKEGSDGQKLLF

SEQ ID NO: 525762 - protein, 15 aa, Homo sapiens
  CDR3 for beta chain variable domain of TCR clone 262881 (TRBV6-3, TRBJ2-7)
CASSSPGTVFYEQYF

SEQ ID NO: 525763 - protein, 14 aa, Homo sapiens
  CDR3 for alpha chain variable domain of TCR clone 262882 (TRAV12-3, TRAJ10)
SHLPLTGGGNKLTF

SEQ ID NO: 525764 - protein, 16 aa, Homo sapiens
  CDR3 for beta chain variable domain of TCR clone 262882 (TRBV19, TRBJ1-1)
CASRFGGPVAGTEAFF

SEQ ID NO: 525765 - protein, 14 aa, Homo sapiens
  CDR3 for alpha chain variable domain of TCR clone 262883 (TRAV12-3, TRAJ10)
SHLPLTGGGNKLTF

SEQ ID NO: 525766 - protein, 16 aa, Homo sapiens
  CDR3 for beta chain variable domain of TCR clone 262883 (TRBV4-3, TRBJ2-1)
CASSPALDRGVNDQFF

SEQ ID NO: 525767 - protein, 17 aa, Homo sapiens
  CDR3 for alpha chain variable domain of TCR clone 262884 (TRAV35, TRAJ47)
GFLDCRTHTEYGNKLVF

SEQ ID NO: 525768 - protein, 11 aa, Homo sapiens
  CDR3 for beta chain variable domain of TCR clone 262884 (TRBV29-1, TRBJ1-1)
CSVEVGTRTFF

SEQ ID NO: 525769 - protein, 14 aa, Homo sapiens
  CDR3 for alpha chain variable domain of TCR clone 262885 (TRAV22, TRAJ6)
CAGVGPGGSYIPTF

SEQ ID NO: 525770 - protein, 16 aa, Homo sapiens
  CDR3 for beta chain variable domain of TCR clone 262885 (TRBV11-2, TRBJ2-7)
CASSPTTGGVSYEQYF

SEQ ID NO: 525771 - protein, 14 aa, Homo sapiens
  CDR3 for alpha chain variable domain of TCR clone 262886 (TRAV12-2, TRAJ24)
CAVTPADSWGKLQF

SEQ ID NO: 525772 - protein, 13 aa, Homo sapiens
  CDR3 for beta chain variable domain of TCR clone 262886 (TRBV20-1, TRBJ2-5)
CSAREAFQETQYF

SEQ ID NO: 525773 - protein, 16 aa, Homo sapiens
  CDR3 for alpha chain variable domain of TCR clone 262887 (TRAV12-3, TRAJ28)
CAMRANSGAGSYQLTF

SEQ ID NO: 525774 - protein, 16 aa, Homo sapiens
  CDR3 for beta chain variable domain of TCR clone 262887 (TRBV7-2, TRBJ1-3)
CASSRLEASSGDTMYF

SEQ ID NO: 525775 - protein, 14 aa, Homo sapiens
  CDR3 for alpha chain variable domain of TCR clone 262888 (TRAV3, TRAJ21)
CAVRDWDNFNKFYF

SEQ ID NO: 525776 - protein, 17 aa, Homo sapiens
  CDR3 for beta chain variable domain of TCR clone 262888 (TRBV13, TRBJ2-3)
CASGLSRVAGGRNTQYF

SEQ ID NO: 525777 - protein, 13 aa, Homo sapiens
  CDR3 for alpha chain variable domain of TCR clone 262889 (TRAV17, TRAJ5)
SALRGTGRRALTF

SEQ ID NO: 525778 - protein, 14 aa, Homo sapiens
  CDR3 for beta chain variable domain of TCR clone 262889 (TRBV7-3, TRBJ2-1)
CASSLAGGTNEQFF

SEQ ID NO: 525779 - protein, 12 aa, Homo sapiens
  CDR3 for alpha chain variable domain of TCR clone 262890 (TRAV13-2, TRAJ8)
CAPWLGFQKLVF

SEQ ID NO: 525780 - protein, 15 aa, Homo sapiens
  CDR3 for beta chain variable domain of TCR clone 262890 (TRBV5-1, TRBJ2-2)
CASSSQGGNTGELFF

SEQ ID NO: 525781 - protein, 11 aa, Homo sapiens
  CDR3 for alpha chain variable domain of TCR clone 262891 (TRAV12-2, TRAJ31)
CAVTRWARLMF

SEQ ID NO: 525782 - protein, 13 aa, Homo sapiens
  CDR3 for beta chain variable domain of TCR clone 262891 (TRBV19, TRBJ1-2)
CASSVPGQDGYTF

SEQ ID NO: 525783 - protein, 16 aa, Homo sapiens
  CDR3 for alpha chain variable domain of TCR clone 262892 (TRAV8-3, TRAJ42)
CAVGEGNGGSQGNLIF

SEQ ID NO: 525784 - protein, 16 aa, Homo sapiens
  CDR3 for beta chain variable domain of TCR clone 262892 (TRBV20-1, TRBJ2-5)
CSARDSSGGLGETQYF

SEQ ID NO: 525785 - protein, 14 aa, Homo sapiens
  CDR3 for alpha chain variable domain of TCR clone 262893 (TRAV38-1, TRAJ45)
CAYYSGGGPDGLTF

SEQ ID NO: 525786 - protein, 20 aa, Homo sapiens
  CDR3 for beta chain variable domain of TCR clone 262893 (TRBV28, TRBJ2-1)
CASTPIGRSPGLAGGNEQFF

SEQ ID NO: 525787 - protein, 14 aa, Homo sapiens
  CDR3 for alpha chain variable domain of TCR clone 262894 (TRAV26-1, TRAJ38)
CIADNAGNNRKLIW

SEQ ID NO: 525788 - protein, 16 aa, Homo sapiens
  CDR3 for beta chain variable domain of TCR clone 262894 (TRBV18, TRBJ2-7)
CASSPGRAGGAYEQYF

SEQ ID NO: 525789 - protein, 18 aa, Homo sapiens
  CDR3 for alpha chain variable domain of TCR clone 262895 (TRAV26-1, TRAJ23)
CIVRVGLEVWNLGGKLIF

SEQ ID NO: 525790 - protein, 16 aa, Homo sapiens
  CDR3 for beta chain variable domain of TCR clone 262895 (TRBV12-4, TRBJ2-5)
CASSFFVRGRQETQYF

SEQ ID NO: 525791 - protein, 13 aa, Homo sapiens
  CDR3 for alpha chain variable domain of TCR clone 262896 (TRAV8-3, TRAJ43)
CAVGPDNNNDMRF

SEQ ID NO: 525792 - protein, 14 aa, Homo sapiens
  CDR3 for beta chain variable domain of TCR clone 262896 (TRBV19, TRBJ2-1)
CASPTFVLSGEQLF

SEQ ID NO: 525793 - protein, 17 aa, Homo sapiens
  CDR3 for alpha chain variable domain of TCR clone 262897 (TRAV21, TRAJ52)
CAVGTNAGGTSYGKLTV

SEQ ID NO: 525794 - protein, 13 aa, Homo sapiens
  CDR3 for beta chain variable domain of TCR clone 262897 (TRBV5-1, TRBJ1-2)
CASSFSGNRGYSF

SEQ ID NO: 525795 - protein, 13 aa, Homo sapiens
  CDR3 for alpha chain variable domain of TCR clone 262898 (TRAV16, TRAJ27)
CALRRTNAGTSTF

SEQ ID NO: 525796 - protein, 15 aa, Homo sapiens
  CDR3 for beta chain variable domain of TCR clone 262898 (TRBV18, TRBJ2-1)
CASSPPSASYNEQFF

SEQ ID NO: 525797 - protein, 13 aa, Homo sapiens
  CDR3 for alpha chain variable domain of TCR clone 262899 (TRAV29/DV5, TRAJ31)
CAASRNNNARLMF

SEQ ID NO: 525798 - protein, 12 aa, Homo sapiens
  CDR3 for beta chain variable domain of TCR clone 262899 (TRBV14, TRBJ2-7)
YASSRLKGEQYF

SEQ ID NO: 525799 - protein, 14 aa, Homo sapiens
  CDR3 for alpha chain variable domain of TCR clone 262900 (TRAV1-2, TRAJ16)
CAVNRFSDGQKLLF

SEQ ID NO: 525800 - protein, 16 aa, Homo sapiens
  CDR3 for beta chain variable domain of TCR clone 262900 (TRBV19, TRBJ2-3)
CASSPEWDRGTDTQYS

SEQ ID NO: 525801 - protein, 17 aa, Homo sapiens
  CDR3 for alpha chain variable domain of TCR clone 262901 (TRAV14/DV4, TRAJ28)
CAMREVSSGAGSYQLTF

SEQ ID NO: 525802 - protein, 12 aa, Homo sapiens
  CDR3 for beta chain variable domain of TCR clone 262901 (TRBV12-4, TRBJ2-1)
CASSPGRNEQFF

SEQ ID NO: 525803 - protein, 15 aa, Homo sapiens
  CDR3 for alpha chain variable domain of TCR clone 262902 (TRAV12-2, TRAJ9)
CAVNGGYTGGFKPIF

SEQ ID NO: 525804 - protein, 17 aa, Homo sapiens
  CDR3 for beta chain variable domain of TCR clone 262902 (TRBV4-1, TRBJ2-1)
CASSHRDSGSSYNEQFF

SEQ ID NO: 525805 - protein, 15 aa, Homo sapiens
  CDR3 for alpha chain variable domain of TCR clone 262903 (TRAV17, TRAJ4)
CATGTWSGGYNKLIF

SEQ ID NO: 525806 - protein, 13 aa, Homo sapiens
  CDR3 for beta chain variable domain of TCR clone 262903 (TRBV6-6, TRBJ2-7)
CASSPKHLAEHYF

SEQ ID NO: 525807 - protein, 13 aa, Homo sapiens
  CDR3 for alpha chain variable domain of TCR clone 262904 (TRAV12-2, TRAJ37)
CAGGSGNTGTLIF

SEQ ID NO: 525808 - protein, 15 aa, Homo sapiens
  CDR3 for beta chain variable domain of TCR clone 262904 (TRBV6-5, TRBJ2-1)
CASSYDAGAGNEQFF

SEQ ID NO: 525809 - protein, 14 aa, Homo sapiens
  CDR3 for alpha chain variable domain of TCR clone 262905 (TRAV12-2, TRAJ40)
CAVKIPPGTYKYIF

SEQ ID NO: 525810 - protein, 16 aa, Homo sapiens
  CDR3 for beta chain variable domain of TCR clone 262905 (TRBV20-1, TRBJ1-1)
CSAQTRIGGTEALLDK

SEQ ID NO: 525811 - protein, 11 aa, Homo sapiens
  CDR3 for alpha chain variable domain of TCR clone 262906 (TRAV1-2, TRAJ11)
CAVRGYSTLTF

SEQ ID NO: 525812 - protein, 13 aa, Homo sapiens
  CDR3 for beta chain variable domain of TCR clone 262906 (TRBV27, TRBJ2-7)
CASSFSQGYEQYF

SEQ ID NO: 525813 - protein, 19 aa, Homo sapiens
  CDR3 for alpha chain variable domain of TCR clone 262907 (TRAV26-2, TRAJ52)
CILRTGFNAGGTSYGKLTF

SEQ ID NO: 525814 - protein, 15 aa, Homo sapiens
  CDR3 for beta chain variable domain of TCR clone 262907 (TRBV7-9, TRBJ1-6)
CASSSPGRGNSPLHF

SEQ ID NO: 525815 - protein, 14 aa, Homo sapiens
  CDR3 for alpha chain variable domain of TCR clone 262908 (TRAV8-3, TRAJ42)
CAVGAWGSQGNLTF

SEQ ID NO: 525816 - protein, 17 aa, Homo sapiens
  CDR3 for beta chain variable domain of TCR clone 262908 (TRBV7-2, TRBJ2-3)
CASSLEARGTSTDTQYF

SEQ ID NO: 525817 - protein, 14 aa, Homo sapiens
  CDR3 for alpha chain variable domain of TCR clone 262909 (TRAV17, TRAJ35)
CATDRPGFGNVRHC

SEQ ID NO: 525818 - protein, 19 aa, Homo sapiens
  CDR3 for beta chain variable domain of TCR clone 262909 (TRBV11-3, TRBJ2-2)
CASSTRPGAKTTNTGELFF

SEQ ID NO: 525819 - protein, 16 aa, Homo sapiens
  CDR3 for alpha chain variable domain of TCR clone 262910 (TRAV27, TRAJ28)
CAGIAYSGAGSYQLTF

SEQ ID NO: 525820 - protein, 15 aa, Homo sapiens
  CDR3 for beta chain variable domain of TCR clone 262910 (TRBV5-1, TRBJ2-1)
CASSPPRAPTMSSSS

SEQ ID NO: 525821 - protein, 14 aa, Homo sapiens
  CDR3 for alpha chain variable domain of TCR clone 262911 (TRAV12-2, TRAJ40)
CAVKIRSGTYKYIF

SEQ ID NO: 525822 - protein, 14 aa, Homo sapiens
  CDR3 for beta chain variable domain of TCR clone 262911 (TRBV20-1, TRBJ1-1)
CSAQTRIGGTEAFF

SEQ ID NO: 525823 - protein, 12 aa, Homo sapiens
  CDR3 for alpha chain variable domain of TCR clone 262912 (TRAV21, TRAJ23)
CAVGPQGGKLIF

SEQ ID NO: 525824 - protein, 13 aa, Homo sapiens
  CDR3 for beta chain variable domain of TCR clone 262912 (TRBV20-1, TRBJ2-7)
CSAREGAGYEQYF

SEQ ID NO: 525825 - protein, 14 aa, Homo sapiens
  CDR3 for alpha chain variable domain of TCR clone 262913 (TRAV12-2, TRAJ13)
CAVKKTGGDQKVTF

SEQ ID NO: 525826 - protein, 17 aa, Homo sapiens
  CDR3 for beta chain variable domain of TCR clone 262913 (TRBV24-1, TRBJ2-1)
CATSDVSTSGTYNEQFF

SEQ ID NO: 525827 - protein, 17 aa, Homo sapiens
  CDR3 for alpha chain variable domain of TCR clone 262914 (TRAV13-2, TRAJ31)
CAENARLMFGDGTPLVV

SEQ ID NO: 525828 - protein, 14 aa, Homo sapiens
  CDR3 for beta chain variable domain of TCR clone 262914 (TRBV7-9, TRBJ2-1)
CASSLGVADNEQFF

SEQ ID NO: 525829 - protein, 13 aa, Homo sapiens
  CDR3 for alpha chain variable domain of TCR clone 262915 (TRAV12-3, TRAJ40)
CAMSDSGTYKYIF

SEQ ID NO: 525830 - protein, 21 aa, Homo sapiens
  CDR3 for beta chain variable domain of TCR clone 262915 (TRBV14, TRBJ1-5)
CQQPRWGYPLLAPIGNQPQHF

SEQ ID NO: 525831 - protein, 14 aa, Homo sapiens
  CDR3 for alpha chain variable domain of TCR clone 262916 (TRAV17, TRAJ16)
CATADFSDGQKLLF

SEQ ID NO: 525832 - protein, 15 aa, Homo sapiens
  CDR3 for beta chain variable domain of TCR clone 262916 (TRBV18, TRBJ2-1)
CASSPPSASYNEHFF

SEQ ID NO: 525833 - protein, 17 aa, Homo sapiens
  CDR3 for alpha chain variable domain of TCR clone 262917 (TRAV3, TRAJ6)
CAVRDGPRAGGSYIPTF

SEQ ID NO: 525834 - protein, 15 aa, Homo sapiens
  CDR3 for beta chain variable domain of TCR clone 262917 (TRBV7-8, TRBJ2-7)
CASSLERAGSYEQYF

SEQ ID NO: 525835 - protein, 11 aa, Homo sapiens
  CDR3 for alpha chain variable domain of TCR clone 262918 (TRAV16, TRAJ26)
CALTRWSEFCL

SEQ ID NO: 525836 - protein, 12 aa, Homo sapiens
  CDR3 for beta chain variable domain of TCR clone 262918 (TRBV7-3, TRBJ2-3)
CASSSLTDTQYF

SEQ ID NO: 525837 - protein, 14 aa, Homo sapiens
  CDR3 for alpha chain variable domain of TCR clone 262919 (TRAV12-2, TRAJ17)
CDVLFKAAGNKLTF

SEQ ID NO: 525838 - protein, 15 aa, Homo sapiens
  CDR3 for beta chain variable domain of TCR clone 262919 (TRBV20-1, TRBJ2-7)
CSARDRVSGMDEQYF

SEQ ID NO: 525839 - protein, 17 aa, Homo sapiens
  CDR3 for alpha chain variable domain of TCR clone 262920 (TRAV14/DV4, TRAJ28)
CAMREVSSGAGSYQLTL

SEQ ID NO: 525840 - protein, 15 aa, Homo sapiens
  CDR3 for beta chain variable domain of TCR clone 262920 (TRBV11-2, TRBJ1-6)
CASTLRETGNSPLHF

SEQ ID NO: 525841 - protein, 13 aa, Homo sapiens
  CDR3 for alpha chain variable domain of TCR clone 262921 (TRAV35, TRAJ42)
CAGFPGSQGNLIF

SEQ ID NO: 525842 - protein, 10 aa, Homo sapiens
  CDR3 for beta chain variable domain of TCR clone 262921 (TRBV19, TRBJ1-1)
CASRQVEAFF

SEQ ID NO: 525843 - protein, 14 aa, Homo sapiens
  CDR3 for alpha chain variable domain of TCR clone 262922 (TRAV8-1, TRAJ6)
CAVNASGGSYIPTF

SEQ ID NO: 525844 - protein, 14 aa, Homo sapiens
  CDR3 for beta chain variable domain of TCR clone 262922 (TRBV7-8, TRBJ2-3)
CASRLEAGTDTQYF

SEQ ID NO: 525845 - protein, 14 aa, Homo sapiens
  CDR3 for alpha chain variable domain of TCR clone 262923 (TRAV12-3, TRAJ12)
CAMSEVDSSYKLIF

SEQ ID NO: 525846 - protein, 15 aa, Homo sapiens
  CDR3 for beta chain variable domain of TCR clone 262923 (TRBV12-4, TRBJ2-5)
CASSPPTGLQETQYF

SEQ ID NO: 525847 - protein, 10 aa, Homo sapiens
  CDR3 for alpha chain variable domain of TCR clone 262924 (TRAV8-3, TRAJ43)
CAVALADRSF

SEQ ID NO: 525848 - protein, 14 aa, Homo sapiens
  CDR3 for beta chain variable domain of TCR clone 262924 (TRBV4-2, TRBJ2-1)
CASGLDRAYNEQFF

SEQ ID NO: 525849 - protein, 14 aa, Homo sapiens
  CDR3 for alpha chain variable domain of TCR clone 262925 (TRAV12-2, TRAJ17)
CAMLFRAAGNKLTF

SEQ ID NO: 525850 - protein, 17 aa, Homo sapiens
  CDR3 for beta chain variable domain of TCR clone 262925 (TRBV20-1, TRBJ2-2)
CSASGSGQGGLTGELFF

SEQ ID NO: 525851 - protein, 14 aa, Homo sapiens
  CDR3 for alpha chain variable domain of TCR clone 262926 (TRAV13-1, TRAJ44)
CAAKATGTASKLTF

SEQ ID NO: 525852 - protein, 16 aa, Homo sapiens
  CDR3 for beta chain variable domain of TCR clone 262926 (TRBV7-9, TRBJ2-6)
CASSLKGPLRANVLTL

SEQ ID NO: 525853 - protein, 13 aa, Homo sapiens
  CDR3 for alpha chain variable domain of TCR clone 262927 (TRAV36/DV7, TRAJ49)
CAGDSNTGNQFYF

SEQ ID NO: 525854 - protein, 13 aa, Homo sapiens
  CDR3 for beta chain variable domain of TCR clone 262927 (TRBV2, TRBJ2-5)
CASGTPYQETQYF

SEQ ID NO: 525855 - protein, 12 aa, Homo sapiens
  CDR3 for alpha chain variable domain of TCR clone 262928 (TRAV8-3, TRAJ26)
CAGDNYGQNFVF

SEQ ID NO: 525856 - protein, 15 aa, Homo sapiens
  CDR3 for beta chain variable domain of TCR clone 262928 (TRBV20-1, TRBJ2-7)
CSAESGTSGAYEQYF

SEQ ID NO: 525857 - protein, 17 aa, Homo sapiens
  CDR3 for alpha chain variable domain of TCR clone 262929 (TRAV20, TRAJ28)
CAVQGGYSGAGSYQLTF

SEQ ID NO: 525858 - protein, 15 aa, Homo sapiens
  CDR3 for beta chain variable domain of TCR clone 262929 (TRBV7-2, TRBJ2-7)
CASSVSSGRTYEQYF

SEQ ID NO: 525859 - protein, 18 aa, Homo sapiens
  CDR3 for alpha chain variable domain of TCR clone 262930 (TRAV26-1, TRAJ22)
CIVRVALISSGSAKQLTF

SEQ ID NO: 525860 - protein, 13 aa, Homo sapiens
  CDR3 for beta chain variable domain of TCR clone 262930 (TRBV13, TRBJ2-5)
CASSPEVGETQYF

SEQ ID NO: 525861 - protein, 16 aa, Homo sapiens
  CDR3 for alpha chain variable domain of TCR clone 262931 (TRAV30, TRAJ24)
CGTEIVAADSWGKFQF

SEQ ID NO: 525862 - protein, 15 aa, Homo sapiens
  CDR3 for beta chain variable domain of TCR clone 262931 (TRBV5-1, TRBJ1-1)
CASSLAPRGNTEAFF

SEQ ID NO: 525863 - protein, 15 aa, Homo sapiens
  CDR3 for alpha chain variable domain of TCR clone 262932 (TRAV27, TRAJ38)
CAARRNAGNDRKLIW

SEQ ID NO: 525864 - protein, 13 aa, Homo sapiens
  CDR3 for beta chain variable domain of TCR clone 262932 (TRBV12-5, TRBJ2-3)
CASGERQSDTQYF

SEQ ID NO: 525865 - protein, 15 aa, Homo sapiens
  CDR3 for alpha chain variable domain of TCR clone 262933 (TRAV38-2/DV8, TRAJ45)
CAYWDSGGGADGLTF

SEQ ID NO: 525866 - protein, 12 aa, Homo sapiens
  CDR3 for beta chain variable domain of TCR clone 262933 (TRBV11-2, TRBJ2-2)
CASSLGGGEPFF

SEQ ID NO: 525867 - protein, 13 aa, Homo sapiens
  CDR3 for alpha chain variable domain of TCR clone 262934 (TRAV27, TRAJ49)
CAPRPYTGNQFYF

SEQ ID NO: 525868 - protein, 16 aa, Homo sapiens
  CDR3 for beta chain variable domain of TCR clone 262934 (TRBV19, TRBJ2-2)
CASRSPGTGATGELFF

SEQ ID NO: 525869 - protein, 14 aa, Homo sapiens
  CDR3 for alpha chain variable domain of TCR clone 262935 (TRAV12-2, TRAJ40)
CAVKIPSGTYKYIF

SEQ ID NO: 525870 - protein, 14 aa, Homo sapiens
  CDR3 for beta chain variable domain of TCR clone 262935 (TRBV18, TRBJ2-7)
CASAPRGGAYEQYF

SEQ ID NO: 525871 - protein, 11 aa, Homo sapiens
  CDR3 for alpha chain variable domain of TCR clone 262936 (TRAV35, TRAJ30)
CAPGGDDKIIF

SEQ ID NO: 525872 - protein, 20 aa, Homo sapiens
  CDR3 for beta chain variable domain of TCR clone 262936 (TRBV7-8, TRBJ2-2)
WASSHLFPGPTIHITGELFF

SEQ ID NO: 525873 - protein, 14 aa, Homo sapiens
  CDR3 for alpha chain variable domain of TCR clone 262937 (TRAV12-3, TRAJ54)
CAMRGIQGAQRLVF

SEQ ID NO: 525874 - protein, 13 aa, Homo sapiens
  CDR3 for beta chain variable domain of TCR clone 262937 (TRBV19, TRBJ1-1)
CASSPSNGGEAFF

SEQ ID NO: 525875 - protein, 14 aa, Homo sapiens
  CDR3 for alpha chain variable domain of TCR clone 262938 (TRAV2, TRAJ37)
CAVDFTSNTGELIF

SEQ ID NO: 525876 - protein, 14 aa, Homo sapiens
  CDR3 for beta chain variable domain of TCR clone 262938 (TRBV15, TRBJ2-5)
CATSIGGLGETQYF

SEQ ID NO: 525877 - protein, 13 aa, Homo sapiens
  CDR3 for alpha chain variable domain of TCR clone 262939 (TRAV13-2, TRAJ13)
CAERPGGYQKVTF

SEQ ID NO: 525878 - protein, 15 aa, Homo sapiens
  CDR3 for beta chain variable domain of TCR clone 262939 (TRBV11-3, TRBJ2-2)
CASSLGGRPTGELFF

SEQ ID NO: 525879 - protein, 14 aa, Homo sapiens
  CDR3 for alpha chain variable domain of TCR clone 262940 (TRAV12-2, TRAJ17)
CAVLFKAAGNKLTF

SEQ ID NO: 525880 - protein, 15 aa, Homo sapiens
  CDR3 for beta chain variable domain of TCR clone 262940 (TRBV19, TRBJ2-2)
CASSPRTGWTGELFF

SEQ ID NO: 525881 - protein, 12 aa, Homo sapiens
  CDR3 for alpha chain variable domain of TCR clone 262941 (TRAV2, TRAJ26)
CAVGEYGQNFVF

SEQ ID NO: 525882 - protein, 14 aa, Homo sapiens
  CDR3 for beta chain variable domain of TCR clone 262941 (TRBV7-2, TRBJ2-2)
CASSPSGGTGELSF

SEQ ID NO: 525883 - protein, 14 aa, Homo sapiens
  CDR3 for alpha chain variable domain of TCR clone 262942 (TRAV12-3, TRAJ42)
CAMNYGGSQGNLIF

SEQ ID NO: 525884 - protein, 16 aa, Homo sapiens
  CDR3 for beta chain variable domain of TCR clone 262942 (TRBV11-3, TRBJ2-5)
CASSGQGYSPKETQYF

SEQ ID NO: 525885 - protein, 19 aa, Homo sapiens
  CDR3 for alpha chain variable domain of TCR clone 262943 (TRAV26-1, TRAJ52)
YIVRAHRNAGGTSYGKLTF

SEQ ID NO: 525886 - protein, 15 aa, Homo sapiens
  CDR3 for beta chain variable domain of TCR clone 262943 (TRBV29-1, TRBJ2-1)
CSGRDRKSSYNEQFF

SEQ ID NO: 525887 - protein, 13 aa, Homo sapiens
  CDR3 for alpha chain variable domain of TCR clone 262944 (TRAV27, TRAJ49)
CAPRPYTGNQFYF

SEQ ID NO: 525888 - protein, 17 aa, Homo sapiens
  CDR3 for beta chain variable domain of TCR clone 262944 (TRBV4-1, TRBJ1-2)
CASSQDAGQVLWLHLRF

SEQ ID NO: 525889 - protein, 13 aa, Homo sapiens
  CDR3 for alpha chain variable domain of TCR clone 262945 (TRAV3, TRAJ30)
CDVRDRGDDKIIF

SEQ ID NO: 525890 - protein, 14 aa, Homo sapiens
  CDR3 for beta chain variable domain of TCR clone 262945 (TRBV5-1, TRBJ1-1)
CASSRTTGDTEAFF

SEQ ID NO: 525891 - protein, 14 aa, Homo sapiens
  CDR3 for alpha chain variable domain of TCR clone 262946 (TRAV21, TRAJ38)
CAVMGAGNNRKLTW

SEQ ID NO: 525892 - protein, 13 aa, Homo sapiens
  CDR3 for beta chain variable domain of TCR clone 262946 (TRBV7-3, TRBJ2-5)
CASSIGFFETQYF

SEQ ID NO: 525893 - protein, 14 aa, Homo sapiens
  CDR3 for alpha chain variable domain of TCR clone 262947 (TRAV38-1, TRAJ40)
CALRPTSGTYKYIF

SEQ ID NO: 525894 - protein, 17 aa, Homo sapiens
  CDR3 for beta chain variable domain of TCR clone 262947 (TRBV4-1, TRBJ1-4)
CASSQEGPRGVEEKLFF

SEQ ID NO: 525895 - protein, 14 aa, Homo sapiens
  CDR3 for alpha chain variable domain of TCR clone 262948 (TRAV26-1, TRAJ38)
CIADNAGNNRKLIW

SEQ ID NO: 525896 - protein, 16 aa, Homo sapiens
  CDR3 for beta chain variable domain of TCR clone 262948 (TRBV20-1, TRBJ2-7)
CGASTSGRLSSYEQYF

SEQ ID NO: 525897 - protein, 14 aa, Homo sapiens
  CDR3 for alpha chain variable domain of TCR clone 262949 (TRAV12-3, TRAJ10)
SHLPLTGGGNKLTF

SEQ ID NO: 525898 - protein, 15 aa, Homo sapiens
  CDR3 for beta chain variable domain of TCR clone 262949 (TRBV7-3, TRBJ2-2)
GASSETGQGTGELFF

SEQ ID NO: 525899 - protein, 11 aa, Homo sapiens
  CDR3 for alpha chain variable domain of TCR clone 262950 (TRAV35, TRAJ30)
CAGERDDKIIF

SEQ ID NO: 525900 - protein, 14 aa, Homo sapiens
  CDR3 for beta chain variable domain of TCR clone 262950 (TRBV15, TRBJ2-5)
CATSGDRGQETQNF

SEQ ID NO: 525901 - protein, 15 aa, Homo sapiens
  CDR3 for alpha chain variable domain of TCR clone 262951 (TRAV38-1, TRAJ58)
CAFMKQETSGSRLTF

SEQ ID NO: 525902 - protein, 15 aa, Homo sapiens
  CDR3 for beta chain variable domain of TCR clone 262951 (TRBV10-1, TRBJ2-3)
CASSATSGGFDTQYF

SEQ ID NO: 525903 - protein, 14 aa, Homo sapiens
  CDR3 for alpha chain variable domain of TCR clone 262952 (TRAV9-2, TRAJ39)
CALYIYNAGNMLTF

SEQ ID NO: 525904 - protein, 15 aa, Homo sapiens
  CDR3 for beta chain variable domain of TCR clone 262952 (TRBV18, TRBJ1-1)
CASSGRTGEVTEAFF

SEQ ID NO: 525905 - protein, 10 aa, Homo sapiens
  CDR3 for alpha chain variable domain of TCR clone 262953 (TRAV29/DV5, TRAJ52)
CAAGFRGLVV

SEQ ID NO: 525906 - protein, 16 aa, Homo sapiens
  CDR3 for beta chain variable domain of TCR clone 262953 (TRBV7-3, TRBJ2-2)
CASSLKRGTLSGELFF

SEQ ID NO: 525907 - protein, 16 aa, Homo sapiens
  CDR3 for alpha chain variable domain of TCR clone 262954 (TRAV8-3, TRAJ42)
RAVGEGNGGSQGNLIF

SEQ ID NO: 525908 - protein, 14 aa, Homo sapiens
  CDR3 for beta chain variable domain of TCR clone 262954 (TRBV7-2, TRBJ2-1)
CASSRGGARNEQFF

SEQ ID NO: 525909 - protein, 16 aa, Homo sapiens
  CDR3 for alpha chain variable domain of TCR clone 262955 (TRAV3, TRAJ37)
CAVRPHGSGNTGKLIF

SEQ ID NO: 525910 - protein, 16 aa, Homo sapiens
  CDR3 for beta chain variable domain of TCR clone 262955 (TRBV9, TRBJ1-2)
CASSVEEKVSPYCYTF

SEQ ID NO: 525911 - protein, 14 aa, Homo sapiens
  CDR3 for alpha chain variable domain of TCR clone 262956 (TRAV8-1, TRAJ34)
CALPRGTTTSSLGL

SEQ ID NO: 525912 - protein, 16 aa, Homo sapiens
  CDR3 for beta chain variable domain of TCR clone 262956 (TRBV11-2, TRBJ1-2)
CASSLDTGGADYGYTF

SEQ ID NO: 525913 - protein, 15 aa, Homo sapiens
  CDR3 for alpha chain variable domain of TCR clone 262957 (TRAV26-1, TRAJ21)
CIVRVPNYNFNKFYF

SEQ ID NO: 525914 - protein, 16 aa, Homo sapiens
  CDR3 for beta chain variable domain of TCR clone 262957 (TRBV7-9, TRBJ2-3)
CASSLQGTPGTDTQYF

SEQ ID NO: 525915 - protein, 14 aa, Homo sapiens
  CDR3 for alpha chain variable domain of TCR clone 262958 (TRAV8-3, TRAJ39)
CVVGANNAGNMLTF

SEQ ID NO: 525916 - protein, 13 aa, Homo sapiens
  CDR3 for beta chain variable domain of TCR clone 262958 (TRBV20-1, TRBJ1-1)
CSARGGGNTEAFF

SEQ ID NO: 525917 - protein, 13 aa, Homo sapiens
  CDR3 for alpha chain variable domain of TCR clone 262959 (TRAV2, TRAJ40)
CAVVTSGTYKYIF

SEQ ID NO: 525918 - protein, 16 aa, Homo sapiens
  CDR3 for beta chain variable domain of TCR clone 262959 (TRBV7-3, TRBJ2-1)
CASSKPLAGGYNEQFF

SEQ ID NO: 525919 - protein, 13 aa, Homo sapiens
  CDR3 for alpha chain variable domain of TCR clone 262960 (TRAV12-3, TRAJ43)
CAMIRPNNNGMRF

SEQ ID NO: 525920 - protein, 12 aa, Homo sapiens
  CDR3 for beta chain variable domain of TCR clone 262960 (TRBV11-2, TRBJ2-5)
CANSLGQETQYF

SEQ ID NO: 525921 - protein, 12 aa, Homo sapiens
  CDR3 for alpha chain variable domain of TCR clone 262961 (TRAV16, TRAJ10)
CSRTGGGNKLTF

SEQ ID NO: 525922 - protein, 14 aa, Homo sapiens
  CDR3 for beta chain variable domain of TCR clone 262961 (TRBV29-1, TRBJ1-4)
CSVLPDSTNEKLFF

SEQ ID NO: 525923 - protein, 17 aa, Homo sapiens
  CDR3 for alpha chain variable domain of TCR clone 262962 (TRAV3, TRAJ12)
CAGRDGGRVDSSYKLIF

SEQ ID NO: 525924 - protein, 13 aa, Homo sapiens
  CDR3 for beta chain variable domain of TCR clone 262962 (TRBV15, TRBJ1-6)
CATSGGLNSPLHF

SEQ ID NO: 525925 - protein, 13 aa, Homo sapiens
  CDR3 for alpha chain variable domain of TCR clone 262963 (TRAV8-4, TRAJ48)
CAVSLFGNEILTF

SEQ ID NO: 525926 - protein, 15 aa, Homo sapiens
  CDR3 for beta chain variable domain of TCR clone 262963 (TRBV20-1, TRBJ2-7)
CSARKGLAESYEQYF

SEQ ID NO: 525927 - protein, 23 aa, Homo sapiens
  CDR3 for alpha chain variable domain of TCR clone 262964 (TRAV26-1, )
CIADNAGNKHIQNPDPAVYQLRD

SEQ ID NO: 525928 - protein, 13 aa, Homo sapiens
  CDR3 for beta chain variable domain of TCR clone 262964 (TRBV20-1, TRBJ1-1)
CSARGVGNTEAFF

SEQ ID NO: 525929 - protein, 23 aa, Homo sapiens
  CDR3 for alpha chain variable domain of TCR clone 262965 (TRAV26-1, TRAJ38)
CIADNAGNNHIQNPDPAVYQLRD

SEQ ID NO: 525930 - protein, 13 aa, Homo sapiens
  CDR3 for beta chain variable domain of TCR clone 262965 (TRBV20-1, TRBJ2-2)
CSASAAGTGELFF

SEQ ID NO: 525931 - protein, 23 aa, Homo sapiens
  CDR3 for alpha chain variable domain of TCR clone 262966 (TRAV26-1, TRAJ38)
CIADNAGNNLIQNPDPAVYQLRD

SEQ ID NO: 525932 - protein, 13 aa, Homo sapiens
  CDR3 for beta chain variable domain of TCR clone 262966 (TRBV20-1, TRBJ1-1)
CSARGGGNTEAFF

SEQ ID NO: 525933 - protein, 17 aa, Homo sapiens
  CDR3 for alpha chain variable domain of TCR clone 262967 (TRAV38-1, TRAJ45)
CAFMKHYMGGGAYGLTF

SEQ ID NO: 525934 - protein, 19 aa, Homo sapiens
  CDR3 for beta chain variable domain of TCR clone 262967 (TRBV6-1, TRBJ2-5)
CASSEQGLAGGLYQETQYF

SEQ ID NO: 525935 - protein, 16 aa, Homo sapiens
  CDR3 for alpha chain variable domain of TCR clone 262968 (TRAV2, TRAJ23)
CVGGKLIFGQGTELSV

SEQ ID NO: 525936 - protein, 20 aa, Homo sapiens
  CDR3 for beta chain variable domain of TCR clone 262968 (TRBV20-1, TRBJ2-5)
CRARAGLAGRLAGHLETQYF

SEQ ID NO: 525937 - protein, 15 aa, Homo sapiens
  CDR3 for alpha chain variable domain of TCR clone 262969 (TRAV26-1, TRAJ17)
CIVRVVKAAGNKLTF

SEQ ID NO: 525938 - protein, 15 aa, Homo sapiens
  CDR3 for beta chain variable domain of TCR clone 262969 (TRBV7-2, TRBJ2-1)
CASSSGLAGGNEQFF

SEQ ID NO: 525939 - protein, 15 aa, Homo sapiens
  CDR3 for alpha chain variable domain of TCR clone 262970 (TRAV3, TRAJ5)
CAVRDLYTGRRALTF

SEQ ID NO: 525940 - protein, 16 aa, Homo sapiens
  CDR3 for beta chain variable domain of TCR clone 262970 (TRBV20-1, TRBJ1-4)
CSAPGQGLFTNEKLFF

SEQ ID NO: 525941 - protein, 17 aa, Homo sapiens
  CDR3 for alpha chain variable domain of TCR clone 262971 (TRAV13-1, TRAJ28)
CAASPHSSGAGSYQLPF

SEQ ID NO: 525942 - protein, 12 aa, Homo sapiens
  CDR3 for beta chain variable domain of TCR clone 262971 (TRBV11-2, TRBJ2-2)
CASSLPTGELFF

SEQ ID NO: 525943 - protein, 16 aa, Homo sapiens
  CDR3 for alpha chain variable domain of TCR clone 262972 (TRAV13-1, TRAJ48)
CAASIFGNFGNEKLTF

SEQ ID NO: 525944 - protein, 16 aa, Homo sapiens
  CDR3 for beta chain variable domain of TCR clone 262972 (TRBV2, TRBJ2-7)
CASSEPWTGPSYEQYF

SEQ ID NO: 525945 - protein, 13 aa, Homo sapiens
  CDR3 for alpha chain variable domain of TCR clone 262973 (TRAV20, TRAJ37)
CAGCSSNTGKLIF

SEQ ID NO: 525946 - protein, 11 aa, Homo sapiens
  CDR3 for beta chain variable domain of TCR clone 262973 (TRBV12-4, TRBJ2-3)
CASTATDTRYF

SEQ ID NO: 525947 - protein, 13 aa, Homo sapiens
  CDR3 for alpha chain variable domain of TCR clone 262974 (TRAV27, TRAJ41)
CAGEGNSGYALNF

SEQ ID NO: 525948 - protein, 15 aa, Homo sapiens
  CDR3 for beta chain variable domain of TCR clone 262974 (TRBV5-1, TRBJ2-3)
CASSVTSGSTDTQYF

SEQ ID NO: 525949 - protein, 10 aa, Homo sapiens
  CDR3 for alpha chain variable domain of TCR clone 262975 (TRAV1-2, TRAJ31)
CAFFDARLMF

SEQ ID NO: 525950 - protein, 15 aa, Homo sapiens
  CDR3 for beta chain variable domain of TCR clone 262975 (TRBV7-9, TRBJ2-7)
CASSLALAEAYEQYF

SEQ ID NO: 525951 - protein, 14 aa, Homo sapiens
  CDR3 for alpha chain variable domain of TCR clone 262976 (TRAV17, TRAJ10)
FATTITGGGNKLTF

SEQ ID NO: 525952 - protein, 13 aa, Homo sapiens
  CDR3 for beta chain variable domain of TCR clone 262976 (TRBV7-9, TRBJ1-2)
CASSLKQNYGYTF

SEQ ID NO: 525953 - protein, 12 aa, Homo sapiens
  CDR3 for alpha chain variable domain of TCR clone 262977 (TRAV36/DV7, TRAJ40)
CAVAGGTYKYIF

SEQ ID NO: 525954 - protein, 18 aa, Homo sapiens
  CDR3 for beta chain variable domain of TCR clone 262977 (TRBV27, TRBJ2-3)
CASSKGTSGRTITDTQYF

SEQ ID NO: 525955 - protein, 12 aa, Homo sapiens
  CDR3 for alpha chain variable domain of TCR clone 262978 (TRAV12-3, TRAJ17)
CAMTLTGNKLTF

SEQ ID NO: 525956 - protein, 16 aa, Homo sapiens
  CDR3 for beta chain variable domain of TCR clone 262978 (TRBV5-1, TRBJ2-3)
CASSWGLAVYTDTQYF

SEQ ID NO: 525957 - protein, 16 aa, Homo sapiens
  CDR3 for alpha chain variable domain of TCR clone 262979 (TRAV3, TRAJ10)
CAVRDIRAGGGNKLTF

SEQ ID NO: 525958 - protein, 14 aa, Homo sapiens
  CDR3 for beta chain variable domain of TCR clone 262979 (TRBV7-2, TRBJ1-1)
CASSFLTGTTEAFF

SEQ ID NO: 525959 - protein, 14 aa, Homo sapiens
  CDR3 for alpha chain variable domain of TCR clone 262980 (TRAV8-6, TRAJ4)
CAVTVSGGYNKLIF

SEQ ID NO: 525960 - protein, 16 aa, Homo sapiens
  CDR3 for beta chain variable domain of TCR clone 262980 (TRBV7-9, TRBJ2-3)
CASSPWREVGTDTQYF

SEQ ID NO: 525961 - protein, 14 aa, Homo sapiens
  CDR3 for alpha chain variable domain of TCR clone 262981 (TRAV29/DV5, TRAJ36)
CAARRKTVANNLFF

SEQ ID NO: 525962 - protein, 17 aa, Homo sapiens
  CDR3 for beta chain variable domain of TCR clone 262981 (TRBV7-6, TRBJ2-5)
CASSPGLADPWGETQYF

SEQ ID NO: 525963 - protein, 18 aa, Homo sapiens
  CDR3 for alpha chain variable domain of TCR clone 262982 (TRAV21, TRAJ52)
CAVRPSPAGGTSYGKLTF

SEQ ID NO: 525964 - protein, 12 aa, Homo sapiens
  CDR3 for beta chain variable domain of TCR clone 262982 (TRBV11-2, TRBJ2-2)
CASRLGGGELFF

SEQ ID NO: 525965 - protein, 15 aa, Homo sapiens
  CDR3 for alpha chain variable domain of TCR clone 262983 (TRAV27, TRAJ38)
CAARRNAGNNRKLIL

SEQ ID NO: 525966 - protein, 15 aa, Homo sapiens
  CDR3 for beta chain variable domain of TCR clone 262983 (TRBV2, TRBJ2-1)
CASSELAGSYNEQFF

SEQ ID NO: 525967 - protein, 16 aa, Homo sapiens
  CDR3 for alpha chain variable domain of TCR clone 262984 (TRAV3, TRAJ8)
CAVRDMKNTGFQKLVF

SEQ ID NO: 525968 - protein, 13 aa, Homo sapiens
  CDR3 for beta chain variable domain of TCR clone 262984 (TRBV19, TRBJ1-2)
CASSVPGQDGYTF

SEQ ID NO: 525969 - protein, 16 aa, Homo sapiens
  CDR3 for alpha chain variable domain of TCR clone 262985 (TRAV4, TRAJ5)
CLVGPDHGHGQESTYF

SEQ ID NO: 525970 - protein, 20 aa, Homo sapiens
  CDR3 for beta chain variable domain of TCR clone 262985 (TRBV7-8, TRBJ2-2)
CASSHLFPGPTIHITGELFF

SEQ ID NO: 525971 - protein, 16 aa, Homo sapiens
  CDR3 for alpha chain variable domain of TCR clone 262986 (TRAV38-1, TRAJ42)
CAFRLVRGGRQGNLIF

SEQ ID NO: 525972 - protein, 15 aa, Homo sapiens
  CDR3 for beta chain variable domain of TCR clone 262986 (TRBV7-2, TRBJ1-2)
CASGITWTGNYGYTF

SEQ ID NO: 525973 - protein, 14 aa, Homo sapiens
  CDR3 for alpha chain variable domain of TCR clone 262987 (TRAV29/DV5, TRAJ36)
CAARRKTGSNNLFF

SEQ ID NO: 525974 - protein, 14 aa, Homo sapiens
  CDR3 for beta chain variable domain of TCR clone 262987 (TRBV20-1, TRBJ1-1)
CSAQTRIGGTEAFF

SEQ ID NO: 525975 - protein, 17 aa, Homo sapiens
  CDR3 for alpha chain variable domain of TCR clone 262988 (TRAV8-4, TRAJ11)
CAVSDRGENSGYRPSPL

SEQ ID NO: 525976 - protein, 14 aa, Homo sapiens
  CDR3 for beta chain variable domain of TCR clone 262988 (TRBV20-1, TRBJ2-1)
CSPNDEASYNEQFF

SEQ ID NO: 525977 - protein, 13 aa, Homo sapiens
  CDR3 for alpha chain variable domain of TCR clone 262989 (TRAV21, TRAJ3)
CCEPDSSASKIIF

SEQ ID NO: 525978 - protein, 15 aa, Homo sapiens
  CDR3 for beta chain variable domain of TCR clone 262989 (TRBV7-3, TRBJ2-1)
CASSPTGGGEVEQFF

SEQ ID NO: 525979 - protein, 14 aa, Homo sapiens
  CDR3 for alpha chain variable domain of TCR clone 262990 (TRAV8-4, TRAJ13)
CAVTLSGGYQKVTF

SEQ ID NO: 525980 - protein, 14 aa, Homo sapiens
  CDR3 for beta chain variable domain of TCR clone 262990 (TRBV7-2, TRBJ1-2)
CASSQTVSTYGYTF

SEQ ID NO: 525981 - protein, 14 aa, Homo sapiens
  CDR3 for alpha chain variable domain of TCR clone 262991 (TRAV9-2, TRAJ39)
CALYISNAGNMLTF

SEQ ID NO: 525982 - protein, 18 aa, Homo sapiens
  CDR3 for beta chain variable domain of TCR clone 262991 (TRBV12-4, TRBJ2-2)
CASSLVAGTRGRTGELFF

SEQ ID NO: 525983 - protein, 13 aa, Homo sapiens
  CDR3 for alpha chain variable domain of TCR clone 262992 (TRAV17, TRAJ9)
CATDYTGGFKTIV

SEQ ID NO: 525984 - protein, 13 aa, Homo sapiens
  CDR3 for beta chain variable domain of TCR clone 262992 (TRBV4-1, TRBJ2-5)
CASSLTRGETQYF

SEQ ID NO: 525985 - protein, 12 aa, Homo sapiens
  CDR3 for alpha chain variable domain of TCR clone 262993 (TRAV22, TRAJ22)
CAPWGAARQLTF

SEQ ID NO: 525986 - protein, 16 aa, Homo sapiens
  CDR3 for beta chain variable domain of TCR clone 262993 (TRBV20-1, TRBJ1-4)
CSAPGQGLLTNEKLFF

SEQ ID NO: 525987 - protein, 14 aa, Homo sapiens
  CDR3 for alpha chain variable domain of TCR clone 262994 (TRAV1-2, TRAJ16)
CAVNRFSDGQKLLF

SEQ ID NO: 525988 - protein, 17 aa, Homo sapiens
  CDR3 for beta chain variable domain of TCR clone 262994 (TRBV7-8, TRBJ2-5)
CASSLASGGRFQETQYF

SEQ ID NO: 525989 - protein, 17 aa, Homo sapiens
  CDR3 for alpha chain variable domain of TCR clone 262995 (TRAV17, TRAJ52)
CATDRNAGGTSYGKLTF

SEQ ID NO: 525990 - protein, 13 aa, Homo sapiens
  CDR3 for beta chain variable domain of TCR clone 262995 (TRBV4-2, TRBJ1-1)
CASSQAGNAEAFF

SEQ ID NO: 525991 - protein, 12 aa, Homo sapiens
  CDR3 for alpha chain variable domain of TCR clone 262996 (TRAV1-1, TRAJ15)
CAVGQAGTALIF

SEQ ID NO: 525992 - protein, 14 aa, Homo sapiens
  CDR3 for beta chain variable domain of TCR clone 262996 (TRBV25-1, TRBJ1-1)
CASTHLGGNTEASF

SEQ ID NO: 525993 - protein, 16 aa, Homo sapiens
  CDR3 for alpha chain variable domain of TCR clone 262997 (TRAV1-1, TRAJ45)
FAVRAYSGGGADGLPF

SEQ ID NO: 525994 - protein, 13 aa, Homo sapiens
  CDR3 for beta chain variable domain of TCR clone 262997 (TRBV20-1, TRBJ1-2)
CSARGTADYGYTF

SEQ ID NO: 525995 - protein, 14 aa, Homo sapiens
  CDR3 for alpha chain variable domain of TCR clone 262998 (TRAV12-1, TRAJ17)
CVVSFKAAGNKLTF

SEQ ID NO: 525996 - protein, 17 aa, Homo sapiens
  CDR3 for beta chain variable domain of TCR clone 262998 (TRBV20-1, TRBJ2-1)
CSASSSGLAGSYNEQFF

SEQ ID NO: 525997 - protein, 14 aa, Homo sapiens
  CDR3 for alpha chain variable domain of TCR clone 262999 (TRAV1-2, TRAJ16)
CAVNRFSDGQKLLF

SEQ ID NO: 525998 - protein, 14 aa, Homo sapiens
  CDR3 for beta chain variable domain of TCR clone 262999 (TRBV2, TRBJ2-1)
CARGTSGGLNEQFF

SEQ ID NO: 525999 - protein, 14 aa, Homo sapiens
  CDR3 for alpha chain variable domain of TCR clone 263000 (TRAV1-2, TRAJ16)
CAVNRFSDGQKLLF

SEQ ID NO: 526000 - protein, 14 aa, Homo sapiens
  CDR3 for beta chain variable domain of TCR clone 263000 (TRBV25-1, TRBJ1-1)
CASTRLGGNTEAFF

SEQ ID NO: 526001 - protein, 15 aa, Homo sapiens
  CDR3 for alpha chain variable domain of TCR clone 263001 (TRAV1-2, TRAJ32)
CAVGGYGGATNKLIF

SEQ ID NO: 526002 - protein, 15 aa, Homo sapiens
  CDR3 for beta chain variable domain of TCR clone 263001 (TRBV25-1, TRBJ2-5)
CGSSDTGTHQETQYF

SEQ ID NO: 526003 - protein, 13 aa, Homo sapiens
  CDR3 for alpha chain variable domain of TCR clone 263002 (TRAV2, TRAJ24)
CAVTTDSRGKLKF

SEQ ID NO: 526004 - protein, 14 aa, Homo sapiens
  CDR3 for beta chain variable domain of TCR clone 263002 (TRBV13, TRBJ2-5)
CASSLGRGQETQYF

SEQ ID NO: 526005 - protein, 18 aa, Homo sapiens
  CDR3 for alpha chain variable domain of TCR clone 263003 (TRAV26-2, TRAJ45)
CILRVDKYSGGGADGLTF

SEQ ID NO: 526006 - protein, 19 aa, Homo sapiens
  CDR3 for beta chain variable domain of TCR clone 263003 (TRBV25-1, TRBJ2-2)
CAILVYRVDRGRKTGELFF

SEQ ID NO: 526007 - protein, 11 aa, Homo sapiens
  CDR3 for alpha chain variable domain of TCR clone 263004 (TRAV2, TRAJ33)
CAVDSNYQLIW

SEQ ID NO: 526008 - protein, 12 aa, Homo sapiens
  CDR3 for beta chain variable domain of TCR clone 263004 (TRBV7-9, TRBJ2-7)
CASSLEGYEQYF

SEQ ID NO: 526009 - protein, 15 aa, Homo sapiens
  CDR3 for alpha chain variable domain of TCR clone 263005 (TRAV8-3, TRAJ21)
CAVGALPPRWYKFYF

SEQ ID NO: 526010 - protein, 14 aa, Homo sapiens
  CDR3 for beta chain variable domain of TCR clone 263005 (TRBV5-7, TRBJ1-1)
CASSLAGDWTEAFF

SEQ ID NO: 526011 - protein, 18 aa, Homo sapiens
  CDR3 for alpha chain variable domain of TCR clone 263006 (TRAV21, TRAJ52)
CAVRPSPAGGTSYGKLTF

SEQ ID NO: 526012 - protein, 16 aa, Homo sapiens
  CDR3 for beta chain variable domain of TCR clone 263006 (TRBV19, TRBJ2-2)
CASRSPGTGGTGELFF

SEQ ID NO: 526013 - protein, 14 aa, Homo sapiens
  CDR3 for alpha chain variable domain of TCR clone 263007 (TRAV3, TRAJ34)
CAVRAPGNTDKLIF

SEQ ID NO: 526014 - protein, 16 aa, Homo sapiens
  CDR3 for beta chain variable domain of TCR clone 263007 (TRBV7-3, TRBJ2-2)
CASSLKRGTLSGELFF

SEQ ID NO: 526015 - protein, 12 aa, Homo sapiens
  CDR3 for alpha chain variable domain of TCR clone 263008 (TRAV12-3, TRAJ17)
CAMTLTGNKLTF

SEQ ID NO: 526016 - protein, 11 aa, Homo sapiens
  CDR3 for beta chain variable domain of TCR clone 263008 (TRBV11-3, TRBJ2-1)
CASSLGNEQFF

SEQ ID NO: 526017 - protein, 15 aa, Homo sapiens
  CDR3 for alpha chain variable domain of TCR clone 263009 (TRAV12-2, TRAJ53)
CAVNGGGGSNYKLTF

SEQ ID NO: 526018 - protein, 17 aa, Homo sapiens
  CDR3 for beta chain variable domain of TCR clone 263009 (TRBV7-3, TRBJ2-3)
RASSLMKRMRGANTQYF

SEQ ID NO: 526019 - protein, 14 aa, Homo sapiens
  CDR3 for alpha chain variable domain of TCR clone 263010 (TRAV35, TRAJ13)
CAGSPSGGYQNVTF

SEQ ID NO: 526020 - protein, 17 aa, Homo sapiens
  CDR3 for beta chain variable domain of TCR clone 263010 (TRBV7-6, TRBJ2-5)
CASSPGLADPWGEIQYF

SEQ ID NO: 526021 - protein, 14 aa, Homo sapiens
  CDR3 for alpha chain variable domain of TCR clone 263011 (TRAV2, TRAJ26)
CAMERDNYGQNFVF

SEQ ID NO: 526022 - protein, 15 aa, Homo sapiens
  CDR3 for beta chain variable domain of TCR clone 263011 (TRBV28, TRBJ2-4)
CASRAPLLAKNMQYF

SEQ ID NO: 526023 - protein, 12 aa, Homo sapiens
  CDR3 for alpha chain variable domain of TCR clone 263012 (TRAV13-2, TRAJ39)
CAENNAGNMLTF

SEQ ID NO: 526024 - protein, 13 aa, Homo sapiens
  CDR3 for beta chain variable domain of TCR clone 263012 (TRBV19, TRBJ1-1)
CASTRRGDTEAFF

SEQ ID NO: 526025 - protein, 15 aa, Homo sapiens
  CDR3 for alpha chain variable domain of TCR clone 263013 (TRAV17, TRAJ57)
CATGPSQGGSEKLVF

SEQ ID NO: 526026 - protein, 16 aa, Homo sapiens
  CDR3 for beta chain variable domain of TCR clone 263013 (TRBV20-1, TRBJ2-2)
CSASASGIPGAWELFF

SEQ ID NO: 526027 - protein, 15 aa, Homo sapiens
  CDR3 for alpha chain variable domain of TCR clone 263014 (TRAV3, TRAJ22)
CAVRDRGGSARQLTF

SEQ ID NO: 526028 - protein, 15 aa, Homo sapiens
  CDR3 for beta chain variable domain of TCR clone 263014 (TRBV20-1, TRBJ2-1)
CSARGIGGTYNEQFF

SEQ ID NO: 526029 - protein, 16 aa, Homo sapiens
  CDR3 for alpha chain variable domain of TCR clone 263015 (TRAV1-2, TRAJ10)
CAVRGVLTGGGNKLTF

SEQ ID NO: 526030 - protein, 15 aa, Homo sapiens
  CDR3 for beta chain variable domain of TCR clone 263015 (TRBV5-5, TRBJ2-7)
CASSLAAPLSYEQYF

SEQ ID NO: 526031 - protein, 17 aa, Homo sapiens
  CDR3 for alpha chain variable domain of TCR clone 263016 (TRAV3, TRAJ12)
CAVRDGGRMDSSYKLIF

SEQ ID NO: 526032 - protein, 12 aa, Homo sapiens
  CDR3 for beta chain variable domain of TCR clone 263016 (TRBV11-2, TRBJ2-2)
CASSLGGGELFC

SEQ ID NO: 526033 - protein, 15 aa, Homo sapiens
  CDR3 for alpha chain variable domain of TCR clone 263017 (TRAV35, TRAJ41)
CAGQLFSNSGCALNF

SEQ ID NO: 526034 - protein, 14 aa, Homo sapiens
  CDR3 for beta chain variable domain of TCR clone 263017 (TRBV7-2, TRBJ1-2)
CASSRGGTNYGYTF

SEQ ID NO: 526035 - protein, 13 aa, Homo sapiens
  CDR3 for alpha chain variable domain of TCR clone 263018 (TRAV23/DV6, TRAJ16)
CAASISDGQKLLF

SEQ ID NO: 526036 - protein, 19 aa, Homo sapiens
  CDR3 for beta chain variable domain of TCR clone 263018 (TRBV7-2, TRBJ2-3)
CASSFLSRNWGGGTDTQYF

SEQ ID NO: 526037 - protein, 12 aa, Homo sapiens
  CDR3 for alpha chain variable domain of TCR clone 263019 (TRAV21, TRAJ39)
CAADNAGNMLTF

SEQ ID NO: 526038 - protein, 14 aa, Homo sapiens
  CDR3 for beta chain variable domain of TCR clone 263019 (TRBV12-5, TRBJ2-5)
CASGSRTHQETQYF

SEQ ID NO: 526039 - protein, 14 aa, Homo sapiens
  CDR3 for alpha chain variable domain of TCR clone 263020 (TRAV3, TRAJ7)
CAVREEEREQQTRF

SEQ ID NO: 526040 - protein, 11 aa, Homo sapiens
  CDR3 for beta chain variable domain of TCR clone 263020 (TRBV7-2, TRBJ2-3)
CASSSSDTQYF

SEQ ID NO: 526041 - protein, 16 aa, Homo sapiens
  CDR3 for alpha chain variable domain of TCR clone 263021 (TRAV16, TRAJ4)
CALSRMFSGGYNKLIF

SEQ ID NO: 526042 - protein, 13 aa, Homo sapiens
  CDR3 for beta chain variable domain of TCR clone 263021 (TRBV14, TRBJ1-1)
CASSREFGTEAFF

SEQ ID NO: 526043 - protein, 12 aa, Homo sapiens
  CDR3 for alpha chain variable domain of TCR clone 263022 (TRAV12-3, TRAJ29)
CAAREGNTSLVF

SEQ ID NO: 526044 - protein, 17 aa, Homo sapiens
  CDR3 for beta chain variable domain of TCR clone 263022 (TRBV18, TRBJ2-1)
CASSPLAAGAGDNEQFF

SEQ ID NO: 526045 - protein, 12 aa, Homo sapiens
  CDR3 for alpha chain variable domain of TCR clone 263023 (TRAV25, TRAJ11)
CAGASGYSTLTF

SEQ ID NO: 526046 - protein, 14 aa, Homo sapiens
  CDR3 for beta chain variable domain of TCR clone 263023 (TRBV5-8, TRBJ2-3)
CASSLRQGTDTQYC

SEQ ID NO: 526047 - protein, 15 aa, Homo sapiens
  CDR3 for alpha chain variable domain of TCR clone 263024 (TRAV12-3, TRAJ6)
CAMSATTGGSYITTF

SEQ ID NO: 526048 - protein, 15 aa, Homo sapiens
  CDR3 for beta chain variable domain of TCR clone 263024 (TRBV20-1, TRBJ2-7)
CSARDRVSGMDEQYF

SEQ ID NO: 526049 - protein, 14 aa, Homo sapiens
  CDR3 for alpha chain variable domain of TCR clone 263025 (TRAV17, TRAJ4)
CATAPLGGYNKLIF

SEQ ID NO: 526050 - protein, 16 aa, Homo sapiens
  CDR3 for beta chain variable domain of TCR clone 263025 (TRBV19, TRBJ2-1)
CASSKAGPSSYNEQFF

SEQ ID NO: 526051 - protein, 14 aa, Homo sapiens
  CDR3 for alpha chain variable domain of TCR clone 263026 (TRAV14/DV4, TRAJ54)
CAMREAPGAQKLVF

SEQ ID NO: 526052 - protein, 10 aa, Homo sapiens
  CDR3 for beta chain variable domain of TCR clone 263026 (TRBV7-2, TRBJ2-2)
CASRRPGQNT

SEQ ID NO: 526053 - protein, 14 aa, Homo sapiens
  CDR3 for alpha chain variable domain of TCR clone 263027 (TRAV12-3, TRAJ10)
SHLPLTGGGNKLTF

SEQ ID NO: 526054 - protein, 14 aa, Homo sapiens
  CDR3 for beta chain variable domain of TCR clone 263027 (TRBV7-3, TRBJ1-1)
CASSRQGGDTEAFF

SEQ ID NO: 526055 - protein, 13 aa, Homo sapiens
  CDR3 for alpha chain variable domain of TCR clone 263028 (TRAV16, TRAJ58)
CALSIPSGSRLTF

SEQ ID NO: 526056 - protein, 14 aa, Homo sapiens
  CDR3 for beta chain variable domain of TCR clone 263028 (TRBV7-2, TRBJ2-7)
CASSPKTSFYEQYF

SEQ ID NO: 526057 - protein, 14 aa, Homo sapiens
  CDR3 for alpha chain variable domain of TCR clone 263029 (TRAV26-1, TRAJ45)
CIEVTVGGADGLTF

SEQ ID NO: 526058 - protein, 14 aa, Homo sapiens
  CDR3 for beta chain variable domain of TCR clone 263029 (TRBV6-1, TRBJ1-3)
CASVQGGGGNTIYF

SEQ ID NO: 526059 - protein, 14 aa, Homo sapiens
  CDR3 for alpha chain variable domain of TCR clone 263030 (TRAV2, TRAJ29)
CAVESYSGNTPIVF

SEQ ID NO: 526060 - protein, 15 aa, Homo sapiens
  CDR3 for beta chain variable domain of TCR clone 263030 (TRBV19, TRBJ2-5)
CASSIARARGETQYF

SEQ ID NO: 526061 - protein, 13 aa, Homo sapiens
  CDR3 for alpha chain variable domain of TCR clone 263031 (TRAV8-3, TRAJ6)
CAVGSGGSYIPSF

SEQ ID NO: 526062 - protein, 14 aa, Homo sapiens
  CDR3 for beta chain variable domain of TCR clone 263031 (TRBV11-2, TRBJ1-1)
CASSTQRGRTEAFF

SEQ ID NO: 526063 - protein, 12 aa, Homo sapiens
  CDR3 for alpha chain variable domain of TCR clone 263032 (TRAV3, TRAJ4)
CAVSGGSNKLIF

SEQ ID NO: 526064 - protein, 17 aa, Homo sapiens
  CDR3 for beta chain variable domain of TCR clone 263032 (TRBV6-5, TRBJ2-6)
CASSSATSGPGANVLTF

SEQ ID NO: 526065 - protein, 15 aa, Homo sapiens
  CDR3 for alpha chain variable domain of TCR clone 263033 (TRAV3, TRAJ4)
CAVRDPSGGYNKLIF

SEQ ID NO: 526066 - protein, 13 aa, Homo sapiens
  CDR3 for beta chain variable domain of TCR clone 263033 (TRBV7-6, TRBJ1-3)
CASSSQQGNTIYF

SEQ ID NO: 526067 - protein, 14 aa, Homo sapiens
  CDR3 for alpha chain variable domain of TCR clone 263034 (TRAV12-1, TRAJ17)
CVVNYKAAGYKLTF

SEQ ID NO: 526068 - protein, 13 aa, Homo sapiens
  CDR3 for beta chain variable domain of TCR clone 263034 (TRBV19, TRBJ2-7)
CASRKAGGSEQYF

SEQ ID NO: 526069 - protein, 18 aa, Homo sapiens
  CDR3 for alpha chain variable domain of TCR clone 263035 (TRAV26-1, TRAJ22)
CIVRVALISSGSARQLTF

SEQ ID NO: 526070 - protein, 15 aa, Homo sapiens
  CDR3 for beta chain variable domain of TCR clone 263035 (TRBV28, TRBJ2-1)
CASSGLAEVDNEQFF

SEQ ID NO: 526071 - protein, 14 aa, Homo sapiens
  CDR3 for alpha chain variable domain of TCR clone 263036 (TRAV35, TRAJ24)
CAGQEADSWGKLQF

SEQ ID NO: 526072 - protein, 13 aa, Homo sapiens
  CDR3 for beta chain variable domain of TCR clone 263036 (TRBV7-7, TRBJ2-3)
CASSLSRADTQYF

SEQ ID NO: 526073 - protein, 11 aa, Homo sapiens
  CDR3 for alpha chain variable domain of TCR clone 263037 (TRAV12-1, TRAJ47)
CVVNPSNNLVF

SEQ ID NO: 526074 - protein, 16 aa, Homo sapiens
  CDR3 for beta chain variable domain of TCR clone 263037 (TRBV24-1, TRBJ2-3)
CATSDPGTGATDTQYF

SEQ ID NO: 526075 - protein, 16 aa, Homo sapiens
  CDR3 for alpha chain variable domain of TCR clone 263038 (TRAV12-3, TRAJ10)
CAMKKGSTGGGNKLTF

SEQ ID NO: 526076 - protein, 12 aa, Homo sapiens
  CDR3 for beta chain variable domain of TCR clone 263038 (TRBV20-1, TRBJ2-7)
CSAITPTKEQYF

SEQ ID NO: 526077 - protein, 15 aa, Homo sapiens
  CDR3 for alpha chain variable domain of TCR clone 263039 (TRAV12-1, TRAJ44)
CVSDLPTGTASKPTF

SEQ ID NO: 526078 - protein, 13 aa, Homo sapiens
  CDR3 for beta chain variable domain of TCR clone 263039 (TRBV6-5, TRBJ2-5)
CASSPQGGETQYF

SEQ ID NO: 526079 - protein, 16 aa, Homo sapiens
  CDR3 for alpha chain variable domain of TCR clone 263040 (TRAV1-2, TRAJ10)
CAVRGVLTGGGNKITF

SEQ ID NO: 526080 - protein, 14 aa, Homo sapiens
  CDR3 for beta chain variable domain of TCR clone 263040 (TRBV19, TRBJ2-1)
CASPTFVLSGEQFF

SEQ ID NO: 526081 - protein, 14 aa, Homo sapiens
  CDR3 for alpha chain variable domain of TCR clone 263041 (TRAV29/DV5, TRAJ45)
CAASFRGGADGLTF

SEQ ID NO: 526082 - protein, 13 aa, Homo sapiens
  CDR3 for beta chain variable domain of TCR clone 263041 (TRBV19, TRBJ1-5)
CASSMRGYQPQHF

SEQ ID NO: 526083 - protein, 14 aa, Homo sapiens
  CDR3 for alpha chain variable domain of TCR clone 263042 (TRAV29/DV5, TRAJ48)
CAAMALFGNGKLTF

SEQ ID NO: 526084 - protein, 15 aa, Homo sapiens
  CDR3 for beta chain variable domain of TCR clone 263042 (TRBV7-2, TRBJ2-1)
CASTHGTGIYNEQFF

SEQ ID NO: 526085 - protein, 14 aa, Homo sapiens
  CDR3 for alpha chain variable domain of TCR clone 263043 (TRAV3, TRAJ37)
CAVKESGNTGKLIF

SEQ ID NO: 526086 - protein, 16 aa, Homo sapiens
  CDR3 for beta chain variable domain of TCR clone 263043 (TRBV19, TRBJ1-1)
CAGSPTRFWPGTEAFF

SEQ ID NO: 526087 - protein, 12 aa, Homo sapiens
  CDR3 for alpha chain variable domain of TCR clone 263044 (TRAV1-2, TRAJ10)
TSVTGGGNKLTF

SEQ ID NO: 526088 - protein, 15 aa, Homo sapiens
  CDR3 for beta chain variable domain of TCR clone 263044 (TRBV4-1, TRBJ1-4)
CASSDTGGTNEKLFF

SEQ ID NO: 526089 - protein, 14 aa, Homo sapiens
  CDR3 for alpha chain variable domain of TCR clone 263045 (TRAV12-2, TRAJ9)
CAVNMEGGGFKTIF

SEQ ID NO: 526090 - protein, 11 aa, Homo sapiens
  CDR3 for beta chain variable domain of TCR clone 263045 (TRBV10-3, TRBJ2-7)
CAISEGLEQYF

SEQ ID NO: 526091 - protein, 13 aa, Homo sapiens
  CDR3 for alpha chain variable domain of TCR clone 263046 (TRAV21, TRAJ34)
CAVSEGDTDKLIF

SEQ ID NO: 526092 - protein, 17 aa, Homo sapiens
  CDR3 for beta chain variable domain of TCR clone 263046 (TRBV20-1, TRBJ1-5)
CSARYPSAQGFNQPQHF

SEQ ID NO: 526093 - protein, 15 aa, Homo sapiens
  CDR3 for alpha chain variable domain of TCR clone 263047 (TRAV34, TRAJ38)
CGADSTPGNNRKLIW

SEQ ID NO: 526094 - protein, 16 aa, Homo sapiens
  CDR3 for beta chain variable domain of TCR clone 263047 (TRBV6-1, TRBJ2-3)
CASSEVIGQGTDTQYF

SEQ ID NO: 526095 - protein, 17 aa, Homo sapiens
  CDR3 for alpha chain variable domain of TCR clone 263048 (TRAV8-6, TRAJ58)
CAVSSWVGETRGSRLPF

SEQ ID NO: 526096 - protein, 14 aa, Homo sapiens
  CDR3 for beta chain variable domain of TCR clone 263048 (TRBV4-2, TRBJ2-1)
CASGLDRAYNEQFF

SEQ ID NO: 526097 - protein, 13 aa, Homo sapiens
  CDR3 for alpha chain variable domain of TCR clone 263049 (TRAV1-2, TRAJ13)
CAVISGGYQKVTF

SEQ ID NO: 526098 - protein, 14 aa, Homo sapiens
  CDR3 for beta chain variable domain of TCR clone 263049 (TRBV4-1, TRBJ1-5)
CASSPKGDNQPQHF

SEQ ID NO: 526099 - protein, 13 aa, Homo sapiens
  CDR3 for alpha chain variable domain of TCR clone 263050 (TRAV27, TRAJ29)
CAGAHSGNTPLVF

SEQ ID NO: 526100 - protein, 13 aa, Homo sapiens
  CDR3 for beta chain variable domain of TCR clone 263050 (TRBV19, TRBJ2-1)
CQSDFRFEGEQFF

SEQ ID NO: 526101 - protein, 15 aa, Homo sapiens
  CDR3 for alpha chain variable domain of TCR clone 263051 (TRAV4, TRAJ8)
CLVGEQHTGFHKLVF

SEQ ID NO: 526102 - protein, 15 aa, Homo sapiens
  CDR3 for beta chain variable domain of TCR clone 263051 (TRBV7-9, TRBJ2-5)
CASSNRDYLQETQYF

SEQ ID NO: 526103 - protein, 14 aa, Homo sapiens
  CDR3 for alpha chain variable domain of TCR clone 263052 (TRAV12-2, TRAJ32)
CAHPESGATNKLIF

SEQ ID NO: 526104 - protein, 13 aa, Homo sapiens
  CDR3 for beta chain variable domain of TCR clone 263052 (TRBV4-2, TRBJ2-3)
CASRETSPRDAVF

SEQ ID NO: 526105 - protein, 14 aa, Homo sapiens
  CDR3 for alpha chain variable domain of TCR clone 263053 (TRAV12-2, TRAJ48)
CAVNAFFGNEKLTF

SEQ ID NO: 526106 - protein, 13 aa, Homo sapiens
  CDR3 for beta chain variable domain of TCR clone 263053 (TRBV28, TRBJ2-7)
CAGAQQSLDEQYF

SEQ ID NO: 526107 - protein, 19 aa, Homo sapiens
  CDR3 for alpha chain variable domain of TCR clone 263054 (TRAV1-2, TRAJ26)
CLLPLCCERPDNYGQNFVF

SEQ ID NO: 526108 - protein, 13 aa, Homo sapiens
  CDR3 for beta chain variable domain of TCR clone 263054 (TRBV12-5, TRBJ2-3)
CASGDRQSDTQYF

SEQ ID NO: 526109 - protein, 15 aa, Homo sapiens
  CDR3 for alpha chain variable domain of TCR clone 263055 (TRAV3, TRAJ22)
CAVRDRGGSARQLTF

SEQ ID NO: 526110 - protein, 14 aa, Homo sapiens
  CDR3 for beta chain variable domain of TCR clone 263055 (TRBV20-1, TRBJ2-5)
CSALVPGDEETQYF

SEQ ID NO: 526111 - protein, 17 aa, Homo sapiens
  CDR3 for alpha chain variable domain of TCR clone 263056 (TRAV4, TRAJ18)
CLVVAAGRGSTLGRLYF

SEQ ID NO: 526112 - protein, 11 aa, Homo sapiens
  CDR3 for beta chain variable domain of TCR clone 263056 (TRBV29-1, TRBJ2-5)
CSEDRTGTQYF

SEQ ID NO: 526113 - protein, 14 aa, Homo sapiens
  CDR3 for alpha chain variable domain of TCR clone 263057 (TRAV12-2, TRAJ13)
CAVKKTGGYQKVTF

SEQ ID NO: 526114 - protein, 14 aa, Homo sapiens
  CDR3 for beta chain variable domain of TCR clone 263057 (TRBV5-5, TRBJ2-7)
CASSLGQGTYEQSF

SEQ ID NO: 526115 - protein, 15 aa, Homo sapiens
  CDR3 for alpha chain variable domain of TCR clone 263058 (TRAV26-1, TRAJ22)
CIVRVSFWFCKATDL

SEQ ID NO: 526116 - protein, 13 aa, Homo sapiens
  CDR3 for beta chain variable domain of TCR clone 263058 (TRBV7-9, TRBJ1-2)
CVSSLKQNYGYTF

SEQ ID NO: 526117 - protein, 14 aa, Homo sapiens
  CDR3 for alpha chain variable domain of TCR clone 263059 (TRAV20, TRAJ29)
CAVQAWVGNTPLVF

SEQ ID NO: 526118 - protein, 15 aa, Homo sapiens
  CDR3 for beta chain variable domain of TCR clone 263059 (TRBV29-1, TRBJ2-7)
CSVEFFDRGSYERYF

SEQ ID NO: 526119 - protein, 12 aa, Homo sapiens
  CDR3 for alpha chain variable domain of TCR clone 263060 (TRAV13-1, TRAJ53)
AASGGSNYKLTF

SEQ ID NO: 526120 - protein, 13 aa, Homo sapiens
  CDR3 for beta chain variable domain of TCR clone 263060 (TRBV2, TRBJ2-7)
CASSVGGSGEQYF

SEQ ID NO: 526121 - protein, 16 aa, Homo sapiens
  CDR3 for alpha chain variable domain of TCR clone 263061 (TRAV21, TRAJ37)
CAVTPRGSSNTGKLIF

SEQ ID NO: 526122 - protein, 13 aa, Homo sapiens
  CDR3 for beta chain variable domain of TCR clone 263061 (TRBV7-9, TRBJ2-5)
CASLSPGQETQYF

SEQ ID NO: 526123 - protein, 14 aa, Homo sapiens
  CDR3 for alpha chain variable domain of TCR clone 263062 (TRAV21, TRAJ45)
CAVSSGGGADGLTF

SEQ ID NO: 526124 - protein, 16 aa, Homo sapiens
  CDR3 for beta chain variable domain of TCR clone 263062 (TRBV6-3, TRBJ2-1)
CASSRTSGARRNEQFF

SEQ ID NO: 526125 - protein, 13 aa, Homo sapiens
  CDR3 for alpha chain variable domain of TCR clone 263063 (TRAV1-2, TRAJ9)
CAALNTGGFKTII

SEQ ID NO: 526126 - protein, 15 aa, Homo sapiens
  CDR3 for beta chain variable domain of TCR clone 263063 (TRBV6-3, TRBJ2-7)
CASSSPGTVFYEQYF

SEQ ID NO: 526127 - protein, 13 aa, Homo sapiens
  CDR3 for alpha chain variable domain of TCR clone 263064 (TRAV3, TRAJ27)
CAVRPLGAGKSTF

SEQ ID NO: 526128 - protein, 15 aa, Homo sapiens
  CDR3 for beta chain variable domain of TCR clone 263064 (TRBV12-4, TRBJ1-5)
CANTRGSGFGQPQHF

SEQ ID NO: 526129 - protein, 13 aa, Homo sapiens
  CDR3 for alpha chain variable domain of TCR clone 263065 (TRAV13-2, TRAJ13)
CAERPGGYQKVPF

SEQ ID NO: 526130 - protein, 15 aa, Homo sapiens
  CDR3 for beta chain variable domain of TCR clone 263065 (TRBV11-3, TRBJ2-7)
CASSPGPASSYEQYF

SEQ ID NO: 526131 - protein, 14 aa, Homo sapiens
  CDR3 for alpha chain variable domain of TCR clone 263066 (TRAV26-1, TRAJ21)
CIVRPPYNFNKFYF

SEQ ID NO: 526132 - protein, 13 aa, Homo sapiens
  CDR3 for beta chain variable domain of TCR clone 263066 (TRBV27, TRBJ1-1)
CASSLSIGAEAFF

SEQ ID NO: 526133 - protein, 14 aa, Homo sapiens
  CDR3 for alpha chain variable domain of TCR clone 263067 (TRAV1-2, TRAJ16)
CAVRGFSDGQKLLF

SEQ ID NO: 526134 - protein, 16 aa, Homo sapiens
  CDR3 for beta chain variable domain of TCR clone 263067 (TRBV13, TRBJ2-2)
CASSPRTGEHTGELFF

SEQ ID NO: 526135 - protein, 13 aa, Homo sapiens
  CDR3 for alpha chain variable domain of TCR clone 263068 (TRAV13-1, TRAJ15)
CAALYQAGTALIF

SEQ ID NO: 526136 - protein, 15 aa, Homo sapiens
  CDR3 for beta chain variable domain of TCR clone 263068 (TRBV5-1, TRBJ2-1)
CASSPPRAAYNEQFF

SEQ ID NO: 526137 - protein, 13 aa, Homo sapiens
  CDR3 for alpha chain variable domain of TCR clone 263069 (TRAV12-2, TRAJ20)
CAVYPSNDYKLSF

SEQ ID NO: 526138 - protein, 17 aa, Homo sapiens
  CDR3 for beta chain variable domain of TCR clone 263069 (TRBV18, TRBJ2-2)
CASSPSDPWQNTGELFF

SEQ ID NO: 526139 - protein, 17 aa, Homo sapiens
  CDR3 for alpha chain variable domain of TCR clone 263070 (TRAV26-1, TRAJ27)
CIVSTPWINTNAGKSTF

SEQ ID NO: 526140 - protein, 15 aa, Homo sapiens
  CDR3 for beta chain variable domain of TCR clone 263070 (TRBV7-9, TRBJ2-1)
CQQRDPGLAIDEQFF

SEQ ID NO: 526141 - protein, 16 aa, Homo sapiens
  CDR3 for alpha chain variable domain of TCR clone 263071 (TRAV30, TRAJ24)
CGTEIVHADSWGKFQF

SEQ ID NO: 526142 - protein, 14 aa, Homo sapiens
  CDR3 for beta chain variable domain of TCR clone 263071 (TRBV12-5, TRBJ2-5)
CASGSRTHEETQYF

SEQ ID NO: 526143 - protein, 14 aa, Homo sapiens
  CDR3 for alpha chain variable domain of TCR clone 263072 (TRAV17, TRAJ16)
CATADFSDGQKLLF

SEQ ID NO: 526144 - protein, 18 aa, Homo sapiens
  CDR3 for beta chain variable domain of TCR clone 263072 (TRBV7-9, TRBJ1-1)
CASSKPWDTMGMNTEAFF

SEQ ID NO: 526145 - protein, 10 aa, Homo sapiens
  CDR3 for alpha chain variable domain of TCR clone 263073 (TRAV1-2, TRAJ20)
CVPNDYQLSF

SEQ ID NO: 526146 - protein, 14 aa, Homo sapiens
  CDR3 for beta chain variable domain of TCR clone 263073 (TRBV12-5, TRBJ2-5)
CASGSRTHQETQYF

SEQ ID NO: 526147 - protein, 15 aa, Homo sapiens
  CDR3 for alpha chain variable domain of TCR clone 263074 (TRAV8-2, TRAJ40)
CVVLGTTSGTYKYIF

SEQ ID NO: 526148 - protein, 15 aa, Homo sapiens
  CDR3 for beta chain variable domain of TCR clone 263074 (TRBV5-1, TRBJ1-4)
CASSSWTGREEKLFF

SEQ ID NO: 526149 - protein, 13 aa, Homo sapiens
  CDR3 for alpha chain variable domain of TCR clone 263075 (TRAV12-3, TRAJ13)
CAMYSGGYQKVTF

SEQ ID NO: 526150 - protein, 14 aa, Homo sapiens
  CDR3 for beta chain variable domain of TCR clone 263075 (TRBV5-1, TRBJ2-7)
CASSRGESLYEQYF

SEQ ID NO: 526151 - protein, 16 aa, Homo sapiens
  CDR3 for alpha chain variable domain of TCR clone 263076 (TRAV13-2, TRAJ53)
CAENASSRGSNYKLTF

SEQ ID NO: 526152 - protein, 19 aa, Homo sapiens
  CDR3 for beta chain variable domain of TCR clone 263076 (TRBV28, TRBJ2-7)
CASSYSGTSRLGWVYEQYF

SEQ ID NO: 526153 - protein, 14 aa, Homo sapiens
  CDR3 for alpha chain variable domain of TCR clone 263077 (TRAV36/DV7, TRAJ44)
CCGANTGTASKLTF

SEQ ID NO: 526154 - protein, 16 aa, Homo sapiens
  CDR3 for beta chain variable domain of TCR clone 263077 (TRBV7-9, TRBJ2-1)
CASSDVAGGSYNEQFF

SEQ ID NO: 526155 - protein, 12 aa, Homo sapiens
  CDR3 for alpha chain variable domain of TCR clone 263078 (TRAV12-3, TRAJ17)
CAMTLTGNKLTF

SEQ ID NO: 526156 - protein, 17 aa, Homo sapiens
  CDR3 for beta chain variable domain of TCR clone 263078 (TRBV20-1, TRBJ2-7)
CSATRAGGAAGVEEQYF

SEQ ID NO: 526157 - protein, 13 aa, Homo sapiens
  CDR3 for alpha chain variable domain of TCR clone 263079 (TRAV8-6, TRAJ16)
CAVSSPDCQKLLF

SEQ ID NO: 526158 - protein, 16 aa, Homo sapiens
  CDR3 for beta chain variable domain of TCR clone 263079 (TRBV5-7, TRBJ2-3)
CASSSLGGAITDTQYF

SEQ ID NO: 526159 - protein, 11 aa, Homo sapiens
  CDR3 for alpha chain variable domain of TCR clone 263080 (TRAV21, TRAJ31)
CAVRNNARLMF

SEQ ID NO: 526160 - protein, 14 aa, Homo sapiens
  CDR3 for beta chain variable domain of TCR clone 263080 (TRBV18, TRBJ2-7)
CASSPRGGAYEQYF

SEQ ID NO: 526161 - protein, 17 aa, Homo sapiens
  CDR3 for alpha chain variable domain of TCR clone 263081 (TRAV3, TRAJ6)
CAVRDGPRAGGSYIPTF

SEQ ID NO: 526162 - protein, 20 aa, Homo sapiens
  CDR3 for beta chain variable domain of TCR clone 263081 (TRBV7-8, TRBJ2-2)
CASSHLFPGPTIHIAGELFF

SEQ ID NO: 526163 - protein, 12 aa, Homo sapiens
  CDR3 for alpha chain variable domain of TCR clone 263082 (TRAV12-3, TRAJ17)
CAMTLTGNKLTF

SEQ ID NO: 526164 - protein, 17 aa, Homo sapiens
  CDR3 for beta chain variable domain of TCR clone 263082 (TRBV6-6, TRBJ2-5)
CASSYPLAGGPQETQYF

SEQ ID NO: 526165 - protein, 13 aa, Homo sapiens
  CDR3 for alpha chain variable domain of TCR clone 263083 (TRAV26-1, TRAJ34)
CIVRPWITDKLIF

SEQ ID NO: 526166 - protein, 13 aa, Homo sapiens
  CDR3 for beta chain variable domain of TCR clone 263083 (TRBV5-1, TRBJ2-1)
GASSWGSYNEQFF

SEQ ID NO: 526167 - protein, 16 aa, Homo sapiens
  CDR3 for alpha chain variable domain of TCR clone 263084 (TRAV30, TRAJ24)
CGTEIVDADSWGKFQF

SEQ ID NO: 526168 - protein, 14 aa, Homo sapiens
  CDR3 for beta chain variable domain of TCR clone 263084 (TRBV12-5, TRBJ2-5)
CASGSRTHQGTQYV

SEQ ID NO: 526169 - protein, 12 aa, Homo sapiens
  CDR3 for alpha chain variable domain of TCR clone 263085 (TRAV1-2, TRAJ33)
CAALDSNYQLIW

SEQ ID NO: 526170 - protein, 16 aa, Homo sapiens
  CDR3 for beta chain variable domain of TCR clone 263085 (TRBV4-1, TRBJ2-7)
CASRPSGGGADNEQYF

SEQ ID NO: 526171 - protein, 14 aa, Homo sapiens
  CDR3 for alpha chain variable domain of TCR clone 263086 (TRAV13-1, TRAJ11)
CAASRRSGYSTLTF

SEQ ID NO: 526172 - protein, 13 aa, Homo sapiens
  CDR3 for beta chain variable domain of TCR clone 263086 (TRBV19, TRBJ1-2)
CASSVPGQDGYTF

SEQ ID NO: 526173 - protein, 15 aa, Homo sapiens
  CDR3 for alpha chain variable domain of TCR clone 263087 (TRAV2, TRAJ9)
CAVEDRGTGGFKTIT

SEQ ID NO: 526174 - protein, 16 aa, Homo sapiens
  CDR3 for beta chain variable domain of TCR clone 263087 (TRBV24-1, TRBJ2-3)
CATSDPGTGATDTQYF

SEQ ID NO: 526175 - protein, 21 aa, Homo sapiens
  CDR3 for alpha chain variable domain of TCR clone 263088 (TRAV8-3, TRAJ10)
CAVGHTHGRRKQTHLWDRHSA

SEQ ID NO: 526176 - protein, 10 aa, Homo sapiens
  CDR3 for beta chain variable domain of TCR clone 263088 (TRBV20-1, TRBJ2-5)
CSARFETKYF

SEQ ID NO: 526177 - protein, 18 aa, Homo sapiens
  CDR3 for alpha chain variable domain of TCR clone 263089 (TRAV13-1, TRAJ52)
CAAKNPNAGGTSYGKLTF

SEQ ID NO: 526178 - protein, 14 aa, Homo sapiens
  CDR3 for beta chain variable domain of TCR clone 263089 (TRBV11-2, TRBJ1-2)
CASSLGTANYGYTF

SEQ ID NO: 526179 - protein, 16 aa, Homo sapiens
  CDR3 for alpha chain variable domain of TCR clone 263090 (TRAV16, TRAJ52)
CALSAAGGTSYGKLTF

SEQ ID NO: 526180 - protein, 16 aa, Homo sapiens
  CDR3 for beta chain variable domain of TCR clone 263090 (TRBV12-4, TRBJ1-5)
CASSRPVGGSNQPEHF

SEQ ID NO: 526181 - protein, 14 aa, Homo sapiens
  CDR3 for alpha chain variable domain of TCR clone 263091 (TRAV12-2, TRAJ40)
CAVKSPSGTYKYIF

SEQ ID NO: 526182 - protein, 14 aa, Homo sapiens
  CDR3 for beta chain variable domain of TCR clone 263091 (TRBV4-2, TRBJ2-1)
CASGLDRAYNEQFF

SEQ ID NO: 526183 - protein, 12 aa, Homo sapiens
  CDR3 for alpha chain variable domain of TCR clone 263092 (TRAV12-1, TRAJ34)
CVVTFNTGKLIF

SEQ ID NO: 526184 - protein, 14 aa, Homo sapiens
  CDR3 for beta chain variable domain of TCR clone 263092 (TRBV19, TRBJ1-1)
CASLRTGLNTEAFC

SEQ ID NO: 526185 - protein, 11 aa, Homo sapiens
  CDR3 for alpha chain variable domain of TCR clone 263093 (TRAV12-1, TRAJ43)
CVEYDNNDMRF

SEQ ID NO: 526186 - protein, 15 aa, Homo sapiens
  CDR3 for beta chain variable domain of TCR clone 263093 (TRBV5-1, TRBJ2-1)
CASSPPRAPYNEQFF

SEQ ID NO: 526187 - protein, 13 aa, Homo sapiens
  CDR3 for alpha chain variable domain of TCR clone 263094 (TRAV13-1, TRAJ5)
CAARVTGRRALTF

SEQ ID NO: 526188 - protein, 16 aa, Homo sapiens
  CDR3 for beta chain variable domain of TCR clone 263094 (TRBV6-1, TRBJ2-5)
CASSETLDRGAETQYF

SEQ ID NO: 526189 - protein, 14 aa, Homo sapiens
  CDR3 for alpha chain variable domain of TCR clone 263095 (TRAV8-6, TRAJ54)
CAVSDFQGAEKLVF

SEQ ID NO: 526190 - protein, 14 aa, Homo sapiens
  CDR3 for beta chain variable domain of TCR clone 263095 (TRBV18, TRBJ2-7)
CASSPRGGAYEQYF

SEQ ID NO: 526191 - protein, 13 aa, Homo sapiens
  CDR3 for alpha chain variable domain of TCR clone 263096 (TRAV13-1, TRAJ11)
CAAVLAGYSTLTF

SEQ ID NO: 526192 - protein, 13 aa, Homo sapiens
  CDR3 for beta chain variable domain of TCR clone 263096 (TRBV7-9, TRBJ1-2)
CASSLKQNYGYTF

SEQ ID NO: 526193 - protein, 10 aa, Homo sapiens
  CDR3 for alpha chain variable domain of TCR clone 263097 (TRAV9-2, TRAJ22)
CAPPRGQLTF

SEQ ID NO: 526194 - protein, 16 aa, Homo sapiens
  CDR3 for beta chain variable domain of TCR clone 263097 (TRBV28, TRBJ1-5)
CASSLTGQGWNQPQHF

SEQ ID NO: 526195 - protein, 13 aa, Homo sapiens
  CDR3 for alpha chain variable domain of TCR clone 263098 (TRAV23/DV6, TRAJ36)
CAASQTGAKNLFF

SEQ ID NO: 526196 - protein, 13 aa, Homo sapiens
  CDR3 for beta chain variable domain of TCR clone 263098 (TRBV5-4, TRBJ1-5)
CASSLGGDQPQHF

SEQ ID NO: 526197 - protein, 11 aa, Homo sapiens
  CDR3 for alpha chain variable domain of TCR clone 263099 (TRAV12-3, TRAJ27)
CAMANAGKSTF

SEQ ID NO: 526198 - protein, 16 aa, Homo sapiens
  CDR3 for beta chain variable domain of TCR clone 263099 (TRBV7-6, TRBJ1-6)
CASSLSSRIGDSPLHF

SEQ ID NO: 526199 - protein, 15 aa, Homo sapiens
  CDR3 for alpha chain variable domain of TCR clone 263100 (TRAV8-4, TRAJ48)
CAVSAAYFGNEKLTS

SEQ ID NO: 526200 - protein, 12 aa, Homo sapiens
  CDR3 for beta chain variable domain of TCR clone 263100 (TRBV3-1, TRBJ2-5)
CASSQRGETQYF

SEQ ID NO: 526201 - protein, 10 aa, Homo sapiens
  CDR3 for alpha chain variable domain of TCR clone 263101 (TRAV30, TRAJ16)
CGTGGQKLLF

SEQ ID NO: 526202 - protein, 13 aa, Homo sapiens
  CDR3 for beta chain variable domain of TCR clone 263101 (TRBV19, TRBJ2-1)
CASSMYGVNEQFF

SEQ ID NO: 526203 - protein, 10 aa, Homo sapiens
  CDR3 for alpha chain variable domain of TCR clone 263102 (TRAV23/DV6, TRAJ43)
CAAADAALEQ

SEQ ID NO: 526204 - protein, 16 aa, Homo sapiens
  CDR3 for beta chain variable domain of TCR clone 263102 (TRBV18, TRBJ1-2)
CASSPPERVTIYGYTF

SEQ ID NO: 526205 - protein, 14 aa, Homo sapiens
  CDR3 for alpha chain variable domain of TCR clone 263103 (TRAV12-2, TRAJ24)
CAVTPADSWGKLQF

SEQ ID NO: 526206 - protein, 22 aa, Homo sapiens
  CDR3 for beta chain variable domain of TCR clone 263103 (TRBV6-4, TRBJ2-3)
CNSVPAAPSEGGRAWGTDTQYF

SEQ ID NO: 526207 - protein, 14 aa, Homo sapiens
  CDR3 for alpha chain variable domain of TCR clone 263104 (TRAV2, TRAJ9)
CAVEDRSGGFKTIF

SEQ ID NO: 526208 - protein, 12 aa, Homo sapiens
  CDR3 for beta chain variable domain of TCR clone 263104 (TRBV12-4, TRBJ2-4)
CASRSSGNMQYF

SEQ ID NO: 526209 - protein, 12 aa, Homo sapiens
  CDR3 for alpha chain variable domain of TCR clone 263105 (TRAV29/DV5, TRAJ43)
CAASGVDNDMRF

SEQ ID NO: 526210 - protein, 15 aa, Homo sapiens
  CDR3 for beta chain variable domain of TCR clone 263105 (TRBV7-2, TRBJ2-1)
CASSSGLAGGNEQFF

SEQ ID NO: 526211 - protein, 13 aa, Homo sapiens
  CDR3 for alpha chain variable domain of TCR clone 263106 (TRAV1-2, TRAJ9)
CAVLNTGGFKTIF

SEQ ID NO: 526212 - protein, 15 aa, Homo sapiens
  CDR3 for beta chain variable domain of TCR clone 263106 (TRBV28, TRBJ2-7)
CASSPGGRGFYEQYF

SEQ ID NO: 526213 - protein, 14 aa, Homo sapiens
  CDR3 for alpha chain variable domain of TCR clone 263107 (TRAV13-1, TRAJ10)
CAALFMGGGNKLTF

SEQ ID NO: 526214 - protein, 15 aa, Homo sapiens
  CDR3 for beta chain variable domain of TCR clone 263107 (TRBV10-3, TRBJ2-2)
CAISEGDRAAGELFF

SEQ ID NO: 526215 - protein, 15 aa, Homo sapiens
  CDR3 for alpha chain variable domain of TCR clone 263108 (TRAV3, TRAJ29)
CAVRDLYSGNTPLVF

SEQ ID NO: 526216 - protein, 13 aa, Homo sapiens
  CDR3 for beta chain variable domain of TCR clone 263108 (TRBV7-9, TRBJ1-2)
CASSLKQNYGYTF

SEQ ID NO: 526217 - protein, 10 aa, Homo sapiens
  CDR3 for alpha chain variable domain of TCR clone 263109 (TRAV26-1, TRAJ22)
CIVSLNFFWF

SEQ ID NO: 526218 - protein, 14 aa, Homo sapiens
  CDR3 for beta chain variable domain of TCR clone 263109 (TRBV5-5, TRBJ1-5)
CASSGQGVDQPQHF

SEQ ID NO: 526219 - protein, 15 aa, Homo sapiens
  CDR3 for alpha chain variable domain of TCR clone 263110 (TRAV17, TRAJ57)
CATGPSQGGSEKLVF

SEQ ID NO: 526220 - protein, 14 aa, Homo sapiens
  CDR3 for beta chain variable domain of TCR clone 263110 (TRBV19, TRBJ2-1)
CATSQGDTYNEQFF

SEQ ID NO: 526221 - protein, 12 aa, Homo sapiens
  CDR3 for alpha chain variable domain of TCR clone 263111 (TRAV12-2, TRAJ47)
CAVAEYGNKLVF

SEQ ID NO: 526222 - protein, 14 aa, Homo sapiens
  CDR3 for beta chain variable domain of TCR clone 263111 (TRBV19, TRBJ2-1)
CASPTFVLSGEQFF

SEQ ID NO: 526223 - protein, 11 aa, Homo sapiens
  CDR3 for alpha chain variable domain of TCR clone 263112 (TRAV35, TRAJ30)
CAPGGDDKIIF

SEQ ID NO: 526224 - protein, 13 aa, Homo sapiens
  CDR3 for beta chain variable domain of TCR clone 263112 (TRBV4-1, TRBJ2-2)
CASSQENTGELFF

SEQ ID NO: 526225 - protein, 13 aa, Homo sapiens
  CDR3 for alpha chain variable domain of TCR clone 263113 (TRAV2, TRAJ15)
CAVASQAGTALIF

SEQ ID NO: 526226 - protein, 15 aa, Homo sapiens
  CDR3 for beta chain variable domain of TCR clone 263113 (TRBV19, TRBJ1-6)
CASSTQGAVGSPLHF

SEQ ID NO: 526227 - protein, 17 aa, Homo sapiens
  CDR3 for alpha chain variable domain of TCR clone 263114 (TRAV27, TRAJ18)
CAGLHRGRGSTLGRLYF

SEQ ID NO: 526228 - protein, 14 aa, Homo sapiens
  CDR3 for beta chain variable domain of TCR clone 263114 (TRBV2, TRBJ2-7)
CASSLTSGGYEQYF

SEQ ID NO: 526229 - protein, 14 aa, Homo sapiens
  CDR3 for alpha chain variable domain of TCR clone 263115 (TRAV12-3, TRAJ15)
CAIIPPQAGTALIF

SEQ ID NO: 526230 - protein, 14 aa, Homo sapiens
  CDR3 for beta chain variable domain of TCR clone 263115 (TRBV20-1, TRBJ2-2)
CSARRRLATGELFF

SEQ ID NO: 526231 - protein, 12 aa, Homo sapiens
  CDR3 for alpha chain variable domain of TCR clone 263116 (TRAV21, TRAJ23)
CAVMLQGGKLIF

SEQ ID NO: 526232 - protein, 14 aa, Homo sapiens
  CDR3 for beta chain variable domain of TCR clone 263116 (TRBV12-5, TRBJ2-5)
CASGSRKHQETQYF

SEQ ID NO: 526233 - protein, 12 aa, Homo sapiens
  CDR3 for alpha chain variable domain of TCR clone 263117 (TRAV12-3, TRAJ17)
CAMTLTGNKLTF

SEQ ID NO: 526234 - protein, 15 aa, Homo sapiens
  CDR3 for beta chain variable domain of TCR clone 263117 (TRBV20-1, TRBJ2-7)
CSARERVSGMDGQYF

SEQ ID NO: 526235 - protein, 17 aa, Homo sapiens
  CDR3 for alpha chain variable domain of TCR clone 263118 (TRAV12-2, TRAJ45)
CAVNIWGSGGGADGLTF

SEQ ID NO: 526236 - protein, 16 aa, Homo sapiens
  CDR3 for beta chain variable domain of TCR clone 263118 (TRBV7-3, TRBJ2-1)
CASSLEGYRSYNEQFF

SEQ ID NO: 526237 - protein, 14 aa, Homo sapiens
  CDR3 for alpha chain variable domain of TCR clone 263119 (TRAV13-1, TRAJ44)
CAAKATGTASKLTF

SEQ ID NO: 526238 - protein, 17 aa, Homo sapiens
  CDR3 for beta chain variable domain of TCR clone 263119 (TRBV15, TRBJ1-2)
CATSRGPRRGRWLHLRF

SEQ ID NO: 526239 - protein, 14 aa, Homo sapiens
  CDR3 for alpha chain variable domain of TCR clone 263120 (TRAV4, TRAJ30)
CLVGDMNRDDKSIF

SEQ ID NO: 526240 - protein, 15 aa, Homo sapiens
  CDR3 for beta chain variable domain of TCR clone 263120 (TRBV7-2, TRBJ2-7)
CASSLSSGRTYEQYF

SEQ ID NO: 526241 - protein, 14 aa, Homo sapiens
  CDR3 for alpha chain variable domain of TCR clone 263121 (TRAV12-2, TRAJ13)
CDVKKTGGYQKVTF

SEQ ID NO: 526242 - protein, 10 aa, Homo sapiens
  CDR3 for beta chain variable domain of TCR clone 263121 (TRBV12-4, TRBJ1-2)
CASSFIWLHL

SEQ ID NO: 526243 - protein, 15 aa, Homo sapiens
  CDR3 for alpha chain variable domain of TCR clone 263122 (TRAV8-6, TRAJ10)
CAVSDQAGGGNKLTF

SEQ ID NO: 526244 - protein, 13 aa, Homo sapiens
  CDR3 for beta chain variable domain of TCR clone 263122 (TRBV4-2, TRBJ1-1)
CASSQAGNTEAFF

SEQ ID NO: 526245 - protein, 18 aa, Homo sapiens
  CDR3 for alpha chain variable domain of TCR clone 263123 (TRAV13-1, TRAJ52)
CAAKNPNAGGTSYGKLTF

SEQ ID NO: 526246 - protein, 11 aa, Homo sapiens
  CDR3 for beta chain variable domain of TCR clone 263123 (TRBV29-1, TRBJ2-5)
CSEDRTGTKYF

SEQ ID NO: 526247 - protein, 14 aa, Homo sapiens
  CDR3 for alpha chain variable domain of TCR clone 263124 (TRAV13-1, TRAJ35)
CAASKGGFGNVLHC

SEQ ID NO: 526248 - protein, 13 aa, Homo sapiens
  CDR3 for beta chain variable domain of TCR clone 263124 (TRBV12-4, TRBJ2-3)
CASSSPLGGTQYF

SEQ ID NO: 526249 - protein, 16 aa, Homo sapiens
  CDR3 for alpha chain variable domain of TCR clone 263125 (TRAV30, TRAJ24)
CGTEIVDADGWGKFQF

SEQ ID NO: 526250 - protein, 16 aa, Homo sapiens
  CDR3 for beta chain variable domain of TCR clone 263125 (TRBV4-1, TRBJ2-7)
CASSPEGTASSYEQYF

SEQ ID NO: 526251 - protein, 13 aa, Homo sapiens
  CDR3 for alpha chain variable domain of TCR clone 263126 (TRAV30, TRAJ18)
CGTEASTLGRLYF

SEQ ID NO: 526252 - protein, 15 aa, Homo sapiens
  CDR3 for beta chain variable domain of TCR clone 263126 (TRBV7-3, TRBJ2-1)
CASSRIGTGSSEQFF

SEQ ID NO: 526253 - protein, 13 aa, Homo sapiens
  CDR3 for alpha chain variable domain of TCR clone 263127 (TRAV21, TRAJ57)
CAVTQGGSEKLVF

SEQ ID NO: 526254 - protein, 15 aa, Homo sapiens
  CDR3 for beta chain variable domain of TCR clone 263127 (TRBV20-1, TRBJ2-1)
CSASSAGSSYNEQFF

SEQ ID NO: 526255 - protein, 17 aa, Homo sapiens
  CDR3 for alpha chain variable domain of TCR clone 263128 (TRAV3, TRAJ6)
CAVRDGPRAGGSYIPTF

SEQ ID NO: 526256 - protein, 14 aa, Homo sapiens
  CDR3 for beta chain variable domain of TCR clone 263128 (TRBV7-2, TRBJ2-7)
RASSPKTSFDEQYF

SEQ ID NO: 526257 - protein, 14 aa, Homo sapiens
  CDR3 for alpha chain variable domain of TCR clone 263129 (TRAV1-2, TRAJ29)
CAVRELTSATPLDF

SEQ ID NO: 526258 - protein, 12 aa, Homo sapiens
  CDR3 for beta chain variable domain of TCR clone 263129 (TRBV29-1, TRBJ2-3)
CSVTGGADTQYF

SEQ ID NO: 526259 - protein, 15 aa, Homo sapiens
  CDR3 for alpha chain variable domain of TCR clone 263130 (TRAV2, TRAJ37)
CAVEDGSSNTGKLIF

SEQ ID NO: 526260 - protein, 13 aa, Homo sapiens
  CDR3 for beta chain variable domain of TCR clone 263130 (TRBV20-1, TRBJ1-6)
CSTFREGNSPLNF

SEQ ID NO: 526261 - protein, 15 aa, Homo sapiens
  CDR3 for alpha chain variable domain of TCR clone 263131 (TRAV27, TRAJ33)
CAGADIMDSNYQLIG

SEQ ID NO: 526262 - protein, 13 aa, Homo sapiens
  CDR3 for beta chain variable domain of TCR clone 263131 (TRBV28, TRBJ1-2)
CASSLQGRGGYTF

SEQ ID NO: 526263 - protein, 17 aa, Homo sapiens
  CDR3 for alpha chain variable domain of TCR clone 263132 (TRAV2, TRAJ36)
CAVEDRGNWGKQPLLWD

SEQ ID NO: 526264 - protein, 14 aa, Homo sapiens
  CDR3 for beta chain variable domain of TCR clone 263132 (TRBV7-9, TRBJ2-5)
CASSLDTAQDTQYF

SEQ ID NO: 526265 - protein, 15 aa, Homo sapiens
  CDR3 for alpha chain variable domain of TCR clone 263133 (TRAV14/DV4, TRAJ12)
CAMREERDSSYKLIF

SEQ ID NO: 526266 - protein, 13 aa, Homo sapiens
  CDR3 for beta chain variable domain of TCR clone 263133 (TRBV4-1, TRBJ2-2)
CASSQENTGELFF

SEQ ID NO: 526267 - protein, 18 aa, Homo sapiens
  CDR3 for alpha chain variable domain of TCR clone 263134 (TRAV12-2, )
CAVEDIQNPDPAVYKLRD

SEQ ID NO: 526268 - protein, 15 aa, Homo sapiens
  CDR3 for beta chain variable domain of TCR clone 263134 (TRBV11-1, TRBJ2-7)
CASSLNYGASYEQYF

SEQ ID NO: 526269 - protein, 17 aa, Homo sapiens
  CDR3 for alpha chain variable domain of TCR clone 263135 (TRAV3, TRAJ6)
CAVRDGPRAGGSYIPTF

SEQ ID NO: 526270 - protein, 13 aa, Homo sapiens
  CDR3 for beta chain variable domain of TCR clone 263135 (TRBV7-2, TRBJ2-5)
CQQLVRGGETQYF

SEQ ID NO: 526271 - protein, 14 aa, Homo sapiens
  CDR3 for alpha chain variable domain of TCR clone 263136 (TRAV1-2, TRAJ8)
CAVREDTGFQKLVF

SEQ ID NO: 526272 - protein, 12 aa, Homo sapiens
  CDR3 for beta chain variable domain of TCR clone 263136 (TRBV13, TRBJ2-7)
CASSLQAYEQYF

SEQ ID NO: 526273 - protein, 15 aa, Homo sapiens
  CDR3 for alpha chain variable domain of TCR clone 263137 (TRAV12-3, TRAJ49)
CAMAVTPNTGNQFYF

SEQ ID NO: 526274 - protein, 18 aa, Homo sapiens
  CDR3 for beta chain variable domain of TCR clone 263137 (TRBV4-1, TRBJ1-5)
CASSQDPRGQGLNQPPHF

SEQ ID NO: 526275 - protein, 12 aa, Homo sapiens
  CDR3 for alpha chain variable domain of TCR clone 263138 (TRAV13-1, TRAJ53)
AASGGSNYKLTF

SEQ ID NO: 526276 - protein, 17 aa, Homo sapiens
  CDR3 for beta chain variable domain of TCR clone 263138 (TRBV11-2, TRBJ2-1)
CASSLYPPGVEYNEQFF

SEQ ID NO: 526277 - protein, 13 aa, Homo sapiens
  CDR3 for alpha chain variable domain of TCR clone 263139 (TRAV8-6, TRAJ8)
CAVSNTGFQKLIF

SEQ ID NO: 526278 - protein, 15 aa, Homo sapiens
  CDR3 for beta chain variable domain of TCR clone 263139 (TRBV28, TRBJ2-5)
CASSSGRTIQETQYF

SEQ ID NO: 526279 - protein, 13 aa, Homo sapiens
  CDR3 for alpha chain variable domain of TCR clone 263140 (TRAV1-1, TRAJ9)
CAAKNTGGFKTIF

SEQ ID NO: 526280 - protein, 13 aa, Homo sapiens
  CDR3 for beta chain variable domain of TCR clone 263140 (TRBV20-1, TRBJ2-5)
CSVTQGNEETQYF

SEQ ID NO: 526281 - protein, 13 aa, Homo sapiens
  CDR3 for alpha chain variable domain of TCR clone 263141 (TRAV2, TRAJ40)
CAVVTSGTYKYTF

SEQ ID NO: 526282 - protein, 16 aa, Homo sapiens
  CDR3 for beta chain variable domain of TCR clone 263141 (TRBV7-2, TRBJ1-2)
CASSSNQDRRGHGYTF

SEQ ID NO: 526283 - protein, 13 aa, Homo sapiens
  CDR3 for alpha chain variable domain of TCR clone 263142 (TRAV2, TRAJ13)
CAVDSGGYQKVTF

SEQ ID NO: 526284 - protein, 12 aa, Homo sapiens
  CDR3 for beta chain variable domain of TCR clone 263142 (TRBV29-1, TRBJ2-3)
CSVTGGADTQYF

SEQ ID NO: 526285 - protein, 13 aa, Homo sapiens
  CDR3 for alpha chain variable domain of TCR clone 263143 (TRAV3, TRAJ27)
CAVRPLGAGKSTF

SEQ ID NO: 526286 - protein, 11 aa, Homo sapiens
  CDR3 for beta chain variable domain of TCR clone 263143 (TRBV7-8, TRBJ2-7)
CASSLSLEQYF

SEQ ID NO: 526287 - protein, 15 aa, Homo sapiens
  CDR3 for alpha chain variable domain of TCR clone 263144 (TRAV26-1, TRAJ29)
CIARVEGAGNTPLVF

SEQ ID NO: 526288 - protein, 14 aa, Homo sapiens
  CDR3 for beta chain variable domain of TCR clone 263144 (TRBV25-1, TRBJ1-1)
CASTHLGGNTEAFF

SEQ ID NO: 526289 - protein, 16 aa, Homo sapiens
  CDR3 for alpha chain variable domain of TCR clone 263145 (TRAV12-3, TRAJ53)
CAMSPGSGGSKYKLTF

SEQ ID NO: 526290 - protein, 15 aa, Homo sapiens
  CDR3 for beta chain variable domain of TCR clone 263145 (TRBV27, TRBJ2-1)
CASSNGGGSSNEQFF

SEQ ID NO: 526291 - protein, 17 aa, Homo sapiens
  CDR3 for alpha chain variable domain of TCR clone 263146 (TRAV26-2, TRAJ42)
CILRDVGYGGSQGNLIF

SEQ ID NO: 526292 - protein, 12 aa, Homo sapiens
  CDR3 for beta chain variable domain of TCR clone 263146 (TRBV19, TRBJ2-1)
CASSMQDTEQFF

SEQ ID NO: 526293 - protein, 11 aa, Homo sapiens
  CDR3 for alpha chain variable domain of TCR clone 263147 (TRAV21, TRAJ31)
CAVRNNARLMF

SEQ ID NO: 526294 - protein, 14 aa, Homo sapiens
  CDR3 for beta chain variable domain of TCR clone 263147 (TRBV7-2, TRBJ2-7)
CASSPKTSFYEQYF

SEQ ID NO: 526295 - protein, 13 aa, Homo sapiens
  CDR3 for alpha chain variable domain of TCR clone 263148 (TRAV8-3, TRAJ36)
CAVGATGANNLFF

SEQ ID NO: 526296 - protein, 13 aa, Homo sapiens
  CDR3 for beta chain variable domain of TCR clone 263148 (TRBV11-2, TRBJ2-5)
CASSRGPSETQYF

SEQ ID NO: 526297 - protein, 11 aa, Homo sapiens
  CDR3 for alpha chain variable domain of TCR clone 263149 (TRAV1-1, TRAJ23)
CAVRQGGKLIF

SEQ ID NO: 526298 - protein, 13 aa, Homo sapiens
  CDR3 for beta chain variable domain of TCR clone 263149 (TRBV2, TRBJ1-1)
CASRWTVNTEAFF

SEQ ID NO: 526299 - protein, 14 aa, Homo sapiens
  CDR3 for alpha chain variable domain of TCR clone 263150 (TRAV1-2, TRAJ8)
CAVREDTGFQKLVF

SEQ ID NO: 526300 - protein, 15 aa, Homo sapiens
  CDR3 for beta chain variable domain of TCR clone 263150 (TRBV6-3, TRBJ2-7)
LASSSPGTVFYEQYF

SEQ ID NO: 526301 - protein, 13 aa, Homo sapiens
  CDR3 for alpha chain variable domain of TCR clone 263151 (TRAV17, TRAJ5)
CAPMDTGRRALTF

SEQ ID NO: 526302 - protein, 15 aa, Homo sapiens
  CDR3 for beta chain variable domain of TCR clone 263151 (TRBV10-2, TRBJ2-6)
CASSEQGTGTNVLTF

SEQ ID NO: 526303 - protein, 13 aa, Homo sapiens
  CDR3 for alpha chain variable domain of TCR clone 263152 (TRAV29/DV5, TRAJ47)
CAASTEYGNKLVF

SEQ ID NO: 526304 - protein, 16 aa, Homo sapiens
  CDR3 for beta chain variable domain of TCR clone 263152 (TRBV7-3, TRBJ2-2)
CASSLKRVTLSVELFF

SEQ ID NO: 526305 - protein, 15 aa, Homo sapiens
  CDR3 for alpha chain variable domain of TCR clone 263153 (TRAV27, TRAJ38)
CAARRNAGNNRKLIW

SEQ ID NO: 526306 - protein, 14 aa, Homo sapiens
  CDR3 for beta chain variable domain of TCR clone 263153 (TRBV11-2, TRBJ1-2)
CASSLYRGNYGYTF

SEQ ID NO: 526307 - protein, 16 aa, Homo sapiens
  CDR3 for alpha chain variable domain of TCR clone 263154 (TRAV23/DV6, TRAJ9)
CAASIGGNTGGFKTIF

SEQ ID NO: 526308 - protein, 14 aa, Homo sapiens
  CDR3 for beta chain variable domain of TCR clone 263154 (TRBV5-1, TRBJ2-3)
CASSFPGNTDTQYF

SEQ ID NO: 526309 - protein, 17 aa, Homo sapiens
  CDR3 for alpha chain variable domain of TCR clone 263155 (TRAV3, TRAJ42)
CAVRDRDYGGSQGNLIL

SEQ ID NO: 526310 - protein, 18 aa, Homo sapiens
  CDR3 for beta chain variable domain of TCR clone 263155 (TRBV20-1, TRBJ2-3)
CSASGLAGGPGTTDTQYF

SEQ ID NO: 526311 - protein, 14 aa, Homo sapiens
  CDR3 for alpha chain variable domain of TCR clone 263156 (TRAV1-2, TRAJ8)
CAVREDTGFQKLVL

SEQ ID NO: 526312 - protein, 14 aa, Homo sapiens
  CDR3 for beta chain variable domain of TCR clone 263156 (TRBV7-6, TRBJ2-3)
CASSLGTVTDTQYF

SEQ ID NO: 526313 - protein, 13 aa, Homo sapiens
  CDR3 for alpha chain variable domain of TCR clone 263157 (TRAV29/DV5, TRAJ31)
CAASRNNNARLML

SEQ ID NO: 526314 - protein, 12 aa, Homo sapiens
  CDR3 for beta chain variable domain of TCR clone 263157 (TRBV14, TRBJ2-7)
CASSSLKGEQYF

SEQ ID NO: 526315 - protein, 14 aa, Homo sapiens
  CDR3 for alpha chain variable domain of TCR clone 263158 (TRAV17, TRAJ49)
CATDARDTGNQFYF

SEQ ID NO: 526316 - protein, 16 aa, Homo sapiens
  CDR3 for beta chain variable domain of TCR clone 263158 (TRBV24-1, TRBJ2-3)
CATSDPGTGATDTQYF

SEQ ID NO: 526317 - protein, 15 aa, Homo sapiens
  CDR3 for alpha chain variable domain of TCR clone 263159 (TRAV8-3, TRAJ45)
CASSYSGGGADGLTF

SEQ ID NO: 526318 - protein, 12 aa, Homo sapiens
  CDR3 for beta chain variable domain of TCR clone 263159 (TRBV7-9, TRBJ2-7)
CASSIKREEQYF

SEQ ID NO: 526319 - protein, 14 aa, Homo sapiens
  CDR3 for alpha chain variable domain of TCR clone 263160 (TRAV1-2, TRAJ16)
CAVNRFSDGQKLLF

SEQ ID NO: 526320 - protein, 12 aa, Homo sapiens
  CDR3 for beta chain variable domain of TCR clone 263160 (TRBV6-6, TRBJ2-3)
CASSSRGDTQYF

SEQ ID NO: 526321 - protein, 10 aa, Homo sapiens
  CDR3 for alpha chain variable domain of TCR clone 263161 (TRAV26-1, TRAJ52)
CGTSYGKLTF

SEQ ID NO: 526322 - protein, 14 aa, Homo sapiens
  CDR3 for beta chain variable domain of TCR clone 263161 (TRBV19, TRBJ1-2)
CASSIGAGSCGYTF

SEQ ID NO: 526323 - protein, 13 aa, Homo sapiens
  CDR3 for alpha chain variable domain of TCR clone 263162 (TRAV21, TRAJ57)
CAVTQCGSEKLFF

SEQ ID NO: 526324 - protein, 16 aa, Homo sapiens
  CDR3 for beta chain variable domain of TCR clone 263162 (TRBV29-1, TRBJ2-7)
CSVEDAEDGTAYEQYF

SEQ ID NO: 526325 - protein, 12 aa, Homo sapiens
  CDR3 for alpha chain variable domain of TCR clone 263163 (TRAV2, TRAJ33)
CAFMDSNYQLIW

SEQ ID NO: 526326 - protein, 13 aa, Homo sapiens
  CDR3 for beta chain variable domain of TCR clone 263163 (TRBV2, TRBJ2-5)
CASGTPYQETQYF

SEQ ID NO: 526327 - protein, 12 aa, Homo sapiens
  CDR3 for alpha chain variable domain of TCR clone 263164 (TRAV8-3, TRAJ20)
CAVDFNDYKLSF

SEQ ID NO: 526328 - protein, 12 aa, Homo sapiens
  CDR3 for beta chain variable domain of TCR clone 263164 (TRBV29-1, TRBJ2-3)
CRVKGGEDTQYF

SEQ ID NO: 526329 - protein, 13 aa, Homo sapiens
  CDR3 for alpha chain variable domain of TCR clone 263165 (TRAV12-3, TRAJ57)
CAMSQSGSEKLVF

SEQ ID NO: 526330 - protein, 13 aa, Homo sapiens
  CDR3 for beta chain variable domain of TCR clone 263165 (TRBV5-4, TRBJ2-5)
CASSPVSQETQYF

SEQ ID NO: 526331 - protein, 13 aa, Homo sapiens
  CDR3 for alpha chain variable domain of TCR clone 263166 (TRAV12-3, TRAJ33)
CAMSVNSNDQLIW

SEQ ID NO: 526332 - protein, 16 aa, Homo sapiens
  CDR3 for beta chain variable domain of TCR clone 263166 (TRBV13, TRBJ2-5)
CASSLRTGGSWETQHF

SEQ ID NO: 526333 - protein, 12 aa, Homo sapiens
  CDR3 for alpha chain variable domain of TCR clone 263167 (TRAV21, TRAJ31)
CAVWGNNARLMF

SEQ ID NO: 526334 - protein, 16 aa, Homo sapiens
  CDR3 for beta chain variable domain of TCR clone 263167 (TRBV27, TRBJ2-5)
CASSYGPGGQKQTQYF

SEQ ID NO: 526335 - protein, 17 aa, Homo sapiens
  CDR3 for alpha chain variable domain of TCR clone 263168 (TRAV4, TRAJ42)
CLVGVLNYGGSQWNLIF

SEQ ID NO: 526336 - protein, 12 aa, Homo sapiens
  CDR3 for beta chain variable domain of TCR clone 263168 (TRBV20-1, TRBJ2-1)
CSAQYTYNEQFF

SEQ ID NO: 526337 - protein, 14 aa, Homo sapiens
  CDR3 for alpha chain variable domain of TCR clone 263169 (TRAV25, TRAJ22)
CAVRSSGSARQLTF

SEQ ID NO: 526338 - protein, 16 aa, Homo sapiens
  CDR3 for beta chain variable domain of TCR clone 263169 (TRBV7-3, TRBJ2-2)
CASSLKRGTLSGELFF

SEQ ID NO: 526339 - protein, 15 aa, Homo sapiens
  CDR3 for alpha chain variable domain of TCR clone 263170 (TRAV23/DV6, TRAJ32)
CAASKMGGATNKLIF

SEQ ID NO: 526340 - protein, 15 aa, Homo sapiens
  CDR3 for beta chain variable domain of TCR clone 263170 (TRBV5-1, TRBJ2-1)
CASSPPRAPYNEQFF

SEQ ID NO: 526341 - protein, 14 aa, Homo sapiens
  CDR3 for alpha chain variable domain of TCR clone 263171 (TRAV21, TRAJ58)
CAVRRGRSGSRLTF

SEQ ID NO: 526342 - protein, 13 aa, Homo sapiens
  CDR3 for beta chain variable domain of TCR clone 263171 (TRBV7-2, TRBJ1-6)
CGSSLKFDSPLHF

SEQ ID NO: 526343 - protein, 15 aa, Homo sapiens
  CDR3 for alpha chain variable domain of TCR clone 263172 (TRAV27, TRAJ38)
CAARRNAGNNSKLIW

SEQ ID NO: 526344 - protein, 14 aa, Homo sapiens
  CDR3 for beta chain variable domain of TCR clone 263172 (TRBV7-2, TRBJ2-7)
CASSPRDGAYEQYF

SEQ ID NO: 526345 - protein, 14 aa, Homo sapiens
  CDR3 for alpha chain variable domain of TCR clone 263173 (TRAV12-3, TRAJ22)
CAMSLFGSARQLTF

SEQ ID NO: 526346 - protein, 14 aa, Homo sapiens
  CDR3 for beta chain variable domain of TCR clone 263173 (TRBV19, TRBJ2-1)
CASKDPSSYNEQFF

SEQ ID NO: 526347 - protein, 17 aa, Homo sapiens
  CDR3 for alpha chain variable domain of TCR clone 263174 (TRAV16, TRAJ58)
CITVLSNGETSGSRLTF

SEQ ID NO: 526348 - protein, 17 aa, Homo sapiens
  CDR3 for beta chain variable domain of TCR clone 263174 (TRBV18, TRBJ2-1)
CASPKGLSGGADNEQFF

SEQ ID NO: 526349 - protein, 14 aa, Homo sapiens
  CDR3 for alpha chain variable domain of TCR clone 263175 (TRAV2, TRAJ9)
CAVEDRCGGFKTIF

SEQ ID NO: 526350 - protein, 14 aa, Homo sapiens
  CDR3 for beta chain variable domain of TCR clone 263175 (TRBV19, TRBJ2-1)
CARGARSFQWEQFF

SEQ ID NO: 526351 - protein, 14 aa, Homo sapiens
  CDR3 for alpha chain variable domain of TCR clone 263176 (TRAV1-2, TRAJ16)
CAVNWFSDGQKLLF

SEQ ID NO: 526352 - protein, 16 aa, Homo sapiens
  CDR3 for beta chain variable domain of TCR clone 263176 (TRBV11-2, TRBJ1-2)
CASSLDTGGADYGYTF

SEQ ID NO: 526353 - protein, 11 aa, Homo sapiens
  CDR3 for alpha chain variable domain of TCR clone 263177 (TRAV4, TRAJ31)
CLVGDNARLMF

SEQ ID NO: 526354 - protein, 15 aa, Homo sapiens
  CDR3 for beta chain variable domain of TCR clone 263177 (TRBV2, TRBJ2-7)
CASTRLGSGATEQYF

SEQ ID NO: 526355 - protein, 17 aa, Homo sapiens
  CDR3 for alpha chain variable domain of TCR clone 263178 (TRAV3, TRAJ6)
CAVRDGPRAGGSYIPTF

SEQ ID NO: 526356 - protein, 14 aa, Homo sapiens
  CDR3 for beta chain variable domain of TCR clone 263178 (TRBV7-2, TRBJ2-7)
CESSPKTSFYEQYF

SEQ ID NO: 526357 - protein, 15 aa, Homo sapiens
  CDR3 for alpha chain variable domain of TCR clone 263179 (TRAV3, TRAJ17)
CAVRDTGAAGNELTF

SEQ ID NO: 526358 - protein, 14 aa, Homo sapiens
  CDR3 for beta chain variable domain of TCR clone 263179 (TRBV6-3, TRBJ1-1)
CASSNLLPGAEAFF

SEQ ID NO: 526359 - protein, 18 aa, Homo sapiens
  CDR3 for alpha chain variable domain of TCR clone 263180 (TRAV21, TRAJ52)
CAVRPSPAGGTSYGKLTF

SEQ ID NO: 526360 - protein, 17 aa, Homo sapiens
  CDR3 for beta chain variable domain of TCR clone 263180 (TRBV13, TRBJ2-3)
CASSVSRGAGGRNTQYF

SEQ ID NO: 526361 - protein, 17 aa, Homo sapiens
  CDR3 for alpha chain variable domain of TCR clone 263181 (TRAV12-2, TRAJ6)
CAPQGPPRAGGSYIPKF

SEQ ID NO: 526362 - protein, 16 aa, Homo sapiens
  CDR3 for beta chain variable domain of TCR clone 263181 (TRBV19, TRBJ2-2)
CASSTARASNTGELFF

SEQ ID NO: 526363 - protein, 11 aa, Homo sapiens
  CDR3 for alpha chain variable domain of TCR clone 263182 (TRAV17, TRAJ9)
CGFTGGFKTIF

SEQ ID NO: 526364 - protein, 14 aa, Homo sapiens
  CDR3 for beta chain variable domain of TCR clone 263182 (TRBV7-9, TRBJ2-2)
CASSLVQATGELFF

SEQ ID NO: 526365 - protein, 14 aa, Homo sapiens
  CDR3 for alpha chain variable domain of TCR clone 263183 (TRAV12-2, TRAJ40)
CSVTIPSGTYKYIF

SEQ ID NO: 526366 - protein, 14 aa, Homo sapiens
  CDR3 for beta chain variable domain of TCR clone 263183 (TRBV20-1, TRBJ1-1)
CSAQTRIGGTEAFF

SEQ ID NO: 526367 - protein, 12 aa, Homo sapiens
  CDR3 for alpha chain variable domain of TCR clone 263184 (TRAV16, TRAJ56)
CAPTAANSKLTF

SEQ ID NO: 526368 - protein, 17 aa, Homo sapiens
  CDR3 for beta chain variable domain of TCR clone 263184 (TRBV27, TRBJ2-6)
CASSLTGFASGANVLTF

SEQ ID NO: 526369 - protein, 13 aa, Homo sapiens
  CDR3 for alpha chain variable domain of TCR clone 263185 (TRAV20, TRAJ49)
CAVQARTGNQFYF

SEQ ID NO: 526370 - protein, 14 aa, Homo sapiens
  CDR3 for beta chain variable domain of TCR clone 263185 (TRBV7-2, TRBJ2-7)
CASSPKTSVYEQYF

SEQ ID NO: 526371 - protein, 13 aa, Homo sapiens
  CDR3 for alpha chain variable domain of TCR clone 263186 (TRAV12-2, TRAJ15)
CAIFNQAGTALIF

SEQ ID NO: 526372 - protein, 14 aa, Homo sapiens
  CDR3 for beta chain variable domain of TCR clone 263186 (TRBV7-8, TRBJ1-5)
CQQPGGGADQPQHF

SEQ ID NO: 526373 - protein, 11 aa, Homo sapiens
  CDR3 for alpha chain variable domain of TCR clone 263187 (TRAV2, TRAJ30)
CAANRDDKIIF

SEQ ID NO: 526374 - protein, 15 aa, Homo sapiens
  CDR3 for beta chain variable domain of TCR clone 263187 (TRBV12-4, TRBJ2-5)
CASSPPTGLQETQYF

SEQ ID NO: 526375 - protein, 16 aa, Homo sapiens
  CDR3 for alpha chain variable domain of TCR clone 263188 (TRAV13-1, TRAJ48)
CAASIFGNFGNEKLTF

SEQ ID NO: 526376 - protein, 19 aa, Homo sapiens
  CDR3 for beta chain variable domain of TCR clone 263188 (TRBV10-1, TRBJ1-6)
CASISDRVFSIIHPSTLGT

SEQ ID NO: 526377 - protein, 17 aa, Homo sapiens
  CDR3 for alpha chain variable domain of TCR clone 263189 (TRAV23/DV6, TRAJ57)
CAASSTLSQGGSEKLVF

SEQ ID NO: 526378 - protein, 13 aa, Homo sapiens
  CDR3 for beta chain variable domain of TCR clone 263189 (TRBV12-4, TRBJ1-2)
CASSSGLTVISTF

SEQ ID NO: 526379 - protein, 14 aa, Homo sapiens
  CDR3 for alpha chain variable domain of TCR clone 263190 (TRAV8-3, TRAJ21)
CAVGARDNFNKFYF

SEQ ID NO: 526380 - protein, 11 aa, Homo sapiens
  CDR3 for beta chain variable domain of TCR clone 263190 (TRBV7-2, TRBJ2-7)
CASSLGWEQYF

SEQ ID NO: 526381 - protein, 14 aa, Homo sapiens
  CDR3 for alpha chain variable domain of TCR clone 263191 (TRAV35, TRAJ22)
CAGLRPGSARQLTF

SEQ ID NO: 526382 - protein, 15 aa, Homo sapiens
  CDR3 for beta chain variable domain of TCR clone 263191 (TRBV20-1, TRBJ2-7)
CSARDRVSWMDEQYF

SEQ ID NO: 526383 - protein, 17 aa, Homo sapiens
  CDR3 for alpha chain variable domain of TCR clone 263192 (TRAV3, TRAJ6)
CAVRDGARAGGSYIPTS

SEQ ID NO: 526384 - protein, 14 aa, Homo sapiens
  CDR3 for beta chain variable domain of TCR clone 263192 (TRBV7-2, TRBJ2-7)
CASSPKTSFYEQYF

SEQ ID NO: 526385 - protein, 14 aa, Homo sapiens
  CDR3 for alpha chain variable domain of TCR clone 263193 (TRAV12-2, TRAJ13)
CAVKKTGGYQKVTF

SEQ ID NO: 526386 - protein, 14 aa, Homo sapiens
  CDR3 for beta chain variable domain of TCR clone 263193 (TRBV7-2, TRBJ2-7)
CASSPKTSFYEPYF

SEQ ID NO: 526387 - protein, 16 aa, Homo sapiens
  CDR3 for alpha chain variable domain of TCR clone 263194 (TRAV13-1, TRAJ28)
CAASPILWGWELPTHF

SEQ ID NO: 526388 - protein, 19 aa, Homo sapiens
  CDR3 for beta chain variable domain of TCR clone 263194 (TRBV25-1, TRBJ2-2)
CAILVYRVDRGRKTGELFF

SEQ ID NO: 526389 - protein, 14 aa, Homo sapiens
  CDR3 for alpha chain variable domain of TCR clone 263195 (TRAV12-1, TRAJ43)
CVVNGRSNNNDVRF

SEQ ID NO: 526390 - protein, 13 aa, Homo sapiens
  CDR3 for beta chain variable domain of TCR clone 263195 (TRBV10-3, TRBJ2-7)
CASKLAVNYEQYF

SEQ ID NO: 526391 - protein, 16 aa, Homo sapiens
  CDR3 for alpha chain variable domain of TCR clone 263196 (TRAV30, TRAJ42)
CGTSKNYGGSQGNLIF

SEQ ID NO: 526392 - protein, 14 aa, Homo sapiens
  CDR3 for beta chain variable domain of TCR clone 263196 (TRBV19, TRBJ1-5)
CASNSYGTHQAQHF

SEQ ID NO: 526393 - protein, 23 aa, Homo sapiens
  CDR3 for alpha chain variable domain of TCR clone 263197 (TRAV26-1, TRAJ38)
CIADNAGNNHIQNPDPAVYQLRN

SEQ ID NO: 526394 - protein, 14 aa, Homo sapiens
  CDR3 for beta chain variable domain of TCR clone 263197 (TRBV19, TRBJ1-2)
CASSLQGQAYGYTF

SEQ ID NO: 526395 - protein, 15 aa, Homo sapiens
  CDR3 for alpha chain variable domain of TCR clone 263198 (TRAV3, TRAJ13)
CAVRVYSGGYQKVTF

SEQ ID NO: 526396 - protein, 15 aa, Homo sapiens
  CDR3 for beta chain variable domain of TCR clone 263198 (TRBV5-7, TRBJ1-2)
CASSLGVAANYGYIF

SEQ ID NO: 526397 - protein, 12 aa, Homo sapiens
  CDR3 for alpha chain variable domain of TCR clone 263199 (TRAV2, TRAJ33)
CAFMDSNYQLIW

SEQ ID NO: 526398 - protein, 16 aa, Homo sapiens
  CDR3 for beta chain variable domain of TCR clone 263199 (TRBV2, TRBJ2-7)
CASSEPWTGPSYAQYF

SEQ ID NO: 526399 - protein, 13 aa, Homo sapiens
  CDR3 for alpha chain variable domain of TCR clone 263200 (TRAV8-3, TRAJ28)
CAVGAGGSYQLTF

SEQ ID NO: 526400 - protein, 13 aa, Homo sapiens
  CDR3 for beta chain variable domain of TCR clone 263200 (TRBV7-9, TRBJ1-2)
CASSLKQNYGYTF

SEQ ID NO: 526401 - protein, 14 aa, Homo sapiens
  CDR3 for alpha chain variable domain of TCR clone 263201 (TRAV27, TRAJ17)
CRSTSRAAGNKLTF

SEQ ID NO: 526402 - protein, 16 aa, Homo sapiens
  CDR3 for beta chain variable domain of TCR clone 263201 (TRBV5-7, TRBJ2-5)
CASTFAPAGGRDTQYF

SEQ ID NO: 526403 - protein, 14 aa, Homo sapiens
  CDR3 for alpha chain variable domain of TCR clone 263202 (TRAV16, TRAJ3)
CALSQYSSASKIIF

SEQ ID NO: 526404 - protein, 12 aa, Homo sapiens
  CDR3 for beta chain variable domain of TCR clone 263202 (TRBV11-2, TRBJ2-1)
CASSPGNNEQFF

SEQ ID NO: 526405 - protein, 16 aa, Homo sapiens
  CDR3 for alpha chain variable domain of TCR clone 263203 (TRAV14/DV4, TRAJ53)
CAMREGGGGSNYKLTF

SEQ ID NO: 526406 - protein, 13 aa, Homo sapiens
  CDR3 for beta chain variable domain of TCR clone 263203 (TRBV6-4, TRBJ1-5)
CASSADLNQPQHF

SEQ ID NO: 526407 - protein, 13 aa, Homo sapiens
  CDR3 for alpha chain variable domain of TCR clone 263204 (TRAV13-1, TRAJ39)
CSKYSNAGNMLTF

SEQ ID NO: 526408 - protein, 20 aa, Homo sapiens
  CDR3 for beta chain variable domain of TCR clone 263204 (TRBV28, TRBJ2-1)
CASTPIGRSPGLAGGNEQFF

SEQ ID NO: 526409 - protein, 14 aa, Homo sapiens
  CDR3 for alpha chain variable domain of TCR clone 263205 (TRAV1-2, TRAJ24)
CAVLTTDSWGKFQF

SEQ ID NO: 526410 - protein, 17 aa, Homo sapiens
  CDR3 for beta chain variable domain of TCR clone 263205 (TRBV11-2, TRBJ2-1)
CASSLYPPGVEYNEQFF

SEQ ID NO: 526411 - protein, 13 aa, Homo sapiens
  CDR3 for alpha chain variable domain of TCR clone 263206 (TRAV26-1, TRAJ48)
CIVLRVRNEKLTF

SEQ ID NO: 526412 - protein, 14 aa, Homo sapiens
  CDR3 for beta chain variable domain of TCR clone 263206 (TRBV20-1, TRBJ1-5)
CSARDISKNQPQHC

SEQ ID NO: 526413 - protein, 15 aa, Homo sapiens
  CDR3 for alpha chain variable domain of TCR clone 263207 (TRAV26-1, TRAJ29)
CIVRVEGAGNAPLVF

SEQ ID NO: 526414 - protein, 15 aa, Homo sapiens
  CDR3 for beta chain variable domain of TCR clone 263207 (TRBV7-9, TRBJ1-5)
CASSQGHQPNQPQHF

SEQ ID NO: 526415 - protein, 13 aa, Homo sapiens
  CDR3 for alpha chain variable domain of TCR clone 263208 (TRAV8-6, TRAJ36)
CAVIGPGANNLFF

SEQ ID NO: 526416 - protein, 16 aa, Homo sapiens
  CDR3 for beta chain variable domain of TCR clone 263208 (TRBV20-1, TRBJ2-3)
CSGEAGLAGGQDTQYF

SEQ ID NO: 526417 - protein, 11 aa, Homo sapiens
  CDR3 for alpha chain variable domain of TCR clone 263209 (TRAV17, TRAJ39)
CATGAGNMLTL

SEQ ID NO: 526418 - protein, 16 aa, Homo sapiens
  CDR3 for beta chain variable domain of TCR clone 263209 (TRBV5-1, TRBJ2-1)
CASSFGVSGSYNEQLF

SEQ ID NO: 526419 - protein, 22 aa, Homo sapiens
  CDR3 for alpha chain variable domain of TCR clone 263210 (TRAV14/DV4, )
CAMREGRKDIQNPDPAVYQLRD

SEQ ID NO: 526420 - protein, 14 aa, Homo sapiens
  CDR3 for beta chain variable domain of TCR clone 263210 (TRBV11-2, TRBJ2-2)
CASSLLADTGELFF

SEQ ID NO: 526421 - protein, 20 aa, Homo sapiens
  CDR3 for alpha chain variable domain of TCR clone 263211 (TRAV13-1, TRAJ10)
CAAKGHGRRKQTHLWDRHSA

SEQ ID NO: 526422 - protein, 13 aa, Homo sapiens
  CDR3 for beta chain variable domain of TCR clone 263211 (TRBV20-1, TRBJ1-1)
CSARGGGNTESFF

SEQ ID NO: 526423 - protein, 12 aa, Homo sapiens
  CDR3 for alpha chain variable domain of TCR clone 263212 (TRAV3, TRAJ20)
CAVRDPDYRLSF

SEQ ID NO: 526424 - protein, 15 aa, Homo sapiens
  CDR3 for beta chain variable domain of TCR clone 263212 (TRBV2, TRBJ2-2)
CASSRETVGTGELFF

SEQ ID NO: 526425 - protein, 16 aa, Homo sapiens
  CDR3 for alpha chain variable domain of TCR clone 263213 (TRAV26-2, TRAJ31)
CILRDSGLVANARLMF

SEQ ID NO: 526426 - protein, 14 aa, Homo sapiens
  CDR3 for beta chain variable domain of TCR clone 263213 (TRBV6-1, TRBJ2-6)
CASQQGAGANVLTF

SEQ ID NO: 526427 - protein, 16 aa, Homo sapiens
  CDR3 for alpha chain variable domain of TCR clone 263214 (TRAV8-4, TRAJ5)
CAVSPLTDTGRRALTF

SEQ ID NO: 526428 - protein, 14 aa, Homo sapiens
  CDR3 for beta chain variable domain of TCR clone 263214 (TRBV19, TRBJ1-6)
CASSTDGWNSRLHF

SEQ ID NO: 526429 - protein, 16 aa, Homo sapiens
  CDR3 for alpha chain variable domain of TCR clone 263215 (TRAV12-1, TRAJ43)
CLVNPHRFGAGTRLTV

SEQ ID NO: 526430 - protein, 15 aa, Homo sapiens
  CDR3 for beta chain variable domain of TCR clone 263215 (TRBV7-2, TRBJ2-1)
CASSSGLAGGNEQFF

SEQ ID NO: 526431 - protein, 12 aa, Homo sapiens
  CDR3 for alpha chain variable domain of TCR clone 263216 (TRAV12-3, TRAJ20)
CAMVRGDYKLSV

SEQ ID NO: 526432 - protein, 13 aa, Homo sapiens
  CDR3 for beta chain variable domain of TCR clone 263216 (TRBV23-1, TRBJ1-4)
CASRGKFNENLFF

SEQ ID NO: 526433 - protein, 13 aa, Homo sapiens
  CDR3 for alpha chain variable domain of TCR clone 263217 (TRAV13-1, TRAJ43)
CAASLSNNNDMRF

SEQ ID NO: 526434 - protein, 13 aa, Homo sapiens
  CDR3 for beta chain variable domain of TCR clone 263217 (TRBV14, TRBJ2-1)
CASSQDRRNEQFF

SEQ ID NO: 526435 - protein, 14 aa, Homo sapiens
  CDR3 for alpha chain variable domain of TCR clone 263218 (TRAV12-3, TRAJ21)
CAMEGHQGFNKFYF

SEQ ID NO: 526436 - protein, 16 aa, Homo sapiens
  CDR3 for beta chain variable domain of TCR clone 263218 (TRBV19, TRBJ2-1)
CASSKAEPSSYNEQFF

SEQ ID NO: 526437 - protein, 15 aa, Homo sapiens
  CDR3 for alpha chain variable domain of TCR clone 263219 (TRAV8-6, TRAJ9)
CAVSDRDTGGFKTIF

SEQ ID NO: 526438 - protein, 16 aa, Homo sapiens
  CDR3 for beta chain variable domain of TCR clone 263219 (TRBV19, TRBJ2-3)
CASSPEWDRGIDTQYF

SEQ ID NO: 526439 - protein, 13 aa, Homo sapiens
  CDR3 for alpha chain variable domain of TCR clone 263220 (TRAV12-2, TRAJ42)
CAVKRGSQGNLIF

SEQ ID NO: 526440 - protein, 17 aa, Homo sapiens
  CDR3 for beta chain variable domain of TCR clone 263220 (TRBV28, TRBJ2-3)
CASSPTPAGGRVDTQYF

SEQ ID NO: 526441 - protein, 15 aa, Homo sapiens
  CDR3 for alpha chain variable domain of TCR clone 263221 (TRAV2, TRAJ28)
CAVPYSGVGSYQLTF

SEQ ID NO: 526442 - protein, 17 aa, Homo sapiens
  CDR3 for beta chain variable domain of TCR clone 263221 (TRBV20-1, TRBJ2-4)
CSARDWASGGRENIQYF

SEQ ID NO: 526443 - protein, 12 aa, Homo sapiens
  CDR3 for alpha chain variable domain of TCR clone 263222 (TRAV21, TRAJ33)
CAKMDSNYQLIW

SEQ ID NO: 526444 - protein, 18 aa, Homo sapiens
  CDR3 for beta chain variable domain of TCR clone 263222 (TRBV15, TRBJ2-3)
CATSRAGARSWDTDTQYF

SEQ ID NO: 526445 - protein, 14 aa, Homo sapiens
  CDR3 for alpha chain variable domain of TCR clone 263223 (TRAV24, TRAJ42)
CAQNYGGSQGNLIF

SEQ ID NO: 526446 - protein, 15 aa, Homo sapiens
  CDR3 for beta chain variable domain of TCR clone 263223 (TRBV19, TRBJ1-5)
CASSSPGGAGQPQHF

SEQ ID NO: 526447 - protein, 14 aa, Homo sapiens
  CDR3 for alpha chain variable domain of TCR clone 263224 (TRAV13-1, TRAJ4)
CAATLPSGDNKLIF

SEQ ID NO: 526448 - protein, 14 aa, Homo sapiens
  CDR3 for beta chain variable domain of TCR clone 263224 (TRBV19, TRBJ2-1)
CASPTFVLSGEQFF

SEQ ID NO: 526449 - protein, 16 aa, Homo sapiens
  CDR3 for alpha chain variable domain of TCR clone 263225 (TRAV30, TRAJ24)
CGTEIVDADSWGKFQF

SEQ ID NO: 526450 - protein, 14 aa, Homo sapiens
  CDR3 for beta chain variable domain of TCR clone 263225 (TRBV18, TRBJ2-1)
CQLPDRGRDNEQFF

SEQ ID NO: 526451 - protein, 13 aa, Homo sapiens
  CDR3 for alpha chain variable domain of TCR clone 263226 (TRAV8-3, TRAJ42)
CARYGGSQGNLIF

SEQ ID NO: 526452 - protein, 13 aa, Homo sapiens
  CDR3 for beta chain variable domain of TCR clone 263226 (TRBV19, TRBJ1-2)
CASSVPGQDGYTF

SEQ ID NO: 526453 - protein, 13 aa, Homo sapiens
  CDR3 for alpha chain variable domain of TCR clone 263227 (TRAV13-1, TRAJ40)
CAASKGGTYKYIF

SEQ ID NO: 526454 - protein, 13 aa, Homo sapiens
  CDR3 for beta chain variable domain of TCR clone 263227 (TRBV7-6, TRBJ1-2)
CASSLVTDYGYTF

SEQ ID NO: 526455 - protein, 15 aa, Homo sapiens
  CDR3 for alpha chain variable domain of TCR clone 263228 (TRAV26-2, TRAJ13)
CILRDLSGGYQKVTF

SEQ ID NO: 526456 - protein, 14 aa, Homo sapiens
  CDR3 for beta chain variable domain of TCR clone 263228 (TRBV4-1, TRBJ2-3)
FASSQEGSTDTQYF

SEQ ID NO: 526457 - protein, 20 aa, Homo sapiens
  CDR3 for alpha chain variable domain of TCR clone 263229 (TRAV13-1, )
CAASPMDIQNPDPAVYQLRD

SEQ ID NO: 526458 - protein, 13 aa, Homo sapiens
  CDR3 for beta chain variable domain of TCR clone 263229 (TRBV20-1, TRBJ2-2)
RSASAAGTGELFF

SEQ ID NO: 526459 - protein, 14 aa, Homo sapiens
  CDR3 for alpha chain variable domain of TCR clone 263230 (TRAV1-2, TRAJ16)
CAVNRFSDGQKLLF

SEQ ID NO: 526460 - protein, 14 aa, Homo sapiens
  CDR3 for beta chain variable domain of TCR clone 263230 (TRBV12-4, TRBJ1-1)
CASSLGSGGTEAFF

SEQ ID NO: 526461 - protein, 13 aa, Homo sapiens
  CDR3 for alpha chain variable domain of TCR clone 263231 (TRAV2, TRAJ15)
CAVASQAGTALIF

SEQ ID NO: 526462 - protein, 16 aa, Homo sapiens
  CDR3 for beta chain variable domain of TCR clone 263231 (TRBV5-1, TRBJ1-1)
CASSSGGNSWNTEAFF

SEQ ID NO: 526463 - protein, 13 aa, Homo sapiens
  CDR3 for alpha chain variable domain of TCR clone 263232 (TRAV12-2, TRAJ3)
CAFQYSSASKLIF

SEQ ID NO: 526464 - protein, 11 aa, Homo sapiens
  CDR3 for beta chain variable domain of TCR clone 263232 (TRBV20-1, TRBJ2-3)
CSGTSSTTQYF

SEQ ID NO: 526465 - protein, 12 aa, Homo sapiens
  CDR3 for alpha chain variable domain of TCR clone 263233 (TRAV1-2, TRAJ7)
CAVAYGNNRLAF

SEQ ID NO: 526466 - protein, 18 aa, Homo sapiens
  CDR3 for beta chain variable domain of TCR clone 263233 (TRBV5-1, TRBJ2-7)
CASGPRTERSPTSSTSGR

SEQ ID NO: 526467 - protein, 14 aa, Homo sapiens
  CDR3 for alpha chain variable domain of TCR clone 263234 (TRAV1-2, TRAJ8)
CAVREDTGFQKLVF

SEQ ID NO: 526468 - protein, 14 aa, Homo sapiens
  CDR3 for beta chain variable domain of TCR clone 263234 (TRBV11-2, TRBJ1-2)
CASSLYRGNYGYTF

SEQ ID NO: 526469 - protein, 11 aa, Homo sapiens
  CDR3 for alpha chain variable domain of TCR clone 263235 (TRAV17, TRAJ31)
CATSNNARLMF

SEQ ID NO: 526470 - protein, 16 aa, Homo sapiens
  CDR3 for beta chain variable domain of TCR clone 263235 (TRBV7-8, TRBJ2-4)
CASSAERTLAKNIQYV

SEQ ID NO: 526471 - protein, 19 aa, Homo sapiens
  CDR3 for alpha chain variable domain of TCR clone 263236 (TRAV26-1, TRAJ52)
CIVRAHRNAGGTSYGKLTF

SEQ ID NO: 526472 - protein, 15 aa, Homo sapiens
  CDR3 for beta chain variable domain of TCR clone 263236 (TRBV12-4, TRBJ2-5)
CASSPPTGLQDTQHF

SEQ ID NO: 526473 - protein, 13 aa, Homo sapiens
  CDR3 for alpha chain variable domain of TCR clone 263237 (TRAV14/DV4, TRAJ43)
CAMREGGTNDMRF

SEQ ID NO: 526474 - protein, 14 aa, Homo sapiens
  CDR3 for beta chain variable domain of TCR clone 263237 (TRBV11-2, TRBJ2-7)
CASSLGAGAYEQYF

SEQ ID NO: 526475 - protein, 13 aa, Homo sapiens
  CDR3 for alpha chain variable domain of TCR clone 263238 (TRAV8-3, TRAJ36)
CAVGATGANNLCF

SEQ ID NO: 526476 - protein, 15 aa, Homo sapiens
  CDR3 for beta chain variable domain of TCR clone 263238 (TRBV5-1, TRBJ2-3)
CASSVTSGSTDTQYF

SEQ ID NO: 526477 - protein, 15 aa, Homo sapiens
  CDR3 for alpha chain variable domain of TCR clone 263239 (TRAV23/DV6, TRAJ13)
CAAWPGGGGYQEVTF

SEQ ID NO: 526478 - protein, 12 aa, Homo sapiens
  CDR3 for beta chain variable domain of TCR clone 263239 (TRBV2, TRBJ2-1)
CAYGPPGNEQFF

SEQ ID NO: 526479 - protein, 13 aa, Homo sapiens
  CDR3 for alpha chain variable domain of TCR clone 263240 (TRAV1-2, TRAJ12)
CAVSMDSSYKLIF

SEQ ID NO: 526480 - protein, 14 aa, Homo sapiens
  CDR3 for beta chain variable domain of TCR clone 263240 (TRBV5-1, TRBJ2-7)
CASSRGESLYEQYF

SEQ ID NO: 526481 - protein, 15 aa, Homo sapiens
  CDR3 for alpha chain variable domain of TCR clone 263241 (TRAV35, TRAJ58)
CAGRRQETSGSRLTF

SEQ ID NO: 526482 - protein, 16 aa, Homo sapiens
  CDR3 for beta chain variable domain of TCR clone 263241 (TRBV20-1, TRBJ2-1)
CNASASGYSSYNEQFF

SEQ ID NO: 526483 - protein, 15 aa, Homo sapiens
  CDR3 for alpha chain variable domain of TCR clone 263242 (TRAV3, TRAJ3)
CAVRDRDSSASKIIF

SEQ ID NO: 526484 - protein, 15 aa, Homo sapiens
  CDR3 for beta chain variable domain of TCR clone 263242 (TRBV28, TRBJ2-1)
CASRVGLDEYNEQFF

SEQ ID NO: 526485 - protein, 15 aa, Homo sapiens
  CDR3 for alpha chain variable domain of TCR clone 263243 (TRAV26-1, TRAJ44)
CIVRANTGTTSKLTF

SEQ ID NO: 526486 - protein, 16 aa, Homo sapiens
  CDR3 for beta chain variable domain of TCR clone 263243 (TRBV7-7, TRBJ2-1)
CASSLASGTSYNGQFF

SEQ ID NO: 526487 - protein, 14 aa, Homo sapiens
  CDR3 for alpha chain variable domain of TCR clone 263244 (TRAV12-3, TRAJ10)
RHLPLTGGGNKLTF

SEQ ID NO: 526488 - protein, 13 aa, Homo sapiens
  CDR3 for beta chain variable domain of TCR clone 263244 (TRBV10-3, TRBJ2-7)
CASKLAVNYEQYF

SEQ ID NO: 526489 - protein, 12 aa, Homo sapiens
  CDR3 for alpha chain variable domain of TCR clone 263245 (TRAV12-3, TRAJ17)
RALTLTGNKLTF

SEQ ID NO: 526490 - protein, 14 aa, Homo sapiens
  CDR3 for beta chain variable domain of TCR clone 263245 (TRBV9, TRBJ2-1)
CASSVVAAYNEQFF

SEQ ID NO: 526491 - protein, 15 aa, Homo sapiens
  CDR3 for alpha chain variable domain of TCR clone 263246 (TRAV12-1, TRAJ44)
CVVDEYTGTASKLTF

SEQ ID NO: 526492 - protein, 14 aa, Homo sapiens
  CDR3 for beta chain variable domain of TCR clone 263246 (TRBV11-2, TRBJ1-2)
CASSLYRGNYGYTF

SEQ ID NO: 526493 - protein, 10 aa, Homo sapiens
  CDR3 for alpha chain variable domain of TCR clone 263247 (TRAV23/DV6, TRAJ31)
CARGGARLMI

SEQ ID NO: 526494 - protein, 14 aa, Homo sapiens
  CDR3 for beta chain variable domain of TCR clone 263247 (TRBV7-8, TRBJ1-2)
CASSPDSLSYGYTF

SEQ ID NO: 526495 - protein, 12 aa, Homo sapiens
  CDR3 for alpha chain variable domain of TCR clone 263248 (TRAV21, TRAJ33)
CAKMDSNYQLIW

SEQ ID NO: 526496 - protein, 12 aa, Homo sapiens
  CDR3 for beta chain variable domain of TCR clone 263248 (TRBV6-5, TRBJ2-7)
CASSDRQNEQYF

SEQ ID NO: 526497 - protein, 12 aa, Homo sapiens
  CDR3 for alpha chain variable domain of TCR clone 263249 (TRAV13-1, TRAJ49)
CEQVSGVTSSIL

SEQ ID NO: 526498 - protein, 14 aa, Homo sapiens
  CDR3 for beta chain variable domain of TCR clone 263249 (TRBV12-4, TRBJ1-1)
CASSLDGLNTEAFF

SEQ ID NO: 526499 - protein, 17 aa, Homo sapiens
  CDR3 for alpha chain variable domain of TCR clone 263250 (TRAV1-2, TRAJ6)
CSVRDTTRTGGSYITTF

SEQ ID NO: 526500 - protein, 12 aa, Homo sapiens
  CDR3 for beta chain variable domain of TCR clone 263250 (TRBV24-1, TRBJ2-3)
CATSSGGDTQYF

SEQ ID NO: 526501 - protein, 13 aa, Homo sapiens
  CDR3 for alpha chain variable domain of TCR clone 263251 (TRAV20, TRAJ37)
CAVCSSNTGKLIF

SEQ ID NO: 526502 - protein, 17 aa, Homo sapiens
  CDR3 for beta chain variable domain of TCR clone 263251 (TRBV11-2, TRBJ2-1)
CASSLYPPGVEYNEQFF

SEQ ID NO: 526503 - protein, 17 aa, Homo sapiens
  CDR3 for alpha chain variable domain of TCR clone 263252 (TRAV3, TRAJ28)
CAVREAYSGAGSYQLTF

SEQ ID NO: 526504 - protein, 15 aa, Homo sapiens
  CDR3 for beta chain variable domain of TCR clone 263252 (TRBV5-1, TRBJ2-1)
CASGPPRAPYNEQFL

SEQ ID NO: 526505 - protein, 10 aa, Homo sapiens
  CDR3 for alpha chain variable domain of TCR clone 263253 (TRAV12-2, TRAJ48)
CAVTSEKLTF

SEQ ID NO: 526506 - protein, 17 aa, Homo sapiens
  CDR3 for beta chain variable domain of TCR clone 263253 (TRBV11-1, TRBJ2-7)
CASSLTGSFDLDYEQYF

SEQ ID NO: 526507 - protein, 14 aa, Homo sapiens
  CDR3 for alpha chain variable domain of TCR clone 263254 (TRAV12-2, TRAJ40)
CAVKIPSGTYKYIF

SEQ ID NO: 526508 - protein, 15 aa, Homo sapiens
  CDR3 for beta chain variable domain of TCR clone 263254 (TRBV15, TRBJ2-3)
CATSRDPRGTDTQYF

SEQ ID NO: 526509 - protein, 21 aa, Homo sapiens
  CDR3 for alpha chain variable domain of TCR clone 263255 (TRAV1-1, TRAJ6)
CLLLLRCERLESTGGSYIPTF

SEQ ID NO: 526510 - protein, 12 aa, Homo sapiens
  CDR3 for beta chain variable domain of TCR clone 263255 (TRBV11-2, TRBJ2-2)
CASSLGGGELFF

SEQ ID NO: 526511 - protein, 15 aa, Homo sapiens
  CDR3 for alpha chain variable domain of TCR clone 263256 (TRAV21, TRAJ24)
CAARSSTDSWGKLQF

SEQ ID NO: 526512 - protein, 19 aa, Homo sapiens
  CDR3 for beta chain variable domain of TCR clone 263256 (TRBV14, TRBJ2-1)
CASSQDQLWEAPEDNEQFF

SEQ ID NO: 526513 - protein, 14 aa, Homo sapiens
  CDR3 for alpha chain variable domain of TCR clone 263257 (TRAV26-1, TRAJ38)
CIADNAGNNRKLIW

SEQ ID NO: 526514 - protein, 15 aa, Homo sapiens
  CDR3 for beta chain variable domain of TCR clone 263257 (TRBV7-6, TRBJ1-4)
CASSLGAGAGEKLFC

SEQ ID NO: 526515 - protein, 14 aa, Homo sapiens
  CDR3 for alpha chain variable domain of TCR clone 263258 (TRAV16, TRAJ17)
CALSGRAAGNKLTF

SEQ ID NO: 526516 - protein, 15 aa, Homo sapiens
  CDR3 for beta chain variable domain of TCR clone 263258 (TRBV3-1, TRBJ1-2)
CPSSPTRLPEGGYTF

SEQ ID NO: 526517 - protein, 11 aa, Homo sapiens
  CDR3 for alpha chain variable domain of TCR clone 263259 (TRAV17, TRAJ9)
CATTGGCKTVF

SEQ ID NO: 526518 - protein, 14 aa, Homo sapiens
  CDR3 for beta chain variable domain of TCR clone 263259 (TRBV7-9, TRBJ2-2)
CASSGLSDAGELFF

SEQ ID NO: 526519 - protein, 20 aa, Homo sapiens
  CDR3 for alpha chain variable domain of TCR clone 263260 (TRAV1-2, TRAJ10)
CLLPLAVRGVLTGGGNKLTF

SEQ ID NO: 526520 - protein, 16 aa, Homo sapiens
  CDR3 for beta chain variable domain of TCR clone 263260 (TRBV29-1, TRBJ2-7)
CSVEVVGTSGSYEQYF

SEQ ID NO: 526521 - protein, 10 aa, Homo sapiens
  CDR3 for alpha chain variable domain of TCR clone 263261 (TRAV13-1, TRAJ52)
CAAKTPMLVV

SEQ ID NO: 526522 - protein, 18 aa, Homo sapiens
  CDR3 for beta chain variable domain of TCR clone 263261 (TRBV12-4, TRBJ2-4)
CASSRTGAVDVAKNIQYF

SEQ ID NO: 526523 - protein, 14 aa, Homo sapiens
  CDR3 for alpha chain variable domain of TCR clone 263262 (TRAV26-1, TRAJ38)
CIADNAGNNSKLIW

SEQ ID NO: 526524 - protein, 16 aa, Homo sapiens
  CDR3 for beta chain variable domain of TCR clone 263262 (TRBV19, TRBJ2-1)
CASSKAGPSSYNEQFF

SEQ ID NO: 526525 - protein, 16 aa, Homo sapiens
  CDR3 for alpha chain variable domain of TCR clone 263263 (TRAV30, TRAJ24)
CGTEIVDADGWGKFQF

SEQ ID NO: 526526 - protein, 15 aa, Homo sapiens
  CDR3 for beta chain variable domain of TCR clone 263263 (TRBV6-3, TRBJ2-7)
CASSSPGTVFYEQYF

SEQ ID NO: 526527 - protein, 17 aa, Homo sapiens
  CDR3 for alpha chain variable domain of TCR clone 263264 (TRAV26-1, TRAJ37)
CIVRVITVSSNTGKLIF

SEQ ID NO: 526528 - protein, 14 aa, Homo sapiens
  CDR3 for beta chain variable domain of TCR clone 263264 (TRBV5-5, TRBJ1-2)
CASSLDPYNYGYTF

SEQ ID NO: 526529 - protein, 13 aa, Homo sapiens
  CDR3 for alpha chain variable domain of TCR clone 263265 (TRAV2, TRAJ24)
CAVSTDSWGKLQF

SEQ ID NO: 526530 - protein, 17 aa, Homo sapiens
  CDR3 for beta chain variable domain of TCR clone 263265 (TRBV11-2, TRBJ2-1)
CASSLYPPGVEYNEQFF

SEQ ID NO: 526531 - protein, 12 aa, Homo sapiens
  CDR3 for alpha chain variable domain of TCR clone 263266 (TRAV13-1, TRAJ22)
CVPRGFCKATDL

SEQ ID NO: 526532 - protein, 16 aa, Homo sapiens
  CDR3 for beta chain variable domain of TCR clone 263266 (TRBV2, TRBJ2-1)
CASSVGGSLSYNEQFF

SEQ ID NO: 526533 - protein, 14 aa, Homo sapiens
  CDR3 for alpha chain variable domain of TCR clone 263267 (TRAV35, TRAJ22)
CAGLRPGSAKQLTF

SEQ ID NO: 526534 - protein, 13 aa, Homo sapiens
  CDR3 for beta chain variable domain of TCR clone 263267 (TRBV20-1, TRBJ2-7)
CSATHTSGYEQYC

SEQ ID NO: 526535 - protein, 17 aa, Homo sapiens
  CDR3 for alpha chain variable domain of TCR clone 263268 (TRAV3, TRAJ6)
CAVRDGPRAGGSYIPTF

SEQ ID NO: 526536 - protein, 14 aa, Homo sapiens
  CDR3 for beta chain variable domain of TCR clone 263268 (TRBV24-1, TRBJ1-1)
CATSIPRGDTEAFF

SEQ ID NO: 526537 - protein, 13 aa, Homo sapiens
  CDR3 for alpha chain variable domain of TCR clone 263269 (TRAV27, TRAJ49)
CAPRPYTGNQFCF

SEQ ID NO: 526538 - protein, 16 aa, Homo sapiens
  CDR3 for beta chain variable domain of TCR clone 263269 (TRBV4-1, TRBJ1-2)
CASSQDAGHVLYGYTF

SEQ ID NO: 526539 - protein, 12 aa, Homo sapiens
  CDR3 for alpha chain variable domain of TCR clone 263270 (TRAV1-1, TRAJ39)
CAVPVVGNMLTF

SEQ ID NO: 526540 - protein, 14 aa, Homo sapiens
  CDR3 for beta chain variable domain of TCR clone 263270 (TRBV19, TRBJ2-1)
CASSPGLAPNEQFF

SEQ ID NO: 526541 - protein, 16 aa, Homo sapiens
  CDR3 for alpha chain variable domain of TCR clone 263271 (TRAV3, TRAJ10)
CAVRDMRAGGGKKLTF

SEQ ID NO: 526542 - protein, 13 aa, Homo sapiens
  CDR3 for beta chain variable domain of TCR clone 263271 (TRBV4-2, TRBJ1-1)
CASSQAGNTEAFF

SEQ ID NO: 526543 - protein, 13 aa, Homo sapiens
  CDR3 for alpha chain variable domain of TCR clone 263272 (TRAV38-1, TRAJ42)
CARWGGSQGNLIF

SEQ ID NO: 526544 - protein, 15 aa, Homo sapiens
  CDR3 for beta chain variable domain of TCR clone 263272 (TRBV6-1, TRBJ2-1)
CASSELRGQYNEQFF

SEQ ID NO: 526545 - protein, 16 aa, Homo sapiens
  CDR3 for alpha chain variable domain of TCR clone 263273 (TRAV12-3, TRAJ53)
CAMSPGSGGSNYKLTF

SEQ ID NO: 526546 - protein, 17 aa, Homo sapiens
  CDR3 for beta chain variable domain of TCR clone 263273 (TRBV4-1, TRBJ2-7)
CASSRDPLGVRGGEQYF

SEQ ID NO: 526547 - protein, 10 aa, Homo sapiens
  CDR3 for alpha chain variable domain of TCR clone 263274 (TRAV25, TRAJ34)
CAENTDKLIF

SEQ ID NO: 526548 - protein, 16 aa, Homo sapiens
  CDR3 for beta chain variable domain of TCR clone 263274 (TRBV7-9, TRBJ2-1)
CASSPRASSAYNEQFF

SEQ ID NO: 526549 - protein, 14 aa, Homo sapiens
  CDR3 for alpha chain variable domain of TCR clone 263275 (TRAV12-1, TRAJ4)
CVGDFSGGYNKLIF

SEQ ID NO: 526550 - protein, 17 aa, Homo sapiens
  CDR3 for beta chain variable domain of TCR clone 263275 (TRBV4-2, TRBJ1-1)
CASTRFGGGSGNTEAFF

SEQ ID NO: 526551 - protein, 13 aa, Homo sapiens
  CDR3 for alpha chain variable domain of TCR clone 263276 (TRAV12-3, TRAJ9)
CVMRNTGGFKTIF

SEQ ID NO: 526552 - protein, 14 aa, Homo sapiens
  CDR3 for beta chain variable domain of TCR clone 263276 (TRBV11-2, TRBJ2-7)
CASSSTGEGYEQYF

SEQ ID NO: 526553 - protein, 10 aa, Homo sapiens
  CDR3 for alpha chain variable domain of TCR clone 263277 (TRAV12-2, TRAJ49)
CAVRRNQFYF

SEQ ID NO: 526554 - protein, 15 aa, Homo sapiens
  CDR3 for beta chain variable domain of TCR clone 263277 (TRBV12-4, TRBJ2-5)
CASSPPTGLQETQYL

SEQ ID NO: 526555 - protein, 14 aa, Homo sapiens
  CDR3 for alpha chain variable domain of TCR clone 263278 (TRAV38-1, TRAJ29)
CAFITPSGNTPLVL

SEQ ID NO: 526556 - protein, 15 aa, Homo sapiens
  CDR3 for beta chain variable domain of TCR clone 263278 (TRBV5-1, TRBJ1-1)
CASSLSDLGGTEAFF

SEQ ID NO: 526557 - protein, 17 aa, Homo sapiens
  CDR3 for alpha chain variable domain of TCR clone 263279 (TRAV35, TRAJ52)
CAGQLAAGGTSYGKLTF

SEQ ID NO: 526558 - protein, 12 aa, Homo sapiens
  CDR3 for beta chain variable domain of TCR clone 263279 (TRBV20-1, TRBJ2-7)
CSAGRGQSEQYF

SEQ ID NO: 526559 - protein, 10 aa, Homo sapiens
  CDR3 for alpha chain variable domain of TCR clone 263280 (TRAV3, TRAJ30)
CAVREIEIIF

SEQ ID NO: 526560 - protein, 15 aa, Homo sapiens
  CDR3 for beta chain variable domain of TCR clone 263280 (TRBV20-1, TRBJ1-1)
CSASRGVTGNTEAFF

SEQ ID NO: 526561 - protein, 11 aa, Homo sapiens
  CDR3 for alpha chain variable domain of TCR clone 263281 (TRAV1-1, TRAJ23)
CAVRQGGKLIF

SEQ ID NO: 526562 - protein, 12 aa, Homo sapiens
  CDR3 for beta chain variable domain of TCR clone 263281 (TRBV7-9, TRBJ1-4)
CASSTDRGKLFF

SEQ ID NO: 526563 - protein, 11 aa, Homo sapiens
  CDR3 for alpha chain variable domain of TCR clone 263282 (TRAV13-1, TRAJ52)
MLVVLDGKLTF

SEQ ID NO: 526564 - protein, 11 aa, Homo sapiens
  CDR3 for beta chain variable domain of TCR clone 263282 (TRBV12-4, TRBJ2-2)
CASSSAGELFF

SEQ ID NO: 526565 - protein, 18 aa, Homo sapiens
  CDR3 for alpha chain variable domain of TCR clone 263283 (TRAV21, TRAJ52)
CAVRPSPAGGTSYGKLTF

SEQ ID NO: 526566 - protein, 12 aa, Homo sapiens
  CDR3 for beta chain variable domain of TCR clone 263283 (TRBV12-4, TRBJ2-7)
CASNPGGGEQYF

SEQ ID NO: 526567 - protein, 20 aa, Homo sapiens
  CDR3 for alpha chain variable domain of TCR clone 263284 (TRAV8-3, TRAJ45)
LSTSVLWGSYSGGGADGLTF

SEQ ID NO: 526568 - protein, 11 aa, Homo sapiens
  CDR3 for beta chain variable domain of TCR clone 263284 (TRBV20-1, TRBJ2-5)
YSADRAETQYF

SEQ ID NO: 526569 - protein, 15 aa, Homo sapiens
  CDR3 for alpha chain variable domain of TCR clone 263285 (TRAV12-2, TRAJ53)
CAVNGGGGSNYKPTF

SEQ ID NO: 526570 - protein, 17 aa, Homo sapiens
  CDR3 for beta chain variable domain of TCR clone 263285 (TRBV7-3, TRBJ2-3)
CASSLMERMRGADTQYF

SEQ ID NO: 526571 - protein, 14 aa, Homo sapiens
  CDR3 for alpha chain variable domain of TCR clone 263286 (TRAV12-2, TRAJ4)
CAEDLSGGYNKLIF

SEQ ID NO: 526572 - protein, 13 aa, Homo sapiens
  CDR3 for beta chain variable domain of TCR clone 263286 (TRBV7-9, TRBJ1-2)
CASSSKQNYGYTF

SEQ ID NO: 526573 - protein, 12 aa, Homo sapiens
  CDR3 for alpha chain variable domain of TCR clone 263287 (TRAV12-3, TRAJ17)
CAMTLTGNKLTF

SEQ ID NO: 526574 - protein, 17 aa, Homo sapiens
  CDR3 for beta chain variable domain of TCR clone 263287 (TRBV11-2, TRBJ2-1)
CASSLYPPGVEYNEQFL

SEQ ID NO: 526575 - protein, 15 aa, Homo sapiens
  CDR3 for alpha chain variable domain of TCR clone 263288 (TRAV12-2, TRAJ50)
CSVNGLETSYDKVIF

SEQ ID NO: 526576 - protein, 16 aa, Homo sapiens
  CDR3 for beta chain variable domain of TCR clone 263288 (TRBV5-4, TRBJ2-3)
CASQQPGAGGADTQYF

SEQ ID NO: 526577 - protein, 14 aa, Homo sapiens
  CDR3 for alpha chain variable domain of TCR clone 263289 (TRAV12-2, TRAJ40)
CAVKIPSGTYKYIF

SEQ ID NO: 526578 - protein, 18 aa, Homo sapiens
  CDR3 for beta chain variable domain of TCR clone 263289 (TRBV20-1, TRBJ2-6)
CSAETTPTHGSGANVMTF

SEQ ID NO: 526579 - protein, 13 aa, Homo sapiens
  CDR3 for alpha chain variable domain of TCR clone 263290 (TRAV12-2, TRAJ37)
CAGGSGNTGKLIF

SEQ ID NO: 526580 - protein, 17 aa, Homo sapiens
  CDR3 for beta chain variable domain of TCR clone 263290 (TRBV11-2, TRBJ2-1)
CASSLYPPRVEYNEQFF

SEQ ID NO: 526581 - protein, 16 aa, Homo sapiens
  CDR3 for alpha chain variable domain of TCR clone 263291 (TRAV3, TRAJ10)
CAVRDMRAGGGNKLTF

SEQ ID NO: 526582 - protein, 13 aa, Homo sapiens
  CDR3 for beta chain variable domain of TCR clone 263291 (TRBV12-5, TRBJ2-3)
CASQNRGTDTQYF

SEQ ID NO: 526583 - protein, 14 aa, Homo sapiens
  CDR3 for alpha chain variable domain of TCR clone 263292 (TRAV12-1, TRAJ17)
CVVNYKAAGNKLTF

SEQ ID NO: 526584 - protein, 16 aa, Homo sapiens
  CDR3 for beta chain variable domain of TCR clone 263292 (TRBV12-4, TRBJ1-5)
CASSRPGGGSNQPQHF

SEQ ID NO: 526585 - protein, 15 aa, Homo sapiens
  CDR3 for alpha chain variable domain of TCR clone 263293 (TRAV20, TRAJ43)
CAVQAGKSSNNDMRF

SEQ ID NO: 526586 - protein, 14 aa, Homo sapiens
  CDR3 for beta chain variable domain of TCR clone 263293 (TRBV7-6, TRBJ2-3)
CASSLGTVTDTQYF

SEQ ID NO: 526587 - protein, 16 aa, Homo sapiens
  CDR3 for alpha chain variable domain of TCR clone 263294 (TRAV3, TRAJ37)
CAVRGKGSGNTGKLIF

SEQ ID NO: 526588 - protein, 13 aa, Homo sapiens
  CDR3 for beta chain variable domain of TCR clone 263294 (TRBV4-1, TRBJ2-7)
CASSQGQAYEQYF

SEQ ID NO: 526589 - protein, 14 aa, Homo sapiens
  CDR3 for alpha chain variable domain of TCR clone 263295 (TRAV8-3, TRAJ47)
CAVGAQGYGNKLVL

SEQ ID NO: 526590 - protein, 17 aa, Homo sapiens
  CDR3 for beta chain variable domain of TCR clone 263295 (TRBV20-1, TRBJ2-1)
CSAPPRLAGTRYNEQFF

SEQ ID NO: 526591 - protein, 14 aa, Homo sapiens
  CDR3 for alpha chain variable domain of TCR clone 263296 (TRAV16, TRAJ54)
CALSGVQGAQKLVF

SEQ ID NO: 526592 - protein, 18 aa, Homo sapiens
  CDR3 for beta chain variable domain of TCR clone 263296 (TRBV12-4, TRBJ2-2)
CASSRSGGAIPNTGELFF

SEQ ID NO: 526593 - protein, 15 aa, Homo sapiens
  CDR3 for alpha chain variable domain of TCR clone 263297 (TRAV1-2, TRAJ30)
CAVRPHGNRDDKIIF

SEQ ID NO: 526594 - protein, 13 aa, Homo sapiens
  CDR3 for beta chain variable domain of TCR clone 263297 (TRBV4-1, TRBJ2-7)
CASSRGQAYEQYV

SEQ ID NO: 526595 - protein, 15 aa, Homo sapiens
  CDR3 for alpha chain variable domain of TCR clone 263298 (TRAV9-2, TRAJ49)
CAMSPPDHTGNQFYF

SEQ ID NO: 526596 - protein, 14 aa, Homo sapiens
  CDR3 for beta chain variable domain of TCR clone 263298 (TRBV12-4, TRBJ1-1)
CASSLGTGGTEAFF

SEQ ID NO: 526597 - protein, 19 aa, Homo sapiens
  CDR3 for alpha chain variable domain of TCR clone 263299 (TRAV2, TRAJ20)
ILQVREADAAVYRDCKLSF

SEQ ID NO: 526598 - protein, 16 aa, Homo sapiens
  CDR3 for beta chain variable domain of TCR clone 263299 (TRBV20-1, TRBJ1-4)
CSATGQGLLTNEKLFF

SEQ ID NO: 526599 - protein, 15 aa, Homo sapiens
  CDR3 for alpha chain variable domain of TCR clone 263300 (TRAV12-1, TRAJ10)
CLVNKLTGGGNKLTF

SEQ ID NO: 526600 - protein, 17 aa, Homo sapiens
  CDR3 for beta chain variable domain of TCR clone 263300 (TRBV5-1, TRBJ1-6)
CASSPSLQGSDNSPLHF

SEQ ID NO: 526601 - protein, 14 aa, Homo sapiens
  CDR3 for alpha chain variable domain of TCR clone 263301 (TRAV12-2, TRAJ17)
CAVLFKAAGNKLTF

SEQ ID NO: 526602 - protein, 17 aa, Homo sapiens
  CDR3 for beta chain variable domain of TCR clone 263301 (TRBV11-3, TRBJ2-6)
CASKWGQGLSGANVLTF

SEQ ID NO: 526603 - protein, 16 aa, Homo sapiens
  CDR3 for alpha chain variable domain of TCR clone 263302 (TRAV3, TRAJ37)
CAVRQHGSGNTGKLIF

SEQ ID NO: 526604 - protein, 17 aa, Homo sapiens
  CDR3 for beta chain variable domain of TCR clone 263302 (TRBV20-1, TRBJ2-1)
CSASSSGLAGSYNEQFF

SEQ ID NO: 526605 - protein, 14 aa, Homo sapiens
  CDR3 for alpha chain variable domain of TCR clone 263303 (TRAV26-1, TRAJ30)
CIVRVRTEMTRSSL

SEQ ID NO: 526606 - protein, 18 aa, Homo sapiens
  CDR3 for beta chain variable domain of TCR clone 263303 (TRBV4-1, TRBJ1-5)
CASSQDPRGQGLNQPQHF

SEQ ID NO: 526607 - protein, 14 aa, Homo sapiens
  CDR3 for alpha chain variable domain of TCR clone 263304 (TRAV13-1, TRAJ35)
CAASKGGFGNVLHC

SEQ ID NO: 526608 - protein, 15 aa, Homo sapiens
  CDR3 for beta chain variable domain of TCR clone 263304 (TRBV20-1, TRBJ2-7)
CSARVPAAYFYEQYF

SEQ ID NO: 526609 - protein, 19 aa, Homo sapiens
  CDR3 for alpha chain variable domain of TCR clone 263305 (TRAV26-1, TRAJ52)
CIVRAHRNAGGTSYGKLTF

SEQ ID NO: 526610 - protein, 15 aa, Homo sapiens
  CDR3 for beta chain variable domain of TCR clone 263305 (TRBV12-4, TRBJ2-5)
CASSPPTGLQKTQYF

SEQ ID NO: 526611 - protein, 12 aa, Homo sapiens
  CDR3 for alpha chain variable domain of TCR clone 263306 (TRAV26-1, TRAJ36)
CIVRVRADNLFF

SEQ ID NO: 526612 - protein, 14 aa, Homo sapiens
  CDR3 for beta chain variable domain of TCR clone 263306 (TRBV7-3, TRBJ2-2)
CASSSGGYTGELFF

SEQ ID NO: 526613 - protein, 15 aa, Homo sapiens
  CDR3 for alpha chain variable domain of TCR clone 263307 (TRAV3, TRAJ13)
CAVRVYSGGYQKVIF

SEQ ID NO: 526614 - protein, 15 aa, Homo sapiens
  CDR3 for beta chain variable domain of TCR clone 263307 (TRBV7-2, TRBJ2-1)
CASSSGLAGGNEQFF

SEQ ID NO: 526615 - protein, 13 aa, Homo sapiens
  CDR3 for alpha chain variable domain of TCR clone 263308 (TRAV3, TRAJ27)
CAVRPLGAGKSTF

SEQ ID NO: 526616 - protein, 13 aa, Homo sapiens
  CDR3 for beta chain variable domain of TCR clone 263308 (TRBV27, TRBJ2-7)
CASSLTTGYEQYF

SEQ ID NO: 526617 - protein, 14 aa, Homo sapiens
  CDR3 for alpha chain variable domain of TCR clone 263309 (TRAV8-6, TRAJ49)
CAVSVRYTGNQFYF

SEQ ID NO: 526618 - protein, 13 aa, Homo sapiens
  CDR3 for beta chain variable domain of TCR clone 263309 (TRBV10-2, TRBJ2-7)
CASGTSGGYEQYF

SEQ ID NO: 526619 - protein, 14 aa, Homo sapiens
  CDR3 for alpha chain variable domain of TCR clone 263310 (TRAV12-3, TRAJ10)
SHLPLTGGGNKLTF

SEQ ID NO: 526620 - protein, 11 aa, Homo sapiens
  CDR3 for beta chain variable domain of TCR clone 263310 (TRBV7-9, TRBJ2-7)
CASIKREEQYF

SEQ ID NO: 526621 - protein, 17 aa, Homo sapiens
  CDR3 for alpha chain variable domain of TCR clone 263311 (TRAV3, TRAJ6)
CAVRDGPRAGGSYILTF

SEQ ID NO: 526622 - protein, 14 aa, Homo sapiens
  CDR3 for beta chain variable domain of TCR clone 263311 (TRBV7-2, TRBJ2-7)
CASGPKTSFYEQYF

SEQ ID NO: 526623 - protein, 15 aa, Homo sapiens
  CDR3 for alpha chain variable domain of TCR clone 263312 (TRAV21, TRAJ53)
CATLNSGGSNYKLTF

SEQ ID NO: 526624 - protein, 15 aa, Homo sapiens
  CDR3 for beta chain variable domain of TCR clone 263312 (TRBV4-1, TRBJ1-4)
CASSDTGGTNEQLFF

SEQ ID NO: 526625 - protein, 12 aa, Homo sapiens
  CDR3 for alpha chain variable domain of TCR clone 263313 (TRAV3, TRAJ43)
CAVTDPNNDMRF

SEQ ID NO: 526626 - protein, 15 aa, Homo sapiens
  CDR3 for beta chain variable domain of TCR clone 263313 (TRBV27, TRBJ1-5)
CASSLGTGFDQPQHF

SEQ ID NO: 526627 - protein, 14 aa, Homo sapiens
  CDR3 for alpha chain variable domain of TCR clone 263314 (TRAV35, TRAJ13)
CAGSPSGGYQKVIF

SEQ ID NO: 526628 - protein, 14 aa, Homo sapiens
  CDR3 for beta chain variable domain of TCR clone 263314 (TRBV7-2, TRBJ1-2)
CASSQTGSTYGYTF

SEQ ID NO: 526629 - protein, 13 aa, Homo sapiens
  CDR3 for alpha chain variable domain of TCR clone 263315 (TRAV17, TRAJ5)
CSTGDTGRRALTF

SEQ ID NO: 526630 - protein, 13 aa, Homo sapiens
  CDR3 for beta chain variable domain of TCR clone 263315 (TRBV19, TRBJ1-5)
CASSIEPVQPQHF

SEQ ID NO: 526631 - protein, 12 aa, Homo sapiens
  CDR3 for alpha chain variable domain of TCR clone 263316 (TRAV2, TRAJ32)
CAVGGATNKLIF

SEQ ID NO: 526632 - protein, 16 aa, Homo sapiens
  CDR3 for beta chain variable domain of TCR clone 263316 (TRBV19, TRBJ2-4)
CATGGLAGGTKNIQYF

SEQ ID NO: 526633 - protein, 11 aa, Homo sapiens
  CDR3 for alpha chain variable domain of TCR clone 263317 (TRAV1-1, TRAJ23)
RAVRQGGKLIF

SEQ ID NO: 526634 - protein, 12 aa, Homo sapiens
  CDR3 for beta chain variable domain of TCR clone 263317 (TRBV11-2, TRBJ2-4)
CASSSASGSEYF

SEQ ID NO: 526635 - protein, 19 aa, Homo sapiens
  CDR3 for alpha chain variable domain of TCR clone 263318 (TRAV2, TRAJ20)
ILQVREADAVVYRDCKLSF

SEQ ID NO: 526636 - protein, 16 aa, Homo sapiens
  CDR3 for beta chain variable domain of TCR clone 263318 (TRBV9, TRBJ2-2)
CASSAMGKGNTGELYF

SEQ ID NO: 526637 - protein, 14 aa, Homo sapiens
  CDR3 for alpha chain variable domain of TCR clone 263319 (TRAV1-2, TRAJ8)
CAVREDTGFQTRVF

SEQ ID NO: 526638 - protein, 15 aa, Homo sapiens
  CDR3 for beta chain variable domain of TCR clone 263319 (TRBV20-1, TRBJ2-7)
CSARDRVSGMDEQYF

SEQ ID NO: 526639 - protein, 16 aa, Homo sapiens
  CDR3 for alpha chain variable domain of TCR clone 263320 (TRAV27, TRAJ52)
CAGAPAGGTSYGKLTF

SEQ ID NO: 526640 - protein, 15 aa, Homo sapiens
  CDR3 for beta chain variable domain of TCR clone 263320 (TRBV27, TRBJ2-1)
CASSLGQGPFGEQFF

SEQ ID NO: 526641 - protein, 14 aa, Homo sapiens
  CDR3 for alpha chain variable domain of TCR clone 263321 (TRAV12-2, TRAJ40)
CAVKIASGTYKYIF

SEQ ID NO: 526642 - protein, 14 aa, Homo sapiens
  CDR3 for beta chain variable domain of TCR clone 263321 (TRBV20-1, TRBJ1-1)
CSAQTRMGGTEAFF

SEQ ID NO: 526643 - protein, 14 aa, Homo sapiens
  CDR3 for alpha chain variable domain of TCR clone 263322 (TRAV17, TRAJ16)
CATADFSDGQKLLF

SEQ ID NO: 526644 - protein, 13 aa, Homo sapiens
  CDR3 for beta chain variable domain of TCR clone 263322 (TRBV14, TRBJ1-2)
CASSQDRRYGYTF

SEQ ID NO: 526645 - protein, 14 aa, Homo sapiens
  CDR3 for alpha chain variable domain of TCR clone 263323 (TRAV13-1, TRAJ40)
CAASMTSGTYKSIF

SEQ ID NO: 526646 - protein, 15 aa, Homo sapiens
  CDR3 for beta chain variable domain of TCR clone 263323 (TRBV7-3, TRBJ2-1)
CASSPTGGGEVEQFF

SEQ ID NO: 526647 - protein, 14 aa, Homo sapiens
  CDR3 for alpha chain variable domain of TCR clone 263324 (TRAV2, TRAJ9)
CAVEDRSGGCKTIF

SEQ ID NO: 526648 - protein, 11 aa, Homo sapiens
  CDR3 for beta chain variable domain of TCR clone 263324 (TRBV7-9, TRBJ2-5)
CASSLGETQYL

SEQ ID NO: 526649 - protein, 17 aa, Homo sapiens
  CDR3 for alpha chain variable domain of TCR clone 263325 (TRAV8-6, TRAJ58)
CAVSSWVGETSGSRLTF

SEQ ID NO: 526650 - protein, 14 aa, Homo sapiens
  CDR3 for beta chain variable domain of TCR clone 263325 (TRBV4-2, TRBJ2-1)
SASGLDRAYNEQFF

SEQ ID NO: 526651 - protein, 14 aa, Homo sapiens
  CDR3 for alpha chain variable domain of TCR clone 263326 (TRAV2, TRAJ9)
CAVGPNTGGFKTIF

SEQ ID NO: 526652 - protein, 13 aa, Homo sapiens
  CDR3 for beta chain variable domain of TCR clone 263326 (TRBV20-1, TRBJ2-1)
CSASTGTSNEQFF

SEQ ID NO: 526653 - protein, 12 aa, Homo sapiens
  CDR3 for alpha chain variable domain of TCR clone 263327 (TRAV30, TRAJ39)
CGRGNAGNLLTF

SEQ ID NO: 526654 - protein, 15 aa, Homo sapiens
  CDR3 for beta chain variable domain of TCR clone 263327 (TRBV5-1, TRBJ1-1)
CASSWTGRGNIEAFF

SEQ ID NO: 526655 - protein, 15 aa, Homo sapiens
  CDR3 for alpha chain variable domain of TCR clone 263328 (TRAV2, TRAJ22)
CAVPSRGGSARQLTF

SEQ ID NO: 526656 - protein, 11 aa, Homo sapiens
  CDR3 for beta chain variable domain of TCR clone 263328 (TRBV27, TRBJ2-3)
CASSLGETQYF

SEQ ID NO: 526657 - protein, 14 aa, Homo sapiens
  CDR3 for alpha chain variable domain of TCR clone 263329 (TRAV12-2, TRAJ13)
CAVKKTGGYQKVTF

SEQ ID NO: 526658 - protein, 15 aa, Homo sapiens
  CDR3 for beta chain variable domain of TCR clone 263329 (TRBV9, TRBJ1-6)
CASSVAGKGDSPLHF

SEQ ID NO: 526659 - protein, 16 aa, Homo sapiens
  CDR3 for alpha chain variable domain of TCR clone 263330 (TRAV12-2, TRAJ32)
CAVNLGQGGATNKLIF

SEQ ID NO: 526660 - protein, 13 aa, Homo sapiens
  CDR3 for beta chain variable domain of TCR clone 263330 (TRBV11-2, TRBJ2-1)
CASSSEAYNEQFF

SEQ ID NO: 526661 - protein, 12 aa, Homo sapiens
  CDR3 for alpha chain variable domain of TCR clone 263331 (TRAV13-2, TRAJ20)
CAENICRLQAQL

SEQ ID NO: 526662 - protein, 15 aa, Homo sapiens
  CDR3 for beta chain variable domain of TCR clone 263331 (TRBV18, TRBJ1-2)
CASSPGNGLGYGYTF

SEQ ID NO: 526663 - protein, 15 aa, Homo sapiens
  CDR3 for alpha chain variable domain of TCR clone 263332 (TRAV26-2, TRAJ13)
CILRDLSGGYQKVTF

SEQ ID NO: 526664 - protein, 14 aa, Homo sapiens
  CDR3 for beta chain variable domain of TCR clone 263332 (TRBV7-2, TRBJ2-7)
CASSPKTSFYEQYF

SEQ ID NO: 526665 - protein, 16 aa, Homo sapiens
  CDR3 for alpha chain variable domain of TCR clone 263333 (TRAV14/DV4, TRAJ15)
CAMREGSFKAGTALIF

SEQ ID NO: 526666 - protein, 18 aa, Homo sapiens
  CDR3 for beta chain variable domain of TCR clone 263333 (TRBV12-4, TRBJ2-4)
CASSRTGAVDVAKNIQYF

SEQ ID NO: 526667 - protein, 14 aa, Homo sapiens
  CDR3 for alpha chain variable domain of TCR clone 263334 (TRAV12-3, TRAJ41)
CAMSAGNSGYALNF

SEQ ID NO: 526668 - protein, 11 aa, Homo sapiens
  CDR3 for beta chain variable domain of TCR clone 263334 (TRBV7-2, TRBJ2-3)
CDSSSSDTQYF

SEQ ID NO: 526669 - protein, 12 aa, Homo sapiens
  CDR3 for alpha chain variable domain of TCR clone 263335 (TRAV22, TRAJ36)
CAVGTGANNLFF

SEQ ID NO: 526670 - protein, 17 aa, Homo sapiens
  CDR3 for beta chain variable domain of TCR clone 263335 (TRBV15, TRBJ1-4)
CTISRYGTGDPNEKLFF

SEQ ID NO: 526671 - protein, 10 aa, Homo sapiens
  CDR3 for alpha chain variable domain of TCR clone 263336 (TRAV1-2, TRAJ18)
CAVRGEAQPW

SEQ ID NO: 526672 - protein, 15 aa, Homo sapiens
  CDR3 for beta chain variable domain of TCR clone 263336 (TRBV20-1, TRBJ2-7)
CSARDRVSGMDEQYF

SEQ ID NO: 526673 - protein, 15 aa, Homo sapiens
  CDR3 for alpha chain variable domain of TCR clone 263337 (TRAV8-3, TRAJ6)
CAVGSAGGGSYIPTF

SEQ ID NO: 526674 - protein, 13 aa, Homo sapiens
  CDR3 for beta chain variable domain of TCR clone 263337 (TRBV12-4, TRBJ1-5)
CASSPDRAQPQHF

SEQ ID NO: 526675 - protein, 14 aa, Homo sapiens
  CDR3 for alpha chain variable domain of TCR clone 263338 (TRAV20, TRAJ10)
CAVRVEGGGNKRTF

SEQ ID NO: 526676 - protein, 13 aa, Homo sapiens
  CDR3 for beta chain variable domain of TCR clone 263338 (TRBV13, TRBJ2-2)
CASSPGLTGELFF

SEQ ID NO: 526677 - protein, 12 aa, Homo sapiens
  CDR3 for alpha chain variable domain of TCR clone 263339 (TRAV3, TRAJ31)
CAVRDGNPRPMF

SEQ ID NO: 526678 - protein, 18 aa, Homo sapiens
  CDR3 for beta chain variable domain of TCR clone 263339 (TRBV7-2, TRBJ2-3)
CASSLKREGSGITDTQYF

SEQ ID NO: 526679 - protein, 14 aa, Homo sapiens
  CDR3 for alpha chain variable domain of TCR clone 263340 (TRAV12-2, TRAJ13)
CAVKKTGGYQKVTF

SEQ ID NO: 526680 - protein, 17 aa, Homo sapiens
  CDR3 for beta chain variable domain of TCR clone 263340 (TRBV12-4, TRBJ2-1)
CASSPGLAGGRINEQFF

SEQ ID NO: 526681 - protein, 11 aa, Homo sapiens
  CDR3 for alpha chain variable domain of TCR clone 263341 (TRAV35, TRAJ30)
CAPGGEDKIIF

SEQ ID NO: 526682 - protein, 14 aa, Homo sapiens
  CDR3 for beta chain variable domain of TCR clone 263341 (TRBV7-6, TRBJ2-1)
CASSLGGGADEQFF

SEQ ID NO: 526683 - protein, 11 aa, Homo sapiens
  CDR3 for alpha chain variable domain of TCR clone 263342 (TRAV21, TRAJ39)
LLVNAGNMLTF

SEQ ID NO: 526684 - protein, 16 aa, Homo sapiens
  CDR3 for beta chain variable domain of TCR clone 263342 (TRBV9, TRBJ2-7)
CASSVGLGGGTYEQYS

SEQ ID NO: 526685 - protein, 13 aa, Homo sapiens
  CDR3 for alpha chain variable domain of TCR clone 263343 (TRAV30, TRAJ24)
CGTVTDSWGKLQF

SEQ ID NO: 526686 - protein, 16 aa, Homo sapiens
  CDR3 for beta chain variable domain of TCR clone 263343 (TRBV7-3, TRBJ2-2)
CASSLKRESLSGELFF

SEQ ID NO: 526687 - protein, 15 aa, Homo sapiens
  CDR3 for alpha chain variable domain of TCR clone 263344 (TRAV1-2, TRAJ20)
CLLPLCCGYDYKLSF

SEQ ID NO: 526688 - protein, 15 aa, Homo sapiens
  CDR3 for beta chain variable domain of TCR clone 263344 (TRBV2, TRBJ2-1)
CASSELAGSYNEQFF

SEQ ID NO: 526689 - protein, 12 aa, Homo sapiens
  CDR3 for alpha chain variable domain of TCR clone 263345 (TRAV20, TRAJ23)
CAVHNQGGKLIF

SEQ ID NO: 526690 - protein, 15 aa, Homo sapiens
  CDR3 for beta chain variable domain of TCR clone 263345 (TRBV7-9, TRBJ1-4)
CASSRTGGFNEKLFF

SEQ ID NO: 526691 - protein, 12 aa, Homo sapiens
  CDR3 for alpha chain variable domain of TCR clone 263346 (TRAV12-2, TRAJ42)
CAVGGSQGNLIF

SEQ ID NO: 526692 - protein, 14 aa, Homo sapiens
  CDR3 for beta chain variable domain of TCR clone 263346 (TRBV7-3, TRBJ2-1)
CASSLAGGTNEQFF

SEQ ID NO: 526693 - protein, 15 aa, Homo sapiens
  CDR3 for alpha chain variable domain of TCR clone 263347 (TRAV23/DV6, TRAJ18)
CAARYIGSTLGRLYF

SEQ ID NO: 526694 - protein, 15 aa, Homo sapiens
  CDR3 for beta chain variable domain of TCR clone 263347 (TRBV9, TRBJ1-6)
CASSVAGTGDSPLHS

SEQ ID NO: 526695 - protein, 14 aa, Homo sapiens
  CDR3 for alpha chain variable domain of TCR clone 263348 (TRAV2, TRAJ23)
CAVGLRNQGGKLIF

SEQ ID NO: 526696 - protein, 14 aa, Homo sapiens
  CDR3 for beta chain variable domain of TCR clone 263348 (TRBV7-3, TRBJ1-1)
CASSLKGGNTEAFF

SEQ ID NO: 526697 - protein, 16 aa, Homo sapiens
  CDR3 for alpha chain variable domain of TCR clone 263349 (TRAV3, TRAJ40)
CAVRDRIASGTYKYIF

SEQ ID NO: 526698 - protein, 16 aa, Homo sapiens
  CDR3 for beta chain variable domain of TCR clone 263349 (TRBV6-1, TRBJ2-5)
CASSETLDRGAETQYF

SEQ ID NO: 526699 - protein, 13 aa, Homo sapiens
  CDR3 for alpha chain variable domain of TCR clone 263350 (TRAV21, TRAJ36)
CAVIKTGANDLFF

SEQ ID NO: 526700 - protein, 13 aa, Homo sapiens
  CDR3 for beta chain variable domain of TCR clone 263350 (TRBV29-1, TRBJ2-3)
CSATRGGRDTQYF

SEQ ID NO: 526701 - protein, 15 aa, Homo sapiens
  CDR3 for alpha chain variable domain of TCR clone 263351 (TRAV2, TRAJ15)
CAVEDRGQAGTALIF

SEQ ID NO: 526702 - protein, 13 aa, Homo sapiens
  CDR3 for beta chain variable domain of TCR clone 263351 (TRBV11-2, TRBJ1-5)
CASSLDRNQPQHF

SEQ ID NO: 526703 - protein, 14 aa, Homo sapiens
  CDR3 for alpha chain variable domain of TCR clone 263352 (TRAV1-2, TRAJ16)
CAVNRFSDGQKLFF

SEQ ID NO: 526704 - protein, 15 aa, Homo sapiens
  CDR3 for beta chain variable domain of TCR clone 263352 (TRBV10-1, TRBJ2-1)
CASSEWRGTYNEQFF

SEQ ID NO: 526705 - protein, 12 aa, Homo sapiens
  CDR3 for alpha chain variable domain of TCR clone 263353 (TRAV30, TRAJ43)
CGTEERGNDMRF

SEQ ID NO: 526706 - protein, 13 aa, Homo sapiens
  CDR3 for beta chain variable domain of TCR clone 263353 (TRBV20-1, TRBJ1-1)
CSAPLGGGTEAFF

SEQ ID NO: 526707 - protein, 17 aa, Homo sapiens
  CDR3 for alpha chain variable domain of TCR clone 263354 (TRAV21, TRAJ52)
CAVGVNAGGTSYGKLTF

SEQ ID NO: 526708 - protein, 13 aa, Homo sapiens
  CDR3 for beta chain variable domain of TCR clone 263354 (TRBV5-1, TRBJ1-2)
CASSCQGNYGYTF

SEQ ID NO: 526709 - protein, 18 aa, Homo sapiens
  CDR3 for alpha chain variable domain of TCR clone 263355 (TRAV21, TRAJ52)
CAVRPSPAGGTSYGKLTF

SEQ ID NO: 526710 - protein, 13 aa, Homo sapiens
  CDR3 for beta chain variable domain of TCR clone 263355 (TRBV2, TRBJ1-1)
CASNLWRNTEAFF

SEQ ID NO: 526711 - protein, 13 aa, Homo sapiens
  CDR3 for alpha chain variable domain of TCR clone 263356 (TRAV35, TRAJ42)
CAGLPGSQGNLIF

SEQ ID NO: 526712 - protein, 14 aa, Homo sapiens
  CDR3 for beta chain variable domain of TCR clone 263356 (TRBV4-1, TRBJ2-2)
CASSQAVSTGELFF

SEQ ID NO: 526713 - protein, 14 aa, Homo sapiens
  CDR3 for alpha chain variable domain of TCR clone 263357 (TRAV1-2, TRAJ8)
CAVREDTGFQKLVF

SEQ ID NO: 526714 - protein, 13 aa, Homo sapiens
  CDR3 for beta chain variable domain of TCR clone 263357 (TRBV4-3, TRBJ2-2)
FASEDRGTGELFF

SEQ ID NO: 526715 - protein, 15 aa, Homo sapiens
  CDR3 for alpha chain variable domain of TCR clone 263358 (TRAV35, TRAJ23)
CAGPLGNNQGGKLIF

SEQ ID NO: 526716 - protein, 14 aa, Homo sapiens
  CDR3 for beta chain variable domain of TCR clone 263358 (TRBV7-9, TRBJ1-1)
CSSTPLQSYTEAFF

SEQ ID NO: 526717 - protein, 13 aa, Homo sapiens
  CDR3 for alpha chain variable domain of TCR clone 263359 (TRAV12-1, TRAJ13)
CVLALLGYQKVTF

SEQ ID NO: 526718 - protein, 13 aa, Homo sapiens
  CDR3 for beta chain variable domain of TCR clone 263359 (TRBV20-1, TRBJ2-5)
CSAILTGQETQYF

SEQ ID NO: 526719 - protein, 10 aa, Homo sapiens
  CDR3 for alpha chain variable domain of TCR clone 263360 (TRAV23/DV6, TRAJ57)
CAASPTLSQG

SEQ ID NO: 526720 - protein, 11 aa, Homo sapiens
  CDR3 for beta chain variable domain of TCR clone 263360 (TRBV25-1, TRBJ1-1)
PTWGGNTEAFF

SEQ ID NO: 526721 - protein, 16 aa, Homo sapiens
  CDR3 for alpha chain variable domain of TCR clone 263361 (TRAV30, TRAJ24)
CGTEIVDADSWGKFRF

SEQ ID NO: 526722 - protein, 14 aa, Homo sapiens
  CDR3 for beta chain variable domain of TCR clone 263361 (TRBV12-5, TRBJ2-5)
CASGSRTHKETQYF

SEQ ID NO: 526723 - protein, 13 aa, Homo sapiens
  CDR3 for alpha chain variable domain of TCR clone 263362 (TRAV12-3, TRAJ33)
CAMSVNSNYQLIW

SEQ ID NO: 526724 - protein, 16 aa, Homo sapiens
  CDR3 for beta chain variable domain of TCR clone 263362 (TRBV20-1, TRBJ1-2)
CSASMGQGVANYGYTF

SEQ ID NO: 526725 - protein, 12 aa, Homo sapiens
  CDR3 for alpha chain variable domain of TCR clone 263363 (TRAV30, TRAJ39)
CGRGNAGNMLTF

SEQ ID NO: 526726 - protein, 14 aa, Homo sapiens
  CDR3 for beta chain variable domain of TCR clone 263363 (TRBV11-2, TRBJ2-3)
CASSRLARTDTQYF

SEQ ID NO: 526727 - protein, 17 aa, Homo sapiens
  CDR3 for alpha chain variable domain of TCR clone 263364 (TRAV3, TRAJ6)
CAVRDGPRAGGSYIPKF

SEQ ID NO: 526728 - protein, 14 aa, Homo sapiens
  CDR3 for beta chain variable domain of TCR clone 263364 (TRBV7-2, TRBJ2-7)
GASSPKTSFYEQYF

SEQ ID NO: 526729 - protein, 15 aa, Homo sapiens
  CDR3 for alpha chain variable domain of TCR clone 263365 (TRAV26-1, TRAJ56)
CIVRVATGANSKRTF

SEQ ID NO: 526730 - protein, 15 aa, Homo sapiens
  CDR3 for beta chain variable domain of TCR clone 263365 (TRBV27, TRBJ2-7)
CASSPQREGQREQYF

SEQ ID NO: 526731 - protein, 11 aa, Homo sapiens
  CDR3 for alpha chain variable domain of TCR clone 263366 (TRAV17, TRAJ9)
CGFTGGFKTIF

SEQ ID NO: 526732 - protein, 14 aa, Homo sapiens
  CDR3 for beta chain variable domain of TCR clone 263366 (TRBV7-9, TRBJ2-2)
CARSLVQDPGELFF

SEQ ID NO: 526733 - protein, 14 aa, Homo sapiens
  CDR3 for alpha chain variable domain of TCR clone 263367 (TRAV13-1, TRAJ9)
CAASALTGGFKTTF

SEQ ID NO: 526734 - protein, 16 aa, Homo sapiens
  CDR3 for beta chain variable domain of TCR clone 263367 (TRBV12-4, TRBJ2-3)
CASSFGTGGISDTQYF

SEQ ID NO: 526735 - protein, 16 aa, Homo sapiens
  CDR3 for alpha chain variable domain of TCR clone 263368 (TRAV23/DV6, TRAJ9)
CAASRGGNTGGFKTIF

SEQ ID NO: 526736 - protein, 14 aa, Homo sapiens
  CDR3 for beta chain variable domain of TCR clone 263368 (TRBV9, TRBJ2-7)
CASSVGVGSYEQYF

SEQ ID NO: 526737 - protein, 12 aa, Homo sapiens
  CDR3 for alpha chain variable domain of TCR clone 263369 (TRAV12-3, TRAJ17)
CAMTLTGNELTF

SEQ ID NO: 526738 - protein, 16 aa, Homo sapiens
  CDR3 for beta chain variable domain of TCR clone 263369 (TRBV20-1, TRBJ1-4)
CSAPGQGLLTNEKLFF

SEQ ID NO: 526739 - protein, 11 aa, Homo sapiens
  CDR3 for alpha chain variable domain of TCR clone 263370 (TRAV35, TRAJ22)
CAGPGVGQLTF

SEQ ID NO: 526740 - protein, 15 aa, Homo sapiens
  CDR3 for beta chain variable domain of TCR clone 263370 (TRBV10-2, TRBJ2-6)
CASSEQGTGANVLTF

SEQ ID NO: 526741 - protein, 15 aa, Homo sapiens
  CDR3 for alpha chain variable domain of TCR clone 263371 (TRAV12-3, TRAJ6)
CAMSATPGGSYIPTF

SEQ ID NO: 526742 - protein, 12 aa, Homo sapiens
  CDR3 for beta chain variable domain of TCR clone 263371 (TRBV11-2, TRBJ2-2)
CASSLGGGELFF

SEQ ID NO: 526743 - protein, 14 aa, Homo sapiens
  CDR3 for alpha chain variable domain of TCR clone 263372 (TRAV12-3, TRAJ10)
SHLPLTGGGNKLTF

SEQ ID NO: 526744 - protein, 14 aa, Homo sapiens
  CDR3 for beta chain variable domain of TCR clone 263372 (TRBV18, TRBJ2-1)
CASSPQGRFNEQFF

SEQ ID NO: 526745 - protein, 16 aa, Homo sapiens
  CDR3 for alpha chain variable domain of TCR clone 263373 (TRAV3, TRAJ6)
CAVRDGMGRRKLHTYI

SEQ ID NO: 526746 - protein, 15 aa, Homo sapiens
  CDR3 for beta chain variable domain of TCR clone 263373 (TRBV9, TRBJ2-1)
CASSLAGSSYNEQYV

SEQ ID NO: 526747 - protein, 12 aa, Homo sapiens
  CDR3 for alpha chain variable domain of TCR clone 263374 (TRAV1-1, TRAJ43)
CAPRVSSNDMRF

SEQ ID NO: 526748 - protein, 15 aa, Homo sapiens
  CDR3 for beta chain variable domain of TCR clone 263374 (TRBV5-1, TRBJ2-7)
CASSLGDFTTYERYF

SEQ ID NO: 526749 - protein, 14 aa, Homo sapiens
  CDR3 for alpha chain variable domain of TCR clone 263375 (TRAV12-2, TRAJ11)
CAVNRETGYSTLTF

SEQ ID NO: 526750 - protein, 10 aa, Homo sapiens
  CDR3 for beta chain variable domain of TCR clone 263375 (TRBV20-1, TRBJ2-5)
CSARFETQYF

SEQ ID NO: 526751 - protein, 14 aa, Homo sapiens
  CDR3 for alpha chain variable domain of TCR clone 263376 (TRAV13-1, TRAJ13)
CAASRVGGYHKVPF

SEQ ID NO: 526752 - protein, 17 aa, Homo sapiens
  CDR3 for beta chain variable domain of TCR clone 263376 (TRBV15, TRBJ1-5)
CATSRAPPGTRNQPQHF

SEQ ID NO: 526753 - protein, 15 aa, Homo sapiens
  CDR3 for alpha chain variable domain of TCR clone 263377 (TRAV25, TRAJ53)
CAATGGGGSNYKPTF

SEQ ID NO: 526754 - protein, 12 aa, Homo sapiens
  CDR3 for beta chain variable domain of TCR clone 263377 (TRBV7-8, TRBJ2-7)
CASSLGDREQYF

SEQ ID NO: 526755 - protein, 17 aa, Homo sapiens
  CDR3 for alpha chain variable domain of TCR clone 263378 (TRAV3, TRAJ12)
CAVRDGGRMDSRYKLIF

SEQ ID NO: 526756 - protein, 16 aa, Homo sapiens
  CDR3 for beta chain variable domain of TCR clone 263378 (TRBV9, TRBJ2-2)
CASSAMGKGNTGELFF

SEQ ID NO: 526757 - protein, 13 aa, Homo sapiens
  CDR3 for alpha chain variable domain of TCR clone 263379 (TRAV23/DV6, TRAJ6)
CAAQTGGSYIPTF

SEQ ID NO: 526758 - protein, 15 aa, Homo sapiens
  CDR3 for beta chain variable domain of TCR clone 263379 (TRBV5-1, TRBJ1-2)
CASSSYGEFDYGYTF

SEQ ID NO: 526759 - protein, 17 aa, Homo sapiens
  CDR3 for alpha chain variable domain of TCR clone 263380 (TRAV3, TRAJ38)
CAVRDCLNAGNNRKLIW

SEQ ID NO: 526760 - protein, 16 aa, Homo sapiens
  CDR3 for beta chain variable domain of TCR clone 263380 (TRBV10-3, TRBJ2-7)
CAISADFADRPYEQYF

SEQ ID NO: 526761 - protein, 13 aa, Homo sapiens
  CDR3 for alpha chain variable domain of TCR clone 263381 (TRAV2, TRAJ40)
CAVVTSGTYKYTF

SEQ ID NO: 526762 - protein, 13 aa, Homo sapiens
  CDR3 for beta chain variable domain of TCR clone 263381 (TRBV7-2, TRBJ2-2)
CASSSVRAGELFF

SEQ ID NO: 526763 - protein, 12 aa, Homo sapiens
  CDR3 for alpha chain variable domain of TCR clone 263382 (TRAV21, TRAJ23)
CAVGPQGGKLIF

SEQ ID NO: 526764 - protein, 13 aa, Homo sapiens
  CDR3 for beta chain variable domain of TCR clone 263382 (TRBV20-1, TRBJ2-7)
YSARTGAGYEQYF

SEQ ID NO: 526765 - protein, 16 aa, Homo sapiens
  CDR3 for alpha chain variable domain of TCR clone 263383 (TRAV14/DV4, TRAJ54)
CAMREGRIQGAQKLVF

SEQ ID NO: 526766 - protein, 15 aa, Homo sapiens
  CDR3 for beta chain variable domain of TCR clone 263383 (TRBV4-3, TRBJ2-3)
CASSPSLLSTDTQYF

SEQ ID NO: 526767 - protein, 18 aa, Homo sapiens
  CDR3 for alpha chain variable domain of TCR clone 263384 (TRAV8-4, TRAJ52)
CAVTRANAGGTSYGKLTF

SEQ ID NO: 526768 - protein, 20 aa, Homo sapiens
  CDR3 for beta chain variable domain of TCR clone 263384 (TRBV19, TRBJ2-1)
CASSISRTVTSTRLNNELFF

SEQ ID NO: 526769 - protein, 14 aa, Homo sapiens
  CDR3 for alpha chain variable domain of TCR clone 263385 (TRAV2, TRAJ37)
CAVDFTSNTGKLIY

SEQ ID NO: 526770 - protein, 16 aa, Homo sapiens
  CDR3 for beta chain variable domain of TCR clone 263385 (TRBV27, TRBJ2-7)
CASSSERRDSAYEQYF

SEQ ID NO: 526771 - protein, 15 aa, Homo sapiens
  CDR3 for alpha chain variable domain of TCR clone 263386 (TRAV27, TRAJ38)
CSVRRNAGNNRKLIW

SEQ ID NO: 526772 - protein, 13 aa, Homo sapiens
  CDR3 for beta chain variable domain of TCR clone 263386 (TRBV12-5, TRBJ2-3)
CASGDRQSDTQYF

SEQ ID NO: 526773 - protein, 14 aa, Homo sapiens
  CDR3 for alpha chain variable domain of TCR clone 263387 (TRAV38-1, TRAJ40)
CALRPTSGTYKYIF

SEQ ID NO: 526774 - protein, 15 aa, Homo sapiens
  CDR3 for beta chain variable domain of TCR clone 263387 (TRBV4-2, TRBJ2-5)
CASSLSGQGEETQYF

SEQ ID NO: 526775 - protein, 14 aa, Homo sapiens
  CDR3 for alpha chain variable domain of TCR clone 263388 (TRAV8-4, TRAJ4)
CAVSPSGGYKKLIF

SEQ ID NO: 526776 - protein, 15 aa, Homo sapiens
  CDR3 for beta chain variable domain of TCR clone 263388 (TRBV7-8, TRBJ2-3)
CASSLSADSGGAQYF

SEQ ID NO: 526777 - protein, 13 aa, Homo sapiens
  CDR3 for alpha chain variable domain of TCR clone 263389 (TRAV29/DV5, TRAJ31)
CAASRNNNARLLF

SEQ ID NO: 526778 - protein, 16 aa, Homo sapiens
  CDR3 for beta chain variable domain of TCR clone 263389 (TRBV19, TRBJ2-2)
CASRSPGTGATGELFF

SEQ ID NO: 526779 - protein, 18 aa, Homo sapiens
  CDR3 for alpha chain variable domain of TCR clone 263390 (TRAV26-1, TRAJ52)
CIVRVEGAGGTSYGKLTF

SEQ ID NO: 526780 - protein, 15 aa, Homo sapiens
  CDR3 for beta chain variable domain of TCR clone 263390 (TRBV7-3, TRBJ1-2)
CASSLKRGYGYTLVR

SEQ ID NO: 526781 - protein, 14 aa, Homo sapiens
  CDR3 for alpha chain variable domain of TCR clone 263391 (TRAV26-1, TRAJ45)
CIEVTGGGADGLTF

SEQ ID NO: 526782 - protein, 13 aa, Homo sapiens
  CDR3 for beta chain variable domain of TCR clone 263391 (TRBV7-6, TRBJ1-2)
CASSLVEDYGYTF

SEQ ID NO: 526783 - protein, 14 aa, Homo sapiens
  CDR3 for alpha chain variable domain of TCR clone 263392 (TRAV13-1, TRAJ17)
CAASRDAAGNKLTF

SEQ ID NO: 526784 - protein, 13 aa, Homo sapiens
  CDR3 for beta chain variable domain of TCR clone 263392 (TRBV15, TRBJ1-6)
CATSGGLNSPLHF

SEQ ID NO: 526785 - protein, 14 aa, Homo sapiens
  CDR3 for alpha chain variable domain of TCR clone 263393 (TRAV1-2, TRAJ8)
CAVREDTGFQKLVF

SEQ ID NO: 526786 - protein, 15 aa, Homo sapiens
  CDR3 for beta chain variable domain of TCR clone 263393 (TRBV6-3, TRBJ2-7)
CASSSTGTVFCEQYF

SEQ ID NO: 526787 - protein, 11 aa, Homo sapiens
  CDR3 for alpha chain variable domain of TCR clone 263394 (TRAV21, TRAJ34)
CAVTNNDKLIF

SEQ ID NO: 526788 - protein, 12 aa, Homo sapiens
  CDR3 for beta chain variable domain of TCR clone 263394 (TRBV7-9, TRBJ1-1)
CASSLVRGEAFF

SEQ ID NO: 526789 - protein, 14 aa, Homo sapiens
  CDR3 for alpha chain variable domain of TCR clone 263395 (TRAV26-1, TRAJ31)
CIALPPNNTARLMF

SEQ ID NO: 526790 - protein, 14 aa, Homo sapiens
  CDR3 for beta chain variable domain of TCR clone 263395 (TRBV4-1, TRBJ2-2)
CASSQAVNTGELFF

SEQ ID NO: 526791 - protein, 14 aa, Homo sapiens
  CDR3 for alpha chain variable domain of TCR clone 263396 (TRAV27, TRAJ49)
CAGRPEGTGNQFYF

SEQ ID NO: 526792 - protein, 14 aa, Homo sapiens
  CDR3 for beta chain variable domain of TCR clone 263396 (TRBV5-4, TRBJ1-1)
CASSLDSRRDEAFF

SEQ ID NO: 526793 - protein, 15 aa, Homo sapiens
  CDR3 for alpha chain variable domain of TCR clone 263397 (TRAV13-1, TRAJ52)
SYYNAGGTSYGKLTF

SEQ ID NO: 526794 - protein, 14 aa, Homo sapiens
  CDR3 for beta chain variable domain of TCR clone 263397 (TRBV12-5, TRBJ2-5)
CASGSRTHQETQYF

SEQ ID NO: 526795 - protein, 18 aa, Homo sapiens
  CDR3 for alpha chain variable domain of TCR clone 263398 (TRAV30, TRAJ29)
RSLLLWHRAFSGNTPLLF

SEQ ID NO: 526796 - protein, 15 aa, Homo sapiens
  CDR3 for beta chain variable domain of TCR clone 263398 (TRBV5-1, TRBJ2-2)
CASSLFGQNTGELFF

SEQ ID NO: 526797 - protein, 14 aa, Homo sapiens
  CDR3 for alpha chain variable domain of TCR clone 263399 (TRAV8-1, TRAJ27)
CAVNVGTSAGKSTF

SEQ ID NO: 526798 - protein, 17 aa, Homo sapiens
  CDR3 for beta chain variable domain of TCR clone 263399 (TRBV11-2, TRBJ2-1)
CASSLYPPGVEYNEQFF

SEQ ID NO: 526799 - protein, 14 aa, Homo sapiens
  CDR3 for alpha chain variable domain of TCR clone 263400 (TRAV8-3, TRAJ9)
CAVVYNTGGFKTIF

SEQ ID NO: 526800 - protein, 13 aa, Homo sapiens
  CDR3 for beta chain variable domain of TCR clone 263400 (TRBV7-3, TRBJ2-2)
CQQLRRNTGELFF

SEQ ID NO: 526801 - protein, 13 aa, Homo sapiens
  CDR3 for alpha chain variable domain of TCR clone 263401 (TRAV27, TRAJ45)
CRRSGGGADGLTF

SEQ ID NO: 526802 - protein, 13 aa, Homo sapiens
  CDR3 for beta chain variable domain of TCR clone 263401 (TRBV7-7, TRBJ2-5)
CASSRSGQETQYF

SEQ ID NO: 526803 - protein, 14 aa, Homo sapiens
  CDR3 for alpha chain variable domain of TCR clone 263402 (TRAV26-1, TRAJ52)
CIVKGGTSYGKLTF

SEQ ID NO: 526804 - protein, 18 aa, Homo sapiens
  CDR3 for beta chain variable domain of TCR clone 263402 (TRBV6-5, TRBJ1-1)
CASSGYGTTRNMNTEAFF

SEQ ID NO: 526805 - protein, 17 aa, Homo sapiens
  CDR3 for alpha chain variable domain of TCR clone 263403 (TRAV3, TRAJ38)
CAVRDCLNAGNNRKLLW

SEQ ID NO: 526806 - protein, 16 aa, Homo sapiens
  CDR3 for beta chain variable domain of TCR clone 263403 (TRBV20-1, TRBJ1-4)
CSARPYGGELNEKLFF

SEQ ID NO: 526807 - protein, 12 aa, Homo sapiens
  CDR3 for alpha chain variable domain of TCR clone 263404 (TRAV3, TRAJ20)
CAVRDPDYKLSF

SEQ ID NO: 526808 - protein, 14 aa, Homo sapiens
  CDR3 for beta chain variable domain of TCR clone 263404 (TRBV19, TRBJ2-7)
CASSMGQGAIEQYF

SEQ ID NO: 526809 - protein, 15 aa, Homo sapiens
  CDR3 for alpha chain variable domain of TCR clone 263405 (TRAV17, TRAJ57)
CATGPSQGGSETLVF

SEQ ID NO: 526810 - protein, 16 aa, Homo sapiens
  CDR3 for beta chain variable domain of TCR clone 263405 (TRBV6-1, TRBJ2-5)
CASSETLDRGAETQYF

SEQ ID NO: 526811 - protein, 14 aa, Homo sapiens
  CDR3 for alpha chain variable domain of TCR clone 263406 (TRAV1-2, TRAJ16)
CAVNRFSDGQKLLF

SEQ ID NO: 526812 - protein, 15 aa, Homo sapiens
  CDR3 for beta chain variable domain of TCR clone 263406 (TRBV7-9, TRBJ1-6)
CPSSSPGRGNSPLHF

SEQ ID NO: 526813 - protein, 15 aa, Homo sapiens
  CDR3 for alpha chain variable domain of TCR clone 263407 (TRAV16, TRAJ16)
CALQGGGSDGQRLLF

SEQ ID NO: 526814 - protein, 15 aa, Homo sapiens
  CDR3 for beta chain variable domain of TCR clone 263407 (TRBV20-1, TRBJ2-7)
CSARDRVSGMDEQYF

SEQ ID NO: 526815 - protein, 20 aa, Homo sapiens
  CDR3 for alpha chain variable domain of TCR clone 263408 (TRAV26-1, TRAJ53)
CCVLFIVRVAMGGSNYKLTF

SEQ ID NO: 526816 - protein, 12 aa, Homo sapiens
  CDR3 for beta chain variable domain of TCR clone 263408 (TRBV7-9, TRBJ1-5)
CASSPQGQPQHF

SEQ ID NO: 526817 - protein, 15 aa, Homo sapiens
  CDR3 for alpha chain variable domain of TCR clone 263409 (TRAV12-1, TRAJ37)
CVVNLPTSNTGKLIF

SEQ ID NO: 526818 - protein, 13 aa, Homo sapiens
  CDR3 for beta chain variable domain of TCR clone 263409 (TRBV24-1, TRBJ2-2)
CATSDWSTGELFF

SEQ ID NO: 526819 - protein, 12 aa, Homo sapiens
  CDR3 for alpha chain variable domain of TCR clone 263410 (TRAV8-4, TRAJ37)
CAVSGNTGKLIF

SEQ ID NO: 526820 - protein, 14 aa, Homo sapiens
  CDR3 for beta chain variable domain of TCR clone 263410 (TRBV11-2, TRBJ2-5)
CASSRTGGIETQYF

SEQ ID NO: 526821 - protein, 10 aa, Homo sapiens
  CDR3 for alpha chain variable domain of TCR clone 263411 (TRAV23/DV6, TRAJ4)
CAARDFWSRD

SEQ ID NO: 526822 - protein, 14 aa, Homo sapiens
  CDR3 for beta chain variable domain of TCR clone 263411 (TRBV6-1, TRBJ2-7)
CASTRTGDYYEQYF

SEQ ID NO: 526823 - protein, 14 aa, Homo sapiens
  CDR3 for alpha chain variable domain of TCR clone 263412 (TRAV1-2, TRAJ16)
CAVNRFSAGQKLLF

SEQ ID NO: 526824 - protein, 13 aa, Homo sapiens
  CDR3 for beta chain variable domain of TCR clone 263412 (TRBV9, TRBJ2-1)
CASSPSGGSEQFF

SEQ ID NO: 526825 - protein, 13 aa, Homo sapiens
  CDR3 for alpha chain variable domain of TCR clone 263413 (TRAV13-1, TRAJ6)
CASGSGGSYIPTF

SEQ ID NO: 526826 - protein, 17 aa, Homo sapiens
  CDR3 for beta chain variable domain of TCR clone 263413 (TRBV7-8, TRBJ2-1)
CASSPPTGTLAYNEQFF

SEQ ID NO: 526827 - protein, 13 aa, Homo sapiens
  CDR3 for alpha chain variable domain of TCR clone 263414 (TRAV8-3, TRAJ42)
CARYGGSKGNLIF

SEQ ID NO: 526828 - protein, 14 aa, Homo sapiens
  CDR3 for beta chain variable domain of TCR clone 263414 (TRBV20-1, TRBJ2-1)
CSALDRGTYNEQFF

SEQ ID NO: 526829 - protein, 14 aa, Homo sapiens
  CDR3 for alpha chain variable domain of TCR clone 263415 (TRAV26-1, TRAJ38)
CIADNAGNNRKLIW

SEQ ID NO: 526830 - protein, 15 aa, Homo sapiens
  CDR3 for beta chain variable domain of TCR clone 263415 (TRBV7-8, TRBJ1-2)
CASSLVRDGGLGYTF

SEQ ID NO: 526831 - protein, 11 aa, Homo sapiens
  CDR3 for alpha chain variable domain of TCR clone 263416 (TRAV3, TRAJ21)
CAVGNFNKFYF

SEQ ID NO: 526832 - protein, 16 aa, Homo sapiens
  CDR3 for beta chain variable domain of TCR clone 263416 (TRBV19, TRBJ2-1)
CASSKVGPISYNEQFF

SEQ ID NO: 526833 - protein, 14 aa, Homo sapiens
  CDR3 for alpha chain variable domain of TCR clone 263417 (TRAV35, TRAJ50)
CAGHRKTSYDKVIF

SEQ ID NO: 526834 - protein, 13 aa, Homo sapiens
  CDR3 for beta chain variable domain of TCR clone 263417 (TRBV7-7, TRBJ2-3)
CASSLSSADTQYF

SEQ ID NO: 526835 - protein, 16 aa, Homo sapiens
  CDR3 for alpha chain variable domain of TCR clone 263418 (TRAV30, TRAJ24)
CGTEIMDADSWGKFQF

SEQ ID NO: 526836 - protein, 15 aa, Homo sapiens
  CDR3 for beta chain variable domain of TCR clone 263418 (TRBV20-1, TRBJ2-6)
CSARDRGPGANVLTF

SEQ ID NO: 526837 - protein, 10 aa, Homo sapiens
  CDR3 for alpha chain variable domain of TCR clone 263419 (TRAV17, TRAJ43)
CGIDNNDMRF

SEQ ID NO: 526838 - protein, 14 aa, Homo sapiens
  CDR3 for beta chain variable domain of TCR clone 263419 (TRBV7-9, TRBJ2-7)
CASSLVAGPYEQYF

SEQ ID NO: 526839 - protein, 13 aa, Homo sapiens
  CDR3 for alpha chain variable domain of TCR clone 263420 (TRAV20, TRAJ48)
CAVQGVGNEKLTF

SEQ ID NO: 526840 - protein, 12 aa, Homo sapiens
  CDR3 for beta chain variable domain of TCR clone 263420 (TRBV5-1, TRBJ2-7)
CASSLDSYEQYF

SEQ ID NO: 526841 - protein, 14 aa, Homo sapiens
  CDR3 for alpha chain variable domain of TCR clone 263421 (TRAV12-2, TRAJ17)
CAVLFKAAGNNLTF

SEQ ID NO: 526842 - protein, 17 aa, Homo sapiens
  CDR3 for beta chain variable domain of TCR clone 263421 (TRBV20-1, TRBJ2-2)
CSASGSGLGGLTGELFF

SEQ ID NO: 526843 - protein, 12 aa, Homo sapiens
  CDR3 for alpha chain variable domain of TCR clone 263422 (TRAV2, TRAJ9)
CAVGAGGFKTIF

SEQ ID NO: 526844 - protein, 15 aa, Homo sapiens
  CDR3 for beta chain variable domain of TCR clone 263422 (TRBV4-3, TRBJ2-1)
CASSQESAIYNEQFF

SEQ ID NO: 526845 - protein, 19 aa, Homo sapiens
  CDR3 for alpha chain variable domain of TCR clone 263423 (TRAV12-2, TRAJ4)
PPTSVPMGWPEGGYNKLIF

SEQ ID NO: 526846 - protein, 16 aa, Homo sapiens
  CDR3 for beta chain variable domain of TCR clone 263423 (TRBV6-1, TRBJ2-5)
CASSETLDRGAETQYF

SEQ ID NO: 526847 - protein, 10 aa, Homo sapiens
  CDR3 for alpha chain variable domain of TCR clone 263424 (TRAV12-3, TRAJ49)
CAMNDDQLYF

SEQ ID NO: 526848 - protein, 13 aa, Homo sapiens
  CDR3 for beta chain variable domain of TCR clone 263424 (TRBV12-4, TRBJ1-1)
CASSPGTGFDAFF

SEQ ID NO: 526849 - protein, 15 aa, Homo sapiens
  CDR3 for alpha chain variable domain of TCR clone 263425 (TRAV14/DV4, TRAJ10)
CAMRELTGGGNKLTF

SEQ ID NO: 526850 - protein, 15 aa, Homo sapiens
  CDR3 for beta chain variable domain of TCR clone 263425 (TRBV9, TRBJ1-6)
CASSVGGTGDSPLHF

SEQ ID NO: 526851 - protein, 12 aa, Homo sapiens
  CDR3 for alpha chain variable domain of TCR clone 263426 (TRAV1-1, TRAJ9)
CAVDTGGLKTIF

SEQ ID NO: 526852 - protein, 14 aa, Homo sapiens
  CDR3 for beta chain variable domain of TCR clone 263426 (TRBV7-8, TRBJ2-5)
CASSATGGQDTQYF

SEQ ID NO: 526853 - protein, 12 aa, Homo sapiens
  CDR3 for alpha chain variable domain of TCR clone 263427 (TRAV17, TRAJ28)
WDSGAGSYQLTF

SEQ ID NO: 526854 - protein, 13 aa, Homo sapiens
  CDR3 for beta chain variable domain of TCR clone 263427 (TRBV11-3, TRBJ1-1)
CASSREPNTEAFF

SEQ ID NO: 526855 - protein, 12 aa, Homo sapiens
  CDR3 for alpha chain variable domain of TCR clone 263428 (TRAV1-1, TRAJ8)
CSGGTGFQKLVF

SEQ ID NO: 526856 - protein, 16 aa, Homo sapiens
  CDR3 for beta chain variable domain of TCR clone 263428 (TRBV12-5, TRBJ2-5)
CASGPRTSGNQETQYF

SEQ ID NO: 526857 - protein, 15 aa, Homo sapiens
  CDR3 for alpha chain variable domain of TCR clone 263429 (TRAV3, TRAJ20)
CAVRDIKLIAYKLSF

SEQ ID NO: 526858 - protein, 15 aa, Homo sapiens
  CDR3 for beta chain variable domain of TCR clone 263429 (TRBV7-9, TRBJ1-6)
CASSSPGRGNSPLHF

SEQ ID NO: 526859 - protein, 13 aa, Homo sapiens
  CDR3 for alpha chain variable domain of TCR clone 263430 (TRAV12-2, TRAJ24)
CAVSTDSWGNLQF

SEQ ID NO: 526860 - protein, 12 aa, Homo sapiens
  CDR3 for beta chain variable domain of TCR clone 263430 (TRBV7-6, TRBJ2-7)
CASSLADSEQYF

SEQ ID NO: 526861 - protein, 11 aa, Homo sapiens
  CDR3 for alpha chain variable domain of TCR clone 263431 (TRAV1-2, TRAJ34)
FAGYNTDKLIF

SEQ ID NO: 526862 - protein, 16 aa, Homo sapiens
  CDR3 for beta chain variable domain of TCR clone 263431 (TRBV10-3, TRBJ2-1)
CAISGVGDGGGGEQFF

SEQ ID NO: 526863 - protein, 16 aa, Homo sapiens
  CDR3 for alpha chain variable domain of TCR clone 263432 (TRAV12-2, TRAJ10)
CAVNRVLTGGGNKLTF

SEQ ID NO: 526864 - protein, 15 aa, Homo sapiens
  CDR3 for beta chain variable domain of TCR clone 263432 (TRBV11-3, TRBJ2-3)
CASLKDGREGDTQYF

SEQ ID NO: 526865 - protein, 16 aa, Homo sapiens
  CDR3 for alpha chain variable domain of TCR clone 263433 (TRAV30, TRAJ24)
CGTEIVDADSWGKFQF

SEQ ID NO: 526866 - protein, 14 aa, Homo sapiens
  CDR3 for beta chain variable domain of TCR clone 263433 (TRBV19, TRBJ1-2)
CASSLQGQTYGYTF

SEQ ID NO: 526867 - protein, 14 aa, Homo sapiens
  CDR3 for alpha chain variable domain of TCR clone 263434 (TRAV20, TRAJ42)
CAVQAGGSEGTLIF

SEQ ID NO: 526868 - protein, 14 aa, Homo sapiens
  CDR3 for beta chain variable domain of TCR clone 263434 (TRBV28, TRBJ1-2)
CASRIQGANYGYTF

SEQ ID NO: 526869 - protein, 14 aa, Homo sapiens
  CDR3 for alpha chain variable domain of TCR clone 263435 (TRAV17, TRAJ53)
CATARGGSNYKLTF

SEQ ID NO: 526870 - protein, 16 aa, Homo sapiens
  CDR3 for beta chain variable domain of TCR clone 263435 (TRBV20-1, TRBJ2-1)
CSARDSLGAVYNEQFF

SEQ ID NO: 526871 - protein, 12 aa, Homo sapiens
  CDR3 for alpha chain variable domain of TCR clone 263436 (TRAV13-1, TRAJ27)
CAAHTNAGKSTF

SEQ ID NO: 526872 - protein, 14 aa, Homo sapiens
  CDR3 for beta chain variable domain of TCR clone 263436 (TRBV12-4, TRBJ1-1)
CASSLGTGGTEAFF

SEQ ID NO: 526873 - protein, 10 aa, Homo sapiens
  CDR3 for alpha chain variable domain of TCR clone 263437 (TRAV12-3, TRAJ18)
CAMSAEAQPW

SEQ ID NO: 526874 - protein, 13 aa, Homo sapiens
  CDR3 for beta chain variable domain of TCR clone 263437 (TRBV15, TRBJ1-6)
CATSGGLNSPLHC

SEQ ID NO: 526875 - protein, 14 aa, Homo sapiens
  CDR3 for alpha chain variable domain of TCR clone 263438 (TRAV13-1, TRAJ28)
CAASKGAGSYQLTF

SEQ ID NO: 526876 - protein, 15 aa, Homo sapiens
  CDR3 for beta chain variable domain of TCR clone 263438 (TRBV4-3, TRBJ2-3)
PAAKTGRGGGVKQYF

SEQ ID NO: 526877 - protein, 14 aa, Homo sapiens
  CDR3 for alpha chain variable domain of TCR clone 263439 (TRAV12-2, TRAJ40)
CAMKIPSGTYKYIF

SEQ ID NO: 526878 - protein, 16 aa, Homo sapiens
  CDR3 for beta chain variable domain of TCR clone 263439 (TRBV28, TRBJ2-5)
CASSFSPAGGWETQYF

SEQ ID NO: 526879 - protein, 15 aa, Homo sapiens
  CDR3 for alpha chain variable domain of TCR clone 263440 (TRAV3, TRAJ20)
CAVRDIKLSDYKLSF

SEQ ID NO: 526880 - protein, 15 aa, Homo sapiens
  CDR3 for beta chain variable domain of TCR clone 263440 (TRBV7-9, TRBJ1-6)
CASSSPGGGNSPLHF

SEQ ID NO: 526881 - protein, 13 aa, Homo sapiens
  CDR3 for alpha chain variable domain of TCR clone 263441 (TRAV1-2, TRAJ9)
CAVLNTGGFKTIF

SEQ ID NO: 526882 - protein, 14 aa, Homo sapiens
  CDR3 for beta chain variable domain of TCR clone 263441 (TRBV11-3, TRBJ2-1)
CASSATTSGSIQFF

SEQ ID NO: 526883 - protein, 14 aa, Homo sapiens
  CDR3 for alpha chain variable domain of TCR clone 263442 (TRAV8-2, TRAJ4)
CFVSPSGGYNKLIF

SEQ ID NO: 526884 - protein, 15 aa, Homo sapiens
  CDR3 for beta chain variable domain of TCR clone 263442 (TRBV4-1, TRBJ1-4)
CASSDTGGTNEKLFF

SEQ ID NO: 526885 - protein, 10 aa, Homo sapiens
  CDR3 for alpha chain variable domain of TCR clone 263443 (TRAV5, TRAJ34)
CAEDTDQLIF

SEQ ID NO: 526886 - protein, 12 aa, Homo sapiens
  CDR3 for beta chain variable domain of TCR clone 263443 (TRBV11-2, TRBJ2-2)
CASSLGGGELFF

SEQ ID NO: 526887 - protein, 14 aa, Homo sapiens
  CDR3 for alpha chain variable domain of TCR clone 263444 (TRAV8-1, TRAJ24)
CAVNAVDSWGKLQF

SEQ ID NO: 526888 - protein, 16 aa, Homo sapiens
  CDR3 for beta chain variable domain of TCR clone 263444 (TRBV4-3, TRBJ2-1)
CASSPALDRGVNEQFF

SEQ ID NO: 526889 - protein, 15 aa, Homo sapiens
  CDR3 for alpha chain variable domain of TCR clone 263445 (TRAV8-4, TRAJ40)
CAVSSITSGTYKYIF

SEQ ID NO: 526890 - protein, 13 aa, Homo sapiens
  CDR3 for beta chain variable domain of TCR clone 263445 (TRBV11-2, TRBJ2-5)
CASGFSSQETQYF

SEQ ID NO: 526891 - protein, 15 aa, Homo sapiens
  CDR3 for alpha chain variable domain of TCR clone 263446 (TRAV12-1, TRAJ41)
CVVNSRTGSGDALNF

SEQ ID NO: 526892 - protein, 11 aa, Homo sapiens
  CDR3 for beta chain variable domain of TCR clone 263446 (TRBV6-4, TRBJ2-1)
CASSDSYAQFF

SEQ ID NO: 526893 - protein, 16 aa, Homo sapiens
  CDR3 for alpha chain variable domain of TCR clone 263447 (TRAV16, TRAJ52)
CALSAAGGTSYGKLTF

SEQ ID NO: 526894 - protein, 16 aa, Homo sapiens
  CDR3 for beta chain variable domain of TCR clone 263447 (TRBV12-4, TRBJ1-5)
CASSRPVGGSDQPQHF

SEQ ID NO: 526895 - protein, 16 aa, Homo sapiens
  CDR3 for alpha chain variable domain of TCR clone 263448 (TRAV30, TRAJ24)
CGTEIVDADSWGKFQF

SEQ ID NO: 526896 - protein, 15 aa, Homo sapiens
  CDR3 for beta chain variable domain of TCR clone 263448 (TRBV19, TRBJ2-1)
CASSLETSGYNEQFF

SEQ ID NO: 526897 - protein, 16 aa, Homo sapiens
  CDR3 for alpha chain variable domain of TCR clone 263449 (TRAV12-1, TRAJ22)
CVVNTISSGSARQLTF

SEQ ID NO: 526898 - protein, 16 aa, Homo sapiens
  CDR3 for beta chain variable domain of TCR clone 263449 (TRBV19, TRBJ2-1)
CASSKAGPSSYNEQFF

SEQ ID NO: 526899 - protein, 10 aa, Homo sapiens
  CDR3 for alpha chain variable domain of TCR clone 263450 (TRAV20, TRAJ34)
TRDNTDKLIF

SEQ ID NO: 526900 - protein, 15 aa, Homo sapiens
  CDR3 for beta chain variable domain of TCR clone 263450 (TRBV2, TRBJ2-1)
CASSVTSEGTDEQFF

SEQ ID NO: 526901 - protein, 13 aa, Homo sapiens
  CDR3 for alpha chain variable domain of TCR clone 263451 (TRAV36/DV7, TRAJ37)
CAVFSSNTGKLIF

SEQ ID NO: 526902 - protein, 18 aa, Homo sapiens
  CDR3 for beta chain variable domain of TCR clone 263451 (TRBV7-9, TRBJ2-7)
CASSLTTSGSRTWYEQYF

SEQ ID NO: 526903 - protein, 12 aa, Homo sapiens
  CDR3 for alpha chain variable domain of TCR clone 263452 (TRAV17, TRAJ20)
CATQANDYKLSF

SEQ ID NO: 526904 - protein, 14 aa, Homo sapiens
  CDR3 for beta chain variable domain of TCR clone 263452 (TRBV7-2, TRBJ2-1)
CASSLGFSYNEQFF

SEQ ID NO: 526905 - protein, 13 aa, Homo sapiens
  CDR3 for alpha chain variable domain of TCR clone 263453 (TRAV3, TRAJ27)
CAVSPLVAGKSTF

SEQ ID NO: 526906 - protein, 13 aa, Homo sapiens
  CDR3 for beta chain variable domain of TCR clone 263453 (TRBV7-9, TRBJ2-3)
CASSPGSTDTQYF

SEQ ID NO: 526907 - protein, 21 aa, Homo sapiens
  CDR3 for alpha chain variable domain of TCR clone 263454 (TRAV12-1, TRAJ37)
CVVNGGLWQHRQTNLWSRDTF

SEQ ID NO: 526908 - protein, 12 aa, Homo sapiens
  CDR3 for beta chain variable domain of TCR clone 263454 (TRBV20-1, TRBJ1-2)
CSAPGFNYGYTF

SEQ ID NO: 526909 - protein, 18 aa, Homo sapiens
  CDR3 for alpha chain variable domain of TCR clone 263455 (TRAV21, TRAJ52)
CAVRPSPAGGTSYGKLTF

SEQ ID NO: 526910 - protein, 17 aa, Homo sapiens
  CDR3 for beta chain variable domain of TCR clone 263455 (TRBV13, TRBJ2-3)
CASSRSRVAGGGNTQYF

SEQ ID NO: 526911 - protein, 14 aa, Homo sapiens
  CDR3 for alpha chain variable domain of TCR clone 263456 (TRAV1-2, TRAJ16)
CAVNRFSDGQKLLF

SEQ ID NO: 526912 - protein, 14 aa, Homo sapiens
  CDR3 for beta chain variable domain of TCR clone 263456 (TRBV12-4, TRBJ2-3)
CASSGQGGTDTQYF

SEQ ID NO: 526913 - protein, 16 aa, Homo sapiens
  CDR3 for alpha chain variable domain of TCR clone 263457 (TRAV35, TRAJ28)
CAGQKYSGAGSYQLPF

SEQ ID NO: 526914 - protein, 16 aa, Homo sapiens
  CDR3 for beta chain variable domain of TCR clone 263457 (TRBV7-3, TRBJ2-2)
CASSLKRGTLSGELFF

SEQ ID NO: 526915 - protein, 14 aa, Homo sapiens
  CDR3 for alpha chain variable domain of TCR clone 263458 (TRAV1-2, TRAJ33)
CAVRAPDSNYQLIW

SEQ ID NO: 526916 - protein, 14 aa, Homo sapiens
  CDR3 for beta chain variable domain of TCR clone 263458 (TRBV11-3, TRBJ1-6)
CASSFSGGDSPRHF

SEQ ID NO: 526917 - protein, 12 aa, Homo sapiens
  CDR3 for alpha chain variable domain of TCR clone 263459 (TRAV27, TRAJ9)
CAGESGGFKTIF

SEQ ID NO: 526918 - protein, 13 aa, Homo sapiens
  CDR3 for beta chain variable domain of TCR clone 263459 (TRBV12-4, TRBJ2-5)
CASSLGGSRTQYF

SEQ ID NO: 526919 - protein, 17 aa, Homo sapiens
  CDR3 for alpha chain variable domain of TCR clone 263460 (TRAV23/DV6, TRAJ3)
CSNHFCFRWSSASKIIF

SEQ ID NO: 526920 - protein, 15 aa, Homo sapiens
  CDR3 for beta chain variable domain of TCR clone 263460 (TRBV19, TRBJ1-6)
CASSTQGAVGSPLHF

SEQ ID NO: 526921 - protein, 11 aa, Homo sapiens
  CDR3 for alpha chain variable domain of TCR clone 263461 (TRAV12-3, TRAJ43)
CAMSVSNDMRF

SEQ ID NO: 526922 - protein, 14 aa, Homo sapiens
  CDR3 for beta chain variable domain of TCR clone 263461 (TRBV20-1, TRBJ1-1)
CSAQTRVGGTEAFF

SEQ ID NO: 526923 - protein, 15 aa, Homo sapiens
  CDR3 for alpha chain variable domain of TCR clone 263462 (TRAV17, TRAJ57)
CATGPSQGGSEKLVF

SEQ ID NO: 526924 - protein, 14 aa, Homo sapiens
  CDR3 for beta chain variable domain of TCR clone 263462 (TRBV19, TRBJ2-1)
CASKDPSSYNEQSF

SEQ ID NO: 526925 - protein, 14 aa, Homo sapiens
  CDR3 for alpha chain variable domain of TCR clone 263463 (TRAV12-3, TRAJ57)
CAMSAWGGSEKLVF

SEQ ID NO: 526926 - protein, 10 aa, Homo sapiens
  CDR3 for beta chain variable domain of TCR clone 263463 (TRBV19, TRBJ2-1)
ARSFQWEQFF

SEQ ID NO: 526927 - protein, 15 aa, Homo sapiens
  CDR3 for alpha chain variable domain of TCR clone 263464 (TRAV12-3, TRAJ6)
CAMSPASGGSYIPTF

SEQ ID NO: 526928 - protein, 16 aa, Homo sapiens
  CDR3 for beta chain variable domain of TCR clone 263464 (TRBV10-3, TRBJ1-2)
CAISDKVSGPFYGYTF

SEQ ID NO: 526929 - protein, 15 aa, Homo sapiens
  CDR3 for alpha chain variable domain of TCR clone 263465 (TRAV26-1, TRAJ56)
CIVRGDNGANSKLTF

SEQ ID NO: 526930 - protein, 15 aa, Homo sapiens
  CDR3 for beta chain variable domain of TCR clone 263465 (TRBV20-1, TRBJ2-7)
CSARDPTEVGHEQYF

SEQ ID NO: 526931 - protein, 14 aa, Homo sapiens
  CDR3 for alpha chain variable domain of TCR clone 263466 (TRAV1-2, TRAJ8)
CAVGEDTCFQKLVF

SEQ ID NO: 526932 - protein, 15 aa, Homo sapiens
  CDR3 for beta chain variable domain of TCR clone 263466 (TRBV6-3, TRBJ2-7)
CASSSPGTVFYEQYF

SEQ ID NO: 526933 - protein, 12 aa, Homo sapiens
  CDR3 for alpha chain variable domain of TCR clone 263467 (TRAV21, TRAJ33)
CAKMDSNYQLIW

SEQ ID NO: 526934 - protein, 12 aa, Homo sapiens
  CDR3 for beta chain variable domain of TCR clone 263467 (TRBV12-4, TRBJ1-5)
CASSLGRQPQHF

SEQ ID NO: 526935 - protein, 16 aa, Homo sapiens
  CDR3 for alpha chain variable domain of TCR clone 263468 (TRAV1-1, TRAJ22)
CAVNDALSGSARQLTF

SEQ ID NO: 526936 - protein, 22 aa, Homo sapiens
  CDR3 for beta chain variable domain of TCR clone 263468 (TRBV11-2, TRBJ1-4)
CASSLDITRRGIPRKDNEKLFF

SEQ ID NO: 526937 - protein, 15 aa, Homo sapiens
  CDR3 for alpha chain variable domain of TCR clone 263469 (TRAV3, TRAJ20)
CAVRDIKLIDYKRSF

SEQ ID NO: 526938 - protein, 15 aa, Homo sapiens
  CDR3 for beta chain variable domain of TCR clone 263469 (TRBV7-9, TRBJ1-6)
CASSSPGRGNSPLHF

SEQ ID NO: 526939 - protein, 12 aa, Homo sapiens
  CDR3 for alpha chain variable domain of TCR clone 263470 (TRAV22, TRAJ22)
CAPGGSARQLTF

SEQ ID NO: 526940 - protein, 13 aa, Homo sapiens
  CDR3 for beta chain variable domain of TCR clone 263470 (TRBV15, TRBJ1-6)
CATSGGINSPLHF

SEQ ID NO: 526941 - protein, 14 aa, Homo sapiens
  CDR3 for alpha chain variable domain of TCR clone 263471 (TRAV29/DV5, TRAJ20)
CAASAPIEDYKLSF

SEQ ID NO: 526942 - protein, 13 aa, Homo sapiens
  CDR3 for beta chain variable domain of TCR clone 263471 (TRBV24-1, TRBJ1-4)
SATNNGRSEKLFF

SEQ ID NO: 526943 - protein, 14 aa, Homo sapiens
  CDR3 for alpha chain variable domain of TCR clone 263472 (TRAV1-2, TRAJ16)
CAVNRFSDGRKMLF

SEQ ID NO: 526944 - protein, 16 aa, Homo sapiens
  CDR3 for beta chain variable domain of TCR clone 263472 (TRBV7-3, TRBJ2-2)
CASSLKRGTLSGELFF

SEQ ID NO: 526945 - protein, 16 aa, Homo sapiens
  CDR3 for alpha chain variable domain of TCR clone 263473 (TRAV3, TRAJ37)
CAVRPPGSGNTGKLIF

SEQ ID NO: 526946 - protein, 15 aa, Homo sapiens
  CDR3 for beta chain variable domain of TCR clone 263473 (TRBV20-1, TRBJ2-7)
CSARDRVSGMDEQYF

SEQ ID NO: 526947 - protein, 13 aa, Homo sapiens
  CDR3 for alpha chain variable domain of TCR clone 263474 (TRAV1-1, TRAJ9)
CAAKNTGGFTTIF

SEQ ID NO: 526948 - protein, 15 aa, Homo sapiens
  CDR3 for beta chain variable domain of TCR clone 263474 (TRBV20-1, TRBJ2-7)
CSADSVTIGAYEQYF

SEQ ID NO: 526949 - protein, 17 aa, Homo sapiens
  CDR3 for alpha chain variable domain of TCR clone 263475 (TRAV13-1, TRAJ28)
CAASPPYSGAGSYNLTF

SEQ ID NO: 526950 - protein, 12 aa, Homo sapiens
  CDR3 for beta chain variable domain of TCR clone 263475 (TRBV11-2, TRBJ2-2)
CASSLPTGELFF

SEQ ID NO: 526951 - protein, 14 aa, Homo sapiens
  CDR3 for alpha chain variable domain of TCR clone 263476 (TRAV17, TRAJ12)
CAILPMDSSYKLIF

SEQ ID NO: 526952 - protein, 13 aa, Homo sapiens
  CDR3 for beta chain variable domain of TCR clone 263476 (TRBV4-1, TRBJ2-2)
FASSQENTGELFF

SEQ ID NO: 526953 - protein, 12 aa, Homo sapiens
  CDR3 for alpha chain variable domain of TCR clone 263477 (TRAV4, TRAJ26)
CLVGDYGQNFVF

SEQ ID NO: 526954 - protein, 16 aa, Homo sapiens
  CDR3 for beta chain variable domain of TCR clone 263477 (TRBV7-2, TRBJ1-2)
CASSSNQDRRGHGFTF

SEQ ID NO: 526955 - protein, 16 aa, Homo sapiens
  CDR3 for alpha chain variable domain of TCR clone 263478 (TRAV30, TRAJ24)
CGTEIVDADSGGKFQF

SEQ ID NO: 526956 - protein, 14 aa, Homo sapiens
  CDR3 for beta chain variable domain of TCR clone 263478 (TRBV7-9, TRBJ2-4)
CASSLAMGGNIQYF

SEQ ID NO: 526957 - protein, 14 aa, Homo sapiens
  CDR3 for alpha chain variable domain of TCR clone 263479 (TRAV3, TRAJ21)
CAVEPQANFNKFYF

SEQ ID NO: 526958 - protein, 12 aa, Homo sapiens
  CDR3 for beta chain variable domain of TCR clone 263479 (TRBV6-3, TRBJ2-7)
CASSLTPYEQYF

SEQ ID NO: 526959 - protein, 13 aa, Homo sapiens
  CDR3 for alpha chain variable domain of TCR clone 263480 (TRAV8-6, TRAJ16)
CAVSSTDGQKLLF

SEQ ID NO: 526960 - protein, 16 aa, Homo sapiens
  CDR3 for beta chain variable domain of TCR clone 263480 (TRBV5-7, TRBJ2-3)
CASSSLGGAITDTQYF

SEQ ID NO: 526961 - protein, 13 aa, Homo sapiens
  CDR3 for alpha chain variable domain of TCR clone 263481 (TRAV20, TRAJ37)
CAGCSSNTGKLIF

SEQ ID NO: 526962 - protein, 11 aa, Homo sapiens
  CDR3 for beta chain variable domain of TCR clone 263481 (TRBV12-4, TRBJ2-3)
CASTATDTQSF

SEQ ID NO: 526963 - protein, 12 aa, Homo sapiens
  CDR3 for alpha chain variable domain of TCR clone 263482 (TRAV8-3, TRAJ26)
CAVDNYGQNFVF

SEQ ID NO: 526964 - protein, 13 aa, Homo sapiens
  CDR3 for beta chain variable domain of TCR clone 263482 (TRBV7-9, TRBJ1-1)
CASSLSGETDAFF

SEQ ID NO: 526965 - protein, 11 aa, Homo sapiens
  CDR3 for alpha chain variable domain of TCR clone 263483 (TRAV35, TRAJ34)
CWARNTDKLIF

SEQ ID NO: 526966 - protein, 15 aa, Homo sapiens
  CDR3 for beta chain variable domain of TCR clone 263483 (TRBV7-9, TRBJ2-2)
CASGPLDTFPGELFF

SEQ ID NO: 526967 - protein, 12 aa, Homo sapiens
  CDR3 for alpha chain variable domain of TCR clone 263484 (TRAV21, TRAJ31)
FAVWGNNARLMF

SEQ ID NO: 526968 - protein, 16 aa, Homo sapiens
  CDR3 for beta chain variable domain of TCR clone 263484 (TRBV27, TRBJ2-5)
CASSYGPGGQKETQYF

SEQ ID NO: 526969 - protein, 15 aa, Homo sapiens
  CDR3 for alpha chain variable domain of TCR clone 263485 (TRAV1-1, TRAJ4)
CAVRAFSGGYNKLIV

SEQ ID NO: 526970 - protein, 18 aa, Homo sapiens
  CDR3 for beta chain variable domain of TCR clone 263485 (TRBV12-4, TRBJ2-2)
CASSLVAGTRGRTGELFF

SEQ ID NO: 526971 - protein, 14 aa, Homo sapiens
  CDR3 for alpha chain variable domain of TCR clone 263486 (TRAV12-3, TRAJ10)
SHLPLTGGGNKLTF

SEQ ID NO: 526972 - protein, 14 aa, Homo sapiens
  CDR3 for beta chain variable domain of TCR clone 263486 (TRBV19, TRBJ2-1)
CASKDPGLANEQFF

SEQ ID NO: 526973 - protein, 14 aa, Homo sapiens
  CDR3 for alpha chain variable domain of TCR clone 263487 (TRAV2, TRAJ16)
CAVERWSDGQKLLF

SEQ ID NO: 526974 - protein, 12 aa, Homo sapiens
  CDR3 for beta chain variable domain of TCR clone 263487 (TRBV6-5, TRBJ2-7)
CASYIDGYEQYF

SEQ ID NO: 526975 - protein, 14 aa, Homo sapiens
  CDR3 for alpha chain variable domain of TCR clone 263488 (TRAV26-1, TRAJ38)
CIADNAGNNRKLIW

SEQ ID NO: 526976 - protein, 15 aa, Homo sapiens
  CDR3 for beta chain variable domain of TCR clone 263488 (TRBV5-1, TRBJ2-7)
CASSPQGRPLDEQYF

SEQ ID NO: 526977 - protein, 13 aa, Homo sapiens
  CDR3 for alpha chain variable domain of TCR clone 263489 (TRAV2, TRAJ29)
CAAQNSGNTPLVF

SEQ ID NO: 526978 - protein, 14 aa, Homo sapiens
  CDR3 for beta chain variable domain of TCR clone 263489 (TRBV7-3, TRBJ1-1)
CASSLKGGNTEAFF

SEQ ID NO: 526979 - protein, 12 aa, Homo sapiens
  CDR3 for alpha chain variable domain of TCR clone 263490 (TRAV20, TRAJ33)
CAVRGSNYQLIW

SEQ ID NO: 526980 - protein, 15 aa, Homo sapiens
  CDR3 for beta chain variable domain of TCR clone 263490 (TRBV11-3, TRBJ2-3)
CASLKDGREGYTQYF

SEQ ID NO: 526981 - protein, 12 aa, Homo sapiens
  CDR3 for alpha chain variable domain of TCR clone 263491 (TRAV12-1, TRAJ20)
CVVNPDDYKLSF

SEQ ID NO: 526982 - protein, 14 aa, Homo sapiens
  CDR3 for beta chain variable domain of TCR clone 263491 (TRBV5-1, TRBJ1-1)
CASSKPGPNTEAFF

SEQ ID NO: 526983 - protein, 10 aa, Homo sapiens
  CDR3 for alpha chain variable domain of TCR clone 263492 (TRAV21, TRAJ31)
CAVDNATLMF

SEQ ID NO: 526984 - protein, 13 aa, Homo sapiens
  CDR3 for beta chain variable domain of TCR clone 263492 (TRBV4-1, TRBJ1-1)
CASSRKMNTEAFF

SEQ ID NO: 526985 - protein, 15 aa, Homo sapiens
  CDR3 for alpha chain variable domain of TCR clone 263493 (TRAV2, TRAJ9)
CAVEDRGNGGFKTTF

SEQ ID NO: 526986 - protein, 16 aa, Homo sapiens
  CDR3 for beta chain variable domain of TCR clone 263493 (TRBV24-1, TRBJ2-3)
CATSDPGTGATDTQYF

SEQ ID NO: 526987 - protein, 10 aa, Homo sapiens
  CDR3 for alpha chain variable domain of TCR clone 263494 (TRAV8-3, TRAJ43)
CAVALADMRF

SEQ ID NO: 526988 - protein, 14 aa, Homo sapiens
  CDR3 for beta chain variable domain of TCR clone 263494 (TRBV4-2, TRBJ2-1)
CASGLDRVYNEQFF

SEQ ID NO: 526989 - protein, 15 aa, Homo sapiens
  CDR3 for alpha chain variable domain of TCR clone 263495 (TRAV21, TRAJ53)
CATLNSGGSNYKLTF

SEQ ID NO: 526990 - protein, 17 aa, Homo sapiens
  CDR3 for beta chain variable domain of TCR clone 263495 (TRBV20-1, TRBJ2-2)
CSASGSGQCGLTGELFF

SEQ ID NO: 526991 - protein, 14 aa, Homo sapiens
  CDR3 for alpha chain variable domain of TCR clone 263496 (TRAV1-2, TRAJ16)
CAVNRFSDGQNLLF

SEQ ID NO: 526992 - protein, 15 aa, Homo sapiens
  CDR3 for beta chain variable domain of TCR clone 263496 (TRBV6-1, TRBJ2-3)
CASSERGGITDTQYF

SEQ ID NO: 526993 - protein, 15 aa, Homo sapiens
  CDR3 for alpha chain variable domain of TCR clone 263497 (TRAV8-3, TRAJ45)
CALSYSGGGAEGLTF

SEQ ID NO: 526994 - protein, 13 aa, Homo sapiens
  CDR3 for beta chain variable domain of TCR clone 263497 (TRBV10-3, TRBJ2-7)
CASKLAVNYEQYF

SEQ ID NO: 526995 - protein, 17 aa, Homo sapiens
  CDR3 for alpha chain variable domain of TCR clone 263498 (TRAV3, TRAJ6)
CSVRDGPRAGGSYIPTF

SEQ ID NO: 526996 - protein, 18 aa, Homo sapiens
  CDR3 for beta chain variable domain of TCR clone 263498 (TRBV7-3, TRBJ2-3)
CASSSTGTYPGSTDTQYF

SEQ ID NO: 526997 - protein, 12 aa, Homo sapiens
  CDR3 for alpha chain variable domain of TCR clone 263499 (TRAV13-2, TRAJ8)
CAPWLGFQKLVF

SEQ ID NO: 526998 - protein, 14 aa, Homo sapiens
  CDR3 for beta chain variable domain of TCR clone 263499 (TRBV7-7, TRBJ2-2)
CASSTRASGGELFF

SEQ ID NO: 526999 - protein, 12 aa, Homo sapiens
  CDR3 for alpha chain variable domain of TCR clone 263500 (TRAV20, TRAJ39)
CAVGNAGNMLTF

SEQ ID NO: 527000 - protein, 15 aa, Homo sapiens
  CDR3 for beta chain variable domain of TCR clone 263500 (TRBV28, TRBJ2-1)
CASSIIAGGRSEQFF

SEQ ID NO: 527001 - protein, 17 aa, Homo sapiens
  CDR3 for alpha chain variable domain of TCR clone 263501 (TRAV27, TRAJ52)
CAGAGWAGGTSYGELTF

SEQ ID NO: 527002 - protein, 16 aa, Homo sapiens
  CDR3 for beta chain variable domain of TCR clone 263501 (TRBV19, TRBJ2-1)
CASSKAGPSSYNEQFF

SEQ ID NO: 527003 - protein, 14 aa, Homo sapiens
  CDR3 for alpha chain variable domain of TCR clone 263502 (TRAV26-1, TRAJ38)
CIADNAGNNRKLIW

SEQ ID NO: 527004 - protein, 13 aa, Homo sapiens
  CDR3 for beta chain variable domain of TCR clone 263502 (TRBV20-1, TRBJ1-1)
CSARGGGNTEDFF

SEQ ID NO: 527005 - protein, 11 aa, Homo sapiens
  CDR3 for alpha chain variable domain of TCR clone 263503 (TRAV2, TRAJ33)
CAVDSNYQLIW

SEQ ID NO: 527006 - protein, 15 aa, Homo sapiens
  CDR3 for beta chain variable domain of TCR clone 263503 (TRBV19, TRBJ1-2)
CASSVGQVLNYAYTF

SEQ ID NO: 527007 - protein, 12 aa, Homo sapiens
  CDR3 for alpha chain variable domain of TCR clone 263504 (TRAV12-3, TRAJ39)
CAMTQAGNMLTF

SEQ ID NO: 527008 - protein, 15 aa, Homo sapiens
  CDR3 for beta chain variable domain of TCR clone 263504 (TRBV19, TRBJ1-5)
CASSIVWADNQPQHF

SEQ ID NO: 527009 - protein, 16 aa, Homo sapiens
  CDR3 for alpha chain variable domain of TCR clone 263505 (TRAV30, TRAJ24)
CGTEMVDADSWGKFQF

SEQ ID NO: 527010 - protein, 14 aa, Homo sapiens
  CDR3 for beta chain variable domain of TCR clone 263505 (TRBV12-5, TRBJ2-5)
CASGSRTRQETQYF

SEQ ID NO: 527011 - protein, 14 aa, Homo sapiens
  CDR3 for alpha chain variable domain of TCR clone 263506 (TRAV12-3, TRAJ58)
CARSTETSGSRLTF

SEQ ID NO: 527012 - protein, 15 aa, Homo sapiens
  CDR3 for beta chain variable domain of TCR clone 263506 (TRBV4-1, TRBJ1-4)
CASSDTGGTNEKLFF

SEQ ID NO: 527013 - protein, 13 aa, Homo sapiens
  CDR3 for alpha chain variable domain of TCR clone 263507 (TRAV13-1, TRAJ37)
CSARSGNTGKLIF

SEQ ID NO: 527014 - protein, 14 aa, Homo sapiens
  CDR3 for beta chain variable domain of TCR clone 263507 (TRBV12-4, TRBJ2-3)
CASSLGQGTDTQYF

SEQ ID NO: 527015 - protein, 14 aa, Homo sapiens
  CDR3 for alpha chain variable domain of TCR clone 263508 (TRAV17, TRAJ35)
CATDRPGFGNVLHC

SEQ ID NO: 527016 - protein, 15 aa, Homo sapiens
  CDR3 for beta chain variable domain of TCR clone 263508 (TRBV28, TRBJ1-5)
CASSRTGGYVQPQHF

SEQ ID NO: 527017 - protein, 14 aa, Homo sapiens
  CDR3 for alpha chain variable domain of TCR clone 263509 (TRAV1-2, TRAJ16)
CAVNRFSDGQKRLF

SEQ ID NO: 527018 - protein, 15 aa, Homo sapiens
  CDR3 for beta chain variable domain of TCR clone 263509 (TRBV29-1, TRBJ2-7)
CSVEFFDRGSYEQYF

SEQ ID NO: 527019 - protein, 13 aa, Homo sapiens
  CDR3 for alpha chain variable domain of TCR clone 263510 (TRAV30, TRAJ24)
FGTVTDSWGKLQF

SEQ ID NO: 527020 - protein, 14 aa, Homo sapiens
  CDR3 for beta chain variable domain of TCR clone 263510 (TRBV6-3, TRBJ2-2)
CASTYTPDTGELFF

SEQ ID NO: 527021 - protein, 15 aa, Homo sapiens
  CDR3 for alpha chain variable domain of TCR clone 263511 (TRAV2, TRAJ13)
FATPSYSGGYQKVTF

SEQ ID NO: 527022 - protein, 14 aa, Homo sapiens
  CDR3 for beta chain variable domain of TCR clone 263511 (TRBV11-2, TRBJ2-3)
CASSRLARTDTQYF

SEQ ID NO: 527023 - protein, 15 aa, Homo sapiens
  CDR3 for alpha chain variable domain of TCR clone 263512 (TRAV13-1, TRAJ50)
CAAKGSETSYDKVIF

SEQ ID NO: 527024 - protein, 13 aa, Homo sapiens
  CDR3 for beta chain variable domain of TCR clone 263512 (TRBV20-1, TRBJ2-3)
CSARAGRRDTQYF

SEQ ID NO: 527025 - protein, 15 aa, Homo sapiens
  CDR3 for alpha chain variable domain of TCR clone 263513 (TRAV17, TRAJ28)
CATDPSGAGSYQLTF

SEQ ID NO: 527026 - protein, 15 aa, Homo sapiens
  CDR3 for beta chain variable domain of TCR clone 263513 (TRBV12-4, TRBJ1-1)
CASSSSGTGNTKAFF

SEQ ID NO: 527027 - protein, 15 aa, Homo sapiens
  CDR3 for alpha chain variable domain of TCR clone 263514 (TRAV2, TRAJ15)
CAVEDRGQAGTALIF

SEQ ID NO: 527028 - protein, 18 aa, Homo sapiens
  CDR3 for beta chain variable domain of TCR clone 263514 (TRBV11-2, TRBJ2-6)
CASSLNPFLGSGANVLTF

SEQ ID NO: 527029 - protein, 14 aa, Homo sapiens
  CDR3 for alpha chain variable domain of TCR clone 263515 (TRAV38-1, TRAJ29)
CPFITPSGNTPPVF

SEQ ID NO: 527030 - protein, 14 aa, Homo sapiens
  CDR3 for beta chain variable domain of TCR clone 263515 (TRBV18, TRBJ2-7)
CASSPRGGAYEQYF

SEQ ID NO: 527031 - protein, 15 aa, Homo sapiens
  CDR3 for alpha chain variable domain of TCR clone 263516 (TRAV21, TRAJ37)
CAVRPTLSNTGKLIF

SEQ ID NO: 527032 - protein, 16 aa, Homo sapiens
  CDR3 for beta chain variable domain of TCR clone 263516 (TRBV24-1, TRBJ2-3)
CATSDRRQALTDTQYF

SEQ ID NO: 527033 - protein, 13 aa, Homo sapiens
  CDR3 for alpha chain variable domain of TCR clone 263517 (TRAV8-4, TRAJ9)
CAVSDTGGFKTIF

SEQ ID NO: 527034 - protein, 19 aa, Homo sapiens
  CDR3 for beta chain variable domain of TCR clone 263517 (TRBV19, TRBJ2-5)
CASSIGQVTDFFLGETQYF

SEQ ID NO: 527035 - protein, 16 aa, Homo sapiens
  CDR3 for alpha chain variable domain of TCR clone 263518 (TRAV3, TRAJ37)
CAVRGRGFGNTGKLIF

SEQ ID NO: 527036 - protein, 13 aa, Homo sapiens
  CDR3 for beta chain variable domain of TCR clone 263518 (TRBV14, TRBJ2-7)
CASSQDRRGEQYF

SEQ ID NO: 527037 - protein, 14 aa, Homo sapiens
  CDR3 for alpha chain variable domain of TCR clone 263519 (TRAV26-1, TRAJ38)
CIADNAGNNRKLIW

SEQ ID NO: 527038 - protein, 13 aa, Homo sapiens
  CDR3 for beta chain variable domain of TCR clone 263519 (TRBV7-9, TRBJ1-2)
CASSLKQYYGYTF

SEQ ID NO: 527039 - protein, 14 aa, Homo sapiens
  CDR3 for alpha chain variable domain of TCR clone 263520 (TRAV17, TRAJ54)
CATDANQGAQKLVF

SEQ ID NO: 527040 - protein, 20 aa, Homo sapiens
  CDR3 for beta chain variable domain of TCR clone 263520 (TRBV7-8, TRBJ2-2)
CASSHLFPGPTIHITGELFF

SEQ ID NO: 527041 - protein, 14 aa, Homo sapiens
  CDR3 for alpha chain variable domain of TCR clone 263521 (TRAV12-3, TRAJ9)
CAMSVETGGFKTIF

SEQ ID NO: 527042 - protein, 14 aa, Homo sapiens
  CDR3 for beta chain variable domain of TCR clone 263521 (TRBV7-2, TRBJ2-7)
CSSRSQGAAYEQYF

SEQ ID NO: 527043 - protein, 17 aa, Homo sapiens
  CDR3 for alpha chain variable domain of TCR clone 263522 (TRAV27, TRAJ42)
CAGRVIYYGGSQGNLIF

SEQ ID NO: 527044 - protein, 17 aa, Homo sapiens
  CDR3 for beta chain variable domain of TCR clone 263522 (TRBV11-2, TRBJ2-1)
CASSLYPPGVEYNEQFF

SEQ ID NO: 527045 - protein, 10 aa, Homo sapiens
  CDR3 for alpha chain variable domain of TCR clone 263523 (TRAV12-3, TRAJ49)
CAMNDDQFYF

SEQ ID NO: 527046 - protein, 13 aa, Homo sapiens
  CDR3 for beta chain variable domain of TCR clone 263523 (TRBV12-4, TRBJ2-2)
CASSITGSGELFF

SEQ ID NO: 527047 - protein, 15 aa, Homo sapiens
  CDR3 for alpha chain variable domain of TCR clone 263524 (TRAV27, TRAJ38)
CAARRNAGNNRKLIW

SEQ ID NO: 527048 - protein, 15 aa, Homo sapiens
  CDR3 for beta chain variable domain of TCR clone 263524 (TRBV11-2, TRBJ2-2)
CASSSDRVNAGELFF

SEQ ID NO: 527049 - protein, 15 aa, Homo sapiens
  CDR3 for alpha chain variable domain of TCR clone 263525 (TRAV12-2, TRAJ53)
CAVNTGGGSNYKLTF

SEQ ID NO: 527050 - protein, 15 aa, Homo sapiens
  CDR3 for beta chain variable domain of TCR clone 263525 (TRBV5-1, TRBJ2-5)
CASSLGLGEIKTQYC

SEQ ID NO: 527051 - protein, 14 aa, Homo sapiens
  CDR3 for alpha chain variable domain of TCR clone 263526 (TRAV35, TRAJ33)
CAGSSQDSNYQLIW

SEQ ID NO: 527052 - protein, 16 aa, Homo sapiens
  CDR3 for beta chain variable domain of TCR clone 263526 (TRBV12-4, TRBJ2-5)
CASSFFVRGRQETQYF

SEQ ID NO: 527053 - protein, 13 aa, Homo sapiens
  CDR3 for alpha chain variable domain of TCR clone 263527 (TRAV20, TRAJ21)
CAVEGYNFNKFYF

SEQ ID NO: 527054 - protein, 14 aa, Homo sapiens
  CDR3 for beta chain variable domain of TCR clone 263527 (TRBV6-1, TRBJ1-3)
CASVQGGGGNTIYF

SEQ ID NO: 527055 - protein, 14 aa, Homo sapiens
  CDR3 for alpha chain variable domain of TCR clone 263528 (TRAV12-2, TRAJ45)
CAVYSGGGADGPTF

SEQ ID NO: 527056 - protein, 15 aa, Homo sapiens
  CDR3 for beta chain variable domain of TCR clone 263528 (TRBV4-1, TRBJ1-4)
CASSDTGGTNEKLFF

SEQ ID NO: 527057 - protein, 14 aa, Homo sapiens
  CDR3 for alpha chain variable domain of TCR clone 263529 (TRAV16, TRAJ54)
CALSLIQGAQKLVF

SEQ ID NO: 527058 - protein, 13 aa, Homo sapiens
  CDR3 for beta chain variable domain of TCR clone 263529 (TRBV10-3, TRBJ2-7)
CASKRAVNYEQYF

SEQ ID NO: 527059 - protein, 15 aa, Homo sapiens
  CDR3 for alpha chain variable domain of TCR clone 263530 (TRAV8-3, TRAJ15)
CAVGAPNQAGTALIF

SEQ ID NO: 527060 - protein, 14 aa, Homo sapiens
  CDR3 for beta chain variable domain of TCR clone 263530 (TRBV20-1, TRBJ2-1)
CSPNDEASYNEHFF

SEQ ID NO: 527061 - protein, 17 aa, Homo sapiens
  CDR3 for alpha chain variable domain of TCR clone 263531 (TRAV3, TRAJ38)
CAVRDCLNAGNNRKLIW

SEQ ID NO: 527062 - protein, 14 aa, Homo sapiens
  CDR3 for beta chain variable domain of TCR clone 263531 (TRBV27, TRBJ2-1)
CQSNGGGSSNEQFF

SEQ ID NO: 527063 - protein, 15 aa, Homo sapiens
  CDR3 for alpha chain variable domain of TCR clone 263532 (TRAV23/DV6, TRAJ57)
CAASSTLSQGGSAKL

SEQ ID NO: 527064 - protein, 14 aa, Homo sapiens
  CDR3 for beta chain variable domain of TCR clone 263532 (TRBV25-1, TRBJ1-1)
CASTHLGGNTEAFF

SEQ ID NO: 527065 - protein, 12 aa, Homo sapiens
  CDR3 for alpha chain variable domain of TCR clone 263533 (TRAV1-1, TRAJ39)
CAVPVVGNMLTF

SEQ ID NO: 527066 - protein, 16 aa, Homo sapiens
  CDR3 for beta chain variable domain of TCR clone 263533 (TRBV28, TRBJ1-5)
CASSLTGQGWNQPQHF

SEQ ID NO: 527067 - protein, 13 aa, Homo sapiens
  CDR3 for alpha chain variable domain of TCR clone 263534 (TRAV13-2, TRAJ54)
CAENYQGAQKLVF

SEQ ID NO: 527068 - protein, 15 aa, Homo sapiens
  CDR3 for beta chain variable domain of TCR clone 263534 (TRBV20-1, TRBJ2-7)
CSARDRVSGMDEQYF

SEQ ID NO: 527069 - protein, 14 aa, Homo sapiens
  CDR3 for alpha chain variable domain of TCR clone 263535 (TRAV17, TRAJ57)
CATDPQGGSEKLVF

SEQ ID NO: 527070 - protein, 16 aa, Homo sapiens
  CDR3 for beta chain variable domain of TCR clone 263535 (TRBV7-9, TRBJ2-1)
CASSDVAGGSYNEQFF

SEQ ID NO: 527071 - protein, 14 aa, Homo sapiens
  CDR3 for alpha chain variable domain of TCR clone 263536 (TRAV12-2, TRAJ45)
CAVNIGGGADGRTF

SEQ ID NO: 527072 - protein, 13 aa, Homo sapiens
  CDR3 for beta chain variable domain of TCR clone 263536 (TRBV19, TRBJ2-2)
CASSIWSTGELFF

SEQ ID NO: 527073 - protein, 10 aa, Homo sapiens
  CDR3 for alpha chain variable domain of TCR clone 263537 (TRAV16, TRAJ22)
SAMYLRQLTF

SEQ ID NO: 527074 - protein, 13 aa, Homo sapiens
  CDR3 for beta chain variable domain of TCR clone 263537 (TRBV12-4, TRBJ1-1)
CGSSPGTGFEAFF

SEQ ID NO: 527075 - protein, 14 aa, Homo sapiens
  CDR3 for alpha chain variable domain of TCR clone 263538 (TRAV1-2, TRAJ16)
CAMKEGSDGQKLLF

SEQ ID NO: 527076 - protein, 13 aa, Homo sapiens
  CDR3 for beta chain variable domain of TCR clone 263538 (TRBV7-2, TRBJ2-1)
CASSLSPDNEQFF

SEQ ID NO: 527077 - protein, 11 aa, Homo sapiens
  CDR3 for alpha chain variable domain of TCR clone 263539 (TRAV23/DV6, TRAJ58)
CAERLLRGETS

SEQ ID NO: 527078 - protein, 13 aa, Homo sapiens
  CDR3 for beta chain variable domain of TCR clone 263539 (TRBV6-4, TRBJ1-5)
CASSADLNQPQHF

SEQ ID NO: 527079 - protein, 14 aa, Homo sapiens
  CDR3 for alpha chain variable domain of TCR clone 263540 (TRAV12-3, TRAJ30)
CAMSLLNGDDKIIF

SEQ ID NO: 527080 - protein, 15 aa, Homo sapiens
  CDR3 for beta chain variable domain of TCR clone 263540 (TRBV20-1, TRBJ2-7)
CSAESGTSGAYEQYF

SEQ ID NO: 527081 - protein, 13 aa, Homo sapiens
  CDR3 for alpha chain variable domain of TCR clone 263541 (TRAV8-3, TRAJ36)
CAVGATGANTLFF

SEQ ID NO: 527082 - protein, 15 aa, Homo sapiens
  CDR3 for beta chain variable domain of TCR clone 263541 (TRBV7-2, TRBJ1-2)
CASSPRASWNYGYSF

SEQ ID NO: 527083 - protein, 17 aa, Homo sapiens
  CDR3 for alpha chain variable domain of TCR clone 263542 (TRAV17, TRAJ28)
CATDPRRGGAGRYQPTF

SEQ ID NO: 527084 - protein, 16 aa, Homo sapiens
  CDR3 for beta chain variable domain of TCR clone 263542 (TRBV25-1, TRBJ1-1)
CASSGDRDRGHIEAFF

SEQ ID NO: 527085 - protein, 13 aa, Homo sapiens
  CDR3 for alpha chain variable domain of TCR clone 263543 (TRAV13-1, TRAJ17)
CAADGAAGNKLTF

SEQ ID NO: 527086 - protein, 16 aa, Homo sapiens
  CDR3 for beta chain variable domain of TCR clone 263543 (TRBV11-2, TRBJ1-3)
CASSLTQGRNTIYLER

SEQ ID NO: 527087 - protein, 14 aa, Homo sapiens
  CDR3 for alpha chain variable domain of TCR clone 263544 (TRAV12-1, TRAJ8)
CVVNSNTGFQQLVF

SEQ ID NO: 527088 - protein, 17 aa, Homo sapiens
  CDR3 for beta chain variable domain of TCR clone 263544 (TRBV7-8, TRBJ2-6)
CASSAGTGGAGANVLTF

SEQ ID NO: 527089 - protein, 14 aa, Homo sapiens
  CDR3 for alpha chain variable domain of TCR clone 263545 (TRAV1-2, TRAJ16)
FAVNRISDGQKLLF

SEQ ID NO: 527090 - protein, 15 aa, Homo sapiens
  CDR3 for beta chain variable domain of TCR clone 263545 (TRBV7-9, TRBJ1-6)
CASSSPGRGNSPLHF

SEQ ID NO: 527091 - protein, 14 aa, Homo sapiens
  CDR3 for alpha chain variable domain of TCR clone 263546 (TRAV12-1, TRAJ43)
CVVNGRSNKNDMRF

SEQ ID NO: 527092 - protein, 13 aa, Homo sapiens
  CDR3 for beta chain variable domain of TCR clone 263546 (TRBV10-3, TRBJ2-7)
CASKLAVNYEQYF

SEQ ID NO: 527093 - protein, 13 aa, Homo sapiens
  CDR3 for alpha chain variable domain of TCR clone 263547 (TRAV8-3, TRAJ48)
CAVVPFGNVRLTF

SEQ ID NO: 527094 - protein, 19 aa, Homo sapiens
  CDR3 for beta chain variable domain of TCR clone 263547 (TRBV25-1, TRBJ2-2)
CAILVYRVDRGRKTGELFF

SEQ ID NO: 527095 - protein, 14 aa, Homo sapiens
  CDR3 for alpha chain variable domain of TCR clone 263548 (TRAV12-2, TRAJ17)
CAVLFKAAGSKLTF

SEQ ID NO: 527096 - protein, 15 aa, Homo sapiens
  CDR3 for beta chain variable domain of TCR clone 263548 (TRBV20-1, TRBJ2-7)
CSARDRVSGMDEQYF

SEQ ID NO: 527097 - protein, 11 aa, Homo sapiens
  CDR3 for alpha chain variable domain of TCR clone 263549 (TRAV3, TRAJ21)
CAGGNFNKFYF

SEQ ID NO: 527098 - protein, 20 aa, Homo sapiens
  CDR3 for beta chain variable domain of TCR clone 263549 (TRBV7-8, TRBJ2-2)
CASSHFFPGPTIHITGELFF

SEQ ID NO: 527099 - protein, 14 aa, Homo sapiens
  CDR3 for alpha chain variable domain of TCR clone 263550 (TRAV2, TRAJ9)
CAVEDRSGGFKTIF

SEQ ID NO: 527100 - protein, 16 aa, Homo sapiens
  CDR3 for beta chain variable domain of TCR clone 263550 (TRBV28, TRBJ1-5)
CASSLTGQCWNQPQHF

SEQ ID NO: 527101 - protein, 15 aa, Homo sapiens
  CDR3 for alpha chain variable domain of TCR clone 263551 (TRAV1-2, TRAJ26)
CAVRDLVTMVRILSL

SEQ ID NO: 527102 - protein, 12 aa, Homo sapiens
  CDR3 for beta chain variable domain of TCR clone 263551 (TRBV7-9, TRBJ2-7)
CATRTDAYEQYF

SEQ ID NO: 527103 - protein, 13 aa, Homo sapiens
  CDR3 for alpha chain variable domain of TCR clone 263552 (TRAV6, TRAJ16)
CALDDSDGQKLLF

SEQ ID NO: 527104 - protein, 16 aa, Homo sapiens
  CDR3 for beta chain variable domain of TCR clone 263552 (TRBV24-1, TRBJ2-3)
CATSDPGTGATDTQYF

SEQ ID NO: 527105 - protein, 14 aa, Homo sapiens
  CDR3 for alpha chain variable domain of TCR clone 263553 (TRAV35, TRAJ42)
CAGRYGGSQGKLIF

SEQ ID NO: 527106 - protein, 15 aa, Homo sapiens
  CDR3 for beta chain variable domain of TCR clone 263553 (TRBV7-9, TRBJ2-1)
CASSLGWGRANEQFF

SEQ ID NO: 527107 - protein, 14 aa, Homo sapiens
  CDR3 for alpha chain variable domain of TCR clone 263554 (TRAV35, TRAJ40)
CAGSTTSGTYKYIF

SEQ ID NO: 527108 - protein, 13 aa, Homo sapiens
  CDR3 for beta chain variable domain of TCR clone 263554 (TRBV20-1, TRBJ1-6)
CSAPLGVGSPLHC

SEQ ID NO: 527109 - protein, 16 aa, Homo sapiens
  CDR3 for alpha chain variable domain of TCR clone 263555 (TRAV12-2, TRAJ32)
CAVNMNYGGATNKLIF

SEQ ID NO: 527110 - protein, 16 aa, Homo sapiens
  CDR3 for beta chain variable domain of TCR clone 263555 (TRBV7-8, TRBJ2-3)
CASSTEGQRETDTHYF

SEQ ID NO: 527111 - protein, 13 aa, Homo sapiens
  CDR3 for alpha chain variable domain of TCR clone 263556 (TRAV12-3, TRAJ33)
CAMSVNSNYQLIW

SEQ ID NO: 527112 - protein, 15 aa, Homo sapiens
  CDR3 for beta chain variable domain of TCR clone 263556 (TRBV29-1, TRBJ2-7)
CSVEFFDRWSYEQYF

SEQ ID NO: 527113 - protein, 14 aa, Homo sapiens
  CDR3 for alpha chain variable domain of TCR clone 263557 (TRAV8-1, TRAJ34)
CALPRGMTSSSLGL

SEQ ID NO: 527114 - protein, 16 aa, Homo sapiens
  CDR3 for beta chain variable domain of TCR clone 263557 (TRBV11-2, TRBJ1-2)
CASSLDTGGADYGYTF

SEQ ID NO: 527115 - protein, 16 aa, Homo sapiens
  CDR3 for alpha chain variable domain of TCR clone 263558 (TRAV3, TRAJ37)
CAVRGKGSGNTGKLIF

SEQ ID NO: 527116 - protein, 16 aa, Homo sapiens
  CDR3 for beta chain variable domain of TCR clone 263558 (TRBV2, TRBJ2-1)
CASSVGGSLSCNEQFF

SEQ ID NO: 527117 - protein, 12 aa, Homo sapiens
  CDR3 for alpha chain variable domain of TCR clone 263559 (TRAV35, TRAJ49)
CAGWNTGNQFYF

SEQ ID NO: 527118 - protein, 15 aa, Homo sapiens
  CDR3 for beta chain variable domain of TCR clone 263559 (TRBV3-1, TRBJ1-2)
CASSRRNPGFYGYTF

SEQ ID NO: 527119 - protein, 13 aa, Homo sapiens
  CDR3 for alpha chain variable domain of TCR clone 263560 (TRAV12-3, TRAJ33)
CAMSVNSNYQLIW

SEQ ID NO: 527120 - protein, 16 aa, Homo sapiens
  CDR3 for beta chain variable domain of TCR clone 263560 (TRBV24-1, TRBJ2-3)
CATSDPGTGATDTQYF

SEQ ID NO: 527121 - protein, 15 aa, Homo sapiens
  CDR3 for alpha chain variable domain of TCR clone 263561 (TRAV26-1, TRAJ40)
CIVRVTTSGTYKYIF

SEQ ID NO: 527122 - protein, 14 aa, Homo sapiens
  CDR3 for beta chain variable domain of TCR clone 263561 (TRBV7-2, TRBJ1-3)
CASSRLRSGNTIYF

SEQ ID NO: 527123 - protein, 13 aa, Homo sapiens
  CDR3 for alpha chain variable domain of TCR clone 263562 (TRAV12-2, TRAJ50)
CAVIVTSYDKVIF

SEQ ID NO: 527124 - protein, 15 aa, Homo sapiens
  CDR3 for beta chain variable domain of TCR clone 263562 (TRBV7-3, TRBJ2-1)
CASSLSSGSFDEQFF

SEQ ID NO: 527125 - protein, 14 aa, Homo sapiens
  CDR3 for alpha chain variable domain of TCR clone 263563 (TRAV23/DV6, TRAJ8)
CEASKNTGFQKLVF

SEQ ID NO: 527126 - protein, 16 aa, Homo sapiens
  CDR3 for beta chain variable domain of TCR clone 263563 (TRBV4-1, TRBJ2-6)
CASSQVGDPGANVLTF

SEQ ID NO: 527127 - protein, 13 aa, Homo sapiens
  CDR3 for alpha chain variable domain of TCR clone 263564 (TRAV8-6, TRAJ49)
CAVITNTGNQYYF

SEQ ID NO: 527128 - protein, 17 aa, Homo sapiens
  CDR3 for beta chain variable domain of TCR clone 263564 (TRBV11-2, TRBJ2-1)
CASSLYPPGVEYNEQFF

SEQ ID NO: 527129 - protein, 16 aa, Homo sapiens
  CDR3 for alpha chain variable domain of TCR clone 263565 (TRAV36/DV7, TRAJ33)
RRPGNKVQDSNYQLIW

SEQ ID NO: 527130 - protein, 15 aa, Homo sapiens
  CDR3 for beta chain variable domain of TCR clone 263565 (TRBV29-1, TRBJ2-1)
RSVGRHALFYNEQFF

SEQ ID NO: 527131 - protein, 14 aa, Homo sapiens
  CDR3 for alpha chain variable domain of TCR clone 263566 (TRAV14/DV4, TRAJ15)
CAMRRDQAGTALIF

SEQ ID NO: 527132 - protein, 16 aa, Homo sapiens
  CDR3 for beta chain variable domain of TCR clone 263566 (TRBV15, TRBJ2-3)
CATSRDLGIVTDTQYV

SEQ ID NO: 527133 - protein, 13 aa, Homo sapiens
  CDR3 for alpha chain variable domain of TCR clone 263567 (TRAV35, TRAJ42)
CAGFPGSQGNPIF

SEQ ID NO: 527134 - protein, 14 aa, Homo sapiens
  CDR3 for beta chain variable domain of TCR clone 263567 (TRBV19, TRBJ2-1)
CASPTVVLSCEQFF

SEQ ID NO: 527135 - protein, 14 aa, Homo sapiens
  CDR3 for alpha chain variable domain of TCR clone 263568 (TRAV1-2, TRAJ16)
CAVNRFSDGQKLLS

SEQ ID NO: 527136 - protein, 14 aa, Homo sapiens
  CDR3 for beta chain variable domain of TCR clone 263568 (TRBV12-4, TRBJ1-1)
CASSLGTGGTEAVF

SEQ ID NO: 527137 - protein, 14 aa, Homo sapiens
  CDR3 for alpha chain variable domain of TCR clone 263569 (TRAV12-2, TRAJ45)
CAVNKGGGADGLTF

SEQ ID NO: 527138 - protein, 19 aa, Homo sapiens
  CDR3 for beta chain variable domain of TCR clone 263569 (TRBV7-2, TRBJ2-3)
CASSLVLRAYISRPDTQYF

SEQ ID NO: 527139 - protein, 11 aa, Homo sapiens
  CDR3 for alpha chain variable domain of TCR clone 263570 (TRAV29/DV5, TRAJ49)
CAAVPGNQFYF

SEQ ID NO: 527140 - protein, 17 aa, Homo sapiens
  CDR3 for beta chain variable domain of TCR clone 263570 (TRBV7-3, TRBJ2-3)
CASSLMKRMRGADTQYF

SEQ ID NO: 527141 - protein, 13 aa, Homo sapiens
  CDR3 for alpha chain variable domain of TCR clone 263571 (TRAV30, TRAJ49)
CGTEPNTGNQFYF

SEQ ID NO: 527142 - protein, 14 aa, Homo sapiens
  CDR3 for beta chain variable domain of TCR clone 263571 (TRBV29-1, TRBJ2-1)
CSVEVRGIPFEQFF

SEQ ID NO: 527143 - protein, 13 aa, Homo sapiens
  CDR3 for alpha chain variable domain of TCR clone 263572 (TRAV26-1, TRAJ8)
CIVRSTGFQKLVF

SEQ ID NO: 527144 - protein, 14 aa, Homo sapiens
  CDR3 for beta chain variable domain of TCR clone 263572 (TRBV7-3, TRBJ1-1)
CASSLKGGNTEAFF

SEQ ID NO: 527145 - protein, 14 aa, Homo sapiens
  CDR3 for alpha chain variable domain of TCR clone 263573 (TRAV1-2, TRAJ8)
CAVREDTGFQKLVF

SEQ ID NO: 527146 - protein, 12 aa, Homo sapiens
  CDR3 for beta chain variable domain of TCR clone 263573 (TRBV7-8, TRBJ2-7)
CASSLGDREQYV

SEQ ID NO: 527147 - protein, 13 aa, Homo sapiens
  CDR3 for alpha chain variable domain of TCR clone 263574 (TRAV35, TRAJ42)
CAGFPGSQGNLIF

SEQ ID NO: 527148 - protein, 16 aa, Homo sapiens
  CDR3 for beta chain variable domain of TCR clone 263574 (TRBV19, TRBJ2-2)
CASSFPGQRLAGELFF

SEQ ID NO: 527149 - protein, 14 aa, Homo sapiens
  CDR3 for alpha chain variable domain of TCR clone 263575 (TRAV23/DV6, TRAJ22)
CADISSGSARQLTF

SEQ ID NO: 527150 - protein, 16 aa, Homo sapiens
  CDR3 for beta chain variable domain of TCR clone 263575 (TRBV5-7, TRBJ2-5)
CASIRGQTGYQETQYS

SEQ ID NO: 527151 - protein, 13 aa, Homo sapiens
  CDR3 for alpha chain variable domain of TCR clone 263576 (TRAV3, TRAJ16)
CAVRDRNGQKLLF

SEQ ID NO: 527152 - protein, 15 aa, Homo sapiens
  CDR3 for beta chain variable domain of TCR clone 263576 (TRBV5-1, TRBJ2-1)
CASSPPRAPHNEQFF

SEQ ID NO: 527153 - protein, 17 aa, Homo sapiens
  CDR3 for alpha chain variable domain of TCR clone 263577 (TRAV1-1, TRAJ32)
CAVRVGELWWCYKQAHL

SEQ ID NO: 527154 - protein, 12 aa, Homo sapiens
  CDR3 for beta chain variable domain of TCR clone 263577 (TRBV7-8, TRBJ2-1)
CASSLGHNEQFF

SEQ ID NO: 527155 - protein, 14 aa, Homo sapiens
  CDR3 for alpha chain variable domain of TCR clone 263578 (TRAV26-1, TRAJ38)
CIADNAGNNRKLIW

SEQ ID NO: 527156 - protein, 12 aa, Homo sapiens
  CDR3 for beta chain variable domain of TCR clone 263578 (TRBV11-2, TRBJ2-5)
CASSLGQETQYF

SEQ ID NO: 527157 - protein, 17 aa, Homo sapiens
  CDR3 for alpha chain variable domain of TCR clone 263579 (TRAV26-2, TRAJ42)
CILRDVGFGGSQGNLIF

SEQ ID NO: 527158 - protein, 16 aa, Homo sapiens
  CDR3 for beta chain variable domain of TCR clone 263579 (TRBV12-4, TRBJ2-7)
YASSLIGGTGTYEQYF

SEQ ID NO: 527159 - protein, 12 aa, Homo sapiens
  CDR3 for alpha chain variable domain of TCR clone 263580 (TRAV17, TRAJ39)
CATGAAGNMLTF

SEQ ID NO: 527160 - protein, 17 aa, Homo sapiens
  CDR3 for beta chain variable domain of TCR clone 263580 (TRBV4-1, TRBJ2-3)
CASSQGYVSGGTDTQYF

SEQ ID NO: 527161 - protein, 11 aa, Homo sapiens
  CDR3 for alpha chain variable domain of TCR clone 263581 (TRAV1-2, TRAJ31)
CAVNNNARLMF

SEQ ID NO: 527162 - protein, 13 aa, Homo sapiens
  CDR3 for beta chain variable domain of TCR clone 263581 (TRBV7-3, TRBJ1-2)
CASSLKRGYGYTF

SEQ ID NO: 527163 - protein, 13 aa, Homo sapiens
  CDR3 for alpha chain variable domain of TCR clone 263582 (TRAV17, TRAJ9)
CATDYTGGFKTIF

SEQ ID NO: 527164 - protein, 18 aa, Homo sapiens
  CDR3 for beta chain variable domain of TCR clone 263582 (TRBV18, TRBJ2-3)
CASSYTSGAAGGTDTQYF

SEQ ID NO: 527165 - protein, 13 aa, Homo sapiens
  CDR3 for alpha chain variable domain of TCR clone 263583 (TRAV21, TRAJ20)
CAVGLRVDYKLSF

SEQ ID NO: 527166 - protein, 21 aa, Homo sapiens
  CDR3 for beta chain variable domain of TCR clone 263583 (TRBV15, TRBJ2-1)
AWGPQPCTCVPPAEVDTARFF

SEQ ID NO: 527167 - protein, 12 aa, Homo sapiens
  CDR3 for alpha chain variable domain of TCR clone 263584 (TRAV3, TRAJ39)
CAVIEWSNMLTF

SEQ ID NO: 527168 - protein, 16 aa, Homo sapiens
  CDR3 for beta chain variable domain of TCR clone 263584 (TRBV7-3, TRBJ2-2)
CASSLKRGTLSGELFS

SEQ ID NO: 527169 - protein, 12 aa, Homo sapiens
  CDR3 for alpha chain variable domain of TCR clone 263585 (TRAV21, TRAJ12)
CAVMDSSYKLIF

SEQ ID NO: 527170 - protein, 16 aa, Homo sapiens
  CDR3 for beta chain variable domain of TCR clone 263585 (TRBV7-9, TRBJ2-5)
CASMLEIGTRKETQYF

SEQ ID NO: 527171 - protein, 13 aa, Homo sapiens
  CDR3 for alpha chain variable domain of TCR clone 263586 (TRAV25, TRAJ29)
CASPPSGNTPLVF

SEQ ID NO: 527172 - protein, 13 aa, Homo sapiens
  CDR3 for beta chain variable domain of TCR clone 263586 (TRBV7-3, TRBJ1-1)
CASSQDWGAEAFF

SEQ ID NO: 527173 - protein, 15 aa, Homo sapiens
  CDR3 for alpha chain variable domain of TCR clone 263587 (TRAV21, TRAJ18)
CAVRDRGSTLGRLSF

SEQ ID NO: 527174 - protein, 17 aa, Homo sapiens
  CDR3 for beta chain variable domain of TCR clone 263587 (TRBV7-2, TRBJ2-3)
CASSSYSGTRRADTQYF

SEQ ID NO: 527175 - protein, 15 aa, Homo sapiens
  CDR3 for alpha chain variable domain of TCR clone 263588 (TRAV26-1, TRAJ56)
CIVRVATGAYSKLTF

SEQ ID NO: 527176 - protein, 15 aa, Homo sapiens
  CDR3 for beta chain variable domain of TCR clone 263588 (TRBV27, TRBJ2-7)
CASSPQREGQREQYF

SEQ ID NO: 527177 - protein, 13 aa, Homo sapiens
  CDR3 for alpha chain variable domain of TCR clone 263589 (TRAV21, TRAJ27)
CAARPGHACKSTF

SEQ ID NO: 527178 - protein, 14 aa, Homo sapiens
  CDR3 for beta chain variable domain of TCR clone 263589 (TRBV7-6, TRBJ2-3)
CASSLGTVTDTQYF

SEQ ID NO: 527179 - protein, 14 aa, Homo sapiens
  CDR3 for alpha chain variable domain of TCR clone 263590 (TRAV17, TRAJ6)
CATNLAGGSYIPTF

SEQ ID NO: 527180 - protein, 14 aa, Homo sapiens
  CDR3 for beta chain variable domain of TCR clone 263590 (TRBV7-8, TRBJ2-3)
CASSLEAGTDTQYF

SEQ ID NO: 527181 - protein, 15 aa, Homo sapiens
  CDR3 for alpha chain variable domain of TCR clone 263591 (TRAV1-2, TRAJ12)
CADARWMDSSYKLIF

SEQ ID NO: 527182 - protein, 16 aa, Homo sapiens
  CDR3 for beta chain variable domain of TCR clone 263591 (TRBV11-3, TRBJ2-6)
CASSQGAGAGANVLTF

SEQ ID NO: 527183 - protein, 14 aa, Homo sapiens
  CDR3 for alpha chain variable domain of TCR clone 263592 (TRAV8-4, TRAJ13)
CAVTLSGGYQKVTF

SEQ ID NO: 527184 - protein, 15 aa, Homo sapiens
  CDR3 for beta chain variable domain of TCR clone 263592 (TRBV6-3, TRBJ2-2)
CASSFLATLTGELFF

SEQ ID NO: 527185 - protein, 19 aa, Homo sapiens
  CDR3 for alpha chain variable domain of TCR clone 263593 (TRAV16, )
CAISGDIQNPDPAVYQLRD

SEQ ID NO: 527186 - protein, 16 aa, Homo sapiens
  CDR3 for beta chain variable domain of TCR clone 263593 (TRBV12-5, TRBJ2-5)
CASGPRTSGNQETQYF

SEQ ID NO: 527187 - protein, 14 aa, Homo sapiens
  CDR3 for alpha chain variable domain of TCR clone 263594 (TRAV1-2, TRAJ8)
CAVREVTGFQKLVF

SEQ ID NO: 527188 - protein, 16 aa, Homo sapiens
  CDR3 for beta chain variable domain of TCR clone 263594 (TRBV7-2, TRBJ2-5)
CASSPFPTGGEETQYF

SEQ ID NO: 527189 - protein, 11 aa, Homo sapiens
  CDR3 for alpha chain variable domain of TCR clone 263595 (TRAV27, TRAJ45)
CAGAQEEVLTD

SEQ ID NO: 527190 - protein, 17 aa, Homo sapiens
  CDR3 for beta chain variable domain of TCR clone 263595 (TRBV11-2, TRBJ2-1)
CASSLYPPGVEYNEQLF

SEQ ID NO: 527191 - protein, 11 aa, Homo sapiens
  CDR3 for alpha chain variable domain of TCR clone 263596 (TRAV12-2, TRAJ30)
CAVGRDDKIIF

SEQ ID NO: 527192 - protein, 14 aa, Homo sapiens
  CDR3 for beta chain variable domain of TCR clone 263596 (TRBV7-9, TRBJ2-5)
CASSSPPGTETQYF

SEQ ID NO: 527193 - protein, 17 aa, Homo sapiens
  CDR3 for alpha chain variable domain of TCR clone 263597 (TRAV12-3, TRAJ26)
CAMSGGRWDNYGQNFVF

SEQ ID NO: 527194 - protein, 14 aa, Homo sapiens
  CDR3 for beta chain variable domain of TCR clone 263597 (TRBV19, TRBJ1-1)
CASSTTGIKLSLDK

SEQ ID NO: 527195 - protein, 15 aa, Homo sapiens
  CDR3 for alpha chain variable domain of TCR clone 263598 (TRAV20, TRAJ4)
CAVTMFSGGYNKLIF

SEQ ID NO: 527196 - protein, 13 aa, Homo sapiens
  CDR3 for beta chain variable domain of TCR clone 263598 (TRBV7-9, TRBJ1-2)
CASSLKQNYGYTF

SEQ ID NO: 527197 - protein, 14 aa, Homo sapiens
  CDR3 for alpha chain variable domain of TCR clone 263599 (TRAV2, TRAJ37)
CAVDFTSNTGKLIF

SEQ ID NO: 527198 - protein, 15 aa, Homo sapiens
  CDR3 for beta chain variable domain of TCR clone 263599 (TRBV4-1, TRBJ1-2)
CASSQDRNRDYGYTF

SEQ ID NO: 527199 - protein, 12 aa, Homo sapiens
  CDR3 for alpha chain variable domain of TCR clone 263600 (TRAV2, TRAJ9)
CAVGAGGFKTIF

SEQ ID NO: 527200 - protein, 15 aa, Homo sapiens
  CDR3 for beta chain variable domain of TCR clone 263600 (TRBV7-3, TRBJ2-7)
CASSLTPTGYDEQYF

SEQ ID NO: 527201 - protein, 11 aa, Homo sapiens
  CDR3 for alpha chain variable domain of TCR clone 263601 (TRAV1-1, TRAJ23)
CAVRQGGKLIF

SEQ ID NO: 527202 - protein, 14 aa, Homo sapiens
  CDR3 for beta chain variable domain of TCR clone 263601 (TRBV19, TRBJ2-1)
CASKDPGLANEQFF

SEQ ID NO: 527203 - protein, 14 aa, Homo sapiens
  CDR3 for alpha chain variable domain of TCR clone 263602 (TRAV1-2, TRAJ16)
CAVNRFSDGQKLLS

SEQ ID NO: 527204 - protein, 10 aa, Homo sapiens
  CDR3 for beta chain variable domain of TCR clone 263602 (TRBV19, TRBJ1-5)
CASSIVWADN

SEQ ID NO: 527205 - protein, 16 aa, Homo sapiens
  CDR3 for alpha chain variable domain of TCR clone 263603 (TRAV26-1, TRAJ53)
CIVRVAMGGSNYKLTF

SEQ ID NO: 527206 - protein, 14 aa, Homo sapiens
  CDR3 for beta chain variable domain of TCR clone 263603 (TRBV6-1, TRBJ1-3)
CARVQGGGGNTIYF

SEQ ID NO: 527207 - protein, 15 aa, Homo sapiens
  CDR3 for alpha chain variable domain of TCR clone 263604 (TRAV21, TRAJ10)
CAVRGLTGGGNKLTF

SEQ ID NO: 527208 - protein, 16 aa, Homo sapiens
  CDR3 for beta chain variable domain of TCR clone 263604 (TRBV12-4, TRBJ2-5)
CASSFFVRGRQETQYF

SEQ ID NO: 527209 - protein, 16 aa, Homo sapiens
  CDR3 for alpha chain variable domain of TCR clone 263605 (TRAV12-1, TRAJ12)
CVVNTLQMDSSYKLIF

SEQ ID NO: 527210 - protein, 13 aa, Homo sapiens
  CDR3 for beta chain variable domain of TCR clone 263605 (TRBV11-2, TRBJ2-1)
CASSSEAYNEQFF

SEQ ID NO: 527211 - protein, 14 aa, Homo sapiens
  CDR3 for alpha chain variable domain of TCR clone 263606 (TRAV1-2, TRAJ8)
CAVREDTGFQTLVF

SEQ ID NO: 527212 - protein, 13 aa, Homo sapiens
  CDR3 for beta chain variable domain of TCR clone 263606 (TRBV15, TRBJ2-7)
CATSTTGHYEQYF

SEQ ID NO: 527213 - protein, 15 aa, Homo sapiens
  CDR3 for alpha chain variable domain of TCR clone 263607 (TRAV26-1, TRAJ29)
CIVRAEGSGHTPLVF

SEQ ID NO: 527214 - protein, 15 aa, Homo sapiens
  CDR3 for beta chain variable domain of TCR clone 263607 (TRBV7-9, TRBJ1-5)
CASSQGHQPNQPQHF

SEQ ID NO: 527215 - protein, 17 aa, Homo sapiens
  CDR3 for alpha chain variable domain of TCR clone 263608 (TRAV16, TRAJ58)
CITVLSNGETSGSRLTF

SEQ ID NO: 527216 - protein, 17 aa, Homo sapiens
  CDR3 for beta chain variable domain of TCR clone 263608 (TRBV18, TRBJ2-1)
CASSKGLSAGADNEQFF

SEQ ID NO: 527217 - protein, 16 aa, Homo sapiens
  CDR3 for alpha chain variable domain of TCR clone 263609 (TRAV3, TRAJ21)
CAVRDIERGNFIKFCF

SEQ ID NO: 527218 - protein, 13 aa, Homo sapiens
  CDR3 for beta chain variable domain of TCR clone 263609 (TRBV27, TRBJ2-7)
CASSLTTGYEQYF

SEQ ID NO: 527219 - protein, 11 aa, Homo sapiens
  CDR3 for alpha chain variable domain of TCR clone 263610 (TRAV17, TRAJ9)
CVFTGGFKTIF

SEQ ID NO: 527220 - protein, 14 aa, Homo sapiens
  CDR3 for beta chain variable domain of TCR clone 263610 (TRBV7-9, TRBJ2-2)
CASSLGQDTGELFF

SEQ ID NO: 527221 - protein, 12 aa, Homo sapiens
  CDR3 for alpha chain variable domain of TCR clone 263611 (TRAV17, TRAJ20)
CATDSNDYKLSF

SEQ ID NO: 527222 - protein, 15 aa, Homo sapiens
  CDR3 for beta chain variable domain of TCR clone 263611 (TRBV28, TRBJ1-2)
CASSFLFGQEVGYTF

SEQ ID NO: 527223 - protein, 14 aa, Homo sapiens
  CDR3 for alpha chain variable domain of TCR clone 263612 (TRAV8-4, TRAJ17)
CAVSDQAAGNKLTF

SEQ ID NO: 527224 - protein, 14 aa, Homo sapiens
  CDR3 for beta chain variable domain of TCR clone 263612 (TRBV7-2, TRBJ2-7)
CASRSQGAAYEQYF

SEQ ID NO: 527225 - protein, 13 aa, Homo sapiens
  CDR3 for alpha chain variable domain of TCR clone 263613 (TRAV8-3, TRAJ6)
CAVGSGGSYIPTF

SEQ ID NO: 527226 - protein, 14 aa, Homo sapiens
  CDR3 for beta chain variable domain of TCR clone 263613 (TRBV11-2, TRBJ1-1)
CASSTQRGRTESFF

SEQ ID NO: 527227 - protein, 16 aa, Homo sapiens
  CDR3 for alpha chain variable domain of TCR clone 263614 (TRAV38-1, TRAJ32)
CAFMKGVGGATNKLIF

SEQ ID NO: 527228 - protein, 13 aa, Homo sapiens
  CDR3 for beta chain variable domain of TCR clone 263614 (TRBV20-1, TRBJ2-5)
CSAREAFQETQYF

SEQ ID NO: 527229 - protein, 13 aa, Homo sapiens
  CDR3 for alpha chain variable domain of TCR clone 263615 (TRAV12-2, TRAJ24)
CAVSTDIWGKLQF

SEQ ID NO: 527230 - protein, 12 aa, Homo sapiens
  CDR3 for beta chain variable domain of TCR clone 263615 (TRBV7-6, TRBJ2-7)
CASSLADSEQYF

SEQ ID NO: 527231 - protein, 14 aa, Homo sapiens
  CDR3 for alpha chain variable domain of TCR clone 263616 (TRAV1-2, TRAJ16)
CAVNRFSDGQKLLF

SEQ ID NO: 527232 - protein, 14 aa, Homo sapiens
  CDR3 for beta chain variable domain of TCR clone 263616 (TRBV7-9, TRBJ1-4)
CAITEGEANEELFF

SEQ ID NO: 527233 - protein, 14 aa, Homo sapiens
  CDR3 for alpha chain variable domain of TCR clone 263617 (TRAV17, TRAJ57)
CATDPQGGSEKLVS

SEQ ID NO: 527234 - protein, 14 aa, Homo sapiens
  CDR3 for beta chain variable domain of TCR clone 263617 (TRBV27, TRBJ2-5)
CASSSLKGWETQYF

SEQ ID NO: 527235 - protein, 12 aa, Homo sapiens
  CDR3 for alpha chain variable domain of TCR clone 263618 (TRAV21, TRAJ11)
CAATSGYSTLTF

SEQ ID NO: 527236 - protein, 14 aa, Homo sapiens
  CDR3 for beta chain variable domain of TCR clone 263618 (TRBV20-1, TRBJ2-7)
GSAPELAGAGEQYF

SEQ ID NO: 527237 - protein, 15 aa, Homo sapiens
  CDR3 for alpha chain variable domain of TCR clone 263619 (TRAV12-3, TRAJ11)
CAMSEENSGYSPLTF

SEQ ID NO: 527238 - protein, 16 aa, Homo sapiens
  CDR3 for beta chain variable domain of TCR clone 263619 (TRBV5-1, TRBJ2-7)
CASSLEGLAGLYEQYF

SEQ ID NO: 527239 - protein, 15 aa, Homo sapiens
  CDR3 for alpha chain variable domain of TCR clone 263620 (TRAV23/DV6, TRAJ28)
CAALLAYSGAGSYQL

SEQ ID NO: 527240 - protein, 14 aa, Homo sapiens
  CDR3 for beta chain variable domain of TCR clone 263620 (TRBV5-1, TRBJ1-1)
CASSLTRRSTEAFF

SEQ ID NO: 527241 - protein, 15 aa, Homo sapiens
  CDR3 for alpha chain variable domain of TCR clone 263621 (TRAV21, TRAJ27)
CAARPGNAGKSPFVD

SEQ ID NO: 527242 - protein, 15 aa, Homo sapiens
  CDR3 for beta chain variable domain of TCR clone 263621 (TRBV6-3, TRBJ2-7)
CASSSPGTVFYEQYF

SEQ ID NO: 527243 - protein, 13 aa, Homo sapiens
  CDR3 for alpha chain variable domain of TCR clone 263622 (TRAV21, TRAJ20)
CAVGLRVDYKLSF

SEQ ID NO: 527244 - protein, 15 aa, Homo sapiens
  CDR3 for beta chain variable domain of TCR clone 263622 (TRBV7-2, TRBJ2-3)
CASSLNLRDTDTQYF

SEQ ID NO: 527245 - protein, 13 aa, Homo sapiens
  CDR3 for alpha chain variable domain of TCR clone 263623 (TRAV12-2, TRAJ29)
CAERLRGNTPLVF

SEQ ID NO: 527246 - protein, 15 aa, Homo sapiens
  CDR3 for beta chain variable domain of TCR clone 263623 (TRBV5-6, TRBJ2-2)
CASSLASSNTGELFF

SEQ ID NO: 527247 - protein, 14 aa, Homo sapiens
  CDR3 for alpha chain variable domain of TCR clone 263624 (TRAV41, TRAJ22)
CCSLPSGSARQLTF

SEQ ID NO: 527248 - protein, 12 aa, Homo sapiens
  CDR3 for beta chain variable domain of TCR clone 263624 (TRBV11-2, TRBJ2-2)
CASSLGGGELFF

SEQ ID NO: 527249 - protein, 16 aa, Homo sapiens
  CDR3 for alpha chain variable domain of TCR clone 263625 (TRAV16, TRAJ4)
CALSRMFSVGYNKLIF

SEQ ID NO: 527250 - protein, 19 aa, Homo sapiens
  CDR3 for beta chain variable domain of TCR clone 263625 (TRBV28, TRBJ2-7)
CASSYSGTSRLGWVYEQYF

SEQ ID NO: 527251 - protein, 12 aa, Homo sapiens
  CDR3 for alpha chain variable domain of TCR clone 263626 (TRAV12-3, TRAJ39)
CAMTQAGNMLTF

SEQ ID NO: 527252 - protein, 14 aa, Homo sapiens
  CDR3 for beta chain variable domain of TCR clone 263626 (TRBV19, TRBJ2-1)
CASPTFVLSGEQFF

SEQ ID NO: 527253 - protein, 15 aa, Homo sapiens
  CDR3 for alpha chain variable domain of TCR clone 263627 (TRAV8-3, TRAJ45)
CASSYSGGGADGLTI

SEQ ID NO: 527254 - protein, 20 aa, Homo sapiens
  CDR3 for beta chain variable domain of TCR clone 263627 (TRBV28, TRBJ2-1)
CASTPIGRSPGLAGGNEQFF

SEQ ID NO: 527255 - protein, 13 aa, Homo sapiens
  CDR3 for alpha chain variable domain of TCR clone 263628 (TRAV8-3, TRAJ28)
CAVGAVGGYQLTF

SEQ ID NO: 527256 - protein, 16 aa, Homo sapiens
  CDR3 for beta chain variable domain of TCR clone 263628 (TRBV6-6, TRBJ2-3)
CASSYSHAGSTDTQYF

SEQ ID NO: 527257 - protein, 12 aa, Homo sapiens
  CDR3 for alpha chain variable domain of TCR clone 263629 (TRAV12-3, TRAJ17)
CAMTLTGNKITF

SEQ ID NO: 527258 - protein, 15 aa, Homo sapiens
  CDR3 for beta chain variable domain of TCR clone 263629 (TRBV6-6, TRBJ2-7)
CASSYSYGGSYEQYF

SEQ ID NO: 527259 - protein, 12 aa, Homo sapiens
  CDR3 for alpha chain variable domain of TCR clone 263630 (TRAV13-1, TRAJ21)
CAAKEGFNKFYF

SEQ ID NO: 527260 - protein, 15 aa, Homo sapiens
  CDR3 for beta chain variable domain of TCR clone 263630 (TRBV4-1, TRBJ1-4)
RASSDTGGTNEKLFF

SEQ ID NO: 527261 - protein, 15 aa, Homo sapiens
  CDR3 for alpha chain variable domain of TCR clone 263631 (TRAV4, TRAJ17)
CLVGDIGAACNKLAF

SEQ ID NO: 527262 - protein, 14 aa, Homo sapiens
  CDR3 for beta chain variable domain of TCR clone 263631 (TRBV6-3, TRBJ2-7)
CASSYSVRVYEQYF

SEQ ID NO: 527263 - protein, 14 aa, Homo sapiens
  CDR3 for alpha chain variable domain of TCR clone 263632 (TRAV12-1, TRAJ24)
CVVRSTDSWWKFQF

SEQ ID NO: 527264 - protein, 13 aa, Homo sapiens
  CDR3 for beta chain variable domain of TCR clone 263632 (TRBV2, TRBJ2-3)
CASILAGGQGQYF

SEQ ID NO: 527265 - protein, 14 aa, Homo sapiens
  CDR3 for alpha chain variable domain of TCR clone 263633 (TRAV6, TRAJ37)
CALGSQGNTGKLIF

SEQ ID NO: 527266 - protein, 15 aa, Homo sapiens
  CDR3 for beta chain variable domain of TCR clone 263633 (TRBV2, TRBJ2-1)
CTSSEEREGDNEQFF

SEQ ID NO: 527267 - protein, 12 aa, Homo sapiens
  CDR3 for alpha chain variable domain of TCR clone 263634 (TRAV1-1, TRAJ29)
CASGSGNTPLVF

SEQ ID NO: 527268 - protein, 15 aa, Homo sapiens
  CDR3 for beta chain variable domain of TCR clone 263634 (TRBV28, TRBJ2-1)
CASSIIAGGRSEQFF

SEQ ID NO: 527269 - protein, 16 aa, Homo sapiens
  CDR3 for alpha chain variable domain of TCR clone 263635 (TRAV8-6, TRAJ37)
CAVSGLGSSNTGKLIF

SEQ ID NO: 527270 - protein, 15 aa, Homo sapiens
  CDR3 for beta chain variable domain of TCR clone 263635 (TRBV7-2, TRBJ2-3)
CASSSTGLETDTQYF

SEQ ID NO: 527271 - protein, 14 aa, Homo sapiens
  CDR3 for alpha chain variable domain of TCR clone 263636 (TRAV1-2, TRAJ16)
CAVNRFSDGQTLLF

SEQ ID NO: 527272 - protein, 17 aa, Homo sapiens
  CDR3 for beta chain variable domain of TCR clone 263636 (TRBV20-1, TRBJ2-1)
CSASSSGLAGSYNEQFF

SEQ ID NO: 527273 - protein, 19 aa, Homo sapiens
  CDR3 for alpha chain variable domain of TCR clone 263637 (TRAV26-1, TRAJ52)
WIVRAHRNAGGTSYGKLTF

SEQ ID NO: 527274 - protein, 14 aa, Homo sapiens
  CDR3 for beta chain variable domain of TCR clone 263637 (TRBV4-1, TRBJ2-2)
CASSQAVNTGELFF

SEQ ID NO: 527275 - protein, 15 aa, Homo sapiens
  CDR3 for alpha chain variable domain of TCR clone 263638 (TRAV23/DV6, TRAJ18)
CAARYRGSTLGRLYF

SEQ ID NO: 527276 - protein, 15 aa, Homo sapiens
  CDR3 for beta chain variable domain of TCR clone 263638 (TRBV7-2, TRBJ2-1)
CASSVGWGRANEQFF

SEQ ID NO: 527277 - protein, 13 aa, Homo sapiens
  CDR3 for alpha chain variable domain of TCR clone 263639 (TRAV26-1, TRAJ33)
CIVRVDSNYQLIW

SEQ ID NO: 527278 - protein, 15 aa, Homo sapiens
  CDR3 for beta chain variable domain of TCR clone 263639 (TRBV7-2, TRBJ1-5)
CASSFSAGINKPQHF

SEQ ID NO: 527279 - protein, 14 aa, Homo sapiens
  CDR3 for alpha chain variable domain of TCR clone 263640 (TRAV1-2, TRAJ27)
CAVRSGTNAGKSTF

SEQ ID NO: 527280 - protein, 15 aa, Homo sapiens
  CDR3 for beta chain variable domain of TCR clone 263640 (TRBV18, TRBJ2-5)
CASSPLQGRTYEQYF

SEQ ID NO: 527281 - protein, 19 aa, Homo sapiens
  CDR3 for alpha chain variable domain of TCR clone 263641 (TRAV26-1, TRAJ52)
CIVRAHRNAGGTSYGKLTF

SEQ ID NO: 527282 - protein, 14 aa, Homo sapiens
  CDR3 for beta chain variable domain of TCR clone 263641 (TRBV7-2, TRBJ2-7)
CSSSPKTSFYEQYF

SEQ ID NO: 527283 - protein, 14 aa, Homo sapiens
  CDR3 for alpha chain variable domain of TCR clone 263642 (TRAV26-1, TRAJ38)
CIADNAGNNRKLMW

SEQ ID NO: 527284 - protein, 12 aa, Homo sapiens
  CDR3 for beta chain variable domain of TCR clone 263642 (TRBV5-1, TRBJ2-7)
CASSFRGYEQYF

SEQ ID NO: 527285 - protein, 15 aa, Homo sapiens
  CDR3 for alpha chain variable domain of TCR clone 263643 (TRAV9-2, TRAJ28)
CALSISGAGRYQLTF

SEQ ID NO: 527286 - protein, 14 aa, Homo sapiens
  CDR3 for beta chain variable domain of TCR clone 263643 (TRBV7-3, TRBJ1-1)
CASSLKGGNTEAFF

SEQ ID NO: 527287 - protein, 14 aa, Homo sapiens
  CDR3 for alpha chain variable domain of TCR clone 263644 (TRAV17, TRAJ6)
CATPAMGGSYIPTF

SEQ ID NO: 527288 - protein, 15 aa, Homo sapiens
  CDR3 for beta chain variable domain of TCR clone 263644 (TRBV10-2, TRBJ2-6)
CASSEQGTGANVLTV

SEQ ID NO: 527289 - protein, 12 aa, Homo sapiens
  CDR3 for alpha chain variable domain of TCR clone 263645 (TRAV2, TRAJ10)
CASTGGGNKLTF

SEQ ID NO: 527290 - protein, 15 aa, Homo sapiens
  CDR3 for beta chain variable domain of TCR clone 263645 (TRBV6-6, TRBJ2-5)
CASSPGGGLEETQYF

SEQ ID NO: 527291 - protein, 14 aa, Homo sapiens
  CDR3 for alpha chain variable domain of TCR clone 263646 (TRAV20, TRAJ29)
CAVQAWVGNTPLVF

SEQ ID NO: 527292 - protein, 15 aa, Homo sapiens
  CDR3 for beta chain variable domain of TCR clone 263646 (TRBV29-1, TRBJ2-7)
RSVEFFDRGSDEQYF

SEQ ID NO: 527293 - protein, 14 aa, Homo sapiens
  CDR3 for alpha chain variable domain of TCR clone 263647 (TRAV12-2, TRAJ15)
CAPHTGQAGTALIF

SEQ ID NO: 527294 - protein, 17 aa, Homo sapiens
  CDR3 for beta chain variable domain of TCR clone 263647 (TRBV5-5, TRBJ1-2)
SASSLGSLDGQSEGYTF

SEQ ID NO: 527295 - protein, 15 aa, Homo sapiens
  CDR3 for alpha chain variable domain of TCR clone 263648 (TRAV16, TRAJ48)
CGLFISNFGNEKLTF

SEQ ID NO: 527296 - protein, 15 aa, Homo sapiens
  CDR3 for beta chain variable domain of TCR clone 263648 (TRBV5-4, TRBJ2-7)
CASSRFGTGSYEQYF

SEQ ID NO: 527297 - protein, 13 aa, Homo sapiens
  CDR3 for alpha chain variable domain of TCR clone 263649 (TRAV27, TRAJ6)
CAGGTRGSYIPTF

SEQ ID NO: 527298 - protein, 15 aa, Homo sapiens
  CDR3 for beta chain variable domain of TCR clone 263649 (TRBV10-3, TRBJ2-1)
CAISESASGRKEQFF

SEQ ID NO: 527299 - protein, 11 aa, Homo sapiens
  CDR3 for alpha chain variable domain of TCR clone 263650 (TRAV26-1, TRAJ27)
CIDPNAGKSTF

SEQ ID NO: 527300 - protein, 18 aa, Homo sapiens
  CDR3 for beta chain variable domain of TCR clone 263650 (TRBV7-9, TRBJ2-6)
CASSSPGAGISGANVLTF

SEQ ID NO: 527301 - protein, 12 aa, Homo sapiens
  CDR3 for alpha chain variable domain of TCR clone 263651 (TRAV8-3, TRAJ20)
CAVGANDYKLSF

SEQ ID NO: 527302 - protein, 13 aa, Homo sapiens
  CDR3 for beta chain variable domain of TCR clone 263651 (TRBV7-9, TRBJ1-2)
CASSLKQNYGYAF

SEQ ID NO: 527303 - protein, 17 aa, Homo sapiens
  CDR3 for alpha chain variable domain of TCR clone 263652 (TRAV38-2/DV8, TRAJ28)
CAFLTLYSGAGSYQLTF

SEQ ID NO: 527304 - protein, 14 aa, Homo sapiens
  CDR3 for beta chain variable domain of TCR clone 263652 (TRBV7-8, TRBJ2-5)
CASSLSGGGETQYF

SEQ ID NO: 527305 - protein, 14 aa, Homo sapiens
  CDR3 for alpha chain variable domain of TCR clone 263653 (TRAV26-1, TRAJ34)
CIVRVAYNTYKLIF

SEQ ID NO: 527306 - protein, 13 aa, Homo sapiens
  CDR3 for beta chain variable domain of TCR clone 263653 (TRBV7-3, TRBJ1-1)
CASSQDWGAEAFF

SEQ ID NO: 527307 - protein, 14 aa, Homo sapiens
  CDR3 for alpha chain variable domain of TCR clone 263654 (TRAV17, TRAJ54)
CATAANQGAQKLVF

SEQ ID NO: 527308 - protein, 15 aa, Homo sapiens
  CDR3 for beta chain variable domain of TCR clone 263654 (TRBV7-2, TRBJ1-2)
CASSPRAGWNYGYTF

SEQ ID NO: 527309 - protein, 17 aa, Homo sapiens
  CDR3 for alpha chain variable domain of TCR clone 263655 (TRAV26-1, TRAJ53)
CIVRVDDSGGSNYKLTF

SEQ ID NO: 527310 - protein, 14 aa, Homo sapiens
  CDR3 for beta chain variable domain of TCR clone 263655 (TRBV27, TRBJ2-7)
CASSFRDGPYEQYF

SEQ ID NO: 527311 - protein, 13 aa, Homo sapiens
  CDR3 for alpha chain variable domain of TCR clone 263656 (TRAV27, TRAJ8)
CAGGPTGFQKLVF

SEQ ID NO: 527312 - protein, 12 aa, Homo sapiens
  CDR3 for beta chain variable domain of TCR clone 263656 (TRBV11-2, TRBJ2-2)
CASSLPTGELFF

SEQ ID NO: 527313 - protein, 14 aa, Homo sapiens
  CDR3 for alpha chain variable domain of TCR clone 263657 (TRAV26-1, TRAJ38)
CIADNAGNNRKLIW

SEQ ID NO: 527314 - protein, 15 aa, Homo sapiens
  CDR3 for beta chain variable domain of TCR clone 263657 (TRBV7-2, TRBJ2-1)
CASSELAGSYNEQFF

SEQ ID NO: 527315 - protein, 14 aa, Homo sapiens
  CDR3 for alpha chain variable domain of TCR clone 263658 (TRAV12-2, TRAJ13)
CAVKKTGGYQEVTF

SEQ ID NO: 527316 - protein, 15 aa, Homo sapiens
  CDR3 for beta chain variable domain of TCR clone 263658 (TRBV27, TRBJ2-1)
CVSSNGGGSSNEQFF

SEQ ID NO: 527317 - protein, 15 aa, Homo sapiens
  CDR3 for alpha chain variable domain of TCR clone 263659 (TRAV3, TRAJ29)
CAVRDPPSGNTPLVF

SEQ ID NO: 527318 - protein, 17 aa, Homo sapiens
  CDR3 for beta chain variable domain of TCR clone 263659 (TRBV7-2, TRBJ2-7)
CASSLGTGTSGRYEQYF

SEQ ID NO: 527319 - protein, 13 aa, Homo sapiens
  CDR3 for alpha chain variable domain of TCR clone 263660 (TRAV12-1, TRAJ34)
CVVTGYNTDKLIF

SEQ ID NO: 527320 - protein, 15 aa, Homo sapiens
  CDR3 for beta chain variable domain of TCR clone 263660 (TRBV11-3, TRBJ2-3)
CASLKDGREGDTQYF

SEQ ID NO: 527321 - protein, 10 aa, Homo sapiens
  CDR3 for alpha chain variable domain of TCR clone 263661 (TRAV8-3, TRAJ44)
CAVGAVVYRH

SEQ ID NO: 527322 - protein, 16 aa, Homo sapiens
  CDR3 for beta chain variable domain of TCR clone 263661 (TRBV6-4, TRBJ1-2)
CASSEAVGDPNYGYTF

SEQ ID NO: 527323 - protein, 14 aa, Homo sapiens
  CDR3 for alpha chain variable domain of TCR clone 263662 (TRAV26-1, TRAJ45)
CIEVTGGGADGLTF

SEQ ID NO: 527324 - protein, 13 aa, Homo sapiens
  CDR3 for beta chain variable domain of TCR clone 263662 (TRBV10-3, TRBJ1-2)
CAISERDSYGYTF

SEQ ID NO: 527325 - protein, 14 aa, Homo sapiens
  CDR3 for alpha chain variable domain of TCR clone 263663 (TRAV12-3, TRAJ57)
CARALEGGSEKLVF

SEQ ID NO: 527326 - protein, 14 aa, Homo sapiens
  CDR3 for beta chain variable domain of TCR clone 263663 (TRBV19, TRBJ2-1)
CASPTFVLSGEQFF

SEQ ID NO: 527327 - protein, 13 aa, Homo sapiens
  CDR3 for alpha chain variable domain of TCR clone 263664 (TRAV16, TRAJ27)
CALRRTNAGKSTI

SEQ ID NO: 527328 - protein, 15 aa, Homo sapiens
  CDR3 for beta chain variable domain of TCR clone 263664 (TRBV18, TRBJ2-1)
CASSPPSASYNEQFF

SEQ ID NO: 527329 - protein, 14 aa, Homo sapiens
  CDR3 for alpha chain variable domain of TCR clone 263665 (TRAV17, TRAJ12)
CATDGVDSSYKLIF

SEQ ID NO: 527330 - protein, 16 aa, Homo sapiens
  CDR3 for beta chain variable domain of TCR clone 263665 (TRBV19, TRBJ2-1)
CASSKAGPSSYNEQFF

SEQ ID NO: 527331 - protein, 12 aa, Homo sapiens
  CDR3 for alpha chain variable domain of TCR clone 263666 (TRAV24, TRAJ37)
CASSINTGKLIF

SEQ ID NO: 527332 - protein, 11 aa, Homo sapiens
  CDR3 for beta chain variable domain of TCR clone 263666 (TRBV29-1, TRBJ2-5)
CSEDRTGTQYF

SEQ ID NO: 527333 - protein, 12 aa, Homo sapiens
  CDR3 for alpha chain variable domain of TCR clone 263667 (TRAV13-2, TRAJ23)
CAERHRGGKIIF

SEQ ID NO: 527334 - protein, 16 aa, Homo sapiens
  CDR3 for beta chain variable domain of TCR clone 263667 (TRBV20-1, TRBJ1-4)
CSAPGQGLLTNENLFF

SEQ ID NO: 527335 - protein, 17 aa, Homo sapiens
  CDR3 for alpha chain variable domain of TCR clone 263668 (TRAV1-1, TRAJ15)
CLLLLRCPNQAGTALVF

SEQ ID NO: 527336 - protein, 15 aa, Homo sapiens
  CDR3 for beta chain variable domain of TCR clone 263668 (TRBV27, TRBJ2-3)
CASSLGLAGPDTQYF

SEQ ID NO: 527337 - protein, 15 aa, Homo sapiens
  CDR3 for alpha chain variable domain of TCR clone 263669 (TRAV17, TRAJ40)
CATVSSTSGTYKYIF

SEQ ID NO: 527338 - protein, 12 aa, Homo sapiens
  CDR3 for beta chain variable domain of TCR clone 263669 (TRBV11-2, TRBJ2-2)
CASSLGGGELFF

SEQ ID NO: 527339 - protein, 18 aa, Homo sapiens
  CDR3 for alpha chain variable domain of TCR clone 263670 (TRAV13-1, TRAJ52)
CAAKNPNAGGTSYGKLTF

SEQ ID NO: 527340 - protein, 16 aa, Homo sapiens
  CDR3 for beta chain variable domain of TCR clone 263670 (TRBV7-2, TRBJ1-2)
CASSSNQDRRGHGYTF

SEQ ID NO: 527341 - protein, 10 aa, Homo sapiens
  CDR3 for alpha chain variable domain of TCR clone 263671 (TRAV2, TRAJ34)
CAVVNDKLTF

SEQ ID NO: 527342 - protein, 15 aa, Homo sapiens
  CDR3 for beta chain variable domain of TCR clone 263671 (TRBV3-1, TRBJ2-2)
CASSQDWTRAGELFF

SEQ ID NO: 527343 - protein, 14 aa, Homo sapiens
  CDR3 for alpha chain variable domain of TCR clone 263672 (TRAV12-1, TRAJ10)
CVVNLAGGGHKLTF

SEQ ID NO: 527344 - protein, 14 aa, Homo sapiens
  CDR3 for beta chain variable domain of TCR clone 263672 (TRBV12-4, TRBJ1-1)
CASSLGTGGTEAFF

SEQ ID NO: 527345 - protein, 13 aa, Homo sapiens
  CDR3 for alpha chain variable domain of TCR clone 263673 (TRAV2, TRAJ40)
CAVVTSGTYKYIF

SEQ ID NO: 527346 - protein, 15 aa, Homo sapiens
  CDR3 for beta chain variable domain of TCR clone 263673 (TRBV3-1, TRBJ2-2)
CASSQDWTRAGELFF

SEQ ID NO: 527347 - protein, 11 aa, Homo sapiens
  CDR3 for alpha chain variable domain of TCR clone 263674 (TRAV35, TRAJ34)
CWARNTDKLIF

SEQ ID NO: 527348 - protein, 14 aa, Homo sapiens
  CDR3 for beta chain variable domain of TCR clone 263674 (TRBV5-1, TRBJ2-7)
CASSKGESLYEQYF

SEQ ID NO: 527349 - protein, 14 aa, Homo sapiens
  CDR3 for alpha chain variable domain of TCR clone 263675 (TRAV8-1, TRAJ34)
CAAITTYNTDKLIF

SEQ ID NO: 527350 - protein, 14 aa, Homo sapiens
  CDR3 for beta chain variable domain of TCR clone 263675 (TRBV11-3, TRBJ1-3)
CASSHNGQGNTIYF

SEQ ID NO: 527351 - protein, 15 aa, Homo sapiens
  CDR3 for alpha chain variable domain of TCR clone 263676 (TRAV26-1, TRAJ39)
CIVRVASNAGNILTF

SEQ ID NO: 527352 - protein, 14 aa, Homo sapiens
  CDR3 for beta chain variable domain of TCR clone 263676 (TRBV7-6, TRBJ2-3)
CASSVAGGTDTQYF

SEQ ID NO: 527353 - protein, 12 aa, Homo sapiens
  CDR3 for alpha chain variable domain of TCR clone 263677 (TRAV2, TRAJ33)
CAFMYSNYQLIW

SEQ ID NO: 527354 - protein, 16 aa, Homo sapiens
  CDR3 for beta chain variable domain of TCR clone 263677 (TRBV19, TRBJ1-5)
CASSTWTGGGNQPQHF

SEQ ID NO: 527355 - protein, 14 aa, Homo sapiens
  CDR3 for alpha chain variable domain of TCR clone 263678 (TRAV26-1, TRAJ38)
CIADNAGNNRKLIW

SEQ ID NO: 527356 - protein, 13 aa, Homo sapiens
  CDR3 for beta chain variable domain of TCR clone 263678 (TRBV20-1, TRBJ1-1)
YSARGGGNTETFF

SEQ ID NO: 527357 - protein, 14 aa, Homo sapiens
  CDR3 for alpha chain variable domain of TCR clone 263679 (TRAV17, TRAJ16)
CAPADFSDGQKLLF

SEQ ID NO: 527358 - protein, 12 aa, Homo sapiens
  CDR3 for beta chain variable domain of TCR clone 263679 (TRBV24-1, TRBJ1-1)
CATLYPDTEAFF

SEQ ID NO: 527359 - protein, 18 aa, Homo sapiens
  CDR3 for alpha chain variable domain of TCR clone 263680 (TRAV1-2, TRAJ8)
CLLPLCCERGHRLSETLF

SEQ ID NO: 527360 - protein, 15 aa, Homo sapiens
  CDR3 for beta chain variable domain of TCR clone 263680 (TRBV6-3, TRBJ2-7)
CASGSPGTVFYEQYF

SEQ ID NO: 527361 - protein, 15 aa, Homo sapiens
  CDR3 for alpha chain variable domain of TCR clone 263681 (TRAV1-2, TRAJ32)
CAVRGYGGATTKLIF

SEQ ID NO: 527362 - protein, 15 aa, Homo sapiens
  CDR3 for beta chain variable domain of TCR clone 263681 (TRBV25-1, TRBJ2-5)
CASSDTGTHQETQYF

SEQ ID NO: 527363 - protein, 13 aa, Homo sapiens
  CDR3 for alpha chain variable domain of TCR clone 263682 (TRAV27, TRAJ45)
CRSSGGGADGLTF

SEQ ID NO: 527364 - protein, 16 aa, Homo sapiens
  CDR3 for beta chain variable domain of TCR clone 263682 (TRBV7-9, TRBJ1-2)
CASSLGFSSGEDGYTL

SEQ ID NO: 527365 - protein, 14 aa, Homo sapiens
  CDR3 for alpha chain variable domain of TCR clone 263683 (TRAV1-2, TRAJ16)
CAVNRFSDDQKLLF

SEQ ID NO: 527366 - protein, 15 aa, Homo sapiens
  CDR3 for beta chain variable domain of TCR clone 263683 (TRBV12-4, TRBJ2-5)
CASSPPTGLQETQYF

SEQ ID NO: 527367 - protein, 16 aa, Homo sapiens
  CDR3 for alpha chain variable domain of TCR clone 263684 (TRAV13-1, TRAJ37)
CAASSLGSSNTGKLIF

SEQ ID NO: 527368 - protein, 15 aa, Homo sapiens
  CDR3 for beta chain variable domain of TCR clone 263684 (TRBV27, TRBJ2-1)
CASSNGGGSSNEQFF

SEQ ID NO: 527369 - protein, 12 aa, Homo sapiens
  CDR3 for alpha chain variable domain of TCR clone 263685 (TRAV6, TRAJ30)
CALDSRDDKIIF

SEQ ID NO: 527370 - protein, 17 aa, Homo sapiens
  CDR3 for beta chain variable domain of TCR clone 263685 (TRBV10-3, TRBJ2-6)
CAISESTAPSGANVLTF

SEQ ID NO: 527371 - protein, 13 aa, Homo sapiens
  CDR3 for alpha chain variable domain of TCR clone 263686 (TRAV8-6, TRAJ32)
CAGSDRARNKLIF

SEQ ID NO: 527372 - protein, 13 aa, Homo sapiens
  CDR3 for beta chain variable domain of TCR clone 263686 (TRBV11-2, TRBJ2-7)
CASSLDLGYEQYF

SEQ ID NO: 527373 - protein, 12 aa, Homo sapiens
  CDR3 for alpha chain variable domain of TCR clone 263687 (TRAV12-1, TRAJ31)
CVVNRNNARLMV

SEQ ID NO: 527374 - protein, 15 aa, Homo sapiens
  CDR3 for beta chain variable domain of TCR clone 263687 (TRBV10-3, TRBJ2-3)
CAISEALSSTDTQYF

SEQ ID NO: 527375 - protein, 14 aa, Homo sapiens
  CDR3 for alpha chain variable domain of TCR clone 263688 (TRAV12-2, TRAJ13)
CAVKKTGGYQKVTF

SEQ ID NO: 527376 - protein, 16 aa, Homo sapiens
  CDR3 for beta chain variable domain of TCR clone 263688 (TRBV2, TRBJ2-1)
CASRSPAGGKYNEQFC

SEQ ID NO: 527377 - protein, 14 aa, Homo sapiens
  CDR3 for alpha chain variable domain of TCR clone 263689 (TRAV8-4, TRAJ8)
CAVSLNTGFRKLVF

SEQ ID NO: 527378 - protein, 13 aa, Homo sapiens
  CDR3 for beta chain variable domain of TCR clone 263689 (TRBV7-9, TRBJ2-3)
CASSPGSTDTQYF

SEQ ID NO: 527379 - protein, 14 aa, Homo sapiens
  CDR3 for alpha chain variable domain of TCR clone 263690 (TRAV3, TRAJ36)
CAVRDGTGANNLFF

SEQ ID NO: 527380 - protein, 16 aa, Homo sapiens
  CDR3 for beta chain variable domain of TCR clone 263690 (TRBV20-1, TRBJ2-6)
CSAREGPRVGANVLTF

SEQ ID NO: 527381 - protein, 13 aa, Homo sapiens
  CDR3 for alpha chain variable domain of TCR clone 263691 (TRAV30, TRAJ24)
CGTVTGSWGKLQF

SEQ ID NO: 527382 - protein, 11 aa, Homo sapiens
  CDR3 for beta chain variable domain of TCR clone 263691 (TRBV7-8, TRBJ2-7)
CASSLSLEQYF

SEQ ID NO: 527383 - protein, 12 aa, Homo sapiens
  CDR3 for alpha chain variable domain of TCR clone 263692 (TRAV8-2, TRAJ30)
CVVIDRDDKIIF

SEQ ID NO: 527384 - protein, 16 aa, Homo sapiens
  CDR3 for beta chain variable domain of TCR clone 263692 (TRBV10-3, TRBJ2-6)
CAISTSGDLGANVLTF

SEQ ID NO: 527385 - protein, 14 aa, Homo sapiens
  CDR3 for alpha chain variable domain of TCR clone 263693 (TRAV34, TRAJ44)
CGADGTGTARKLTF

SEQ ID NO: 527386 - protein, 13 aa, Homo sapiens
  CDR3 for beta chain variable domain of TCR clone 263693 (TRBV19, TRBJ1-2)
CASSVPGQDGYTF

SEQ ID NO: 527387 - protein, 16 aa, Homo sapiens
  CDR3 for alpha chain variable domain of TCR clone 263694 (TRAV8-6, TRAJ4)
CAVSPTFSGGDNKLIF

SEQ ID NO: 527388 - protein, 14 aa, Homo sapiens
  CDR3 for beta chain variable domain of TCR clone 263694 (TRBV29-1, TRBJ2-2)
CSVVTSGAPGELFF

SEQ ID NO: 527389 - protein, 14 aa, Homo sapiens
  CDR3 for alpha chain variable domain of TCR clone 263695 (TRAV16, TRAJ33)
CALSAMDSNYQLIC

SEQ ID NO: 527390 - protein, 12 aa, Homo sapiens
  CDR3 for beta chain variable domain of TCR clone 263695 (TRBV5-1, TRBJ1-2)
CASSQDTYSYTF

SEQ ID NO: 527391 - protein, 14 aa, Homo sapiens
  CDR3 for alpha chain variable domain of TCR clone 263696 (TRAV12-1, TRAJ38)
CVVNNAGNNRKLIW

SEQ ID NO: 527392 - protein, 15 aa, Homo sapiens
  CDR3 for beta chain variable domain of TCR clone 263696 (TRBV6-3, TRBJ2-7)
CASSSPGTVFYEQYF

SEQ ID NO: 527393 - protein, 15 aa, Homo sapiens
  CDR3 for alpha chain variable domain of TCR clone 263697 (TRAV12-1, TRAJ44)
CVVFVNTGTASKLTF

SEQ ID NO: 527394 - protein, 17 aa, Homo sapiens
  CDR3 for beta chain variable domain of TCR clone 263697 (TRBV4-1, TRBJ2-3)
CASSQGYVSGGTDTQYF

SEQ ID NO: 527395 - protein, 14 aa, Homo sapiens
  CDR3 for alpha chain variable domain of TCR clone 263698 (TRAV23/DV6, TRAJ10)
CAAAISGGGNKITF

SEQ ID NO: 527396 - protein, 12 aa, Homo sapiens
  CDR3 for beta chain variable domain of TCR clone 263698 (TRBV28, TRBJ2-7)
CASSVPPYEQYF

SEQ ID NO: 527397 - protein, 14 aa, Homo sapiens
  CDR3 for alpha chain variable domain of TCR clone 263699 (TRAV1-2, TRAJ16)
CAVNRFSDGQKLLF

SEQ ID NO: 527398 - protein, 12 aa, Homo sapiens
  CDR3 for beta chain variable domain of TCR clone 263699 (TRBV7-2, TRBJ2-5)
CASSLIGETQYF

SEQ ID NO: 527399 - protein, 15 aa, Homo sapiens
  CDR3 for alpha chain variable domain of TCR clone 263700 (TRAV13-2, TRAJ10)
CAENRDTGGGNKLTF

SEQ ID NO: 527400 - protein, 17 aa, Homo sapiens
  CDR3 for beta chain variable domain of TCR clone 263700 (TRBV18, TRBJ2-3)
CASSSRGPASSTDTQYF

SEQ ID NO: 527401 - protein, 15 aa, Homo sapiens
  CDR3 for alpha chain variable domain of TCR clone 263701 (TRAV8-3, TRAJ13)
CAVAPNSGGYQKVTF

SEQ ID NO: 527402 - protein, 15 aa, Homo sapiens
  CDR3 for beta chain variable domain of TCR clone 263701 (TRBV20-1, TRBJ1-1)
CSASRGVTGNTEAFF

SEQ ID NO: 527403 - protein, 12 aa, Homo sapiens
  CDR3 for alpha chain variable domain of TCR clone 263702 (TRAV25, TRAJ16)
CAGNRDGQKLLF

SEQ ID NO: 527404 - protein, 15 aa, Homo sapiens
  CDR3 for beta chain variable domain of TCR clone 263702 (TRBV6-3, TRBJ2-7)
CASSSPGTVFYEQYF

SEQ ID NO: 527405 - protein, 12 aa, Homo sapiens
  CDR3 for alpha chain variable domain of TCR clone 263703 (TRAV12-3, TRAJ17)
CAMTLTGNKLTF

SEQ ID NO: 527406 - protein, 17 aa, Homo sapiens
  CDR3 for beta chain variable domain of TCR clone 263703 (TRBV20-1, TRBJ2-7)
CSARDMGKEGSSYEQYF

SEQ ID NO: 527407 - protein, 14 aa, Homo sapiens
  CDR3 for alpha chain variable domain of TCR clone 263704 (TRAV12-1, TRAJ12)
CVVFWMDSSYKLIF

SEQ ID NO: 527408 - protein, 14 aa, Homo sapiens
  CDR3 for beta chain variable domain of TCR clone 263704 (TRBV7-2, TRBJ2-1)
CASSLVAGGNEQFF

SEQ ID NO: 527409 - protein, 14 aa, Homo sapiens
  CDR3 for alpha chain variable domain of TCR clone 263705 (TRAV36/DV7, TRAJ53)
CAVVDGGSNYKLTF

SEQ ID NO: 527410 - protein, 14 aa, Homo sapiens
  CDR3 for beta chain variable domain of TCR clone 263705 (TRBV4-1, TRBJ2-2)
CASSQAVNTGELFF

SEQ ID NO: 527411 - protein, 12 aa, Homo sapiens
  CDR3 for alpha chain variable domain of TCR clone 263706 (TRAV17, TRAJ57)
CATDGGSEKLVF

SEQ ID NO: 527412 - protein, 12 aa, Homo sapiens
  CDR3 for beta chain variable domain of TCR clone 263706 (TRBV29-1, TRBJ2-2)
CSVYKYTGELFF

SEQ ID NO: 527413 - protein, 21 aa, Homo sapiens
  CDR3 for alpha chain variable domain of TCR clone 263707 (TRAV25, TRAJ47)
TATQTTDVGTYFWEYGNKLVF

SEQ ID NO: 527414 - protein, 13 aa, Homo sapiens
  CDR3 for beta chain variable domain of TCR clone 263707 (TRBV20-1, TRBJ2-5)
CSAREAFQETQFF

SEQ ID NO: 527415 - protein, 17 aa, Homo sapiens
  CDR3 for alpha chain variable domain of TCR clone 263708 (TRAV13-1, TRAJ28)
CAASPPYSGAGSYQLTF

SEQ ID NO: 527416 - protein, 16 aa, Homo sapiens
  CDR3 for beta chain variable domain of TCR clone 263708 (TRBV11-2, TRBJ2-7)
CASSLAPTGVNYEQYF

SEQ ID NO: 527417 - protein, 16 aa, Homo sapiens
  CDR3 for alpha chain variable domain of TCR clone 263709 (TRAV26-1, TRAJ36)
CIVRVPDQTGANNLFF

SEQ ID NO: 527418 - protein, 15 aa, Homo sapiens
  CDR3 for beta chain variable domain of TCR clone 263709 (TRBV2, TRBJ2-5)
CASSEQGLIGETQYF

SEQ ID NO: 527419 - protein, 14 aa, Homo sapiens
  CDR3 for alpha chain variable domain of TCR clone 263710 (TRAV23/DV6, TRAJ22)
CAATGSGSARQLTF

SEQ ID NO: 527420 - protein, 12 aa, Homo sapiens
  CDR3 for beta chain variable domain of TCR clone 263710 (TRBV7-2, TRBJ2-1)
CASSLRQNEQFF

SEQ ID NO: 527421 - protein, 14 aa, Homo sapiens
  CDR3 for alpha chain variable domain of TCR clone 263711 (TRAV13-1, TRAJ13)
CAASRVGGYQKATF

SEQ ID NO: 527422 - protein, 17 aa, Homo sapiens
  CDR3 for beta chain variable domain of TCR clone 263711 (TRBV15, TRBJ1-5)
CATSRAPPGTRNQPQHF

SEQ ID NO: 527423 - protein, 16 aa, Homo sapiens
  CDR3 for alpha chain variable domain of TCR clone 263712 (TRAV30, TRAJ24)
CSTEIVDADSWGKFQF

SEQ ID NO: 527424 - protein, 15 aa, Homo sapiens
  CDR3 for beta chain variable domain of TCR clone 263712 (TRBV28, TRBJ2-1)
CASSIIAGGRSEQFF

SEQ ID NO: 527425 - protein, 17 aa, Homo sapiens
  CDR3 for alpha chain variable domain of TCR clone 263713 (TRAV3, TRAJ6)
CAVRDGPRAGGSYLSTF

SEQ ID NO: 527426 - protein, 14 aa, Homo sapiens
  CDR3 for beta chain variable domain of TCR clone 263713 (TRBV7-2, TRBJ2-7)
CASSPKTSFYEQYF

SEQ ID NO: 527427 - protein, 13 aa, Homo sapiens
  CDR3 for alpha chain variable domain of TCR clone 263714 (TRAV2, TRAJ40)
CAVVTSGTYKYIF

SEQ ID NO: 527428 - protein, 10 aa, Homo sapiens
  CDR3 for beta chain variable domain of TCR clone 263714 (TRBV2, TRBJ2-4)
CASRGSIQYF

SEQ ID NO: 527429 - protein, 15 aa, Homo sapiens
  CDR3 for alpha chain variable domain of TCR clone 263715 (TRAV2, TRAJ32)
CAVANYGGATNKLVF

SEQ ID NO: 527430 - protein, 15 aa, Homo sapiens
  CDR3 for beta chain variable domain of TCR clone 263715 (TRBV7-7, TRBJ2-5)
CASSQLERAEETQYF

SEQ ID NO: 527431 - protein, 15 aa, Homo sapiens
  CDR3 for alpha chain variable domain of TCR clone 263716 (TRAV17, TRAJ57)
CATGPSQGGSEKLVF

SEQ ID NO: 527432 - protein, 11 aa, Homo sapiens
  CDR3 for beta chain variable domain of TCR clone 263716 (TRBV29-1, TRBJ2-5)
CIEDRTGTQYF

SEQ ID NO: 527433 - protein, 15 aa, Homo sapiens
  CDR3 for alpha chain variable domain of TCR clone 263717 (TRAV17, TRAJ35)
CATAFVIGFGNVLHS

SEQ ID NO: 527434 - protein, 15 aa, Homo sapiens
  CDR3 for beta chain variable domain of TCR clone 263717 (TRBV7-9, TRBJ2-7)
CASSLALAEAYEQYF

SEQ ID NO: 527435 - protein, 16 aa, Homo sapiens
  CDR3 for alpha chain variable domain of TCR clone 263718 (TRAV12-2, TRAJ45)
CAVNRNPGGGADGLTF

SEQ ID NO: 527436 - protein, 12 aa, Homo sapiens
  CDR3 for beta chain variable domain of TCR clone 263718 (TRBV6-1, TRBJ2-5)
CASSEGRETQYF

SEQ ID NO: 527437 - protein, 13 aa, Homo sapiens
  CDR3 for alpha chain variable domain of TCR clone 263719 (TRAV3, TRAJ5)
CAVRDTGRRALTF

SEQ ID NO: 527438 - protein, 12 aa, Homo sapiens
  CDR3 for beta chain variable domain of TCR clone 263719 (TRBV7-2, TRBJ1-6)
CASSLSSSALHF

SEQ ID NO: 527439 - protein, 18 aa, Homo sapiens
  CDR3 for alpha chain variable domain of TCR clone 263720 (TRAV35, TRAJ28)
CAGHNYLLSGAGSYQLTF

SEQ ID NO: 527440 - protein, 12 aa, Homo sapiens
  CDR3 for beta chain variable domain of TCR clone 263720 (TRBV7-9, TRBJ1-1)
CASSLEGTEAFF

SEQ ID NO: 527441 - protein, 16 aa, Homo sapiens
  CDR3 for alpha chain variable domain of TCR clone 263721 (TRAV30, TRAJ24)
CGTEIVDADSWGKSQF

SEQ ID NO: 527442 - protein, 15 aa, Homo sapiens
  CDR3 for beta chain variable domain of TCR clone 263721 (TRBV6-3, TRBJ2-2)
CASSFLATLTGELFF

SEQ ID NO: 527443 - protein, 13 aa, Homo sapiens
  CDR3 for alpha chain variable domain of TCR clone 263722 (TRAV39, TRAJ58)
CAGEETSGSRLTF

SEQ ID NO: 527444 - protein, 16 aa, Homo sapiens
  CDR3 for beta chain variable domain of TCR clone 263722 (TRBV28, TRBJ2-7)
CASSLFFETGGPEQYF

SEQ ID NO: 527445 - protein, 13 aa, Homo sapiens
  CDR3 for alpha chain variable domain of TCR clone 263723 (TRAV30, TRAJ49)
CGTEWDHREPVLF

SEQ ID NO: 527446 - protein, 14 aa, Homo sapiens
  CDR3 for beta chain variable domain of TCR clone 263723 (TRBV19, TRBJ2-1)
CASGKSTQYNEQFF

SEQ ID NO: 527447 - protein, 15 aa, Homo sapiens
  CDR3 for alpha chain variable domain of TCR clone 263724 (TRAV12-3, TRAJ6)
CAMSATTGGSYIPTF

SEQ ID NO: 527448 - protein, 14 aa, Homo sapiens
  CDR3 for beta chain variable domain of TCR clone 263724 (TRBV15, TRBJ1-4)
CATSGQGRDEKLFF

SEQ ID NO: 527449 - protein, 13 aa, Homo sapiens
  CDR3 for alpha chain variable domain of TCR clone 263725 (TRAV1-2, TRAJ13)
CAVNSGGYPKVTF

SEQ ID NO: 527450 - protein, 14 aa, Homo sapiens
  CDR3 for beta chain variable domain of TCR clone 263725 (TRBV4-1, TRBJ1-5)
CASSPKGDNQPQHF

SEQ ID NO: 527451 - protein, 12 aa, Homo sapiens
  CDR3 for alpha chain variable domain of TCR clone 263726 (TRAV12-3, TRAJ5)
CAMDTGRRALTF

SEQ ID NO: 527452 - protein, 13 aa, Homo sapiens
  CDR3 for beta chain variable domain of TCR clone 263726 (TRBV7-7, TRBJ2-2)
CASSLTRAGELFF

SEQ ID NO: 527453 - protein, 15 aa, Homo sapiens
  CDR3 for alpha chain variable domain of TCR clone 263727 (TRAV21, TRAJ53)
CSTLNSGGSNYKLTF

SEQ ID NO: 527454 - protein, 13 aa, Homo sapiens
  CDR3 for beta chain variable domain of TCR clone 263727 (TRBV7-9, TRBJ2-3)
CASSPGSTDTQYF

SEQ ID NO: 527455 - protein, 17 aa, Homo sapiens
  CDR3 for alpha chain variable domain of TCR clone 263728 (TRAV8-1, TRAJ42)
CAVNSPYYGGSQGNLIF

SEQ ID NO: 527456 - protein, 16 aa, Homo sapiens
  CDR3 for beta chain variable domain of TCR clone 263728 (TRBV13, TRBJ2-2)
CASSPRTGEHTGELFF

SEQ ID NO: 527457 - protein, 13 aa, Homo sapiens
  CDR3 for alpha chain variable domain of TCR clone 263729 (TRAV13-2, TRAJ13)
CVERPGGYQKVTF

SEQ ID NO: 527458 - protein, 16 aa, Homo sapiens
  CDR3 for beta chain variable domain of TCR clone 263729 (TRBV18, TRBJ2-5)
CASSPPSSGGAKTQYF

SEQ ID NO: 527459 - protein, 15 aa, Homo sapiens
  CDR3 for alpha chain variable domain of TCR clone 263730 (TRAV3, TRAJ9)
CAVRDSNTGGFKTIF

SEQ ID NO: 527460 - protein, 13 aa, Homo sapiens
  CDR3 for beta chain variable domain of TCR clone 263730 (TRBV10-3, TRBJ2-7)
CASKLAVNYEQYF

SEQ ID NO: 527461 - protein, 17 aa, Homo sapiens
  CDR3 for alpha chain variable domain of TCR clone 263731 (TRAV4, TRAJ13)
CLVGVQGSSGGYQKGTF

SEQ ID NO: 527462 - protein, 15 aa, Homo sapiens
  CDR3 for beta chain variable domain of TCR clone 263731 (TRBV6-3, TRBJ2-7)
CASSSPGTVFYEQYF

SEQ ID NO: 527463 - protein, 14 aa, Homo sapiens
  CDR3 for alpha chain variable domain of TCR clone 263732 (TRAV12-2, TRAJ13)
CAVKKTGGYQKVTF

SEQ ID NO: 527464 - protein, 15 aa, Homo sapiens
  CDR3 for beta chain variable domain of TCR clone 263732 (TRBV5-1, TRBJ2-1)
CVSSPPRAPYNEQFF

SEQ ID NO: 527465 - protein, 15 aa, Homo sapiens
  CDR3 for alpha chain variable domain of TCR clone 263733 (TRAV17, TRAJ56)
CATDANTGANSKLTF

SEQ ID NO: 527466 - protein, 14 aa, Homo sapiens
  CDR3 for beta chain variable domain of TCR clone 263733 (TRBV19, TRBJ1-5)
CASSLGTGGQTQHL

SEQ ID NO: 527467 - protein, 10 aa, Homo sapiens
  CDR3 for alpha chain variable domain of TCR clone 263734 (TRAV12-2, TRAJ32)
CAVNLGQVVL

SEQ ID NO: 527468 - protein, 13 aa, Homo sapiens
  CDR3 for beta chain variable domain of TCR clone 263734 (TRBV9, TRBJ2-2)
CASSPRPAGELFF

SEQ ID NO: 527469 - protein, 15 aa, Homo sapiens
  CDR3 for alpha chain variable domain of TCR clone 263735 (TRAV35, TRAJ20)
CAGQLVGSNDYKISF

SEQ ID NO: 527470 - protein, 13 aa, Homo sapiens
  CDR3 for beta chain variable domain of TCR clone 263735 (TRBV19, TRBJ2-7)
CASSKTGTHEQYF

SEQ ID NO: 527471 - protein, 16 aa, Homo sapiens
  CDR3 for alpha chain variable domain of TCR clone 263736 (TRAV8-3, TRAJ13)
CAVGAYPSGGYQKVIF

SEQ ID NO: 527472 - protein, 15 aa, Homo sapiens
  CDR3 for beta chain variable domain of TCR clone 263736 (TRBV19, TRBJ1-5)
CANSIVWADNQPQHF

SEQ ID NO: 527473 - protein, 17 aa, Homo sapiens
  CDR3 for alpha chain variable domain of TCR clone 263737 (TRAV38-1, TRAJ28)
CAFMRPTSGAGSYQLTF

SEQ ID NO: 527474 - protein, 15 aa, Homo sapiens
  CDR3 for beta chain variable domain of TCR clone 263737 (TRBV5-1, TRBJ2-4)
CASSLGGGGSYIQYF

SEQ ID NO: 527475 - protein, 14 aa, Homo sapiens
  CDR3 for alpha chain variable domain of TCR clone 263738 (TRAV8-4, TRAJ49)
CAVSESNTGNQFYF

SEQ ID NO: 527476 - protein, 14 aa, Homo sapiens
  CDR3 for beta chain variable domain of TCR clone 263738 (TRBV7-9, TRBJ2-1)
CASSPRDSLYEQFF

SEQ ID NO: 527477 - protein, 12 aa, Homo sapiens
  CDR3 for alpha chain variable domain of TCR clone 263739 (TRAV1-1, TRAJ8)
CAGGTGFQKLVF

SEQ ID NO: 527478 - protein, 15 aa, Homo sapiens
  CDR3 for beta chain variable domain of TCR clone 263739 (TRBV5-1, TRBJ1-1)
CASSSTTGTNTEAFF

SEQ ID NO: 527479 - protein, 15 aa, Homo sapiens
  CDR3 for alpha chain variable domain of TCR clone 263740 (TRAV12-2, TRAJ23)
CAVNTLYNQGGKLIF

SEQ ID NO: 527480 - protein, 14 aa, Homo sapiens
  CDR3 for beta chain variable domain of TCR clone 263740 (TRBV2, TRBJ2-1)
CASRTGSSYNEQFF

SEQ ID NO: 527481 - protein, 12 aa, Homo sapiens
  CDR3 for alpha chain variable domain of TCR clone 263741 (TRAV16, TRAJ27)
CALNHQCRQNNL

SEQ ID NO: 527482 - protein, 14 aa, Homo sapiens
  CDR3 for beta chain variable domain of TCR clone 263741 (TRBV11-2, TRBJ1-5)
CASSLDRGRQPQHF

SEQ ID NO: 527483 - protein, 15 aa, Homo sapiens
  CDR3 for alpha chain variable domain of TCR clone 263742 (TRAV34, TRAJ38)
CGADFTPGNNRKLIW

SEQ ID NO: 527484 - protein, 16 aa, Homo sapiens
  CDR3 for beta chain variable domain of TCR clone 263742 (TRBV6-3, TRBJ1-2)
CASSYSRRASNYGYTF

SEQ ID NO: 527485 - protein, 18 aa, Homo sapiens
  CDR3 for alpha chain variable domain of TCR clone 263743 (TRAV26-2, TRAJ32)
CILRAPLNYGGATNKLLF

SEQ ID NO: 527486 - protein, 13 aa, Homo sapiens
  CDR3 for beta chain variable domain of TCR clone 263743 (TRBV7-3, TRBJ2-1)
CASSLWPYNEQFF

SEQ ID NO: 527487 - protein, 12 aa, Homo sapiens
  CDR3 for alpha chain variable domain of TCR clone 263744 (TRAV26-1, TRAJ26)
CIVFIYGQNFVF

SEQ ID NO: 527488 - protein, 13 aa, Homo sapiens
  CDR3 for beta chain variable domain of TCR clone 263744 (TRBV27, TRBJ1-1)
CASSLSIVAEASF

SEQ ID NO: 527489 - protein, 16 aa, Homo sapiens
  CDR3 for alpha chain variable domain of TCR clone 263745 (TRAV30, TRAJ24)
CGTEIVDADSWGKFQI

SEQ ID NO: 527490 - protein, 14 aa, Homo sapiens
  CDR3 for beta chain variable domain of TCR clone 263745 (TRBV12-5, TRBJ2-5)
CASGSRTHQETQDF

SEQ ID NO: 527491 - protein, 14 aa, Homo sapiens
  CDR3 for alpha chain variable domain of TCR clone 263746 (TRAV29/DV5, TRAJ20)
CAASAPIEDYKLSF

SEQ ID NO: 527492 - protein, 12 aa, Homo sapiens
  CDR3 for beta chain variable domain of TCR clone 263746 (TRBV11-2, TRBJ2-1)
CASSPGNNEQFF

SEQ ID NO: 527493 - protein, 14 aa, Homo sapiens
  CDR3 for alpha chain variable domain of TCR clone 263747 (TRAV1-2, TRAJ8)
CAVREDTGSQKLVF

SEQ ID NO: 527494 - protein, 16 aa, Homo sapiens
  CDR3 for beta chain variable domain of TCR clone 263747 (TRBV19, TRBJ2-1)
CASSKAGPSSYNEQFF

SEQ ID NO: 527495 - protein, 11 aa, Homo sapiens
  CDR3 for alpha chain variable domain of TCR clone 263748 (TRAV17, TRAJ43)
CATDVTGDLRF

SEQ ID NO: 527496 - protein, 14 aa, Homo sapiens
  CDR3 for beta chain variable domain of TCR clone 263748 (TRBV12-4, TRBJ1-1)
CASRPGQGRTEAFF

SEQ ID NO: 527497 - protein, 15 aa, Homo sapiens
  CDR3 for alpha chain variable domain of TCR clone 263749 (TRAV19, TRAJ9)
CALSLPDTGGFKTIF

SEQ ID NO: 527498 - protein, 17 aa, Homo sapiens
  CDR3 for beta chain variable domain of TCR clone 263749 (TRBV20-1, TRBJ2-1)
CSASDPLAGVWDNEQFF

SEQ ID NO: 527499 - protein, 12 aa, Homo sapiens
  CDR3 for alpha chain variable domain of TCR clone 263750 (TRAV36/DV7, TRAJ37)
CACYGNTGKLIF

SEQ ID NO: 527500 - protein, 14 aa, Homo sapiens
  CDR3 for beta chain variable domain of TCR clone 263750 (TRBV6-3, TRBJ1-4)
CASSGQSLNDKLFF

SEQ ID NO: 527501 - protein, 12 aa, Homo sapiens
  CDR3 for alpha chain variable domain of TCR clone 263751 (TRAV12-3, TRAJ48)
CAMRIGNEKLTF

SEQ ID NO: 527502 - protein, 12 aa, Homo sapiens
  CDR3 for beta chain variable domain of TCR clone 263751 (TRBV13, TRBJ2-7)
CASSSQAYEQYF

SEQ ID NO: 527503 - protein, 11 aa, Homo sapiens
  CDR3 for alpha chain variable domain of TCR clone 263752 (TRAV12-3, TRAJ27)
CAMANAGKSTF

SEQ ID NO: 527504 - protein, 16 aa, Homo sapiens
  CDR3 for beta chain variable domain of TCR clone 263752 (TRBV7-7, TRBJ2-1)
CASSLASGTSYNEQFF

SEQ ID NO: 527505 - protein, 11 aa, Homo sapiens
  CDR3 for alpha chain variable domain of TCR clone 263753 (TRAV1-2, TRAJ20)
CAVANDYKLSF

SEQ ID NO: 527506 - protein, 13 aa, Homo sapiens
  CDR3 for beta chain variable domain of TCR clone 263753 (TRBV29-1, TRBJ1-1)
CSVGDSRNTEAFF

SEQ ID NO: 527507 - protein, 13 aa, Homo sapiens
  CDR3 for alpha chain variable domain of TCR clone 263754 (TRAV9-2, TRAJ21)
CALSLYNFNKFYF

SEQ ID NO: 527508 - protein, 15 aa, Homo sapiens
  CDR3 for beta chain variable domain of TCR clone 263754 (TRBV18, TRBJ2-6)
CASSPSYAGANVLTF

SEQ ID NO: 527509 - protein, 15 aa, Homo sapiens
  CDR3 for alpha chain variable domain of TCR clone 263755 (TRAV2, TRAJ32)
CAVANYGGATNKLIF

SEQ ID NO: 527510 - protein, 14 aa, Homo sapiens
  CDR3 for beta chain variable domain of TCR clone 263755 (TRBV28, TRBJ2-7)
CASKPGPDLYEQYF

SEQ ID NO: 527511 - protein, 14 aa, Homo sapiens
  CDR3 for alpha chain variable domain of TCR clone 263756 (TRAV26-1, TRAJ38)
CIADNTGNNRKRIW

SEQ ID NO: 527512 - protein, 13 aa, Homo sapiens
  CDR3 for beta chain variable domain of TCR clone 263756 (TRBV20-1, TRBJ1-1)
CSARGGGNTEAFF

SEQ ID NO: 527513 - protein, 15 aa, Homo sapiens
  CDR3 for alpha chain variable domain of TCR clone 263757 (TRAV4, TRAJ39)
CLVGPNNNAGNMPPF

SEQ ID NO: 527514 - protein, 15 aa, Homo sapiens
  CDR3 for beta chain variable domain of TCR clone 263757 (TRBV5-1, TRBJ2-1)
CASSPPRAPYNEQFF

SEQ ID NO: 527515 - protein, 14 aa, Homo sapiens
  CDR3 for alpha chain variable domain of TCR clone 263758 (TRAV2, TRAJ9)
CAVEARSGGFKTIF

SEQ ID NO: 527516 - protein, 11 aa, Homo sapiens
  CDR3 for beta chain variable domain of TCR clone 263758 (TRBV7-9, TRBJ2-5)
CASSLGETQYF

SEQ ID NO: 527517 - protein, 16 aa, Homo sapiens
  CDR3 for alpha chain variable domain of TCR clone 263759 (TRAV12-3, TRAJ53)
CAMSPGSGGSNYKLTF

SEQ ID NO: 527518 - protein, 11 aa, Homo sapiens
  CDR3 for beta chain variable domain of TCR clone 263759 (TRBV29-1, TRBJ2-5)
CSEYRTGTQCF

SEQ ID NO: 527519 - protein, 14 aa, Homo sapiens
  CDR3 for alpha chain variable domain of TCR clone 263760 (TRAV8-2, TRAJ4)
CVVSPSGGYNKLIF

SEQ ID NO: 527520 - protein, 14 aa, Homo sapiens
  CDR3 for beta chain variable domain of TCR clone 263760 (TRBV11-2, TRBJ1-5)
CVSSLDRGRQPQNF

SEQ ID NO: 527521 - protein, 14 aa, Homo sapiens
  CDR3 for alpha chain variable domain of TCR clone 263761 (TRAV1-2, TRAJ8)
CAVREDTGFQKLVF

SEQ ID NO: 527522 - protein, 14 aa, Homo sapiens
  CDR3 for beta chain variable domain of TCR clone 263761 (TRBV7-9, TRBJ2-5)
CASSSDTAQETQYF

SEQ ID NO: 527523 - protein, 14 aa, Homo sapiens
  CDR3 for alpha chain variable domain of TCR clone 263762 (TRAV8-3, TRAJ4)
CAVGASGGYNKLIF

SEQ ID NO: 527524 - protein, 17 aa, Homo sapiens
  CDR3 for beta chain variable domain of TCR clone 263762 (TRBV11-2, TRBJ2-1)
CASSLSPPGVEYNEQFF

SEQ ID NO: 527525 - protein, 12 aa, Homo sapiens
  CDR3 for alpha chain variable domain of TCR clone 263763 (TRAV27, TRAJ9)
CAGESGGFKTIF

SEQ ID NO: 527526 - protein, 14 aa, Homo sapiens
  CDR3 for beta chain variable domain of TCR clone 263763 (TRBV6-1, TRBJ2-1)
CASAKDGSYNEQFF

SEQ ID NO: 527527 - protein, 16 aa, Homo sapiens
  CDR3 for alpha chain variable domain of TCR clone 263764 (TRAV3, TRAJ37)
CAVRGKGSGNTGKLIF

SEQ ID NO: 527528 - protein, 14 aa, Homo sapiens
  CDR3 for beta chain variable domain of TCR clone 263764 (TRBV7-3, TRBJ1-5)
RASSFSGCNQPQHF

SEQ ID NO: 527529 - protein, 14 aa, Homo sapiens
  CDR3 for alpha chain variable domain of TCR clone 263765 (TRAV17, TRAJ56)
CATVPAGANSKLTF

SEQ ID NO: 527530 - protein, 16 aa, Homo sapiens
  CDR3 for beta chain variable domain of TCR clone 263765 (TRBV5-1, TRBJ2-3)
CASSLGLAVYTDTQYF

SEQ ID NO: 527531 - protein, 14 aa, Homo sapiens
  CDR3 for alpha chain variable domain of TCR clone 263766 (TRAV12-2, TRAJ45)
CAVNKGGGADGLTF

SEQ ID NO: 527532 - protein, 19 aa, Homo sapiens
  CDR3 for beta chain variable domain of TCR clone 263766 (TRBV7-2, TRBJ2-3)
CASSFVLSAYISRPDTQYF

SEQ ID NO: 527533 - protein, 15 aa, Homo sapiens
  CDR3 for alpha chain variable domain of TCR clone 263767 (TRAV3, TRAJ3)
CAVRDMSSSASKIIF

SEQ ID NO: 527534 - protein, 14 aa, Homo sapiens
  CDR3 for beta chain variable domain of TCR clone 263767 (TRBV19, TRBJ2-1)
CASPTFVLSGEQFF

SEQ ID NO: 527535 - protein, 14 aa, Homo sapiens
  CDR3 for alpha chain variable domain of TCR clone 263768 (TRAV13-2, TRAJ6)
CAERGSGGSYIPKF

SEQ ID NO: 527536 - protein, 13 aa, Homo sapiens
  CDR3 for beta chain variable domain of TCR clone 263768 (TRBV19, TRBJ1-2)
CASSQGQVYGYTF

SEQ ID NO: 527537 - protein, 15 aa, Homo sapiens
  CDR3 for alpha chain variable domain of TCR clone 263769 (TRAV21, TRAJ53)
CAVRQSGGSNYKLTF

SEQ ID NO: 527538 - protein, 16 aa, Homo sapiens
  CDR3 for beta chain variable domain of TCR clone 263769 (TRBV12-5, TRBJ2-5)
CASGPRTSGNQETQYF

SEQ ID NO: 527539 - protein, 17 aa, Homo sapiens
  CDR3 for alpha chain variable domain of TCR clone 263770 (TRAV3, TRAJ12)
CAMRDGGRMDSSYKLIF

SEQ ID NO: 527540 - protein, 14 aa, Homo sapiens
  CDR3 for beta chain variable domain of TCR clone 263770 (TRBV12-4, TRBJ1-3)
CASTLTGAGNTIYF

SEQ ID NO: 527541 - protein, 14 aa, Homo sapiens
  CDR3 for alpha chain variable domain of TCR clone 263771 (TRAV16, TRAJ17)
CALSGRAAGNKLTF

SEQ ID NO: 527542 - protein, 17 aa, Homo sapiens
  CDR3 for beta chain variable domain of TCR clone 263771 (TRBV18, TRBJ2-6)
RASSPRQGAVGANVLTF

SEQ ID NO: 527543 - protein, 18 aa, Homo sapiens
  CDR3 for alpha chain variable domain of TCR clone 263772 (TRAV21, TRAJ52)
CAVRHSPAGGTSYGKLTF

SEQ ID NO: 527544 - protein, 17 aa, Homo sapiens
  CDR3 for beta chain variable domain of TCR clone 263772 (TRBV13, TRBJ2-3)
CASSLSRVAGGKNTQYF

SEQ ID NO: 527545 - protein, 16 aa, Homo sapiens
  CDR3 for alpha chain variable domain of TCR clone 263773 (TRAV17, TRAJ22)
CATGPISSGSARQLTF

SEQ ID NO: 527546 - protein, 14 aa, Homo sapiens
  CDR3 for beta chain variable domain of TCR clone 263773 (TRBV25-1, TRBJ1-1)
CASTHLGGNTEAFF

SEQ ID NO: 527547 - protein, 13 aa, Homo sapiens
  CDR3 for alpha chain variable domain of TCR clone 263774 (TRAV38-1, TRAJ42)
LARWGGSQGNLIF

SEQ ID NO: 527548 - protein, 17 aa, Homo sapiens
  CDR3 for beta chain variable domain of TCR clone 263774 (TRBV4-2, TRBJ1-1)
CASTQFGGGSGNTEAFF

SEQ ID NO: 527549 - protein, 14 aa, Homo sapiens
  CDR3 for alpha chain variable domain of TCR clone 263775 (TRAV12-2, TRAJ44)
CAVNPAGTASKLTF

SEQ ID NO: 527550 - protein, 18 aa, Homo sapiens
  CDR3 for beta chain variable domain of TCR clone 263775 (TRBV7-9, TRBJ2-1)
CASSLAVSGTSGRNEQFF

SEQ ID NO: 527551 - protein, 15 aa, Homo sapiens
  CDR3 for alpha chain variable domain of TCR clone 263776 (TRAV23/DV6, TRAJ9)
CSKHRGNTGGFKTIF

SEQ ID NO: 527552 - protein, 15 aa, Homo sapiens
  CDR3 for beta chain variable domain of TCR clone 263776 (TRBV6-3, TRBJ2-7)
CASSSPGTVLYEQYF

SEQ ID NO: 527553 - protein, 12 aa, Homo sapiens
  CDR3 for alpha chain variable domain of TCR clone 263777 (TRAV24, TRAJ30)
CAFGNRDDKIIF

SEQ ID NO: 527554 - protein, 12 aa, Homo sapiens
  CDR3 for beta chain variable domain of TCR clone 263777 (TRBV14, TRBJ2-7)
CASSSLKGEQYF

SEQ ID NO: 527555 - protein, 18 aa, Homo sapiens
  CDR3 for alpha chain variable domain of TCR clone 263778 (TRAV21, TRAJ52)
CAVRPSPAVGTSYGKLTF

SEQ ID NO: 527556 - protein, 17 aa, Homo sapiens
  CDR3 for beta chain variable domain of TCR clone 263778 (TRBV13, TRBJ2-3)
CASSLSRVAEGRNTQYF

SEQ ID NO: 527557 - protein, 16 aa, Homo sapiens
  CDR3 for alpha chain variable domain of TCR clone 263779 (TRAV12-3, TRAJ53)
CAMSPGSGGSNYKLTF

SEQ ID NO: 527558 - protein, 17 aa, Homo sapiens
  CDR3 for beta chain variable domain of TCR clone 263779 (TRBV7-3, TRBJ2-3)
RASSLVKRMRGADTQYF

SEQ ID NO: 527559 - protein, 11 aa, Homo sapiens
  CDR3 for alpha chain variable domain of TCR clone 263780 (TRAV12-1, TRAJ30)
CVVNGQDKIIF

SEQ ID NO: 527560 - protein, 16 aa, Homo sapiens
  CDR3 for beta chain variable domain of TCR clone 263780 (TRBV2, TRBJ1-3)
CASSRTGGSTGNTIYF

SEQ ID NO: 527561 - protein, 14 aa, Homo sapiens
  CDR3 for alpha chain variable domain of TCR clone 263781 (TRAV12-2, TRAJ9)
CAMSPNTGGFKTIF

SEQ ID NO: 527562 - protein, 11 aa, Homo sapiens
  CDR3 for beta chain variable domain of TCR clone 263781 (TRBV29-1, TRBJ2-5)
CSEDRTGTQYF

SEQ ID NO: 527563 - protein, 13 aa, Homo sapiens
  CDR3 for alpha chain variable domain of TCR clone 263782 (TRAV12-1, TRAJ13)
CVVALLGYQKVTF

SEQ ID NO: 527564 - protein, 13 aa, Homo sapiens
  CDR3 for beta chain variable domain of TCR clone 263782 (TRBV20-1, TRBJ2-5)
CSAILIGQETQYF

SEQ ID NO: 527565 - protein, 13 aa, Homo sapiens
  CDR3 for alpha chain variable domain of TCR clone 263783 (TRAV17, TRAJ9)
CATAITGGVKTIF

SEQ ID NO: 527566 - protein, 16 aa, Homo sapiens
  CDR3 for beta chain variable domain of TCR clone 263783 (TRBV15, TRBJ2-1)
CATSRNLAGGYNEQFF

SEQ ID NO: 527567 - protein, 14 aa, Homo sapiens
  CDR3 for alpha chain variable domain of TCR clone 263784 (TRAV17, TRAJ31)
CATVLRNNNARLIV

SEQ ID NO: 527568 - protein, 14 aa, Homo sapiens
  CDR3 for beta chain variable domain of TCR clone 263784 (TRBV12-4, TRBJ2-5)
CASSLWQKQETQYF

SEQ ID NO: 527569 - protein, 14 aa, Homo sapiens
  CDR3 for alpha chain variable domain of TCR clone 263785 (TRAV26-1, TRAJ26)
CIVRATFLGQNFSF

SEQ ID NO: 527570 - protein, 16 aa, Homo sapiens
  CDR3 for beta chain variable domain of TCR clone 263785 (TRBV12-4, TRBJ2-7)
CASRPTGTGPSYEQYF

SEQ ID NO: 527571 - protein, 16 aa, Homo sapiens
  CDR3 for alpha chain variable domain of TCR clone 263786 (TRAV12-3, TRAJ53)
CAMSPGSGGSNDKLTF

SEQ ID NO: 527572 - protein, 11 aa, Homo sapiens
  CDR3 for beta chain variable domain of TCR clone 263786 (TRBV29-1, TRBJ2-5)
CSEDRTGTQYS

SEQ ID NO: 527573 - protein, 15 aa, Homo sapiens
  CDR3 for alpha chain variable domain of TCR clone 263787 (TRAV26-1, TRAJ9)
FIVRESNTGGFKTIF

SEQ ID NO: 527574 - protein, 11 aa, Homo sapiens
  CDR3 for beta chain variable domain of TCR clone 263787 (TRBV7-6, TRBJ2-5)
CASSFQETQYF

SEQ ID NO: 527575 - protein, 15 aa, Homo sapiens
  CDR3 for alpha chain variable domain of TCR clone 263788 (TRAV12-2, TRAJ53)
CAVNRGGGSNYKLTF

SEQ ID NO: 527576 - protein, 14 aa, Homo sapiens
  CDR3 for beta chain variable domain of TCR clone 263788 (TRBV6-1, TRBJ1-3)
CASVQGGGGNTIYF

SEQ ID NO: 527577 - protein, 14 aa, Homo sapiens
  CDR3 for alpha chain variable domain of TCR clone 263789 (TRAV8-3, TRAJ13)
CAVGAQEGYQKVTS

SEQ ID NO: 527578 - protein, 13 aa, Homo sapiens
  CDR3 for beta chain variable domain of TCR clone 263789 (TRBV11-2, TRBJ2-5)
CASSATGEETQYF

SEQ ID NO: 527579 - protein, 14 aa, Homo sapiens
  CDR3 for alpha chain variable domain of TCR clone 263790 (TRAV38-1, TRAJ40)
CALRPTSGTYKYIF

SEQ ID NO: 527580 - protein, 14 aa, Homo sapiens
  CDR3 for beta chain variable domain of TCR clone 263790 (TRBV6-3, TRBJ1-1)
CASSYQRRDTEAFF

SEQ ID NO: 527581 - protein, 12 aa, Homo sapiens
  CDR3 for alpha chain variable domain of TCR clone 263791 (TRAV35, TRAJ49)
CAGWNTGNQFYF

SEQ ID NO: 527582 - protein, 16 aa, Homo sapiens
  CDR3 for beta chain variable domain of TCR clone 263791 (TRBV5-1, TRBJ2-2)
CASRLWDTTNTGELFF

SEQ ID NO: 527583 - protein, 13 aa, Homo sapiens
  CDR3 for alpha chain variable domain of TCR clone 263792 (TRAV36/DV7, TRAJ37)
CAVFSRNTGKLIF

SEQ ID NO: 527584 - protein, 15 aa, Homo sapiens
  CDR3 for beta chain variable domain of TCR clone 263792 (TRBV5-1, TRBJ2-2)
CASSSQGGNTGELFF

SEQ ID NO: 527585 - protein, 15 aa, Homo sapiens
  CDR3 for alpha chain variable domain of TCR clone 263793 (TRAV26-1, TRAJ29)
CIVRVEGSGNTPLVF

SEQ ID NO: 527586 - protein, 15 aa, Homo sapiens
  CDR3 for beta chain variable domain of TCR clone 263793 (TRBV5-1, TRBJ1-2)
CASSPGDRGSYGYTF

SEQ ID NO: 527587 - protein, 13 aa, Homo sapiens
  CDR3 for alpha chain variable domain of TCR clone 263794 (TRAV23/DV6, TRAJ49)
CAATLRPGNQFYF

SEQ ID NO: 527588 - protein, 14 aa, Homo sapiens
  CDR3 for beta chain variable domain of TCR clone 263794 (TRBV7-2, TRBJ2-6)
CASRQSSGANVLTF

SEQ ID NO: 527589 - protein, 16 aa, Homo sapiens
  CDR3 for alpha chain variable domain of TCR clone 263795 (TRAV8-3, TRAJ10)
CAVGPILTGGGNKLTF

SEQ ID NO: 527590 - protein, 16 aa, Homo sapiens
  CDR3 for beta chain variable domain of TCR clone 263795 (TRBV7-2, TRBJ2-5)
CASSSKWLSGQETQYC

SEQ ID NO: 527591 - protein, 14 aa, Homo sapiens
  CDR3 for alpha chain variable domain of TCR clone 263796 (TRAV12-2, TRAJ53)
CRDRGGGSNYKLTF

SEQ ID NO: 527592 - protein, 13 aa, Homo sapiens
  CDR3 for beta chain variable domain of TCR clone 263796 (TRBV3-1, TRBJ1-1)
CASSPGVITGAFF

SEQ ID NO: 527593 - protein, 14 aa, Homo sapiens
  CDR3 for alpha chain variable domain of TCR clone 263797 (TRAV12-3, TRAJ10)
SHLPLTGGGNKLTF

SEQ ID NO: 527594 - protein, 16 aa, Homo sapiens
  CDR3 for beta chain variable domain of TCR clone 263797 (TRBV6-1, TRBJ2-2)
CASSAFRGGDTGELFF

SEQ ID NO: 527595 - protein, 15 aa, Homo sapiens
  CDR3 for alpha chain variable domain of TCR clone 263798 (TRAV13-1, TRAJ42)
CAASIAGGSQGNLIF

SEQ ID NO: 527596 - protein, 15 aa, Homo sapiens
  CDR3 for beta chain variable domain of TCR clone 263798 (TRBV19, TRBJ2-1)
CASSIVRGEDREQFF

SEQ ID NO: 527597 - protein, 13 aa, Homo sapiens
  CDR3 for alpha chain variable domain of TCR clone 263799 (TRAV20, TRAJ37)
CAGCSSNSGKLIF

SEQ ID NO: 527598 - protein, 21 aa, Homo sapiens
  CDR3 for beta chain variable domain of TCR clone 263799 (TRBV4-2, TRBJ2-3)
PCSQKTRPCISVPAAPDTQYF

SEQ ID NO: 527599 - protein, 11 aa, Homo sapiens
  CDR3 for alpha chain variable domain of TCR clone 263800 (TRAV3, TRAJ21)
CAVGHFNKFYF

SEQ ID NO: 527600 - protein, 13 aa, Homo sapiens
  CDR3 for beta chain variable domain of TCR clone 263800 (TRBV7-9, TRBJ1-2)
CASSLKQNYGYSF

SEQ ID NO: 527601 - protein, 14 aa, Homo sapiens
  CDR3 for alpha chain variable domain of TCR clone 263801 (TRAV8-6, TRAJ9)
CAVSSYTGVFKTIF

SEQ ID NO: 527602 - protein, 15 aa, Homo sapiens
  CDR3 for beta chain variable domain of TCR clone 263801 (TRBV2, TRBJ1-2)
CASSESRTVNYGYTF

SEQ ID NO: 527603 - protein, 13 aa, Homo sapiens
  CDR3 for alpha chain variable domain of TCR clone 263802 (TRAV2, TRAJ15)
CAVEAQAGTALIF

SEQ ID NO: 527604 - protein, 14 aa, Homo sapiens
  CDR3 for beta chain variable domain of TCR clone 263802 (TRBV7-3, TRBJ2-1)
CASSLAGGTNEQFF

SEQ ID NO: 527605 - protein, 15 aa, Homo sapiens
  CDR3 for alpha chain variable domain of TCR clone 263803 (TRAV8-3, TRAJ45)
CASSYSGGGADGLTF

SEQ ID NO: 527606 - protein, 15 aa, Homo sapiens
  CDR3 for beta chain variable domain of TCR clone 263803 (TRBV20-1, TRBJ2-7)
CSARDRVSGMDEQYV

SEQ ID NO: 527607 - protein, 16 aa, Homo sapiens
  CDR3 for alpha chain variable domain of TCR clone 263804 (TRAV3, TRAJ37)
CAVRLHGTGKTGKLIF

SEQ ID NO: 527608 - protein, 17 aa, Homo sapiens
  CDR3 for beta chain variable domain of TCR clone 263804 (TRBV20-1, TRBJ2-1)
CSASSSGLAGSYNEQFF

SEQ ID NO: 527609 - protein, 14 aa, Homo sapiens
  CDR3 for alpha chain variable domain of TCR clone 263805 (TRAV27, TRAJ22)
CAGLPSGSARQLTF

SEQ ID NO: 527610 - protein, 17 aa, Homo sapiens
  CDR3 for beta chain variable domain of TCR clone 263805 (TRBV4-2, TRBJ1-1)
CASTQFGGGSGNTEAFF

SEQ ID NO: 527611 - protein, 16 aa, Homo sapiens
  CDR3 for alpha chain variable domain of TCR clone 263806 (TRAV3, TRAJ5)
CAVRNPMDTGRRALTF

SEQ ID NO: 527612 - protein, 16 aa, Homo sapiens
  CDR3 for beta chain variable domain of TCR clone 263806 (TRBV12-5, TRBJ2-5)
CASGPRTSGNQETQYF

SEQ ID NO: 527613 - protein, 10 aa, Homo sapiens
  CDR3 for alpha chain variable domain of TCR clone 263807 (TRAV12-3, TRAJ18)
CAMSAEAQPW

SEQ ID NO: 527614 - protein, 12 aa, Homo sapiens
  CDR3 for beta chain variable domain of TCR clone 263807 (TRBV11-2, TRBJ2-1)
CASSPGNNEQFF

SEQ ID NO: 527615 - protein, 13 aa, Homo sapiens
  CDR3 for alpha chain variable domain of TCR clone 263808 (TRAV35, TRAJ58)
CAGFETSGSRLTF

SEQ ID NO: 527616 - protein, 15 aa, Homo sapiens
  CDR3 for beta chain variable domain of TCR clone 263808 (TRBV20-1, TRBJ2-1)
CSARFSAGGLNEQFF

SEQ ID NO: 527617 - protein, 16 aa, Homo sapiens
  CDR3 for alpha chain variable domain of TCR clone 263809 (TRAV12-3, TRAJ53)
RAMSPGSGGSNYKLTF

SEQ ID NO: 527618 - protein, 11 aa, Homo sapiens
  CDR3 for beta chain variable domain of TCR clone 263809 (TRBV29-1, TRBJ2-5)
CTEDRTGTQYF

SEQ ID NO: 527619 - protein, 12 aa, Homo sapiens
  CDR3 for alpha chain variable domain of TCR clone 263810 (TRAV29/DV5, TRAJ49)
CAATDTGNQFDF

SEQ ID NO: 527620 - protein, 11 aa, Homo sapiens
  CDR3 for beta chain variable domain of TCR clone 263810 (TRBV12-4, TRBJ2-7)
CQQFRGYEQYF

SEQ ID NO: 527621 - protein, 14 aa, Homo sapiens
  CDR3 for alpha chain variable domain of TCR clone 263811 (TRAV12-3, TRAJ58)
CAMSTETSGSRLTF

SEQ ID NO: 527622 - protein, 13 aa, Homo sapiens
  CDR3 for beta chain variable domain of TCR clone 263811 (TRBV27, TRBJ2-3)
CASSWGRTDKQYF

SEQ ID NO: 527623 - protein, 11 aa, Homo sapiens
  CDR3 for alpha chain variable domain of TCR clone 263812 (TRAV4, TRAJ28)
NSGAGSYQLTF

SEQ ID NO: 527624 - protein, 14 aa, Homo sapiens
  CDR3 for beta chain variable domain of TCR clone 263812 (TRBV7-6, TRBJ2-4)
CASSPAPGSFLWYF

SEQ ID NO: 527625 - protein, 16 aa, Homo sapiens
  CDR3 for alpha chain variable domain of TCR clone 263813 (TRAV30, TRAJ24)
CGTEIVDADSWGKCQL

SEQ ID NO: 527626 - protein, 14 aa, Homo sapiens
  CDR3 for beta chain variable domain of TCR clone 263813 (TRBV12-5, TRBJ2-5)
CASGSRTHQETQYF

SEQ ID NO: 527627 - protein, 15 aa, Homo sapiens
  CDR3 for alpha chain variable domain of TCR clone 263814 (TRAV26-1, TRAJ23)
CIVRVLNNKGGKLIF

SEQ ID NO: 527628 - protein, 15 aa, Homo sapiens
  CDR3 for beta chain variable domain of TCR clone 263814 (TRBV11-3, TRBJ2-1)
CASSLAGQTYNEQFF

SEQ ID NO: 527629 - protein, 15 aa, Homo sapiens
  CDR3 for alpha chain variable domain of TCR clone 263815 (TRAV3, TRAJ22)
CAVRDRGGSARQMTF

SEQ ID NO: 527630 - protein, 16 aa, Homo sapiens
  CDR3 for beta chain variable domain of TCR clone 263815 (TRBV5-4, TRBJ2-3)
CASQQPGAGGSDTQYF

SEQ ID NO: 527631 - protein, 10 aa, Homo sapiens
  CDR3 for alpha chain variable domain of TCR clone 263816 (TRAV21, TRAJ31)
CAVDNARLMF

SEQ ID NO: 527632 - protein, 13 aa, Homo sapiens
  CDR3 for beta chain variable domain of TCR clone 263816 (TRBV11-2, TRBJ2-5)
CASSSTGEETQYF

SEQ ID NO: 527633 - protein, 12 aa, Homo sapiens
  CDR3 for alpha chain variable domain of TCR clone 263817 (TRAV12-3, TRAJ17)
CAMTLTGNKLAF

SEQ ID NO: 527634 - protein, 14 aa, Homo sapiens
  CDR3 for beta chain variable domain of TCR clone 263817 (TRBV7-3, TRBJ2-3)
CASSLLATSDTQDF

SEQ ID NO: 527635 - protein, 14 aa, Homo sapiens
  CDR3 for alpha chain variable domain of TCR clone 263818 (TRAV12-1, TRAJ9)
CVVNRRTGGFKTIF

SEQ ID NO: 527636 - protein, 16 aa, Homo sapiens
  CDR3 for beta chain variable domain of TCR clone 263818 (TRBV4-1, TRBJ2-3)
CASSQSTGGAEDTQYF

SEQ ID NO: 527637 - protein, 14 aa, Homo sapiens
  CDR3 for alpha chain variable domain of TCR clone 263819 (TRAV1-2, TRAJ16)
CAVNRFSDGQKLLF

SEQ ID NO: 527638 - protein, 14 aa, Homo sapiens
  CDR3 for beta chain variable domain of TCR clone 263819 (TRBV12-4, TRBJ1-1)
CASSLGTGGTEASF

SEQ ID NO: 527639 - protein, 12 aa, Homo sapiens
  CDR3 for alpha chain variable domain of TCR clone 263820 (TRAV23/DV6, TRAJ3)
CAASAPQQCFQD

SEQ ID NO: 527640 - protein, 17 aa, Homo sapiens
  CDR3 for beta chain variable domain of TCR clone 263820 (TRBV7-9, TRBJ2-3)
CASSPTVAGDLTDTQYF

SEQ ID NO: 527641 - protein, 14 aa, Homo sapiens
  CDR3 for alpha chain variable domain of TCR clone 263821 (TRAV1-2, TRAJ16)
CAVNRLSDGQKLLF

SEQ ID NO: 527642 - protein, 14 aa, Homo sapiens
  CDR3 for beta chain variable domain of TCR clone 263821 (TRBV11-1, TRBJ2-7)
CASSFRQGSYEQYF

SEQ ID NO: 527643 - protein, 15 aa, Homo sapiens
  CDR3 for alpha chain variable domain of TCR clone 263822 (TRAV26-1, TRAJ22)
CIVRVSFWFCKATDL

SEQ ID NO: 527644 - protein, 16 aa, Homo sapiens
  CDR3 for beta chain variable domain of TCR clone 263822 (TRBV27, TRBJ2-7)
CASSSERRDSAYEQYF

SEQ ID NO: 527645 - protein, 15 aa, Homo sapiens
  CDR3 for alpha chain variable domain of TCR clone 263823 (TRAV21, TRAJ24)
CAARSSTDSWGKLQF

SEQ ID NO: 527646 - protein, 14 aa, Homo sapiens
  CDR3 for beta chain variable domain of TCR clone 263823 (TRBV6-1, TRBJ2-5)
CASSGSGGAETQYF

SEQ ID NO: 527647 - protein, 14 aa, Homo sapiens
  CDR3 for alpha chain variable domain of TCR clone 263824 (TRAV1-2, TRAJ16)
CAVNRFSDGQKLLF

SEQ ID NO: 527648 - protein, 13 aa, Homo sapiens
  CDR3 for beta chain variable domain of TCR clone 263824 (TRBV20-1, TRBJ1-1)
CSAPPGGQTEAFF

SEQ ID NO: 527649 - protein, 12 aa, Homo sapiens
  CDR3 for alpha chain variable domain of TCR clone 263825 (TRAV21, TRAJ12)
CAVMDSSYRLIF

SEQ ID NO: 527650 - protein, 16 aa, Homo sapiens
  CDR3 for beta chain variable domain of TCR clone 263825 (TRBV7-9, TRBJ2-5)
CASRLEIGTRKETQYF

SEQ ID NO: 527651 - protein, 13 aa, Homo sapiens
  CDR3 for alpha chain variable domain of TCR clone 263826 (TRAV1-2, TRAJ12)
CAVSMDSSYKLIF

SEQ ID NO: 527652 - protein, 13 aa, Homo sapiens
  CDR3 for beta chain variable domain of TCR clone 263826 (TRBV28, TRBJ2-7)
CASSPSGTYEQYF

SEQ ID NO: 527653 - protein, 21 aa, Homo sapiens
  CDR3 for alpha chain variable domain of TCR clone 263827 (TRAV26-1, TRAJ17)
CCVLLHRQSSGSKAAGNKLTF

SEQ ID NO: 527654 - protein, 14 aa, Homo sapiens
  CDR3 for beta chain variable domain of TCR clone 263827 (TRBV28, TRBJ1-2)
CARRIQGANYGYTF

SEQ ID NO: 527655 - protein, 15 aa, Homo sapiens
  CDR3 for alpha chain variable domain of TCR clone 263828 (TRAV16, TRAJ17)
CALSGNKAAGNKLPF

SEQ ID NO: 527656 - protein, 16 aa, Homo sapiens
  CDR3 for beta chain variable domain of TCR clone 263828 (TRBV7-6, TRBJ1-6)
CASSSLPAGEYSPLHF

SEQ ID NO: 527657 - protein, 16 aa, Homo sapiens
  CDR3 for alpha chain variable domain of TCR clone 263829 (TRAV16, TRAJ52)
CALSAAGGTSYGKLTF

SEQ ID NO: 527658 - protein, 16 aa, Homo sapiens
  CDR3 for beta chain variable domain of TCR clone 263829 (TRBV5-4, TRBJ2-3)
CASQQPGAGGADTQYF

SEQ ID NO: 527659 - protein, 11 aa, Homo sapiens
  CDR3 for alpha chain variable domain of TCR clone 263830 (TRAV2, TRAJ13)
CASVGYQKVTF

SEQ ID NO: 527660 - protein, 17 aa, Homo sapiens
  CDR3 for beta chain variable domain of TCR clone 263830 (TRBV13, TRBJ2-3)
CASSLSRVAGGRNTQYF

SEQ ID NO: 527661 - protein, 14 aa, Homo sapiens
  CDR3 for alpha chain variable domain of TCR clone 263831 (TRAV12-3, TRAJ53)
CGATSGGSDYKLTF

SEQ ID NO: 527662 - protein, 13 aa, Homo sapiens
  CDR3 for beta chain variable domain of TCR clone 263831 (TRBV19, TRBJ1-5)
CASSTQDGQPQHF

SEQ ID NO: 527663 - protein, 10 aa, Homo sapiens
  CDR3 for alpha chain variable domain of TCR clone 263832 (TRAV13-1, TRAJ27)
CAPLARQNNL

SEQ ID NO: 527664 - protein, 13 aa, Homo sapiens
  CDR3 for beta chain variable domain of TCR clone 263832 (TRBV7-3, TRBJ1-1)
CASSQDWGAEAFF

SEQ ID NO: 527665 - protein, 10 aa, Homo sapiens
  CDR3 for alpha chain variable domain of TCR clone 263833 (TRAV13-1, TRAJ27)
CAPLARQINL

SEQ ID NO: 527666 - protein, 15 aa, Homo sapiens
  CDR3 for beta chain variable domain of TCR clone 263833 (TRBV28, TRBJ2-5)
CASSPPWSYQETQYF

SEQ ID NO: 527667 - protein, 17 aa, Homo sapiens
  CDR3 for alpha chain variable domain of TCR clone 263834 (TRAV23/DV6, TRAJ57)
CAASSTLSQGGSEKLVF

SEQ ID NO: 527668 - protein, 14 aa, Homo sapiens
  CDR3 for beta chain variable domain of TCR clone 263834 (TRBV25-1, TRBJ1-1)
WASTHLGGNTEAFF

SEQ ID NO: 527669 - protein, 13 aa, Homo sapiens
  CDR3 for alpha chain variable domain of TCR clone 263835 (TRAV2, TRAJ21)
CAVEDLNFNKFYF

SEQ ID NO: 527670 - protein, 18 aa, Homo sapiens
  CDR3 for beta chain variable domain of TCR clone 263835 (TRBV11-2, TRBJ2-3)
CASSLGGASRGAPNTQYF

SEQ ID NO: 527671 - protein, 13 aa, Homo sapiens
  CDR3 for alpha chain variable domain of TCR clone 263836 (TRAV12-3, TRAJ53)
CAMRGGSNYKLTF

SEQ ID NO: 527672 - protein, 13 aa, Homo sapiens
  CDR3 for beta chain variable domain of TCR clone 263836 (TRBV12-4, TRBJ1-2)
CASSLRQGKGYTF

SEQ ID NO: 527673 - protein, 17 aa, Homo sapiens
  CDR3 for alpha chain variable domain of TCR clone 263837 (TRAV3, TRAJ6)
CAVRDGPRAGGSYIPTF

SEQ ID NO: 527674 - protein, 19 aa, Homo sapiens
  CDR3 for beta chain variable domain of TCR clone 263837 (TRBV25-1, TRBJ2-2)
CAILVCRVDRGRKTGELFF

SEQ ID NO: 527675 - protein, 14 aa, Homo sapiens
  CDR3 for alpha chain variable domain of TCR clone 263838 (TRAV12-1, TRAJ17)
CVVNYKGEGNKLTF

SEQ ID NO: 527676 - protein, 17 aa, Homo sapiens
  CDR3 for beta chain variable domain of TCR clone 263838 (TRBV20-1, TRBJ2-1)
CSASSSGLAGSYNEQFF

SEQ ID NO: 527677 - protein, 13 aa, Homo sapiens
  CDR3 for alpha chain variable domain of TCR clone 263839 (TRAV8-6, TRAJ8)
CAVSNTGFQKLVF

SEQ ID NO: 527678 - protein, 18 aa, Homo sapiens
  CDR3 for beta chain variable domain of TCR clone 263839 (TRBV11-2, TRBJ2-3)
CASSLGGASRGAPNTQYF

SEQ ID NO: 527679 - protein, 17 aa, Homo sapiens
  CDR3 for alpha chain variable domain of TCR clone 263840 (TRAV3, TRAJ4)
CAVRDSMFSGGYNKLIF

SEQ ID NO: 527680 - protein, 13 aa, Homo sapiens
  CDR3 for beta chain variable domain of TCR clone 263840 (TRBV28, TRBJ2-1)
CASSLIGRDEQFF

SEQ ID NO: 527681 - protein, 17 aa, Homo sapiens
  CDR3 for alpha chain variable domain of TCR clone 263841 (TRAV26-2, TRAJ42)
CILRDVGYGGSQGNLIF

SEQ ID NO: 527682 - protein, 13 aa, Homo sapiens
  CDR3 for beta chain variable domain of TCR clone 263841 (TRBV20-1, TRBJ1-1)
CSAPPGGHTEAVF

SEQ ID NO: 527683 - protein, 14 aa, Homo sapiens
  CDR3 for alpha chain variable domain of TCR clone 263842 (TRAV1-2, TRAJ16)
CAVNRFSDGQKLPF

SEQ ID NO: 527684 - protein, 11 aa, Homo sapiens
  CDR3 for beta chain variable domain of TCR clone 263842 (TRBV4-1, TRBJ2-2)
CASEHTGELFF

SEQ ID NO: 527685 - protein, 18 aa, Homo sapiens
  CDR3 for alpha chain variable domain of TCR clone 263843 (TRAV21, TRAJ52)
CAVRPSPAGGTSYGKLTF

SEQ ID NO: 527686 - protein, 17 aa, Homo sapiens
  CDR3 for beta chain variable domain of TCR clone 263843 (TRBV13, TRBJ2-3)
CASSLPGVAGGRNTQYF

SEQ ID NO: 527687 - protein, 15 aa, Homo sapiens
  CDR3 for alpha chain variable domain of TCR clone 263844 (TRAV30, TRAJ32)
CGTEILGGATNKLIF

SEQ ID NO: 527688 - protein, 17 aa, Homo sapiens
  CDR3 for beta chain variable domain of TCR clone 263844 (TRBV5-4, TRBJ2-1)
CSSSSAGGGGPYNEQFF

SEQ ID NO: 527689 - protein, 15 aa, Homo sapiens
  CDR3 for alpha chain variable domain of TCR clone 263845 (TRAV26-1, TRAJ44)
CIVRANTGTASKLNF

SEQ ID NO: 527690 - protein, 16 aa, Homo sapiens
  CDR3 for beta chain variable domain of TCR clone 263845 (TRBV7-7, TRBJ2-1)
CASSLASGTSYHEQFF

SEQ ID NO: 527691 - protein, 14 aa, Homo sapiens
  CDR3 for alpha chain variable domain of TCR clone 263846 (TRAV8-2, TRAJ37)
CVVSISGNTGKLIF

SEQ ID NO: 527692 - protein, 14 aa, Homo sapiens
  CDR3 for beta chain variable domain of TCR clone 263846 (TRBV7-2, TRBJ2-7)
CASSGLAGRGEQYF

SEQ ID NO: 527693 - protein, 12 aa, Homo sapiens
  CDR3 for alpha chain variable domain of TCR clone 263847 (TRAV20, TRAJ39)
CAVGNAGNMLTF

SEQ ID NO: 527694 - protein, 16 aa, Homo sapiens
  CDR3 for beta chain variable domain of TCR clone 263847 (TRBV15, TRBJ1-2)
CATSRRPRTGGGGYTF

SEQ ID NO: 527695 - protein, 14 aa, Homo sapiens
  CDR3 for alpha chain variable domain of TCR clone 263848 (TRAV1-2, TRAJ16)
FAVNRFSDGQKLLF

SEQ ID NO: 527696 - protein, 13 aa, Homo sapiens
  CDR3 for beta chain variable domain of TCR clone 263848 (TRBV20-1, TRBJ1-1)
CSARGGGNTEAFF

SEQ ID NO: 527697 - protein, 13 aa, Homo sapiens
  CDR3 for alpha chain variable domain of TCR clone 263849 (TRAV2, TRAJ40)
CAVVTSGTYKYIF

SEQ ID NO: 527698 - protein, 16 aa, Homo sapiens
  CDR3 for beta chain variable domain of TCR clone 263849 (TRBV19, TRBJ2-1)
CASSMAGPSSYNEQFF

SEQ ID NO: 527699 - protein, 13 aa, Homo sapiens
  CDR3 for alpha chain variable domain of TCR clone 263850 (TRAV3, TRAJ27)
CAVRPLGAGKSTF

SEQ ID NO: 527700 - protein, 15 aa, Homo sapiens
  CDR3 for beta chain variable domain of TCR clone 263850 (TRBV7-2, TRBJ2-3)
CASSLRGGSTDTQYF

SEQ ID NO: 527701 - protein, 18 aa, Homo sapiens
  CDR3 for alpha chain variable domain of TCR clone 263851 (TRAV26-2, TRAJ45)
CILRLWGYSGGGADGLTL

SEQ ID NO: 527702 - protein, 17 aa, Homo sapiens
  CDR3 for beta chain variable domain of TCR clone 263851 (TRBV28, TRBJ2-3)
CASSPTPAGGRADTQYF

SEQ ID NO: 527703 - protein, 15 aa, Homo sapiens
  CDR3 for alpha chain variable domain of TCR clone 263852 (TRAV26-2, TRAJ50)
CILRDEETSYDKVIF

SEQ ID NO: 527704 - protein, 12 aa, Homo sapiens
  CDR3 for beta chain variable domain of TCR clone 263852 (TRBV5-7, TRBJ1-2)
FASSDGPYGYTF

SEQ ID NO: 527705 - protein, 15 aa, Homo sapiens
  CDR3 for alpha chain variable domain of TCR clone 263853 (TRAV13-1, TRAJ45)
CAASGSGGGADVLTL

SEQ ID NO: 527706 - protein, 14 aa, Homo sapiens
  CDR3 for beta chain variable domain of TCR clone 263853 (TRBV12-4, TRBJ1-2)
CASSFVGTAYGYTF

SEQ ID NO: 527707 - protein, 13 aa, Homo sapiens
  CDR3 for alpha chain variable domain of TCR clone 263854 (TRAV2, TRAJ20)
CAVEDPSEYKLSF

SEQ ID NO: 527708 - protein, 12 aa, Homo sapiens
  CDR3 for beta chain variable domain of TCR clone 263854 (TRBV5-7, TRBJ1-1)
CASSLGRGKAFF

SEQ ID NO: 527709 - protein, 14 aa, Homo sapiens
  CDR3 for alpha chain variable domain of TCR clone 263855 (TRAV20, TRAJ56)
CAVQFGGANSKLTF

SEQ ID NO: 527710 - protein, 12 aa, Homo sapiens
  CDR3 for beta chain variable domain of TCR clone 263855 (TRBV7-3, TRBJ1-1)
CQQPGLGAEAFF

SEQ ID NO: 527711 - protein, 16 aa, Homo sapiens
  CDR3 for alpha chain variable domain of TCR clone 263856 (TRAV16, TRAJ42)
CALSVLLGGSQGNLIF

SEQ ID NO: 527712 - protein, 15 aa, Homo sapiens
  CDR3 for beta chain variable domain of TCR clone 263856 (TRBV5-1, TRBJ2-1)
CASSPGGLAGNEQFF

SEQ ID NO: 527713 - protein, 16 aa, Homo sapiens
  CDR3 for alpha chain variable domain of TCR clone 263857 (TRAV12-2, TRAJ32)
CAVNLGQGGATNKLIF

SEQ ID NO: 527714 - protein, 12 aa, Homo sapiens
  CDR3 for beta chain variable domain of TCR clone 263857 (TRBV29-1, TRBJ2-3)
CSVTGEADTQYF

SEQ ID NO: 527715 - protein, 15 aa, Homo sapiens
  CDR3 for alpha chain variable domain of TCR clone 263858 (TRAV38-2/DV8, TRAJ45)
CAYWDSGGGADGLTF

SEQ ID NO: 527716 - protein, 13 aa, Homo sapiens
  CDR3 for beta chain variable domain of TCR clone 263858 (TRBV2, TRBJ2-7)
CASSVGGSGEQYF

SEQ ID NO: 527717 - protein, 23 aa, Homo sapiens
  CDR3 for alpha chain variable domain of TCR clone 263859 (TRAV26-1, TRAJ38)
CIADNAGNNHIQNPDPSVYQLRD

SEQ ID NO: 527718 - protein, 16 aa, Homo sapiens
  CDR3 for beta chain variable domain of TCR clone 263859 (TRBV7-9, TRBJ1-2)
CASSLGFSSGEDGYTF

SEQ ID NO: 527719 - protein, 12 aa, Homo sapiens
  CDR3 for alpha chain variable domain of TCR clone 263860 (TRAV13-1, TRAJ15)
CAASQAGTALIF

SEQ ID NO: 527720 - protein, 14 aa, Homo sapiens
  CDR3 for beta chain variable domain of TCR clone 263860 (TRBV19, TRBJ2-2)
CVSSTLHRSGELFF

SEQ ID NO: 527721 - protein, 12 aa, Homo sapiens
  CDR3 for alpha chain variable domain of TCR clone 263861 (TRAV12-2, TRAJ43)
CAVNVNKNDMRF

SEQ ID NO: 527722 - protein, 14 aa, Homo sapiens
  CDR3 for beta chain variable domain of TCR clone 263861 (TRBV7-2, TRBJ2-7)
CASSFLGRVYEQYF

SEQ ID NO: 527723 - protein, 14 aa, Homo sapiens
  CDR3 for alpha chain variable domain of TCR clone 263862 (TRAV8-3, TRAJ10)
CAVGIAGGGNKLTF

SEQ ID NO: 527724 - protein, 16 aa, Homo sapiens
  CDR3 for beta chain variable domain of TCR clone 263862 (TRBV11-2, TRBJ1-2)
CASSLDTGGADYGYTF

SEQ ID NO: 527725 - protein, 15 aa, Homo sapiens
  CDR3 for alpha chain variable domain of TCR clone 263863 (TRAV20, TRAJ58)
CAVQDLETSGARLTF

SEQ ID NO: 527726 - protein, 13 aa, Homo sapiens
  CDR3 for beta chain variable domain of TCR clone 263863 (TRBV20-1, TRBJ1-1)
CSARGGGNTEAFF

SEQ ID NO: 527727 - protein, 14 aa, Homo sapiens
  CDR3 for alpha chain variable domain of TCR clone 263864 (TRAV12-3, TRAJ58)
CAMSTQTSGSRLTF

SEQ ID NO: 527728 - protein, 13 aa, Homo sapiens
  CDR3 for beta chain variable domain of TCR clone 263864 (TRBV27, TRBJ2-3)
CASSWGRTDTQYF

SEQ ID NO: 527729 - protein, 10 aa, Homo sapiens
  CDR3 for alpha chain variable domain of TCR clone 263865 (TRAV13-1, TRAJ7)
LIGGNNRLAF

SEQ ID NO: 527730 - protein, 16 aa, Homo sapiens
  CDR3 for beta chain variable domain of TCR clone 263865 (TRBV4-1, TRBJ1-2)
CASSQDARQVLYGYTF

SEQ ID NO: 527731 - protein, 11 aa, Homo sapiens
  CDR3 for alpha chain variable domain of TCR clone 263866 (TRAV17, TRAJ43)
CATPRSNDMRF

SEQ ID NO: 527732 - protein, 13 aa, Homo sapiens
  CDR3 for beta chain variable domain of TCR clone 263866 (TRBV12-4, TRBJ1-2)
CASSLRQGKGYTF

SEQ ID NO: 527733 - protein, 11 aa, Homo sapiens
  CDR3 for alpha chain variable domain of TCR clone 263867 (TRAV12-2, TRAJ33)
CAVTSNYQLIW

SEQ ID NO: 527734 - protein, 14 aa, Homo sapiens
  CDR3 for beta chain variable domain of TCR clone 263867 (TRBV12-4, TRBJ2-2)
CASNQGANNGELFF

SEQ ID NO: 527735 - protein, 11 aa, Homo sapiens
  CDR3 for alpha chain variable domain of TCR clone 263868 (TRAV2, TRAJ13)
CASGGYRKVTF

SEQ ID NO: 527736 - protein, 13 aa, Homo sapiens
  CDR3 for beta chain variable domain of TCR clone 263868 (TRBV20-1, TRBJ2-2)
CSASAAGTGDLFF

SEQ ID NO: 527737 - protein, 17 aa, Homo sapiens
  CDR3 for alpha chain variable domain of TCR clone 263869 (TRAV26-2, TRAJ42)
CILRDVGYGGSQGNLIF

SEQ ID NO: 527738 - protein, 16 aa, Homo sapiens
  CDR3 for beta chain variable domain of TCR clone 263869 (TRBV12-4, TRBJ2-7)
CASSLIGGTGIYEQYF

SEQ ID NO: 527739 - protein, 15 aa, Homo sapiens
  CDR3 for alpha chain variable domain of TCR clone 263870 (TRAV12-3, TRAJ6)
CAMSASTGGSYIPTF

SEQ ID NO: 527740 - protein, 16 aa, Homo sapiens
  CDR3 for beta chain variable domain of TCR clone 263870 (TRBV20-1, TRBJ1-2)
CSALMGQGVANYGYTF

SEQ ID NO: 527741 - protein, 11 aa, Homo sapiens
  CDR3 for alpha chain variable domain of TCR clone 263871 (TRAV21, TRAJ27)
CAVRMQANQPL

SEQ ID NO: 527742 - protein, 15 aa, Homo sapiens
  CDR3 for beta chain variable domain of TCR clone 263871 (TRBV7-9, TRBJ2-3)
CASSLKWGVTDTQYF

SEQ ID NO: 527743 - protein, 17 aa, Homo sapiens
  CDR3 for alpha chain variable domain of TCR clone 263872 (TRAV3, TRAJ6)
CAVRDGPRAGGSYIPTF

SEQ ID NO: 527744 - protein, 16 aa, Homo sapiens
  CDR3 for beta chain variable domain of TCR clone 263872 (TRBV7-7, TRBJ2-3)
CASSPGTSGSTDTQYF

SEQ ID NO: 527745 - protein, 12 aa, Homo sapiens
  CDR3 for alpha chain variable domain of TCR clone 263873 (TRAV6, TRAJ41)
CSSPLWRYALNF

SEQ ID NO: 527746 - protein, 12 aa, Homo sapiens
  CDR3 for beta chain variable domain of TCR clone 263873 (TRBV29-1, TRBJ2-2)
CSVDKYTGELFF

SEQ ID NO: 527747 - protein, 15 aa, Homo sapiens
  CDR3 for alpha chain variable domain of TCR clone 263874 (TRAV8-3, TRAJ44)
CAVGAAASTASKLTF

SEQ ID NO: 527748 - protein, 12 aa, Homo sapiens
  CDR3 for beta chain variable domain of TCR clone 263874 (TRBV7-8, TRBJ2-4)
CASSLGGNIQYF

SEQ ID NO: 527749 - protein, 15 aa, Homo sapiens
  CDR3 for alpha chain variable domain of TCR clone 263875 (TRAV23/DV6, TRAJ15)
CAALPAGRDCSDLWE

SEQ ID NO: 527750 - protein, 14 aa, Homo sapiens
  CDR3 for beta chain variable domain of TCR clone 263875 (TRBV7-9, TRBJ1-2)
CASSRQGANYGYTF

SEQ ID NO: 527751 - protein, 13 aa, Homo sapiens
  CDR3 for alpha chain variable domain of TCR clone 263876 (TRAV12-2, TRAJ7)
CAANLYGNNRLAF

SEQ ID NO: 527752 - protein, 14 aa, Homo sapiens
  CDR3 for beta chain variable domain of TCR clone 263876 (TRBV25-1, TRBJ1-2)
CASSEATGPYGYTF

SEQ ID NO: 527753 - protein, 15 aa, Homo sapiens
  CDR3 for alpha chain variable domain of TCR clone 263877 (TRAV1-2, TRAJ30)
CAVRPHGNRDDKIIF

SEQ ID NO: 527754 - protein, 16 aa, Homo sapiens
  CDR3 for beta chain variable domain of TCR clone 263877 (TRBV19, TRBJ1-1)
CASSPTRFWPGTEAFF

SEQ ID NO: 527755 - protein, 13 aa, Homo sapiens
  CDR3 for alpha chain variable domain of TCR clone 263878 (TRAV2, TRAJ40)
CAVVTSGTYKYIF

SEQ ID NO: 527756 - protein, 14 aa, Homo sapiens
  CDR3 for beta chain variable domain of TCR clone 263878 (TRBV19, TRBJ2-1)
CASPTFVLSSEQFL

SEQ ID NO: 527757 - protein, 12 aa, Homo sapiens
  CDR3 for alpha chain variable domain of TCR clone 263879 (TRAV9-2, TRAJ26)
CALRGYGQNFVF

SEQ ID NO: 527758 - protein, 12 aa, Homo sapiens
  CDR3 for beta chain variable domain of TCR clone 263879 (TRBV29-1, TRBJ2-3)
CSVTGGAETQYF

SEQ ID NO: 527759 - protein, 13 aa, Homo sapiens
  CDR3 for alpha chain variable domain of TCR clone 263880 (TRAV3, TRAJ21)
CAVREPDFNNFYF

SEQ ID NO: 527760 - protein, 15 aa, Homo sapiens
  CDR3 for beta chain variable domain of TCR clone 263880 (TRBV3-1, TRBJ2-7)
CASSQAPSGSYEQYF

SEQ ID NO: 527761 - protein, 17 aa, Homo sapiens
  CDR3 for alpha chain variable domain of TCR clone 263881 (TRAV20, TRAJ42)
CAVRGHRGGGSQGNLIF

SEQ ID NO: 527762 - protein, 14 aa, Homo sapiens
  CDR3 for beta chain variable domain of TCR clone 263881 (TRBV7-3, TRBJ2-1)
CASSLSGSYNEQFF

SEQ ID NO: 527763 - protein, 10 aa, Homo sapiens
  CDR3 for alpha chain variable domain of TCR clone 263882 (TRAV1-2, TRAJ20)
CVPNDYKLSF

SEQ ID NO: 527764 - protein, 14 aa, Homo sapiens
  CDR3 for beta chain variable domain of TCR clone 263882 (TRBV12-5, TRBJ1-3)
CASGPAGSGNTIYF

SEQ ID NO: 527765 - protein, 12 aa, Homo sapiens
  CDR3 for alpha chain variable domain of TCR clone 263883 (TRAV8-1, TRAJ23)
RAVGNQGGKLIF

SEQ ID NO: 527766 - protein, 16 aa, Homo sapiens
  CDR3 for beta chain variable domain of TCR clone 263883 (TRBV7-3, TRBJ2-2)
CASSLKRGTLSGELFF

SEQ ID NO: 527767 - protein, 18 aa, Homo sapiens
  CDR3 for alpha chain variable domain of TCR clone 263884 (TRAV12-3, TRAJ52)
CAMSRTNAGGTSYGKLTF

SEQ ID NO: 527768 - protein, 14 aa, Homo sapiens
  CDR3 for beta chain variable domain of TCR clone 263884 (TRBV7-8, TRBJ2-3)
CASSFPDGQDTQYF

SEQ ID NO: 527769 - protein, 14 aa, Homo sapiens
  CDR3 for alpha chain variable domain of TCR clone 263885 (TRAV21, TRAJ37)
CAVKGSSNTGKLIF

SEQ ID NO: 527770 - protein, 14 aa, Homo sapiens
  CDR3 for beta chain variable domain of TCR clone 263885 (TRBV11-2, TRBJ2-5)
CASSRTGGIETQYF

SEQ ID NO: 527771 - protein, 18 aa, Homo sapiens
  CDR3 for alpha chain variable domain of TCR clone 263886 (TRAV13-1, TRAJ52)
CAASKRSAGGTSYGKLTC

SEQ ID NO: 527772 - protein, 14 aa, Homo sapiens
  CDR3 for beta chain variable domain of TCR clone 263886 (TRBV7-2, TRBJ2-7)
CASCPKTSFYEQYF

SEQ ID NO: 527773 - protein, 16 aa, Homo sapiens
  CDR3 for alpha chain variable domain of TCR clone 263887 (TRAV12-3, TRAJ53)
CAMSVGSGGSNYKLTF

SEQ ID NO: 527774 - protein, 18 aa, Homo sapiens
  CDR3 for beta chain variable domain of TCR clone 263887 (TRBV25-1, TRBJ1-2)
CASSGLQNGQGLIFGYTF

SEQ ID NO: 527775 - protein, 15 aa, Homo sapiens
  CDR3 for alpha chain variable domain of TCR clone 263888 (TRAV2, TRAJ28)
CAVPYSGAGSYQLTS

SEQ ID NO: 527776 - protein, 10 aa, Homo sapiens
  CDR3 for beta chain variable domain of TCR clone 263888 (TRBV23-1, TRBJ2-1)
KWSSYNEQFF

SEQ ID NO: 527777 - protein, 18 aa, Homo sapiens
  CDR3 for alpha chain variable domain of TCR clone 263889 (TRAV2, TRAJ20)
LQVREADAAVYRDCKLSF

SEQ ID NO: 527778 - protein, 17 aa, Homo sapiens
  CDR3 for beta chain variable domain of TCR clone 263889 (TRBV12-4, TRBJ1-1)
CASSLSGFRTMNTEAFF

SEQ ID NO: 527779 - protein, 14 aa, Homo sapiens
  CDR3 for alpha chain variable domain of TCR clone 263890 (TRAV17, TRAJ16)
CATADFSDGQKLLF

SEQ ID NO: 527780 - protein, 14 aa, Homo sapiens
  CDR3 for beta chain variable domain of TCR clone 263890 (TRBV19, TRBJ2-5)
CASSMTGQQETQYF

SEQ ID NO: 527781 - protein, 17 aa, Homo sapiens
  CDR3 for alpha chain variable domain of TCR clone 263891 (TRAV13-1, TRAJ52)
CAASSGAGGTSYGTLTF

SEQ ID NO: 527782 - protein, 20 aa, Homo sapiens
  CDR3 for beta chain variable domain of TCR clone 263891 (TRBV11-2, TRBJ1-6)
CASSLVFATGGSVHPSTLGT

SEQ ID NO: 527783 - protein, 14 aa, Homo sapiens
  CDR3 for alpha chain variable domain of TCR clone 263892 (TRAV2, TRAJ9)
CAVEDRSGGFNTIF

SEQ ID NO: 527784 - protein, 16 aa, Homo sapiens
  CDR3 for beta chain variable domain of TCR clone 263892 (TRBV7-3, TRBJ2-2)
CASSLKRGTLSGELFF

SEQ ID NO: 527785 - protein, 16 aa, Homo sapiens
  CDR3 for alpha chain variable domain of TCR clone 263893 (TRAV3, TRAJ37)
CAVRGKGSGNTGKPIF

SEQ ID NO: 527786 - protein, 14 aa, Homo sapiens
  CDR3 for beta chain variable domain of TCR clone 263893 (TRBV7-2, TRBJ2-7)
CASSPKTSFYEQYF

SEQ ID NO: 527787 - protein, 19 aa, Homo sapiens
  CDR3 for alpha chain variable domain of TCR clone 263894 (TRAV2, TRAJ32)
TTVLSTPPSQGGATNKLIF

SEQ ID NO: 527788 - protein, 13 aa, Homo sapiens
  CDR3 for beta chain variable domain of TCR clone 263894 (TRBV4-2, TRBJ1-1)
CASSQAGNTEAFF

SEQ ID NO: 527789 - protein, 13 aa, Homo sapiens
  CDR3 for alpha chain variable domain of TCR clone 263895 (TRAV12-1, TRAJ16)
CVVNGPDGQKLLF

SEQ ID NO: 527790 - protein, 14 aa, Homo sapiens
  CDR3 for beta chain variable domain of TCR clone 263895 (TRBV4-2, TRBJ1-5)
CASSRDRGNQPQHF

SEQ ID NO: 527791 - protein, 14 aa, Homo sapiens
  CDR3 for alpha chain variable domain of TCR clone 263896 (TRAV26-1, TRAJ38)
CIADNAGNNLKLIW

SEQ ID NO: 527792 - protein, 14 aa, Homo sapiens
  CDR3 for beta chain variable domain of TCR clone 263896 (TRBV4-1, TRBJ2-2)
CASSQAVNTGELFF

SEQ ID NO: 527793 - protein, 14 aa, Homo sapiens
  CDR3 for alpha chain variable domain of TCR clone 263897 (TRAV12-1, TRAJ3)
CVVNPGSSASKIIF

SEQ ID NO: 527794 - protein, 15 aa, Homo sapiens
  CDR3 for beta chain variable domain of TCR clone 263897 (TRBV5-7, TRBJ1-2)
CAGSSPGQGNYGYTC

SEQ ID NO: 527795 - protein, 16 aa, Homo sapiens
  CDR3 for alpha chain variable domain of TCR clone 263898 (TRAV3, TRAJ23)
CAVKIGIYNQGGKLIF

SEQ ID NO: 527796 - protein, 16 aa, Homo sapiens
  CDR3 for beta chain variable domain of TCR clone 263898 (TRBV7-6, TRBJ2-1)
CASSAPGPSSYNEQFF

SEQ ID NO: 527797 - protein, 13 aa, Homo sapiens
  CDR3 for alpha chain variable domain of TCR clone 263899 (TRAV6, TRAJ5)
CAPKATGGRALTF

SEQ ID NO: 527798 - protein, 13 aa, Homo sapiens
  CDR3 for beta chain variable domain of TCR clone 263899 (TRBV20-1, TRBJ2-7)
CSASPFSSYEQYF

SEQ ID NO: 527799 - protein, 12 aa, Homo sapiens
  CDR3 for alpha chain variable domain of TCR clone 263900 (TRAV12-1, TRAJ40)
CVVYSGTYKYIF

SEQ ID NO: 527800 - protein, 17 aa, Homo sapiens
  CDR3 for beta chain variable domain of TCR clone 263900 (TRBV11-2, TRBJ2-3)
CQQLRAASRGAPNTQYF

SEQ ID NO: 527801 - protein, 14 aa, Homo sapiens
  CDR3 for alpha chain variable domain of TCR clone 263901 (TRAV16, TRAJ33)
CALSAMDSNYQLIW

SEQ ID NO: 527802 - protein, 14 aa, Homo sapiens
  CDR3 for beta chain variable domain of TCR clone 263901 (TRBV15, TRBJ2-2)
CATSSGWNTGELFF

SEQ ID NO: 527803 - protein, 14 aa, Homo sapiens
  CDR3 for alpha chain variable domain of TCR clone 263902 (TRAV12-2, TRAJ13)
CAVNPSGGYQKVTF

SEQ ID NO: 527804 - protein, 13 aa, Homo sapiens
  CDR3 for beta chain variable domain of TCR clone 263902 (TRBV20-1, TRBJ1-6)
CSAKLGGTSALHF

SEQ ID NO: 527805 - protein, 13 aa, Homo sapiens
  CDR3 for alpha chain variable domain of TCR clone 263903 (TRAV13-1, TRAJ27)
CAASTHQCRQINL

SEQ ID NO: 527806 - protein, 16 aa, Homo sapiens
  CDR3 for beta chain variable domain of TCR clone 263903 (TRBV27, TRBJ2-2)
CASSFRGLVRTGELLF

SEQ ID NO: 527807 - protein, 10 aa, Homo sapiens
  CDR3 for alpha chain variable domain of TCR clone 263904 (TRAV17, TRAJ36)
CATVEGNLFF

SEQ ID NO: 527808 - protein, 12 aa, Homo sapiens
  CDR3 for beta chain variable domain of TCR clone 263904 (TRBV11-2, TRBJ2-4)
CASSSASGSEYF

SEQ ID NO: 527809 - protein, 13 aa, Homo sapiens
  CDR3 for alpha chain variable domain of TCR clone 263905 (TRAV12-3, TRAJ13)
CAMSSGGYQKVTF

SEQ ID NO: 527810 - protein, 13 aa, Homo sapiens
  CDR3 for beta chain variable domain of TCR clone 263905 (TRBV28, TRBJ2-5)
CASSFAGGETQYF

SEQ ID NO: 527811 - protein, 14 aa, Homo sapiens
  CDR3 for alpha chain variable domain of TCR clone 263906 (TRAV8-2, TRAJ45)
CVVSAGGGADGLTI

SEQ ID NO: 527812 - protein, 12 aa, Homo sapiens
  CDR3 for beta chain variable domain of TCR clone 263906 (TRBV12-4, TRBJ2-1)
CASSLVRVEQFF

SEQ ID NO: 527813 - protein, 23 aa, Homo sapiens
  CDR3 for alpha chain variable domain of TCR clone 263907 (TRAV30, TRAJ43)
CTLRPPSSVTQEPTSAALSNMRF

SEQ ID NO: 527814 - protein, 13 aa, Homo sapiens
  CDR3 for beta chain variable domain of TCR clone 263907 (TRBV12-4, TRBJ2-2)
CASSITGSGELFF

SEQ ID NO: 527815 - protein, 12 aa, Homo sapiens
  CDR3 for alpha chain variable domain of TCR clone 263908 (TRAV17, TRAJ20)
CATQSNDYKLNF

SEQ ID NO: 527816 - protein, 12 aa, Homo sapiens
  CDR3 for beta chain variable domain of TCR clone 263908 (TRBV10-3, TRBJ1-1)
CHHSRRVTEAFF

SEQ ID NO: 527817 - protein, 17 aa, Homo sapiens
  CDR3 for alpha chain variable domain of TCR clone 263909 (TRAV4, TRAJ20)
CTTASWVKGNNDYKHSF

SEQ ID NO: 527818 - protein, 17 aa, Homo sapiens
  CDR3 for beta chain variable domain of TCR clone 263909 (TRBV11-2, TRBJ2-1)
CASSLYPPGVEYNEQFF

SEQ ID NO: 527819 - protein, 15 aa, Homo sapiens
  CDR3 for alpha chain variable domain of TCR clone 263910 (TRAV3, TRAJ22)
CAVSDRGGSAGHLTF

SEQ ID NO: 527820 - protein, 16 aa, Homo sapiens
  CDR3 for beta chain variable domain of TCR clone 263910 (TRBV5-4, TRBJ2-3)
CASQQPGAGGADTQYF

SEQ ID NO: 527821 - protein, 17 aa, Homo sapiens
  CDR3 for alpha chain variable domain of TCR clone 263911 (TRAV3, TRAJ6)
CAVRDGPRAGGSHIPTF

SEQ ID NO: 527822 - protein, 14 aa, Homo sapiens
  CDR3 for beta chain variable domain of TCR clone 263911 (TRBV7-2, TRBJ2-7)
CASSPKTSFYEQYF

SEQ ID NO: 527823 - protein, 16 aa, Homo sapiens
  CDR3 for alpha chain variable domain of TCR clone 263912 (TRAV3, TRAJ37)
CDVRGKGSGNTGKLIF

SEQ ID NO: 527824 - protein, 16 aa, Homo sapiens
  CDR3 for beta chain variable domain of TCR clone 263912 (TRBV28, TRBJ1-5)
CASSFRGGYSNQPQHF

SEQ ID NO: 527825 - protein, 17 aa, Homo sapiens
  CDR3 for alpha chain variable domain of TCR clone 263913 (TRAV8-6, TRAJ58)
CAVSSWVGETSGSRLTF

SEQ ID NO: 527826 - protein, 15 aa, Homo sapiens
  CDR3 for beta chain variable domain of TCR clone 263913 (TRBV6-5, TRBJ2-1)
CASSYDAGAGNEQLV

SEQ ID NO: 527827 - protein, 16 aa, Homo sapiens
  CDR3 for alpha chain variable domain of TCR clone 263914 (TRAV14/DV4, TRAJ20)
CAMREGRSRDDYKLSF

SEQ ID NO: 527828 - protein, 12 aa, Homo sapiens
  CDR3 for beta chain variable domain of TCR clone 263914 (TRBV7-3, TRBJ1-2)
CASSKKGVPVTF

SEQ ID NO: 527829 - protein, 15 aa, Homo sapiens
  CDR3 for alpha chain variable domain of TCR clone 263915 (TRAV35, TRAJ23)
CAGPLGNNQGGKLIF

SEQ ID NO: 527830 - protein, 15 aa, Homo sapiens
  CDR3 for beta chain variable domain of TCR clone 263915 (TRBV7-9, TRBJ1-4)
CASSRTGGFNEKLFF

SEQ ID NO: 527831 - protein, 14 aa, Homo sapiens
  CDR3 for alpha chain variable domain of TCR clone 263916 (TRAV38-1, TRAJ45)
CAYYSGGGADGLTF

SEQ ID NO: 527832 - protein, 14 aa, Homo sapiens
  CDR3 for beta chain variable domain of TCR clone 263916 (TRBV25-1, TRBJ1-1)
CASTHLGGNTDAFF

SEQ ID NO: 527833 - protein, 11 aa, Homo sapiens
  CDR3 for alpha chain variable domain of TCR clone 263917 (TRAV2, TRAJ13)
CASGGYQKVTF

SEQ ID NO: 527834 - protein, 14 aa, Homo sapiens
  CDR3 for beta chain variable domain of TCR clone 263917 (TRBV7-2, TRBJ1-1)
CASSFLTGRTEAFF

SEQ ID NO: 527835 - protein, 16 aa, Homo sapiens
  CDR3 for alpha chain variable domain of TCR clone 263918 (TRAV12-2, TRAJ28)
CAVITDSGAGSYQLTF

SEQ ID NO: 527836 - protein, 19 aa, Homo sapiens
  CDR3 for beta chain variable domain of TCR clone 263918 (TRBV28, TRBJ2-1)
CASSFSIRGSGRTRYEQFF

SEQ ID NO: 527837 - protein, 13 aa, Homo sapiens
  CDR3 for alpha chain variable domain of TCR clone 263919 (TRAV16, TRAJ34)
CALTGYNTDKLIF

SEQ ID NO: 527838 - protein, 13 aa, Homo sapiens
  CDR3 for beta chain variable domain of TCR clone 263919 (TRBV6-1, TRBJ2-1)
CASREDRGHEQFF

SEQ ID NO: 527839 - protein, 12 aa, Homo sapiens
  CDR3 for alpha chain variable domain of TCR clone 263920 (TRAV38-1, TRAJ20)
CAFIWNDYKLSF

SEQ ID NO: 527840 - protein, 14 aa, Homo sapiens
  CDR3 for beta chain variable domain of TCR clone 263920 (TRBV12-5, TRBJ2-5)
CASGSRTHQETQYF

SEQ ID NO: 527841 - protein, 16 aa, Homo sapiens
  CDR3 for alpha chain variable domain of TCR clone 263921 (TRAV8-4, TRAJ9)
CAVTFNTGGFKNYLWS

SEQ ID NO: 527842 - protein, 15 aa, Homo sapiens
  CDR3 for beta chain variable domain of TCR clone 263921 (TRBV7-9, TRBJ2-2)
CASSPETGDGGELFF

SEQ ID NO: 527843 - protein, 14 aa, Homo sapiens
  CDR3 for alpha chain variable domain of TCR clone 263922 (TRAV12-1, TRAJ17)
CVLNYKAAGNKLTF

SEQ ID NO: 527844 - protein, 17 aa, Homo sapiens
  CDR3 for beta chain variable domain of TCR clone 263922 (TRBV20-1, TRBJ2-1)
CSDSSSGLAGSYNEQFF

SEQ ID NO: 527845 - protein, 16 aa, Homo sapiens
  CDR3 for alpha chain variable domain of TCR clone 263923 (TRAV3, TRAJ37)
CAVRPHGSGNTGQLIF

SEQ ID NO: 527846 - protein, 14 aa, Homo sapiens
  CDR3 for beta chain variable domain of TCR clone 263923 (TRBV2, TRBJ2-1)
CASSVRAYYNEQFF

SEQ ID NO: 527847 - protein, 15 aa, Homo sapiens
  CDR3 for alpha chain variable domain of TCR clone 263924 (TRAV2, TRAJ44)
CAVEAYTGTASKLTF

SEQ ID NO: 527848 - protein, 14 aa, Homo sapiens
  CDR3 for beta chain variable domain of TCR clone 263924 (TRBV11-2, TRBJ2-1)
CASNPGSRDNEQFF

SEQ ID NO: 527849 - protein, 13 aa, Homo sapiens
  CDR3 for alpha chain variable domain of TCR clone 263925 (TRAV12-3, TRAJ9)
CAMRNTGGFKTIF

SEQ ID NO: 527850 - protein, 14 aa, Homo sapiens
  CDR3 for beta chain variable domain of TCR clone 263925 (TRBV11-2, TRBJ2-2)
CASSSTGEGYEQYS

SEQ ID NO: 527851 - protein, 18 aa, Homo sapiens
  CDR3 for alpha chain variable domain of TCR clone 263926 (TRAV20, TRAJ4)
CAVQPYYMFSGGYNKMIF

SEQ ID NO: 527852 - protein, 13 aa, Homo sapiens
  CDR3 for beta chain variable domain of TCR clone 263926 (TRBV19, TRBJ2-3)
CATWDKSTDTQYF

SEQ ID NO: 527853 - protein, 10 aa, Homo sapiens
  CDR3 for alpha chain variable domain of TCR clone 263927 (TRAV38-2/DV8, TRAJ40)
CASGTYKYIF

SEQ ID NO: 527854 - protein, 18 aa, Homo sapiens
  CDR3 for beta chain variable domain of TCR clone 263927 (TRBV12-4, TRBJ2-2)
CASSLVAGTRGRTGELFF

SEQ ID NO: 527855 - protein, 11 aa, Homo sapiens
  CDR3 for alpha chain variable domain of TCR clone 263928 (TRAV12-3, TRAJ49)
CAANTGNQFYF

SEQ ID NO: 527856 - protein, 12 aa, Homo sapiens
  CDR3 for beta chain variable domain of TCR clone 263928 (TRBV6-3, TRBJ2-7)
CASSETGFEQYF

SEQ ID NO: 527857 - protein, 14 aa, Homo sapiens
  CDR3 for alpha chain variable domain of TCR clone 263929 (TRAV12-2, TRAJ6)
CAVIASGGSYIPTF

SEQ ID NO: 527858 - protein, 15 aa, Homo sapiens
  CDR3 for beta chain variable domain of TCR clone 263929 (TRBV7-2, TRBJ2-3)
CQQLSGRREWDTQYF

SEQ ID NO: 527859 - protein, 10 aa, Homo sapiens
  CDR3 for alpha chain variable domain of TCR clone 263930 (TRAV20, TRAJ52)
CAVLPDGGTS

SEQ ID NO: 527860 - protein, 12 aa, Homo sapiens
  CDR3 for beta chain variable domain of TCR clone 263930 (TRBV19, TRBJ2-1)
CASSQISNEQFF

SEQ ID NO: 527861 - protein, 16 aa, Homo sapiens
  CDR3 for alpha chain variable domain of TCR clone 263931 (TRAV1-2, TRAJ10)
CAVRGVLTGGGNKLTF

SEQ ID NO: 527862 - protein, 16 aa, Homo sapiens
  CDR3 for beta chain variable domain of TCR clone 263931 (TRBV18, TRBJ1-5)
CASSPYRVEGNQPQHF

SEQ ID NO: 527863 - protein, 17 aa, Homo sapiens
  CDR3 for alpha chain variable domain of TCR clone 263932 (TRAV14/DV4, TRAJ4)
CAMREASGRGGYNKLIF

SEQ ID NO: 527864 - protein, 16 aa, Homo sapiens
  CDR3 for beta chain variable domain of TCR clone 263932 (TRBV7-9, TRBJ1-2)
CASSLGFSSGEDGYTF

SEQ ID NO: 527865 - protein, 17 aa, Homo sapiens
  CDR3 for alpha chain variable domain of TCR clone 263933 (TRAV26-1, TRAJ58)
CIVRVGAEETSGSRLTF

SEQ ID NO: 527866 - protein, 13 aa, Homo sapiens
  CDR3 for beta chain variable domain of TCR clone 263933 (TRBV12-5, TRBJ1-2)
CASGVRTGNGYTF

SEQ ID NO: 527867 - protein, 12 aa, Homo sapiens
  CDR3 for alpha chain variable domain of TCR clone 263934 (TRAV12-3, TRAJ17)
CAMTLTGNKLTF

SEQ ID NO: 527868 - protein, 16 aa, Homo sapiens
  CDR3 for beta chain variable domain of TCR clone 263934 (TRBV19, TRBJ2-1)
CASSKAGPSSSNEQFF

SEQ ID NO: 527869 - protein, 15 aa, Homo sapiens
  CDR3 for alpha chain variable domain of TCR clone 263935 (TRAV4, TRAJ39)
CLVGPNNNAGNMLTF

SEQ ID NO: 527870 - protein, 13 aa, Homo sapiens
  CDR3 for beta chain variable domain of TCR clone 263935 (TRBV11-2, TRBJ2-5)
GASSSTGEETQYF

SEQ ID NO: 527871 - protein, 11 aa, Homo sapiens
  CDR3 for alpha chain variable domain of TCR clone 263936 (TRAV23/DV6, TRAJ29)
CAASRNTPLVF

SEQ ID NO: 527872 - protein, 15 aa, Homo sapiens
  CDR3 for beta chain variable domain of TCR clone 263936 (TRBV6-3, TRBJ2-2)
RASRGMTVDTGELFF

SEQ ID NO: 527873 - protein, 14 aa, Homo sapiens
  CDR3 for alpha chain variable domain of TCR clone 263937 (TRAV1-2, TRAJ16)
CAVNRFSDGQKLLF

SEQ ID NO: 527874 - protein, 12 aa, Homo sapiens
  CDR3 for beta chain variable domain of TCR clone 263937 (TRBV19, TRBJ2-7)
CASTDRGYEQYF

SEQ ID NO: 527875 - protein, 14 aa, Homo sapiens
  CDR3 for alpha chain variable domain of TCR clone 263938 (TRAV1-2, TRAJ8)
CAVREDTGFQKLVF

SEQ ID NO: 527876 - protein, 13 aa, Homo sapiens
  CDR3 for beta chain variable domain of TCR clone 263938 (TRBV27, TRBJ2-5)
CASSRGPWETQYF

SEQ ID NO: 527877 - protein, 14 aa, Homo sapiens
  CDR3 for alpha chain variable domain of TCR clone 263939 (TRAV13-1, TRAJ12)
CSNYPMDSSYKLIF

SEQ ID NO: 527878 - protein, 11 aa, Homo sapiens
  CDR3 for beta chain variable domain of TCR clone 263939 (TRBV20-1, TRBJ2-1)
CRLSSGSEQFF

SEQ ID NO: 527879 - protein, 15 aa, Homo sapiens
  CDR3 for alpha chain variable domain of TCR clone 263940 (TRAV8-4, TRAJ37)
WAVTYGSSNTGKLIF

SEQ ID NO: 527880 - protein, 13 aa, Homo sapiens
  CDR3 for beta chain variable domain of TCR clone 263940 (TRBV12-4, TRBJ2-5)
CASSLGGSRTQYF

SEQ ID NO: 527881 - protein, 17 aa, Homo sapiens
  CDR3 for alpha chain variable domain of TCR clone 263941 (TRAV16, TRAJ26)
CALSGSEFCLWSRNPIV

SEQ ID NO: 527882 - protein, 12 aa, Homo sapiens
  CDR3 for beta chain variable domain of TCR clone 263941 (TRBV11-2, TRBJ2-1)
CASSPGNNEQFF

SEQ ID NO: 527883 - protein, 22 aa, Homo sapiens
  CDR3 for alpha chain variable domain of TCR clone 263942 (TRAV27, TRAJ41)
CAVRTQIPDIQYPDPAVYQLRD

SEQ ID NO: 527884 - protein, 16 aa, Homo sapiens
  CDR3 for beta chain variable domain of TCR clone 263942 (TRBV5-1, TRBJ2-3)
CASSLGLAVYTDTQYF

SEQ ID NO: 527885 - protein, 12 aa, Homo sapiens
  CDR3 for alpha chain variable domain of TCR clone 263943 (TRAV26-2, TRAJ47)
CILVEYGNKLVF

SEQ ID NO: 527886 - protein, 14 aa, Homo sapiens
  CDR3 for beta chain variable domain of TCR clone 263943 (TRBV18, TRBJ2-3)
CASSPGGYTDTQYF

SEQ ID NO: 527887 - protein, 14 aa, Homo sapiens
  CDR3 for alpha chain variable domain of TCR clone 263944 (TRAV14/DV4, TRAJ42)
CPRGSLRSRGNLIF

SEQ ID NO: 527888 - protein, 12 aa, Homo sapiens
  CDR3 for beta chain variable domain of TCR clone 263944 (TRBV2, TRBJ2-5)
CASKEYGETQYF

SEQ ID NO: 527889 - protein, 13 aa, Homo sapiens
  CDR3 for alpha chain variable domain of TCR clone 263945 (TRAV12-3, TRAJ10)
CAVGTGGGNKLTF

SEQ ID NO: 527890 - protein, 15 aa, Homo sapiens
  CDR3 for beta chain variable domain of TCR clone 263945 (TRBV20-1, TRBJ2-3)
CSARDGPAPTDTQYF

SEQ ID NO: 527891 - protein, 16 aa, Homo sapiens
  CDR3 for alpha chain variable domain of TCR clone 263946 (TRAV1-2, TRAJ10)
CAVRDQGGGGGNKLTF

SEQ ID NO: 527892 - protein, 12 aa, Homo sapiens
  CDR3 for beta chain variable domain of TCR clone 263946 (TRBV7-8, TRBJ2-7)
CASSLGDREQYF

SEQ ID NO: 527893 - protein, 18 aa, Homo sapiens
  CDR3 for alpha chain variable domain of TCR clone 263947 (TRAV29/DV5, TRAJ52)
CAAGFRGAGGTSYGKLTF

SEQ ID NO: 527894 - protein, 13 aa, Homo sapiens
  CDR3 for beta chain variable domain of TCR clone 263947 (TRBV19, TRBJ2-3)
CASASGSTDTQYF

SEQ ID NO: 527895 - protein, 15 aa, Homo sapiens
  CDR3 for alpha chain variable domain of TCR clone 263948 (TRAV13-1, TRAJ45)
CAASGSGGCSDGLTS

SEQ ID NO: 527896 - protein, 14 aa, Homo sapiens
  CDR3 for beta chain variable domain of TCR clone 263948 (TRBV12-4, TRBJ1-2)
CASSFVGTAYGYTF

SEQ ID NO: 527897 - protein, 14 aa, Homo sapiens
  CDR3 for alpha chain variable domain of TCR clone 263949 (TRAV35, TRAJ42)
CAGRYGGSQGNLIF

SEQ ID NO: 527898 - protein, 15 aa, Homo sapiens
  CDR3 for beta chain variable domain of TCR clone 263949 (TRBV7-9, TRBJ2-1)
CASGLGWGRANERFF

SEQ ID NO: 527899 - protein, 14 aa, Homo sapiens
  CDR3 for alpha chain variable domain of TCR clone 263950 (TRAV12-2, TRAJ13)
CAVKKTGGYQKVTF

SEQ ID NO: 527900 - protein, 13 aa, Homo sapiens
  CDR3 for beta chain variable domain of TCR clone 263950 (TRBV20-1, TRBJ1-1)
CSARGRGNTEAFF

SEQ ID NO: 527901 - protein, 11 aa, Homo sapiens
  CDR3 for alpha chain variable domain of TCR clone 263951 (TRAV3, TRAJ21)
CAVGNFNKFYF

SEQ ID NO: 527902 - protein, 19 aa, Homo sapiens
  CDR3 for beta chain variable domain of TCR clone 263951 (TRBV6-3, TRBJ1-2)
CASSYSKGRTGPPNYGYTF

SEQ ID NO: 527903 - protein, 15 aa, Homo sapiens
  CDR3 for alpha chain variable domain of TCR clone 263952 (TRAV3, TRAJ3)
CAVRDRRSSASKIIF

SEQ ID NO: 527904 - protein, 17 aa, Homo sapiens
  CDR3 for beta chain variable domain of TCR clone 263952 (TRBV9, TRBJ2-5)
CASSPRFGDPVLRARHA

SEQ ID NO: 527905 - protein, 16 aa, Homo sapiens
  CDR3 for alpha chain variable domain of TCR clone 263953 (TRAV14/DV4, TRAJ53)
CAMREGGGGSNYKLTF

SEQ ID NO: 527906 - protein, 11 aa, Homo sapiens
  CDR3 for beta chain variable domain of TCR clone 263953 (TRBV7-9, TRBJ2-3)
CASSWGDTQYF

SEQ ID NO: 527907 - protein, 14 aa, Homo sapiens
  CDR3 for alpha chain variable domain of TCR clone 263954 (TRAV17, TRAJ16)
CATADFLDGQKLLF

SEQ ID NO: 527908 - protein, 15 aa, Homo sapiens
  CDR3 for beta chain variable domain of TCR clone 263954 (TRBV18, TRBJ2-1)
CASSPPSAPYNEQFF

SEQ ID NO: 527909 - protein, 14 aa, Homo sapiens
  CDR3 for alpha chain variable domain of TCR clone 263955 (TRAV26-1, TRAJ38)
CIADNAGNDRKLIW

SEQ ID NO: 527910 - protein, 15 aa, Homo sapiens
  CDR3 for beta chain variable domain of TCR clone 263955 (TRBV12-4, TRBJ2-5)
CASSPPTGLQETQYF

SEQ ID NO: 527911 - protein, 14 aa, Homo sapiens
  CDR3 for alpha chain variable domain of TCR clone 263956 (TRAV17, TRAJ48)
CATEGNFGIEKLTF

SEQ ID NO: 527912 - protein, 15 aa, Homo sapiens
  CDR3 for beta chain variable domain of TCR clone 263956 (TRBV6-3, TRBJ2-7)
CASSSPGTVFYEQYF

SEQ ID NO: 527913 - protein, 13 aa, Homo sapiens
  CDR3 for alpha chain variable domain of TCR clone 263957 (TRAV1-2, TRAJ24)
CAVTGDSWGKLQF

SEQ ID NO: 527914 - protein, 15 aa, Homo sapiens
  CDR3 for beta chain variable domain of TCR clone 263957 (TRBV7-2, TRBJ2-7)
CASSLGGAESGEQYF

SEQ ID NO: 527915 - protein, 15 aa, Homo sapiens
  CDR3 for alpha chain variable domain of TCR clone 263958 (TRAV8-6, TRAJ28)
CAVTRSGAGSYQLTF

SEQ ID NO: 527916 - protein, 17 aa, Homo sapiens
  CDR3 for beta chain variable domain of TCR clone 263958 (TRBV5-1, TRBJ2-2)
CASSLAGLSGGTGELFF

SEQ ID NO: 527917 - protein, 14 aa, Homo sapiens
  CDR3 for alpha chain variable domain of TCR clone 263959 (TRAV27, TRAJ13)
CAGAGGTRKVPLEL

SEQ ID NO: 527918 - protein, 15 aa, Homo sapiens
  CDR3 for beta chain variable domain of TCR clone 263959 (TRBV20-1, TRBJ2-6)
CSARDRGPGANVLTF

SEQ ID NO: 527919 - protein, 11 aa, Homo sapiens
  CDR3 for alpha chain variable domain of TCR clone 263960 (TRAV2, TRAJ13)
CASGGYQKVTF

SEQ ID NO: 527920 - protein, 15 aa, Homo sapiens
  CDR3 for beta chain variable domain of TCR clone 263960 (TRBV20-1, TRBJ1-5)
CSARPRGQLNQPQHF

SEQ ID NO: 527921 - protein, 11 aa, Homo sapiens
  CDR3 for alpha chain variable domain of TCR clone 263961 (TRAV27, TRAJ43)
CVRYNNNDMRF

SEQ ID NO: 527922 - protein, 14 aa, Homo sapiens
  CDR3 for beta chain variable domain of TCR clone 263961 (TRBV18, TRBJ2-5)
CASSPGVSQETQYF

SEQ ID NO: 527923 - protein, 15 aa, Homo sapiens
  CDR3 for alpha chain variable domain of TCR clone 263962 (TRAV8-3, TRAJ37)
CAVGVLSSNTGKLIF

SEQ ID NO: 527924 - protein, 15 aa, Homo sapiens
  CDR3 for beta chain variable domain of TCR clone 263962 (TRBV7-8, TRBJ1-1)
CASSLGSGFDTEAFF

SEQ ID NO: 527925 - protein, 12 aa, Homo sapiens
  CDR3 for alpha chain variable domain of TCR clone 263963 (TRAV12-2, TRAJ8)
CAVNTGFQKLVF

SEQ ID NO: 527926 - protein, 15 aa, Homo sapiens
  CDR3 for beta chain variable domain of TCR clone 263963 (TRBV19, TRBJ1-1)
CASTSGQIQNTEAFF

SEQ ID NO: 527927 - protein, 13 aa, Homo sapiens
  CDR3 for alpha chain variable domain of TCR clone 263964 (TRAV30, TRAJ6)
CGTEAGGSYIPTF

SEQ ID NO: 527928 - protein, 15 aa, Homo sapiens
  CDR3 for beta chain variable domain of TCR clone 263964 (TRBV7-2, TRBJ2-1)
CASSSGLAGGNEQFF

SEQ ID NO: 527929 - protein, 14 aa, Homo sapiens
  CDR3 for alpha chain variable domain of TCR clone 263965 (TRAV23/DV6, TRAJ28)
CAASSGAGSYQLTF

SEQ ID NO: 527930 - protein, 12 aa, Homo sapiens
  CDR3 for beta chain variable domain of TCR clone 263965 (TRBV12-5, TRBJ2-5)
CASGQGVENQYF

SEQ ID NO: 527931 - protein, 12 aa, Homo sapiens
  CDR3 for alpha chain variable domain of TCR clone 263966 (TRAV21, TRAJ11)
YAATSGYSTLTF

SEQ ID NO: 527932 - protein, 16 aa, Homo sapiens
  CDR3 for beta chain variable domain of TCR clone 263966 (TRBV28, TRBJ2-2)
CASSLEGGSNTGELFF

SEQ ID NO: 527933 - protein, 15 aa, Homo sapiens
  CDR3 for alpha chain variable domain of TCR clone 263967 (TRAV12-2, TRAJ50)
CAVNGLETSYDNVIF

SEQ ID NO: 527934 - protein, 14 aa, Homo sapiens
  CDR3 for beta chain variable domain of TCR clone 263967 (TRBV7-2, TRBJ1-1)
CASSFLTGTTEEFF

SEQ ID NO: 527935 - protein, 17 aa, Homo sapiens
  CDR3 for alpha chain variable domain of TCR clone 263968 (TRAV3, TRAJ6)
CAVRDGPRAGGSYIPTF

SEQ ID NO: 527936 - protein, 14 aa, Homo sapiens
  CDR3 for beta chain variable domain of TCR clone 263968 (TRBV7-2, TRBJ2-7)
CASSTKTSLYEQYF

SEQ ID NO: 527937 - protein, 14 aa, Homo sapiens
  CDR3 for alpha chain variable domain of TCR clone 263969 (TRAV8-3, TRAJ3)
CAVVPRSSASKIIF

SEQ ID NO: 527938 - protein, 15 aa, Homo sapiens
  CDR3 for beta chain variable domain of TCR clone 263969 (TRBV11-3, TRBJ2-3)
CASLKDGREGDTQYF

SEQ ID NO: 527939 - protein, 12 aa, Homo sapiens
  CDR3 for alpha chain variable domain of TCR clone 263970 (TRAV12-2, TRAJ10)
WGVTGGGNKITF

SEQ ID NO: 527940 - protein, 16 aa, Homo sapiens
  CDR3 for beta chain variable domain of TCR clone 263970 (TRBV6-4, TRBJ1-2)
CASSEAVGDPNYGYTF

SEQ ID NO: 527941 - protein, 14 aa, Homo sapiens
  CDR3 for alpha chain variable domain of TCR clone 263971 (TRAV12-2, TRAJ17)
CAVLFKAAGNKLTF

SEQ ID NO: 527942 - protein, 16 aa, Homo sapiens
  CDR3 for beta chain variable domain of TCR clone 263971 (TRBV7-9, TRBJ2-3)
CASSPWREVGTDTQYF

SEQ ID NO: 527943 - protein, 19 aa, Homo sapiens
  CDR3 for alpha chain variable domain of TCR clone 263972 (TRAV1-2, TRAJ26)
CLLPLCCERPDNYAQNFVF

SEQ ID NO: 527944 - protein, 15 aa, Homo sapiens
  CDR3 for beta chain variable domain of TCR clone 263972 (TRBV9, TRBJ1-6)
CASSVAGTGDSPLHF

SEQ ID NO: 527945 - protein, 15 aa, Homo sapiens
  CDR3 for alpha chain variable domain of TCR clone 263973 (TRAV8-3, TRAJ41)
CAVGSNSNSGYALNF

SEQ ID NO: 527946 - protein, 17 aa, Homo sapiens
  CDR3 for beta chain variable domain of TCR clone 263973 (TRBV25-1, TRBJ2-1)
SASSAYGQGRGVYEQFF

SEQ ID NO: 527947 - protein, 12 aa, Homo sapiens
  CDR3 for alpha chain variable domain of TCR clone 263974 (TRAV16, TRAJ56)
CAPTGANSKLTF

SEQ ID NO: 527948 - protein, 15 aa, Homo sapiens
  CDR3 for beta chain variable domain of TCR clone 263974 (TRBV9, TRBJ1-6)
CASSVAGTGDSALHF

SEQ ID NO: 527949 - protein, 12 aa, Homo sapiens
  CDR3 for alpha chain variable domain of TCR clone 263975 (TRAV16, TRAJ9)
CALRAVGFKTIF

SEQ ID NO: 527950 - protein, 13 aa, Homo sapiens
  CDR3 for beta chain variable domain of TCR clone 263975 (TRBV4-3, TRBJ1-1)
CASSQVEGSMAFF

SEQ ID NO: 527951 - protein, 12 aa, Homo sapiens
  CDR3 for alpha chain variable domain of TCR clone 263976 (TRAV3, TRAJ20)
CAVRDPDYKLSF

SEQ ID NO: 527952 - protein, 17 aa, Homo sapiens
  CDR3 for beta chain variable domain of TCR clone 263976 (TRBV4-1, TRBJ2-7)
CASSRDPLGVRGGEQYF

SEQ ID NO: 527953 - protein, 17 aa, Homo sapiens
  CDR3 for alpha chain variable domain of TCR clone 263977 (TRAV8-6, TRAJ58)
CAVSSWVGETSGSRLTF

SEQ ID NO: 527954 - protein, 15 aa, Homo sapiens
  CDR3 for beta chain variable domain of TCR clone 263977 (TRBV15, TRBJ1-5)
CATSTTGVVNQPQHF

SEQ ID NO: 527955 - protein, 14 aa, Homo sapiens
  CDR3 for alpha chain variable domain of TCR clone 263978 (TRAV3, TRAJ7)
CAVREEEREQQTRL

SEQ ID NO: 527956 - protein, 14 aa, Homo sapiens
  CDR3 for beta chain variable domain of TCR clone 263978 (TRBV5-8, TRBJ1-1)
CASSPRTGFSEAFF

SEQ ID NO: 527957 - protein, 16 aa, Homo sapiens
  CDR3 for alpha chain variable domain of TCR clone 263979 (TRAV30, TRAJ24)
CGTEIVDADSWRKFQF

SEQ ID NO: 527958 - protein, 13 aa, Homo sapiens
  CDR3 for beta chain variable domain of TCR clone 263979 (TRBV20-1, TRBJ1-1)
CSAPPGGHTEAFF

SEQ ID NO: 527959 - protein, 17 aa, Homo sapiens
  CDR3 for alpha chain variable domain of TCR clone 263980 (TRAV4, TRAJ18)
CLVGERSVGSTLGRLYF

SEQ ID NO: 527960 - protein, 17 aa, Homo sapiens
  CDR3 for beta chain variable domain of TCR clone 263980 (TRBV4-1, TRBJ2-3)
CASSQEPAGGPLDTQYF

SEQ ID NO: 527961 - protein, 18 aa, Homo sapiens
  CDR3 for alpha chain variable domain of TCR clone 263981 (TRAV26-1, TRAJ23)
CIVRVGLEVWNQGGKLIL

SEQ ID NO: 527962 - protein, 12 aa, Homo sapiens
  CDR3 for beta chain variable domain of TCR clone 263981 (TRBV12-4, TRBJ1-2)
CASSFIWLHLRF

SEQ ID NO: 527963 - protein, 15 aa, Homo sapiens
  CDR3 for alpha chain variable domain of TCR clone 263982 (TRAV17, TRAJ57)
CATGPSQGVSENLVF

SEQ ID NO: 527964 - protein, 16 aa, Homo sapiens
  CDR3 for beta chain variable domain of TCR clone 263982 (TRBV12-4, TRBJ1-5)
CASSRPVGGSNQPQHF

SEQ ID NO: 527965 - protein, 15 aa, Homo sapiens
  CDR3 for alpha chain variable domain of TCR clone 263983 (TRAV26-1, TRAJ56)
CIVRVDNGANSKLTF

SEQ ID NO: 527966 - protein, 15 aa, Homo sapiens
  CDR3 for beta chain variable domain of TCR clone 263983 (TRBV20-1, TRBJ2-7)
CSARDPTEVVHEQYF

SEQ ID NO: 527967 - protein, 14 aa, Homo sapiens
  CDR3 for alpha chain variable domain of TCR clone 263984 (TRAV12-2, TRAJ13)
CAVKKTGGYQKVTF

SEQ ID NO: 527968 - protein, 13 aa, Homo sapiens
  CDR3 for beta chain variable domain of TCR clone 263984 (TRBV12-5, TRBJ2-7)
CWWFSRSSYEQYF

SEQ ID NO: 527969 - protein, 14 aa, Homo sapiens
  CDR3 for alpha chain variable domain of TCR clone 263985 (TRAV12-2, TRAJ17)
CAGLFKAAGNNLTF

SEQ ID NO: 527970 - protein, 17 aa, Homo sapiens
  CDR3 for beta chain variable domain of TCR clone 263985 (TRBV20-1, TRBJ2-2)
CSASGSGQGGLTGELFF

SEQ ID NO: 527971 - protein, 13 aa, Homo sapiens
  CDR3 for alpha chain variable domain of TCR clone 263986 (TRAV1-2, TRAJ27)
CAVFNTNACKSTF

SEQ ID NO: 527972 - protein, 17 aa, Homo sapiens
  CDR3 for beta chain variable domain of TCR clone 263986 (TRBV11-2, TRBJ2-4)
CASSLGEGEGGKNIQYF

SEQ ID NO: 527973 - protein, 12 aa, Homo sapiens
  CDR3 for alpha chain variable domain of TCR clone 263987 (TRAV2, TRAJ36)
CAELTGANNLFF

SEQ ID NO: 527974 - protein, 14 aa, Homo sapiens
  CDR3 for beta chain variable domain of TCR clone 263987 (TRBV7-2, TRBJ1-1)
CASSFLTGTTEAFF

SEQ ID NO: 527975 - protein, 13 aa, Homo sapiens
  CDR3 for alpha chain variable domain of TCR clone 263988 (TRAV20, TRAJ31)
CAVQAWNNARLMF

SEQ ID NO: 527976 - protein, 16 aa, Homo sapiens
  CDR3 for beta chain variable domain of TCR clone 263988 (TRBV6-6, TRBJ2-1)
CASSSGGQGPYNEQFF

SEQ ID NO: 527977 - protein, 15 aa, Homo sapiens
  CDR3 for alpha chain variable domain of TCR clone 263989 (TRAV13-1, TRAJ44)
CAASRNTGTASKLTF

SEQ ID NO: 527978 - protein, 15 aa, Homo sapiens
  CDR3 for beta chain variable domain of TCR clone 263989 (TRBV19, TRBJ2-1)
CASSMGWNSNNEQFF

SEQ ID NO: 527979 - protein, 14 aa, Homo sapiens
  CDR3 for alpha chain variable domain of TCR clone 263990 (TRAV35, TRAJ50)
CAGHRKTSYDKVIF

SEQ ID NO: 527980 - protein, 15 aa, Homo sapiens
  CDR3 for beta chain variable domain of TCR clone 263990 (TRBV19, TRBJ2-7)
CASSTGLAGTYEQYF

SEQ ID NO: 527981 - protein, 14 aa, Homo sapiens
  CDR3 for alpha chain variable domain of TCR clone 263991 (TRAV1-2, TRAJ16)
CAVNRFSDGQKLLF

SEQ ID NO: 527982 - protein, 16 aa, Homo sapiens
  CDR3 for beta chain variable domain of TCR clone 263991 (TRBV12-4, TRBJ2-1)
CASSAVGQVNGDEQFF

SEQ ID NO: 527983 - protein, 16 aa, Homo sapiens
  CDR3 for alpha chain variable domain of TCR clone 263992 (TRAV12-3, TRAJ53)
CAMSPGSGGSNYKLPF

SEQ ID NO: 527984 - protein, 13 aa, Homo sapiens
  CDR3 for beta chain variable domain of TCR clone 263992 (TRBV23-1, TRBJ1-4)
CASRGKFNENLFF

SEQ ID NO: 527985 - protein, 13 aa, Homo sapiens
  CDR3 for alpha chain variable domain of TCR clone 263993 (TRAV38-2/DV8, TRAJ34)
CAYRTWNTDKRIF

SEQ ID NO: 527986 - protein, 15 aa, Homo sapiens
  CDR3 for beta chain variable domain of TCR clone 263993 (TRBV12-4, TRBJ2-5)
CASSPPTGLQETQYF

SEQ ID NO: 527987 - protein, 13 aa, Homo sapiens
  CDR3 for alpha chain variable domain of TCR clone 263994 (TRAV1-2, TRAJ9)
CAALNTGGFKTIF

SEQ ID NO: 527988 - protein, 13 aa, Homo sapiens
  CDR3 for beta chain variable domain of TCR clone 263994 (TRBV11-3, TRBJ1-1)
CASTGSLNTEAFF

SEQ ID NO: 527989 - protein, 16 aa, Homo sapiens
  CDR3 for alpha chain variable domain of TCR clone 263995 (TRAV26-1, TRAJ37)
CIVRGDGSGNTGKLIF

SEQ ID NO: 527990 - protein, 13 aa, Homo sapiens
  CDR3 for beta chain variable domain of TCR clone 263995 (TRBV10-3, TRBJ2-7)
CASKLAVNYEQYF

SEQ ID NO: 527991 - protein, 17 aa, Homo sapiens
  CDR3 for alpha chain variable domain of TCR clone 263996 (TRAV29/DV5, TRAJ52)
CGATSTADGTSYGKLTF

SEQ ID NO: 527992 - protein, 15 aa, Homo sapiens
  CDR3 for beta chain variable domain of TCR clone 263996 (TRBV7-3, TRBJ2-1)
CASSPTGGGEVEQFF

SEQ ID NO: 527993 - protein, 15 aa, Homo sapiens
  CDR3 for alpha chain variable domain of TCR clone 263997 (TRAV17, TRAJ22)
CATVAPSGSARQPTF

SEQ ID NO: 527994 - protein, 16 aa, Homo sapiens
  CDR3 for beta chain variable domain of TCR clone 263997 (TRBV10-3, TRBJ2-7)
CAISADFANRPYEQYF

SEQ ID NO: 527995 - protein, 12 aa, Homo sapiens
  CDR3 for alpha chain variable domain of TCR clone 263998 (TRAV1-2, TRAJ26)
CAVRYYGQNFVF

SEQ ID NO: 527996 - protein, 14 aa, Homo sapiens
  CDR3 for beta chain variable domain of TCR clone 263998 (TRBV12-4, TRBJ2-3)
CASSLSGATDTQYF

SEQ ID NO: 527997 - protein, 18 aa, Homo sapiens
  CDR3 for alpha chain variable domain of TCR clone 263999 (TRAV21, TRAJ52)
CAVRPSPAGGTSYGKLTF

SEQ ID NO: 527998 - protein, 16 aa, Homo sapiens
  CDR3 for beta chain variable domain of TCR clone 263999 (TRBV2, TRBJ2-4)
CASSEAPGGEQNVQYF

SEQ ID NO: 527999 - protein, 19 aa, Homo sapiens
  CDR3 for alpha chain variable domain of TCR clone 264000 (TRAV26-1, TRAJ52)
CIVRAHRNVGGTSYGKLTF

SEQ ID NO: 528000 - protein, 13 aa, Homo sapiens
  CDR3 for beta chain variable domain of TCR clone 264000 (TRBV19, TRBJ2-7)
CASRKAGGSEQYF

SEQ ID NO: 528001 - protein, 12 aa, Homo sapiens
  CDR3 for alpha chain variable domain of TCR clone 264001 (TRAV2, TRAJ9)
CAVVAGGFNTIF

SEQ ID NO: 528002 - protein, 16 aa, Homo sapiens
  CDR3 for beta chain variable domain of TCR clone 264001 (TRBV13, TRBJ2-2)
CASSPRTGEHTGELFF

SEQ ID NO: 528003 - protein, 15 aa, Homo sapiens
  CDR3 for alpha chain variable domain of TCR clone 264002 (TRAV38-2/DV8, TRAJ15)
CAYKGANQAGTALIF

SEQ ID NO: 528004 - protein, 15 aa, Homo sapiens
  CDR3 for beta chain variable domain of TCR clone 264002 (TRBV18, TRBJ2-1)
CASSPPSASYNEQFF

SEQ ID NO: 528005 - protein, 15 aa, Homo sapiens
  CDR3 for alpha chain variable domain of TCR clone 264003 (TRAV17, TRAJ57)
CATGPSQGGSEKLVF

SEQ ID NO: 528006 - protein, 14 aa, Homo sapiens
  CDR3 for beta chain variable domain of TCR clone 264003 (TRBV7-3, TRBJ1-1)
CASSLGTGYTEAFF

SEQ ID NO: 528007 - protein, 14 aa, Homo sapiens
  CDR3 for alpha chain variable domain of TCR clone 264004 (TRAV1-2, TRAJ16)
CAVNRFSDGQKLLF

SEQ ID NO: 528008 - protein, 19 aa, Homo sapiens
  CDR3 for beta chain variable domain of TCR clone 264004 (TRBV12-5, TRBJ2-2)
CASGLGQGTMFANTGELFF

SEQ ID NO: 528009 - protein, 13 aa, Homo sapiens
  CDR3 for alpha chain variable domain of TCR clone 264005 (TRAV2, TRAJ40)
CAVVTSGTYKYIF

SEQ ID NO: 528010 - protein, 14 aa, Homo sapiens
  CDR3 for beta chain variable domain of TCR clone 264005 (TRBV19, TRBJ2-1)
CANPTFILSGEQFF

SEQ ID NO: 528011 - protein, 14 aa, Homo sapiens
  CDR3 for alpha chain variable domain of TCR clone 264006 (TRAV12-3, TRAJ56)
CAMSVTGANSKLTF

SEQ ID NO: 528012 - protein, 17 aa, Homo sapiens
  CDR3 for beta chain variable domain of TCR clone 264006 (TRBV20-1, TRBJ2-3)
FSASLLGRGGSADTQYF

SEQ ID NO: 528013 - protein, 14 aa, Homo sapiens
  CDR3 for alpha chain variable domain of TCR clone 264007 (TRAV1-2, TRAJ8)
CAVREDTGFQNLVF

SEQ ID NO: 528014 - protein, 15 aa, Homo sapiens
  CDR3 for beta chain variable domain of TCR clone 264007 (TRBV6-3, TRBJ2-7)
CASSSRGTVFYEQYF

SEQ ID NO: 528015 - protein, 13 aa, Homo sapiens
  CDR3 for alpha chain variable domain of TCR clone 264008 (TRAV13-1, TRAJ21)
CAASIYKFNKFYF

SEQ ID NO: 528016 - protein, 13 aa, Homo sapiens
  CDR3 for beta chain variable domain of TCR clone 264008 (TRBV27, TRBJ1-4)
CAGSLMGDEKLFV

SEQ ID NO: 528017 - protein, 11 aa, Homo sapiens
  CDR3 for alpha chain variable domain of TCR clone 264009 (TRAV1-2, TRAJ20)
CAVSNDYKLSF

SEQ ID NO: 528018 - protein, 16 aa, Homo sapiens
  CDR3 for beta chain variable domain of TCR clone 264009 (TRBV29-1, TRBJ2-6)
CSVEYITYSGANVLTF

SEQ ID NO: 528019 - protein, 15 aa, Homo sapiens
  CDR3 for alpha chain variable domain of TCR clone 264010 (TRAV26-1, TRAJ22)
CIVRVSFCFCKATDL

SEQ ID NO: 528020 - protein, 14 aa, Homo sapiens
  CDR3 for beta chain variable domain of TCR clone 264010 (TRBV18, TRBJ2-7)
CASSPRGGAYEQYF

SEQ ID NO: 528021 - protein, 13 aa, Homo sapiens
  CDR3 for alpha chain variable domain of TCR clone 264011 (TRAV20, TRAJ35)
CAVQEGFGNVLHC

SEQ ID NO: 528022 - protein, 15 aa, Homo sapiens
  CDR3 for beta chain variable domain of TCR clone 264011 (TRBV7-9, TRBJ1-6)
CASSSPGRGNSPLHF

SEQ ID NO: 528023 - protein, 14 aa, Homo sapiens
  CDR3 for alpha chain variable domain of TCR clone 264012 (TRAV13-1, TRAJ35)
CAASKGGFGNVLHF

SEQ ID NO: 528024 - protein, 14 aa, Homo sapiens
  CDR3 for beta chain variable domain of TCR clone 264012 (TRBV7-8, TRBJ2-3)
CASSFPDGQDTQYF

SEQ ID NO: 528025 - protein, 16 aa, Homo sapiens
  CDR3 for alpha chain variable domain of TCR clone 264013 (TRAV13-1, TRAJ17)
CAASKGVKAAGNKPTF

SEQ ID NO: 528026 - protein, 15 aa, Homo sapiens
  CDR3 for beta chain variable domain of TCR clone 264013 (TRBV20-1, TRBJ1-5)
CSAREGGYSNQPQHF

SEQ ID NO: 528027 - protein, 14 aa, Homo sapiens
  CDR3 for alpha chain variable domain of TCR clone 264014 (TRAV12-3, TRAJ42)
CAMNYGGSHGNLIF

SEQ ID NO: 528028 - protein, 13 aa, Homo sapiens
  CDR3 for beta chain variable domain of TCR clone 264014 (TRBV20-1, TRBJ1-6)
CSAPLGVGSPLHF

SEQ ID NO: 528029 - protein, 18 aa, Homo sapiens
  CDR3 for alpha chain variable domain of TCR clone 264015 (TRAV16, TRAJ52)
CALSGVDAGGTSYGKLKF

SEQ ID NO: 528030 - protein, 15 aa, Homo sapiens
  CDR3 for beta chain variable domain of TCR clone 264015 (TRBV11-3, TRBJ2-3)
CASSAGTVVTNTQYF

SEQ ID NO: 528031 - protein, 16 aa, Homo sapiens
  CDR3 for alpha chain variable domain of TCR clone 264016 (TRAV6, TRAJ37)
CALDIFGSRNTGKLIF

SEQ ID NO: 528032 - protein, 14 aa, Homo sapiens
  CDR3 for beta chain variable domain of TCR clone 264016 (TRBV5-7, TRBJ2-7)
CASSLRSATYEQYF

SEQ ID NO: 528033 - protein, 12 aa, Homo sapiens
  CDR3 for alpha chain variable domain of TCR clone 264017 (TRAV2, TRAJ9)
CAVGAGGFKTIF

SEQ ID NO: 528034 - protein, 15 aa, Homo sapiens
  CDR3 for beta chain variable domain of TCR clone 264017 (TRBV5-5, TRBJ1-5)
CASSSTPGSNQPQHF

SEQ ID NO: 528035 - protein, 13 aa, Homo sapiens
  CDR3 for alpha chain variable domain of TCR clone 264018 (TRAV23/DV6, TRAJ34)
CAASIEGTDKPIF

SEQ ID NO: 528036 - protein, 14 aa, Homo sapiens
  CDR3 for beta chain variable domain of TCR clone 264018 (TRBV19, TRBJ2-1)
CASPTFVLSGEQFF

SEQ ID NO: 528037 - protein, 16 aa, Homo sapiens
  CDR3 for alpha chain variable domain of TCR clone 264019 (TRAV27, TRAJ53)
CAAPEGSGGSNYKLTF

SEQ ID NO: 528038 - protein, 15 aa, Homo sapiens
  CDR3 for beta chain variable domain of TCR clone 264019 (TRBV20-1, TRBJ1-1)
SSASRGVTGNTEAFF

SEQ ID NO: 528039 - protein, 14 aa, Homo sapiens
  CDR3 for alpha chain variable domain of TCR clone 264020 (TRAV23/DV6, TRAJ13)
CAASEPGGYQKVTF

SEQ ID NO: 528040 - protein, 16 aa, Homo sapiens
  CDR3 for beta chain variable domain of TCR clone 264020 (TRBV5-1, TRBJ1-3)
CASSPWAPSSGNTIYF

SEQ ID NO: 528041 - protein, 14 aa, Homo sapiens
  CDR3 for alpha chain variable domain of TCR clone 264021 (TRAV3, TRAJ21)
CAVESQANFNKFYF

SEQ ID NO: 528042 - protein, 14 aa, Homo sapiens
  CDR3 for beta chain variable domain of TCR clone 264021 (TRBV7-2, TRBJ1-6)
CASSLQGANSPLHF

SEQ ID NO: 528043 - protein, 18 aa, Homo sapiens
  CDR3 for alpha chain variable domain of TCR clone 264022 (TRAV13-1, TRAJ52)
CAAKNANAGGTSYGKLTF

SEQ ID NO: 528044 - protein, 14 aa, Homo sapiens
  CDR3 for beta chain variable domain of TCR clone 264022 (TRBV6-5, TRBJ1-1)
CASSFGQGLTEAFF

SEQ ID NO: 528045 - protein, 15 aa, Homo sapiens
  CDR3 for alpha chain variable domain of TCR clone 264023 (TRAV38-2/DV8, TRAJ45)
CAYCDSGGGADGLTF

SEQ ID NO: 528046 - protein, 14 aa, Homo sapiens
  CDR3 for beta chain variable domain of TCR clone 264023 (TRBV7-2, TRBJ2-7)
CASRSQGAAYEQYF

SEQ ID NO: 528047 - protein, 15 aa, Homo sapiens
  CDR3 for alpha chain variable domain of TCR clone 264024 (TRAV12-3, TRAJ6)
CAMRATTGGSYIPTF

SEQ ID NO: 528048 - protein, 16 aa, Homo sapiens
  CDR3 for beta chain variable domain of TCR clone 264024 (TRBV20-1, TRBJ1-2)
CSASMGQGVANYGDSF

SEQ ID NO: 528049 - protein, 11 aa, Homo sapiens
  CDR3 for alpha chain variable domain of TCR clone 264025 (TRAV21, TRAJ34)
CAVTNTDKRIF

SEQ ID NO: 528050 - protein, 17 aa, Homo sapiens
  CDR3 for beta chain variable domain of TCR clone 264025 (TRBV20-1, TRBJ2-1)
CSARSPSGGPPTMSSSS

SEQ ID NO: 528051 - protein, 15 aa, Homo sapiens
  CDR3 for alpha chain variable domain of TCR clone 264026 (TRAV8-6, TRAJ23)
CAVREFYNQGGTLIF

SEQ ID NO: 528052 - protein, 15 aa, Homo sapiens
  CDR3 for beta chain variable domain of TCR clone 264026 (TRBV20-1, TRBJ2-1)
CSAITGTSGSNEQFF

SEQ ID NO: 528053 - protein, 17 aa, Homo sapiens
  CDR3 for alpha chain variable domain of TCR clone 264027 (TRAV38-1, TRAJ28)
CAFMKPTSGAGSYQITF

SEQ ID NO: 528054 - protein, 15 aa, Homo sapiens
  CDR3 for beta chain variable domain of TCR clone 264027 (TRBV5-1, TRBJ2-4)
CASSLGGGGSYIQYF

SEQ ID NO: 528055 - protein, 17 aa, Homo sapiens
  CDR3 for alpha chain variable domain of TCR clone 264028 (TRAV3, TRAJ42)
CAVRDRDYGGSQGNLIF

SEQ ID NO: 528056 - protein, 15 aa, Homo sapiens
  CDR3 for beta chain variable domain of TCR clone 264028 (TRBV12-4, TRBJ2-7)
CASSQRTSGNYEQYF

SEQ ID NO: 528057 - protein, 10 aa, Homo sapiens
  CDR3 for alpha chain variable domain of TCR clone 264029 (TRAV3, TRAJ3)
CAVVQQCFQD

SEQ ID NO: 528058 - protein, 14 aa, Homo sapiens
  CDR3 for beta chain variable domain of TCR clone 264029 (TRBV7-2, TRBJ2-7)
CASRSQGAAYEQYF

SEQ ID NO: 528059 - protein, 11 aa, Homo sapiens
  CDR3 for alpha chain variable domain of TCR clone 264030 (TRAV3, TRAJ21)
CAVGNFNKFSF

SEQ ID NO: 528060 - protein, 16 aa, Homo sapiens
  CDR3 for beta chain variable domain of TCR clone 264030 (TRBV19, TRBJ2-1)
CASSKAGPSSYNEQFV

SEQ ID NO: 528061 - protein, 13 aa, Homo sapiens
  CDR3 for alpha chain variable domain of TCR clone 264031 (TRAV12-1, TRAJ16)
CVVNGPDGQKLLF

SEQ ID NO: 528062 - protein, 15 aa, Homo sapiens
  CDR3 for beta chain variable domain of TCR clone 264031 (TRBV6-3, TRBJ2-7)
CASSYPGTVFYEQYF

SEQ ID NO: 528063 - protein, 15 aa, Homo sapiens
  CDR3 for alpha chain variable domain of TCR clone 264032 (TRAV40, TRAJ45)
CLLGDLGGGADGLTF

SEQ ID NO: 528064 - protein, 13 aa, Homo sapiens
  CDR3 for beta chain variable domain of TCR clone 264032 (TRBV7-9, TRBJ1-2)
CATSLKQNYGYTF

SEQ ID NO: 528065 - protein, 14 aa, Homo sapiens
  CDR3 for alpha chain variable domain of TCR clone 264033 (TRAV26-1, TRAJ45)
CIEVTGGGADGLTF

SEQ ID NO: 528066 - protein, 13 aa, Homo sapiens
  CDR3 for beta chain variable domain of TCR clone 264033 (TRBV7-6, TRBJ1-2)
CASSLVADYGYTS

SEQ ID NO: 528067 - protein, 15 aa, Homo sapiens
  CDR3 for alpha chain variable domain of TCR clone 264034 (TRAV26-1, TRAJ29)
CIVRVEGSGNTPLVF

SEQ ID NO: 528068 - protein, 14 aa, Homo sapiens
  CDR3 for beta chain variable domain of TCR clone 264034 (TRBV20-1, TRBJ2-1)
CSAQIGGSANEQFF

SEQ ID NO: 528069 - protein, 14 aa, Homo sapiens
  CDR3 for alpha chain variable domain of TCR clone 264035 (TRAV1-2, TRAJ8)
CAVREDTGFQRLVF

SEQ ID NO: 528070 - protein, 15 aa, Homo sapiens
  CDR3 for beta chain variable domain of TCR clone 264035 (TRBV19, TRBJ2-1)
CASSTGTSSYNEQFF

SEQ ID NO: 528071 - protein, 13 aa, Homo sapiens
  CDR3 for alpha chain variable domain of TCR clone 264036 (TRAV29/DV5, TRAJ47)
CAASAEYGNKLVF

SEQ ID NO: 528072 - protein, 17 aa, Homo sapiens
  CDR3 for beta chain variable domain of TCR clone 264036 (TRBV20-1, TRBJ2-1)
CSARDPLAGVWDNEQFF

SEQ ID NO: 528073 - protein, 16 aa, Homo sapiens
  CDR3 for alpha chain variable domain of TCR clone 264037 (TRAV14/DV4, TRAJ12)
CAMREVLMDSSYKLIF

SEQ ID NO: 528074 - protein, 15 aa, Homo sapiens
  CDR3 for beta chain variable domain of TCR clone 264037 (TRBV7-9, TRBJ1-5)
CASSQGHQPNQPQHF

SEQ ID NO: 528075 - protein, 16 aa, Homo sapiens
  CDR3 for alpha chain variable domain of TCR clone 264038 (TRAV20, TRAJ22)
CAVQASSCGSARQLTF

SEQ ID NO: 528076 - protein, 13 aa, Homo sapiens
  CDR3 for beta chain variable domain of TCR clone 264038 (TRBV7-2, TRBJ2-5)
CASSQTSVETQYF

SEQ ID NO: 528077 - protein, 13 aa, Homo sapiens
  CDR3 for alpha chain variable domain of TCR clone 264039 (TRAV21, TRAJ56)
CAVRLGANSKLTF

SEQ ID NO: 528078 - protein, 17 aa, Homo sapiens
  CDR3 for beta chain variable domain of TCR clone 264039 (TRBV28, TRBJ2-1)
CASSSARQALTYNEQFF

SEQ ID NO: 528079 - protein, 13 aa, Homo sapiens
  CDR3 for alpha chain variable domain of TCR clone 264040 (TRAV3, TRAJ43)
CAVKARHNNDMRF

SEQ ID NO: 528080 - protein, 16 aa, Homo sapiens
  CDR3 for beta chain variable domain of TCR clone 264040 (TRBV7-9, TRBJ2-3)
GASSFSVAGGTDTQYF

SEQ ID NO: 528081 - protein, 14 aa, Homo sapiens
  CDR3 for alpha chain variable domain of TCR clone 264041 (TRAV12-3, TRAJ29)
CAMILLSGHTPLVF

SEQ ID NO: 528082 - protein, 16 aa, Homo sapiens
  CDR3 for beta chain variable domain of TCR clone 264041 (TRBV28, TRBJ2-7)
CASSSGTSGRGYEQYF

SEQ ID NO: 528083 - protein, 14 aa, Homo sapiens
  CDR3 for alpha chain variable domain of TCR clone 264042 (TRAV2, TRAJ9)
CAVEDRSGGFKPIF

SEQ ID NO: 528084 - protein, 13 aa, Homo sapiens
  CDR3 for beta chain variable domain of TCR clone 264042 (TRBV12-4, TRBJ1-5)
CASSPDRAQPQHF

SEQ ID NO: 528085 - protein, 17 aa, Homo sapiens
  CDR3 for alpha chain variable domain of TCR clone 264043 (TRAV3, TRAJ42)
CAVRDRDYGGSQGNHIF

SEQ ID NO: 528086 - protein, 18 aa, Homo sapiens
  CDR3 for beta chain variable domain of TCR clone 264043 (TRBV20-1, TRBJ2-3)
CSASGLAGGPGTTDTQYF

SEQ ID NO: 528087 - protein, 13 aa, Homo sapiens
  CDR3 for alpha chain variable domain of TCR clone 264044 (TRAV12-3, TRAJ33)
CAMSVNSKYQLIW

SEQ ID NO: 528088 - protein, 14 aa, Homo sapiens
  CDR3 for beta chain variable domain of TCR clone 264044 (TRBV12-5, TRBJ2-5)
RASGSRTHQETQYF

SEQ ID NO: 528089 - protein, 14 aa, Homo sapiens
  CDR3 for alpha chain variable domain of TCR clone 264045 (TRAV12-2, TRAJ44)
CAGNPAGTASKLTF

SEQ ID NO: 528090 - protein, 13 aa, Homo sapiens
  CDR3 for beta chain variable domain of TCR clone 264045 (TRBV20-1, TRBJ1-6)
CSAPLGVGSPLHF

SEQ ID NO: 528091 - protein, 13 aa, Homo sapiens
  CDR3 for alpha chain variable domain of TCR clone 264046 (TRAV13-1, TRAJ10)
CAATAGGGNKLTF

SEQ ID NO: 528092 - protein, 14 aa, Homo sapiens
  CDR3 for beta chain variable domain of TCR clone 264046 (TRBV12-4, TRBJ2-7)
SASSPAGLKYEQYF

SEQ ID NO: 528093 - protein, 15 aa, Homo sapiens
  CDR3 for alpha chain variable domain of TCR clone 264047 (TRAV26-1, TRAJ40)
CIVRVTTSGTYKYIF

SEQ ID NO: 528094 - protein, 12 aa, Homo sapiens
  CDR3 for beta chain variable domain of TCR clone 264047 (TRBV7-9, TRBJ1-4)
CASSNDREKLFF

SEQ ID NO: 528095 - protein, 16 aa, Homo sapiens
  CDR3 for alpha chain variable domain of TCR clone 264048 (TRAV8-3, TRAJ28)
CAVPPQRGAGSYPLTF

SEQ ID NO: 528096 - protein, 13 aa, Homo sapiens
  CDR3 for beta chain variable domain of TCR clone 264048 (TRBV7-6, TRBJ2-3)
CASSLRSDNTQYF

SEQ ID NO: 528097 - protein, 13 aa, Homo sapiens
  CDR3 for alpha chain variable domain of TCR clone 264049 (TRAV1-2, TRAJ9)
CAALNTGGFKTIF

SEQ ID NO: 528098 - protein, 12 aa, Homo sapiens
  CDR3 for beta chain variable domain of TCR clone 264049 (TRBV12-5, TRBJ2-5)
CASGQGVETQYF

SEQ ID NO: 528099 - protein, 12 aa, Homo sapiens
  CDR3 for alpha chain variable domain of TCR clone 264050 (TRAV16, TRAJ26)
CALRSYGQNFVF

SEQ ID NO: 528100 - protein, 20 aa, Homo sapiens
  CDR3 for beta chain variable domain of TCR clone 264050 (TRBV4-1, TRBJ2-2)
CASSQASPPGLASNTGELFF

SEQ ID NO: 528101 - protein, 15 aa, Homo sapiens
  CDR3 for alpha chain variable domain of TCR clone 264051 (TRAV8-3, TRAJ45)
CASSYSVGGADGLTF

SEQ ID NO: 528102 - protein, 12 aa, Homo sapiens
  CDR3 for beta chain variable domain of TCR clone 264051 (TRBV29-1, TRBJ2-3)
CSVAGGADTQYF

SEQ ID NO: 528103 - protein, 15 aa, Homo sapiens
  CDR3 for alpha chain variable domain of TCR clone 264052 (TRAV34, TRAJ38)
CGADFTPGNNRRLIW

SEQ ID NO: 528104 - protein, 14 aa, Homo sapiens
  CDR3 for beta chain variable domain of TCR clone 264052 (TRBV11-2, TRBJ2-3)
CASSLGGGANTQYF

SEQ ID NO: 528105 - protein, 17 aa, Homo sapiens
  CDR3 for alpha chain variable domain of TCR clone 264053 (TRAV3, TRAJ6)
CAVRDGPGAGGSYIPTF

SEQ ID NO: 528106 - protein, 15 aa, Homo sapiens
  CDR3 for beta chain variable domain of TCR clone 264053 (TRBV19, TRBJ2-1)
CASSIVRGEGREQFF

SEQ ID NO: 528107 - protein, 13 aa, Homo sapiens
  CDR3 for alpha chain variable domain of TCR clone 264054 (TRAV8-1, TRAJ32)
CAADGGATNKLIF

SEQ ID NO: 528108 - protein, 16 aa, Homo sapiens
  CDR3 for beta chain variable domain of TCR clone 264054 (TRBV7-3, TRBJ2-1)
CASSKPLAGGYNEQFF

SEQ ID NO: 528109 - protein, 12 aa, Homo sapiens
  CDR3 for alpha chain variable domain of TCR clone 264055 (TRAV36/DV7, TRAJ54)
CAVVRRAQKLVF

SEQ ID NO: 528110 - protein, 14 aa, Homo sapiens
  CDR3 for beta chain variable domain of TCR clone 264055 (TRBV7-3, TRBJ1-1)
CASSLQGGNTEAFF

SEQ ID NO: 528111 - protein, 18 aa, Homo sapiens
  CDR3 for alpha chain variable domain of TCR clone 264056 (TRAV13-1, TRAJ52)
CAAKNPNAGGTSYGKLTF

SEQ ID NO: 528112 - protein, 12 aa, Homo sapiens
  CDR3 for beta chain variable domain of TCR clone 264056 (TRBV27, TRBJ2-2)
CASKLFTGELFF

SEQ ID NO: 528113 - protein, 14 aa, Homo sapiens
  CDR3 for alpha chain variable domain of TCR clone 264057 (TRAV12-3, TRAJ15)
CAMIAPQAGTALIF

SEQ ID NO: 528114 - protein, 12 aa, Homo sapiens
  CDR3 for beta chain variable domain of TCR clone 264057 (TRBV11-2, TRBJ2-2)
CASSFGGGELFF

SEQ ID NO: 528115 - protein, 14 aa, Homo sapiens
  CDR3 for alpha chain variable domain of TCR clone 264058 (TRAV26-1, TRAJ38)
CIADNAGNNRQLIW

SEQ ID NO: 528116 - protein, 13 aa, Homo sapiens
  CDR3 for beta chain variable domain of TCR clone 264058 (TRBV15, TRBJ1-6)
CATSGGLNSPLHF

SEQ ID NO: 528117 - protein, 12 aa, Homo sapiens
  CDR3 for alpha chain variable domain of TCR clone 264059 (TRAV3, TRAJ43)
CAVRDPNNDMRF

SEQ ID NO: 528118 - protein, 14 aa, Homo sapiens
  CDR3 for beta chain variable domain of TCR clone 264059 (TRBV12-4, TRBJ1-1)
CASSLGTGGTEAFF

SEQ ID NO: 528119 - protein, 17 aa, Homo sapiens
  CDR3 for alpha chain variable domain of TCR clone 264060 (TRAV12-3, TRAJ6)
CAMSARGGAGGSYIPAF

SEQ ID NO: 528120 - protein, 12 aa, Homo sapiens
  CDR3 for beta chain variable domain of TCR clone 264060 (TRBV12-4, TRBJ2-3)
CASSTLPDTQDF

SEQ ID NO: 528121 - protein, 14 aa, Homo sapiens
  CDR3 for alpha chain variable domain of TCR clone 264061 (TRAV2, TRAJ9)
CAVEDRSGGFKTIF

SEQ ID NO: 528122 - protein, 12 aa, Homo sapiens
  CDR3 for beta chain variable domain of TCR clone 264061 (TRBV11-3, TRBJ1-1)
CASSHRQGEAFF

SEQ ID NO: 528123 - protein, 15 aa, Homo sapiens
  CDR3 for alpha chain variable domain of TCR clone 264062 (TRAV3, TRAJ22)
CAVRDRGGSARHLTF

SEQ ID NO: 528124 - protein, 14 aa, Homo sapiens
  CDR3 for beta chain variable domain of TCR clone 264062 (TRBV19, TRBJ1-5)
CASSLGLIGQPQHF

SEQ ID NO: 528125 - protein, 13 aa, Homo sapiens
  CDR3 for alpha chain variable domain of TCR clone 264063 (TRAV21, TRAJ27)
CAARPVNAGKSTF

SEQ ID NO: 528126 - protein, 15 aa, Homo sapiens
  CDR3 for beta chain variable domain of TCR clone 264063 (TRBV11-3, TRBJ2-7)
CASSPGPASSYEQYF

SEQ ID NO: 528127 - protein, 14 aa, Homo sapiens
  CDR3 for alpha chain variable domain of TCR clone 264064 (TRAV17, TRAJ37)
CATDGSSNTGKLIF

SEQ ID NO: 528128 - protein, 15 aa, Homo sapiens
  CDR3 for beta chain variable domain of TCR clone 264064 (TRBV11-3, TRBJ2-3)
CASLKDGREGDTQYF

SEQ ID NO: 528129 - protein, 14 aa, Homo sapiens
  CDR3 for alpha chain variable domain of TCR clone 264065 (TRAV1-2, TRAJ16)
CDVNRFSDGQKLLF

SEQ ID NO: 528130 - protein, 11 aa, Homo sapiens
  CDR3 for beta chain variable domain of TCR clone 264065 (TRBV29-1, TRBJ2-5)
CSEDRTGTQYF

SEQ ID NO: 528131 - protein, 14 aa, Homo sapiens
  CDR3 for alpha chain variable domain of TCR clone 264066 (TRAV12-2, TRAJ40)
CAVKIPSGTYKYIF

SEQ ID NO: 528132 - protein, 15 aa, Homo sapiens
  CDR3 for beta chain variable domain of TCR clone 264066 (TRBV11-3, TRBJ2-7)
CASSPGPASSYEQYF

SEQ ID NO: 528133 - protein, 11 aa, Homo sapiens
  CDR3 for alpha chain variable domain of TCR clone 264067 (TRAV2, TRAJ13)
CSSGGYQKVTF

SEQ ID NO: 528134 - protein, 17 aa, Homo sapiens
  CDR3 for beta chain variable domain of TCR clone 264067 (TRBV15, TRBJ1-4)
CATSRYGTGDPNEKLFF

SEQ ID NO: 528135 - protein, 13 aa, Homo sapiens
  CDR3 for alpha chain variable domain of TCR clone 264068 (TRAV17, TRAJ5)
CALRGTSRRALTF

SEQ ID NO: 528136 - protein, 13 aa, Homo sapiens
  CDR3 for beta chain variable domain of TCR clone 264068 (TRBV4-2, TRBJ1-1)
CASSQAGNTEAFF

SEQ ID NO: 528137 - protein, 11 aa, Homo sapiens
  CDR3 for alpha chain variable domain of TCR clone 264069 (TRAV12-3, TRAJ49)
CAANTGNQFYF

SEQ ID NO: 528138 - protein, 15 aa, Homo sapiens
  CDR3 for beta chain variable domain of TCR clone 264069 (TRBV19, TRBJ2-2)
CASSLNRGVTGELFF

SEQ ID NO: 528139 - protein, 14 aa, Homo sapiens
  CDR3 for alpha chain variable domain of TCR clone 264070 (TRAV12-2, TRAJ4)
CAEDLSGGYNQLIL

SEQ ID NO: 528140 - protein, 13 aa, Homo sapiens
  CDR3 for beta chain variable domain of TCR clone 264070 (TRBV7-9, TRBJ1-2)
CASSLKQNYGYTF

SEQ ID NO: 528141 - protein, 16 aa, Homo sapiens
  CDR3 for alpha chain variable domain of TCR clone 264071 (TRAV3, TRAJ40)
CAVRDRIASGTYKYIF

SEQ ID NO: 528142 - protein, 15 aa, Homo sapiens
  CDR3 for beta chain variable domain of TCR clone 264071 (TRBV27, TRBJ2-7)
CASSPIVTGAYEQYF

SEQ ID NO: 528143 - protein, 12 aa, Homo sapiens
  CDR3 for alpha chain variable domain of TCR clone 264072 (TRAV22, TRAJ29)
CAPPSGNAPLVF

SEQ ID NO: 528144 - protein, 14 aa, Homo sapiens
  CDR3 for beta chain variable domain of TCR clone 264072 (TRBV11-2, TRBJ2-7)
CASSLGAGAYEQYF

SEQ ID NO: 528145 - protein, 16 aa, Homo sapiens
  CDR3 for alpha chain variable domain of TCR clone 264073 (TRAV35, TRAJ28)
CAGQRYSGAGSYQLTF

SEQ ID NO: 528146 - protein, 13 aa, Homo sapiens
  CDR3 for beta chain variable domain of TCR clone 264073 (TRBV11-2, TRBJ2-5)
CASSFSSQETQYF

SEQ ID NO: 528147 - protein, 13 aa, Homo sapiens
  CDR3 for alpha chain variable domain of TCR clone 264074 (TRAV35, TRAJ21)
CAGQLSNFNKFYF

SEQ ID NO: 528148 - protein, 14 aa, Homo sapiens
  CDR3 for beta chain variable domain of TCR clone 264074 (TRBV11-1, TRBJ2-7)
CASSFRQGSYEQYF

SEQ ID NO: 528149 - protein, 15 aa, Homo sapiens
  CDR3 for alpha chain variable domain of TCR clone 264075 (TRAV26-1, TRAJ39)
CIVRDGSNAGNMLTF

SEQ ID NO: 528150 - protein, 13 aa, Homo sapiens
  CDR3 for beta chain variable domain of TCR clone 264075 (TRBV27, TRBJ2-7)
CASSFVSSYEQYF

SEQ ID NO: 528151 - protein, 14 aa, Homo sapiens
  CDR3 for alpha chain variable domain of TCR clone 264076 (TRAV12-2, TRAJ13)
CAVKKTGGYQKVTF

SEQ ID NO: 528152 - protein, 13 aa, Homo sapiens
  CDR3 for beta chain variable domain of TCR clone 264076 (TRBV12-4, TRBJ1-2)
CTSVAAVSYGYTF

SEQ ID NO: 528153 - protein, 17 aa, Homo sapiens
  CDR3 for alpha chain variable domain of TCR clone 264077 (TRAV3, TRAJ6)
CAVRDGPRAGGSYIPTF

SEQ ID NO: 528154 - protein, 15 aa, Homo sapiens
  CDR3 for beta chain variable domain of TCR clone 264077 (TRBV11-3, TRBJ2-7)
CASGPGPASSYEQYF

SEQ ID NO: 528155 - protein, 15 aa, Homo sapiens
  CDR3 for alpha chain variable domain of TCR clone 264078 (TRAV12-3, TRAJ6)
CAMSATTGRSYIPTF

SEQ ID NO: 528156 - protein, 16 aa, Homo sapiens
  CDR3 for beta chain variable domain of TCR clone 264078 (TRBV20-1, TRBJ1-2)
CSASMGQGVANYGYIF

SEQ ID NO: 528157 - protein, 13 aa, Homo sapiens
  CDR3 for alpha chain variable domain of TCR clone 264079 (TRAV2, TRAJ40)
CAVVTSGTYKYIF

SEQ ID NO: 528158 - protein, 20 aa, Homo sapiens
  CDR3 for beta chain variable domain of TCR clone 264079 (TRBV7-8, TRBJ2-2)
RASSHLFPGPTIHITGELFF

SEQ ID NO: 528159 - protein, 12 aa, Homo sapiens
  CDR3 for alpha chain variable domain of TCR clone 264080 (TRAV12-1, TRAJ23)
CVVNIPGGKLIF

SEQ ID NO: 528160 - protein, 15 aa, Homo sapiens
  CDR3 for beta chain variable domain of TCR clone 264080 (TRBV6-3, TRBJ2-7)
CSSSSPGTVFYEQYF

SEQ ID NO: 528161 - protein, 16 aa, Homo sapiens
  CDR3 for alpha chain variable domain of TCR clone 264081 (TRAV12-3, TRAJ53)
CAMSPRSGGSNYKLTF

SEQ ID NO: 528162 - protein, 20 aa, Homo sapiens
  CDR3 for beta chain variable domain of TCR clone 264081 (TRBV7-8, TRBJ2-2)
CASSHLFPGPTIHITGELFF

SEQ ID NO: 528163 - protein, 11 aa, Homo sapiens
  CDR3 for alpha chain variable domain of TCR clone 264082 (TRAV2, TRAJ13)
CASGGYQKVTF

SEQ ID NO: 528164 - protein, 11 aa, Homo sapiens
  CDR3 for beta chain variable domain of TCR clone 264082 (TRBV6-3, TRBJ2-3)
CDTGQADTQYF

SEQ ID NO: 528165 - protein, 16 aa, Homo sapiens
  CDR3 for alpha chain variable domain of TCR clone 264083 (TRAV8-3, TRAJ13)
CAVGAYPSGGYQHVTF

SEQ ID NO: 528166 - protein, 15 aa, Homo sapiens
  CDR3 for beta chain variable domain of TCR clone 264083 (TRBV19, TRBJ1-5)
CASSIVWADNQPQHF

SEQ ID NO: 528167 - protein, 14 aa, Homo sapiens
  CDR3 for alpha chain variable domain of TCR clone 264084 (TRAV12-2, TRAJ13)
CAVKKTGGYQKVTF

SEQ ID NO: 528168 - protein, 17 aa, Homo sapiens
  CDR3 for beta chain variable domain of TCR clone 264084 (TRBV20-1, TRBJ2-7)
CSAAGTSGGGSSYEQYF

SEQ ID NO: 528169 - protein, 13 aa, Homo sapiens
  CDR3 for alpha chain variable domain of TCR clone 264085 (TRAV12-3, TRAJ7)
CAMSASGNNRLAF

SEQ ID NO: 528170 - protein, 14 aa, Homo sapiens
  CDR3 for beta chain variable domain of TCR clone 264085 (TRBV25-1, TRBJ1-1)
CASTHLGGNTEAFF

SEQ ID NO: 528171 - protein, 14 aa, Homo sapiens
  CDR3 for alpha chain variable domain of TCR clone 264086 (TRAV12-2, TRAJ40)
CAVKIPSGTYKYIF

SEQ ID NO: 528172 - protein, 11 aa, Homo sapiens
  CDR3 for beta chain variable domain of TCR clone 264086 (TRBV11-3, TRBJ2-1)
CASSLGNEQFF

SEQ ID NO: 528173 - protein, 12 aa, Homo sapiens
  CDR3 for alpha chain variable domain of TCR clone 264087 (TRAV20, TRAJ34)
CAVKDNTDKVIF

SEQ ID NO: 528174 - protein, 14 aa, Homo sapiens
  CDR3 for beta chain variable domain of TCR clone 264087 (TRBV7-9, TRBJ2-7)
CASSRPGGPYEQYF

SEQ ID NO: 528175 - protein, 14 aa, Homo sapiens
  CDR3 for alpha chain variable domain of TCR clone 264088 (TRAV4, TRAJ17)
CLVGDMAAGNKLTF

SEQ ID NO: 528176 - protein, 12 aa, Homo sapiens
  CDR3 for beta chain variable domain of TCR clone 264088 (TRBV18, TRBJ2-7)
CQPIRGGYEQYF

SEQ ID NO: 528177 - protein, 14 aa, Homo sapiens
  CDR3 for alpha chain variable domain of TCR clone 264089 (TRAV26-1, TRAJ39)
CIVFTNNAGNMLTF

SEQ ID NO: 528178 - protein, 15 aa, Homo sapiens
  CDR3 for beta chain variable domain of TCR clone 264089 (TRBV19, TRBJ2-4)
GASSLTGLTKNIQYF

SEQ ID NO: 528179 - protein, 10 aa, Homo sapiens
  CDR3 for alpha chain variable domain of TCR clone 264090 (TRAV8-4, TRAJ43)
CAVSADDMRF

SEQ ID NO: 528180 - protein, 15 aa, Homo sapiens
  CDR3 for beta chain variable domain of TCR clone 264090 (TRBV20-1, TRBJ2-7)
CSARDRVSVMDEQYF

SEQ ID NO: 528181 - protein, 14 aa, Homo sapiens
  CDR3 for alpha chain variable domain of TCR clone 264091 (TRAV22, TRAJ40)
CAVAPTSGTYKYIF

SEQ ID NO: 528182 - protein, 16 aa, Homo sapiens
  CDR3 for beta chain variable domain of TCR clone 264091 (TRBV5-1, TRBJ2-1)
CASSFTTGTALVEQYF

SEQ ID NO: 528183 - protein, 14 aa, Homo sapiens
  CDR3 for alpha chain variable domain of TCR clone 264092 (TRAV13-1, TRAJ44)
CAAKATGTASKLTF

SEQ ID NO: 528184 - protein, 17 aa, Homo sapiens
  CDR3 for beta chain variable domain of TCR clone 264092 (TRBV11-2, TRBJ2-1)
CASSLYPPGVEYSEQFF

SEQ ID NO: 528185 - protein, 13 aa, Homo sapiens
  CDR3 for alpha chain variable domain of TCR clone 264093 (TRAV12-3, TRAJ33)
CAMSVNSNYQLIW

SEQ ID NO: 528186 - protein, 15 aa, Homo sapiens
  CDR3 for beta chain variable domain of TCR clone 264093 (TRBV5-1, TRBJ2-3)
CASSVTAGSTDTQYF

SEQ ID NO: 528187 - protein, 13 aa, Homo sapiens
  CDR3 for alpha chain variable domain of TCR clone 264094 (TRAV3, TRAJ20)
CAVRSLNDYKLSF

SEQ ID NO: 528188 - protein, 15 aa, Homo sapiens
  CDR3 for beta chain variable domain of TCR clone 264094 (TRBV7-9, TRBJ1-4)
CASSRTGGFNEKLFF

SEQ ID NO: 528189 - protein, 15 aa, Homo sapiens
  CDR3 for alpha chain variable domain of TCR clone 264095 (TRAV3, TRAJ15)
CAVRPANHAGTALIF

SEQ ID NO: 528190 - protein, 14 aa, Homo sapiens
  CDR3 for beta chain variable domain of TCR clone 264095 (TRBV4-1, TRBJ2-2)
CASSQAVNTGELFF

SEQ ID NO: 528191 - protein, 18 aa, Homo sapiens
  CDR3 for alpha chain variable domain of TCR clone 264096 (TRAV26-2, TRAJ45)
CILRVDKYSGGGADGRTF

SEQ ID NO: 528192 - protein, 17 aa, Homo sapiens
  CDR3 for beta chain variable domain of TCR clone 264096 (TRBV13, TRBJ2-3)
CASSRSRVAGGRNTQYF

SEQ ID NO: 528193 - protein, 14 aa, Homo sapiens
  CDR3 for alpha chain variable domain of TCR clone 264097 (TRAV8-3, TRAJ4)
CAVGAAGGYNKLIF

SEQ ID NO: 528194 - protein, 15 aa, Homo sapiens
  CDR3 for beta chain variable domain of TCR clone 264097 (TRBV5-7, TRBJ2-1)
CASSYISGRGNEQFF

SEQ ID NO: 528195 - protein, 12 aa, Homo sapiens
  CDR3 for alpha chain variable domain of TCR clone 264098 (TRAV12-3, TRAJ17)
CAMTLTGNKLTF

SEQ ID NO: 528196 - protein, 13 aa, Homo sapiens
  CDR3 for beta chain variable domain of TCR clone 264098 (TRBV11-3, TRBJ2-1)
CASSPRRVDEQFF

SEQ ID NO: 528197 - protein, 14 aa, Homo sapiens
  CDR3 for alpha chain variable domain of TCR clone 264099 (TRAV12-2, TRAJ17)
CAVLFKAAGNKLTF

SEQ ID NO: 528198 - protein, 14 aa, Homo sapiens
  CDR3 for beta chain variable domain of TCR clone 264099 (TRBV7-2, TRBJ1-3)
CASSRGGTGNTIYF

SEQ ID NO: 528199 - protein, 15 aa, Homo sapiens
  CDR3 for alpha chain variable domain of TCR clone 264100 (TRAV3, TRAJ22)
CAVRDRGGSARQLTF

SEQ ID NO: 528200 - protein, 13 aa, Homo sapiens
  CDR3 for beta chain variable domain of TCR clone 264100 (TRBV6-3, TRBJ2-3)
CASTLQGIDTQYF

SEQ ID NO: 528201 - protein, 14 aa, Homo sapiens
  CDR3 for alpha chain variable domain of TCR clone 264101 (TRAV12-3, TRAJ29)
CAMILLSGNTPLVF

SEQ ID NO: 528202 - protein, 15 aa, Homo sapiens
  CDR3 for beta chain variable domain of TCR clone 264101 (TRBV19, TRBJ2-7)
FASRPTPGLSIEQYF

SEQ ID NO: 528203 - protein, 18 aa, Homo sapiens
  CDR3 for alpha chain variable domain of TCR clone 264102 (TRAV12-3, TRAJ52)
CAMSRTNAGGTCYGKLTF

SEQ ID NO: 528204 - protein, 15 aa, Homo sapiens
  CDR3 for beta chain variable domain of TCR clone 264102 (TRBV19, TRBJ1-2)
CASSVGQVLNYGYTF

SEQ ID NO: 528205 - protein, 12 aa, Homo sapiens
  CDR3 for alpha chain variable domain of TCR clone 264103 (TRAV8-3, TRAJ20)
CAVGANDYKLSF

SEQ ID NO: 528206 - protein, 15 aa, Homo sapiens
  CDR3 for beta chain variable domain of TCR clone 264103 (TRBV7-9, TRBJ1-5)
CASSQGHQPNQPQHF

SEQ ID NO: 528207 - protein, 17 aa, Homo sapiens
  CDR3 for alpha chain variable domain of TCR clone 264104 (TRAV3, TRAJ6)
CAVRDGPRAGGSYIPTF

SEQ ID NO: 528208 - protein, 14 aa, Homo sapiens
  CDR3 for beta chain variable domain of TCR clone 264104 (TRBV7-2, TRBJ2-2)
CASSLGHRTGELFF

SEQ ID NO: 528209 - protein, 15 aa, Homo sapiens
  CDR3 for alpha chain variable domain of TCR clone 264105 (TRAV8-4, TRAJ11)
CALSRALSGYSTLTF

SEQ ID NO: 528210 - protein, 13 aa, Homo sapiens
  CDR3 for beta chain variable domain of TCR clone 264105 (TRBV10-3, TRBJ2-7)
CASKLAVNYEQYF

SEQ ID NO: 528211 - protein, 14 aa, Homo sapiens
  CDR3 for alpha chain variable domain of TCR clone 264106 (TRAV29/DV5, TRAJ32)
CAAAYGGATNKLIF

SEQ ID NO: 528212 - protein, 15 aa, Homo sapiens
  CDR3 for beta chain variable domain of TCR clone 264106 (TRBV27, TRBJ2-7)
CDSSTAGTGSYEQYF

SEQ ID NO: 528213 - protein, 14 aa, Homo sapiens
  CDR3 for alpha chain variable domain of TCR clone 264107 (TRAV1-2, TRAJ16)
CAVNRFSDGQKLLF

SEQ ID NO: 528214 - protein, 14 aa, Homo sapiens
  CDR3 for beta chain variable domain of TCR clone 264107 (TRBV13, TRBJ2-5)
YASSLGRGQETQYF

SEQ ID NO: 528215 - protein, 12 aa, Homo sapiens
  CDR3 for alpha chain variable domain of TCR clone 264108 (TRAV8-3, TRAJ41)
CAVALSGYALNF

SEQ ID NO: 528216 - protein, 17 aa, Homo sapiens
  CDR3 for beta chain variable domain of TCR clone 264108 (TRBV7-3, TRBJ2-2)
CASSLSGTSGGTGELFV

SEQ ID NO: 528217 - protein, 12 aa, Homo sapiens
  CDR3 for alpha chain variable domain of TCR clone 264109 (TRAV3, TRAJ20)
CAVRDGDYKLSF

SEQ ID NO: 528218 - protein, 15 aa, Homo sapiens
  CDR3 for beta chain variable domain of TCR clone 264109 (TRBV28, TRBJ1-5)
CASSRTGGYVQPQHF

SEQ ID NO: 528219 - protein, 12 aa, Homo sapiens
  CDR3 for alpha chain variable domain of TCR clone 264110 (TRAV30, TRAJ43)
CGTEERGNDVRF

SEQ ID NO: 528220 - protein, 13 aa, Homo sapiens
  CDR3 for beta chain variable domain of TCR clone 264110 (TRBV27, TRBJ2-7)
CASSFSQGYDQYF

SEQ ID NO: 528221 - protein, 14 aa, Homo sapiens
  CDR3 for alpha chain variable domain of TCR clone 264111 (TRAV26-1, TRAJ26)
CIVRATFLGQNFVF

SEQ ID NO: 528222 - protein, 16 aa, Homo sapiens
  CDR3 for beta chain variable domain of TCR clone 264111 (TRBV12-4, TRBJ2-7)
CASRSTGTGPSFEQYF

SEQ ID NO: 528223 - protein, 12 aa, Homo sapiens
  CDR3 for alpha chain variable domain of TCR clone 264112 (TRAV8-4, TRAJ37)
CAVRSNTGKLIF

SEQ ID NO: 528224 - protein, 16 aa, Homo sapiens
  CDR3 for beta chain variable domain of TCR clone 264112 (TRBV11-2, TRBJ1-2)
CASSLDTGGADYGYTF

SEQ ID NO: 528225 - protein, 15 aa, Homo sapiens
  CDR3 for alpha chain variable domain of TCR clone 264113 (TRAV3, TRAJ3)
CAVRDGHSSASKIIF

SEQ ID NO: 528226 - protein, 16 aa, Homo sapiens
  CDR3 for beta chain variable domain of TCR clone 264113 (TRBV28, TRBJ1-5)
CASSLTGQGWNQPQHF

SEQ ID NO: 528227 - protein, 15 aa, Homo sapiens
  CDR3 for alpha chain variable domain of TCR clone 264114 (TRAV8-3, TRAJ11)
CAVGLLNSGYITLTF

SEQ ID NO: 528228 - protein, 13 aa, Homo sapiens
  CDR3 for beta chain variable domain of TCR clone 264114 (TRBV11-2, TRBJ2-5)
CASSSTGEETQYF

SEQ ID NO: 528229 - protein, 15 aa, Homo sapiens
  CDR3 for alpha chain variable domain of TCR clone 264115 (TRAV26-1, TRAJ29)
CIVRVEGSGNTPLVF

SEQ ID NO: 528230 - protein, 15 aa, Homo sapiens
  CDR3 for beta chain variable domain of TCR clone 264115 (TRBV12-4, TRBJ1-1)
CQQQDRVVAYTEAFF

SEQ ID NO: 528231 - protein, 12 aa, Homo sapiens
  CDR3 for alpha chain variable domain of TCR clone 264116 (TRAV27, TRAJ20)
CAGASNDYKPSF

SEQ ID NO: 528232 - protein, 15 aa, Homo sapiens
  CDR3 for beta chain variable domain of TCR clone 264116 (TRBV5-4, TRBJ1-2)
CASRGSRGTSGGYTF

SEQ ID NO: 528233 - protein, 16 aa, Homo sapiens
  CDR3 for alpha chain variable domain of TCR clone 264117 (TRAV21, TRAJ37)
CAMRPRGSSNTGKLIF

SEQ ID NO: 528234 - protein, 13 aa, Homo sapiens
  CDR3 for beta chain variable domain of TCR clone 264117 (TRBV7-9, TRBJ2-5)
CASLSPGQETQYF

SEQ ID NO: 528235 - protein, 13 aa, Homo sapiens
  CDR3 for alpha chain variable domain of TCR clone 264118 (TRAV3, TRAJ20)
CAVRDTPRYKLSF

SEQ ID NO: 528236 - protein, 16 aa, Homo sapiens
  CDR3 for beta chain variable domain of TCR clone 264118 (TRBV20-1, TRBJ2-7)
CSARAPGLVLSYEQYF

SEQ ID NO: 528237 - protein, 13 aa, Homo sapiens
  CDR3 for alpha chain variable domain of TCR clone 264119 (TRAV8-3, TRAJ6)
CAVGSGGSYIPKF

SEQ ID NO: 528238 - protein, 14 aa, Homo sapiens
  CDR3 for beta chain variable domain of TCR clone 264119 (TRBV11-2, TRBJ1-1)
CASSTQRGRTEAFF

SEQ ID NO: 528239 - protein, 12 aa, Homo sapiens
  CDR3 for alpha chain variable domain of TCR clone 264120 (TRAV12-2, TRAJ4)
GWPEGGYNKLIF

SEQ ID NO: 528240 - protein, 15 aa, Homo sapiens
  CDR3 for beta chain variable domain of TCR clone 264120 (TRBV9, TRBJ1-6)
CASSVAGTGDSHLHF

SEQ ID NO: 528241 - protein, 14 aa, Homo sapiens
  CDR3 for alpha chain variable domain of TCR clone 264121 (TRAV1-2, TRAJ16)
CAVNRFSDGQKLLF

SEQ ID NO: 528242 - protein, 16 aa, Homo sapiens
  CDR3 for beta chain variable domain of TCR clone 264121 (TRBV2, TRBJ2-1)
CASSANPRDWQAEQFF

SEQ ID NO: 528243 - protein, 15 aa, Homo sapiens
  CDR3 for alpha chain variable domain of TCR clone 264122 (TRAV13-1, TRAJ52)
SYYNAGGSSYGKLTF

SEQ ID NO: 528244 - protein, 11 aa, Homo sapiens
  CDR3 for beta chain variable domain of TCR clone 264122 (TRBV12-4, TRBJ2-2)
CASSSAGELFF

SEQ ID NO: 528245 - protein, 12 aa, Homo sapiens
  CDR3 for alpha chain variable domain of TCR clone 264123 (TRAV29/DV5, TRAJ49)
CAATDTGNQFYF

SEQ ID NO: 528246 - protein, 19 aa, Homo sapiens
  CDR3 for beta chain variable domain of TCR clone 264123 (TRBV25-1, TRBJ2-2)
CAILVYRVDRLRKTGELFF

SEQ ID NO: 528247 - protein, 12 aa, Homo sapiens
  CDR3 for alpha chain variable domain of TCR clone 264124 (TRAV16, TRAJ12)
CAHRDSSYKLIF

SEQ ID NO: 528248 - protein, 12 aa, Homo sapiens
  CDR3 for beta chain variable domain of TCR clone 264124 (TRBV28, TRBJ2-1)
RASSRLVGEQFF

SEQ ID NO: 528249 - protein, 12 aa, Homo sapiens
  CDR3 for alpha chain variable domain of TCR clone 264125 (TRAV21, TRAJ8)
CAVNTGFPKLVF

SEQ ID NO: 528250 - protein, 13 aa, Homo sapiens
  CDR3 for beta chain variable domain of TCR clone 264125 (TRBV6-3, TRBJ2-1)
CASSYDNYNEQFF

SEQ ID NO: 528251 - protein, 17 aa, Homo sapiens
  CDR3 for alpha chain variable domain of TCR clone 264126 (TRAV36/DV7, TRAJ52)
CAVAQRAGGTSYGKLTC

SEQ ID NO: 528252 - protein, 14 aa, Homo sapiens
  CDR3 for beta chain variable domain of TCR clone 264126 (TRBV6-1, TRBJ1-3)
CARVQGGGGNTIYF

SEQ ID NO: 528253 - protein, 16 aa, Homo sapiens
  CDR3 for alpha chain variable domain of TCR clone 264127 (TRAV3, TRAJ37)
CAVRGKGSGNTGKLIF

SEQ ID NO: 528254 - protein, 15 aa, Homo sapiens
  CDR3 for beta chain variable domain of TCR clone 264127 (TRBV7-3, TRBJ2-2)
CASSGTGQGTGELFF

SEQ ID NO: 528255 - protein, 13 aa, Homo sapiens
  CDR3 for alpha chain variable domain of TCR clone 264128 (TRAV24, TRAJ23)
CASHWNQGGKLIF

SEQ ID NO: 528256 - protein, 15 aa, Homo sapiens
  CDR3 for beta chain variable domain of TCR clone 264128 (TRBV9, TRBJ1-6)
CASSVAGTGDSPLHF

SEQ ID NO: 528257 - protein, 13 aa, Homo sapiens
  CDR3 for alpha chain variable domain of TCR clone 264129 (TRAV12-3, TRAJ13)
CAMTSGGYQKVTF

SEQ ID NO: 528258 - protein, 14 aa, Homo sapiens
  CDR3 for beta chain variable domain of TCR clone 264129 (TRBV7-3, TRBJ1-1)
CASSLKGGNTEAFF

SEQ ID NO: 528259 - protein, 11 aa, Homo sapiens
  CDR3 for alpha chain variable domain of TCR clone 264130 (TRAV13-1, TRAJ23)
CAASSQGKLIF

SEQ ID NO: 528260 - protein, 18 aa, Homo sapiens
  CDR3 for beta chain variable domain of TCR clone 264130 (TRBV7-3, TRBJ2-5)
CASSFQGGGDPVLRARHA

SEQ ID NO: 528261 - protein, 14 aa, Homo sapiens
  CDR3 for alpha chain variable domain of TCR clone 264131 (TRAV12-2, TRAJ40)
CAVQIPSGTYKYIF

SEQ ID NO: 528262 - protein, 14 aa, Homo sapiens
  CDR3 for beta chain variable domain of TCR clone 264131 (TRBV20-1, TRBJ1-1)
CSAQTRIGGTEAVF

SEQ ID NO: 528263 - protein, 14 aa, Homo sapiens
  CDR3 for alpha chain variable domain of TCR clone 264132 (TRAV29/DV5, TRAJ36)
CAARRKTGANNLSF

SEQ ID NO: 528264 - protein, 14 aa, Homo sapiens
  CDR3 for beta chain variable domain of TCR clone 264132 (TRBV12-5, TRBJ2-5)
CASGSRTHQGTQYF

SEQ ID NO: 528265 - protein, 16 aa, Homo sapiens
  CDR3 for alpha chain variable domain of TCR clone 264133 (TRAV3, TRAJ37)
CAVRPHGSRNTAKLIF

SEQ ID NO: 528266 - protein, 16 aa, Homo sapiens
  CDR3 for beta chain variable domain of TCR clone 264133 (TRBV9, TRBJ1-2)
CASSVEEKVSPYGYTF

SEQ ID NO: 528267 - protein, 17 aa, Homo sapiens
  CDR3 for alpha chain variable domain of TCR clone 264134 (TRAV36/DV7, TRAJ52)
CAVAQRAGGTSYGKLTF

SEQ ID NO: 528268 - protein, 15 aa, Homo sapiens
  CDR3 for beta chain variable domain of TCR clone 264134 (TRBV27, TRBJ1-3)
CASSPSPGSGNTIYF

SEQ ID NO: 528269 - protein, 16 aa, Homo sapiens
  CDR3 for alpha chain variable domain of TCR clone 264135 (TRAV3, TRAJ37)
CAVRGKGSGNTGKLIF

SEQ ID NO: 528270 - protein, 14 aa, Homo sapiens
  CDR3 for beta chain variable domain of TCR clone 264135 (TRBV4-2, TRBJ2-5)
CASSQDRGRETQYF

SEQ ID NO: 528271 - protein, 15 aa, Homo sapiens
  CDR3 for alpha chain variable domain of TCR clone 264136 (TRAV3, TRAJ3)
CAVRDRDSSASKIIF

SEQ ID NO: 528272 - protein, 18 aa, Homo sapiens
  CDR3 for beta chain variable domain of TCR clone 264136 (TRBV25-1, TRBJ1-2)
CASSGLQNGQGLIFDDTF

SEQ ID NO: 528273 - protein, 15 aa, Homo sapiens
  CDR3 for alpha chain variable domain of TCR clone 264137 (TRAV3, TRAJ4)
CAVRDGTGGYNKLIF

SEQ ID NO: 528274 - protein, 16 aa, Homo sapiens
  CDR3 for beta chain variable domain of TCR clone 264137 (TRBV27, TRBJ2-2)
RASSSSGVSNTGELFF

SEQ ID NO: 528275 - protein, 12 aa, Homo sapiens
  CDR3 for alpha chain variable domain of TCR clone 264138 (TRAV12-3, TRAJ17)
CAMTLTGNKLTF

SEQ ID NO: 528276 - protein, 14 aa, Homo sapiens
  CDR3 for beta chain variable domain of TCR clone 264138 (TRBV12-4, TRBJ2-3)
CASSLSGATDTQYF

SEQ ID NO: 528277 - protein, 14 aa, Homo sapiens
  CDR3 for alpha chain variable domain of TCR clone 264139 (TRAV1-2, TRAJ16)
CAVNRFSDGQKLLF

SEQ ID NO: 528278 - protein, 13 aa, Homo sapiens
  CDR3 for beta chain variable domain of TCR clone 264139 (TRBV15, TRBJ1-6)
CATSGGLNSPLLF

SEQ ID NO: 528279 - protein, 14 aa, Homo sapiens
  CDR3 for alpha chain variable domain of TCR clone 264140 (TRAV12-2, TRAJ44)
CAVNPAGPASKLTF

SEQ ID NO: 528280 - protein, 15 aa, Homo sapiens
  CDR3 for beta chain variable domain of TCR clone 264140 (TRBV7-3, TRBJ2-1)
CASSPTGGGEVEQFF

SEQ ID NO: 528281 - protein, 14 aa, Homo sapiens
  CDR3 for alpha chain variable domain of TCR clone 264141 (TRAV12-2, TRAJ15)
CAPHTGQAGTALIF

SEQ ID NO: 528282 - protein, 13 aa, Homo sapiens
  CDR3 for beta chain variable domain of TCR clone 264141 (TRBV7-9, TRBJ1-2)
CASSLEQNYGYTF

SEQ ID NO: 528283 - protein, 15 aa, Homo sapiens
  CDR3 for alpha chain variable domain of TCR clone 264142 (TRAV29/DV5, TRAJ24)
CAASGATDSLGKFQF

SEQ ID NO: 528284 - protein, 13 aa, Homo sapiens
  CDR3 for beta chain variable domain of TCR clone 264142 (TRBV19, TRBJ1-2)
CASSVPGQDGYTF

SEQ ID NO: 528285 - protein, 15 aa, Homo sapiens
  CDR3 for alpha chain variable domain of TCR clone 264143 (TRAV8-4, TRAJ3)
CAVTGENRVQQCFQD

SEQ ID NO: 528286 - protein, 16 aa, Homo sapiens
  CDR3 for beta chain variable domain of TCR clone 264143 (TRBV4-2, TRBJ1-1)
CASSQAGFGMNTEAFF

SEQ ID NO: 528287 - protein, 14 aa, Homo sapiens
  CDR3 for alpha chain variable domain of TCR clone 264144 (TRAV21, TRAJ36)
CAVIKTGKQPLLWD

SEQ ID NO: 528288 - protein, 13 aa, Homo sapiens
  CDR3 for beta chain variable domain of TCR clone 264144 (TRBV29-1, TRBJ2-3)
CSATRGGRDTQYF

SEQ ID NO: 528289 - protein, 13 aa, Homo sapiens
  CDR3 for alpha chain variable domain of TCR clone 264145 (TRAV8-3, TRAJ44)
CAVVPGTASKPTF

SEQ ID NO: 528290 - protein, 13 aa, Homo sapiens
  CDR3 for beta chain variable domain of TCR clone 264145 (TRBV15, TRBJ2-7)
CATSTTGHYEQYF

SEQ ID NO: 528291 - protein, 14 aa, Homo sapiens
  CDR3 for alpha chain variable domain of TCR clone 264146 (TRAV12-1, TRAJ17)
CVVNYKAAGNKLTF

SEQ ID NO: 528292 - protein, 13 aa, Homo sapiens
  CDR3 for beta chain variable domain of TCR clone 264146 (TRBV7-8, TRBJ1-5)
CASSLGGDQPQHF

SEQ ID NO: 528293 - protein, 16 aa, Homo sapiens
  CDR3 for alpha chain variable domain of TCR clone 264147 (TRAV30, TRAJ24)
CGTEIVDADSWGKFRF

SEQ ID NO: 528294 - protein, 12 aa, Homo sapiens
  CDR3 for beta chain variable domain of TCR clone 264147 (TRBV7-8, TRBJ2-7)
CASSLGDREQYF

SEQ ID NO: 528295 - protein, 11 aa, Homo sapiens
  CDR3 for alpha chain variable domain of TCR clone 264148 (TRAV21, TRAJ39)
LLVNAGNMLTF

SEQ ID NO: 528296 - protein, 14 aa, Homo sapiens
  CDR3 for beta chain variable domain of TCR clone 264148 (TRBV12-5, TRBJ2-5)
CASGSRTHQETQYF

SEQ ID NO: 528297 - protein, 17 aa, Homo sapiens
  CDR3 for alpha chain variable domain of TCR clone 264149 (TRAV12-3, TRAJ26)
CAMSGGRWGNYGQNFVF

SEQ ID NO: 528298 - protein, 12 aa, Homo sapiens
  CDR3 for beta chain variable domain of TCR clone 264149 (TRBV19, TRBJ1-1)
CASSTTGIEAFC

SEQ ID NO: 528299 - protein, 12 aa, Homo sapiens
  CDR3 for alpha chain variable domain of TCR clone 264150 (TRAV13-2, TRAJ44)
CAEPGTASKLTF

SEQ ID NO: 528300 - protein, 16 aa, Homo sapiens
  CDR3 for beta chain variable domain of TCR clone 264150 (TRBV24-1, TRBJ2-3)
CATSDPGTGATDTQYF

SEQ ID NO: 528301 - protein, 16 aa, Homo sapiens
  CDR3 for alpha chain variable domain of TCR clone 264151 (TRAV12-3, TRAJ58)
CAMTATEETSGSRLTF

SEQ ID NO: 528302 - protein, 22 aa, Homo sapiens
  CDR3 for beta chain variable domain of TCR clone 264151 (TRBV23-1, TRBJ2-7)
CASSRRLDSGQGYVGGGYEQYF

SEQ ID NO: 528303 - protein, 15 aa, Homo sapiens
  CDR3 for alpha chain variable domain of TCR clone 264152 (TRAV12-2, TRAJ53)
CAVNGGGGSNYKLTF

SEQ ID NO: 528304 - protein, 13 aa, Homo sapiens
  CDR3 for beta chain variable domain of TCR clone 264152 (TRBV14, TRBJ2-7)
CASSQDRRYEQYF

SEQ ID NO: 528305 - protein, 11 aa, Homo sapiens
  CDR3 for alpha chain variable domain of TCR clone 264153 (TRAV17, TRAJ9)
CATTGGLKNIF

SEQ ID NO: 528306 - protein, 14 aa, Homo sapiens
  CDR3 for beta chain variable domain of TCR clone 264153 (TRBV7-9, TRBJ2-2)
CASSGLADTGELFF

SEQ ID NO: 528307 - protein, 14 aa, Homo sapiens
  CDR3 for alpha chain variable domain of TCR clone 264154 (TRAV12-3, TRAJ41)
CAMSAGNSGYALNF

SEQ ID NO: 528308 - protein, 14 aa, Homo sapiens
  CDR3 for beta chain variable domain of TCR clone 264154 (TRBV25-1, TRBJ1-1)
CASTHLGGNTEAFF

SEQ ID NO: 528309 - protein, 12 aa, Homo sapiens
  CDR3 for alpha chain variable domain of TCR clone 264155 (TRAV35, TRAJ52)
NAGGTSYGKLTF

SEQ ID NO: 528310 - protein, 12 aa, Homo sapiens
  CDR3 for beta chain variable domain of TCR clone 264155 (TRBV11-2, TRBJ2-1)
CASSPGNNEQFF

SEQ ID NO: 528311 - protein, 13 aa, Homo sapiens
  CDR3 for alpha chain variable domain of TCR clone 264156 (TRAV2, TRAJ40)
CAVVTSGTYKYIF

SEQ ID NO: 528312 - protein, 14 aa, Homo sapiens
  CDR3 for beta chain variable domain of TCR clone 264156 (TRBV19, TRBJ2-1)
CASGKSTQYNEQFF

SEQ ID NO: 528313 - protein, 14 aa, Homo sapiens
  CDR3 for alpha chain variable domain of TCR clone 264157 (TRAV3, TRAJ21)
CAVRDAYNFKKFYF

SEQ ID NO: 528314 - protein, 15 aa, Homo sapiens
  CDR3 for beta chain variable domain of TCR clone 264157 (TRBV6-5, TRBJ1-5)
CASSYSWDSNQPQHF

SEQ ID NO: 528315 - protein, 16 aa, Homo sapiens
  CDR3 for alpha chain variable domain of TCR clone 264158 (TRAV21, TRAJ33)
CAVSPASMDSNYQLIC

SEQ ID NO: 528316 - protein, 17 aa, Homo sapiens
  CDR3 for beta chain variable domain of TCR clone 264158 (TRBV2, TRBJ1-4)
CASSKSELTQGEEKLFF

SEQ ID NO: 528317 - protein, 12 aa, Homo sapiens
  CDR3 for alpha chain variable domain of TCR clone 264159 (TRAV8-3, TRAJ26)
CAGDNYGQNFVF

SEQ ID NO: 528318 - protein, 15 aa, Homo sapiens
  CDR3 for beta chain variable domain of TCR clone 264159 (TRBV20-1, TRBJ2-7)
CSARDGVSGMDEQYF

SEQ ID NO: 528319 - protein, 12 aa, Homo sapiens
  CDR3 for alpha chain variable domain of TCR clone 264160 (TRAV12-3, TRAJ41)
CAMSYSGYALNF

SEQ ID NO: 528320 - protein, 15 aa, Homo sapiens
  CDR3 for beta chain variable domain of TCR clone 264160 (TRBV5-1, TRBJ2-1)
CASSPLRAPYNEQFF

SEQ ID NO: 528321 - protein, 18 aa, Homo sapiens
  CDR3 for alpha chain variable domain of TCR clone 264161 (TRAV21, TRAJ52)
CVVRPSPAGGTSYGKLTF

SEQ ID NO: 528322 - protein, 12 aa, Homo sapiens
  CDR3 for beta chain variable domain of TCR clone 264161 (TRBV11-2, TRBJ2-2)
CASSLGGGELFF

SEQ ID NO: 528323 - protein, 16 aa, Homo sapiens
  CDR3 for alpha chain variable domain of TCR clone 264162 (TRAV3, TRAJ37)
CAVRGKGSGNTGKLIF

SEQ ID NO: 528324 - protein, 15 aa, Homo sapiens
  CDR3 for beta chain variable domain of TCR clone 264162 (TRBV11-2, TRBJ1-6)
CASTLRGTGNSPLHF

SEQ ID NO: 528325 - protein, 17 aa, Homo sapiens
  CDR3 for alpha chain variable domain of TCR clone 264163 (TRAV3, TRAJ6)
CAVRDGPKGRRKLHTYI

SEQ ID NO: 528326 - protein, 14 aa, Homo sapiens
  CDR3 for beta chain variable domain of TCR clone 264163 (TRBV7-2, TRBJ2-7)
CASSPKTSFYEQYF

SEQ ID NO: 528327 - protein, 14 aa, Homo sapiens
  CDR3 for alpha chain variable domain of TCR clone 264164 (TRAV1-2, TRAJ16)
CAVNRFSDRQKLLF

SEQ ID NO: 528328 - protein, 11 aa, Homo sapiens
  CDR3 for beta chain variable domain of TCR clone 264164 (TRBV11-2, TRBJ2-2)
CASSLPGELFF

SEQ ID NO: 528329 - protein, 15 aa, Homo sapiens
  CDR3 for alpha chain variable domain of TCR clone 264165 (TRAV35, TRAJ58)
CAGRRQETSGSRLTF

SEQ ID NO: 528330 - protein, 11 aa, Homo sapiens
  CDR3 for beta chain variable domain of TCR clone 264165 (TRBV11-2, TRBJ1-1)
CASNINTEAFF

SEQ ID NO: 528331 - protein, 15 aa, Homo sapiens
  CDR3 for alpha chain variable domain of TCR clone 264166 (TRAV8-3, TRAJ15)
CAVGAPNEAGTALIF

SEQ ID NO: 528332 - protein, 14 aa, Homo sapiens
  CDR3 for beta chain variable domain of TCR clone 264166 (TRBV20-1, TRBJ2-1)
CSPNDEASYNEQFF

SEQ ID NO: 528333 - protein, 14 aa, Homo sapiens
  CDR3 for alpha chain variable domain of TCR clone 264167 (TRAV12-2, TRAJ13)
CAVKKTGGYQKDTF

SEQ ID NO: 528334 - protein, 14 aa, Homo sapiens
  CDR3 for beta chain variable domain of TCR clone 264167 (TRBV5-1, TRBJ2-5)
CASSLAGKQETQYF

SEQ ID NO: 528335 - protein, 23 aa, Homo sapiens
  CDR3 for alpha chain variable domain of TCR clone 264168 (TRAV17, TRAJ9)
CATTEASKLSLEQEQDYLLKQIS

SEQ ID NO: 528336 - protein, 14 aa, Homo sapiens
  CDR3 for beta chain variable domain of TCR clone 264168 (TRBV7-9, TRBJ2-2)
CASSGLADTGELFF

SEQ ID NO: 528337 - protein, 14 aa, Homo sapiens
  CDR3 for alpha chain variable domain of TCR clone 264169 (TRAV23/DV6, TRAJ8)
CAASKATGFQKLAF

SEQ ID NO: 528338 - protein, 15 aa, Homo sapiens
  CDR3 for beta chain variable domain of TCR clone 264169 (TRBV28, TRBJ2-3)
CASSPDRQGANTQYC

SEQ ID NO: 528339 - protein, 15 aa, Homo sapiens
  CDR3 for alpha chain variable domain of TCR clone 264170 (TRAV8-3, TRAJ15)
CAVGAPNQAGTALIF

SEQ ID NO: 528340 - protein, 17 aa, Homo sapiens
  CDR3 for beta chain variable domain of TCR clone 264170 (TRBV20-1, TRBJ2-1)
CSASSSGLAGSYNEQFF

SEQ ID NO: 528341 - protein, 13 aa, Homo sapiens
  CDR3 for alpha chain variable domain of TCR clone 264171 (TRAV2, TRAJ40)
CAVVTSGAYKYIF

SEQ ID NO: 528342 - protein, 14 aa, Homo sapiens
  CDR3 for beta chain variable domain of TCR clone 264171 (TRBV19, TRBJ2-1)
CASLTFVLSGEQFF

SEQ ID NO: 528343 - protein, 16 aa, Homo sapiens
  CDR3 for alpha chain variable domain of TCR clone 264172 (TRAV30, TRAJ24)
CGTEIVDADSWGNSIL

SEQ ID NO: 528344 - protein, 14 aa, Homo sapiens
  CDR3 for beta chain variable domain of TCR clone 264172 (TRBV12-5, TRBJ2-5)
CASGSRTHQETQYF

SEQ ID NO: 528345 - protein, 16 aa, Homo sapiens
  CDR3 for alpha chain variable domain of TCR clone 264173 (TRAV3, TRAJ21)
CAVRDIERGNFNKFYF

SEQ ID NO: 528346 - protein, 15 aa, Homo sapiens
  CDR3 for beta chain variable domain of TCR clone 264173 (TRBV28, TRBJ2-3)
CAPTFRDWSTDTQYF

SEQ ID NO: 528347 - protein, 11 aa, Homo sapiens
  CDR3 for alpha chain variable domain of TCR clone 264174 (TRAV2, TRAJ13)
CASGGYQTVTF

SEQ ID NO: 528348 - protein, 14 aa, Homo sapiens
  CDR3 for beta chain variable domain of TCR clone 264174 (TRBV6-3, TRBJ1-1)
CASSNLLPGAEAFF

SEQ ID NO: 528349 - protein, 14 aa, Homo sapiens
  CDR3 for alpha chain variable domain of TCR clone 264175 (TRAV21, TRAJ21)
CAVKGFGNFNKFYF

SEQ ID NO: 528350 - protein, 13 aa, Homo sapiens
  CDR3 for beta chain variable domain of TCR clone 264175 (TRBV18, TRBJ1-1)
CASSPETKPEAFC

SEQ ID NO: 528351 - protein, 12 aa, Homo sapiens
  CDR3 for alpha chain variable domain of TCR clone 264176 (TRAV27, TRAJ34)
CAGAKNTDKLTF

SEQ ID NO: 528352 - protein, 13 aa, Homo sapiens
  CDR3 for beta chain variable domain of TCR clone 264176 (TRBV4-1, TRBJ2-1)
CASSQEVQYEQFF

SEQ ID NO: 528353 - protein, 15 aa, Homo sapiens
  CDR3 for alpha chain variable domain of TCR clone 264177 (TRAV8-4, TRAJ3)
CAVTGENLVQQCFQD

SEQ ID NO: 528354 - protein, 13 aa, Homo sapiens
  CDR3 for beta chain variable domain of TCR clone 264177 (TRBV5-7, TRBJ1-2)
CASSLIRAPGYTF

SEQ ID NO: 528355 - protein, 15 aa, Homo sapiens
  CDR3 for alpha chain variable domain of TCR clone 264178 (TRAV1-2, TRAJ28)
CGVQYSGAGSYQLTF

SEQ ID NO: 528356 - protein, 13 aa, Homo sapiens
  CDR3 for beta chain variable domain of TCR clone 264178 (TRBV4-2, TRBJ1-1)
CASSQAGNTEAFF

SEQ ID NO: 528357 - protein, 14 aa, Homo sapiens
  CDR3 for alpha chain variable domain of TCR clone 264179 (TRAV3, TRAJ7)
CAVIEEEREQQTRF

SEQ ID NO: 528358 - protein, 12 aa, Homo sapiens
  CDR3 for beta chain variable domain of TCR clone 264179 (TRBV7-8, TRBJ2-7)
CASSLGDREQYF

SEQ ID NO: 528359 - protein, 14 aa, Homo sapiens
  CDR3 for alpha chain variable domain of TCR clone 264180 (TRAV12-2, TRAJ13)
CAVKKTGGYQKVTF

SEQ ID NO: 528360 - protein, 15 aa, Homo sapiens
  CDR3 for beta chain variable domain of TCR clone 264180 (TRBV9, TRBJ1-6)
CASSVAGTGDSPLHL

SEQ ID NO: 528361 - protein, 17 aa, Homo sapiens
  CDR3 for alpha chain variable domain of TCR clone 264181 (TRAV3, TRAJ6)
CAVRDGPRAGGSYIPTS

SEQ ID NO: 528362 - protein, 14 aa, Homo sapiens
  CDR3 for beta chain variable domain of TCR clone 264181 (TRBV7-2, TRBJ2-7)
CASSPKTGFYEQYF

SEQ ID NO: 528363 - protein, 11 aa, Homo sapiens
  CDR3 for alpha chain variable domain of TCR clone 264182 (TRAV12-3, TRAJ43)
CAMRVSNDMRF

SEQ ID NO: 528364 - protein, 15 aa, Homo sapiens
  CDR3 for beta chain variable domain of TCR clone 264182 (TRBV5-1, TRBJ2-1)
CASSPPRASYNEQFF

SEQ ID NO: 528365 - protein, 12 aa, Homo sapiens
  CDR3 for alpha chain variable domain of TCR clone 264183 (TRAV21, TRAJ33)
CAKMDSNYQLIW

SEQ ID NO: 528366 - protein, 15 aa, Homo sapiens
  CDR3 for beta chain variable domain of TCR clone 264183 (TRBV9, TRBJ1-6)
CASSVAGTGDSHLHF

SEQ ID NO: 528367 - protein, 14 aa, Homo sapiens
  CDR3 for alpha chain variable domain of TCR clone 264184 (TRAV12-2, TRAJ45)
CAVNKGGGADGLTF

SEQ ID NO: 528368 - protein, 11 aa, Homo sapiens
  CDR3 for beta chain variable domain of TCR clone 264184 (TRBV6-3, TRBJ2-3)
CATGQADTQYF

SEQ ID NO: 528369 - protein, 15 aa, Homo sapiens
  CDR3 for alpha chain variable domain of TCR clone 264185 (TRAV34, TRAJ38)
CGADFTPGNNRKLIW

SEQ ID NO: 528370 - protein, 15 aa, Homo sapiens
  CDR3 for beta chain variable domain of TCR clone 264185 (TRBV20-1, TRBJ2-7)
CSARDRVYGMDEQYF

SEQ ID NO: 528371 - protein, 13 aa, Homo sapiens
  CDR3 for alpha chain variable domain of TCR clone 264186 (TRAV20, TRAJ48)
CAVHLFGNEKLTF

SEQ ID NO: 528372 - protein, 14 aa, Homo sapiens
  CDR3 for beta chain variable domain of TCR clone 264186 (TRBV28, TRBJ1-4)
CASSFGTFDEKLFF

SEQ ID NO: 528373 - protein, 18 aa, Homo sapiens
  CDR3 for alpha chain variable domain of TCR clone 264187 (TRAV13-1, TRAJ52)
CAAKNPNAGGTSYGKLQF

SEQ ID NO: 528374 - protein, 13 aa, Homo sapiens
  CDR3 for beta chain variable domain of TCR clone 264187 (TRBV7-9, TRBJ1-2)
CASSLKQNYGYAF

SEQ ID NO: 528375 - protein, 22 aa, Homo sapiens
  CDR3 for alpha chain variable domain of TCR clone 264188 (TRAV8-2, TRAJ45)
HLTKPSAHMSDAAEYSADGLTF

SEQ ID NO: 528376 - protein, 14 aa, Homo sapiens
  CDR3 for beta chain variable domain of TCR clone 264188 (TRBV7-8, TRBJ2-3)
CASSLEAGTDTQYF

SEQ ID NO: 528377 - protein, 12 aa, Homo sapiens
  CDR3 for alpha chain variable domain of TCR clone 264189 (TRAV17, TRAJ12)
CATLGSSYKLIF

SEQ ID NO: 528378 - protein, 16 aa, Homo sapiens
  CDR3 for beta chain variable domain of TCR clone 264189 (TRBV28, TRBJ2-7)
CASSLFFETGGPEQYF

SEQ ID NO: 528379 - protein, 18 aa, Homo sapiens
  CDR3 for alpha chain variable domain of TCR clone 264190 (TRAV12-3, TRAJ52)
CAMSVGGAGGTSYGKLTF

SEQ ID NO: 528380 - protein, 14 aa, Homo sapiens
  CDR3 for beta chain variable domain of TCR clone 264190 (TRBV7-8, TRBJ1-2)
CASSPDSLSYGYTF

SEQ ID NO: 528381 - protein, 17 aa, Homo sapiens
  CDR3 for alpha chain variable domain of TCR clone 264191 (TRAV8-3, TRAJ8)
CAVGPNEHRLSETCICN

SEQ ID NO: 528382 - protein, 13 aa, Homo sapiens
  CDR3 for beta chain variable domain of TCR clone 264191 (TRBV7-9, TRBJ2-1)
CASSWESYNEQFF

SEQ ID NO: 528383 - protein, 14 aa, Homo sapiens
  CDR3 for alpha chain variable domain of TCR clone 264192 (TRAV2, TRAJ3)
CCGAPYSSASKIIF

SEQ ID NO: 528384 - protein, 15 aa, Homo sapiens
  CDR3 for beta chain variable domain of TCR clone 264192 (TRBV18, TRBJ1-1)
CASSPRQGENTEAFF

SEQ ID NO: 528385 - protein, 14 aa, Homo sapiens
  CDR3 for alpha chain variable domain of TCR clone 264193 (TRAV1-2, TRAJ16)
CAVNRFSDGQKLLF

SEQ ID NO: 528386 - protein, 15 aa, Homo sapiens
  CDR3 for beta chain variable domain of TCR clone 264193 (TRBV18, TRBJ2-2)
CQLTTPDSEHRELFF

SEQ ID NO: 528387 - protein, 14 aa, Homo sapiens
  CDR3 for alpha chain variable domain of TCR clone 264194 (TRAV13-1, TRAJ13)
CAASRVGGYQKVTF

SEQ ID NO: 528388 - protein, 17 aa, Homo sapiens
  CDR3 for beta chain variable domain of TCR clone 264194 (TRBV15, TRBJ1-5)
GATSRAPPGTRNQPQHF

SEQ ID NO: 528389 - protein, 13 aa, Homo sapiens
  CDR3 for alpha chain variable domain of TCR clone 264195 (TRAV29/DV5, TRAJ37)
CAAVPGNTGKLIF

SEQ ID NO: 528390 - protein, 13 aa, Homo sapiens
  CDR3 for beta chain variable domain of TCR clone 264195 (TRBV28, TRBJ2-7)
CASSPTLKREQSF

SEQ ID NO: 528391 - protein, 12 aa, Homo sapiens
  CDR3 for alpha chain variable domain of TCR clone 264196 (TRAV1-2, TRAJ33)
CACGDSNYQLIW

SEQ ID NO: 528392 - protein, 14 aa, Homo sapiens
  CDR3 for beta chain variable domain of TCR clone 264196 (TRBV12-5, TRBJ2-5)
CASGSRTHQETQYF

SEQ ID NO: 528393 - protein, 16 aa, Homo sapiens
  CDR3 for alpha chain variable domain of TCR clone 264197 (TRAV8-3, TRAJ10)
CAVGPILTGGGNKLTF

SEQ ID NO: 528394 - protein, 16 aa, Homo sapiens
  CDR3 for beta chain variable domain of TCR clone 264197 (TRBV7-3, TRBJ2-1)
CASSLEGYRSYNEQFF

SEQ ID NO: 528395 - protein, 14 aa, Homo sapiens
  CDR3 for alpha chain variable domain of TCR clone 264198 (TRAV8-3, TRAJ39)
CAVGAWGAGNMLTC

SEQ ID NO: 528396 - protein, 16 aa, Homo sapiens
  CDR3 for beta chain variable domain of TCR clone 264198 (TRBV7-2, TRBJ1-3)
CASSSGRVLSGNTIYF

SEQ ID NO: 528397 - protein, 15 aa, Homo sapiens
  CDR3 for alpha chain variable domain of TCR clone 264199 (TRAV13-1, TRAJ57)
CAASNTQGGSEKLVF

SEQ ID NO: 528398 - protein, 16 aa, Homo sapiens
  CDR3 for beta chain variable domain of TCR clone 264199 (TRBV6-1, TRBJ2-5)
CASSETLDRGAETQYF

SEQ ID NO: 528399 - protein, 14 aa, Homo sapiens
  CDR3 for alpha chain variable domain of TCR clone 264200 (TRAV1-2, TRAJ16)
CAVNRFSDGQKLLF

SEQ ID NO: 528400 - protein, 15 aa, Homo sapiens
  CDR3 for beta chain variable domain of TCR clone 264200 (TRBV9, TRBJ2-1)
CASSLAGSSYSEQFF

SEQ ID NO: 528401 - protein, 14 aa, Homo sapiens
  CDR3 for alpha chain variable domain of TCR clone 264201 (TRAV8-6, TRAJ53)
CAALGLGSNYKLTF

SEQ ID NO: 528402 - protein, 15 aa, Homo sapiens
  CDR3 for beta chain variable domain of TCR clone 264201 (TRBV20-1, TRBJ2-3)
CSAEPLAGHGDTQYF

SEQ ID NO: 528403 - protein, 14 aa, Homo sapiens
  CDR3 for alpha chain variable domain of TCR clone 264202 (TRAV12-3, TRAJ10)
SHLPLTGGGNKLTF

SEQ ID NO: 528404 - protein, 14 aa, Homo sapiens
  CDR3 for beta chain variable domain of TCR clone 264202 (TRBV19, TRBJ1-4)
CASAIEAEGEELFF

SEQ ID NO: 528405 - protein, 23 aa, Homo sapiens
  CDR3 for alpha chain variable domain of TCR clone 264203 (TRAV26-1, TRAJ38)
CIADNAGNNHIQNPDPAVYQLRD

SEQ ID NO: 528406 - protein, 16 aa, Homo sapiens
  CDR3 for beta chain variable domain of TCR clone 264203 (TRBV7-9, TRBJ1-2)
CASSPGGGAINYGYTF

SEQ ID NO: 528407 - protein, 15 aa, Homo sapiens
  CDR3 for alpha chain variable domain of TCR clone 264204 (TRAV26-1, TRAJ15)
CIVRAANQVGTALIF

SEQ ID NO: 528408 - protein, 15 aa, Homo sapiens
  CDR3 for beta chain variable domain of TCR clone 264204 (TRBV20-1, TRBJ1-1)
CSARSAATSNTEAFF

SEQ ID NO: 528409 - protein, 14 aa, Homo sapiens
  CDR3 for alpha chain variable domain of TCR clone 264205 (TRAV12-2, TRAJ6)
CPSKWGGGSDIPTF

SEQ ID NO: 528410 - protein, 13 aa, Homo sapiens
  CDR3 for beta chain variable domain of TCR clone 264205 (TRBV2, TRBJ1-1)
CASSEGGNTEAFF

SEQ ID NO: 528411 - protein, 15 aa, Homo sapiens
  CDR3 for alpha chain variable domain of TCR clone 264206 (TRAV27, TRAJ17)
CRSTMIKAACNKLTF

SEQ ID NO: 528412 - protein, 13 aa, Homo sapiens
  CDR3 for beta chain variable domain of TCR clone 264206 (TRBV7-2, TRBJ2-2)
CASSLAVTGELFF

SEQ ID NO: 528413 - protein, 13 aa, Homo sapiens
  CDR3 for alpha chain variable domain of TCR clone 264207 (TRAV3, TRAJ30)
CAVRDRADDKIIF

SEQ ID NO: 528414 - protein, 16 aa, Homo sapiens
  CDR3 for beta chain variable domain of TCR clone 264207 (TRBV7-3, TRBJ2-2)
CASSLKRGTLSGELFF

SEQ ID NO: 528415 - protein, 11 aa, Homo sapiens
  CDR3 for alpha chain variable domain of TCR clone 264208 (TRAV3, TRAJ21)
CAVCNFNKFYF

SEQ ID NO: 528416 - protein, 15 aa, Homo sapiens
  CDR3 for beta chain variable domain of TCR clone 264208 (TRBV29-1, TRBJ2-1)
CSVEGGPASYNEQFF

SEQ ID NO: 528417 - protein, 12 aa, Homo sapiens
  CDR3 for alpha chain variable domain of TCR clone 264209 (TRAV26-2, TRAJ21)
CILKGNFNKFYF

SEQ ID NO: 528418 - protein, 17 aa, Homo sapiens
  CDR3 for beta chain variable domain of TCR clone 264209 (TRBV20-1, TRBJ2-1)
CSASSSGLAGSYNEQFF

SEQ ID NO: 528419 - protein, 14 aa, Homo sapiens
  CDR3 for alpha chain variable domain of TCR clone 264210 (TRAV1-2, TRAJ16)
CAVNRFSDGQKLLF

SEQ ID NO: 528420 - protein, 15 aa, Homo sapiens
  CDR3 for beta chain variable domain of TCR clone 264210 (TRBV20-1, TRBJ1-6)
CSARAASSYNSPLHF

SEQ ID NO: 528421 - protein, 15 aa, Homo sapiens
  CDR3 for alpha chain variable domain of TCR clone 264211 (TRAV3, TRAJ20)
CAVRDSRSSDYKLSF

SEQ ID NO: 528422 - protein, 14 aa, Homo sapiens
  CDR3 for beta chain variable domain of TCR clone 264211 (TRBV20-1, TRBJ2-7)
CSARRGNGIYEQYF

SEQ ID NO: 528423 - protein, 15 aa, Homo sapiens
  CDR3 for alpha chain variable domain of TCR clone 264212 (TRAV17, TRAJ10)
CATVLLTGGGNELTF

SEQ ID NO: 528424 - protein, 16 aa, Homo sapiens
  CDR3 for beta chain variable domain of TCR clone 264212 (TRBV7-9, TRBJ2-3)
CASSPWREVGTDTQYF

SEQ ID NO: 528425 - protein, 14 aa, Homo sapiens
  CDR3 for alpha chain variable domain of TCR clone 264213 (TRAV16, TRAJ33)
CALSAMDSNYQLIR

SEQ ID NO: 528426 - protein, 12 aa, Homo sapiens
  CDR3 for beta chain variable domain of TCR clone 264213 (TRBV5-1, TRBJ1-2)
CASSQDTYGCTF

SEQ ID NO: 528427 - protein, 15 aa, Homo sapiens
  CDR3 for alpha chain variable domain of TCR clone 264214 (TRAV13-2, TRAJ58)
RVTAQKETSGSRLTF

SEQ ID NO: 528428 - protein, 14 aa, Homo sapiens
  CDR3 for beta chain variable domain of TCR clone 264214 (TRBV7-2, TRBJ2-3)
CASRRGLAADTQYF

SEQ ID NO: 528429 - protein, 17 aa, Homo sapiens
  CDR3 for alpha chain variable domain of TCR clone 264215 (TRAV3, TRAJ6)
CSVRDGPRAGGSYIPPF

SEQ ID NO: 528430 - protein, 14 aa, Homo sapiens
  CDR3 for beta chain variable domain of TCR clone 264215 (TRBV7-2, TRBJ2-7)
CASSPKTSFYEQYF

SEQ ID NO: 528431 - protein, 14 aa, Homo sapiens
  CDR3 for alpha chain variable domain of TCR clone 264216 (TRAV8-6, TRAJ52)
CAVIGGISYGKLTF

SEQ ID NO: 528432 - protein, 15 aa, Homo sapiens
  CDR3 for beta chain variable domain of TCR clone 264216 (TRBV11-2, TRBJ2-5)
CASSLGAGGVETQYF

SEQ ID NO: 528433 - protein, 16 aa, Homo sapiens
  CDR3 for alpha chain variable domain of TCR clone 264217 (TRAV16, TRAJ42)
CARKMNYGGSLGNLIF

SEQ ID NO: 528434 - protein, 15 aa, Homo sapiens
  CDR3 for beta chain variable domain of TCR clone 264217 (TRBV20-1, TRBJ2-7)
CSAREGRYSLYEQYF

SEQ ID NO: 528435 - protein, 14 aa, Homo sapiens
  CDR3 for alpha chain variable domain of TCR clone 264218 (TRAV12-1, TRAJ3)
CGAARYSSASKIIF

SEQ ID NO: 528436 - protein, 16 aa, Homo sapiens
  CDR3 for beta chain variable domain of TCR clone 264218 (TRBV4-3, TRBJ2-2)
CASSHLQWSGTGELFF

SEQ ID NO: 528437 - protein, 14 aa, Homo sapiens
  CDR3 for alpha chain variable domain of TCR clone 264219 (TRAV3, TRAJ36)
CAVRDGTGANNLFF

SEQ ID NO: 528438 - protein, 16 aa, Homo sapiens
  CDR3 for beta chain variable domain of TCR clone 264219 (TRBV20-1, TRBJ2-6)
CSAREGPGVGANVLSF

SEQ ID NO: 528439 - protein, 12 aa, Homo sapiens
  CDR3 for alpha chain variable domain of TCR clone 264220 (TRAV8-3, TRAJ6)
CAVAGGSYIPTF

SEQ ID NO: 528440 - protein, 14 aa, Homo sapiens
  CDR3 for beta chain variable domain of TCR clone 264220 (TRBV27, TRBJ2-7)
CVSATGTERREQYF

SEQ ID NO: 528441 - protein, 13 aa, Homo sapiens
  CDR3 for alpha chain variable domain of TCR clone 264221 (TRAV23/DV6, TRAJ27)
CVASKPMHANQPL

SEQ ID NO: 528442 - protein, 14 aa, Homo sapiens
  CDR3 for beta chain variable domain of TCR clone 264221 (TRBV5-4, TRBJ1-1)
CASSLDSRRDEAFF

SEQ ID NO: 528443 - protein, 16 aa, Homo sapiens
  CDR3 for alpha chain variable domain of TCR clone 264222 (TRAV12-3, TRAJ53)
CAMSPGSGGSNYKLTF

SEQ ID NO: 528444 - protein, 16 aa, Homo sapiens
  CDR3 for beta chain variable domain of TCR clone 264222 (TRBV19, TRBJ2-1)
CASSKAGPSSYKEQFF

SEQ ID NO: 528445 - protein, 15 aa, Homo sapiens
  CDR3 for alpha chain variable domain of TCR clone 264223 (TRAV8-6, TRAJ6)
CAVSFTSGGSYIPTF

SEQ ID NO: 528446 - protein, 12 aa, Homo sapiens
  CDR3 for beta chain variable domain of TCR clone 264223 (TRBV6-5, TRBJ2-2)
CASRTGTGELFF

SEQ ID NO: 528447 - protein, 14 aa, Homo sapiens
  CDR3 for alpha chain variable domain of TCR clone 264224 (TRAV1-2, TRAJ8)
CAVREDTGFQKLVF

SEQ ID NO: 528448 - protein, 18 aa, Homo sapiens
  CDR3 for beta chain variable domain of TCR clone 264224 (TRBV11-2, TRBJ2-3)
WASSLGGASRGAPNTQYF

SEQ ID NO: 528449 - protein, 14 aa, Homo sapiens
  CDR3 for alpha chain variable domain of TCR clone 264225 (TRAV13-1, TRAJ44)
CAAKATGTASKLTF

SEQ ID NO: 528450 - protein, 14 aa, Homo sapiens
  CDR3 for beta chain variable domain of TCR clone 264225 (TRBV19, TRBJ2-2)
CASSTHHRSGELFF

SEQ ID NO: 528451 - protein, 18 aa, Homo sapiens
  CDR3 for alpha chain variable domain of TCR clone 264226 (TRAV13-1, TRAJ52)
CAAKNPNAGGTSYGKLTF

SEQ ID NO: 528452 - protein, 17 aa, Homo sapiens
  CDR3 for beta chain variable domain of TCR clone 264226 (TRBV11-2, TRBJ2-1)
CASSVYPPGVEYNEQFF

SEQ ID NO: 528453 - protein, 15 aa, Homo sapiens
  CDR3 for alpha chain variable domain of TCR clone 264227 (TRAV12-3, TRAJ17)
CAMSPSLAAGNKLTF

SEQ ID NO: 528454 - protein, 14 aa, Homo sapiens
  CDR3 for beta chain variable domain of TCR clone 264227 (TRBV6-1, TRBJ2-5)
CASSGVGTGRTQYF

SEQ ID NO: 528455 - protein, 15 aa, Homo sapiens
  CDR3 for alpha chain variable domain of TCR clone 264228 (TRAV12-3, TRAJ11)
CAMSEENSGYSTLTF

SEQ ID NO: 528456 - protein, 13 aa, Homo sapiens
  CDR3 for beta chain variable domain of TCR clone 264228 (TRBV11-2, TRBJ1-3)
CASSLEPVNTIYF

SEQ ID NO: 528457 - protein, 12 aa, Homo sapiens
  CDR3 for alpha chain variable domain of TCR clone 264229 (TRAV17, TRAJ4)
CDTDGGYNKLIF

SEQ ID NO: 528458 - protein, 13 aa, Homo sapiens
  CDR3 for beta chain variable domain of TCR clone 264229 (TRBV29-1, TRBJ2-2)
CSTTGVNTGELFF

SEQ ID NO: 528459 - protein, 13 aa, Homo sapiens
  CDR3 for alpha chain variable domain of TCR clone 264230 (TRAV1-2, TRAJ9)
CAASNTGGCKTIF

SEQ ID NO: 528460 - protein, 15 aa, Homo sapiens
  CDR3 for beta chain variable domain of TCR clone 264230 (TRBV6-3, TRBJ2-7)
CASSSPGTVFYEQYF

SEQ ID NO: 528461 - protein, 14 aa, Homo sapiens
  CDR3 for alpha chain variable domain of TCR clone 264231 (TRAV8-2, TRAJ4)
CVVSPSGGYNKLIF

SEQ ID NO: 528462 - protein, 15 aa, Homo sapiens
  CDR3 for beta chain variable domain of TCR clone 264231 (TRBV10-1, TRBJ2-1)
CASSNGGGSSNEQFF

SEQ ID NO: 528463 - protein, 13 aa, Homo sapiens
  CDR3 for alpha chain variable domain of TCR clone 264232 (TRAV2, TRAJ40)
CAVVPSGTYKYIF

SEQ ID NO: 528464 - protein, 11 aa, Homo sapiens
  CDR3 for beta chain variable domain of TCR clone 264232 (TRBV6-3, TRBJ2-3)
CATGQADTQYF

SEQ ID NO: 528465 - protein, 10 aa, Homo sapiens
  CDR3 for alpha chain variable domain of TCR clone 264233 (TRAV1-2, TRAJ31)
CVSEDARLMF

SEQ ID NO: 528466 - protein, 16 aa, Homo sapiens
  CDR3 for beta chain variable domain of TCR clone 264233 (TRBV29-1, TRBJ2-7)
CSVEVVGTSGSYEQYF

SEQ ID NO: 528467 - protein, 14 aa, Homo sapiens
  CDR3 for alpha chain variable domain of TCR clone 264234 (TRAV1-2, TRAJ8)
CAVREDTGCQKLVF

SEQ ID NO: 528468 - protein, 16 aa, Homo sapiens
  CDR3 for beta chain variable domain of TCR clone 264234 (TRBV19, TRBJ2-3)
CASGTGPNDGTDTQYF

SEQ ID NO: 528469 - protein, 18 aa, Homo sapiens
  CDR3 for alpha chain variable domain of TCR clone 264235 (TRAV21, TRAJ52)
CAVRPSPAGGTSYGELTF

SEQ ID NO: 528470 - protein, 14 aa, Homo sapiens
  CDR3 for beta chain variable domain of TCR clone 264235 (TRBV12-4, TRBJ2-2)
CASNQGANTGELFF

SEQ ID NO: 528471 - protein, 11 aa, Homo sapiens
  CDR3 for alpha chain variable domain of TCR clone 264236 (TRAV3, TRAJ21)
CAVGNFNKFYF

SEQ ID NO: 528472 - protein, 16 aa, Homo sapiens
  CDR3 for beta chain variable domain of TCR clone 264236 (TRBV10-3, TRBJ2-7)
CAISADFADRPYEQYF

SEQ ID NO: 528473 - protein, 13 aa, Homo sapiens
  CDR3 for alpha chain variable domain of TCR clone 264237 (TRAV17, TRAJ5)
CAPMDTGRRALTF

SEQ ID NO: 528474 - protein, 13 aa, Homo sapiens
  CDR3 for beta chain variable domain of TCR clone 264237 (TRBV7-9, TRBJ1-2)
CSSSLKQNYGHTF

SEQ ID NO: 528475 - protein, 14 aa, Homo sapiens
  CDR3 for alpha chain variable domain of TCR clone 264238 (TRAV1-2, TRAJ16)
CAVNRFSDGQKLIF

SEQ ID NO: 528476 - protein, 12 aa, Homo sapiens
  CDR3 for beta chain variable domain of TCR clone 264238 (TRBV11-2, TRBJ2-2)
CASSLGGGELFL

SEQ ID NO: 528477 - protein, 12 aa, Homo sapiens
  CDR3 for alpha chain variable domain of TCR clone 264239 (TRAV21, TRAJ30)
CAVMNRDDKIIF

SEQ ID NO: 528478 - protein, 17 aa, Homo sapiens
  CDR3 for beta chain variable domain of TCR clone 264239 (TRBV5-1, TRBJ1-1)
FASRPIRTGGVNTEAFF

SEQ ID NO: 528479 - protein, 12 aa, Homo sapiens
  CDR3 for alpha chain variable domain of TCR clone 264240 (TRAV12-2, TRAJ44)
CADTVTASKLTF

SEQ ID NO: 528480 - protein, 17 aa, Homo sapiens
  CDR3 for beta chain variable domain of TCR clone 264240 (TRBV20-1, TRBJ1-1)
CSARGTGGSYGNTGAFF

SEQ ID NO: 528481 - protein, 16 aa, Homo sapiens
  CDR3 for alpha chain variable domain of TCR clone 264241 (TRAV12-3, TRAJ53)
CAMRTGSGGSNYKLTF

SEQ ID NO: 528482 - protein, 11 aa, Homo sapiens
  CDR3 for beta chain variable domain of TCR clone 264241 (TRBV29-1, TRBJ2-5)
CSEDRTGTQYF

SEQ ID NO: 528483 - protein, 17 aa, Homo sapiens
  CDR3 for alpha chain variable domain of TCR clone 264242 (TRAV14/DV4, TRAJ28)
CAIRGTSSGAGSYQLTF

SEQ ID NO: 528484 - protein, 13 aa, Homo sapiens
  CDR3 for beta chain variable domain of TCR clone 264242 (TRBV28, TRBJ2-5)
CASSFAGGETQYF

SEQ ID NO: 528485 - protein, 14 aa, Homo sapiens
  CDR3 for alpha chain variable domain of TCR clone 264243 (TRAV12-3, TRAJ10)
SHLPLTGGGNKLTF

SEQ ID NO: 528486 - protein, 22 aa, Homo sapiens
  CDR3 for beta chain variable domain of TCR clone 264243 (TRBV6-1, TRBJ1-3)
CASVQGGGWQHHIFWRGKLAHC

SEQ ID NO: 528487 - protein, 18 aa, Homo sapiens
  CDR3 for alpha chain variable domain of TCR clone 264244 (TRAV4, TRAJ8)
CLVGDPVLRDTGFQKLVF

SEQ ID NO: 528488 - protein, 16 aa, Homo sapiens
  CDR3 for beta chain variable domain of TCR clone 264244 (TRBV7-9, TRBJ2-3)
CASSLGAGGPTDTQYF

SEQ ID NO: 528489 - protein, 12 aa, Homo sapiens
  CDR3 for alpha chain variable domain of TCR clone 264245 (TRAV13-2, TRAJ23)
CAERHRGGKLIF

SEQ ID NO: 528490 - protein, 13 aa, Homo sapiens
  CDR3 for beta chain variable domain of TCR clone 264245 (TRBV7-9, TRBJ1-2)
CASSLKQNYGYTL

SEQ ID NO: 528491 - protein, 16 aa, Homo sapiens
  CDR3 for alpha chain variable domain of TCR clone 264246 (TRAV30, TRAJ24)
CGTEIVDADSWGKFQF

SEQ ID NO: 528492 - protein, 12 aa, Homo sapiens
  CDR3 for beta chain variable domain of TCR clone 264246 (TRBV7-8, TRBJ2-7)
CASSLGDSEQYF

SEQ ID NO: 528493 - protein, 13 aa, Homo sapiens
  CDR3 for alpha chain variable domain of TCR clone 264247 (TRAV8-6, TRAJ21)
CAVSPSSLNKFYF

SEQ ID NO: 528494 - protein, 15 aa, Homo sapiens
  CDR3 for beta chain variable domain of TCR clone 264247 (TRBV28, TRBJ2-3)
CASSPDRQGADTQYF

SEQ ID NO: 528495 - protein, 17 aa, Homo sapiens
  CDR3 for alpha chain variable domain of TCR clone 264248 (TRAV26-2, TRAJ42)
CILRDVGYGGSQGNLNF

SEQ ID NO: 528496 - protein, 16 aa, Homo sapiens
  CDR3 for beta chain variable domain of TCR clone 264248 (TRBV12-4, TRBJ2-7)
CASSLIGGTGTYEQYF

SEQ ID NO: 528497 - protein, 14 aa, Homo sapiens
  CDR3 for alpha chain variable domain of TCR clone 264249 (TRAV26-1, TRAJ38)
CIADNAGNNRKLIW

SEQ ID NO: 528498 - protein, 15 aa, Homo sapiens
  CDR3 for beta chain variable domain of TCR clone 264249 (TRBV10-3, TRBJ2-1)
CAISDVQDRAYEQFF

SEQ ID NO: 528499 - protein, 14 aa, Homo sapiens
  CDR3 for alpha chain variable domain of TCR clone 264250 (TRAV1-2, TRAJ16)
CAVNRFSDGQKLLF

SEQ ID NO: 528500 - protein, 15 aa, Homo sapiens
  CDR3 for beta chain variable domain of TCR clone 264250 (TRBV7-9, TRBJ1-6)
CASSSPGRGNSPLSF

SEQ ID NO: 528501 - protein, 15 aa, Homo sapiens
  CDR3 for alpha chain variable domain of TCR clone 264251 (TRAV17, TRAJ57)
CATGPSQGVSEKLVF

SEQ ID NO: 528502 - protein, 11 aa, Homo sapiens
  CDR3 for beta chain variable domain of TCR clone 264251 (TRBV29-1, TRBJ2-5)
CSEDRTGTQYF

SEQ ID NO: 528503 - protein, 14 aa, Homo sapiens
  CDR3 for alpha chain variable domain of TCR clone 264252 (TRAV12-2, TRAJ15)
CAPHTGQAGTALIF

SEQ ID NO: 528504 - protein, 13 aa, Homo sapiens
  CDR3 for beta chain variable domain of TCR clone 264252 (TRBV4-2, TRBJ1-1)
CASSQAGNTEAFF

SEQ ID NO: 528505 - protein, 12 aa, Homo sapiens
  CDR3 for alpha chain variable domain of TCR clone 264253 (TRAV16, TRAJ30)
CALTNRDDKIIF

SEQ ID NO: 528506 - protein, 14 aa, Homo sapiens
  CDR3 for beta chain variable domain of TCR clone 264253 (TRBV28, TRBJ2-7)
CASRPTTGAYEQYF

SEQ ID NO: 528507 - protein, 12 aa, Homo sapiens
  CDR3 for alpha chain variable domain of TCR clone 264254 (TRAV1-2, TRAJ29)
CAVRNLNTPLVF

SEQ ID NO: 528508 - protein, 14 aa, Homo sapiens
  CDR3 for beta chain variable domain of TCR clone 264254 (TRBV15, TRBJ2-1)
PGCSGGPTTNEQFF

SEQ ID NO: 528509 - protein, 14 aa, Homo sapiens
  CDR3 for alpha chain variable domain of TCR clone 264255 (TRAV1-2, TRAJ16)
CAVNRFSDVQKLLF

SEQ ID NO: 528510 - protein, 12 aa, Homo sapiens
  CDR3 for beta chain variable domain of TCR clone 264255 (TRBV14, TRBJ2-5)
CASSQLKETQYF

SEQ ID NO: 528511 - protein, 14 aa, Homo sapiens
  CDR3 for alpha chain variable domain of TCR clone 264256 (TRAV38-1, TRAJ45)
CASHSGGGADGLTF

SEQ ID NO: 528512 - protein, 16 aa, Homo sapiens
  CDR3 for beta chain variable domain of TCR clone 264256 (TRBV20-1, TRBJ1-4)
CSAPGQGLLTNEKLFF

SEQ ID NO: 528513 - protein, 12 aa, Homo sapiens
  CDR3 for alpha chain variable domain of TCR clone 264257 (TRAV16, TRAJ10)
CSRTGGGNKLTF

SEQ ID NO: 528514 - protein, 15 aa, Homo sapiens
  CDR3 for beta chain variable domain of TCR clone 264257 (TRBV6-1, TRBJ2-1)
CASSELRGQYNEQFF

SEQ ID NO: 528515 - protein, 15 aa, Homo sapiens
  CDR3 for alpha chain variable domain of TCR clone 264258 (TRAV25, TRAJ53)
CAATGGGGSNYKLTF

SEQ ID NO: 528516 - protein, 19 aa, Homo sapiens
  CDR3 for beta chain variable domain of TCR clone 264258 (TRBV7-2, TRBJ2-3)
GASSFLSRNWGGGTDTQYF

SEQ ID NO: 528517 - protein, 17 aa, Homo sapiens
  CDR3 for alpha chain variable domain of TCR clone 264259 (TRAV8-3, TRAJ34)
CAIPGKLIFGTGTRLQV

SEQ ID NO: 528518 - protein, 15 aa, Homo sapiens
  CDR3 for beta chain variable domain of TCR clone 264259 (TRBV5-7, TRBJ2-1)
CASSRRLARDNEQFF

SEQ ID NO: 528519 - protein, 17 aa, Homo sapiens
  CDR3 for alpha chain variable domain of TCR clone 264260 (TRAV4, TRAJ42)
CLVGVLNYGGSQGNLIF

SEQ ID NO: 528520 - protein, 12 aa, Homo sapiens
  CDR3 for beta chain variable domain of TCR clone 264260 (TRBV20-1, TRBJ2-1)
CSAQRTYNEQFF

SEQ ID NO: 528521 - protein, 14 aa, Homo sapiens
  CDR3 for alpha chain variable domain of TCR clone 264261 (TRAV1-2, TRAJ16)
CAVNRFSDGQKLLF

SEQ ID NO: 528522 - protein, 16 aa, Homo sapiens
  CDR3 for beta chain variable domain of TCR clone 264261 (TRBV19, TRBJ2-1)
CACSEILAGDGNEQFF

SEQ ID NO: 528523 - protein, 12 aa, Homo sapiens
  CDR3 for alpha chain variable domain of TCR clone 264262 (TRAV13-1, TRAJ21)
CAAKEGFNKFYF

SEQ ID NO: 528524 - protein, 20 aa, Homo sapiens
  CDR3 for beta chain variable domain of TCR clone 264262 (TRBV7-8, TRBJ2-2)
CASSHLFPGPIIHITGELFF

SEQ ID NO: 528525 - protein, 12 aa, Homo sapiens
  CDR3 for alpha chain variable domain of TCR clone 264263 (TRAV2, TRAJ10)
CARPGGGNKLTF

SEQ ID NO: 528526 - protein, 14 aa, Homo sapiens
  CDR3 for beta chain variable domain of TCR clone 264263 (TRBV19, TRBJ1-5)
CASSLGPGGEPQHF

SEQ ID NO: 528527 - protein, 14 aa, Homo sapiens
  CDR3 for alpha chain variable domain of TCR clone 264264 (TRAV12-1, TRAJ22)
CVVTTSGSARQLTF

SEQ ID NO: 528528 - protein, 15 aa, Homo sapiens
  CDR3 for beta chain variable domain of TCR clone 264264 (TRBV20-1, TRBJ2-7)
CSARDRVSGMDGQYF

SEQ ID NO: 528529 - protein, 11 aa, Homo sapiens
  CDR3 for alpha chain variable domain of TCR clone 264265 (TRAV3, TRAJ21)
FAVGNFNKFYF

SEQ ID NO: 528530 - protein, 16 aa, Homo sapiens
  CDR3 for beta chain variable domain of TCR clone 264265 (TRBV19, TRBJ2-1)
CASSKAGQSSYNEQFF

SEQ ID NO: 528531 - protein, 14 aa, Homo sapiens
  CDR3 for alpha chain variable domain of TCR clone 264266 (TRAV23/DV6, TRAJ37)
CAATASSITGKLIF

SEQ ID NO: 528532 - protein, 13 aa, Homo sapiens
  CDR3 for beta chain variable domain of TCR clone 264266 (TRBV7-2, TRBJ2-5)
CASSQTSVETQYF

SEQ ID NO: 528533 - protein, 13 aa, Homo sapiens
  CDR3 for alpha chain variable domain of TCR clone 264267 (TRAV13-2, TRAJ13)
CAGRAGGYQKVTF

SEQ ID NO: 528534 - protein, 15 aa, Homo sapiens
  CDR3 for beta chain variable domain of TCR clone 264267 (TRBV11-3, TRBJ2-7)
CASSPGPASSYEQYF

SEQ ID NO: 528535 - protein, 15 aa, Homo sapiens
  CDR3 for alpha chain variable domain of TCR clone 264268 (TRAV3, TRAJ20)
CAVRDSRSNDYKRSF

SEQ ID NO: 528536 - protein, 14 aa, Homo sapiens
  CDR3 for beta chain variable domain of TCR clone 264268 (TRBV20-1, TRBJ2-7)
CSARRGNGIYEQYF

SEQ ID NO: 528537 - protein, 14 aa, Homo sapiens
  CDR3 for alpha chain variable domain of TCR clone 264269 (TRAV12-2, TRAJ40)
CAVKVPSGTYKYIF

SEQ ID NO: 528538 - protein, 14 aa, Homo sapiens
  CDR3 for beta chain variable domain of TCR clone 264269 (TRBV20-1, TRBJ1-1)
CSAHTRIGGTEAFF

SEQ ID NO: 528539 - protein, 16 aa, Homo sapiens
  CDR3 for alpha chain variable domain of TCR clone 264270 (TRAV12-3, TRAJ53)
CAMSPGSGGSNYKLTF

SEQ ID NO: 528540 - protein, 13 aa, Homo sapiens
  CDR3 for beta chain variable domain of TCR clone 264270 (TRBV19, TRBJ1-1)
CASTRRGDTEAFF

SEQ ID NO: 528541 - protein, 14 aa, Homo sapiens
  CDR3 for alpha chain variable domain of TCR clone 264271 (TRAV1-2, TRAJ16)
CAANRFSDGQKLLF

SEQ ID NO: 528542 - protein, 14 aa, Homo sapiens
  CDR3 for beta chain variable domain of TCR clone 264271 (TRBV6-1, TRBJ1-3)
CASVQGGGGNTIYF

SEQ ID NO: 528543 - protein, 15 aa, Homo sapiens
  CDR3 for alpha chain variable domain of TCR clone 264272 (TRAV12-1, TRAJ42)
CVVLNYGGSQGNLIF

SEQ ID NO: 528544 - protein, 15 aa, Homo sapiens
  CDR3 for beta chain variable domain of TCR clone 264272 (TRBV5-1, TRBJ2-1)
CASSLVGTVKNEQFF

SEQ ID NO: 528545 - protein, 15 aa, Homo sapiens
  CDR3 for alpha chain variable domain of TCR clone 264273 (TRAV27, TRAJ38)
CAARRNAGNNRKLIW

SEQ ID NO: 528546 - protein, 15 aa, Homo sapiens
  CDR3 for beta chain variable domain of TCR clone 264273 (TRBV20-1, TRBJ2-7)
CSARVPAAYFYEQYF

SEQ ID NO: 528547 - protein, 11 aa, Homo sapiens
  CDR3 for alpha chain variable domain of TCR clone 264274 (TRAV1-1, TRAJ23)
CAVRQGGKLIF

SEQ ID NO: 528548 - protein, 14 aa, Homo sapiens
  CDR3 for beta chain variable domain of TCR clone 264274 (TRBV7-8, TRBJ2-7)
CASSPKTSFYEQYF

SEQ ID NO: 528549 - protein, 15 aa, Homo sapiens
  CDR3 for alpha chain variable domain of TCR clone 264275 (TRAV3, TRAJ22)
CAVRDRGGSARQLTF

SEQ ID NO: 528550 - protein, 16 aa, Homo sapiens
  CDR3 for beta chain variable domain of TCR clone 264275 (TRBV5-4, TRBJ2-3)
CTSQQPGAGGSDTQYF

SEQ ID NO: 528551 - protein, 11 aa, Homo sapiens
  CDR3 for alpha chain variable domain of TCR clone 264276 (TRAV1-2, TRAJ40)
CAVPGTYKYIF

SEQ ID NO: 528552 - protein, 16 aa, Homo sapiens
  CDR3 for beta chain variable domain of TCR clone 264276 (TRBV29-1, TRBJ2-7)
RSVEVVGTSGSYEQYF

SEQ ID NO: 528553 - protein, 12 aa, Homo sapiens
  CDR3 for alpha chain variable domain of TCR clone 264277 (TRAV12-3, TRAJ17)
CAMTLTGNKLTL

SEQ ID NO: 528554 - protein, 14 aa, Homo sapiens
  CDR3 for beta chain variable domain of TCR clone 264277 (TRBV4-1, TRBJ2-2)
CASSQAVNTGELFF

SEQ ID NO: 528555 - protein, 11 aa, Homo sapiens
  CDR3 for alpha chain variable domain of TCR clone 264278 (TRAV17, TRAJ36)
CAPTGANNLFF

SEQ ID NO: 528556 - protein, 15 aa, Homo sapiens
  CDR3 for beta chain variable domain of TCR clone 264278 (TRBV15, TRBJ1-5)
CATSRDPVSNQPQHF

SEQ ID NO: 528557 - protein, 13 aa, Homo sapiens
  CDR3 for alpha chain variable domain of TCR clone 264279 (TRAV29/DV5, TRAJ58)
CAGEETSGSRLTF

SEQ ID NO: 528558 - protein, 15 aa, Homo sapiens
  CDR3 for beta chain variable domain of TCR clone 264279 (TRBV11-2, TRBJ1-6)
CASTGFGTAVSPLHV

SEQ ID NO: 528559 - protein, 14 aa, Homo sapiens
  CDR3 for alpha chain variable domain of TCR clone 264280 (TRAV12-2, TRAJ45)
CALPERGGADGLTF

SEQ ID NO: 528560 - protein, 13 aa, Homo sapiens
  CDR3 for beta chain variable domain of TCR clone 264280 (TRBV18, TRBJ1-1)
CASSPNGDTEAFF

SEQ ID NO: 528561 - protein, 10 aa, Homo sapiens
  CDR3 for alpha chain variable domain of TCR clone 264281 (TRAV36/DV7, TRAJ13)
CAAGYQKVTF

SEQ ID NO: 528562 - protein, 14 aa, Homo sapiens
  CDR3 for beta chain variable domain of TCR clone 264281 (TRBV6-3, TRBJ2-7)
CASSYSGDHYEQYF

SEQ ID NO: 528563 - protein, 14 aa, Homo sapiens
  CDR3 for alpha chain variable domain of TCR clone 264282 (TRAV1-2, TRAJ8)
CAVREDTGFQKLVF

SEQ ID NO: 528564 - protein, 15 aa, Homo sapiens
  CDR3 for beta chain variable domain of TCR clone 264282 (TRBV27, TRBJ2-1)
CASSNGGWSSNEQFF

SEQ ID NO: 528565 - protein, 12 aa, Homo sapiens
  CDR3 for alpha chain variable domain of TCR clone 264283 (TRAV12-2, TRAJ10)
WGVTGGGNKLTF

SEQ ID NO: 528566 - protein, 17 aa, Homo sapiens
  CDR3 for beta chain variable domain of TCR clone 264283 (TRBV24-1, TRBJ2-1)
CATSDVSTSGTYNEQFF

SEQ ID NO: 528567 - protein, 14 aa, Homo sapiens
  CDR3 for alpha chain variable domain of TCR clone 264284 (TRAV26-2, TRAJ17)
CILQSKLQANKLTF

SEQ ID NO: 528568 - protein, 12 aa, Homo sapiens
  CDR3 for beta chain variable domain of TCR clone 264284 (TRBV29-1, TRBJ2-7)
CSARDRPYEQYF

SEQ ID NO: 528569 - protein, 14 aa, Homo sapiens
  CDR3 for alpha chain variable domain of TCR clone 264285 (TRAV12-3, TRAJ10)
SHLPLTGGGNKITF

SEQ ID NO: 528570 - protein, 13 aa, Homo sapiens
  CDR3 for beta chain variable domain of TCR clone 264285 (TRBV7-7, TRBJ2-5)
CASSRSGQETQYF

SEQ ID NO: 528571 - protein, 16 aa, Homo sapiens
  CDR3 for alpha chain variable domain of TCR clone 264286 (TRAV23/DV6, TRAJ35)
CAASMRLRGFGNVLHC

SEQ ID NO: 528572 - protein, 16 aa, Homo sapiens
  CDR3 for beta chain variable domain of TCR clone 264286 (TRBV5-5, TRBJ2-2)
CASSGRREGATGELFF

SEQ ID NO: 528573 - protein, 13 aa, Homo sapiens
  CDR3 for alpha chain variable domain of TCR clone 264287 (TRAV27, TRAJ56)
CAGKPGANSKLTF

SEQ ID NO: 528574 - protein, 14 aa, Homo sapiens
  CDR3 for beta chain variable domain of TCR clone 264287 (TRBV27, TRBJ2-2)
CASRPGVNTGELFF

SEQ ID NO: 528575 - protein, 17 aa, Homo sapiens
  CDR3 for alpha chain variable domain of TCR clone 264288 (TRAV2, TRAJ23)
CCLLLCWDRGLGGKLIF

SEQ ID NO: 528576 - protein, 20 aa, Homo sapiens
  CDR3 for beta chain variable domain of TCR clone 264288 (TRBV3-1, TRBJ2-6)
CASSPRPGLEGGAGANVLTF

SEQ ID NO: 528577 - protein, 12 aa, Homo sapiens
  CDR3 for alpha chain variable domain of TCR clone 264289 (TRAV12-2, TRAJ9)
CAVNTGGFKTIF

SEQ ID NO: 528578 - protein, 15 aa, Homo sapiens
  CDR3 for beta chain variable domain of TCR clone 264289 (TRBV25-1, TRBJ1-4)
CASSPGDSTNEKLFF

SEQ ID NO: 528579 - protein, 14 aa, Homo sapiens
  CDR3 for alpha chain variable domain of TCR clone 264290 (TRAV35, TRAJ58)
CWAPQETSGSRLTF

SEQ ID NO: 528580 - protein, 11 aa, Homo sapiens
  CDR3 for beta chain variable domain of TCR clone 264290 (TRBV11-2, TRBJ1-1)
CASSINTEAFF

SEQ ID NO: 528581 - protein, 12 aa, Homo sapiens
  CDR3 for alpha chain variable domain of TCR clone 264291 (TRAV12-3, TRAJ20)
CAMVRGDYKLSF

SEQ ID NO: 528582 - protein, 14 aa, Homo sapiens
  CDR3 for beta chain variable domain of TCR clone 264291 (TRBV15, TRBJ2-5)
CATSIGGLGETQYF

SEQ ID NO: 528583 - protein, 15 aa, Homo sapiens
  CDR3 for alpha chain variable domain of TCR clone 264292 (TRAV3, TRAJ13)
CAVRVYSGGYQKVTF

SEQ ID NO: 528584 - protein, 16 aa, Homo sapiens
  CDR3 for beta chain variable domain of TCR clone 264292 (TRBV7-3, TRBJ2-2)
CASSLKRGTLSGELFF

SEQ ID NO: 528585 - protein, 15 aa, Homo sapiens
  CDR3 for alpha chain variable domain of TCR clone 264293 (TRAV3, TRAJ20)
CAVRDIKVSDYKLSF

SEQ ID NO: 528586 - protein, 15 aa, Homo sapiens
  CDR3 for beta chain variable domain of TCR clone 264293 (TRBV7-9, TRBJ1-6)
CASSSPGRGNSPLYF

SEQ ID NO: 528587 - protein, 12 aa, Homo sapiens
  CDR3 for alpha chain variable domain of TCR clone 264294 (TRAV25, TRAJ20)
CAGRSNDYKLSF

SEQ ID NO: 528588 - protein, 15 aa, Homo sapiens
  CDR3 for beta chain variable domain of TCR clone 264294 (TRBV7-6, TRBJ2-7)
CASSGRRDTCGEQYF

SEQ ID NO: 528589 - protein, 16 aa, Homo sapiens
  CDR3 for alpha chain variable domain of TCR clone 264295 (TRAV3, TRAJ37)
CAVRVRGSGNTGQLIF

SEQ ID NO: 528590 - protein, 11 aa, Homo sapiens
  CDR3 for beta chain variable domain of TCR clone 264295 (TRBV11-2, TRBJ2-2)
CASSVPGELFF

SEQ ID NO: 528591 - protein, 10 aa, Homo sapiens
  CDR3 for alpha chain variable domain of TCR clone 264296 (TRAV30, TRAJ48)
CGIGNEKLTF

SEQ ID NO: 528592 - protein, 13 aa, Homo sapiens
  CDR3 for beta chain variable domain of TCR clone 264296 (TRBV2, TRBJ2-7)
CASSVGGSGEQYF

SEQ ID NO: 528593 - protein, 18 aa, Homo sapiens
  CDR3 for alpha chain variable domain of TCR clone 264297 (TRAV21, TRAJ13)
CAVPRSFWGLPESYLWNC

SEQ ID NO: 528594 - protein, 15 aa, Homo sapiens
  CDR3 for beta chain variable domain of TCR clone 264297 (TRBV27, TRBJ2-5)
CASSLYPRGGETQYF

SEQ ID NO: 528595 - protein, 11 aa, Homo sapiens
  CDR3 for alpha chain variable domain of TCR clone 264298 (TRAV26-1, TRAJ37)
CIVRVGRKLIF

SEQ ID NO: 528596 - protein, 13 aa, Homo sapiens
  CDR3 for beta chain variable domain of TCR clone 264298 (TRBV14, TRBJ1-2)
CASSEDRRYCYTF

SEQ ID NO: 528597 - protein, 12 aa, Homo sapiens
  CDR3 for alpha chain variable domain of TCR clone 264299 (TRAV12-1, TRAJ34)
CVVILNTDKLIF

SEQ ID NO: 528598 - protein, 14 aa, Homo sapiens
  CDR3 for beta chain variable domain of TCR clone 264299 (TRBV12-5, TRBJ2-5)
CASGSRTHQETQYF

SEQ ID NO: 528599 - protein, 12 aa, Homo sapiens
  CDR3 for alpha chain variable domain of TCR clone 264300 (TRAV17, TRAJ57)
CATDGGSEKLVY

SEQ ID NO: 528600 - protein, 13 aa, Homo sapiens
  CDR3 for beta chain variable domain of TCR clone 264300 (TRBV7-9, TRBJ2-7)
CASSFAGAYEQYF

SEQ ID NO: 528601 - protein, 17 aa, Homo sapiens
  CDR3 for alpha chain variable domain of TCR clone 264301 (TRAV14/DV4, TRAJ28)
CAMRGTSSGAGSYLLTF

SEQ ID NO: 528602 - protein, 13 aa, Homo sapiens
  CDR3 for beta chain variable domain of TCR clone 264301 (TRBV28, TRBJ2-5)
CASSFAGGETQYF

SEQ ID NO: 528603 - protein, 14 aa, Homo sapiens
  CDR3 for alpha chain variable domain of TCR clone 264302 (TRAV8-3, TRAJ13)
CAVGAQEGYQKVTF

SEQ ID NO: 528604 - protein, 17 aa, Homo sapiens
  CDR3 for beta chain variable domain of TCR clone 264302 (TRBV7-8, TRBJ2-6)
CASSAGTGGAGANVLTF

SEQ ID NO: 528605 - protein, 15 aa, Homo sapiens
  CDR3 for alpha chain variable domain of TCR clone 264303 (TRAV13-1, TRAJ6)
CAAIHPSGGSYIPTF

SEQ ID NO: 528606 - protein, 14 aa, Homo sapiens
  CDR3 for beta chain variable domain of TCR clone 264303 (TRBV7-9, TRBJ2-2)
SASGLAINTGELFF

SEQ ID NO: 528607 - protein, 14 aa, Homo sapiens
  CDR3 for alpha chain variable domain of TCR clone 264304 (TRAV9-2, TRAJ27)
CALGRNTNAGKSTF

SEQ ID NO: 528608 - protein, 14 aa, Homo sapiens
  CDR3 for beta chain variable domain of TCR clone 264304 (TRBV5-4, TRBJ1-1)
CASSLDSRRDEAFF

SEQ ID NO: 528609 - protein, 14 aa, Homo sapiens
  CDR3 for alpha chain variable domain of TCR clone 264305 (TRAV3, TRAJ17)
CAVRDAAAGNKRTF

SEQ ID NO: 528610 - protein, 16 aa, Homo sapiens
  CDR3 for beta chain variable domain of TCR clone 264305 (TRBV20-1, TRBJ1-2)
CSASMGQGVANYGYTF

SEQ ID NO: 528611 - protein, 16 aa, Homo sapiens
  CDR3 for alpha chain variable domain of TCR clone 264306 (TRAV12-3, TRAJ8)
CAMSLGPDTGFQKLVF

SEQ ID NO: 528612 - protein, 18 aa, Homo sapiens
  CDR3 for beta chain variable domain of TCR clone 264306 (TRBV11-2, TRBJ2-3)
CASSLGGASRGAPNTQYF

SEQ ID NO: 528613 - protein, 12 aa, Homo sapiens
  CDR3 for alpha chain variable domain of TCR clone 264307 (TRAV12-3, TRAJ17)
CAMTLTGNKLTF

SEQ ID NO: 528614 - protein, 17 aa, Homo sapiens
  CDR3 for beta chain variable domain of TCR clone 264307 (TRBV7-9, TRBJ2-7)
CASSWQGRWREAYEQYF

SEQ ID NO: 528615 - protein, 12 aa, Homo sapiens
  CDR3 for alpha chain variable domain of TCR clone 264308 (TRAV30, TRAJ43)
CGTEESGNDMRF

SEQ ID NO: 528616 - protein, 13 aa, Homo sapiens
  CDR3 for beta chain variable domain of TCR clone 264308 (TRBV12-4, TRBJ1-2)
CASSSGSKDGYTF

SEQ ID NO: 528617 - protein, 15 aa, Homo sapiens
  CDR3 for alpha chain variable domain of TCR clone 264309 (TRAV3, TRAJ40)
RAVRDGPGGTYKYIF

SEQ ID NO: 528618 - protein, 16 aa, Homo sapiens
  CDR3 for beta chain variable domain of TCR clone 264309 (TRBV5-1, TRBJ1-1)
CASSSGGNSLNTEAFF

SEQ ID NO: 528619 - protein, 17 aa, Homo sapiens
  CDR3 for alpha chain variable domain of TCR clone 264310 (TRAV3, TRAJ6)
CAVRDGPRAGGSHIPTF

SEQ ID NO: 528620 - protein, 14 aa, Homo sapiens
  CDR3 for beta chain variable domain of TCR clone 264310 (TRBV7-2, TRBJ2-7)
CASRPKTSFYEQYF

SEQ ID NO: 528621 - protein, 14 aa, Homo sapiens
  CDR3 for alpha chain variable domain of TCR clone 264311 (TRAV13-1, TRAJ8)
CAATEDTGFQKLVF

SEQ ID NO: 528622 - protein, 13 aa, Homo sapiens
  CDR3 for beta chain variable domain of TCR clone 264311 (TRBV19, TRBJ1-5)
CASSTRRDQPQHF

SEQ ID NO: 528623 - protein, 14 aa, Homo sapiens
  CDR3 for alpha chain variable domain of TCR clone 264312 (TRAV29/DV5, TRAJ48)
CTAMALFGNEKLTF

SEQ ID NO: 528624 - protein, 15 aa, Homo sapiens
  CDR3 for beta chain variable domain of TCR clone 264312 (TRBV7-2, TRBJ2-1)
CASTHGTGVYNEQFF

SEQ ID NO: 528625 - protein, 13 aa, Homo sapiens
  CDR3 for alpha chain variable domain of TCR clone 264313 (TRAV8-6, TRAJ20)
CAVRTADDYKLSF

SEQ ID NO: 528626 - protein, 16 aa, Homo sapiens
  CDR3 for beta chain variable domain of TCR clone 264313 (TRBV19, TRBJ2-1)
CASSKAGPSSYNEQFF

SEQ ID NO: 528627 - protein, 12 aa, Homo sapiens
  CDR3 for alpha chain variable domain of TCR clone 264314 (TRAV13-2, TRAJ23)
CAERHRGGELIF

SEQ ID NO: 528628 - protein, 12 aa, Homo sapiens
  CDR3 for beta chain variable domain of TCR clone 264314 (TRBV27, TRBJ2-5)
CASSPTGETQYF

SEQ ID NO: 528629 - protein, 15 aa, Homo sapiens
  CDR3 for alpha chain variable domain of TCR clone 264315 (TRAV12-3, TRAJ10)
CASYILTGGGNKLTF

SEQ ID NO: 528630 - protein, 17 aa, Homo sapiens
  CDR3 for beta chain variable domain of TCR clone 264315 (TRBV13, TRBJ2-3)
CASSLSRVAGGRNTQYF

SEQ ID NO: 528631 - protein, 22 aa, Homo sapiens
  CDR3 for alpha chain variable domain of TCR clone 264316 (TRAV27, TRAJ38)
CAARRNAGNNHTQNPDPAGYQL

SEQ ID NO: 528632 - protein, 13 aa, Homo sapiens
  CDR3 for beta chain variable domain of TCR clone 264316 (TRBV12-5, TRBJ2-3)
CASGDRQSDTQYF

SEQ ID NO: 528633 - protein, 16 aa, Homo sapiens
  CDR3 for alpha chain variable domain of TCR clone 264317 (TRAV30, TRAJ24)
CGTEIVDAGSWGKFQF

SEQ ID NO: 528634 - protein, 14 aa, Homo sapiens
  CDR3 for beta chain variable domain of TCR clone 264317 (TRBV7-2, TRBJ1-2)
CASSQTGSTYGYTF

SEQ ID NO: 528635 - protein, 15 aa, Homo sapiens
  CDR3 for alpha chain variable domain of TCR clone 264318 (TRAV13-1, TRAJ16)
CAARYQMARSCTLQG

SEQ ID NO: 528636 - protein, 13 aa, Homo sapiens
  CDR3 for beta chain variable domain of TCR clone 264318 (TRBV4-1, TRBJ2-1)
CASSQAGGDEQFF

SEQ ID NO: 528637 - protein, 16 aa, Homo sapiens
  CDR3 for alpha chain variable domain of TCR clone 264319 (TRAV4, TRAJ22)
CLVGDLYSGSARQLTF

SEQ ID NO: 528638 - protein, 14 aa, Homo sapiens
  CDR3 for beta chain variable domain of TCR clone 264319 (TRBV28, TRBJ2-3)
CARSWRGRADTQYF

SEQ ID NO: 528639 - protein, 10 aa, Homo sapiens
  CDR3 for alpha chain variable domain of TCR clone 264320 (TRAV23/DV6, TRAJ57)
CAASSTLSQG

SEQ ID NO: 528640 - protein, 15 aa, Homo sapiens
  CDR3 for beta chain variable domain of TCR clone 264320 (TRBV11-2, TRBJ2-5)
CASSLQRGGRETQYF

SEQ ID NO: 528641 - protein, 15 aa, Homo sapiens
  CDR3 for alpha chain variable domain of TCR clone 264321 (TRAV13-2, TRAJ23)
CAERGLYNQGGKLIF

SEQ ID NO: 528642 - protein, 14 aa, Homo sapiens
  CDR3 for beta chain variable domain of TCR clone 264321 (TRBV4-1, TRBJ2-3)
CASSQDWSTDTQYF

SEQ ID NO: 528643 - protein, 15 aa, Homo sapiens
  CDR3 for alpha chain variable domain of TCR clone 264322 (TRAV17, TRAJ56)
CSTEPFTGANSKLTF

SEQ ID NO: 528644 - protein, 15 aa, Homo sapiens
  CDR3 for beta chain variable domain of TCR clone 264322 (TRBV28, TRBJ1-5)
CASSRTGGYVQPQHF

SEQ ID NO: 528645 - protein, 14 aa, Homo sapiens
  CDR3 for alpha chain variable domain of TCR clone 264323 (TRAV26-1, TRAJ20)
CIVRGHTNDYKLSF

SEQ ID NO: 528646 - protein, 17 aa, Homo sapiens
  CDR3 for beta chain variable domain of TCR clone 264323 (TRBV19, TRBJ2-1)
CASSTDRAEISYNEQFF

SEQ ID NO: 528647 - protein, 13 aa, Homo sapiens
  CDR3 for alpha chain variable domain of TCR clone 264324 (TRAV35, TRAJ57)
CAGSQGGSEKLVF

SEQ ID NO: 528648 - protein, 14 aa, Homo sapiens
  CDR3 for beta chain variable domain of TCR clone 264324 (TRBV25-1, TRBJ1-1)
CASTHLGGDTEAFF

SEQ ID NO: 528649 - protein, 12 aa, Homo sapiens
  CDR3 for alpha chain variable domain of TCR clone 264325 (TRAV3, TRAJ20)
CAVRDPDYKLSF

SEQ ID NO: 528650 - protein, 13 aa, Homo sapiens
  CDR3 for beta chain variable domain of TCR clone 264325 (TRBV10-2, TRBJ2-7)
CASGASGGYEQYF

SEQ ID NO: 528651 - protein, 13 aa, Homo sapiens
  CDR3 for alpha chain variable domain of TCR clone 264326 (TRAV1-2, TRAJ9)
CAVLNTGGFKTIF

SEQ ID NO: 528652 - protein, 18 aa, Homo sapiens
  CDR3 for beta chain variable domain of TCR clone 264326 (TRBV20-1, TRBJ2-2)
CSARVQTARPSGTGELFF

SEQ ID NO: 528653 - protein, 12 aa, Homo sapiens
  CDR3 for alpha chain variable domain of TCR clone 264327 (TRAV8-4, TRAJ47)
CAVSEYGNKLVF

SEQ ID NO: 528654 - protein, 15 aa, Homo sapiens
  CDR3 for beta chain variable domain of TCR clone 264327 (TRBV4-1, TRBJ2-5)
CASSQASGEYETQYF

SEQ ID NO: 528655 - protein, 14 aa, Homo sapiens
  CDR3 for alpha chain variable domain of TCR clone 264328 (TRAV26-1, TRAJ48)
CIVRVGFGNEKLTF

SEQ ID NO: 528656 - protein, 13 aa, Homo sapiens
  CDR3 for beta chain variable domain of TCR clone 264328 (TRBV11-3, TRBJ2-3)
YASSHDTKDTQYF

SEQ ID NO: 528657 - protein, 15 aa, Homo sapiens
  CDR3 for alpha chain variable domain of TCR clone 264329 (TRAV3, TRAJ13)
CAVRVYSGGYQKVTF

SEQ ID NO: 528658 - protein, 15 aa, Homo sapiens
  CDR3 for beta chain variable domain of TCR clone 264329 (TRBV5-7, TRBJ1-2)
CASSLRVAANYGYTF

SEQ ID NO: 528659 - protein, 13 aa, Homo sapiens
  CDR3 for alpha chain variable domain of TCR clone 264330 (TRAV8-1, TRAJ34)
CAVRPYNTDKLIF

SEQ ID NO: 528660 - protein, 16 aa, Homo sapiens
  CDR3 for beta chain variable domain of TCR clone 264330 (TRBV15, TRBJ2-3)
CATRLSGGRAPDTQYF

SEQ ID NO: 528661 - protein, 15 aa, Homo sapiens
  CDR3 for alpha chain variable domain of TCR clone 264331 (TRAV3, TRAJ22)
CAVRDRGGSARQLPF

SEQ ID NO: 528662 - protein, 15 aa, Homo sapiens
  CDR3 for beta chain variable domain of TCR clone 264331 (TRBV19, TRBJ2-5)
CASSIVRASQETQYF

SEQ ID NO: 528663 - protein, 12 aa, Homo sapiens
  CDR3 for alpha chain variable domain of TCR clone 264332 (TRAV30, TRAJ31)
CGTAKHNARLMF

SEQ ID NO: 528664 - protein, 13 aa, Homo sapiens
  CDR3 for beta chain variable domain of TCR clone 264332 (TRBV7-3, TRBJ1-1)
CASSQDWGAEAFF

SEQ ID NO: 528665 - protein, 12 aa, Homo sapiens
  CDR3 for alpha chain variable domain of TCR clone 264333 (TRAV13-1, TRAJ27)
CAAHTNAGKSTF

SEQ ID NO: 528666 - protein, 16 aa, Homo sapiens
  CDR3 for beta chain variable domain of TCR clone 264333 (TRBV3-1, TRBJ2-5)
CASSQDWASGQETQYF

SEQ ID NO: 528667 - protein, 12 aa, Homo sapiens
  CDR3 for alpha chain variable domain of TCR clone 264334 (TRAV27, TRAJ37)
CADSGSTGKLNF

SEQ ID NO: 528668 - protein, 18 aa, Homo sapiens
  CDR3 for beta chain variable domain of TCR clone 264334 (TRBV7-9, TRBJ1-1)
CASSKPWDTMGMNTEAFF

SEQ ID NO: 528669 - protein, 17 aa, Homo sapiens
  CDR3 for alpha chain variable domain of TCR clone 264335 (TRAV3, TRAJ6)
CAVRDGPRAGGSYIPTF

SEQ ID NO: 528670 - protein, 13 aa, Homo sapiens
  CDR3 for beta chain variable domain of TCR clone 264335 (TRBV25-1, TRBJ2-5)
CASSESVRETQYF

SEQ ID NO: 528671 - protein, 15 aa, Homo sapiens
  CDR3 for alpha chain variable domain of TCR clone 264336 (TRAV35, TRAJ50)
CAGQLRKTSYDKVIF

SEQ ID NO: 528672 - protein, 13 aa, Homo sapiens
  CDR3 for beta chain variable domain of TCR clone 264336 (TRBV27, TRBJ2-7)
CASSFVSSYEQYF

SEQ ID NO: 528673 - protein, 15 aa, Homo sapiens
  CDR3 for alpha chain variable domain of TCR clone 264337 (TRAV8-6, TRAJ23)
CAVREFYNQGGKLIF

SEQ ID NO: 528674 - protein, 15 aa, Homo sapiens
  CDR3 for beta chain variable domain of TCR clone 264337 (TRBV20-1, TRBJ2-1)
CSAITGASGSNEQFF

SEQ ID NO: 528675 - protein, 16 aa, Homo sapiens
  CDR3 for alpha chain variable domain of TCR clone 264338 (TRAV13-1, TRAJ48)
CAASIFGNFGNEKLTF

SEQ ID NO: 528676 - protein, 12 aa, Homo sapiens
  CDR3 for beta chain variable domain of TCR clone 264338 (TRBV6-1, TRBJ2-7)
CASSDYSYEQYF

SEQ ID NO: 528677 - protein, 17 aa, Homo sapiens
  CDR3 for alpha chain variable domain of TCR clone 264339 (TRAV3, TRAJ6)
CAVRDGPRAGGSYIPTF

SEQ ID NO: 528678 - protein, 15 aa, Homo sapiens
  CDR3 for beta chain variable domain of TCR clone 264339 (TRBV3-1, TRBJ2-5)
CASSQEVRLEETQYF

SEQ ID NO: 528679 - protein, 14 aa, Homo sapiens
  CDR3 for alpha chain variable domain of TCR clone 264340 (TRAV3, TRAJ6)
CAVRDWGGSYIPTF

SEQ ID NO: 528680 - protein, 14 aa, Homo sapiens
  CDR3 for beta chain variable domain of TCR clone 264340 (TRBV25-1, TRBJ1-1)
CASTHLGGNTEAFF

SEQ ID NO: 528681 - protein, 17 aa, Homo sapiens
  CDR3 for alpha chain variable domain of TCR clone 264341 (TRAV12-2, TRAJ36)
CAVKDDLFFGTGTRLTV

SEQ ID NO: 528682 - protein, 15 aa, Homo sapiens
  CDR3 for beta chain variable domain of TCR clone 264341 (TRBV28, TRBJ2-2)
CASTVAGANTGELFF

SEQ ID NO: 528683 - protein, 12 aa, Homo sapiens
  CDR3 for alpha chain variable domain of TCR clone 264342 (TRAV1-1, TRAJ39)
CAVPVVGNMLTF

SEQ ID NO: 528684 - protein, 16 aa, Homo sapiens
  CDR3 for beta chain variable domain of TCR clone 264342 (TRBV20-1, TRBJ1-4)
CSAPGQGLLTNEKLFF

SEQ ID NO: 528685 - protein, 14 aa, Homo sapiens
  CDR3 for alpha chain variable domain of TCR clone 264343 (TRAV1-2, TRAJ8)
CAVREDTGFEKLVF

SEQ ID NO: 528686 - protein, 15 aa, Homo sapiens
  CDR3 for beta chain variable domain of TCR clone 264343 (TRBV10-2, TRBJ2-6)
CASSEQGTGANALTF

SEQ ID NO: 528687 - protein, 15 aa, Homo sapiens
  CDR3 for alpha chain variable domain of TCR clone 264344 (TRAV14/DV4, TRAJ39)
CAMRAVNNAGNMLTF

SEQ ID NO: 528688 - protein, 14 aa, Homo sapiens
  CDR3 for beta chain variable domain of TCR clone 264344 (TRBV7-9, TRBJ2-5)
CASSLDTAQETQYF

SEQ ID NO: 528689 - protein, 14 aa, Homo sapiens
  CDR3 for alpha chain variable domain of TCR clone 264345 (TRAV17, TRAJ15)
CATGPNQSGTALIF

SEQ ID NO: 528690 - protein, 15 aa, Homo sapiens
  CDR3 for beta chain variable domain of TCR clone 264345 (TRBV11-2, TRBJ2-2)
CASSSDRVNAGELFF

SEQ ID NO: 528691 - protein, 11 aa, Homo sapiens
  CDR3 for alpha chain variable domain of TCR clone 264346 (TRAV29/DV5, TRAJ26)
CAAGDGQNFVF

SEQ ID NO: 528692 - protein, 14 aa, Homo sapiens
  CDR3 for beta chain variable domain of TCR clone 264346 (TRBV20-1, TRBJ1-2)
CSARVWGTNYGYTF

SEQ ID NO: 528693 - protein, 16 aa, Homo sapiens
  CDR3 for alpha chain variable domain of TCR clone 264347 (TRAV30, TRAJ24)
CGTEIVDADSWGKFQF

SEQ ID NO: 528694 - protein, 12 aa, Homo sapiens
  CDR3 for beta chain variable domain of TCR clone 264347 (TRBV5-1, TRBJ2-7)
CASSPRQGPQYF

SEQ ID NO: 528695 - protein, 15 aa, Homo sapiens
  CDR3 for alpha chain variable domain of TCR clone 264348 (TRAV26-1, TRAJ29)
CIVRVEGSGNTPLVF

SEQ ID NO: 528696 - protein, 16 aa, Homo sapiens
  CDR3 for beta chain variable domain of TCR clone 264348 (TRBV28, TRBJ2-1)
CASSSPEYPRDNEQFF

SEQ ID NO: 528697 - protein, 12 aa, Homo sapiens
  CDR3 for alpha chain variable domain of TCR clone 264349 (TRAV29/DV5, TRAJ49)
CAATDTGNQFYF

SEQ ID NO: 528698 - protein, 13 aa, Homo sapiens
  CDR3 for beta chain variable domain of TCR clone 264349 (TRBV3-1, TRBJ1-1)
RASSPGVITEAFF

SEQ ID NO: 528699 - protein, 12 aa, Homo sapiens
  CDR3 for alpha chain variable domain of TCR clone 264350 (TRAV27, TRAJ35)
CAGAAFGNVLHC

SEQ ID NO: 528700 - protein, 15 aa, Homo sapiens
  CDR3 for beta chain variable domain of TCR clone 264350 (TRBV20-1, TRBJ2-7)
CSARDRVSGMDEQYF

SEQ ID NO: 528701 - protein, 18 aa, Homo sapiens
  CDR3 for alpha chain variable domain of TCR clone 264351 (TRAV1-2, TRAJ18)
CAVRDMGDRGSTLGRLYF

SEQ ID NO: 528702 - protein, 18 aa, Homo sapiens
  CDR3 for beta chain variable domain of TCR clone 264351 (TRBV11-2, TRBJ2-3)
CASSLGGASRGAPNTQYF

SEQ ID NO: 528703 - protein, 14 aa, Homo sapiens
  CDR3 for alpha chain variable domain of TCR clone 264352 (TRAV26-1, TRAJ38)
CIADNAGNSRKLMW

SEQ ID NO: 528704 - protein, 17 aa, Homo sapiens
  CDR3 for beta chain variable domain of TCR clone 264352 (TRBV7-9, TRBJ2-3)
CASSPTVAGDLTDTQYF

SEQ ID NO: 528705 - protein, 14 aa, Homo sapiens
  CDR3 for alpha chain variable domain of TCR clone 264353 (TRAV8-6, TRAJ12)
CAVKAADSSYKLIF

SEQ ID NO: 528706 - protein, 15 aa, Homo sapiens
  CDR3 for beta chain variable domain of TCR clone 264353 (TRBV5-1, TRBJ2-5)
WASSLGLAEQETQYF

SEQ ID NO: 528707 - protein, 13 aa, Homo sapiens
  CDR3 for alpha chain variable domain of TCR clone 264354 (TRAV20, TRAJ49)
CAVQARTGNQFYF

SEQ ID NO: 528708 - protein, 15 aa, Homo sapiens
  CDR3 for beta chain variable domain of TCR clone 264354 (TRBV10-2, TRBJ2-6)
CASSEQGTEANVLTF

SEQ ID NO: 528709 - protein, 15 aa, Homo sapiens
  CDR3 for alpha chain variable domain of TCR clone 264355 (TRAV21, TRAJ53)
CATLNSGGSNYKLTF

SEQ ID NO: 528710 - protein, 16 aa, Homo sapiens
  CDR3 for beta chain variable domain of TCR clone 264355 (TRBV11-2, TRBJ2-3)
CASSLGVSGGQDTQYF

SEQ ID NO: 528711 - protein, 13 aa, Homo sapiens
  CDR3 for alpha chain variable domain of TCR clone 264356 (TRAV26-1, TRAJ39)
CIVRVVAGNMPTF

SEQ ID NO: 528712 - protein, 14 aa, Homo sapiens
  CDR3 for beta chain variable domain of TCR clone 264356 (TRBV20-1, TRBJ2-5)
CSARHQGIRETQYF

SEQ ID NO: 528713 - protein, 14 aa, Homo sapiens
  CDR3 for alpha chain variable domain of TCR clone 264357 (TRAV8-3, TRAJ39)
CAVGANNAGNMQTF

SEQ ID NO: 528714 - protein, 15 aa, Homo sapiens
  CDR3 for beta chain variable domain of TCR clone 264357 (TRBV4-3, TRBJ1-1)
CASSQELGRGTEAFF

SEQ ID NO: 528715 - protein, 11 aa, Homo sapiens
  CDR3 for alpha chain variable domain of TCR clone 264358 (TRAV1-2, TRAJ11)
CAVRGYSTLTF

SEQ ID NO: 528716 - protein, 16 aa, Homo sapiens
  CDR3 for beta chain variable domain of TCR clone 264358 (TRBV4-1, TRBJ2-7)
CASSQEWTSGPLEQYF

SEQ ID NO: 528717 - protein, 16 aa, Homo sapiens
  CDR3 for alpha chain variable domain of TCR clone 264359 (TRAV30, TRAJ24)
CGTEIVDADSGGKFQF

SEQ ID NO: 528718 - protein, 14 aa, Homo sapiens
  CDR3 for beta chain variable domain of TCR clone 264359 (TRBV12-5, TRBJ2-5)
CASGSRTHQGTQYF

SEQ ID NO: 528719 - protein, 11 aa, Homo sapiens
  CDR3 for alpha chain variable domain of TCR clone 264360 (TRAV21, TRAJ34)
CAHYNTDKLIF

SEQ ID NO: 528720 - protein, 15 aa, Homo sapiens
  CDR3 for beta chain variable domain of TCR clone 264360 (TRBV10-3, TRBJ2-2)
CAISEGDRAAGELFF

SEQ ID NO: 528721 - protein, 12 aa, Homo sapiens
  CDR3 for alpha chain variable domain of TCR clone 264361 (TRAV1-2, TRAJ33)
CAALDSNYQLIW

SEQ ID NO: 528722 - protein, 15 aa, Homo sapiens
  CDR3 for beta chain variable domain of TCR clone 264361 (TRBV27, TRBJ2-1)
CASSNGGGSSNEQFF

SEQ ID NO: 528723 - protein, 14 aa, Homo sapiens
  CDR3 for alpha chain variable domain of TCR clone 264362 (TRAV36/DV7, TRAJ40)
CAVETNSGTYKYIF

SEQ ID NO: 528724 - protein, 13 aa, Homo sapiens
  CDR3 for beta chain variable domain of TCR clone 264362 (TRBV10-3, TRBJ2-5)
CAMTSGAGETQYF

SEQ ID NO: 528725 - protein, 14 aa, Homo sapiens
  CDR3 for alpha chain variable domain of TCR clone 264363 (TRAV8-3, TRAJ4)
CAVGASGGYNKLIF

SEQ ID NO: 528726 - protein, 13 aa, Homo sapiens
  CDR3 for beta chain variable domain of TCR clone 264363 (TRBV19, TRBJ1-2)
CASSVPGQDGYTF

SEQ ID NO: 528727 - protein, 13 aa, Homo sapiens
  CDR3 for alpha chain variable domain of TCR clone 264364 (TRAV17, TRAJ34)
CATVPYNTDKLIF

SEQ ID NO: 528728 - protein, 17 aa, Homo sapiens
  CDR3 for beta chain variable domain of TCR clone 264364 (TRBV4-2, TRBJ1-1)
CASSQVATGGMNTEAFF

SEQ ID NO: 528729 - protein, 14 aa, Homo sapiens
  CDR3 for alpha chain variable domain of TCR clone 264365 (TRAV1-2, TRAJ15)
CAVRDRQAGTALLF

SEQ ID NO: 528730 - protein, 15 aa, Homo sapiens
  CDR3 for beta chain variable domain of TCR clone 264365 (TRBV27, TRBJ2-1)
CASSNGGGSSNEQFF

SEQ ID NO: 528731 - protein, 12 aa, Homo sapiens
  CDR3 for alpha chain variable domain of TCR clone 264366 (TRAV2, TRAJ31)
CAVEDNNARLMF

SEQ ID NO: 528732 - protein, 14 aa, Homo sapiens
  CDR3 for beta chain variable domain of TCR clone 264366 (TRBV4-2, TRBJ2-1)
CASGLDRAYNEQFF

SEQ ID NO: 528733 - protein, 16 aa, Homo sapiens
  CDR3 for alpha chain variable domain of TCR clone 264367 (TRAV30, TRAJ24)
CGPEIVDADSWGKFQF

SEQ ID NO: 528734 - protein, 15 aa, Homo sapiens
  CDR3 for beta chain variable domain of TCR clone 264367 (TRBV6-1, TRBJ2-1)
CASSELRGQYNEQFF

SEQ ID NO: 528735 - protein, 14 aa, Homo sapiens
  CDR3 for alpha chain variable domain of TCR clone 264368 (TRAV8-3, TRAJ4)
CAVGASGGYNKLIF

SEQ ID NO: 528736 - protein, 13 aa, Homo sapiens
  CDR3 for beta chain variable domain of TCR clone 264368 (TRBV15, TRBJ2-7)
CATSTTGHYEQYF

SEQ ID NO: 528737 - protein, 17 aa, Homo sapiens
  CDR3 for alpha chain variable domain of TCR clone 264369 (TRAV2, TRAJ22)
ILQVREADAAEQRQLTF

SEQ ID NO: 528738 - protein, 14 aa, Homo sapiens
  CDR3 for beta chain variable domain of TCR clone 264369 (TRBV11-2, TRBJ2-5)
CASSRTGGIETQYF

SEQ ID NO: 528739 - protein, 11 aa, Homo sapiens
  CDR3 for alpha chain variable domain of TCR clone 264370 (TRAV21, TRAJ34)
CAHYNTDKLIF

SEQ ID NO: 528740 - protein, 13 aa, Homo sapiens
  CDR3 for beta chain variable domain of TCR clone 264370 (TRBV7-6, TRBJ1-2)
SASSLVADYGYTF

SEQ ID NO: 528741 - protein, 14 aa, Homo sapiens
  CDR3 for alpha chain variable domain of TCR clone 264371 (TRAV1-2, TRAJ16)
CAVNRFPDGQKLPF

SEQ ID NO: 528742 - protein, 16 aa, Homo sapiens
  CDR3 for beta chain variable domain of TCR clone 264371 (TRBV11-2, TRBJ1-2)
CASSLDTGGADYGYTF

SEQ ID NO: 528743 - protein, 12 aa, Homo sapiens
  CDR3 for alpha chain variable domain of TCR clone 264372 (TRAV12-2, TRAJ47)
CAVAEYGNKLVV

SEQ ID NO: 528744 - protein, 14 aa, Homo sapiens
  CDR3 for beta chain variable domain of TCR clone 264372 (TRBV20-1, TRBJ1-1)
CSAMGGTANTEAFF

SEQ ID NO: 528745 - protein, 15 aa, Homo sapiens
  CDR3 for alpha chain variable domain of TCR clone 264373 (TRAV12-2, TRAJ20)
CAVKGGFGAGTTVTV

SEQ ID NO: 528746 - protein, 14 aa, Homo sapiens
  CDR3 for beta chain variable domain of TCR clone 264373 (TRBV7-8, TRBJ2-7)
CASTFRGEPNEQYF

SEQ ID NO: 528747 - protein, 15 aa, Homo sapiens
  CDR3 for alpha chain variable domain of TCR clone 264374 (TRAV2, TRAJ11)
CAVGGRNSVYSTLTF

SEQ ID NO: 528748 - protein, 15 aa, Homo sapiens
  CDR3 for beta chain variable domain of TCR clone 264374 (TRBV7-9, TRBJ1-6)
CASSSPGRGNSPLHF

SEQ ID NO: 528749 - protein, 16 aa, Homo sapiens
  CDR3 for alpha chain variable domain of TCR clone 264375 (TRAV30, TRAJ24)
CGTEIVDAASWGKFQF

SEQ ID NO: 528750 - protein, 15 aa, Homo sapiens
  CDR3 for beta chain variable domain of TCR clone 264375 (TRBV5-1, TRBJ1-1)
CASSLAPRGNTEAFF

SEQ ID NO: 528751 - protein, 13 aa, Homo sapiens
  CDR3 for alpha chain variable domain of TCR clone 264376 (TRAV13-1, TRAJ39)
CSTYSNAGNMLTF

SEQ ID NO: 528752 - protein, 16 aa, Homo sapiens
  CDR3 for beta chain variable domain of TCR clone 264376 (TRBV7-2, TRBJ2-3)
CASSLVALYSTDTQYF

SEQ ID NO: 528753 - protein, 13 aa, Homo sapiens
  CDR3 for alpha chain variable domain of TCR clone 264377 (TRAV17, TRAJ26)
CATVDNYGQNFVF

SEQ ID NO: 528754 - protein, 12 aa, Homo sapiens
  CDR3 for beta chain variable domain of TCR clone 264377 (TRBV7-8, TRBJ2-5)
CASSPSVQTQYF

SEQ ID NO: 528755 - protein, 12 aa, Homo sapiens
  CDR3 for alpha chain variable domain of TCR clone 264378 (TRAV21, TRAJ42)
CAVGGSQGNLIF

SEQ ID NO: 528756 - protein, 14 aa, Homo sapiens
  CDR3 for beta chain variable domain of TCR clone 264378 (TRBV19, TRBJ2-1)
CASPTFVLSGEQFF

SEQ ID NO: 528757 - protein, 15 aa, Homo sapiens
  CDR3 for alpha chain variable domain of TCR clone 264379 (TRAV4, TRAJ17)
CLVGDIGAAGNKLTF

SEQ ID NO: 528758 - protein, 15 aa, Homo sapiens
  CDR3 for beta chain variable domain of TCR clone 264379 (TRBV5-1, TRBJ2-7)
CASSLNGGPAREQYF

SEQ ID NO: 528759 - protein, 14 aa, Homo sapiens
  CDR3 for alpha chain variable domain of TCR clone 264380 (TRAV8-1, TRAJ22)
CAAPSSGSARQLAF

SEQ ID NO: 528760 - protein, 16 aa, Homo sapiens
  CDR3 for beta chain variable domain of TCR clone 264380 (TRBV13, TRBJ2-2)
CASSPRTGEHTGELFF

SEQ ID NO: 528761 - protein, 14 aa, Homo sapiens
  CDR3 for alpha chain variable domain of TCR clone 264381 (TRAV26-1, TRAJ22)
CIVYPPGSARQLTF

SEQ ID NO: 528762 - protein, 13 aa, Homo sapiens
  CDR3 for beta chain variable domain of TCR clone 264381 (TRBV2, TRBJ1-5)
CASSQGGSQPQHF

SEQ ID NO: 528763 - protein, 12 aa, Homo sapiens
  CDR3 for alpha chain variable domain of TCR clone 264382 (TRAV21, TRAJ23)
CAVMLQGGKLIF

SEQ ID NO: 528764 - protein, 13 aa, Homo sapiens
  CDR3 for beta chain variable domain of TCR clone 264382 (TRBV7-2, TRBJ2-2)
CASSLAVTGELFF

SEQ ID NO: 528765 - protein, 14 aa, Homo sapiens
  CDR3 for alpha chain variable domain of TCR clone 264383 (TRAV12-2, TRAJ40)
CAVKIHSGTCKYIF

SEQ ID NO: 528766 - protein, 16 aa, Homo sapiens
  CDR3 for beta chain variable domain of TCR clone 264383 (TRBV28, TRBJ2-5)
CASSFSPAGGWETQYF

SEQ ID NO: 528767 - protein, 14 aa, Homo sapiens
  CDR3 for alpha chain variable domain of TCR clone 264384 (TRAV12-1, TRAJ12)
CVVTRMDSSYKLTF

SEQ ID NO: 528768 - protein, 14 aa, Homo sapiens
  CDR3 for beta chain variable domain of TCR clone 264384 (TRBV4-1, TRBJ2-7)
CASSPVAGGDEQYF

SEQ ID NO: 528769 - protein, 13 aa, Homo sapiens
  CDR3 for alpha chain variable domain of TCR clone 264385 (TRAV12-2, TRAJ9)
CAVKWAGGFKTIF

SEQ ID NO: 528770 - protein, 19 aa, Homo sapiens
  CDR3 for beta chain variable domain of TCR clone 264385 (TRBV7-2, TRBJ2-3)
CASSFLSRNWGGGTDTQYF

SEQ ID NO: 528771 - protein, 14 aa, Homo sapiens
  CDR3 for alpha chain variable domain of TCR clone 264386 (TRAV3, TRAJ40)
CAVRDRRGTYKYIF

SEQ ID NO: 528772 - protein, 15 aa, Homo sapiens
  CDR3 for beta chain variable domain of TCR clone 264386 (TRBV11-1, TRBJ1-3)
CASTDPRAFGNTIYS

SEQ ID NO: 528773 - protein, 14 aa, Homo sapiens
  CDR3 for alpha chain variable domain of TCR clone 264387 (TRAV16, TRAJ17)
CALSGRAAGNKLTF

SEQ ID NO: 528774 - protein, 15 aa, Homo sapiens
  CDR3 for beta chain variable domain of TCR clone 264387 (TRBV3-1, TRBJ1-2)
CASSPTRLPVGDYTF

SEQ ID NO: 528775 - protein, 15 aa, Homo sapiens
  CDR3 for alpha chain variable domain of TCR clone 264388 (TRAV12-3, TRAJ6)
CAMSATTGGSYIPTF

SEQ ID NO: 528776 - protein, 13 aa, Homo sapiens
  CDR3 for beta chain variable domain of TCR clone 264388 (TRBV3-1, TRBJ1-1)
CASSPGVITEAFF

SEQ ID NO: 528777 - protein, 13 aa, Homo sapiens
  CDR3 for alpha chain variable domain of TCR clone 264389 (TRAV12-1, TRAJ33)
CGYAPDSNYQLIW

SEQ ID NO: 528778 - protein, 15 aa, Homo sapiens
  CDR3 for beta chain variable domain of TCR clone 264389 (TRBV27, TRBJ2-1)
CASSNGGGSSNEQFF

SEQ ID NO: 528779 - protein, 11 aa, Homo sapiens
  CDR3 for alpha chain variable domain of TCR clone 264390 (TRAV27, TRAJ45)
CAGAQEEVLTD

SEQ ID NO: 528780 - protein, 11 aa, Homo sapiens
  CDR3 for beta chain variable domain of TCR clone 264390 (TRBV7-8, TRBJ2-7)
CASSLSLEQYF

SEQ ID NO: 528781 - protein, 15 aa, Homo sapiens
  CDR3 for alpha chain variable domain of TCR clone 264391 (TRAV20, TRAJ58)
CAVQDLETSGSRLTF

SEQ ID NO: 528782 - protein, 18 aa, Homo sapiens
  CDR3 for beta chain variable domain of TCR clone 264391 (TRBV7-9, TRBJ2-1)
CASSLAVSGTSGRNEQFF

SEQ ID NO: 528783 - protein, 14 aa, Homo sapiens
  CDR3 for alpha chain variable domain of TCR clone 264392 (TRAV2, TRAJ9)
CAVADRSGGFKTIF

SEQ ID NO: 528784 - protein, 13 aa, Homo sapiens
  CDR3 for beta chain variable domain of TCR clone 264392 (TRBV7-3, TRBJ2-5)
CASSFRGGETQYF

SEQ ID NO: 528785 - protein, 12 aa, Homo sapiens
  CDR3 for alpha chain variable domain of TCR clone 264393 (TRAV12-3, TRAJ3)
CAIDSSASKIIF

SEQ ID NO: 528786 - protein, 17 aa, Homo sapiens
  CDR3 for beta chain variable domain of TCR clone 264393 (TRBV7-9, TRBJ2-3)
WARSLEEAGAYPDTQYF

SEQ ID NO: 528787 - protein, 12 aa, Homo sapiens
  CDR3 for alpha chain variable domain of TCR clone 264394 (TRAV1-1, TRAJ39)
CAVPVVGNILTF

SEQ ID NO: 528788 - protein, 17 aa, Homo sapiens
  CDR3 for beta chain variable domain of TCR clone 264394 (TRBV28, TRBJ2-5)
CASSTPEGDALQETQYF

SEQ ID NO: 528789 - protein, 14 aa, Homo sapiens
  CDR3 for alpha chain variable domain of TCR clone 264395 (TRAV21, TRAJ38)
CAVANAGNNRKLIL

SEQ ID NO: 528790 - protein, 16 aa, Homo sapiens
  CDR3 for beta chain variable domain of TCR clone 264395 (TRBV5-4, TRBJ2-1)
CASSLALAGAYNEQFF

SEQ ID NO: 528791 - protein, 19 aa, Homo sapiens
  CDR3 for alpha chain variable domain of TCR clone 264396 (TRAV2, TRAJ20)
ILQVREAGAAVYRDCKLSF

SEQ ID NO: 528792 - protein, 15 aa, Homo sapiens
  CDR3 for beta chain variable domain of TCR clone 264396 (TRBV20-1, TRBJ2-5)
CSAEGTGGLQETQYF

SEQ ID NO: 528793 - protein, 14 aa, Homo sapiens
  CDR3 for alpha chain variable domain of TCR clone 264397 (TRAV17, TRAJ35)
CATDRPGFGNVLHC

SEQ ID NO: 528794 - protein, 19 aa, Homo sapiens
  CDR3 for beta chain variable domain of TCR clone 264397 (TRBV11-3, TRBJ2-2)
CASSTHPGAKTTNTGELFF

SEQ ID NO: 528795 - protein, 16 aa, Homo sapiens
  CDR3 for alpha chain variable domain of TCR clone 264398 (TRAV3, TRAJ21)
CSVRDRAASTNFTLDL

SEQ ID NO: 528796 - protein, 16 aa, Homo sapiens
  CDR3 for beta chain variable domain of TCR clone 264398 (TRBV7-2, TRBJ2-5)
CASSLESAGGRETQYF

SEQ ID NO: 528797 - protein, 17 aa, Homo sapiens
  CDR3 for alpha chain variable domain of TCR clone 264399 (TRAV3, TRAJ42)
CAVRDRDYRGSQGNLIF

SEQ ID NO: 528798 - protein, 12 aa, Homo sapiens
  CDR3 for beta chain variable domain of TCR clone 264399 (TRBV11-2, TRBJ2-1)
CASSPGNNEQFF

SEQ ID NO: 528799 - protein, 13 aa, Homo sapiens
  CDR3 for alpha chain variable domain of TCR clone 264400 (TRAV12-1, TRAJ39)
CVARSGAGNMLTF

SEQ ID NO: 528800 - protein, 13 aa, Homo sapiens
  CDR3 for beta chain variable domain of TCR clone 264400 (TRBV19, TRBJ2-1)
CATSRGVYNEQFF

SEQ ID NO: 528801 - protein, 11 aa, Homo sapiens
  CDR3 for alpha chain variable domain of TCR clone 264401 (TRAV13-1, TRAJ39)
CASHAGNMLTF

SEQ ID NO: 528802 - protein, 15 aa, Homo sapiens
  CDR3 for beta chain variable domain of TCR clone 264401 (TRBV11-3, TRBJ2-7)
CASSPGPASSYEQYF

SEQ ID NO: 528803 - protein, 12 aa, Homo sapiens
  CDR3 for alpha chain variable domain of TCR clone 264402 (TRAV35, TRAJ43)
CAGAYNNNDMRF

SEQ ID NO: 528804 - protein, 13 aa, Homo sapiens
  CDR3 for beta chain variable domain of TCR clone 264402 (TRBV2, TRBJ2-2)
CQQLAGGDRELFF

SEQ ID NO: 528805 - protein, 15 aa, Homo sapiens
  CDR3 for alpha chain variable domain of TCR clone 264403 (TRAV21, TRAJ53)
CATLNSGGSNYKLTF

SEQ ID NO: 528806 - protein, 15 aa, Homo sapiens
  CDR3 for beta chain variable domain of TCR clone 264403 (TRBV7-6, TRBJ1-5)
CASSQSRGINQPQHF

SEQ ID NO: 528807 - protein, 15 aa, Homo sapiens
  CDR3 for alpha chain variable domain of TCR clone 264404 (TRAV8-3, TRAJ40)
CAARSLGSGTYKYIF

SEQ ID NO: 528808 - protein, 15 aa, Homo sapiens
  CDR3 for beta chain variable domain of TCR clone 264404 (TRBV9, TRBJ1-6)
CASSVAGTGDSPLHF

SEQ ID NO: 528809 - protein, 14 aa, Homo sapiens
  CDR3 for alpha chain variable domain of TCR clone 264405 (TRAV1-2, TRAJ16)
CAVNRFSDGQKLLF

SEQ ID NO: 528810 - protein, 16 aa, Homo sapiens
  CDR3 for beta chain variable domain of TCR clone 264405 (TRBV28, TRBJ2-4)
CASSWIQGSLGNIQYF

SEQ ID NO: 528811 - protein, 10 aa, Homo sapiens
  CDR3 for alpha chain variable domain of TCR clone 264406 (TRAV1-2, TRAJ20)
CALNDYKLSF

SEQ ID NO: 528812 - protein, 16 aa, Homo sapiens
  CDR3 for beta chain variable domain of TCR clone 264406 (TRBV20-1, TRBJ1-1)
CSARALIQGMNTEAFF

SEQ ID NO: 528813 - protein, 17 aa, Homo sapiens
  CDR3 for alpha chain variable domain of TCR clone 264407 (TRAV3, TRAJ6)
CAVRDGPRAGGSYIPTF

SEQ ID NO: 528814 - protein, 14 aa, Homo sapiens
  CDR3 for beta chain variable domain of TCR clone 264407 (TRBV5-8, TRBJ2-3)
CASSLGQGTDTQYF

SEQ ID NO: 528815 - protein, 12 aa, Homo sapiens
  CDR3 for alpha chain variable domain of TCR clone 264408 (TRAV8-3, TRAJ47)
CAVGVGGNKLVF

SEQ ID NO: 528816 - protein, 15 aa, Homo sapiens
  CDR3 for beta chain variable domain of TCR clone 264408 (TRBV7-8, TRBJ2-7)
CASSLGTGKPYEQYF

SEQ ID NO: 528817 - protein, 12 aa, Homo sapiens
  CDR3 for alpha chain variable domain of TCR clone 264409 (TRAV22, TRAJ34)
CAVLYNTDKLIF

SEQ ID NO: 528818 - protein, 13 aa, Homo sapiens
  CDR3 for beta chain variable domain of TCR clone 264409 (TRBV11-2, TRBJ2-1)
CASSLGLAGGRFF

SEQ ID NO: 528819 - protein, 16 aa, Homo sapiens
  CDR3 for alpha chain variable domain of TCR clone 264410 (TRAV21, TRAJ52)
CAVTSAGGTSYGKLTF

SEQ ID NO: 528820 - protein, 14 aa, Homo sapiens
  CDR3 for beta chain variable domain of TCR clone 264410 (TRBV12-5, TRBJ2-5)
CASGSRTHQETQYF

SEQ ID NO: 528821 - protein, 14 aa, Homo sapiens
  CDR3 for alpha chain variable domain of TCR clone 264411 (TRAV26-1, TRAJ21)
CIVRVIYTFNKFYF

SEQ ID NO: 528822 - protein, 17 aa, Homo sapiens
  CDR3 for beta chain variable domain of TCR clone 264411 (TRBV11-2, TRBJ2-1)
CASSLYPPGVEYNEQFF

SEQ ID NO: 528823 - protein, 11 aa, Homo sapiens
  CDR3 for alpha chain variable domain of TCR clone 264412 (TRAV2, TRAJ13)
CASGGYQKVTF

SEQ ID NO: 528824 - protein, 17 aa, Homo sapiens
  CDR3 for beta chain variable domain of TCR clone 264412 (TRBV7-9, TRBJ2-7)
CASSFDGSRGGAYEQYF

SEQ ID NO: 528825 - protein, 17 aa, Homo sapiens
  CDR3 for alpha chain variable domain of TCR clone 264413 (TRAV19, TRAJ53)
CALSEADSGGSKYKLTF

SEQ ID NO: 528826 - protein, 13 aa, Homo sapiens
  CDR3 for beta chain variable domain of TCR clone 264413 (TRBV29-1, TRBJ1-1)
CSVGDSRNTEAFF

SEQ ID NO: 528827 - protein, 12 aa, Homo sapiens
  CDR3 for alpha chain variable domain of TCR clone 264414 (TRAV13-1, TRAJ21)
CTAKEGFNKFYF

SEQ ID NO: 528828 - protein, 18 aa, Homo sapiens
  CDR3 for beta chain variable domain of TCR clone 264414 (TRBV11-2, TRBJ2-3)
CASSLGGASRGAPNTQYF

SEQ ID NO: 528829 - protein, 18 aa, Homo sapiens
  CDR3 for alpha chain variable domain of TCR clone 264415 (TRAV21, TRAJ52)
CAVRPSPAGGTSSGKLTF

SEQ ID NO: 528830 - protein, 14 aa, Homo sapiens
  CDR3 for beta chain variable domain of TCR clone 264415 (TRBV4-2, TRBJ2-1)
CASGLDRAYNEQFF

SEQ ID NO: 528831 - protein, 16 aa, Homo sapiens
  CDR3 for alpha chain variable domain of TCR clone 264416 (TRAV26-1, TRAJ32)
CIVRTNYGGATNKLIF

SEQ ID NO: 528832 - protein, 14 aa, Homo sapiens
  CDR3 for beta chain variable domain of TCR clone 264416 (TRBV12-4, TRBJ1-1)
CASSLLSGLSEAFF

SEQ ID NO: 528833 - protein, 14 aa, Homo sapiens
  CDR3 for alpha chain variable domain of TCR clone 264417 (TRAV12-2, TRAJ44)
CAVNPAGTASKLTF

SEQ ID NO: 528834 - protein, 16 aa, Homo sapiens
  CDR3 for beta chain variable domain of TCR clone 264417 (TRBV19, TRBJ2-7)
CASSLIAGTYFYEQYF

SEQ ID NO: 528835 - protein, 12 aa, Homo sapiens
  CDR3 for alpha chain variable domain of TCR clone 264418 (TRAV17, TRAJ45)
CAAGGGADGLTF

SEQ ID NO: 528836 - protein, 15 aa, Homo sapiens
  CDR3 for beta chain variable domain of TCR clone 264418 (TRBV20-1, TRBJ2-7)
CSARDRVSGMEEQYF

SEQ ID NO: 528837 - protein, 13 aa, Homo sapiens
  CDR3 for alpha chain variable domain of TCR clone 264419 (TRAV2, TRAJ40)
CAVVTSGTYKYIF

SEQ ID NO: 528838 - protein, 14 aa, Homo sapiens
  CDR3 for beta chain variable domain of TCR clone 264419 (TRBV19, TRBJ2-1)
CASPTVVLSGERFF

SEQ ID NO: 528839 - protein, 15 aa, Homo sapiens
  CDR3 for alpha chain variable domain of TCR clone 264420 (TRAV27, TRAJ38)
CAARRNAGNNRKRIW

SEQ ID NO: 528840 - protein, 13 aa, Homo sapiens
  CDR3 for beta chain variable domain of TCR clone 264420 (TRBV12-5, TRBJ2-3)
CASGDRRSDTQYF

SEQ ID NO: 528841 - protein, 12 aa, Homo sapiens
  CDR3 for alpha chain variable domain of TCR clone 264421 (TRAV2, TRAJ33)
CAFLDSNYQLIW

SEQ ID NO: 528842 - protein, 16 aa, Homo sapiens
  CDR3 for beta chain variable domain of TCR clone 264421 (TRBV2, TRBJ2-7)
WASSEPWTGPSYEQYF

SEQ ID NO: 528843 - protein, 15 aa, Homo sapiens
  CDR3 for alpha chain variable domain of TCR clone 264422 (TRAV13-1, TRAJ17)
CAASIEMAAGNKLTF

SEQ ID NO: 528844 - protein, 15 aa, Homo sapiens
  CDR3 for beta chain variable domain of TCR clone 264422 (TRBV6-1, TRBJ2-3)
CASSERGGITDTQYF

SEQ ID NO: 528845 - protein, 18 aa, Homo sapiens
  CDR3 for alpha chain variable domain of TCR clone 264423 (TRAV1-2, TRAJ10)
CAVRALTPVTGRGNKLTF

SEQ ID NO: 528846 - protein, 14 aa, Homo sapiens
  CDR3 for beta chain variable domain of TCR clone 264423 (TRBV4-1, TRBJ1-1)
CASSQQGNGNEAFF

SEQ ID NO: 528847 - protein, 14 aa, Homo sapiens
  CDR3 for alpha chain variable domain of TCR clone 264424 (TRAV12-2, TRAJ13)
CAVKKTGGYQNVTF

SEQ ID NO: 528848 - protein, 16 aa, Homo sapiens
  CDR3 for beta chain variable domain of TCR clone 264424 (TRBV5-5, TRBJ2-2)
CASSGRREGATGELFF

SEQ ID NO: 528849 - protein, 14 aa, Homo sapiens
  CDR3 for alpha chain variable domain of TCR clone 264425 (TRAV12-3, TRAJ10)
SHLPLTGGGNKLTF

SEQ ID NO: 528850 - protein, 16 aa, Homo sapiens
  CDR3 for beta chain variable domain of TCR clone 264425 (TRBV4-1, TRBJ1-4)
CSSSQDLRRGGEKLFF

SEQ ID NO: 528851 - protein, 13 aa, Homo sapiens
  CDR3 for alpha chain variable domain of TCR clone 264426 (TRAV12-2, TRAJ20)
CAVYPSNDYKLSF

SEQ ID NO: 528852 - protein, 14 aa, Homo sapiens
  CDR3 for beta chain variable domain of TCR clone 264426 (TRBV7-2, TRBJ2-1)
CASSPGLAGNEQFF

SEQ ID NO: 528853 - protein, 15 aa, Homo sapiens
  CDR3 for alpha chain variable domain of TCR clone 264427 (TRAV8-3, TRAJ23)
CAVGDRYNQGGKLIF

SEQ ID NO: 528854 - protein, 17 aa, Homo sapiens
  CDR3 for beta chain variable domain of TCR clone 264427 (TRBV4-1, TRBJ1-4)
CASSQEGPRGVGEKLFF

SEQ ID NO: 528855 - protein, 17 aa, Homo sapiens
  CDR3 for alpha chain variable domain of TCR clone 264428 (TRAV3, TRAJ6)
CAVRDGPRAGGSYIPTF

SEQ ID NO: 528856 - protein, 15 aa, Homo sapiens
  CDR3 for beta chain variable domain of TCR clone 264428 (TRBV18, TRBJ1-5)
CASSETGGNNQPQHF

SEQ ID NO: 528857 - protein, 18 aa, Homo sapiens
  CDR3 for alpha chain variable domain of TCR clone 264429 (TRAV12-1, TRAJ52)
CGVKLINAGGTSYGKLTF

SEQ ID NO: 528858 - protein, 16 aa, Homo sapiens
  CDR3 for beta chain variable domain of TCR clone 264429 (TRBV7-6, TRBJ2-7)
CAGSGGTGALSYEQYF

SEQ ID NO: 528859 - protein, 15 aa, Homo sapiens
  CDR3 for alpha chain variable domain of TCR clone 264430 (TRAV8-3, TRAJ23)
CAVGDRYNQGGKLIF

SEQ ID NO: 528860 - protein, 15 aa, Homo sapiens
  CDR3 for beta chain variable domain of TCR clone 264430 (TRBV4-3, TRBJ2-1)
CASSQMRGAHNEQFF

SEQ ID NO: 528861 - protein, 15 aa, Homo sapiens
  CDR3 for alpha chain variable domain of TCR clone 264431 (TRAV21, TRAJ24)
CTARSSTDSWWKLQF

SEQ ID NO: 528862 - protein, 13 aa, Homo sapiens
  CDR3 for beta chain variable domain of TCR clone 264431 (TRBV11-2, TRBJ2-5)
CASSSTGEETQYF

SEQ ID NO: 528863 - protein, 12 aa, Homo sapiens
  CDR3 for alpha chain variable domain of TCR clone 264432 (TRAV9-2, TRAJ5)
CALSPGRRALTF

SEQ ID NO: 528864 - protein, 13 aa, Homo sapiens
  CDR3 for beta chain variable domain of TCR clone 264432 (TRBV7-9, TRBJ1-2)
CASSLKQNYGYTF

SEQ ID NO: 528865 - protein, 16 aa, Homo sapiens
  CDR3 for alpha chain variable domain of TCR clone 264433 (TRAV12-3, TRAJ53)
CAMSGGSGGSKYKLTF

SEQ ID NO: 528866 - protein, 13 aa, Homo sapiens
  CDR3 for beta chain variable domain of TCR clone 264433 (TRBV7-6, TRBJ1-2)
CASSLVADYGYTF

SEQ ID NO: 528867 - protein, 12 aa, Homo sapiens
  CDR3 for alpha chain variable domain of TCR clone 264434 (TRAV21, TRAJ33)
CANMDSNYQLIW

SEQ ID NO: 528868 - protein, 12 aa, Homo sapiens
  CDR3 for beta chain variable domain of TCR clone 264434 (TRBV11-2, TRBJ2-2)
CASSLGGGELFF

SEQ ID NO: 528869 - protein, 11 aa, Homo sapiens
  CDR3 for alpha chain variable domain of TCR clone 264435 (TRAV3, TRAJ21)
CAVGNFNKFYF

SEQ ID NO: 528870 - protein, 16 aa, Homo sapiens
  CDR3 for beta chain variable domain of TCR clone 264435 (TRBV19, TRBJ2-1)
CASSKAGPRSSNEQFF

SEQ ID NO: 528871 - protein, 14 aa, Homo sapiens
  CDR3 for alpha chain variable domain of TCR clone 264436 (TRAV21, TRAJ35)
CDVMRIGFGNVLHC

SEQ ID NO: 528872 - protein, 12 aa, Homo sapiens
  CDR3 for beta chain variable domain of TCR clone 264436 (TRBV7-9, TRBJ2-7)
CASSIKREEQYF

SEQ ID NO: 528873 - protein, 16 aa, Homo sapiens
  CDR3 for alpha chain variable domain of TCR clone 264437 (TRAV30, TRAJ24)
CGTEIADADSWGKFQF

SEQ ID NO: 528874 - protein, 12 aa, Homo sapiens
  CDR3 for beta chain variable domain of TCR clone 264437 (TRBV12-4, TRBJ2-3)
CASSSTTDTQYF

SEQ ID NO: 528875 - protein, 13 aa, Homo sapiens
  CDR3 for alpha chain variable domain of TCR clone 264438 (TRAV26-2, TRAJ43)
CILRAVNNNDMRF

SEQ ID NO: 528876 - protein, 15 aa, Homo sapiens
  CDR3 for beta chain variable domain of TCR clone 264438 (TRBV2, TRBJ2-1)
CASSELAGSYNEQFF

SEQ ID NO: 528877 - protein, 13 aa, Homo sapiens
  CDR3 for alpha chain variable domain of TCR clone 264439 (TRAV16, TRAJ10)
CAPAREGETNPPL

SEQ ID NO: 528878 - protein, 15 aa, Homo sapiens
  CDR3 for beta chain variable domain of TCR clone 264439 (TRBV6-3, TRBJ2-7)
CASSSPGTVFYEQYF

SEQ ID NO: 528879 - protein, 13 aa, Homo sapiens
  CDR3 for alpha chain variable domain of TCR clone 264440 (TRAV8-2, TRAJ8)
CVVSDQGFQKLVF

SEQ ID NO: 528880 - protein, 14 aa, Homo sapiens
  CDR3 for beta chain variable domain of TCR clone 264440 (TRBV19, TRBJ2-2)
CASSGQGIAGELFF

SEQ ID NO: 528881 - protein, 14 aa, Homo sapiens
  CDR3 for alpha chain variable domain of TCR clone 264441 (TRAV1-2, TRAJ16)
CAVNRFSDGQKLLF

SEQ ID NO: 528882 - protein, 12 aa, Homo sapiens
  CDR3 for beta chain variable domain of TCR clone 264441 (TRBV11-2, TRBJ2-2)
CASSLRGGELFF

SEQ ID NO: 528883 - protein, 12 aa, Homo sapiens
  CDR3 for alpha chain variable domain of TCR clone 264442 (TRAV12-3, TRAJ40)
CAMSSGTNKYIF

SEQ ID NO: 528884 - protein, 15 aa, Homo sapiens
  CDR3 for beta chain variable domain of TCR clone 264442 (TRBV7-3, TRBJ2-2)
CASSETGQGTGELLF

SEQ ID NO: 528885 - protein, 13 aa, Homo sapiens
  CDR3 for alpha chain variable domain of TCR clone 264443 (TRAV21, TRAJ37)
CAVSSGNTGKLIF

SEQ ID NO: 528886 - protein, 13 aa, Homo sapiens
  CDR3 for beta chain variable domain of TCR clone 264443 (TRBV7-9, TRBJ1-2)
CASSLKQNYGYAF

SEQ ID NO: 528887 - protein, 17 aa, Homo sapiens
  CDR3 for alpha chain variable domain of TCR clone 264444 (TRAV8-6, TRAJ58)
CAVSSWVGETSGSRVTF

SEQ ID NO: 528888 - protein, 13 aa, Homo sapiens
  CDR3 for beta chain variable domain of TCR clone 264444 (TRBV7-9, TRBJ1-2)
CASSLKQNYGYTF

SEQ ID NO: 528889 - protein, 16 aa, Homo sapiens
  CDR3 for alpha chain variable domain of TCR clone 264445 (TRAV17, TRAJ52)
CATGIIGGTSYGKLTF

SEQ ID NO: 528890 - protein, 16 aa, Homo sapiens
  CDR3 for beta chain variable domain of TCR clone 264445 (TRBV19, TRBJ2-2)
CASRSPGTGATGELFF

SEQ ID NO: 528891 - protein, 11 aa, Homo sapiens
  CDR3 for alpha chain variable domain of TCR clone 264446 (TRAV13-1, TRAJ39)
CASHAGNMLTF

SEQ ID NO: 528892 - protein, 12 aa, Homo sapiens
  CDR3 for beta chain variable domain of TCR clone 264446 (TRBV11-2, TRBJ2-1)
CASSPGNNEQFF

SEQ ID NO: 528893 - protein, 14 aa, Homo sapiens
  CDR3 for alpha chain variable domain of TCR clone 264447 (TRAV21, TRAJ35)
CAVMPIGFGNVLHC

SEQ ID NO: 528894 - protein, 12 aa, Homo sapiens
  CDR3 for beta chain variable domain of TCR clone 264447 (TRBV7-9, TRBJ2-7)
CASSIKREGQYF

SEQ ID NO: 528895 - protein, 13 aa, Homo sapiens
  CDR3 for alpha chain variable domain of TCR clone 264448 (TRAV21, TRAJ37)
CAVSSGNTGKLIF

SEQ ID NO: 528896 - protein, 14 aa, Homo sapiens
  CDR3 for beta chain variable domain of TCR clone 264448 (TRBV2, TRBJ2-3)
CASSEGQNTDTQYF

SEQ ID NO: 528897 - protein, 11 aa, Homo sapiens
  CDR3 for alpha chain variable domain of TCR clone 264449 (TRAV3, TRAJ21)
CAVGNFNKFYF

SEQ ID NO: 528898 - protein, 18 aa, Homo sapiens
  CDR3 for beta chain variable domain of TCR clone 264449 (TRBV7-9, TRBJ2-5)
CASTQGGGGDPVLRARHA

SEQ ID NO: 528899 - protein, 12 aa, Homo sapiens
  CDR3 for alpha chain variable domain of TCR clone 264450 (TRAV13-1, TRAJ43)
CAAGRFNDDMRF

SEQ ID NO: 528900 - protein, 15 aa, Homo sapiens
  CDR3 for beta chain variable domain of TCR clone 264450 (TRBV29-1, TRBJ2-7)
CSVEFFDRGSYEQYF

SEQ ID NO: 528901 - protein, 14 aa, Homo sapiens
  CDR3 for alpha chain variable domain of TCR clone 264451 (TRAV35, TRAJ40)
CAGSITSGTYKYIF

SEQ ID NO: 528902 - protein, 14 aa, Homo sapiens
  CDR3 for beta chain variable domain of TCR clone 264451 (TRBV19, TRBJ2-1)
CARGARSFQWEQFF

SEQ ID NO: 528903 - protein, 14 aa, Homo sapiens
  CDR3 for alpha chain variable domain of TCR clone 264452 (TRAV26-1, TRAJ21)
CIVRPPYNFNKFYF

SEQ ID NO: 528904 - protein, 14 aa, Homo sapiens
  CDR3 for beta chain variable domain of TCR clone 264452 (TRBV19, TRBJ2-1)
CASPTFVVSGEQFF

SEQ ID NO: 528905 - protein, 15 aa, Homo sapiens
  CDR3 for alpha chain variable domain of TCR clone 264453 (TRAV35, TRAJ40)
CAGQLGQAGTYNYIF

SEQ ID NO: 528906 - protein, 14 aa, Homo sapiens
  CDR3 for beta chain variable domain of TCR clone 264453 (TRBV7-3, TRBJ2-1)
CASSLTGGANEQFF

SEQ ID NO: 528907 - protein, 14 aa, Homo sapiens
  CDR3 for alpha chain variable domain of TCR clone 264454 (TRAV29/DV5, TRAJ48)
CAAMALFGNEKLTF

SEQ ID NO: 528908 - protein, 15 aa, Homo sapiens
  CDR3 for beta chain variable domain of TCR clone 264454 (TRBV7-2, TRBJ2-1)
CASTHGTGIYNEQSF

SEQ ID NO: 528909 - protein, 13 aa, Homo sapiens
  CDR3 for alpha chain variable domain of TCR clone 264455 (TRAV8-4, TRAJ36)
CAVSEGGANNLFF

SEQ ID NO: 528910 - protein, 12 aa, Homo sapiens
  CDR3 for beta chain variable domain of TCR clone 264455 (TRBV28, TRBJ2-7)
CASTGNHYEQDF

SEQ ID NO: 528911 - protein, 14 aa, Homo sapiens
  CDR3 for alpha chain variable domain of TCR clone 264456 (TRAV26-1, TRAJ34)
CIVRVAYNTDKPIF

SEQ ID NO: 528912 - protein, 15 aa, Homo sapiens
  CDR3 for beta chain variable domain of TCR clone 264456 (TRBV20-1, TRBJ2-7)
YSARVPAAYFYEQYF

SEQ ID NO: 528913 - protein, 13 aa, Homo sapiens
  CDR3 for alpha chain variable domain of TCR clone 264457 (TRAV1-1, TRAJ33)
CASHMDSNYQLIW

SEQ ID NO: 528914 - protein, 15 aa, Homo sapiens
  CDR3 for beta chain variable domain of TCR clone 264457 (TRBV7-2, TRBJ2-1)
CASTHGTGIYNEQFF

SEQ ID NO: 528915 - protein, 14 aa, Homo sapiens
  CDR3 for alpha chain variable domain of TCR clone 264458 (TRAV12-1, TRAJ3)
CGAARYSSASKIIF

SEQ ID NO: 528916 - protein, 15 aa, Homo sapiens
  CDR3 for beta chain variable domain of TCR clone 264458 (TRBV7-2, TRBJ2-6)
CASSREGSGANALTF

SEQ ID NO: 528917 - protein, 10 aa, Homo sapiens
  CDR3 for alpha chain variable domain of TCR clone 264459 (TRAV13-1, TRAJ49)
CAVPGNQFYF

SEQ ID NO: 528918 - protein, 15 aa, Homo sapiens
  CDR3 for beta chain variable domain of TCR clone 264459 (TRBV29-1, TRBJ2-7)
CSVEFFDRGSYEQHF

SEQ ID NO: 528919 - protein, 15 aa, Homo sapiens
  CDR3 for alpha chain variable domain of TCR clone 264460 (TRAV3, TRAJ36)
CAVRASETGANNLFF

SEQ ID NO: 528920 - protein, 13 aa, Homo sapiens
  CDR3 for beta chain variable domain of TCR clone 264460 (TRBV10-3, TRBJ1-2)
CAISERDSYGYTF

SEQ ID NO: 528921 - protein, 12 aa, Homo sapiens
  CDR3 for alpha chain variable domain of TCR clone 264461 (TRAV2, TRAJ9)
CAVGAGGFKTIF

SEQ ID NO: 528922 - protein, 14 aa, Homo sapiens
  CDR3 for beta chain variable domain of TCR clone 264461 (TRBV7-2, TRBJ1-1)
CASSFLTGTTEAFF

SEQ ID NO: 528923 - protein, 14 aa, Homo sapiens
  CDR3 for alpha chain variable domain of TCR clone 264462 (TRAV8-4, TRAJ54)
CAVSEVLGAQKLVF

SEQ ID NO: 528924 - protein, 17 aa, Homo sapiens
  CDR3 for beta chain variable domain of TCR clone 264462 (TRBV4-1, TRBJ1-4)
CASSQEGPRGVEEELFF

SEQ ID NO: 528925 - protein, 18 aa, Homo sapiens
  CDR3 for alpha chain variable domain of TCR clone 264463 (TRAV26-2, TRAJ54)
CILRDVEVGIQGAHKLVF

SEQ ID NO: 528926 - protein, 14 aa, Homo sapiens
  CDR3 for beta chain variable domain of TCR clone 264463 (TRBV12-5, TRBJ2-5)
CASGSRTHQETQYF

SEQ ID NO: 528927 - protein, 14 aa, Homo sapiens
  CDR3 for alpha chain variable domain of TCR clone 264464 (TRAV13-1, TRAJ26)
CAAPKGPNGQNFVF

SEQ ID NO: 528928 - protein, 15 aa, Homo sapiens
  CDR3 for beta chain variable domain of TCR clone 264464 (TRBV28, TRBJ2-5)
CASSFRQGALETQYF

SEQ ID NO: 528929 - protein, 17 aa, Homo sapiens
  CDR3 for alpha chain variable domain of TCR clone 264465 (TRAV12-3, TRAJ6)
CAMSARGGAGGSYIPTF

SEQ ID NO: 528930 - protein, 15 aa, Homo sapiens
  CDR3 for beta chain variable domain of TCR clone 264465 (TRBV9, TRBJ1-6)
CASSVAGTGDSTLHF

SEQ ID NO: 528931 - protein, 14 aa, Homo sapiens
  CDR3 for alpha chain variable domain of TCR clone 264466 (TRAV12-2, TRAJ5)
CAVNRSTGRRALTF

SEQ ID NO: 528932 - protein, 13 aa, Homo sapiens
  CDR3 for beta chain variable domain of TCR clone 264466 (TRBV3-1, TRBJ2-7)
CASSLRDGYEQYF

SEQ ID NO: 528933 - protein, 14 aa, Homo sapiens
  CDR3 for alpha chain variable domain of TCR clone 264467 (TRAV23/DV6, TRAJ40)
FAARKNSGTNKYIF

SEQ ID NO: 528934 - protein, 14 aa, Homo sapiens
  CDR3 for beta chain variable domain of TCR clone 264467 (TRBV10-3, TRBJ2-5)
CAISERYYQETQYF

SEQ ID NO: 528935 - protein, 16 aa, Homo sapiens
  CDR3 for alpha chain variable domain of TCR clone 264468 (TRAV30, TRAJ24)
CGTEIVDADSWGKFQF

SEQ ID NO: 528936 - protein, 18 aa, Homo sapiens
  CDR3 for beta chain variable domain of TCR clone 264468 (TRBV11-2, TRBJ2-6)
CASSLNPSLGTGANVLTF

SEQ ID NO: 528937 - protein, 13 aa, Homo sapiens
  CDR3 for alpha chain variable domain of TCR clone 264469 (TRAV21, TRAJ20)
CAVGLRVDYKLSF

SEQ ID NO: 528938 - protein, 13 aa, Homo sapiens
  CDR3 for beta chain variable domain of TCR clone 264469 (TRBV6-1, TRBJ1-1)
GASSRQGNTEAFF

SEQ ID NO: 528939 - protein, 12 aa, Homo sapiens
  CDR3 for alpha chain variable domain of TCR clone 264470 (TRAV12-3, TRAJ17)
CAMTLTGNKLTF

SEQ ID NO: 528940 - protein, 13 aa, Homo sapiens
  CDR3 for beta chain variable domain of TCR clone 264470 (TRBV6-1, TRBJ1-4)
CASSDLDRGKLFF

SEQ ID NO: 528941 - protein, 13 aa, Homo sapiens
  CDR3 for alpha chain variable domain of TCR clone 264471 (TRAV1-1, TRAJ9)
CAANNTGGLKTIF

SEQ ID NO: 528942 - protein, 14 aa, Homo sapiens
  CDR3 for beta chain variable domain of TCR clone 264471 (TRBV20-1, TRBJ2-1)
CSAQIGGSANEQFF

SEQ ID NO: 528943 - protein, 12 aa, Homo sapiens
  CDR3 for alpha chain variable domain of TCR clone 264472 (TRAV21, TRAJ33)
CAKMDSNYQLIR

SEQ ID NO: 528944 - protein, 15 aa, Homo sapiens
  CDR3 for beta chain variable domain of TCR clone 264472 (TRBV9, TRBJ1-6)
CASSVAGTGDSPLHF

SEQ ID NO: 528945 - protein, 13 aa, Homo sapiens
  CDR3 for alpha chain variable domain of TCR clone 264473 (TRAV3, TRAJ3)
CAVADSSASKIIF

SEQ ID NO: 528946 - protein, 16 aa, Homo sapiens
  CDR3 for beta chain variable domain of TCR clone 264473 (TRBV5-1, TRBJ2-3)
CASSLGLAVYTYTQYF

SEQ ID NO: 528947 - protein, 14 aa, Homo sapiens
  CDR3 for alpha chain variable domain of TCR clone 264474 (TRAV2, TRAJ9)
CAVEDRSGGFKTIF

SEQ ID NO: 528948 - protein, 15 aa, Homo sapiens
  CDR3 for beta chain variable domain of TCR clone 264474 (TRBV12-4, TRBJ2-5)
CASSLSGAFQGTQYF

SEQ ID NO: 528949 - protein, 16 aa, Homo sapiens
  CDR3 for alpha chain variable domain of TCR clone 264475 (TRAV30, TRAJ24)
CVTEIVDADSWGKFHF

SEQ ID NO: 528950 - protein, 14 aa, Homo sapiens
  CDR3 for beta chain variable domain of TCR clone 264475 (TRBV12-5, TRBJ2-5)
CASGSRTHQETQYF

SEQ ID NO: 528951 - protein, 14 aa, Homo sapiens
  CDR3 for alpha chain variable domain of TCR clone 264476 (TRAV29/DV5, TRAJ36)
CSARRKTGANNLFF

SEQ ID NO: 528952 - protein, 15 aa, Homo sapiens
  CDR3 for beta chain variable domain of TCR clone 264476 (TRBV12-4, TRBJ2-7)
CASSQRTSGNYEQYF

SEQ ID NO: 528953 - protein, 14 aa, Homo sapiens
  CDR3 for alpha chain variable domain of TCR clone 264477 (TRAV12-3, TRAJ10)
SHLPLTGGGNKLTF

SEQ ID NO: 528954 - protein, 12 aa, Homo sapiens
  CDR3 for beta chain variable domain of TCR clone 264477 (TRBV7-6, TRBJ2-3)
CQQLSRGDTQYF

SEQ ID NO: 528955 - protein, 12 aa, Homo sapiens
  CDR3 for alpha chain variable domain of TCR clone 264478 (TRAV25, TRAJ11)
CAGASGYSTLTF

SEQ ID NO: 528956 - protein, 16 aa, Homo sapiens
  CDR3 for beta chain variable domain of TCR clone 264478 (TRBV7-2, TRBJ2-1)
CASSLVAGAGYNEQFF

SEQ ID NO: 528957 - protein, 12 aa, Homo sapiens
  CDR3 for alpha chain variable domain of TCR clone 264479 (TRAV4, TRAJ26)
CLVGDYGQNFVF

SEQ ID NO: 528958 - protein, 12 aa, Homo sapiens
  CDR3 for beta chain variable domain of TCR clone 264479 (TRBV12-5, TRBJ2-5)
CASGQGVETQYF

SEQ ID NO: 528959 - protein, 10 aa, Homo sapiens
  CDR3 for alpha chain variable domain of TCR clone 264480 (TRAV1-2, TRAJ23)
CAAWAGKLIF

SEQ ID NO: 528960 - protein, 14 aa, Homo sapiens
  CDR3 for beta chain variable domain of TCR clone 264480 (TRBV6-1, TRBJ1-3)
CASVQGGGGNTIYF

SEQ ID NO: 528961 - protein, 14 aa, Homo sapiens
  CDR3 for alpha chain variable domain of TCR clone 264481 (TRAV12-3, TRAJ10)
SHLPLTGGGNKLTF

SEQ ID NO: 528962 - protein, 15 aa, Homo sapiens
  CDR3 for beta chain variable domain of TCR clone 264481 (TRBV9, TRBJ1-2)
CSSVEEKVSPYGYTF

SEQ ID NO: 528963 - protein, 15 aa, Homo sapiens
  CDR3 for alpha chain variable domain of TCR clone 264482 (TRAV8-3, TRAJ6)
CAVGEDRGGSYIPTF

SEQ ID NO: 528964 - protein, 14 aa, Homo sapiens
  CDR3 for beta chain variable domain of TCR clone 264482 (TRBV27, TRBJ2-2)
CASLRSPPGGDLFF

SEQ ID NO: 528965 - protein, 10 aa, Homo sapiens
  CDR3 for alpha chain variable domain of TCR clone 264483 (TRAV8-4, TRAJ43)
CAVSADDMRL

SEQ ID NO: 528966 - protein, 13 aa, Homo sapiens
  CDR3 for beta chain variable domain of TCR clone 264483 (TRBV12-4, TRBJ2-5)
CASSPGTEETQYF

SEQ ID NO: 528967 - protein, 13 aa, Homo sapiens
  CDR3 for alpha chain variable domain of TCR clone 264484 (TRAV8-6, TRAJ33)
CAVSEGSNYQLTW

SEQ ID NO: 528968 - protein, 13 aa, Homo sapiens
  CDR3 for beta chain variable domain of TCR clone 264484 (TRBV10-2, TRBJ2-7)
CASGASGGYEQYF

SEQ ID NO: 528969 - protein, 15 aa, Homo sapiens
  CDR3 for alpha chain variable domain of TCR clone 264485 (TRAV12-3, TRAJ48)
CAMNAKNFGNEKLTF

SEQ ID NO: 528970 - protein, 14 aa, Homo sapiens
  CDR3 for beta chain variable domain of TCR clone 264485 (TRBV2, TRBJ1-6)
CASSKSRNNSPLHF

SEQ ID NO: 528971 - protein, 13 aa, Homo sapiens
  CDR3 for alpha chain variable domain of TCR clone 264486 (TRAV2, TRAJ15)
CAVASQAGTALIF

SEQ ID NO: 528972 - protein, 17 aa, Homo sapiens
  CDR3 for beta chain variable domain of TCR clone 264486 (TRBV7-3, TRBJ2-5)
CASSLGSGRSGSETQYV

SEQ ID NO: 528973 - protein, 10 aa, Homo sapiens
  CDR3 for alpha chain variable domain of TCR clone 264487 (TRAV30, TRAJ48)
CGIGNEKLTF

SEQ ID NO: 528974 - protein, 15 aa, Homo sapiens
  CDR3 for beta chain variable domain of TCR clone 264487 (TRBV6-3, TRBJ2-7)
CASSSPGTVFYEQYF

SEQ ID NO: 528975 - protein, 13 aa, Homo sapiens
  CDR3 for alpha chain variable domain of TCR clone 264488 (TRAV26-2, TRAJ43)
CILRAVNNNDMRF

SEQ ID NO: 528976 - protein, 14 aa, Homo sapiens
  CDR3 for beta chain variable domain of TCR clone 264488 (TRBV13, TRBJ2-7)
CASSLKGASYEQYF

SEQ ID NO: 528977 - protein, 16 aa, Homo sapiens
  CDR3 for alpha chain variable domain of TCR clone 264489 (TRAV4, TRAJ22)
CLVGDLYSGSARQLTF

SEQ ID NO: 528978 - protein, 15 aa, Homo sapiens
  CDR3 for beta chain variable domain of TCR clone 264489 (TRBV12-4, TRBJ2-5)
CQQFFVRGRQETQYF

SEQ ID NO: 528979 - protein, 10 aa, Homo sapiens
  CDR3 for alpha chain variable domain of TCR clone 264490 (TRAV1-2, TRAJ20)
CALNDYKLSF

SEQ ID NO: 528980 - protein, 14 aa, Homo sapiens
  CDR3 for beta chain variable domain of TCR clone 264490 (TRBV7-2, TRBJ1-6)
CASSLQGANSPLHF

SEQ ID NO: 528981 - protein, 23 aa, Homo sapiens
  CDR3 for alpha chain variable domain of TCR clone 264491 (TRAV26-1, )
CTADDAGNNHIQNPDPAVYQLRD

SEQ ID NO: 528982 - protein, 13 aa, Homo sapiens
  CDR3 for beta chain variable domain of TCR clone 264491 (TRBV20-1, TRBJ1-1)
CSARGGGNTEAFF

SEQ ID NO: 528983 - protein, 15 aa, Homo sapiens
  CDR3 for alpha chain variable domain of TCR clone 264492 (TRAV27, TRAJ24)
CAGGTSADSWGKLQF

SEQ ID NO: 528984 - protein, 13 aa, Homo sapiens
  CDR3 for beta chain variable domain of TCR clone 264492 (TRBV7-9, TRBJ1-2)
CASSLKQNYGYTF

SEQ ID NO: 528985 - protein, 10 aa, Homo sapiens
  CDR3 for alpha chain variable domain of TCR clone 264493 (TRAV36/DV7, TRAJ49)
CALTGNQFYF

SEQ ID NO: 528986 - protein, 15 aa, Homo sapiens
  CDR3 for beta chain variable domain of TCR clone 264493 (TRBV11-2, TRBJ2-1)
CSSSLGTSGLNEQFF

SEQ ID NO: 528987 - protein, 15 aa, Homo sapiens
  CDR3 for alpha chain variable domain of TCR clone 264494 (TRAV12-3, TRAJ13)
CAMSARSGGYQKVTF

SEQ ID NO: 528988 - protein, 18 aa, Homo sapiens
  CDR3 for beta chain variable domain of TCR clone 264494 (TRBV15, TRBJ2-3)
CATSRDGARSWDTDTQYF

SEQ ID NO: 528989 - protein, 14 aa, Homo sapiens
  CDR3 for alpha chain variable domain of TCR clone 264495 (TRAV26-1, TRAJ38)
CIADNAGNNRKLIW

SEQ ID NO: 528990 - protein, 15 aa, Homo sapiens
  CDR3 for beta chain variable domain of TCR clone 264495 (TRBV7-3, TRBJ2-1)
CQQLQTSGRYNEQFF

SEQ ID NO: 528991 - protein, 16 aa, Homo sapiens
  CDR3 for alpha chain variable domain of TCR clone 264496 (TRAV8-3, TRAJ44)
CAVGTLMTGTASKLTL

SEQ ID NO: 528992 - protein, 18 aa, Homo sapiens
  CDR3 for beta chain variable domain of TCR clone 264496 (TRBV7-9, TRBJ2-7)
CASSLTTSGSRMWYEQYF

SEQ ID NO: 528993 - protein, 13 aa, Homo sapiens
  CDR3 for alpha chain variable domain of TCR clone 264497 (TRAV2, TRAJ40)
CAVVTSGTYKYIF

SEQ ID NO: 528994 - protein, 15 aa, Homo sapiens
  CDR3 for beta chain variable domain of TCR clone 264497 (TRBV11-2, TRBJ1-6)
CASTLRGTWNSPLHF

SEQ ID NO: 528995 - protein, 14 aa, Homo sapiens
  CDR3 for alpha chain variable domain of TCR clone 264498 (TRAV1-2, TRAJ8)
CAVREDTGFQKLVF

SEQ ID NO: 528996 - protein, 20 aa, Homo sapiens
  CDR3 for beta chain variable domain of TCR clone 264498 (TRBV12-5, TRBJ2-5)
CASGPRTSGNQETSTSGQAR

SEQ ID NO: 528997 - protein, 15 aa, Homo sapiens
  CDR3 for alpha chain variable domain of TCR clone 264499 (TRAV2, TRAJ11)
CAVGGRNSGYSTLTF

SEQ ID NO: 528998 - protein, 14 aa, Homo sapiens
  CDR3 for beta chain variable domain of TCR clone 264499 (TRBV20-1, TRBJ2-7)
CSAKRGRSSYEQYF

SEQ ID NO: 528999 - protein, 13 aa, Homo sapiens
  CDR3 for alpha chain variable domain of TCR clone 264500 (TRAV2, TRAJ40)
CAVVISGTYKYIF

SEQ ID NO: 529000 - protein, 16 aa, Homo sapiens
  CDR3 for beta chain variable domain of TCR clone 264500 (TRBV29-1, TRBJ2-6)
CSVEDITYSGANVLTF

SEQ ID NO: 529001 - protein, 12 aa, Homo sapiens
  CDR3 for alpha chain variable domain of TCR clone 264501 (TRAV12-3, TRAJ4)
CAMTGAGTRLAV

SEQ ID NO: 529002 - protein, 14 aa, Homo sapiens
  CDR3 for beta chain variable domain of TCR clone 264501 (TRBV10-3, TRBJ1-1)
CAISDTDRVVEAFF

SEQ ID NO: 529003 - protein, 13 aa, Homo sapiens
  CDR3 for alpha chain variable domain of TCR clone 264502 (TRAV8-2, TRAJ13)
CVVSDLRYQKVTF

SEQ ID NO: 529004 - protein, 14 aa, Homo sapiens
  CDR3 for beta chain variable domain of TCR clone 264502 (TRBV25-1, TRBJ1-1)
CASPHLGGNTEAFF

SEQ ID NO: 529005 - protein, 17 aa, Homo sapiens
  CDR3 for alpha chain variable domain of TCR clone 264503 (TRAV3, TRAJ6)
CAARDGPRAGGSYIPTF

SEQ ID NO: 529006 - protein, 14 aa, Homo sapiens
  CDR3 for beta chain variable domain of TCR clone 264503 (TRBV7-2, TRBJ2-7)
CACSPKTSFYEQYF

SEQ ID NO: 529007 - protein, 12 aa, Homo sapiens
  CDR3 for alpha chain variable domain of TCR clone 264504 (TRAV12-3, TRAJ17)
CAMTLTGNKLTF

SEQ ID NO: 529008 - protein, 17 aa, Homo sapiens
  CDR3 for beta chain variable domain of TCR clone 264504 (TRBV7-3, TRBJ2-3)
CASSLMERMRGADTQYF

SEQ ID NO: 529009 - protein, 12 aa, Homo sapiens
  CDR3 for alpha chain variable domain of TCR clone 264505 (TRAV21, TRAJ23)
CAVPNQGGKLIF

SEQ ID NO: 529010 - protein, 15 aa, Homo sapiens
  CDR3 for beta chain variable domain of TCR clone 264505 (TRBV27, TRBJ2-1)
CASSFGAGMGPEQFF

SEQ ID NO: 529011 - protein, 11 aa, Homo sapiens
  CDR3 for alpha chain variable domain of TCR clone 264506 (TRAV12-1, TRAJ43)
CVEYDNNDMRF

SEQ ID NO: 529012 - protein, 13 aa, Homo sapiens
  CDR3 for beta chain variable domain of TCR clone 264506 (TRBV12-5, TRBJ2-3)
CASGDRQSDTQYF

SEQ ID NO: 529013 - protein, 17 aa, Homo sapiens
  CDR3 for alpha chain variable domain of TCR clone 264507 (TRAV12-3, TRAJ6)
CAMSARGGAGGSYRPTF

SEQ ID NO: 529014 - protein, 12 aa, Homo sapiens
  CDR3 for beta chain variable domain of TCR clone 264507 (TRBV12-4, TRBJ2-3)
CASSTLPDTEYF

SEQ ID NO: 529015 - protein, 15 aa, Homo sapiens
  CDR3 for alpha chain variable domain of TCR clone 264508 (TRAV12-1, TRAJ44)
CVADLPTGTASKLTF

SEQ ID NO: 529016 - protein, 13 aa, Homo sapiens
  CDR3 for beta chain variable domain of TCR clone 264508 (TRBV7-2, TRBJ2-5)
CASSQTSVETQYF

SEQ ID NO: 529017 - protein, 12 aa, Homo sapiens
  CDR3 for alpha chain variable domain of TCR clone 264509 (TRAV36/DV7, TRAJ54)
CAVVRGAQKLVF

SEQ ID NO: 529018 - protein, 13 aa, Homo sapiens
  CDR3 for beta chain variable domain of TCR clone 264509 (TRBV19, TRBJ1-4)
CASPTQGNEKLFF

SEQ ID NO: 529019 - protein, 15 aa, Homo sapiens
  CDR3 for alpha chain variable domain of TCR clone 264510 (TRAV12-3, TRAJ6)
CAMSATTGGSYIPTS

SEQ ID NO: 529020 - protein, 16 aa, Homo sapiens
  CDR3 for beta chain variable domain of TCR clone 264510 (TRBV20-1, TRBJ1-2)
CGASMGQGVANYGYTF

SEQ ID NO: 529021 - protein, 12 aa, Homo sapiens
  CDR3 for alpha chain variable domain of TCR clone 264511 (TRAV1-2, TRAJ24)
CAVGGSWGKFQF

SEQ ID NO: 529022 - protein, 13 aa, Homo sapiens
  CDR3 for beta chain variable domain of TCR clone 264511 (TRBV6-6, TRBJ1-5)
CASSRGSNQPQHF

SEQ ID NO: 529023 - protein, 14 aa, Homo sapiens
  CDR3 for alpha chain variable domain of TCR clone 264512 (TRAV8-3, TRAJ4)
CAVGAAGGYNKLIF

SEQ ID NO: 529024 - protein, 16 aa, Homo sapiens
  CDR3 for beta chain variable domain of TCR clone 264512 (TRBV7-2, TRBJ2-5)
CASSPFPTGGEETQYF

SEQ ID NO: 529025 - protein, 15 aa, Homo sapiens
  CDR3 for alpha chain variable domain of TCR clone 264513 (TRAV12-1, TRAJ38)
CVVNLHAGNNRKLIW

SEQ ID NO: 529026 - protein, 17 aa, Homo sapiens
  CDR3 for beta chain variable domain of TCR clone 264513 (TRBV7-9, TRBJ2-1)
CASSLVASYPSYNEQFF

SEQ ID NO: 529027 - protein, 12 aa, Homo sapiens
  CDR3 for alpha chain variable domain of TCR clone 264514 (TRAV21, TRAJ23)
CAVMLQGGKLIF

SEQ ID NO: 529028 - protein, 14 aa, Homo sapiens
  CDR3 for beta chain variable domain of TCR clone 264514 (TRBV7-9, TRBJ1-4)
CAINEGEANEKLFF

SEQ ID NO: 529029 - protein, 13 aa, Homo sapiens
  CDR3 for alpha chain variable domain of TCR clone 264515 (TRAV25, TRAJ10)
CAGRTGGGNKLTC

SEQ ID NO: 529030 - protein, 15 aa, Homo sapiens
  CDR3 for beta chain variable domain of TCR clone 264515 (TRBV19, TRBJ2-1)
CASSSPGVPLDEQFF

SEQ ID NO: 529031 - protein, 14 aa, Homo sapiens
  CDR3 for alpha chain variable domain of TCR clone 264516 (TRAV12-3, TRAJ10)
SHLPLTGGGNKLTF

SEQ ID NO: 529032 - protein, 15 aa, Homo sapiens
  CDR3 for beta chain variable domain of TCR clone 264516 (TRBV10-3, TRBJ2-5)
CAISEFGRGQETQFF

SEQ ID NO: 529033 - protein, 13 aa, Homo sapiens
  CDR3 for alpha chain variable domain of TCR clone 264517 (TRAV3, TRAJ20)
CCEAFCKDYKLSF

SEQ ID NO: 529034 - protein, 15 aa, Homo sapiens
  CDR3 for beta chain variable domain of TCR clone 264517 (TRBV19, TRBJ2-6)
CASVRRDSGANVLTF

SEQ ID NO: 529035 - protein, 13 aa, Homo sapiens
  CDR3 for alpha chain variable domain of TCR clone 264518 (TRAV12-3, TRAJ53)
CAMRGGSNYKLTF

SEQ ID NO: 529036 - protein, 15 aa, Homo sapiens
  CDR3 for beta chain variable domain of TCR clone 264518 (TRBV2, TRBJ2-1)
CATQASLVMIGEQFF

SEQ ID NO: 529037 - protein, 15 aa, Homo sapiens
  CDR3 for alpha chain variable domain of TCR clone 264519 (TRAV21, TRAJ53)
CATLNSGGSNYKLTF

SEQ ID NO: 529038 - protein, 14 aa, Homo sapiens
  CDR3 for beta chain variable domain of TCR clone 264519 (TRBV20-1, TRBJ2-7)
CSAKRGRSSYEQYF

SEQ ID NO: 529039 - protein, 13 aa, Homo sapiens
  CDR3 for alpha chain variable domain of TCR clone 264520 (TRAV8-1, TRAJ7)
CAVMPYGNNRLAF

SEQ ID NO: 529040 - protein, 12 aa, Homo sapiens
  CDR3 for beta chain variable domain of TCR clone 264520 (TRBV11-2, TRBJ2-2)
CASSLPTGELFF

SEQ ID NO: 529041 - protein, 12 aa, Homo sapiens
  CDR3 for alpha chain variable domain of TCR clone 264521 (TRAV17, TRAJ4)
CATDGGYNKLIF

SEQ ID NO: 529042 - protein, 16 aa, Homo sapiens
  CDR3 for beta chain variable domain of TCR clone 264521 (TRBV2, TRBJ2-1)
CASSVGGSLSYNEQFF

SEQ ID NO: 529043 - protein, 15 aa, Homo sapiens
  CDR3 for alpha chain variable domain of TCR clone 264522 (TRAV17, TRAJ56)
CATDANTGANSKLTF

SEQ ID NO: 529044 - protein, 14 aa, Homo sapiens
  CDR3 for beta chain variable domain of TCR clone 264522 (TRBV19, TRBJ1-5)
CASSLWTGGQPQHF

SEQ ID NO: 529045 - protein, 15 aa, Homo sapiens
  CDR3 for alpha chain variable domain of TCR clone 264523 (TRAV29/DV5, TRAJ24)
CAASGATDSWGKFQF

SEQ ID NO: 529046 - protein, 15 aa, Homo sapiens
  CDR3 for beta chain variable domain of TCR clone 264523 (TRBV7-9, TRBJ1-4)
CASSARTGGNEKLFF

SEQ ID NO: 529047 - protein, 16 aa, Homo sapiens
  CDR3 for alpha chain variable domain of TCR clone 264524 (TRAV1-2, TRAJ10)
CSVRGVLTGGGNKLTF

SEQ ID NO: 529048 - protein, 15 aa, Homo sapiens
  CDR3 for beta chain variable domain of TCR clone 264524 (TRBV29-1, TRBJ2-1)
CSVGRHALFYNEQFF

SEQ ID NO: 529049 - protein, 13 aa, Homo sapiens
  CDR3 for alpha chain variable domain of TCR clone 264525 (TRAV12-3, TRAJ40)
CAMSDSGTYKYIF

SEQ ID NO: 529050 - protein, 14 aa, Homo sapiens
  CDR3 for beta chain variable domain of TCR clone 264525 (TRBV4-2, TRBJ2-1)
CASGLDRAYNEQFF

SEQ ID NO: 529051 - protein, 22 aa, Homo sapiens
  CDR3 for alpha chain variable domain of TCR clone 264526 (TRAV8-3, TRAJ32)
CVVEVVLQTSSSLELALCLLSS

SEQ ID NO: 529052 - protein, 15 aa, Homo sapiens
  CDR3 for beta chain variable domain of TCR clone 264526 (TRBV7-2, TRBJ2-1)
CASSSRTSREDEQFF

SEQ ID NO: 529053 - protein, 14 aa, Homo sapiens
  CDR3 for alpha chain variable domain of TCR clone 264527 (TRAV12-3, TRAJ10)
SHLPLTGGGNKLTF

SEQ ID NO: 529054 - protein, 14 aa, Homo sapiens
  CDR3 for beta chain variable domain of TCR clone 264527 (TRBV7-2, TRBJ2-2)
CGSSLNSNTGELFF

SEQ ID NO: 529055 - protein, 14 aa, Homo sapiens
  CDR3 for alpha chain variable domain of TCR clone 264528 (TRAV21, TRAJ52)
RGRAGGTSYGKLTF

SEQ ID NO: 529056 - protein, 14 aa, Homo sapiens
  CDR3 for beta chain variable domain of TCR clone 264528 (TRBV19, TRBJ1-2)
CASSVLGYNYGYTF

SEQ ID NO: 529057 - protein, 13 aa, Homo sapiens
  CDR3 for alpha chain variable domain of TCR clone 264529 (TRAV13-2, TRAJ48)
CAEMDFGNEKLTF

SEQ ID NO: 529058 - protein, 13 aa, Homo sapiens
  CDR3 for beta chain variable domain of TCR clone 264529 (TRBV13, TRBJ2-5)
CASSPEVGETQYV

SEQ ID NO: 529059 - protein, 14 aa, Homo sapiens
  CDR3 for alpha chain variable domain of TCR clone 264530 (TRAV12-1, TRAJ46)
CVLTAKSSGDKLTF

SEQ ID NO: 529060 - protein, 17 aa, Homo sapiens
  CDR3 for beta chain variable domain of TCR clone 264530 (TRBV4-1, TRBJ2-3)
CASSQDPAGGPLDTQYF

SEQ ID NO: 529061 - protein, 15 aa, Homo sapiens
  CDR3 for alpha chain variable domain of TCR clone 264531 (TRAV10, TRAJ39)
CVVIASGNAGNMLTF

SEQ ID NO: 529062 - protein, 13 aa, Homo sapiens
  CDR3 for beta chain variable domain of TCR clone 264531 (TRBV18, TRBJ2-7)
CASQSGGGYEQYF

SEQ ID NO: 529063 - protein, 14 aa, Homo sapiens
  CDR3 for alpha chain variable domain of TCR clone 264532 (TRAV20, TRAJ10)
CAVRVEGGGNELTF

SEQ ID NO: 529064 - protein, 13 aa, Homo sapiens
  CDR3 for beta chain variable domain of TCR clone 264532 (TRBV13, TRBJ2-2)
CASSPGLTGELFF

SEQ ID NO: 529065 - protein, 13 aa, Homo sapiens
  CDR3 for alpha chain variable domain of TCR clone 264533 (TRAV13-1, TRAJ10)
CAATAGGGNKLTF

SEQ ID NO: 529066 - protein, 16 aa, Homo sapiens
  CDR3 for beta chain variable domain of TCR clone 264533 (TRBV7-3, TRBJ2-2)
CASSLKRGTLSGELFF

SEQ ID NO: 529067 - protein, 11 aa, Homo sapiens
  CDR3 for alpha chain variable domain of TCR clone 264534 (TRAV16, TRAJ29)
WAPSGNTPLVF

SEQ ID NO: 529068 - protein, 15 aa, Homo sapiens
  CDR3 for beta chain variable domain of TCR clone 264534 (TRBV5-7, TRBJ2-7)
CASSPYFEGSYEQFF

SEQ ID NO: 529069 - protein, 13 aa, Homo sapiens
  CDR3 for alpha chain variable domain of TCR clone 264535 (TRAV12-2, TRAJ42)
CAVKRGSQGNLIF

SEQ ID NO: 529070 - protein, 15 aa, Homo sapiens
  CDR3 for beta chain variable domain of TCR clone 264535 (TRBV10-3, TRBJ2-1)
CAIRNGTSGHNEQFF

SEQ ID NO: 529071 - protein, 14 aa, Homo sapiens
  CDR3 for alpha chain variable domain of TCR clone 264536 (TRAV1-1, TRAJ27)
CAVIYNTNAGKSTF

SEQ ID NO: 529072 - protein, 14 aa, Homo sapiens
  CDR3 for beta chain variable domain of TCR clone 264536 (TRBV7-2, TRBJ2-1)
CQQPGLAGGNEQFF

SEQ ID NO: 529073 - protein, 14 aa, Homo sapiens
  CDR3 for alpha chain variable domain of TCR clone 264537 (TRAV27, TRAJ17)
CRSTIRAAGNKLTF

SEQ ID NO: 529074 - protein, 16 aa, Homo sapiens
  CDR3 for beta chain variable domain of TCR clone 264537 (TRBV5-7, TRBJ2-5)
CASTLAPEGGRETKYF

SEQ ID NO: 529075 - protein, 13 aa, Homo sapiens
  CDR3 for alpha chain variable domain of TCR clone 264538 (TRAV14/DV4, TRAJ26)
GAMREAYGQNFVF

SEQ ID NO: 529076 - protein, 19 aa, Homo sapiens
  CDR3 for beta chain variable domain of TCR clone 264538 (TRBV13, TRBJ2-6)
CASSLVHRDRGAGANVLTF

SEQ ID NO: 529077 - protein, 12 aa, Homo sapiens
  CDR3 for alpha chain variable domain of TCR clone 264539 (TRAV12-1, TRAJ40)
CVVNGETYKYIF

SEQ ID NO: 529078 - protein, 16 aa, Homo sapiens
  CDR3 for beta chain variable domain of TCR clone 264539 (TRBV7-3, TRBJ2-2)
CASSLKRGTLSGELFF

SEQ ID NO: 529079 - protein, 13 aa, Homo sapiens
  CDR3 for alpha chain variable domain of TCR clone 264540 (TRAV3, TRAJ16)
CAVRDRNGQKLLF

SEQ ID NO: 529080 - protein, 15 aa, Homo sapiens
  CDR3 for beta chain variable domain of TCR clone 264540 (TRBV5-1, TRBJ2-1)
GASTPPRAPYNEQFF

SEQ ID NO: 529081 - protein, 15 aa, Homo sapiens
  CDR3 for alpha chain variable domain of TCR clone 264541 (TRAV1-2, TRAJ30)
CAVRPHGNRDDKIIF

SEQ ID NO: 529082 - protein, 14 aa, Homo sapiens
  CDR3 for beta chain variable domain of TCR clone 264541 (TRBV7-9, TRBJ2-2)
CASSGLADTGELFF

SEQ ID NO: 529083 - protein, 13 aa, Homo sapiens
  CDR3 for alpha chain variable domain of TCR clone 264542 (TRAV12-3, TRAJ9)
CAMRNTGGFKSIF

SEQ ID NO: 529084 - protein, 13 aa, Homo sapiens
  CDR3 for beta chain variable domain of TCR clone 264542 (TRBV27, TRBJ2-1)
CASRTLGVGEQFF

SEQ ID NO: 529085 - protein, 14 aa, Homo sapiens
  CDR3 for alpha chain variable domain of TCR clone 264543 (TRAV1-2, TRAJ8)
CAVREDTGFQKLVF

SEQ ID NO: 529086 - protein, 11 aa, Homo sapiens
  CDR3 for beta chain variable domain of TCR clone 264543 (TRBV18, TRBJ1-2)
CASSPLNGYTF

SEQ ID NO: 529087 - protein, 14 aa, Homo sapiens
  CDR3 for alpha chain variable domain of TCR clone 264544 (TRAV1-2, TRAJ16)
CAVNRFSDGQKLLF

SEQ ID NO: 529088 - protein, 14 aa, Homo sapiens
  CDR3 for beta chain variable domain of TCR clone 264544 (TRBV7-2, TRBJ2-2)
FASRGQGAAGELFF

SEQ ID NO: 529089 - protein, 11 aa, Homo sapiens
  CDR3 for alpha chain variable domain of TCR clone 264545 (TRAV29/DV5, TRAJ47)
CAATYGNKLVF

SEQ ID NO: 529090 - protein, 17 aa, Homo sapiens
  CDR3 for beta chain variable domain of TCR clone 264545 (TRBV7-9, TRBJ2-1)
CASSLVASYPSYNEQLF

SEQ ID NO: 529091 - protein, 16 aa, Homo sapiens
  CDR3 for alpha chain variable domain of TCR clone 264546 (TRAV3, TRAJ37)
CAVRPHGSGNTGKLIF

SEQ ID NO: 529092 - protein, 19 aa, Homo sapiens
  CDR3 for beta chain variable domain of TCR clone 264546 (TRBV25-1, TRBJ2-2)
CAILVYRVDRGRKTGELFF

SEQ ID NO: 529093 - protein, 17 aa, Homo sapiens
  CDR3 for alpha chain variable domain of TCR clone 264547 (TRAV3, TRAJ6)
CAVRDGPRAGGSYIPTF

SEQ ID NO: 529094 - protein, 15 aa, Homo sapiens
  CDR3 for beta chain variable domain of TCR clone 264547 (TRBV19, TRBJ2-4)
CASRCPRRGENIQYF

SEQ ID NO: 529095 - protein, 11 aa, Homo sapiens
  CDR3 for alpha chain variable domain of TCR clone 264548 (TRAV3, TRAJ21)
CAVGNFNKFYF

SEQ ID NO: 529096 - protein, 14 aa, Homo sapiens
  CDR3 for beta chain variable domain of TCR clone 264548 (TRBV2, TRBJ2-7)
RASSLTSGGYEQYF

SEQ ID NO: 529097 - protein, 15 aa, Homo sapiens
  CDR3 for alpha chain variable domain of TCR clone 264549 (TRAV12-3, TRAJ11)
CAMSEENSGYSTLTF

SEQ ID NO: 529098 - protein, 17 aa, Homo sapiens
  CDR3 for beta chain variable domain of TCR clone 264549 (TRBV5-1, TRBJ1-6)
CASSFGEVSSYNSPLHF

SEQ ID NO: 529099 - protein, 18 aa, Homo sapiens
  CDR3 for alpha chain variable domain of TCR clone 264550 (TRAV21, TRAJ52)
RAVRPSPAVGTSYGNLTF

SEQ ID NO: 529100 - protein, 17 aa, Homo sapiens
  CDR3 for beta chain variable domain of TCR clone 264550 (TRBV13, TRBJ2-3)
CASSLSRVAGGRNTQYF

SEQ ID NO: 529101 - protein, 14 aa, Homo sapiens
  CDR3 for alpha chain variable domain of TCR clone 264551 (TRAV16, TRAJ54)
CALSLIQGAQKLVF

SEQ ID NO: 529102 - protein, 15 aa, Homo sapiens
  CDR3 for beta chain variable domain of TCR clone 264551 (TRBV7-8, TRBJ2-5)
CASSDAAGSQETQYF

SEQ ID NO: 529103 - protein, 13 aa, Homo sapiens
  CDR3 for alpha chain variable domain of TCR clone 264552 (TRAV13-2, TRAJ53)
CAENMGGNDKLTF

SEQ ID NO: 529104 - protein, 13 aa, Homo sapiens
  CDR3 for beta chain variable domain of TCR clone 264552 (TRBV4-1, TRBJ2-2)
CASSQENTGELFF

SEQ ID NO: 529105 - protein, 21 aa, Homo sapiens
  CDR3 for alpha chain variable domain of TCR clone 264553 (TRAV26-1, TRAJ17)
CCVLLHRQSSGSKAAGNKPTF

SEQ ID NO: 529106 - protein, 14 aa, Homo sapiens
  CDR3 for beta chain variable domain of TCR clone 264553 (TRBV28, TRBJ1-2)
RASRIQGANYGDTF

SEQ ID NO: 529107 - protein, 11 aa, Homo sapiens
  CDR3 for alpha chain variable domain of TCR clone 264554 (TRAV1-1, TRAJ23)
CAVRQGGKLIF

SEQ ID NO: 529108 - protein, 15 aa, Homo sapiens
  CDR3 for beta chain variable domain of TCR clone 264554 (TRBV6-5, TRBJ1-2)
CASSYSQAFNYGYTF

SEQ ID NO: 529109 - protein, 14 aa, Homo sapiens
  CDR3 for alpha chain variable domain of TCR clone 264555 (TRAV29/DV5, TRAJ36)
CAARRKTGANNPFF

SEQ ID NO: 529110 - protein, 14 aa, Homo sapiens
  CDR3 for beta chain variable domain of TCR clone 264555 (TRBV7-2, TRBJ2-7)
CASRSQGAAYEQYF

SEQ ID NO: 529111 - protein, 14 aa, Homo sapiens
  CDR3 for alpha chain variable domain of TCR clone 264556 (TRAV8-3, TRAJ31)
CTVGRGLNNARLMF

SEQ ID NO: 529112 - protein, 15 aa, Homo sapiens
  CDR3 for beta chain variable domain of TCR clone 264556 (TRBV7-2, TRBJ2-2)
CASSLAGGLTGELFF

SEQ ID NO: 529113 - protein, 12 aa, Homo sapiens
  CDR3 for alpha chain variable domain of TCR clone 264557 (TRAV29/DV5, TRAJ15)
CASNQAGTALIF

SEQ ID NO: 529114 - protein, 22 aa, Homo sapiens
  CDR3 for beta chain variable domain of TCR clone 264557 (TRBV11-2, TRBJ2-2)
LRTRPCISVPAARTGNAGELFF

SEQ ID NO: 529115 - protein, 12 aa, Homo sapiens
  CDR3 for alpha chain variable domain of TCR clone 264558 (TRAV12-3, TRAJ42)
CAPGGSQGNLIF

SEQ ID NO: 529116 - protein, 13 aa, Homo sapiens
  CDR3 for beta chain variable domain of TCR clone 264558 (TRBV5-7, TRBJ2-6)
CASASSGANVLTF

SEQ ID NO: 529117 - protein, 13 aa, Homo sapiens
  CDR3 for alpha chain variable domain of TCR clone 264559 (TRAV8-3, TRAJ43)
CAVGPDNNNDMRF

SEQ ID NO: 529118 - protein, 14 aa, Homo sapiens
  CDR3 for beta chain variable domain of TCR clone 264559 (TRBV20-1, TRBJ1-3)
CSASTTGAGNTIYF

SEQ ID NO: 529119 - protein, 17 aa, Homo sapiens
  CDR3 for alpha chain variable domain of TCR clone 264560 (TRAV3, TRAJ6)
CAVRDGPRAGGSYIPPF

SEQ ID NO: 529120 - protein, 12 aa, Homo sapiens
  CDR3 for beta chain variable domain of TCR clone 264560 (TRBV5-1, TRBJ1-1)
CASSFGNTEAFF

SEQ ID NO: 529121 - protein, 14 aa, Homo sapiens
  CDR3 for alpha chain variable domain of TCR clone 264561 (TRAV17, TRAJ12)
CAILPMDSSYKLIF

SEQ ID NO: 529122 - protein, 16 aa, Homo sapiens
  CDR3 for beta chain variable domain of TCR clone 264561 (TRBV4-2, TRBJ2-7)
CASSQDGVERGYEQYF

SEQ ID NO: 529123 - protein, 16 aa, Homo sapiens
  CDR3 for alpha chain variable domain of TCR clone 264562 (TRAV3, TRAJ37)
CAGRVRGSGNTGKLIF

SEQ ID NO: 529124 - protein, 16 aa, Homo sapiens
  CDR3 for beta chain variable domain of TCR clone 264562 (TRBV11-2, TRBJ2-7)
CASSPTTGGVSYEQYF

SEQ ID NO: 529125 - protein, 11 aa, Homo sapiens
  CDR3 for alpha chain variable domain of TCR clone 264563 (TRAV29/DV5, TRAJ31)
CAAINNARLMF

SEQ ID NO: 529126 - protein, 14 aa, Homo sapiens
  CDR3 for beta chain variable domain of TCR clone 264563 (TRBV18, TRBJ2-5)
CASSPPGHQETQYF

SEQ ID NO: 529127 - protein, 15 aa, Homo sapiens
  CDR3 for alpha chain variable domain of TCR clone 264564 (TRAV3, TRAJ10)
CAVRDGTGGGNKLTF

SEQ ID NO: 529128 - protein, 15 aa, Homo sapiens
  CDR3 for beta chain variable domain of TCR clone 264564 (TRBV4-2, TRBJ1-4)
CASSLVQMEVEKLFF

SEQ ID NO: 529129 - protein, 12 aa, Homo sapiens
  CDR3 for alpha chain variable domain of TCR clone 264565 (TRAV12-2, TRAJ21)
CAVRYNFNKFYF

SEQ ID NO: 529130 - protein, 16 aa, Homo sapiens
  CDR3 for beta chain variable domain of TCR clone 264565 (TRBV13, TRBJ2-2)
CASSPRTGEHTGELFF

SEQ ID NO: 529131 - protein, 14 aa, Homo sapiens
  CDR3 for alpha chain variable domain of TCR clone 264566 (TRAV12-2, TRAJ4)
CAVSSSGGYNKLIL

SEQ ID NO: 529132 - protein, 14 aa, Homo sapiens
  CDR3 for beta chain variable domain of TCR clone 264566 (TRBV6-1, TRBJ2-7)
CASSERQTTGEQYF

SEQ ID NO: 529133 - protein, 14 aa, Homo sapiens
  CDR3 for alpha chain variable domain of TCR clone 264567 (TRAV12-2, TRAJ53)
CAVKGGGSNYKLTF

SEQ ID NO: 529134 - protein, 16 aa, Homo sapiens
  CDR3 for beta chain variable domain of TCR clone 264567 (TRBV24-1, TRBJ2-3)
CATSDPGTGATDTQYF

SEQ ID NO: 529135 - protein, 16 aa, Homo sapiens
  CDR3 for alpha chain variable domain of TCR clone 264568 (TRAV30, TRAJ24)
CGTEIVDADSWGKFQF

SEQ ID NO: 529136 - protein, 14 aa, Homo sapiens
  CDR3 for beta chain variable domain of TCR clone 264568 (TRBV5-5, TRBJ1-2)
CASSLDPYNYGYTV

SEQ ID NO: 529137 - protein, 14 aa, Homo sapiens
  CDR3 for alpha chain variable domain of TCR clone 264569 (TRAV17, TRAJ22)
CATSPSGSARQLTF

SEQ ID NO: 529138 - protein, 13 aa, Homo sapiens
  CDR3 for beta chain variable domain of TCR clone 264569 (TRBV12-4, TRBJ2-7)
CASSPTETYEQYF

SEQ ID NO: 529139 - protein, 13 aa, Homo sapiens
  CDR3 for alpha chain variable domain of TCR clone 264570 (TRAV16, TRAJ34)
CALSPYNTDKLIF

SEQ ID NO: 529140 - protein, 17 aa, Homo sapiens
  CDR3 for beta chain variable domain of TCR clone 264570 (TRBV7-2, TRBJ2-4)
CASSVQGLVQAKNIQYF

SEQ ID NO: 529141 - protein, 12 aa, Homo sapiens
  CDR3 for alpha chain variable domain of TCR clone 264571 (TRAV1-1, TRAJ34)
CAAVPWSDKLIF

SEQ ID NO: 529142 - protein, 15 aa, Homo sapiens
  CDR3 for beta chain variable domain of TCR clone 264571 (TRBV6-5, TRBJ2-7)
CASSRTSGFSYEQYF

SEQ ID NO: 529143 - protein, 13 aa, Homo sapiens
  CDR3 for alpha chain variable domain of TCR clone 264572 (TRAV29/DV5, TRAJ31)
CAASRNNNARLMY

SEQ ID NO: 529144 - protein, 13 aa, Homo sapiens
  CDR3 for beta chain variable domain of TCR clone 264572 (TRBV10-3, TRBJ2-7)
CGSKLAVNYEQYF

SEQ ID NO: 529145 - protein, 14 aa, Homo sapiens
  CDR3 for alpha chain variable domain of TCR clone 264573 (TRAV8-4, TRAJ54)
CAVSEVLGAQKLVF

SEQ ID NO: 529146 - protein, 12 aa, Homo sapiens
  CDR3 for beta chain variable domain of TCR clone 264573 (TRBV28, TRBJ2-6)
CAIQAGANVLTF

SEQ ID NO: 529147 - protein, 13 aa, Homo sapiens
  CDR3 for alpha chain variable domain of TCR clone 264574 (TRAV12-1, TRAJ17)
CVVSKAAGNKLTF

SEQ ID NO: 529148 - protein, 13 aa, Homo sapiens
  CDR3 for beta chain variable domain of TCR clone 264574 (TRBV29-1, TRBJ1-1)
CSVGDSRNTEAFF

SEQ ID NO: 529149 - protein, 11 aa, Homo sapiens
  CDR3 for alpha chain variable domain of TCR clone 264575 (TRAV1-1, TRAJ23)
CAVRQGGKFIF

SEQ ID NO: 529150 - protein, 20 aa, Homo sapiens
  CDR3 for beta chain variable domain of TCR clone 264575 (TRBV7-8, TRBJ2-2)
WASSHLFPGPTVHITGELFF

SEQ ID NO: 529151 - protein, 14 aa, Homo sapiens
  CDR3 for alpha chain variable domain of TCR clone 264576 (TRAV12-3, TRAJ42)
CAMNYGGSQGNLIF

SEQ ID NO: 529152 - protein, 14 aa, Homo sapiens
  CDR3 for beta chain variable domain of TCR clone 264576 (TRBV11-2, TRBJ2-7)
CASSSTGEGYEQYF

SEQ ID NO: 529153 - protein, 13 aa, Homo sapiens
  CDR3 for alpha chain variable domain of TCR clone 264577 (TRAV2, TRAJ12)
CAVGADSSYILIF

SEQ ID NO: 529154 - protein, 13 aa, Homo sapiens
  CDR3 for beta chain variable domain of TCR clone 264577 (TRBV20-1, TRBJ2-1)
CSARSSPRDEQFF

SEQ ID NO: 529155 - protein, 13 aa, Homo sapiens
  CDR3 for alpha chain variable domain of TCR clone 264578 (TRAV12-2, TRAJ6)
CAVNVSRKLHTYI

SEQ ID NO: 529156 - protein, 10 aa, Homo sapiens
  CDR3 for beta chain variable domain of TCR clone 264578 (TRBV20-1, TRBJ1-5)
CSAIAQPQHF

SEQ ID NO: 529157 - protein, 15 aa, Homo sapiens
  CDR3 for alpha chain variable domain of TCR clone 264579 (TRAV12-2, TRAJ8)
CAVREEKTGFQKLVF

SEQ ID NO: 529158 - protein, 16 aa, Homo sapiens
  CDR3 for beta chain variable domain of TCR clone 264579 (TRBV7-3, TRBJ2-2)
CASSLKRGTLSGELFF

SEQ ID NO: 529159 - protein, 15 aa, Homo sapiens
  CDR3 for alpha chain variable domain of TCR clone 264580 (TRAV8-3, TRAJ27)
CAVGPSKTNAGKATF

SEQ ID NO: 529160 - protein, 15 aa, Homo sapiens
  CDR3 for beta chain variable domain of TCR clone 264580 (TRBV7-2, TRBJ2-1)
CASSSGRAGGNEQFF

SEQ ID NO: 529161 - protein, 16 aa, Homo sapiens
  CDR3 for alpha chain variable domain of TCR clone 264581 (TRAV3, TRAJ37)
CALRPHGPGNTGKLIF

SEQ ID NO: 529162 - protein, 16 aa, Homo sapiens
  CDR3 for beta chain variable domain of TCR clone 264581 (TRBV9, TRBJ1-2)
CASSVEEKVSPYGYTF

SEQ ID NO: 529163 - protein, 10 aa, Homo sapiens
  CDR3 for alpha chain variable domain of TCR clone 264582 (TRAV1-2, TRAJ20)
CALNDYKLSF

SEQ ID NO: 529164 - protein, 14 aa, Homo sapiens
  CDR3 for beta chain variable domain of TCR clone 264582 (TRBV19, TRBJ2-1)
CAGPTFVLSGEQFF

SEQ ID NO: 529165 - protein, 14 aa, Homo sapiens
  CDR3 for alpha chain variable domain of TCR clone 264583 (TRAV1-1, TRAJ34)
CAVSPSYNTDKLIF

SEQ ID NO: 529166 - protein, 15 aa, Homo sapiens
  CDR3 for beta chain variable domain of TCR clone 264583 (TRBV12-4, TRBJ2-5)
CASSGTGQAQETQYF

SEQ ID NO: 529167 - protein, 13 aa, Homo sapiens
  CDR3 for alpha chain variable domain of TCR clone 264584 (TRAV27, TRAJ6)
CAGGTRGSYILTF

SEQ ID NO: 529168 - protein, 15 aa, Homo sapiens
  CDR3 for beta chain variable domain of TCR clone 264584 (TRBV11-2, TRBJ1-3)
CASSLSPLVRDTIYF

SEQ ID NO: 529169 - protein, 11 aa, Homo sapiens
  CDR3 for alpha chain variable domain of TCR clone 264585 (TRAV1-2, TRAJ31)
CAVNNNARLKF

SEQ ID NO: 529170 - protein, 15 aa, Homo sapiens
  CDR3 for beta chain variable domain of TCR clone 264585 (TRBV28, TRBJ2-1)
CASSIIAGGRSEQFF

SEQ ID NO: 529171 - protein, 11 aa, Homo sapiens
  CDR3 for alpha chain variable domain of TCR clone 264586 (TRAV4, TRAJ21)
CLIYNFNKFYF

SEQ ID NO: 529172 - protein, 17 aa, Homo sapiens
  CDR3 for beta chain variable domain of TCR clone 264586 (TRBV23-1, TRBJ2-1)
CISAPAVNRYQGGEQFF

SEQ ID NO: 529173 - protein, 17 aa, Homo sapiens
  CDR3 for alpha chain variable domain of TCR clone 264587 (TRAV4, TRAJ13)
CLVGVQGSSGGYQKVTF

SEQ ID NO: 529174 - protein, 16 aa, Homo sapiens
  CDR3 for beta chain variable domain of TCR clone 264587 (TRBV19, TRBJ2-1)
CASSKAGPGSYNEQFF

SEQ ID NO: 529175 - protein, 12 aa, Homo sapiens
  CDR3 for alpha chain variable domain of TCR clone 264588 (TRAV16, TRAJ10)
CSRTGGGNKLTF

SEQ ID NO: 529176 - protein, 16 aa, Homo sapiens
  CDR3 for beta chain variable domain of TCR clone 264588 (TRBV10-3, TRBJ2-1)
CAISGVGDGGGGEQFF

SEQ ID NO: 529177 - protein, 15 aa, Homo sapiens
  CDR3 for alpha chain variable domain of TCR clone 264589 (TRAV8-4, TRAJ40)
CAVSSIPSGTYKYIF

SEQ ID NO: 529178 - protein, 13 aa, Homo sapiens
  CDR3 for beta chain variable domain of TCR clone 264589 (TRBV2, TRBJ2-1)
CATSRGTDNEQFF

SEQ ID NO: 529179 - protein, 14 aa, Homo sapiens
  CDR3 for alpha chain variable domain of TCR clone 264590 (TRAV26-1, TRAJ34)
CIVLVACNTDKLIV

SEQ ID NO: 529180 - protein, 14 aa, Homo sapiens
  CDR3 for beta chain variable domain of TCR clone 264590 (TRBV4-2, TRBJ2-7)
CASSPNRAPYEQYF

SEQ ID NO: 529181 - protein, 17 aa, Homo sapiens
  CDR3 for alpha chain variable domain of TCR clone 264591 (TRAV12-1, TRAJ52)
CVVTPNAGGTSYGKLTF

SEQ ID NO: 529182 - protein, 14 aa, Homo sapiens
  CDR3 for beta chain variable domain of TCR clone 264591 (TRBV7-3, TRBJ1-1)
CASSLGTGYTEAFF

SEQ ID NO: 529183 - protein, 14 aa, Homo sapiens
  CDR3 for alpha chain variable domain of TCR clone 264592 (TRAV13-1, TRAJ44)
CAAKATGTASKLTF

SEQ ID NO: 529184 - protein, 22 aa, Homo sapiens
  CDR3 for beta chain variable domain of TCR clone 264592 (TRBV19, TRBJ2-1)
CASSVGDRVTGTSGRIYNEQFF

SEQ ID NO: 529185 - protein, 15 aa, Homo sapiens
  CDR3 for alpha chain variable domain of TCR clone 264593 (TRAV20, TRAJ41)
CAVQANSNSGYALNF

SEQ ID NO: 529186 - protein, 12 aa, Homo sapiens
  CDR3 for beta chain variable domain of TCR clone 264593 (TRBV7-9, TRBJ2-7)
CASSLEGYEQYF

SEQ ID NO: 529187 - protein, 15 aa, Homo sapiens
  CDR3 for alpha chain variable domain of TCR clone 264594 (TRAV26-1, TRAJ22)
CIVRVSFWFCKATDL

SEQ ID NO: 529188 - protein, 13 aa, Homo sapiens
  CDR3 for beta chain variable domain of TCR clone 264594 (TRBV24-1, TRBJ2-2)
CATSDWSTGELFF

SEQ ID NO: 529189 - protein, 15 aa, Homo sapiens
  CDR3 for alpha chain variable domain of TCR clone 264595 (TRAV21, TRAJ32)
CAAAPYGGATNKLIL

SEQ ID NO: 529190 - protein, 17 aa, Homo sapiens
  CDR3 for beta chain variable domain of TCR clone 264595 (TRBV18, TRBJ2-3)
CASSPFGDGGFTDTQYF

SEQ ID NO: 529191 - protein, 12 aa, Homo sapiens
  CDR3 for alpha chain variable domain of TCR clone 264596 (TRAV2, TRAJ9)
CAVGAGGFKTIL

SEQ ID NO: 529192 - protein, 16 aa, Homo sapiens
  CDR3 for beta chain variable domain of TCR clone 264596 (TRBV13, TRBJ2-2)
CASSPRTGEHTGELFL

SEQ ID NO: 529193 - protein, 13 aa, Homo sapiens
  CDR3 for alpha chain variable domain of TCR clone 264597 (TRAV8-3, TRAJ43)
CAVGDGNNNDMRF

SEQ ID NO: 529194 - protein, 17 aa, Homo sapiens
  CDR3 for beta chain variable domain of TCR clone 264597 (TRBV12-4, TRBJ1-2)
CASSLGGGRGSDYGYTF

SEQ ID NO: 529195 - protein, 17 aa, Homo sapiens
  CDR3 for alpha chain variable domain of TCR clone 264598 (TRAV26-1, TRAJ27)
CIVSTPWINTHAGISTF

SEQ ID NO: 529196 - protein, 16 aa, Homo sapiens
  CDR3 for beta chain variable domain of TCR clone 264598 (TRBV7-9, TRBJ2-1)
CASSLDPGLAIDEQFF

SEQ ID NO: 529197 - protein, 11 aa, Homo sapiens
  CDR3 for alpha chain variable domain of TCR clone 264599 (TRAV21, TRAJ11)
CAVNGYSTLTF

SEQ ID NO: 529198 - protein, 11 aa, Homo sapiens
  CDR3 for beta chain variable domain of TCR clone 264599 (TRBV11-2, TRBJ2-7)
CASSSDYEQYV

SEQ ID NO: 529199 - protein, 16 aa, Homo sapiens
  CDR3 for alpha chain variable domain of TCR clone 264600 (TRAV3, TRAJ10)
CAVRDMRAGGGNKLTF

SEQ ID NO: 529200 - protein, 15 aa, Homo sapiens
  CDR3 for beta chain variable domain of TCR clone 264600 (TRBV5-1, TRBJ2-1)
CASSLEGLAANEHFF

SEQ ID NO: 529201 - protein, 12 aa, Homo sapiens
  CDR3 for alpha chain variable domain of TCR clone 264601 (TRAV29/DV5, TRAJ49)
CAATDTGNQSYF

SEQ ID NO: 529202 - protein, 14 aa, Homo sapiens
  CDR3 for beta chain variable domain of TCR clone 264601 (TRBV7-9, TRBJ2-2)
CASSLVQDTGELFF

SEQ ID NO: 529203 - protein, 12 aa, Homo sapiens
  CDR3 for alpha chain variable domain of TCR clone 264602 (TRAV22, TRAJ34)
CSVLYNTDKLIF

SEQ ID NO: 529204 - protein, 19 aa, Homo sapiens
  CDR3 for beta chain variable domain of TCR clone 264602 (TRBV25-1, TRBJ2-2)
CAILVYRVDRGRKTGELFF

SEQ ID NO: 529205 - protein, 14 aa, Homo sapiens
  CDR3 for alpha chain variable domain of TCR clone 264603 (TRAV26-1, TRAJ38)
CIADNAGNNRKLIW

SEQ ID NO: 529206 - protein, 16 aa, Homo sapiens
  CDR3 for beta chain variable domain of TCR clone 264603 (TRBV6-5, TRBJ2-7)
CASSTRTSGAPYEQYF

SEQ ID NO: 529207 - protein, 12 aa, Homo sapiens
  CDR3 for alpha chain variable domain of TCR clone 264604 (TRAV2, TRAJ9)
CAVGAGGFETIF

SEQ ID NO: 529208 - protein, 16 aa, Homo sapiens
  CDR3 for beta chain variable domain of TCR clone 264604 (TRBV13, TRBJ2-2)
CASSPRTEEHTGELFF

SEQ ID NO: 529209 - protein, 13 aa, Homo sapiens
  CDR3 for alpha chain variable domain of TCR clone 264605 (TRAV17, TRAJ5)
CAPMDTGRRALTF

SEQ ID NO: 529210 - protein, 15 aa, Homo sapiens
  CDR3 for beta chain variable domain of TCR clone 264605 (TRBV6-6, TRBJ2-5)
CASSPWGGLEETQYF

SEQ ID NO: 529211 - protein, 13 aa, Homo sapiens
  CDR3 for alpha chain variable domain of TCR clone 264606 (TRAV20, TRAJ37)
CAGCSSNTGKLIF

SEQ ID NO: 529212 - protein, 17 aa, Homo sapiens
  CDR3 for beta chain variable domain of TCR clone 264606 (TRBV28, TRBJ2-5)
CASSRQGGLAGAKTQYF

SEQ ID NO: 529213 - protein, 12 aa, Homo sapiens
  CDR3 for alpha chain variable domain of TCR clone 264607 (TRAV17, TRAJ5)
CSYDTGRRALTF

SEQ ID NO: 529214 - protein, 15 aa, Homo sapiens
  CDR3 for beta chain variable domain of TCR clone 264607 (TRBV6-6, TRBJ2-5)
CASSPGGGLEETQYF

SEQ ID NO: 529215 - protein, 12 aa, Homo sapiens
  CDR3 for alpha chain variable domain of TCR clone 264608 (TRAV2, TRAJ31)
CAVEDNNAILIF

SEQ ID NO: 529216 - protein, 14 aa, Homo sapiens
  CDR3 for beta chain variable domain of TCR clone 264608 (TRBV28, TRBJ1-5)
CASSRTGLNQPQHF

SEQ ID NO: 529217 - protein, 14 aa, Homo sapiens
  CDR3 for alpha chain variable domain of TCR clone 264609 (TRAV38-1, TRAJ45)
CAYYSGGGADGLTF

SEQ ID NO: 529218 - protein, 12 aa, Homo sapiens
  CDR3 for beta chain variable domain of TCR clone 264609 (TRBV7-9, TRBJ2-7)
CASSFGSYERYF

SEQ ID NO: 529219 - protein, 21 aa, Homo sapiens
  CDR3 for alpha chain variable domain of TCR clone 264610 (TRAV1-1, TRAJ6)
CLLLLRCERLEKTGGSYIPTF

SEQ ID NO: 529220 - protein, 14 aa, Homo sapiens
  CDR3 for beta chain variable domain of TCR clone 264610 (TRBV7-8, TRBJ2-5)
CAGSLSGGGETQYF

SEQ ID NO: 529221 - protein, 14 aa, Homo sapiens
  CDR3 for alpha chain variable domain of TCR clone 264611 (TRAV12-1, TRAJ37)
CVVNRSGNTGKLIF

SEQ ID NO: 529222 - protein, 15 aa, Homo sapiens
  CDR3 for beta chain variable domain of TCR clone 264611 (TRBV27, TRBJ1-5)
CASSLGTGFDQPQHF

SEQ ID NO: 529223 - protein, 22 aa, Homo sapiens
  CDR3 for alpha chain variable domain of TCR clone 264612 (TRAV8-3, TRAJ32)
CAVEVVLQTSLSLELALCLLSS

SEQ ID NO: 529224 - protein, 12 aa, Homo sapiens
  CDR3 for beta chain variable domain of TCR clone 264612 (TRBV7-8, TRBJ2-7)
CASSLGDREQYF

SEQ ID NO: 529225 - protein, 15 aa, Homo sapiens
  CDR3 for alpha chain variable domain of TCR clone 264613 (TRAV25, TRAJ52)
CAGRPGGTSYGKLTF

SEQ ID NO: 529226 - protein, 12 aa, Homo sapiens
  CDR3 for beta chain variable domain of TCR clone 264613 (TRBV7-8, TRBJ2-7)
CASSLGDRGQYF

SEQ ID NO: 529227 - protein, 14 aa, Homo sapiens
  CDR3 for alpha chain variable domain of TCR clone 264614 (TRAV2, TRAJ9)
CAVEDRSGGFKTIF

SEQ ID NO: 529228 - protein, 13 aa, Homo sapiens
  CDR3 for beta chain variable domain of TCR clone 264614 (TRBV19, TRBJ1-2)
CASSVPRQDGYTF

SEQ ID NO: 529229 - protein, 11 aa, Homo sapiens
  CDR3 for alpha chain variable domain of TCR clone 264615 (TRAV23/DV6, TRAJ58)
CAARLLRGETR

SEQ ID NO: 529230 - protein, 15 aa, Homo sapiens
  CDR3 for beta chain variable domain of TCR clone 264615 (TRBV9, TRBJ1-6)
CASSVAGTGDSPLHF

SEQ ID NO: 529231 - protein, 14 aa, Homo sapiens
  CDR3 for alpha chain variable domain of TCR clone 264616 (TRAV4, TRAJ9)
CLVGSGTGGFKTIF

SEQ ID NO: 529232 - protein, 14 aa, Homo sapiens
  CDR3 for beta chain variable domain of TCR clone 264616 (TRBV7-9, TRBJ2-4)
CASSLALGGNIQYF

SEQ ID NO: 529233 - protein, 11 aa, Homo sapiens
  CDR3 for alpha chain variable domain of TCR clone 264617 (TRAV21, TRAJ11)
CAVNGYSTLTF

SEQ ID NO: 529234 - protein, 12 aa, Homo sapiens
  CDR3 for beta chain variable domain of TCR clone 264617 (TRBV6-3, TRBJ2-7)
CASSRQGYEQYF

SEQ ID NO: 529235 - protein, 17 aa, Homo sapiens
  CDR3 for alpha chain variable domain of TCR clone 264618 (TRAV4, TRAJ13)
CIVGVQGSSGGYQKVTF

SEQ ID NO: 529236 - protein, 18 aa, Homo sapiens
  CDR3 for beta chain variable domain of TCR clone 264618 (TRBV15, TRBJ2-3)
CATSRDGARSWDTDTQEF

SEQ ID NO: 529237 - protein, 18 aa, Homo sapiens
  CDR3 for alpha chain variable domain of TCR clone 264619 (TRAV13-1, TRAJ52)
CAAKNPNAGGTSYVKLTF

SEQ ID NO: 529238 - protein, 13 aa, Homo sapiens
  CDR3 for beta chain variable domain of TCR clone 264619 (TRBV6-5, TRBJ2-5)
CASSPQGGETQYF

SEQ ID NO: 529239 - protein, 14 aa, Homo sapiens
  CDR3 for alpha chain variable domain of TCR clone 264620 (TRAV8-3, TRAJ12)
CAVGARDSSYKLIF

SEQ ID NO: 529240 - protein, 15 aa, Homo sapiens
  CDR3 for beta chain variable domain of TCR clone 264620 (TRBV11-2, TRBJ2-1)
CASSLGTSGLNEQFF

SEQ ID NO: 529241 - protein, 13 aa, Homo sapiens
  CDR3 for alpha chain variable domain of TCR clone 264621 (TRAV27, TRAJ3)
ASLRGSSASKIIF

SEQ ID NO: 529242 - protein, 13 aa, Homo sapiens
  CDR3 for beta chain variable domain of TCR clone 264621 (TRBV28, TRBJ2-5)
CASSFAGGETQYF

SEQ ID NO: 529243 - protein, 14 aa, Homo sapiens
  CDR3 for alpha chain variable domain of TCR clone 264622 (TRAV2, TRAJ9)
CSVEDRSGGFKTIF

SEQ ID NO: 529244 - protein, 13 aa, Homo sapiens
  CDR3 for beta chain variable domain of TCR clone 264622 (TRBV12-4, TRBJ1-5)
CASSPDRAQPQHF

SEQ ID NO: 529245 - protein, 12 aa, Homo sapiens
  CDR3 for alpha chain variable domain of TCR clone 264623 (TRAV12-2, TRAJ10)
WGVTGGGNKLTF

SEQ ID NO: 529246 - protein, 14 aa, Homo sapiens
  CDR3 for beta chain variable domain of TCR clone 264623 (TRBV7-9, TRBJ2-7)
CASSLSAATYEQYF

SEQ ID NO: 529247 - protein, 13 aa, Homo sapiens
  CDR3 for alpha chain variable domain of TCR clone 264624 (TRAV12-2, TRAJ24)
CAVSTDSWRKLQF

SEQ ID NO: 529248 - protein, 16 aa, Homo sapiens
  CDR3 for beta chain variable domain of TCR clone 264624 (TRBV7-3, TRBJ2-2)
CASSLKRGTLSGELFF

SEQ ID NO: 529249 - protein, 15 aa, Homo sapiens
  CDR3 for alpha chain variable domain of TCR clone 264625 (TRAV12-3, TRAJ6)
CAMSATTGGSYIPTF

SEQ ID NO: 529250 - protein, 15 aa, Homo sapiens
  CDR3 for beta chain variable domain of TCR clone 264625 (TRBV28, TRBJ1-2)
CASIPQGSDDYGYTF

SEQ ID NO: 529251 - protein, 14 aa, Homo sapiens
  CDR3 for alpha chain variable domain of TCR clone 264626 (TRAV35, TRAJ10)
CAGILTGGGNKLTF

SEQ ID NO: 529252 - protein, 15 aa, Homo sapiens
  CDR3 for beta chain variable domain of TCR clone 264626 (TRBV7-2, TRBJ2-1)
CASSFRESSYNEQFF

SEQ ID NO: 529253 - protein, 16 aa, Homo sapiens
  CDR3 for alpha chain variable domain of TCR clone 264627 (TRAV8-4, TRAJ44)
CAVSAPLTATASKLTF

SEQ ID NO: 529254 - protein, 11 aa, Homo sapiens
  CDR3 for beta chain variable domain of TCR clone 264627 (TRBV7-9, TRBJ2-5)
CASSVGETQYF

SEQ ID NO: 529255 - protein, 13 aa, Homo sapiens
  CDR3 for alpha chain variable domain of TCR clone 264628 (TRAV12-2, TRAJ47)
CAVFMEYGKKLVF

SEQ ID NO: 529256 - protein, 14 aa, Homo sapiens
  CDR3 for beta chain variable domain of TCR clone 264628 (TRBV4-1, TRBJ1-5)
RASSQGPTNQPQHF

SEQ ID NO: 529257 - protein, 22 aa, Homo sapiens
  CDR3 for alpha chain variable domain of TCR clone 264629 (TRAV22, TRAJ6)
CLGSGQEEATYLHLEEEPALLF

SEQ ID NO: 529258 - protein, 14 aa, Homo sapiens
  CDR3 for beta chain variable domain of TCR clone 264629 (TRBV9, TRBJ2-7)
CASSVGVGSYEQYF

SEQ ID NO: 529259 - protein, 17 aa, Homo sapiens
  CDR3 for alpha chain variable domain of TCR clone 264630 (TRAV26-1, TRAJ37)
CIVRVITVSSNTGKLIF

SEQ ID NO: 529260 - protein, 16 aa, Homo sapiens
  CDR3 for beta chain variable domain of TCR clone 264630 (TRBV2, TRBJ2-3)
CASSTSVEGVTDTQYF

SEQ ID NO: 529261 - protein, 13 aa, Homo sapiens
  CDR3 for alpha chain variable domain of TCR clone 264631 (TRAV17, TRAJ9)
CATDYTGGFKTIF

SEQ ID NO: 529262 - protein, 14 aa, Homo sapiens
  CDR3 for beta chain variable domain of TCR clone 264631 (TRBV19, TRBJ2-5)
CAGSMTGQLETQYF

SEQ ID NO: 529263 - protein, 16 aa, Homo sapiens
  CDR3 for alpha chain variable domain of TCR clone 264632 (TRAV1-2, TRAJ16)
CAVNGFQMARSCSLQG

SEQ ID NO: 529264 - protein, 12 aa, Homo sapiens
  CDR3 for beta chain variable domain of TCR clone 264632 (TRBV7-6, TRBJ2-7)
CASSLADSEQYF

SEQ ID NO: 529265 - protein, 14 aa, Homo sapiens
  CDR3 for alpha chain variable domain of TCR clone 264633 (TRAV17, TRAJ36)
CATDALSGSNNLFF

SEQ ID NO: 529266 - protein, 13 aa, Homo sapiens
  CDR3 for beta chain variable domain of TCR clone 264633 (TRBV12-4, TRBJ1-2)
CASSSGLTVISTF

SEQ ID NO: 529267 - protein, 17 aa, Homo sapiens
  CDR3 for alpha chain variable domain of TCR clone 264634 (TRAV17, TRAJ28)
CATDPRRGGAGGYHLTF

SEQ ID NO: 529268 - protein, 16 aa, Homo sapiens
  CDR3 for beta chain variable domain of TCR clone 264634 (TRBV25-1, TRBJ1-1)
CASSGDRDRGRIEAFF

SEQ ID NO: 529269 - protein, 14 aa, Homo sapiens
  CDR3 for alpha chain variable domain of TCR clone 264635 (TRAV8-6, TRAJ9)
CDVSSYTGGFKTNF

SEQ ID NO: 529270 - protein, 15 aa, Homo sapiens
  CDR3 for beta chain variable domain of TCR clone 264635 (TRBV2, TRBJ1-2)
CASSESRTVNYGYTF

SEQ ID NO: 529271 - protein, 12 aa, Homo sapiens
  CDR3 for alpha chain variable domain of TCR clone 264636 (TRAV8-3, TRAJ20)
CAVGANDYKLSF

SEQ ID NO: 529272 - protein, 15 aa, Homo sapiens
  CDR3 for beta chain variable domain of TCR clone 264636 (TRBV7-2, TRBJ2-1)
CASSSGLAGGNEQFF

SEQ ID NO: 529273 - protein, 15 aa, Homo sapiens
  CDR3 for alpha chain variable domain of TCR clone 264637 (TRAV26-1, TRAJ56)
CIVRVDNGANSKLTF

SEQ ID NO: 529274 - protein, 14 aa, Homo sapiens
  CDR3 for beta chain variable domain of TCR clone 264637 (TRBV5-1, TRBJ2-7)
CASSKGESLYEQYF

SEQ ID NO: 529275 - protein, 13 aa, Homo sapiens
  CDR3 for alpha chain variable domain of TCR clone 264638 (TRAV17, TRAJ5)
CAPMDTGRRALTF

SEQ ID NO: 529276 - protein, 15 aa, Homo sapiens
  CDR3 for beta chain variable domain of TCR clone 264638 (TRBV6-6, TRBJ2-5)
CASRPGGGLEETQYF

SEQ ID NO: 529277 - protein, 14 aa, Homo sapiens
  CDR3 for alpha chain variable domain of TCR clone 264639 (TRAV8-6, TRAJ6)
CAVSEGGGSYIPTF

SEQ ID NO: 529278 - protein, 14 aa, Homo sapiens
  CDR3 for beta chain variable domain of TCR clone 264639 (TRBV7-3, TRBJ2-1)
CASSLGTSANEQFF

SEQ ID NO: 529279 - protein, 13 aa, Homo sapiens
  CDR3 for alpha chain variable domain of TCR clone 264640 (TRAV8-3, TRAJ43)
CAVVPYNNNDMRF

SEQ ID NO: 529280 - protein, 17 aa, Homo sapiens
  CDR3 for beta chain variable domain of TCR clone 264640 (TRBV7-7, TRBJ1-1)
CASIGDRPNLGVTEAFF

SEQ ID NO: 529281 - protein, 12 aa, Homo sapiens
  CDR3 for alpha chain variable domain of TCR clone 264641 (TRAV3, TRAJ21)
CAGQLQQILLWF

SEQ ID NO: 529282 - protein, 16 aa, Homo sapiens
  CDR3 for beta chain variable domain of TCR clone 264641 (TRBV19, TRBJ2-1)
CASSKAGPSSYNEQFF

SEQ ID NO: 529283 - protein, 13 aa, Homo sapiens
  CDR3 for alpha chain variable domain of TCR clone 264642 (TRAV1-1, TRAJ5)
CAVRQAGRRALTF

SEQ ID NO: 529284 - protein, 12 aa, Homo sapiens
  CDR3 for beta chain variable domain of TCR clone 264642 (TRBV11-2, TRBJ2-2)
CASSLGGGELFF

SEQ ID NO: 529285 - protein, 15 aa, Homo sapiens
  CDR3 for alpha chain variable domain of TCR clone 264643 (TRAV17, TRAJ57)
CATGPSQGGSEKLVF

SEQ ID NO: 529286 - protein, 14 aa, Homo sapiens
  CDR3 for beta chain variable domain of TCR clone 264643 (TRBV12-5, TRBJ2-5)
GASGSRTHQETQYF

SEQ ID NO: 529287 - protein, 13 aa, Homo sapiens
  CDR3 for alpha chain variable domain of TCR clone 264644 (TRAV35, TRAJ42)
CAGFPGSQGNLIF

SEQ ID NO: 529288 - protein, 16 aa, Homo sapiens
  CDR3 for beta chain variable domain of TCR clone 264644 (TRBV19, TRBJ2-2)
CASSFPGQGLTGELFF

SEQ ID NO: 529289 - protein, 16 aa, Homo sapiens
  CDR3 for alpha chain variable domain of TCR clone 264645 (TRAV3, TRAJ17)
CAVRDGSPAVGNKLTF

SEQ ID NO: 529290 - protein, 14 aa, Homo sapiens
  CDR3 for beta chain variable domain of TCR clone 264645 (TRBV15, TRBJ2-1)
CATNHGGRHNEQFF

SEQ ID NO: 529291 - protein, 13 aa, Homo sapiens
  CDR3 for alpha chain variable domain of TCR clone 264646 (TRAV12-1, TRAJ34)
CGEPLRNTDKPIF

SEQ ID NO: 529292 - protein, 20 aa, Homo sapiens
  CDR3 for beta chain variable domain of TCR clone 264646 (TRBV19, TRBJ2-1)
CASSISRTVTSTRLNNEQFF

SEQ ID NO: 529293 - protein, 14 aa, Homo sapiens
  CDR3 for alpha chain variable domain of TCR clone 264647 (TRAV25, TRAJ45)
CARESGGGADGLTF

SEQ ID NO: 529294 - protein, 12 aa, Homo sapiens
  CDR3 for beta chain variable domain of TCR clone 264647 (TRBV7-9, TRBJ2-7)
CASSFDNYEQYF

SEQ ID NO: 529295 - protein, 14 aa, Homo sapiens
  CDR3 for alpha chain variable domain of TCR clone 264648 (TRAV38-1, TRAJ45)
CASHSGGGADGVTF

SEQ ID NO: 529296 - protein, 14 aa, Homo sapiens
  CDR3 for beta chain variable domain of TCR clone 264648 (TRBV20-1, TRBJ1-1)
CSAQTRIGGTEAFF

SEQ ID NO: 529297 - protein, 13 aa, Homo sapiens
  CDR3 for alpha chain variable domain of TCR clone 264649 (TRAV23/DV6, TRAJ16)
CAASISDGQKLLF

SEQ ID NO: 529298 - protein, 15 aa, Homo sapiens
  CDR3 for beta chain variable domain of TCR clone 264649 (TRBV2, TRBJ2-2)
CASSGETVGTGELFF

SEQ ID NO: 529299 - protein, 17 aa, Homo sapiens
  CDR3 for alpha chain variable domain of TCR clone 264650 (TRAV3, TRAJ28)
CAVRPLYSGAWSYQLTF

SEQ ID NO: 529300 - protein, 16 aa, Homo sapiens
  CDR3 for beta chain variable domain of TCR clone 264650 (TRBV4-2, TRBJ1-4)
CASSQARGPTNEKLFF

SEQ ID NO: 529301 - protein, 15 aa, Homo sapiens
  CDR3 for alpha chain variable domain of TCR clone 264651 (TRAV3, TRAJ32)
CAVSSCGGATNKLIF

SEQ ID NO: 529302 - protein, 16 aa, Homo sapiens
  CDR3 for beta chain variable domain of TCR clone 264651 (TRBV5-1, TRBJ2-5)
CASSLSLAGAQETQYF

SEQ ID NO: 529303 - protein, 13 aa, Homo sapiens
  CDR3 for alpha chain variable domain of TCR clone 264652 (TRAV23/DV6, TRAJ22)
CAPYSGSARQLTF

SEQ ID NO: 529304 - protein, 14 aa, Homo sapiens
  CDR3 for beta chain variable domain of TCR clone 264652 (TRBV19, TRBJ2-7)
CASSMGQGAIEQYF

SEQ ID NO: 529305 - protein, 16 aa, Homo sapiens
  CDR3 for alpha chain variable domain of TCR clone 264653 (TRAV26-2, TRAJ57)
CILRDVGSGGSEKRVF

SEQ ID NO: 529306 - protein, 13 aa, Homo sapiens
  CDR3 for beta chain variable domain of TCR clone 264653 (TRBV18, TRBJ2-3)
CASSPGVTDTQYF

SEQ ID NO: 529307 - protein, 10 aa, Homo sapiens
  CDR3 for alpha chain variable domain of TCR clone 264654 (TRAV12-1, TRAJ21)
CVVNPIKFYF

SEQ ID NO: 529308 - protein, 17 aa, Homo sapiens
  CDR3 for beta chain variable domain of TCR clone 264654 (TRBV7-3, TRBJ2-3)
RASSLMKRMRGADTQYF

SEQ ID NO: 529309 - protein, 14 aa, Homo sapiens
  CDR3 for alpha chain variable domain of TCR clone 264655 (TRAV8-2, TRAJ4)
CVVSPSGGYNKLIF

SEQ ID NO: 529310 - protein, 15 aa, Homo sapiens
  CDR3 for beta chain variable domain of TCR clone 264655 (TRBV4-1)
CARRDKGGNNEKMFF

SEQ ID NO: 529311 - protein, 17 aa, Homo sapiens
  CDR3 for alpha chain variable domain of TCR clone 264656 (TRAV26-1, TRAJ53)
CIVRVDDSGGSNYKLTF

SEQ ID NO: 529312 - protein, 13 aa, Homo sapiens
  CDR3 for beta chain variable domain of TCR clone 264656 (TRBV12-4, TRBJ1-2)
CASSLDSNYGYTF

SEQ ID NO: 529313 - protein, 13 aa, Homo sapiens
  CDR3 for alpha chain variable domain of TCR clone 264657 (TRAV29/DV5, TRAJ31)
CAASRNNNARLMF

SEQ ID NO: 529314 - protein, 15 aa, Homo sapiens
  CDR3 for beta chain variable domain of TCR clone 264657 (TRBV7-2, TRBJ1-2)
CASSPRAGWNYGYTF

SEQ ID NO: 529315 - protein, 12 aa, Homo sapiens
  CDR3 for alpha chain variable domain of TCR clone 264658 (TRAV25, TRAJ53)
CQSGGSNYKMTF

SEQ ID NO: 529316 - protein, 12 aa, Homo sapiens
  CDR3 for beta chain variable domain of TCR clone 264658 (TRBV14, TRBJ2-7)
CASSSLKGEQYF

SEQ ID NO: 529317 - protein, 14 aa, Homo sapiens
  CDR3 for alpha chain variable domain of TCR clone 264659 (TRAV38-1, TRAJ45)
CASHSGGGADGLTF

SEQ ID NO: 529318 - protein, 15 aa, Homo sapiens
  CDR3 for beta chain variable domain of TCR clone 264659 (TRBV5-1, TRBJ2-7)
CASSLNGGPAREQYF

SEQ ID NO: 529319 - protein, 15 aa, Homo sapiens
  CDR3 for alpha chain variable domain of TCR clone 264660 (TRAV12-3, TRAJ6)
CAMSATTGGSYIPTF

SEQ ID NO: 529320 - protein, 16 aa, Homo sapiens
  CDR3 for beta chain variable domain of TCR clone 264660 (TRBV11-3, TRBJ2-5)
CASSSVVAGSTETQYF

SEQ ID NO: 529321 - protein, 14 aa, Homo sapiens
  CDR3 for alpha chain variable domain of TCR clone 264661 (TRAV9-2, TRAJ39)
CALYIYNAGNMLTF

SEQ ID NO: 529322 - protein, 13 aa, Homo sapiens
  CDR3 for beta chain variable domain of TCR clone 264661 (TRBV12-4, TRBJ2-5)
CASSPGTEETQYF

SEQ ID NO: 529323 - protein, 14 aa, Homo sapiens
  CDR3 for alpha chain variable domain of TCR clone 264662 (TRAV12-1, TRAJ17)
CVVNYKAAVNKLTF

SEQ ID NO: 529324 - protein, 17 aa, Homo sapiens
  CDR3 for beta chain variable domain of TCR clone 264662 (TRBV20-1, TRBJ2-1)
CSASSSGLAGSYNEQLF

SEQ ID NO: 529325 - protein, 15 aa, Homo sapiens
  CDR3 for alpha chain variable domain of TCR clone 264663 (TRAV35, TRAJ23)
CAGPRGYNQGGKLIF

SEQ ID NO: 529326 - protein, 16 aa, Homo sapiens
  CDR3 for beta chain variable domain of TCR clone 264663 (TRBV27, TRBJ2-1)
CASSSRLAGNYNEQFF

SEQ ID NO: 529327 - protein, 12 aa, Homo sapiens
  CDR3 for alpha chain variable domain of TCR clone 264664 (TRAV1-1, TRAJ8)
CAGGTGFQKLAF

SEQ ID NO: 529328 - protein, 12 aa, Homo sapiens
  CDR3 for beta chain variable domain of TCR clone 264664 (TRBV14, TRBJ1-1)
CASSQLKGLAFF

SEQ ID NO: 529329 - protein, 16 aa, Homo sapiens
  CDR3 for alpha chain variable domain of TCR clone 264665 (TRAV30, TRAJ24)
SVAQRLWMDSWGKFQF

SEQ ID NO: 529330 - protein, 14 aa, Homo sapiens
  CDR3 for beta chain variable domain of TCR clone 264665 (TRBV12-5, TRBJ2-5)
CASGSRTHQETQYF

SEQ ID NO: 529331 - protein, 15 aa, Homo sapiens
  CDR3 for alpha chain variable domain of TCR clone 264666 (TRAV21, TRAJ53)
CATLNSGRSNYKLTF

SEQ ID NO: 529332 - protein, 14 aa, Homo sapiens
  CDR3 for beta chain variable domain of TCR clone 264666 (TRBV20-1, TRBJ2-5)
CSAHRQGLWETQYF

SEQ ID NO: 529333 - protein, 10 aa, Homo sapiens
  CDR3 for alpha chain variable domain of TCR clone 264667 (TRAV23/DV6, TRAJ57)
CAASSTLSQG

SEQ ID NO: 529334 - protein, 13 aa, Homo sapiens
  CDR3 for beta chain variable domain of TCR clone 264667 (TRBV7-9, TRBJ2-7)
CASSFAGAYEQYF

SEQ ID NO: 529335 - protein, 13 aa, Homo sapiens
  CDR3 for alpha chain variable domain of TCR clone 264668 (TRAV21, TRAJ20)
CAVGLRVYYKFSF

SEQ ID NO: 529336 - protein, 13 aa, Homo sapiens
  CDR3 for beta chain variable domain of TCR clone 264668 (TRBV6-1, TRBJ1-1)
CASSRQGNTEAFF

SEQ ID NO: 529337 - protein, 14 aa, Homo sapiens
  CDR3 for alpha chain variable domain of TCR clone 264669 (TRAV17, TRAJ22)
CATSPSGSARQLTF

SEQ ID NO: 529338 - protein, 14 aa, Homo sapiens
  CDR3 for beta chain variable domain of TCR clone 264669 (TRBV12-5, TRBJ2-5)
CASGSRTHQETQYF

SEQ ID NO: 529339 - protein, 13 aa, Homo sapiens
  CDR3 for alpha chain variable domain of TCR clone 264670 (TRAV35, TRAJ48)
CAGHEFGNEKLTF

SEQ ID NO: 529340 - protein, 16 aa, Homo sapiens
  CDR3 for beta chain variable domain of TCR clone 264670 (TRBV15, TRBJ1-4)
CATSRDSPPGREKLFF

SEQ ID NO: 529341 - protein, 15 aa, Homo sapiens
  CDR3 for alpha chain variable domain of TCR clone 264671 (TRAV17, TRAJ4)
SATGTWSGGYNKLIF

SEQ ID NO: 529342 - protein, 14 aa, Homo sapiens
  CDR3 for beta chain variable domain of TCR clone 264671 (TRBV7-2, TRBJ2-7)
CASRSQGAAYEQYF

SEQ ID NO: 529343 - protein, 11 aa, Homo sapiens
  CDR3 for alpha chain variable domain of TCR clone 264672 (TRAV2, TRAJ33)
CAVDSNYQLIW

SEQ ID NO: 529344 - protein, 13 aa, Homo sapiens
  CDR3 for beta chain variable domain of TCR clone 264672 (TRBV7-9, TRBJ1-2)
CARSLKQNYGYTF

SEQ ID NO: 529345 - protein, 11 aa, Homo sapiens
  CDR3 for alpha chain variable domain of TCR clone 264673 (TRAV2, TRAJ31)
CAVYNNARLMF

SEQ ID NO: 529346 - protein, 16 aa, Homo sapiens
  CDR3 for beta chain variable domain of TCR clone 264673 (TRBV28, TRBJ1-6)
CASSSLLQGDNSPLHF

SEQ ID NO: 529347 - protein, 14 aa, Homo sapiens
  CDR3 for alpha chain variable domain of TCR clone 264674 (TRAV8-4, TRAJ13)
CAVTLSGGYQKVTF

SEQ ID NO: 529348 - protein, 15 aa, Homo sapiens
  CDR3 for beta chain variable domain of TCR clone 264674 (TRBV27, TRBJ2-7)
CASRTMGQGRKWQYF

SEQ ID NO: 529349 - protein, 19 aa, Homo sapiens
  CDR3 for alpha chain variable domain of TCR clone 264675 (TRAV17, TRAJ17)
CATDGRPGVIKAAGNTRTF

SEQ ID NO: 529350 - protein, 17 aa, Homo sapiens
  CDR3 for beta chain variable domain of TCR clone 264675 (TRBV12-4, TRBJ1-1)
CASSLSGFRTMNTEAFF

SEQ ID NO: 529351 - protein, 14 aa, Homo sapiens
  CDR3 for alpha chain variable domain of TCR clone 264676 (TRAV12-3, TRAJ57)
CAMSAWGGSEKLVF

SEQ ID NO: 529352 - protein, 16 aa, Homo sapiens
  CDR3 for beta chain variable domain of TCR clone 264676 (TRBV9, TRBJ2-1)
CASSVGGGGNYNEQFF

SEQ ID NO: 529353 - protein, 11 aa, Homo sapiens
  CDR3 for alpha chain variable domain of TCR clone 264677 (TRAV12-2, TRAJ33)
CAVGSNYQLIW

SEQ ID NO: 529354 - protein, 14 aa, Homo sapiens
  CDR3 for beta chain variable domain of TCR clone 264677 (TRBV6-1, TRBJ2-2)
CASVEHIASGELFF

SEQ ID NO: 529355 - protein, 14 aa, Homo sapiens
  CDR3 for alpha chain variable domain of TCR clone 264678 (TRAV29/DV5, TRAJ36)
CPARRKTGANNLFF

SEQ ID NO: 529356 - protein, 12 aa, Homo sapiens
  CDR3 for beta chain variable domain of TCR clone 264678 (TRBV12-5, TRBJ2-5)
CASGQGVETQYF

SEQ ID NO: 529357 - protein, 11 aa, Homo sapiens
  CDR3 for alpha chain variable domain of TCR clone 264679 (TRAV3, TRAJ21)
FAVGNFNKFYF

SEQ ID NO: 529358 - protein, 11 aa, Homo sapiens
  CDR3 for beta chain variable domain of TCR clone 264679 (TRBV12-4, TRBJ2-3)
CASTATDTQYF

SEQ ID NO: 529359 - protein, 11 aa, Homo sapiens
  CDR3 for alpha chain variable domain of TCR clone 264680 (TRAV23/DV6, TRAJ4)
APAGGYSKLIF

SEQ ID NO: 529360 - protein, 17 aa, Homo sapiens
  CDR3 for beta chain variable domain of TCR clone 264680 (TRBV20-1, TRBJ2-1)
CSAPDRGAGVAYNEQFF

SEQ ID NO: 529361 - protein, 14 aa, Homo sapiens
  CDR3 for alpha chain variable domain of TCR clone 264681 (TRAV12-1, TRAJ12)
CVVTRMDSSYKLIF

SEQ ID NO: 529362 - protein, 13 aa, Homo sapiens
  CDR3 for beta chain variable domain of TCR clone 264681 (TRBV20-1, TRBJ1-1)
CSARGGGNTQPFF

SEQ ID NO: 529363 - protein, 13 aa, Homo sapiens
  CDR3 for alpha chain variable domain of TCR clone 264682 (TRAV16, TRAJ34)
CALISYNTDKLIF

SEQ ID NO: 529364 - protein, 16 aa, Homo sapiens
  CDR3 for beta chain variable domain of TCR clone 264682 (TRBV12-5, TRBJ2-5)
CASGPRTSGNQETQYF

SEQ ID NO: 529365 - protein, 19 aa, Homo sapiens
  CDR3 for alpha chain variable domain of TCR clone 264683 (TRAV3, TRAJ37)
CAVRDIVGGYPSNTGKLIF

SEQ ID NO: 529366 - protein, 14 aa, Homo sapiens
  CDR3 for beta chain variable domain of TCR clone 264683 (TRBV4-1, TRBJ2-2)
CASSQAVNTGELFF

SEQ ID NO: 529367 - protein, 13 aa, Homo sapiens
  CDR3 for alpha chain variable domain of TCR clone 264684 (TRAV21, TRAJ15)
CAVGNQAGTALIF

SEQ ID NO: 529368 - protein, 15 aa, Homo sapiens
  CDR3 for beta chain variable domain of TCR clone 264684 (TRBV27, TRBJ2-7)
CASSLGSSVSPEQYF

SEQ ID NO: 529369 - protein, 14 aa, Homo sapiens
  CDR3 for alpha chain variable domain of TCR clone 264685 (TRAV17, TRAJ6)
CATDASGGSYIPTF

SEQ ID NO: 529370 - protein, 19 aa, Homo sapiens
  CDR3 for beta chain variable domain of TCR clone 264685 (TRBV4-3, TRBJ2-7)
CTSSREFIGWQVTPYEQYF

SEQ ID NO: 529371 - protein, 15 aa, Homo sapiens
  CDR3 for alpha chain variable domain of TCR clone 264686 (TRAV12-1, TRAJ45)
CVVIRRGGGADGLTF

SEQ ID NO: 529372 - protein, 15 aa, Homo sapiens
  CDR3 for beta chain variable domain of TCR clone 264686 (TRBV28, TRBJ2-5)
CASSPGQGSIETQYF

SEQ ID NO: 529373 - protein, 14 aa, Homo sapiens
  CDR3 for alpha chain variable domain of TCR clone 264687 (TRAV8-2, TRAJ37)
CVVSISGNTGKLLF

SEQ ID NO: 529374 - protein, 13 aa, Homo sapiens
  CDR3 for beta chain variable domain of TCR clone 264687 (TRBV7-8, TRBJ2-7)
RRVRLTEMGEQYF

SEQ ID NO: 529375 - protein, 14 aa, Homo sapiens
  CDR3 for alpha chain variable domain of TCR clone 264688 (TRAV12-3, TRAJ10)
SHLPLTGGGNKLTF

SEQ ID NO: 529376 - protein, 15 aa, Homo sapiens
  CDR3 for beta chain variable domain of TCR clone 264688 (TRBV7-9, TRBJ1-4)
CASSRTGGFNEELSF

SEQ ID NO: 529377 - protein, 16 aa, Homo sapiens
  CDR3 for alpha chain variable domain of TCR clone 264689 (TRAV26-2, TRAJ57)
CILRYVGSGGSEKLVF

SEQ ID NO: 529378 - protein, 13 aa, Homo sapiens
  CDR3 for beta chain variable domain of TCR clone 264689 (TRBV18, TRBJ2-3)
CASSPGVTDTQYF

SEQ ID NO: 529379 - protein, 13 aa, Homo sapiens
  CDR3 for alpha chain variable domain of TCR clone 264690 (TRAV35, TRAJ36)
CAGPWIGANNLFF

SEQ ID NO: 529380 - protein, 15 aa, Homo sapiens
  CDR3 for beta chain variable domain of TCR clone 264690 (TRBV28, TRBJ2-5)
CASSPSWSYQETQYF

SEQ ID NO: 529381 - protein, 16 aa, Homo sapiens
  CDR3 for alpha chain variable domain of TCR clone 264691 (TRAV3, TRAJ23)
CAVKIGIYNQGVKLIF

SEQ ID NO: 529382 - protein, 17 aa, Homo sapiens
  CDR3 for beta chain variable domain of TCR clone 264691 (TRBV10-3, TRBJ2-6)
CAISESTAPSGSNVLTF

SEQ ID NO: 529383 - protein, 14 aa, Homo sapiens
  CDR3 for alpha chain variable domain of TCR clone 264692 (TRAV8-1, TRAJ5)
CAVRTDTGRRALTF

SEQ ID NO: 529384 - protein, 15 aa, Homo sapiens
  CDR3 for beta chain variable domain of TCR clone 264692 (TRBV28, TRBJ2-5)
CASSPGQGSIETQYF

SEQ ID NO: 529385 - protein, 16 aa, Homo sapiens
  CDR3 for alpha chain variable domain of TCR clone 264693 (TRAV21, TRAJ37)
CAVRTAGSSNTDKLIF

SEQ ID NO: 529386 - protein, 13 aa, Homo sapiens
  CDR3 for beta chain variable domain of TCR clone 264693 (TRBV7-9, TRBJ2-5)
CASLASGRETQYF

SEQ ID NO: 529387 - protein, 14 aa, Homo sapiens
  CDR3 for alpha chain variable domain of TCR clone 264694 (TRAV1-2, TRAJ16)
CAVNRFSDGKKLLF

SEQ ID NO: 529388 - protein, 12 aa, Homo sapiens
  CDR3 for beta chain variable domain of TCR clone 264694 (TRBV7-8, TRBJ2-7)
CASSLGDREQYF

SEQ ID NO: 529389 - protein, 13 aa, Homo sapiens
  CDR3 for alpha chain variable domain of TCR clone 264695 (TRAV27, TRAJ11)
CAGARSGYSTLTF

SEQ ID NO: 529390 - protein, 15 aa, Homo sapiens
  CDR3 for beta chain variable domain of TCR clone 264695 (TRBV11-3, TRBJ2-5)
CASSLRGRVQETQYF

SEQ ID NO: 529391 - protein, 18 aa, Homo sapiens
  CDR3 for alpha chain variable domain of TCR clone 264696 (TRAV1-1, TRAJ42)
CAVSPSAFSGGSQGNLIF

SEQ ID NO: 529392 - protein, 14 aa, Homo sapiens
  CDR3 for beta chain variable domain of TCR clone 264696 (TRBV6-3, TRBJ2-7)
CASSYSTGGDEQYF

SEQ ID NO: 529393 - protein, 15 aa, Homo sapiens
  CDR3 for alpha chain variable domain of TCR clone 264697 (TRAV35, TRAJ40)
CAGQLGTSGTYKYIF

SEQ ID NO: 529394 - protein, 15 aa, Homo sapiens
  CDR3 for beta chain variable domain of TCR clone 264697 (TRBV7-9, TRBJ1-6)
CASSSPGRGNSPLHF

SEQ ID NO: 529395 - protein, 14 aa, Homo sapiens
  CDR3 for alpha chain variable domain of TCR clone 264698 (TRAV12-3, TRAJ58)
CAMSTETSGSWLTF

SEQ ID NO: 529396 - protein, 13 aa, Homo sapiens
  CDR3 for beta chain variable domain of TCR clone 264698 (TRBV27, TRBJ2-3)
CASSWGRTDTQYF

SEQ ID NO: 529397 - protein, 14 aa, Homo sapiens
  CDR3 for alpha chain variable domain of TCR clone 264699 (TRAV17, TRAJ22)
CATSHSGSARQLTF

SEQ ID NO: 529398 - protein, 13 aa, Homo sapiens
  CDR3 for beta chain variable domain of TCR clone 264699 (TRBV12-4, TRBJ1-2)
CASSLRQGKGYTF

SEQ ID NO: 529399 - protein, 10 aa, Homo sapiens
  CDR3 for alpha chain variable domain of TCR clone 264700 (TRAV27, TRAJ43)
CAGANNDMRF

SEQ ID NO: 529400 - protein, 15 aa, Homo sapiens
  CDR3 for beta chain variable domain of TCR clone 264700 (TRBV5-1, TRBJ1-1)
CASSLGQGRFAEAFF

SEQ ID NO: 529401 - protein, 14 aa, Homo sapiens
  CDR3 for alpha chain variable domain of TCR clone 264701 (TRAV26-1, TRAJ21)
CIVRVVYNFNKFYF

SEQ ID NO: 529402 - protein, 11 aa, Homo sapiens
  CDR3 for beta chain variable domain of TCR clone 264701 (TRBV5-6, TRBJ2-5)
CPSSLERTQYF

SEQ ID NO: 529403 - protein, 11 aa, Homo sapiens
  CDR3 for alpha chain variable domain of TCR clone 264702 (TRAV12-1, TRAJ30)
CVVNGQDKIIF

SEQ ID NO: 529404 - protein, 18 aa, Homo sapiens
  CDR3 for beta chain variable domain of TCR clone 264702 (TRBV24-1, TRBJ2-2)
CATGLSTGQWTQTGELFF

SEQ ID NO: 529405 - protein, 13 aa, Homo sapiens
  CDR3 for alpha chain variable domain of TCR clone 264703 (TRAV2, TRAJ40)
CAVVTSGTYKYIF

SEQ ID NO: 529406 - protein, 13 aa, Homo sapiens
  CDR3 for beta chain variable domain of TCR clone 264703 (TRBV27, TRBJ2-1)
CASRTLGVGEQFF

SEQ ID NO: 529407 - protein, 16 aa, Homo sapiens
  CDR3 for alpha chain variable domain of TCR clone 264704 (TRAV38-1, TRAJ45)
CAFMKGSGGGADGLTF

SEQ ID NO: 529408 - protein, 15 aa, Homo sapiens
  CDR3 for beta chain variable domain of TCR clone 264704 (TRBV20-1, TRBJ2-7)
CSAREGRDSLYEQCF

SEQ ID NO: 529409 - protein, 13 aa, Homo sapiens
  CDR3 for alpha chain variable domain of TCR clone 264705 (TRAV21, TRAJ45)
CAVPGGGADGLTF

SEQ ID NO: 529410 - protein, 17 aa, Homo sapiens
  CDR3 for beta chain variable domain of TCR clone 264705 (TRBV11-2, TRBJ2-1)
CASSLYPPGVEYNEQFF

SEQ ID NO: 529411 - protein, 11 aa, Homo sapiens
  CDR3 for alpha chain variable domain of TCR clone 264706 (TRAV2, TRAJ13)
CASGGYQKVTF

SEQ ID NO: 529412 - protein, 15 aa, Homo sapiens
  CDR3 for beta chain variable domain of TCR clone 264706 (TRBV29-1, TRBJ2-1)
CSGRDKKSSYNEQFF

SEQ ID NO: 529413 - protein, 17 aa, Homo sapiens
  CDR3 for alpha chain variable domain of TCR clone 264707 (TRAV12-1, TRAJ13)
CVVNKRGEFWGLPESYL

SEQ ID NO: 529414 - protein, 17 aa, Homo sapiens
  CDR3 for beta chain variable domain of TCR clone 264707 (TRBV4-3, TRBJ2-1)
CASSQFSSGRASGEQFF

SEQ ID NO: 529415 - protein, 15 aa, Homo sapiens
  CDR3 for alpha chain variable domain of TCR clone 264708 (TRAV2, TRAJ28)
CAVPYSGAGSYQLTF

SEQ ID NO: 529416 - protein, 17 aa, Homo sapiens
  CDR3 for beta chain variable domain of TCR clone 264708 (TRBV20-1, TRBJ2-4)
CSARDCASGGRENIQYF

SEQ ID NO: 529417 - protein, 16 aa, Homo sapiens
  CDR3 for alpha chain variable domain of TCR clone 264709 (TRAV3, TRAJ28)
CAVLPRSGAGSYQLTF

SEQ ID NO: 529418 - protein, 13 aa, Homo sapiens
  CDR3 for beta chain variable domain of TCR clone 264709 (TRBV12-4, TRBJ2-5)
SASRLAVQETQYF

SEQ ID NO: 529419 - protein, 16 aa, Homo sapiens
  CDR3 for alpha chain variable domain of TCR clone 264710 (TRAV30, TRAJ24)
CGTEIGDADSWGKFQF

SEQ ID NO: 529420 - protein, 14 aa, Homo sapiens
  CDR3 for beta chain variable domain of TCR clone 264710 (TRBV13, TRBJ2-1)
CASSPRPRYNEQFF

SEQ ID NO: 529421 - protein, 11 aa, Homo sapiens
  CDR3 for alpha chain variable domain of TCR clone 264711 (TRAV12-2, TRAJ49)
CAVNTGNQFYF

SEQ ID NO: 529422 - protein, 13 aa, Homo sapiens
  CDR3 for beta chain variable domain of TCR clone 264711 (TRBV24-1, TRBJ2-2)
CATSDWSTGELFF

SEQ ID NO: 529423 - protein, 16 aa, Homo sapiens
  CDR3 for alpha chain variable domain of TCR clone 264712 (TRAV16, TRAJ4)
CALHFSGGYNKLILEQ

SEQ ID NO: 529424 - protein, 15 aa, Homo sapiens
  CDR3 for beta chain variable domain of TCR clone 264712 (TRBV7-2, TRBJ2-7)
CASSTRLAGVDEQYF

SEQ ID NO: 529425 - protein, 13 aa, Homo sapiens
  CDR3 for alpha chain variable domain of TCR clone 264713 (TRAV21, TRAJ27)
CAARPGNAGRSTV

SEQ ID NO: 529426 - protein, 14 aa, Homo sapiens
  CDR3 for beta chain variable domain of TCR clone 264713 (TRBV7-6, TRBJ2-3)
CASSLGTVTDTQYF

SEQ ID NO: 529427 - protein, 15 aa, Homo sapiens
  CDR3 for alpha chain variable domain of TCR clone 264714 (TRAV8-3, TRAJ27)
CAVGTSKTNAGKSTF

SEQ ID NO: 529428 - protein, 13 aa, Homo sapiens
  CDR3 for beta chain variable domain of TCR clone 264714 (TRBV7-2, TRBJ2-2)
CASSLAVTGELFF

SEQ ID NO: 529429 - protein, 12 aa, Homo sapiens
  CDR3 for alpha chain variable domain of TCR clone 264715 (TRAV23/DV6, TRAJ24)
CAANDSWGKLQF

SEQ ID NO: 529430 - protein, 17 aa, Homo sapiens
  CDR3 for beta chain variable domain of TCR clone 264715 (TRBV19, TRBJ2-7)
CASSISFYDSYPYEQYF

SEQ ID NO: 529431 - protein, 12 aa, Homo sapiens
  CDR3 for alpha chain variable domain of TCR clone 264716 (TRAV12-3, TRAJ17)
CAMTPTGNELTF

SEQ ID NO: 529432 - protein, 15 aa, Homo sapiens
  CDR3 for beta chain variable domain of TCR clone 264716 (TRBV20-1, TRBJ2-7)
CSARDRVSGMDEQYF

SEQ ID NO: 529433 - protein, 12 aa, Homo sapiens
  CDR3 for alpha chain variable domain of TCR clone 264717 (TRAV1-2, TRAJ26)
CAVRYYGQNFVF

SEQ ID NO: 529434 - protein, 14 aa, Homo sapiens
  CDR3 for beta chain variable domain of TCR clone 264717 (TRBV11-1, TRBJ2-7)
CAISFRQGSYEQYF

SEQ ID NO: 529435 - protein, 15 aa, Homo sapiens
  CDR3 for alpha chain variable domain of TCR clone 264718 (TRAV8-3, TRAJ45)
CASSYSGGGADGLTF

SEQ ID NO: 529436 - protein, 16 aa, Homo sapiens
  CDR3 for beta chain variable domain of TCR clone 264718 (TRBV10-3, TRBJ2-1)
CAIRGGGRGDYNEQFF

SEQ ID NO: 529437 - protein, 15 aa, Homo sapiens
  CDR3 for alpha chain variable domain of TCR clone 264719 (TRAV26-1, TRAJ22)
CIVRVSFWFCKATDL

SEQ ID NO: 529438 - protein, 14 aa, Homo sapiens
  CDR3 for beta chain variable domain of TCR clone 264719 (TRBV28, TRBJ2-7)
CASSLGVPTYEQYF

SEQ ID NO: 529439 - protein, 14 aa, Homo sapiens
  CDR3 for alpha chain variable domain of TCR clone 264720 (TRAV12-2, TRAJ15)
CAPHTGQAGTALIF

SEQ ID NO: 529440 - protein, 14 aa, Homo sapiens
  CDR3 for beta chain variable domain of TCR clone 264720 (TRBV7-2, TRBJ2-7)
CASSPKTSCYEQYF

SEQ ID NO: 529441 - protein, 13 aa, Homo sapiens
  CDR3 for alpha chain variable domain of TCR clone 264721 (TRAV21, TRAJ57)
CAVTQGGSGKLVF

SEQ ID NO: 529442 - protein, 12 aa, Homo sapiens
  CDR3 for beta chain variable domain of TCR clone 264721 (TRBV11-2, TRBJ2-2)
CASSLGGGELFF

SEQ ID NO: 529443 - protein, 13 aa, Homo sapiens
  CDR3 for alpha chain variable domain of TCR clone 264722 (TRAV27, TRAJ8)
CAGVPTGFQKLVF

SEQ ID NO: 529444 - protein, 15 aa, Homo sapiens
  CDR3 for beta chain variable domain of TCR clone 264722 (TRBV6-1, TRBJ2-7)
CASSESMGDFYEQYF

SEQ ID NO: 529445 - protein, 13 aa, Homo sapiens
  CDR3 for alpha chain variable domain of TCR clone 264723 (TRAV4, TRAJ36)
CLVGPTGANNLFF

SEQ ID NO: 529446 - protein, 15 aa, Homo sapiens
  CDR3 for beta chain variable domain of TCR clone 264723 (TRBV9, TRBJ1-6)
CACSVAGTGGSPLHF

SEQ ID NO: 529447 - protein, 13 aa, Homo sapiens
  CDR3 for alpha chain variable domain of TCR clone 264724 (TRAV26-1, )
CIVSHRVEGVWNQ

SEQ ID NO: 529448 - protein, 14 aa, Homo sapiens
  CDR3 for beta chain variable domain of TCR clone 264724 (TRBV20-1, TRBJ2-7)
FSAWTALSSYEQYF

SEQ ID NO: 529449 - protein, 11 aa, Homo sapiens
  CDR3 for alpha chain variable domain of TCR clone 264725 (TRAV2, TRAJ33)
CAVDSNYQLIW

SEQ ID NO: 529450 - protein, 15 aa, Homo sapiens
  CDR3 for beta chain variable domain of TCR clone 264725 (TRBV15, TRBJ1-1)
CATSLQRGRNTEAFF

SEQ ID NO: 529451 - protein, 13 aa, Homo sapiens
  CDR3 for alpha chain variable domain of TCR clone 264726 (TRAV27, TRAJ54)
CAGAGQGAQKLVF

SEQ ID NO: 529452 - protein, 15 aa, Homo sapiens
  CDR3 for beta chain variable domain of TCR clone 264726 (TRBV18, TRBJ2-6)
CASSPSYAGANVLSF

SEQ ID NO: 529453 - protein, 13 aa, Homo sapiens
  CDR3 for alpha chain variable domain of TCR clone 264727 (TRAV21, TRAJ27)
CAARPGNAGKSTF

SEQ ID NO: 529454 - protein, 15 aa, Homo sapiens
  CDR3 for beta chain variable domain of TCR clone 264727 (TRBV2, TRBJ2-3)
CASSDAGGPPDTQYL

SEQ ID NO: 529455 - protein, 15 aa, Homo sapiens
  CDR3 for alpha chain variable domain of TCR clone 264728 (TRAV8-3, TRAJ45)
CASSYSGGGADGLTF

SEQ ID NO: 529456 - protein, 22 aa, Homo sapiens
  CDR3 for beta chain variable domain of TCR clone 264728 (TRBV11-2, TRBJ1-4)
CASSLDITRRGIPRKDNEKLFF

SEQ ID NO: 529457 - protein, 14 aa, Homo sapiens
  CDR3 for alpha chain variable domain of TCR clone 264729 (TRAV8-4, TRAJ8)
CAVSEDTGFLKLVF

SEQ ID NO: 529458 - protein, 13 aa, Homo sapiens
  CDR3 for beta chain variable domain of TCR clone 264729 (TRBV7-9, TRBJ1-2)
CASSLKQNYGYTF

SEQ ID NO: 529459 - protein, 16 aa, Homo sapiens
  CDR3 for alpha chain variable domain of TCR clone 264730 (TRAV26-1, TRAJ23)
CIVRVHPYNQGGELIF

SEQ ID NO: 529460 - protein, 15 aa, Homo sapiens
  CDR3 for beta chain variable domain of TCR clone 264730 (TRBV5-7, TRBJ2-7)
CASSPYFEGSYEQYF

SEQ ID NO: 529461 - protein, 17 aa, Homo sapiens
  CDR3 for alpha chain variable domain of TCR clone 264731 (TRAV3, TRAJ28)
CAVREAYSGAGSYQLTF

SEQ ID NO: 529462 - protein, 18 aa, Homo sapiens
  CDR3 for beta chain variable domain of TCR clone 264731 (TRBV27, TRBJ2-1)
CASGNRAVGVGSKNEQFI

SEQ ID NO: 529463 - protein, 15 aa, Homo sapiens
  CDR3 for alpha chain variable domain of TCR clone 264732 (TRAV3, TRAJ3)
CAVRDRDSRASKIIF

SEQ ID NO: 529464 - protein, 18 aa, Homo sapiens
  CDR3 for beta chain variable domain of TCR clone 264732 (TRBV25-1, TRBJ1-2)
CASSGLQNGQGLIFGCTF

SEQ ID NO: 529465 - protein, 13 aa, Homo sapiens
  CDR3 for alpha chain variable domain of TCR clone 264733 (TRAV16, TRAJ9)
CALLNTGGFKTIF

SEQ ID NO: 529466 - protein, 15 aa, Homo sapiens
  CDR3 for beta chain variable domain of TCR clone 264733 (TRBV7-9, TRBJ1-4)
CASSARTGGNEKLFF

SEQ ID NO: 529467 - protein, 11 aa, Homo sapiens
  CDR3 for alpha chain variable domain of TCR clone 264734 (TRAV21, TRAJ11)
CAVNGYSTLTF

SEQ ID NO: 529468 - protein, 15 aa, Homo sapiens
  CDR3 for beta chain variable domain of TCR clone 264734 (TRBV6-3, TRBJ2-7)
CASSAPGTVFYEQYF

SEQ ID NO: 529469 - protein, 14 aa, Homo sapiens
  CDR3 for alpha chain variable domain of TCR clone 264735 (TRAV38-1, TRAJ45)
FSSHSVGGADGLTF

SEQ ID NO: 529470 - protein, 13 aa, Homo sapiens
  CDR3 for beta chain variable domain of TCR clone 264735 (TRBV10-3, TRBJ1-2)
CAISERDSYGYTF

SEQ ID NO: 529471 - protein, 14 aa, Homo sapiens
  CDR3 for alpha chain variable domain of TCR clone 264736 (TRAV27, TRAJ13)
CRSSNSGGYQKVTF

SEQ ID NO: 529472 - protein, 16 aa, Homo sapiens
  CDR3 for beta chain variable domain of TCR clone 264736 (TRBV7-9, TRBJ2-3)
CASSPWREVGTDTQYF

SEQ ID NO: 529473 - protein, 15 aa, Homo sapiens
  CDR3 for alpha chain variable domain of TCR clone 264737 (TRAV26-1, TRAJ29)
CIVRVEGSGNTPLGI

SEQ ID NO: 529474 - protein, 15 aa, Homo sapiens
  CDR3 for beta chain variable domain of TCR clone 264737 (TRBV7-9, TRBJ1-5)
CASSQGHQPNQPQHF

SEQ ID NO: 529475 - protein, 13 aa, Homo sapiens
  CDR3 for alpha chain variable domain of TCR clone 264738 (TRAV6, TRAJ37)
CSRSRSNTGKLIF

SEQ ID NO: 529476 - protein, 16 aa, Homo sapiens
  CDR3 for beta chain variable domain of TCR clone 264738 (TRBV9, TRBJ2-2)
CASSAMGKGNTGELFF

SEQ ID NO: 529477 - protein, 16 aa, Homo sapiens
  CDR3 for alpha chain variable domain of TCR clone 264739 (TRAV27, TRAJ53)
CAAPEGSGGSNYKLTF

SEQ ID NO: 529478 - protein, 12 aa, Homo sapiens
  CDR3 for beta chain variable domain of TCR clone 264739 (TRBV7-8, TRBJ2-7)
CASSLGDREQYF

SEQ ID NO: 529479 - protein, 14 aa, Homo sapiens
  CDR3 for alpha chain variable domain of TCR clone 264740 (TRAV38-1, TRAJ29)
CAFITPSGNTPLVF

SEQ ID NO: 529480 - protein, 14 aa, Homo sapiens
  CDR3 for beta chain variable domain of TCR clone 264740 (TRBV18, TRBJ2-7)
WASSPRGGAYEQYF

SEQ ID NO: 529481 - protein, 15 aa, Homo sapiens
  CDR3 for alpha chain variable domain of TCR clone 264741 (TRAV8-3, TRAJ45)
CASSYSGGGAYGLTF

SEQ ID NO: 529482 - protein, 13 aa, Homo sapiens
  CDR3 for beta chain variable domain of TCR clone 264741 (TRBV10-3, TRBJ2-7)
CASKLAVNYGQYF

SEQ ID NO: 529483 - protein, 15 aa, Homo sapiens
  CDR3 for alpha chain variable domain of TCR clone 264742 (TRAV4, TRAJ5)
CLVGAMDTGRRALTF

SEQ ID NO: 529484 - protein, 13 aa, Homo sapiens
  CDR3 for beta chain variable domain of TCR clone 264742 (TRBV20-1, TRBJ1-1)
CSAGTVGNTEAFF

SEQ ID NO: 529485 - protein, 13 aa, Homo sapiens
  CDR3 for alpha chain variable domain of TCR clone 264743 (TRAV1-1, TRAJ33)
CASHMDSNYQLIC

SEQ ID NO: 529486 - protein, 18 aa, Homo sapiens
  CDR3 for beta chain variable domain of TCR clone 264743 (TRBV20-1, TRBJ2-2)
CSARVQTARPSGTGELFF

SEQ ID NO: 529487 - protein, 12 aa, Homo sapiens
  CDR3 for alpha chain variable domain of TCR clone 264744 (TRAV16, TRAJ13)
CITLRGYQKVTF

SEQ ID NO: 529488 - protein, 17 aa, Homo sapiens
  CDR3 for beta chain variable domain of TCR clone 264744 (TRBV28, TRBJ2-5)
CASSRQGGLAGAETQCF

SEQ ID NO: 529489 - protein, 15 aa, Homo sapiens
  CDR3 for alpha chain variable domain of TCR clone 264745 (TRAV3, TRAJ22)
CAVRDRGGSSRQLTF

SEQ ID NO: 529490 - protein, 14 aa, Homo sapiens
  CDR3 for beta chain variable domain of TCR clone 264745 (TRBV20-1, TRBJ2-5)
CSALVPGYQETQYF

SEQ ID NO: 529491 - protein, 11 aa, Homo sapiens
  CDR3 for alpha chain variable domain of TCR clone 264746 (TRAV1-2, TRAJ20)
CAVANDYKLSF

SEQ ID NO: 529492 - protein, 17 aa, Homo sapiens
  CDR3 for beta chain variable domain of TCR clone 264746 (TRBV3-1, TRBJ2-2)
CASSQFRDKVDTGELFF

SEQ ID NO: 529493 - protein, 10 aa, Homo sapiens
  CDR3 for alpha chain variable domain of TCR clone 264747 (TRAV12-3, TRAJ49)
CAMNDDQFYF

SEQ ID NO: 529494 - protein, 11 aa, Homo sapiens
  CDR3 for beta chain variable domain of TCR clone 264747 (TRBV6-1, TRBJ2-1)
CASISSNEQFF

SEQ ID NO: 529495 - protein, 13 aa, Homo sapiens
  CDR3 for alpha chain variable domain of TCR clone 264748 (TRAV1-1, TRAJ9)
CAAKNTGGFNTIF

SEQ ID NO: 529496 - protein, 15 aa, Homo sapiens
  CDR3 for beta chain variable domain of TCR clone 264748 (TRBV20-1, TRBJ2-7)
CSARDRVSGMDEQYF

SEQ ID NO: 529497 - protein, 12 aa, Homo sapiens
  CDR3 for alpha chain variable domain of TCR clone 264749 (TRAV2, TRAJ9)
CAVGAGGFKTIF

SEQ ID NO: 529498 - protein, 21 aa, Homo sapiens
  CDR3 for beta chain variable domain of TCR clone 264749 (TRBV7-2, TRBJ2-2)
RRTRPCISVPAARFGPGSCFF

SEQ ID NO: 529499 - protein, 13 aa, Homo sapiens
  CDR3 for alpha chain variable domain of TCR clone 264750 (TRAV29/DV5, TRAJ31)
CAASRNNNARPMF

SEQ ID NO: 529500 - protein, 12 aa, Homo sapiens
  CDR3 for beta chain variable domain of TCR clone 264750 (TRBV14, TRBJ1-1)
CASSQLKGLAFF

SEQ ID NO: 529501 - protein, 17 aa, Homo sapiens
  CDR3 for alpha chain variable domain of TCR clone 264751 (TRAV26-1, TRAJ47)
CIVPSLLYMEYGNKLVF

SEQ ID NO: 529502 - protein, 14 aa, Homo sapiens
  CDR3 for beta chain variable domain of TCR clone 264751 (TRBV7-3, TRBJ1-5)
RASRFSGCNQPQHF

SEQ ID NO: 529503 - protein, 18 aa, Homo sapiens
  CDR3 for alpha chain variable domain of TCR clone 264752 (TRAV21, TRAJ52)
CAVRPSPAGGTSYGKLTF

SEQ ID NO: 529504 - protein, 22 aa, Homo sapiens
  CDR3 for beta chain variable domain of TCR clone 264752 (TRBV13, TRBJ2-3)
CASSLSRVAGGEEYAVCWPRHP

SEQ ID NO: 529505 - protein, 10 aa, Homo sapiens
  CDR3 for alpha chain variable domain of TCR clone 264753 (TRAV16, TRAJ54)
CALKVRGAQA

SEQ ID NO: 529506 - protein, 13 aa, Homo sapiens
  CDR3 for beta chain variable domain of TCR clone 264753 (TRBV20-1, TRBJ1-1)
CSARGGGNTEAFF

SEQ ID NO: 529507 - protein, 14 aa, Homo sapiens
  CDR3 for alpha chain variable domain of TCR clone 264754 (TRAV13-1, TRAJ3)
CAASKSSSASKIIL

SEQ ID NO: 529508 - protein, 13 aa, Homo sapiens
  CDR3 for beta chain variable domain of TCR clone 264754 (TRBV25-1, TRBJ2-5)
CASSESGRETQYF

SEQ ID NO: 529509 - protein, 15 aa, Homo sapiens
  CDR3 for alpha chain variable domain of TCR clone 264755 (TRAV13-1, TRAJ44)
CAASRGGGTASKLTF

SEQ ID NO: 529510 - protein, 17 aa, Homo sapiens
  CDR3 for beta chain variable domain of TCR clone 264755 (TRBV7-2, TRBJ2-3)
CASSPQGRARVQDTQYF

SEQ ID NO: 529511 - protein, 16 aa, Homo sapiens
  CDR3 for alpha chain variable domain of TCR clone 264756 (TRAV12-2, TRAJ37)
CAVKEKGSSNTGKLIF

SEQ ID NO: 529512 - protein, 14 aa, Homo sapiens
  CDR3 for beta chain variable domain of TCR clone 264756 (TRBV18, TRBJ2-5)
CASSPGVSQETQHL

SEQ ID NO: 529513 - protein, 13 aa, Homo sapiens
  CDR3 for alpha chain variable domain of TCR clone 264757 (TRAV3, TRAJ21)
CAVREQDFNKFYF

SEQ ID NO: 529514 - protein, 14 aa, Homo sapiens
  CDR3 for beta chain variable domain of TCR clone 264757 (TRBV4-1, TRBJ2-2)
CASSQAVNTGELFF

SEQ ID NO: 529515 - protein, 15 aa, Homo sapiens
  CDR3 for alpha chain variable domain of TCR clone 264758 (TRAV12-3, TRAJ10)
CASYIRTGGGNKLTF

SEQ ID NO: 529516 - protein, 15 aa, Homo sapiens
  CDR3 for beta chain variable domain of TCR clone 264758 (TRBV7-2, TRBJ1-6)
CASSLGPDRGMPLHF

SEQ ID NO: 529517 - protein, 18 aa, Homo sapiens
  CDR3 for alpha chain variable domain of TCR clone 264759 (TRAV13-1, TRAJ52)
CAASKRSAGGTSYGKLTF

SEQ ID NO: 529518 - protein, 15 aa, Homo sapiens
  CDR3 for beta chain variable domain of TCR clone 264759 (TRBV12-4, TRBJ1-2)
CTSVPSLRQGKGYTF

SEQ ID NO: 529519 - protein, 12 aa, Homo sapiens
  CDR3 for alpha chain variable domain of TCR clone 264760 (TRAV17, TRAJ49)
CATFTTGNQFYF

SEQ ID NO: 529520 - protein, 18 aa, Homo sapiens
  CDR3 for beta chain variable domain of TCR clone 264760 (TRBV11-2, TRBJ2-6)
CASSLNPFLGTGANVLTF

SEQ ID NO: 529521 - protein, 14 aa, Homo sapiens
  CDR3 for alpha chain variable domain of TCR clone 264761 (TRAV1-1, TRAJ5)
CAVRDGAGRRELTF

SEQ ID NO: 529522 - protein, 14 aa, Homo sapiens
  CDR3 for beta chain variable domain of TCR clone 264761 (TRBV28, TRBJ2-1)
CASSYYTAYNEQFF

SEQ ID NO: 529523 - protein, 12 aa, Homo sapiens
  CDR3 for alpha chain variable domain of TCR clone 264762 (TRAV8-3, TRAJ26)
WAGDNYGQNFVF

SEQ ID NO: 529524 - protein, 15 aa, Homo sapiens
  CDR3 for beta chain variable domain of TCR clone 264762 (TRBV9, TRBJ2-1)
CASSLAGSSYNEQFF

SEQ ID NO: 529525 - protein, 17 aa, Homo sapiens
  CDR3 for alpha chain variable domain of TCR clone 264763 (TRAV3, TRAJ32)
CAVRAWDYGGATNKLIF

SEQ ID NO: 529526 - protein, 16 aa, Homo sapiens
  CDR3 for beta chain variable domain of TCR clone 264763 (TRBV27, TRBJ2-2)
CASSSSGVSNTGELFF

SEQ ID NO: 529527 - protein, 11 aa, Homo sapiens
  CDR3 for alpha chain variable domain of TCR clone 264764 (TRAV2, TRAJ33)
CAVDSNYQLIW

SEQ ID NO: 529528 - protein, 15 aa, Homo sapiens
  CDR3 for beta chain variable domain of TCR clone 264764 (TRBV19, TRBJ1-2)
CASSVGQVLTYGYTF

SEQ ID NO: 529529 - protein, 13 aa, Homo sapiens
  CDR3 for alpha chain variable domain of TCR clone 264765 (TRAV3, TRAJ21)
CAVREPDFNKFYF

SEQ ID NO: 529530 - protein, 15 aa, Homo sapiens
  CDR3 for beta chain variable domain of TCR clone 264765 (TRBV2, TRBJ2-1)
RASSELAGGYNEQFF

SEQ ID NO: 529531 - protein, 13 aa, Homo sapiens
  CDR3 for alpha chain variable domain of TCR clone 264766 (TRAV2, TRAJ40)
YAVVTSGTYKYIF

SEQ ID NO: 529532 - protein, 13 aa, Homo sapiens
  CDR3 for beta chain variable domain of TCR clone 264766 (TRBV19, TRBJ2-1)
CQSDFRFSGEQFV

SEQ ID NO: 529533 - protein, 14 aa, Homo sapiens
  CDR3 for alpha chain variable domain of TCR clone 264767 (TRAV34, TRAJ44)
CGADGTGTASKLTF

SEQ ID NO: 529534 - protein, 15 aa, Homo sapiens
  CDR3 for beta chain variable domain of TCR clone 264767 (TRBV7-3, TRBJ2-2)
CASKANGANTGELFF

SEQ ID NO: 529535 - protein, 11 aa, Homo sapiens
  CDR3 for alpha chain variable domain of TCR clone 264768 (TRAV1-2, TRAJ20)
CAVSNDYKLSF

SEQ ID NO: 529536 - protein, 13 aa, Homo sapiens
  CDR3 for beta chain variable domain of TCR clone 264768 (TRBV19, TRBJ2-7)
CASSKQGGYEQYF

SEQ ID NO: 529537 - protein, 15 aa, Homo sapiens
  CDR3 for alpha chain variable domain of TCR clone 264769 (TRAV26-1, TRAJ22)
CIVRVSFWFCNATDL

SEQ ID NO: 529538 - protein, 15 aa, Homo sapiens
  CDR3 for beta chain variable domain of TCR clone 264769 (TRBV9, TRBJ1-6)
CASGVAGTGDSPLHF

SEQ ID NO: 529539 - protein, 12 aa, Homo sapiens
  CDR3 for alpha chain variable domain of TCR clone 264770 (TRAV35, TRAJ39)
LAPNNAGNMLTF

SEQ ID NO: 529540 - protein, 16 aa, Homo sapiens
  CDR3 for beta chain variable domain of TCR clone 264770 (TRBV2, TRBJ2-3)
CASSTSVEGVTDAQYF

SEQ ID NO: 529541 - protein, 15 aa, Homo sapiens
  CDR3 for alpha chain variable domain of TCR clone 264771 (TRAV2, TRAJ9)
CAVEDRGTGGFKTIF

SEQ ID NO: 529542 - protein, 14 aa, Homo sapiens
  CDR3 for beta chain variable domain of TCR clone 264771 (TRBV4-1, TRBJ2-2)
CASSQAVNTGELFV

SEQ ID NO: 529543 - protein, 16 aa, Homo sapiens
  CDR3 for alpha chain variable domain of TCR clone 264772 (TRAV23/DV6, )
CADIQNPDPAVYPLRD

SEQ ID NO: 529544 - protein, 13 aa, Homo sapiens
  CDR3 for beta chain variable domain of TCR clone 264772 (TRBV28, TRBJ2-7)
CASRSSGVYEQYF

SEQ ID NO: 529545 - protein, 11 aa, Homo sapiens
  CDR3 for alpha chain variable domain of TCR clone 264773 (TRAV4, TRAJ31)
CLVGDNARLMF

SEQ ID NO: 529546 - protein, 14 aa, Homo sapiens
  CDR3 for beta chain variable domain of TCR clone 264773 (TRBV7-9, TRBJ2-7)
CASSLVAGPYEQYF

SEQ ID NO: 529547 - protein, 14 aa, Homo sapiens
  CDR3 for alpha chain variable domain of TCR clone 264774 (TRAV1-2, TRAJ8)
CAVRGDTGFQKLVF

SEQ ID NO: 529548 - protein, 19 aa, Homo sapiens
  CDR3 for beta chain variable domain of TCR clone 264774 (TRBV7-2, TRBJ2-3)
CASSFLSRNWGGGTDTQYF

SEQ ID NO: 529549 - protein, 15 aa, Homo sapiens
  CDR3 for alpha chain variable domain of TCR clone 264775 (TRAV17, TRAJ37)
CATDHGSSNTGKLIF

SEQ ID NO: 529550 - protein, 15 aa, Homo sapiens
  CDR3 for beta chain variable domain of TCR clone 264775 (TRBV7-2, TRBJ2-7)
CASSWGQGAIYEQYF

SEQ ID NO: 529551 - protein, 13 aa, Homo sapiens
  CDR3 for alpha chain variable domain of TCR clone 264776 (TRAV12-3, TRAJ33)
CAMSGKSNYQLIW

SEQ ID NO: 529552 - protein, 15 aa, Homo sapiens
  CDR3 for beta chain variable domain of TCR clone 264776 (TRBV11-2, TRBJ1-3)
CASSLDGTVGNTIYF

SEQ ID NO: 529553 - protein, 18 aa, Homo sapiens
  CDR3 for alpha chain variable domain of TCR clone 264777 (TRAV12-3, TRAJ52)
CAMSRTNAGGTSYGKLTF

SEQ ID NO: 529554 - protein, 17 aa, Homo sapiens
  CDR3 for beta chain variable domain of TCR clone 264777 (TRBV7-3, TRBJ2-3)
CASSLMKRMRGADTQYC

SEQ ID NO: 529555 - protein, 12 aa, Homo sapiens
  CDR3 for alpha chain variable domain of TCR clone 264778 (TRAV12-1, TRAJ40)
CVFYSGTYKYIF

SEQ ID NO: 529556 - protein, 16 aa, Homo sapiens
  CDR3 for beta chain variable domain of TCR clone 264778 (TRBV27, TRBJ2-5)
CASSLLAGGFQETQYF

SEQ ID NO: 529557 - protein, 13 aa, Homo sapiens
  CDR3 for alpha chain variable domain of TCR clone 264779 (TRAV2, TRAJ29)
CAVYSSGNTPLVF

SEQ ID NO: 529558 - protein, 14 aa, Homo sapiens
  CDR3 for beta chain variable domain of TCR clone 264779 (TRBV7-9, TRBJ1-1)
CASSLGGLKTEAFF

SEQ ID NO: 529559 - protein, 15 aa, Homo sapiens
  CDR3 for alpha chain variable domain of TCR clone 264780 (TRAV8-4, TRAJ7)
CAVSGGNYGNNRLAF

SEQ ID NO: 529560 - protein, 11 aa, Homo sapiens
  CDR3 for beta chain variable domain of TCR clone 264780 (TRBV20-1, TRBJ2-1)
CSLSSGSEQSF

SEQ ID NO: 529561 - protein, 12 aa, Homo sapiens
  CDR3 for alpha chain variable domain of TCR clone 264781 (TRAV16, TRAJ10)
CSRTGGGNKLTF

SEQ ID NO: 529562 - protein, 14 aa, Homo sapiens
  CDR3 for beta chain variable domain of TCR clone 264781 (TRBV20-1, TRBJ2-1)
CSAQIGGSANEQFF

SEQ ID NO: 529563 - protein, 18 aa, Homo sapiens
  CDR3 for alpha chain variable domain of TCR clone 264782 (TRAV23/DV6, TRAJ21)
CAASSGGGTTSTTFTLDL

SEQ ID NO: 529564 - protein, 11 aa, Homo sapiens
  CDR3 for beta chain variable domain of TCR clone 264782 (TRBV7-8, TRBJ2-7)
CASSLSHEQYF

SEQ ID NO: 529565 - protein, 18 aa, Homo sapiens
  CDR3 for alpha chain variable domain of TCR clone 264783 (TRAV21, TRAJ52)
CAVRPSPAGGTSYGKLTF

SEQ ID NO: 529566 - protein, 15 aa, Homo sapiens
  CDR3 for beta chain variable domain of TCR clone 264783 (TRBV7-8, TRBJ2-1)
CASSLADSLYNEQFF

SEQ ID NO: 529567 - protein, 15 aa, Homo sapiens
  CDR3 for alpha chain variable domain of TCR clone 264784 (TRAV8-2, TRAJ20)
CVVSDGVRGDYKLSF

SEQ ID NO: 529568 - protein, 16 aa, Homo sapiens
  CDR3 for beta chain variable domain of TCR clone 264784 (TRBV3-1, TRBJ1-2)
CASSQGQGVQRDGYTF

SEQ ID NO: 529569 - protein, 15 aa, Homo sapiens
  CDR3 for alpha chain variable domain of TCR clone 264785 (TRAV12-2, TRAJ53)
CAVDGGGGSNYKLTF

SEQ ID NO: 529570 - protein, 14 aa, Homo sapiens
  CDR3 for beta chain variable domain of TCR clone 264785 (TRBV18, TRBJ2-7)
CASSPRGGAYEQYF

SEQ ID NO: 529571 - protein, 11 aa, Homo sapiens
  CDR3 for alpha chain variable domain of TCR clone 264786 (TRAV2, TRAJ33)
CAVDSNYQLIW

SEQ ID NO: 529572 - protein, 15 aa, Homo sapiens
  CDR3 for beta chain variable domain of TCR clone 264786 (TRBV5-1, TRBJ2-1)
CASTGSGRTYNEQFF

SEQ ID NO: 529573 - protein, 15 aa, Homo sapiens
  CDR3 for alpha chain variable domain of TCR clone 264787 (TRAV20, TRAJ53)
CAVQASGGSDYKLTF

SEQ ID NO: 529574 - protein, 15 aa, Homo sapiens
  CDR3 for beta chain variable domain of TCR clone 264787 (TRBV9, TRBJ2-1)
CASSLAGSSYNEQFF

SEQ ID NO: 529575 - protein, 12 aa, Homo sapiens
  CDR3 for alpha chain variable domain of TCR clone 264788 (TRAV1-2, TRAJ29)
CAVPSGNTPLVF

SEQ ID NO: 529576 - protein, 14 aa, Homo sapiens
  CDR3 for beta chain variable domain of TCR clone 264788 (TRBV28, TRBJ2-7)
CASSSPGASYEQYF

SEQ ID NO: 529577 - protein, 11 aa, Homo sapiens
  CDR3 for alpha chain variable domain of TCR clone 264789 (TRAV3, TRAJ21)
CAMGNFNKFYF

SEQ ID NO: 529578 - protein, 14 aa, Homo sapiens
  CDR3 for beta chain variable domain of TCR clone 264789 (TRBV29-1, TRBJ2-2)
CSGRGSGNTGELFF

SEQ ID NO: 529579 - protein, 11 aa, Homo sapiens
  CDR3 for alpha chain variable domain of TCR clone 264790 (TRAV35, TRAJ12)
RRMDSSYKLIF

SEQ ID NO: 529580 - protein, 14 aa, Homo sapiens
  CDR3 for beta chain variable domain of TCR clone 264790 (TRBV19, TRBJ1-1)
CASSQNRGDTEAFF

SEQ ID NO: 529581 - protein, 17 aa, Homo sapiens
  CDR3 for alpha chain variable domain of TCR clone 264791 (TRAV17, TRAJ28)
CATDPRRGGAGSYQLTF

SEQ ID NO: 529582 - protein, 13 aa, Homo sapiens
  CDR3 for beta chain variable domain of TCR clone 264791 (TRBV12-5, TRBJ2-3)
CASGDRQSDTQYF

SEQ ID NO: 529583 - protein, 14 aa, Homo sapiens
  CDR3 for alpha chain variable domain of TCR clone 264792 (TRAV1-2, TRAJ16)
CAVNRFSDGQKLLF

SEQ ID NO: 529584 - protein, 14 aa, Homo sapiens
  CDR3 for beta chain variable domain of TCR clone 264792 (TRBV7-3, TRBJ1-1)
FASSLGTGYTEAFF

SEQ ID NO: 529585 - protein, 15 aa, Homo sapiens
  CDR3 for alpha chain variable domain of TCR clone 264793 (TRAV3, TRAJ21)
CAVRDRRYNFNKFYF

SEQ ID NO: 529586 - protein, 17 aa, Homo sapiens
  CDR3 for beta chain variable domain of TCR clone 264793 (TRBV19, TRBJ2-3)
CASSTLGVAGVKDTQYF

SEQ ID NO: 529587 - protein, 15 aa, Homo sapiens
  CDR3 for alpha chain variable domain of TCR clone 264794 (TRAV3, TRAJ4)
CAQNIFSGGYNKLIF

SEQ ID NO: 529588 - protein, 16 aa, Homo sapiens
  CDR3 for beta chain variable domain of TCR clone 264794 (TRBV3-1, TRBJ1-6)
CASSQEFQGSYSPLHF

SEQ ID NO: 529589 - protein, 14 aa, Homo sapiens
  CDR3 for alpha chain variable domain of TCR clone 264795 (TRAV12-1, TRAJ22)
CVVTTSGSARQLTF

SEQ ID NO: 529590 - protein, 15 aa, Homo sapiens
  CDR3 for beta chain variable domain of TCR clone 264795 (TRBV9, TRBJ1-2)
CSSVEEKVSPYGYTF

SEQ ID NO: 529591 - protein, 15 aa, Homo sapiens
  CDR3 for alpha chain variable domain of TCR clone 264796 (TRAV8-3, TRAJ45)
CASSYSGGGADGLTF

SEQ ID NO: 529592 - protein, 13 aa, Homo sapiens
  CDR3 for beta chain variable domain of TCR clone 264796 (TRBV7-9, TRBJ2-7)
CASSFAGDYEQYF

SEQ ID NO: 529593 - protein, 15 aa, Homo sapiens
  CDR3 for alpha chain variable domain of TCR clone 264797 (TRAV3, TRAJ47)
CAVRDIGEYGNKLVF

SEQ ID NO: 529594 - protein, 15 aa, Homo sapiens
  CDR3 for beta chain variable domain of TCR clone 264797 (TRBV4-1, TRBJ1-4)
CASSDTGGTNEKLFF

SEQ ID NO: 529595 - protein, 18 aa, Homo sapiens
  CDR3 for alpha chain variable domain of TCR clone 264798 (TRAV26-2, TRAJ54)
RILRDVEVGIQGAQKLVF

SEQ ID NO: 529596 - protein, 14 aa, Homo sapiens
  CDR3 for beta chain variable domain of TCR clone 264798 (TRBV20-1, TRBJ2-1)
CSAQIGGSANEQFF

SEQ ID NO: 529597 - protein, 14 aa, Homo sapiens
  CDR3 for alpha chain variable domain of TCR clone 264799 (TRAV30, TRAJ26)
CGTEIVSYGQNFVF

SEQ ID NO: 529598 - protein, 13 aa, Homo sapiens
  CDR3 for beta chain variable domain of TCR clone 264799 (TRBV19, TRBJ1-3)
SASRLSLGNTIYF

SEQ ID NO: 529599 - protein, 13 aa, Homo sapiens
  CDR3 for alpha chain variable domain of TCR clone 264800 (TRAV12-2, TRAJ42)
CAVKRGSQGNLIF

SEQ ID NO: 529600 - protein, 15 aa, Homo sapiens
  CDR3 for beta chain variable domain of TCR clone 264800 (TRBV7-9, TRBJ1-6)
CASSSPGRGNSPLHF

SEQ ID NO: 529601 - protein, 15 aa, Homo sapiens
  CDR3 for alpha chain variable domain of TCR clone 264801 (TRAV17, TRAJ57)
CATGPSQGGSENLVF

SEQ ID NO: 529602 - protein, 15 aa, Homo sapiens
  CDR3 for beta chain variable domain of TCR clone 264801 (TRBV7-9, TRBJ1-6)
CASSSPGRGNSPLHF

SEQ ID NO: 529603 - protein, 13 aa, Homo sapiens
  CDR3 for alpha chain variable domain of TCR clone 264802 (TRAV8-3, TRAJ20)
CAVGRPNDYKLSF

SEQ ID NO: 529604 - protein, 11 aa, Homo sapiens
  CDR3 for beta chain variable domain of TCR clone 264802 (TRBV12-4, TRBJ2-3)
CASTATDTQYF

SEQ ID NO: 529605 - protein, 12 aa, Homo sapiens
  CDR3 for alpha chain variable domain of TCR clone 264803 (TRAV12-2, TRAJ10)
WGVTGGGNKLTV

SEQ ID NO: 529606 - protein, 16 aa, Homo sapiens
  CDR3 for beta chain variable domain of TCR clone 264803 (TRBV7-3, TRBJ2-1)
CASSLVSGSSNNEQFF

SEQ ID NO: 529607 - protein, 14 aa, Homo sapiens
  CDR3 for alpha chain variable domain of TCR clone 264804 (TRAV8-3, TRAJ17)
CAVGAQTAGNKLTF

SEQ ID NO: 529608 - protein, 11 aa, Homo sapiens
  CDR3 for beta chain variable domain of TCR clone 264804 (TRBV29-1, TRBJ1-4)
CSVSSGDKLFF

SEQ ID NO: 529609 - protein, 14 aa, Homo sapiens
  CDR3 for alpha chain variable domain of TCR clone 264805 (TRAV12-2, TRAJ4)
CAEDLSGGYNKLIF

SEQ ID NO: 529610 - protein, 13 aa, Homo sapiens
  CDR3 for beta chain variable domain of TCR clone 264805 (TRBV7-9, TRBJ1-2)
CASSLKQNYGYSF

SEQ ID NO: 529611 - protein, 10 aa, Homo sapiens
  CDR3 for alpha chain variable domain of TCR clone 264806 (TRAV21, TRAJ43)
CAVRIGDMRF

SEQ ID NO: 529612 - protein, 13 aa, Homo sapiens
  CDR3 for beta chain variable domain of TCR clone 264806 (TRBV20-1, TRBJ2-7)
CSAPGLADYEQHF

SEQ ID NO: 529613 - protein, 13 aa, Homo sapiens
  CDR3 for alpha chain variable domain of TCR clone 264807 (TRAV1-2, TRAJ9)
CAVLNTGGFKTIF

SEQ ID NO: 529614 - protein, 14 aa, Homo sapiens
  CDR3 for beta chain variable domain of TCR clone 264807 (TRBV20-1, TRBJ2-3)
CSPRGGTSTDTQYF

SEQ ID NO: 529615 - protein, 15 aa, Homo sapiens
  CDR3 for alpha chain variable domain of TCR clone 264808 (TRAV12-3, TRAJ48)
CAMNAKNFGNEKLTF

SEQ ID NO: 529616 - protein, 14 aa, Homo sapiens
  CDR3 for beta chain variable domain of TCR clone 264808 (TRBV2, TRBJ1-6)
CASSESRNNSPLHC

SEQ ID NO: 529617 - protein, 14 aa, Homo sapiens
  CDR3 for alpha chain variable domain of TCR clone 264809 (TRAV26-1, TRAJ21)
CIAHTTSTNFTLDL

SEQ ID NO: 529618 - protein, 15 aa, Homo sapiens
  CDR3 for beta chain variable domain of TCR clone 264809 (TRBV20-1, TRBJ2-7)
GSARDRVSGMDEQYF

SEQ ID NO: 529619 - protein, 14 aa, Homo sapiens
  CDR3 for alpha chain variable domain of TCR clone 264810 (TRAV12-1, TRAJ17)
CVVNYKAAGNKLTF

SEQ ID NO: 529620 - protein, 14 aa, Homo sapiens
  CDR3 for beta chain variable domain of TCR clone 264810 (TRBV7-8, TRBJ2-3)
CASSLEAGTDTKYF

SEQ ID NO: 529621 - protein, 14 aa, Homo sapiens
  CDR3 for alpha chain variable domain of TCR clone 264811 (TRAV12-1, TRAJ17)
CLVNYKAAGNKLTF

SEQ ID NO: 529622 - protein, 12 aa, Homo sapiens
  CDR3 for beta chain variable domain of TCR clone 264811 (TRBV11-2, TRBJ2-2)
CASSLGGGELFF

SEQ ID NO: 529623 - protein, 15 aa, Homo sapiens
  CDR3 for alpha chain variable domain of TCR clone 264812 (TRAV13-1, TRAJ16)
CAARNQMARSCSLQG

SEQ ID NO: 529624 - protein, 13 aa, Homo sapiens
  CDR3 for beta chain variable domain of TCR clone 264812 (TRBV4-1, TRBJ2-1)
CASSQAGGDEQFF

SEQ ID NO: 529625 - protein, 15 aa, Homo sapiens
  CDR3 for alpha chain variable domain of TCR clone 264813 (TRAV3, TRAJ32)
CAVSSYGGATNKLIF

SEQ ID NO: 529626 - protein, 16 aa, Homo sapiens
  CDR3 for beta chain variable domain of TCR clone 264813 (TRBV20-1, TRBJ1-4)
CSAPGQGLLTNEKLFF

SEQ ID NO: 529627 - protein, 11 aa, Homo sapiens
  CDR3 for alpha chain variable domain of TCR clone 264814 (TRAV23/DV6, TRAJ49)
CAARAGNQFSF

SEQ ID NO: 529628 - protein, 13 aa, Homo sapiens
  CDR3 for beta chain variable domain of TCR clone 264814 (TRBV20-1, TRBJ2-2)
CSASAAGTGELFF

SEQ ID NO: 529629 - protein, 12 aa, Homo sapiens
  CDR3 for alpha chain variable domain of TCR clone 264815 (TRAV21, TRAJ39)
CAADNAGNMLTS

SEQ ID NO: 529630 - protein, 13 aa, Homo sapiens
  CDR3 for beta chain variable domain of TCR clone 264815 (TRBV12-4, TRBJ1-1)
CASSPGTGFEAFF

SEQ ID NO: 529631 - protein, 13 aa, Homo sapiens
  CDR3 for alpha chain variable domain of TCR clone 264816 (TRAV35, TRAJ42)
CAGFPGSQGNLIF

SEQ ID NO: 529632 - protein, 14 aa, Homo sapiens
  CDR3 for beta chain variable domain of TCR clone 264816 (TRBV19, TRBJ2-1)
CASLTFVLSGEQFF

SEQ ID NO: 529633 - protein, 15 aa, Homo sapiens
  CDR3 for alpha chain variable domain of TCR clone 264817 (TRAV12-3, TRAJ6)
CAMSATTGGSYIPTF

SEQ ID NO: 529634 - protein, 16 aa, Homo sapiens
  CDR3 for beta chain variable domain of TCR clone 264817 (TRBV7-9, TRBJ1-2)
CACSLGFSSGEDGYTF

SEQ ID NO: 529635 - protein, 13 aa, Homo sapiens
  CDR3 for alpha chain variable domain of TCR clone 264818 (TRAV26-1, TRAJ40)
CIVRVEGTYKYIF

SEQ ID NO: 529636 - protein, 16 aa, Homo sapiens
  CDR3 for beta chain variable domain of TCR clone 264818 (TRBV12-4, TRBJ1-5)
CASSRPVGGSNQPQHF

SEQ ID NO: 529637 - protein, 11 aa, Homo sapiens
  CDR3 for alpha chain variable domain of TCR clone 264819 (TRAV3, TRAJ21)
CAVDNFNKFYF

SEQ ID NO: 529638 - protein, 16 aa, Homo sapiens
  CDR3 for beta chain variable domain of TCR clone 264819 (TRBV19, TRBJ2-1)
CASSKARPSSYNEQFF

SEQ ID NO: 529639 - protein, 10 aa, Homo sapiens
  CDR3 for alpha chain variable domain of TCR clone 264820 (TRAV8-6, TRAJ34)
CAGRADKLIF

SEQ ID NO: 529640 - protein, 17 aa, Homo sapiens
  CDR3 for beta chain variable domain of TCR clone 264820 (TRBV7-8, TRBJ2-6)
CASSAGTGGAGANGLTF

SEQ ID NO: 529641 - protein, 15 aa, Homo sapiens
  CDR3 for alpha chain variable domain of TCR clone 264821 (TRAV17, TRAJ57)
CATGPSQGGSEKLDF

SEQ ID NO: 529642 - protein, 15 aa, Homo sapiens
  CDR3 for beta chain variable domain of TCR clone 264821 (TRBV9, TRBJ1-6)
CASSVAGTGDSPLHF

SEQ ID NO: 529643 - protein, 14 aa, Homo sapiens
  CDR3 for alpha chain variable domain of TCR clone 264822 (TRAV17, TRAJ40)
CATALTSGTYNYIS

SEQ ID NO: 529644 - protein, 13 aa, Homo sapiens
  CDR3 for beta chain variable domain of TCR clone 264822 (TRBV27, TRBJ2-1)
CASSSGSYNEQFF

SEQ ID NO: 529645 - protein, 17 aa, Homo sapiens
  CDR3 for alpha chain variable domain of TCR clone 264823 (TRAV3, TRAJ38)
CAVRDCLNAGNNRKLIW

SEQ ID NO: 529646 - protein, 16 aa, Homo sapiens
  CDR3 for beta chain variable domain of TCR clone 264823 (TRBV5-1, TRBJ2-2)
CASSLWDTTNTGELFF

SEQ ID NO: 529647 - protein, 11 aa, Homo sapiens
  CDR3 for alpha chain variable domain of TCR clone 264824 (TRAV16, TRAJ20)
CALSEGFKAAL

SEQ ID NO: 529648 - protein, 13 aa, Homo sapiens
  CDR3 for beta chain variable domain of TCR clone 264824 (TRBV7-3, TRBJ2-1)
CASSSDSYNEQFF

SEQ ID NO: 529649 - protein, 15 aa, Homo sapiens
  CDR3 for alpha chain variable domain of TCR clone 264825 (TRAV21, TRAJ53)
CATLNSGGSNYKLTF

SEQ ID NO: 529650 - protein, 14 aa, Homo sapiens
  CDR3 for beta chain variable domain of TCR clone 264825 (TRBV12-4, TRBJ2-3)
CASTIAGWGDTQYF

SEQ ID NO: 529651 - protein, 12 aa, Homo sapiens
  CDR3 for alpha chain variable domain of TCR clone 264826 (TRAV12-1, TRAJ40)
CVVYSGIYKYIF

SEQ ID NO: 529652 - protein, 18 aa, Homo sapiens
  CDR3 for beta chain variable domain of TCR clone 264826 (TRBV11-2, TRBJ2-3)
RASSLGGASRGAPNTQYF

SEQ ID NO: 529653 - protein, 15 aa, Homo sapiens
  CDR3 for alpha chain variable domain of TCR clone 264827 (TRAV26-1, TRAJ44)
CIVRANTGTASKLTF

SEQ ID NO: 529654 - protein, 13 aa, Homo sapiens
  CDR3 for beta chain variable domain of TCR clone 264827 (TRBV20-1, TRBJ2-7)
CSATHTSGYEQYF

SEQ ID NO: 529655 - protein, 14 aa, Homo sapiens
  CDR3 for alpha chain variable domain of TCR clone 264828 (TRAV12-2, TRAJ44)
CAVNPAGTASKLTF

SEQ ID NO: 529656 - protein, 17 aa, Homo sapiens
  CDR3 for beta chain variable domain of TCR clone 264828 (TRBV5-1, TRBJ2-5)
CASSPVALGQNQETQYF

SEQ ID NO: 529657 - protein, 14 aa, Homo sapiens
  CDR3 for alpha chain variable domain of TCR clone 264829 (TRAV12-1, TRAJ30)
CVVNIGGRDDKIIF

SEQ ID NO: 529658 - protein, 13 aa, Homo sapiens
  CDR3 for beta chain variable domain of TCR clone 264829 (TRBV3-1, TRBJ1-1)
CASSPGVITEAFF

SEQ ID NO: 529659 - protein, 13 aa, Homo sapiens
  CDR3 for alpha chain variable domain of TCR clone 264830 (TRAV29/DV5, TRAJ31)
CAASRDNNARLMF

SEQ ID NO: 529660 - protein, 12 aa, Homo sapiens
  CDR3 for beta chain variable domain of TCR clone 264830 (TRBV14, TRBJ2-7)
CASSRYKDEQYF

SEQ ID NO: 529661 - protein, 13 aa, Homo sapiens
  CDR3 for alpha chain variable domain of TCR clone 264831 (TRAV35, TRAJ44)
CAGLSGTASKLTF

SEQ ID NO: 529662 - protein, 17 aa, Homo sapiens
  CDR3 for beta chain variable domain of TCR clone 264831 (TRBV7-2, TRBJ1-2)
CASSLRPLQGHLYGYTF

SEQ ID NO: 529663 - protein, 12 aa, Homo sapiens
  CDR3 for alpha chain variable domain of TCR clone 264832 (TRAV35, TRAJ40)
CAGRAGTYKYIF

SEQ ID NO: 529664 - protein, 14 aa, Homo sapiens
  CDR3 for beta chain variable domain of TCR clone 264832 (TRBV7-2, TRBJ1-3)
CASNRGGTGNTIYF

SEQ ID NO: 529665 - protein, 10 aa, Homo sapiens
  CDR3 for alpha chain variable domain of TCR clone 264833 (TRAV12-3, TRAJ49)
CAMNDDQFYF

SEQ ID NO: 529666 - protein, 13 aa, Homo sapiens
  CDR3 for beta chain variable domain of TCR clone 264833 (TRBV7-7, TRBJ1-1)
CASSLGANTEAFF

SEQ ID NO: 529667 - protein, 12 aa, Homo sapiens
  CDR3 for alpha chain variable domain of TCR clone 264834 (TRAV12-1, TRAJ6)
CVVSERSYIPTF

SEQ ID NO: 529668 - protein, 21 aa, Homo sapiens
  CDR3 for beta chain variable domain of TCR clone 264834 (TRBV7-3, TRBJ2-1)
GGTQPCISVPAADGLAGAQFF

SEQ ID NO: 529669 - protein, 15 aa, Homo sapiens
  CDR3 for alpha chain variable domain of TCR clone 264835 (TRAV25, TRAJ52)
CAGTSGGTSYEKLTF

SEQ ID NO: 529670 - protein, 16 aa, Homo sapiens
  CDR3 for beta chain variable domain of TCR clone 264835 (TRBV15, TRBJ1-2)
CATSRGPRTGGGGYTF

SEQ ID NO: 529671 - protein, 14 aa, Homo sapiens
  CDR3 for alpha chain variable domain of TCR clone 264836 (TRAV26-1, TRAJ21)
CIVRVGHNFNKFYF

SEQ ID NO: 529672 - protein, 15 aa, Homo sapiens
  CDR3 for beta chain variable domain of TCR clone 264836 (TRBV4-3, TRBJ2-1)
CASSQGLAGSNEQFL

SEQ ID NO: 529673 - protein, 17 aa, Homo sapiens
  CDR3 for alpha chain variable domain of TCR clone 264837 (TRAV3, TRAJ6)
CAVRDGSRAGGNYIPTF

SEQ ID NO: 529674 - protein, 14 aa, Homo sapiens
  CDR3 for beta chain variable domain of TCR clone 264837 (TRBV7-2, TRBJ2-7)
CASSPKTSFYEQYF

SEQ ID NO: 529675 - protein, 17 aa, Homo sapiens
  CDR3 for alpha chain variable domain of TCR clone 264838 (TRAV3, TRAJ42)
CAVRDRDYGGSQGNLIF

SEQ ID NO: 529676 - protein, 19 aa, Homo sapiens
  CDR3 for beta chain variable domain of TCR clone 264838 (TRBV28, TRBJ2-7)
CASSYSGTSRLGWVYEQYF

SEQ ID NO: 529677 - protein, 14 aa, Homo sapiens
  CDR3 for alpha chain variable domain of TCR clone 264839 (TRAV30, TRAJ33)
CDTVAPRSNYQLIW

SEQ ID NO: 529678 - protein, 11 aa, Homo sapiens
  CDR3 for beta chain variable domain of TCR clone 264839 (TRBV12-4, TRBJ2-3)
CASTATDTQYF

SEQ ID NO: 529679 - protein, 14 aa, Homo sapiens
  CDR3 for alpha chain variable domain of TCR clone 264840 (TRAV12-3, TRAJ13)
CAMKNSGGDQKVTF

SEQ ID NO: 529680 - protein, 13 aa, Homo sapiens
  CDR3 for beta chain variable domain of TCR clone 264840 (TRBV29-1, TRBJ2-5)
CSARDRVEETQYF

SEQ ID NO: 529681 - protein, 15 aa, Homo sapiens
  CDR3 for alpha chain variable domain of TCR clone 264841 (TRAV9-2, TRAJ23)
CALSDLYNQGGKLIF

SEQ ID NO: 529682 - protein, 11 aa, Homo sapiens
  CDR3 for beta chain variable domain of TCR clone 264841 (TRBV11-2, TRBJ1-1)
CASSINTEAFF

SEQ ID NO: 529683 - protein, 13 aa, Homo sapiens
  CDR3 for alpha chain variable domain of TCR clone 264842 (TRAV2, TRAJ40)
CAVVTSGTYRYIF

SEQ ID NO: 529684 - protein, 16 aa, Homo sapiens
  CDR3 for beta chain variable domain of TCR clone 264842 (TRBV7-2, TRBJ1-2)
CASSSNQDRRGHGYTF

SEQ ID NO: 529685 - protein, 10 aa, Homo sapiens
  CDR3 for alpha chain variable domain of TCR clone 264843 (TRAV23/DV6, TRAJ3)
CAATTFALGG

SEQ ID NO: 529686 - protein, 14 aa, Homo sapiens
  CDR3 for beta chain variable domain of TCR clone 264843 (TRBV6-1, TRBJ1-3)
CASVQGGGGNTIYF

SEQ ID NO: 529687 - protein, 15 aa, Homo sapiens
  CDR3 for alpha chain variable domain of TCR clone 264844 (TRAV8-3, TRAJ27)
CAVGPSKTNAGKSNF

SEQ ID NO: 529688 - protein, 15 aa, Homo sapiens
  CDR3 for beta chain variable domain of TCR clone 264844 (TRBV7-2, TRBJ2-1)
CASNSGLAGGNEQFF

SEQ ID NO: 529689 - protein, 17 aa, Homo sapiens
  CDR3 for alpha chain variable domain of TCR clone 264845 (TRAV3, TRAJ6)
CAVRDGPRAGGSYLPTF

SEQ ID NO: 529690 - protein, 15 aa, Homo sapiens
  CDR3 for beta chain variable domain of TCR clone 264845 (TRBV29-1, TRBJ2-5)
CSVEGLAVNQETQYF

SEQ ID NO: 529691 - protein, 11 aa, Homo sapiens
  CDR3 for alpha chain variable domain of TCR clone 264846 (TRAV17, TRAJ43)
CATPRSNDMRF

SEQ ID NO: 529692 - protein, 17 aa, Homo sapiens
  CDR3 for beta chain variable domain of TCR clone 264846 (TRBV7-3, TRBJ2-2)
CASSLSGTSGGTGELFF

SEQ ID NO: 529693 - protein, 10 aa, Homo sapiens
  CDR3 for alpha chain variable domain of TCR clone 264847 (TRAV38-1, TRAJ34)
CAFMDDKLTF

SEQ ID NO: 529694 - protein, 14 aa, Homo sapiens
  CDR3 for beta chain variable domain of TCR clone 264847 (TRBV7-2, TRBJ2-2)
FASSLNSNTGELFF

SEQ ID NO: 529695 - protein, 16 aa, Homo sapiens
  CDR3 for alpha chain variable domain of TCR clone 264848 (TRAV14/DV4, TRAJ53)
CAMREGGGGRNYKLTF

SEQ ID NO: 529696 - protein, 12 aa, Homo sapiens
  CDR3 for beta chain variable domain of TCR clone 264848 (TRBV7-7, TRBJ2-5)
CASSLGGETQYF

SEQ ID NO: 529697 - protein, 13 aa, Homo sapiens
  CDR3 for alpha chain variable domain of TCR clone 264849 (TRAV8-3, TRAJ15)
CAVGVQAGTAPIF

SEQ ID NO: 529698 - protein, 17 aa, Homo sapiens
  CDR3 for beta chain variable domain of TCR clone 264849 (TRBV20-1, TRBJ2-1)
CSARDPLAGVSYNEQFF

SEQ ID NO: 529699 - protein, 17 aa, Homo sapiens
  CDR3 for alpha chain variable domain of TCR clone 264850 (TRAV2, TRAJ36)
CAVEDRGNWGKQPLLWD

SEQ ID NO: 529700 - protein, 16 aa, Homo sapiens
  CDR3 for beta chain variable domain of TCR clone 264850 (TRBV11-2, TRBJ2-2)
CASSLRTGNLIGELFF

SEQ ID NO: 529701 - protein, 18 aa, Homo sapiens
  CDR3 for alpha chain variable domain of TCR clone 264851 (TRAV21, TRAJ52)
CAVRPSPAGGTSSGKLTF

SEQ ID NO: 529702 - protein, 13 aa, Homo sapiens
  CDR3 for beta chain variable domain of TCR clone 264851 (TRBV10-3, TRBJ2-7)
CASKLAVNYEQYF

SEQ ID NO: 529703 - protein, 13 aa, Homo sapiens
  CDR3 for alpha chain variable domain of TCR clone 264852 (TRAV36/DV7, TRAJ37)
CAVFSSNTGKLIF

SEQ ID NO: 529704 - protein, 16 aa, Homo sapiens
  CDR3 for beta chain variable domain of TCR clone 264852 (TRBV3-1, TRBJ2-5)
CASSPGQFNGFGTHYF

SEQ ID NO: 529705 - protein, 13 aa, Homo sapiens
  CDR3 for alpha chain variable domain of TCR clone 264853 (TRAV3, TRAJ27)
CAVRPLGAGKSTF

SEQ ID NO: 529706 - protein, 15 aa, Homo sapiens
  CDR3 for beta chain variable domain of TCR clone 264853 (TRBV5-8, TRBJ2-2)
CASSLDRGATGELFF

SEQ ID NO: 529707 - protein, 14 aa, Homo sapiens
  CDR3 for alpha chain variable domain of TCR clone 264854 (TRAV1-2, TRAJ8)
CAVREDTGCQKLVF

SEQ ID NO: 529708 - protein, 15 aa, Homo sapiens
  CDR3 for beta chain variable domain of TCR clone 264854 (TRBV7-3, TRBJ2-2)
CASSETGQGTGELFF

SEQ ID NO: 529709 - protein, 13 aa, Homo sapiens
  CDR3 for alpha chain variable domain of TCR clone 264855 (TRAV1-2, TRAJ9)
CAALNTGGFKTIF

SEQ ID NO: 529710 - protein, 15 aa, Homo sapiens
  CDR3 for beta chain variable domain of TCR clone 264855 (TRBV27, TRBJ2-3)
CASSLGLAATDTQYF

SEQ ID NO: 529711 - protein, 16 aa, Homo sapiens
  CDR3 for alpha chain variable domain of TCR clone 264856 (TRAV12-3, TRAJ53)
CAMSPGSGGSNYKLTF

SEQ ID NO: 529712 - protein, 14 aa, Homo sapiens
  CDR3 for beta chain variable domain of TCR clone 264856 (TRBV15, TRBJ2-5)
CATSIGGPGETQYF

SEQ ID NO: 529713 - protein, 13 aa, Homo sapiens
  CDR3 for alpha chain variable domain of TCR clone 264857 (TRAV13-1, TRAJ49)
CAAVVRGGNQFYF

SEQ ID NO: 529714 - protein, 12 aa, Homo sapiens
  CDR3 for beta chain variable domain of TCR clone 264857 (TRBV2, TRBJ2-1)
CAYGPPGNEQFF

SEQ ID NO: 529715 - protein, 13 aa, Homo sapiens
  CDR3 for alpha chain variable domain of TCR clone 264858 (TRAV8-6, TRAJ16)
CAVSSPDGQKLLF

SEQ ID NO: 529716 - protein, 16 aa, Homo sapiens
  CDR3 for beta chain variable domain of TCR clone 264858 (TRBV5-7, TRBJ2-3)
CASGSLGGAITDTQYF

SEQ ID NO: 529717 - protein, 14 aa, Homo sapiens
  CDR3 for alpha chain variable domain of TCR clone 264859 (TRAV9-2, TRAJ39)
CALYIYNAGNMLTF

SEQ ID NO: 529718 - protein, 16 aa, Homo sapiens
  CDR3 for beta chain variable domain of TCR clone 264859 (TRBV6-6, TRBJ2-1)
CASSLLSDSSYNEQFF

SEQ ID NO: 529719 - protein, 17 aa, Homo sapiens
  CDR3 for alpha chain variable domain of TCR clone 264860 (TRAV3, TRAJ6)
CAVRDGPRAGGSYIPTF

SEQ ID NO: 529720 - protein, 10 aa, Homo sapiens
  CDR3 for beta chain variable domain of TCR clone 264860 (TRBV20-1, TRBJ1-1)
CSAMGGTAIF

SEQ ID NO: 529721 - protein, 14 aa, Homo sapiens
  CDR3 for alpha chain variable domain of TCR clone 264861 (TRAV1-2, TRAJ16)
CAVDRFSYGQKLLF

SEQ ID NO: 529722 - protein, 15 aa, Homo sapiens
  CDR3 for beta chain variable domain of TCR clone 264861 (TRBV20-1, TRBJ2-7)
CSARDRVSGMDEQYF

SEQ ID NO: 529723 - protein, 14 aa, Homo sapiens
  CDR3 for alpha chain variable domain of TCR clone 264862 (TRAV13-1, TRAJ44)
CTAKATGTASKLTF

SEQ ID NO: 529724 - protein, 14 aa, Homo sapiens
  CDR3 for beta chain variable domain of TCR clone 264862 (TRBV25-1, TRBJ1-1)
CASTHLGGNTEAFF

SEQ ID NO: 529725 - protein, 12 aa, Homo sapiens
  CDR3 for alpha chain variable domain of TCR clone 264863 (TRAV35, TRAJ31)
CAAASNNSRLMF

SEQ ID NO: 529726 - protein, 14 aa, Homo sapiens
  CDR3 for beta chain variable domain of TCR clone 264863 (TRBV2, TRBJ2-2)
CASSLFGGNGELFF

SEQ ID NO: 529727 - protein, 10 aa, Homo sapiens
  CDR3 for alpha chain variable domain of TCR clone 264864 (TRAV23/DV6, TRAJ57)
CAASSTLSQG

SEQ ID NO: 529728 - protein, 13 aa, Homo sapiens
  CDR3 for beta chain variable domain of TCR clone 264864 (TRBV12-4, TRBJ1-2)
CASSSGLTVISSF

SEQ ID NO: 529729 - protein, 13 aa, Homo sapiens
  CDR3 for alpha chain variable domain of TCR clone 264865 (TRAV12-3, TRAJ33)
CAMSVNSNYQLIW

SEQ ID NO: 529730 - protein, 13 aa, Homo sapiens
  CDR3 for beta chain variable domain of TCR clone 264865 (TRBV7-2, TRBJ2-2)
CASSLEVTGELFL

SEQ ID NO: 529731 - protein, 16 aa, Homo sapiens
  CDR3 for alpha chain variable domain of TCR clone 264866 (TRAV1-1, TRAJ28)
CAVRDASGAGSYQLTF

SEQ ID NO: 529732 - protein, 12 aa, Homo sapiens
  CDR3 for beta chain variable domain of TCR clone 264866 (TRBV11-2, TRBJ2-5)
CASSLDTQTQYF

SEQ ID NO: 529733 - protein, 14 aa, Homo sapiens
  CDR3 for alpha chain variable domain of TCR clone 264867 (TRAV1-2, TRAJ8)
CAVREDTGFQQLVF

SEQ ID NO: 529734 - protein, 15 aa, Homo sapiens
  CDR3 for beta chain variable domain of TCR clone 264867 (TRBV7-3, TRBJ2-2)
CASSETGQGTGELFF

SEQ ID NO: 529735 - protein, 13 aa, Homo sapiens
  CDR3 for alpha chain variable domain of TCR clone 264868 (TRAV2, TRAJ40)
CAVVTSGTYKYIF

SEQ ID NO: 529736 - protein, 15 aa, Homo sapiens
  CDR3 for beta chain variable domain of TCR clone 264868 (TRBV9, TRBJ2-7)
CASSPSEQGSYEQYF

SEQ ID NO: 529737 - protein, 13 aa, Homo sapiens
  CDR3 for alpha chain variable domain of TCR clone 264869 (TRAV26-1, TRAJ26)
CIVRLSYGQNFVF

SEQ ID NO: 529738 - protein, 17 aa, Homo sapiens
  CDR3 for beta chain variable domain of TCR clone 264869 (TRBV13, TRBJ2-3)
CASSLSRVAGGRNTQYF

SEQ ID NO: 529739 - protein, 11 aa, Homo sapiens
  CDR3 for alpha chain variable domain of TCR clone 264870 (TRAV1-2, TRAJ20)
CAVSNDYKLSF

SEQ ID NO: 529740 - protein, 17 aa, Homo sapiens
  CDR3 for beta chain variable domain of TCR clone 264870 (TRBV7-9, TRBJ2-3)
CASSPTVAGDLTDTQYF

SEQ ID NO: 529741 - protein, 17 aa, Homo sapiens
  CDR3 for alpha chain variable domain of TCR clone 264871 (TRAV3, TRAJ6)
CAVRDGPRAGGSYIPTF

SEQ ID NO: 529742 - protein, 15 aa, Homo sapiens
  CDR3 for beta chain variable domain of TCR clone 264871 (TRBV7-9, TRBJ1-6)
CASSSPGRGKSPLHF

SEQ ID NO: 529743 - protein, 18 aa, Homo sapiens
  CDR3 for alpha chain variable domain of TCR clone 264872 (TRAV12-3, TRAJ52)
CAMSVAGAGGTSYGELTF

SEQ ID NO: 529744 - protein, 15 aa, Homo sapiens
  CDR3 for beta chain variable domain of TCR clone 264872 (TRBV27, TRBJ1-6)
CASSFDRGLGSPLHF

SEQ ID NO: 529745 - protein, 16 aa, Homo sapiens
  CDR3 for alpha chain variable domain of TCR clone 264873 (TRAV12-3, TRAJ53)
CAMSPGSGGSNYNLTF

SEQ ID NO: 529746 - protein, 15 aa, Homo sapiens
  CDR3 for beta chain variable domain of TCR clone 264873 (TRBV10-2, TRBJ2-6)
CASSEQGTGANVLTF

SEQ ID NO: 529747 - protein, 15 aa, Homo sapiens
  CDR3 for alpha chain variable domain of TCR clone 264874 (TRAV20, TRAJ41)
CAVQANSNSGYALNF

SEQ ID NO: 529748 - protein, 13 aa, Homo sapiens
  CDR3 for beta chain variable domain of TCR clone 264874 (TRBV7-2, TRBJ2-5)
CQQLVRGGETQYF

SEQ ID NO: 529749 - protein, 14 aa, Homo sapiens
  CDR3 for alpha chain variable domain of TCR clone 264875 (TRAV16, TRAJ32)
CALKSGGVTNKLIF

SEQ ID NO: 529750 - protein, 17 aa, Homo sapiens
  CDR3 for beta chain variable domain of TCR clone 264875 (TRBV20-1, TRBJ2-1)
CSASSSGLAGSYNEQFF

SEQ ID NO: 529751 - protein, 16 aa, Homo sapiens
  CDR3 for alpha chain variable domain of TCR clone 264876 (TRAV3, TRAJ52)
CALSAAGGTSYGKLKF

SEQ ID NO: 529752 - protein, 12 aa, Homo sapiens
  CDR3 for beta chain variable domain of TCR clone 264876 (TRBV12-4, TRBJ1-3)
CASSFSGNTIYF

SEQ ID NO: 529753 - protein, 17 aa, Homo sapiens
  CDR3 for alpha chain variable domain of TCR clone 264877 (TRAV3, TRAJ28)
CAVREAYSGAGSYQLTF

SEQ ID NO: 529754 - protein, 16 aa, Homo sapiens
  CDR3 for beta chain variable domain of TCR clone 264877 (TRBV2, TRBJ2-1)
CASSVGGSLSYNEQFF

SEQ ID NO: 529755 - protein, 14 aa, Homo sapiens
  CDR3 for alpha chain variable domain of TCR clone 264878 (TRAV17, TRAJ17)
CATDDAAAGNKITF

SEQ ID NO: 529756 - protein, 16 aa, Homo sapiens
  CDR3 for beta chain variable domain of TCR clone 264878 (TRBV19, TRBJ2-1)
CASSIETGSPYNEQFF

SEQ ID NO: 529757 - protein, 16 aa, Homo sapiens
  CDR3 for alpha chain variable domain of TCR clone 264879 (TRAV23/DV6, TRAJ52)
CAARPSGGTSFGKLTF

SEQ ID NO: 529758 - protein, 13 aa, Homo sapiens
  CDR3 for beta chain variable domain of TCR clone 264879 (TRBV7-9, TRBJ1-1)
CASSLSGETEAFF

SEQ ID NO: 529759 - protein, 12 aa, Homo sapiens
  CDR3 for alpha chain variable domain of TCR clone 264880 (TRAV17, TRAJ12)
CATLRSSYKLIF

SEQ ID NO: 529760 - protein, 16 aa, Homo sapiens
  CDR3 for beta chain variable domain of TCR clone 264880 (TRBV28, TRBJ2-7)
CASSLFFETGGPEEYF

SEQ ID NO: 529761 - protein, 14 aa, Homo sapiens
  CDR3 for alpha chain variable domain of TCR clone 264881 (TRAV1-2, TRAJ16)
CAVNRFSDGQKLLF

SEQ ID NO: 529762 - protein, 11 aa, Homo sapiens
  CDR3 for beta chain variable domain of TCR clone 264881 (TRBV18, TRBJ2-5)
CASSPRETQYF

SEQ ID NO: 529763 - protein, 15 aa, Homo sapiens
  CDR3 for alpha chain variable domain of TCR clone 264882 (TRAV12-3, TRAJ22)
CAMRTISGSASQLTF

SEQ ID NO: 529764 - protein, 16 aa, Homo sapiens
  CDR3 for beta chain variable domain of TCR clone 264882 (TRBV20-1, TRBJ2-2)
CSARRPGTGNTGELFF

SEQ ID NO: 529765 - protein, 16 aa, Homo sapiens
  CDR3 for alpha chain variable domain of TCR clone 264883 (TRAV27, TRAJ22)
ASTSVQDGGSARQLTF

SEQ ID NO: 529766 - protein, 14 aa, Homo sapiens
  CDR3 for beta chain variable domain of TCR clone 264883 (TRBV7-9, TRBJ2-5)
CASSSWGFFATQYF

SEQ ID NO: 529767 - protein, 14 aa, Homo sapiens
  CDR3 for alpha chain variable domain of TCR clone 264884 (TRAV12-3, TRAJ42)
CAMNYGGSQGNLIF

SEQ ID NO: 529768 - protein, 15 aa, Homo sapiens
  CDR3 for beta chain variable domain of TCR clone 264884 (TRBV5-7, TRBJ1-5)
CASSYGKLWDKHQHF

SEQ ID NO: 529769 - protein, 12 aa, Homo sapiens
  CDR3 for alpha chain variable domain of TCR clone 264885 (TRAV13-1, TRAJ16)
CAASNGGQKLLF

SEQ ID NO: 529770 - protein, 14 aa, Homo sapiens
  CDR3 for beta chain variable domain of TCR clone 264885 (TRBV20-1, TRBJ2-7)
CSARDPTGRDEQYF

SEQ ID NO: 529771 - protein, 13 aa, Homo sapiens
  CDR3 for alpha chain variable domain of TCR clone 264886 (TRAV1-2, TRAJ9)
CAALNTGCFKTIF

SEQ ID NO: 529772 - protein, 11 aa, Homo sapiens
  CDR3 for beta chain variable domain of TCR clone 264886 (TRBV7-2, TRBJ2-2)
CASSADRRKRR

SEQ ID NO: 529773 - protein, 14 aa, Homo sapiens
  CDR3 for alpha chain variable domain of TCR clone 264887 (TRAV16, TRAJ37)
CALDISGNTGKLIS

SEQ ID NO: 529774 - protein, 14 aa, Homo sapiens
  CDR3 for beta chain variable domain of TCR clone 264887 (TRBV7-6, TRBJ2-7)
CASSFRQGADEQYF

SEQ ID NO: 529775 - protein, 13 aa, Homo sapiens
  CDR3 for alpha chain variable domain of TCR clone 264888 (TRAV27, TRAJ6)
CAGGTRGSYIPTF

SEQ ID NO: 529776 - protein, 14 aa, Homo sapiens
  CDR3 for beta chain variable domain of TCR clone 264888 (TRBV12-4, TRBJ1-1)
CASSPIRRTGEAFF

SEQ ID NO: 529777 - protein, 12 aa, Homo sapiens
  CDR3 for alpha chain variable domain of TCR clone 264889 (TRAV23/DV6, TRAJ24)
CAANDSWGQLQF

SEQ ID NO: 529778 - protein, 16 aa, Homo sapiens
  CDR3 for beta chain variable domain of TCR clone 264889 (TRBV12-4, TRBJ2-5)
CACSLSTSGGKETQYF

SEQ ID NO: 529779 - protein, 16 aa, Homo sapiens
  CDR3 for alpha chain variable domain of TCR clone 264890 (TRAV4, TRAJ5)
CLGGPDHGHGQESTYF

SEQ ID NO: 529780 - protein, 15 aa, Homo sapiens
  CDR3 for beta chain variable domain of TCR clone 264890 (TRBV27, TRBJ2-5)
CASSLIPSGGETQYF

SEQ ID NO: 529781 - protein, 14 aa, Homo sapiens
  CDR3 for alpha chain variable domain of TCR clone 264891 (TRAV3, TRAJ6)
CSVRDWGGSYIPTF

SEQ ID NO: 529782 - protein, 15 aa, Homo sapiens
  CDR3 for beta chain variable domain of TCR clone 264891 (TRBV5-1, TRBJ2-1)
CASSPPRAPYNEQFF

SEQ ID NO: 529783 - protein, 14 aa, Homo sapiens
  CDR3 for alpha chain variable domain of TCR clone 264892 (TRAV12-2, TRAJ5)
CAVNRSTGRRALTF

SEQ ID NO: 529784 - protein, 14 aa, Homo sapiens
  CDR3 for beta chain variable domain of TCR clone 264892 (TRBV4-1, TRBJ2-2)
CASSQALNTGELFF

SEQ ID NO: 529785 - protein, 18 aa, Homo sapiens
  CDR3 for alpha chain variable domain of TCR clone 264893 (TRAV12-3, TRAJ52)
CAMSVGGAGGTSYGKLTF

SEQ ID NO: 529786 - protein, 17 aa, Homo sapiens
  CDR3 for beta chain variable domain of TCR clone 264893 (TRBV7-3, TRBJ2-5)
CASSLGSGRSGSETQYF

SEQ ID NO: 529787 - protein, 17 aa, Homo sapiens
  CDR3 for alpha chain variable domain of TCR clone 264894 (TRAV3, TRAJ6)
CAVRDGPRAGGSYIPTF

SEQ ID NO: 529788 - protein, 13 aa, Homo sapiens
  CDR3 for beta chain variable domain of TCR clone 264894 (TRBV19, TRBJ2-7)
CASSIDRTYDQYF

SEQ ID NO: 529789 - protein, 15 aa, Homo sapiens
  CDR3 for alpha chain variable domain of TCR clone 264895 (TRAV3, TRAJ23)
CAVRDRGNQGGKLIF

SEQ ID NO: 529790 - protein, 15 aa, Homo sapiens
  CDR3 for beta chain variable domain of TCR clone 264895 (TRBV7-3, TRBJ2-1)
CQQLAASGSYNEQFF

SEQ ID NO: 529791 - protein, 16 aa, Homo sapiens
  CDR3 for alpha chain variable domain of TCR clone 264896 (TRAV30, TRAJ24)
CGTEIVDADSWGKSQF

SEQ ID NO: 529792 - protein, 14 aa, Homo sapiens
  CDR3 for beta chain variable domain of TCR clone 264896 (TRBV7-9, TRBJ1-1)
CASSLVPVWTEAFF

SEQ ID NO: 529793 - protein, 12 aa, Homo sapiens
  CDR3 for alpha chain variable domain of TCR clone 264897 (TRAV12-3, TRAJ21)
CAMFNNFNNFYF

SEQ ID NO: 529794 - protein, 16 aa, Homo sapiens
  CDR3 for beta chain variable domain of TCR clone 264897 (TRBV7-9, TRBJ1-2)
CASSLAPLRAAYGYTF

SEQ ID NO: 529795 - protein, 16 aa, Homo sapiens
  CDR3 for alpha chain variable domain of TCR clone 264898 (TRAV12-1, TRAJ28)
CVVIAYSGAGSYPLTF

SEQ ID NO: 529796 - protein, 15 aa, Homo sapiens
  CDR3 for beta chain variable domain of TCR clone 264898 (TRBV14, TRBJ1-1)
CASSQEGMGFTEAFF

SEQ ID NO: 529797 - protein, 13 aa, Homo sapiens
  CDR3 for alpha chain variable domain of TCR clone 264899 (TRAV12-1, TRAJ40)
CVVNSSGTYKYIF

SEQ ID NO: 529798 - protein, 14 aa, Homo sapiens
  CDR3 for beta chain variable domain of TCR clone 264899 (TRBV2, TRBJ1-6)
CASEVSSYNSTLHF

SEQ ID NO: 529799 - protein, 14 aa, Homo sapiens
  CDR3 for alpha chain variable domain of TCR clone 264900 (TRAV12-3, TRAJ58)
CAMSTETSGSRLTF

SEQ ID NO: 529800 - protein, 15 aa, Homo sapiens
  CDR3 for beta chain variable domain of TCR clone 264900 (TRBV4-1, TRBJ1-4)
CASSDTGGTNENLFF

SEQ ID NO: 529801 - protein, 15 aa, Homo sapiens
  CDR3 for alpha chain variable domain of TCR clone 264901 (TRAV26-1, TRAJ44)
CIVRANTDTASKLTF

SEQ ID NO: 529802 - protein, 16 aa, Homo sapiens
  CDR3 for beta chain variable domain of TCR clone 264901 (TRBV7-7, TRBJ2-1)
CASSLASGTYYNEQFF

SEQ ID NO: 529803 - protein, 14 aa, Homo sapiens
  CDR3 for alpha chain variable domain of TCR clone 264902 (TRAV1-2, TRAJ8)
CAVREDTGFQKLVF

SEQ ID NO: 529804 - protein, 13 aa, Homo sapiens
  CDR3 for beta chain variable domain of TCR clone 264902 (TRBV7-3, TRBJ1-1)
CASSPAGGLEAFF

SEQ ID NO: 529805 - protein, 13 aa, Homo sapiens
  CDR3 for alpha chain variable domain of TCR clone 264903 (TRAV17, TRAJ22)
CAHHSGSARQLTF

SEQ ID NO: 529806 - protein, 16 aa, Homo sapiens
  CDR3 for beta chain variable domain of TCR clone 264903 (TRBV4-1, TRBJ1-2)
CASSQDAGQVLYGYTF

SEQ ID NO: 529807 - protein, 14 aa, Homo sapiens
  CDR3 for alpha chain variable domain of TCR clone 264904 (TRAV12-1, TRAJ12)
CVVTRMDSSYKLIY

SEQ ID NO: 529808 - protein, 13 aa, Homo sapiens
  CDR3 for beta chain variable domain of TCR clone 264904 (TRBV20-1, TRBJ1-1)
CSARGGGNTEAFF

SEQ ID NO: 529809 - protein, 18 aa, Homo sapiens
  CDR3 for alpha chain variable domain of TCR clone 264905 (TRAV26-1, TRAJ37)
CIVGVDMHGSSNTGKLIF

SEQ ID NO: 529810 - protein, 15 aa, Homo sapiens
  CDR3 for beta chain variable domain of TCR clone 264905 (TRBV20-1, TRBJ2-7)
CSARVLASPLYEQYF

SEQ ID NO: 529811 - protein, 12 aa, Homo sapiens
  CDR3 for alpha chain variable domain of TCR clone 264906 (TRAV12-3, TRAJ17)
CAMTLTGNKLTF

SEQ ID NO: 529812 - protein, 15 aa, Homo sapiens
  CDR3 for beta chain variable domain of TCR clone 264906 (TRBV19, TRBJ1-1)
CGSTSGQIQNTEAFF

SEQ ID NO: 529813 - protein, 17 aa, Homo sapiens
  CDR3 for alpha chain variable domain of TCR clone 264907 (TRAV13-1, TRAJ52)
CAASSGACGTSYGKLTF

SEQ ID NO: 529814 - protein, 15 aa, Homo sapiens
  CDR3 for beta chain variable domain of TCR clone 264907 (TRBV2, TRBJ2-1)
CASSELAGSYNEQFF

SEQ ID NO: 529815 - protein, 12 aa, Homo sapiens
  CDR3 for alpha chain variable domain of TCR clone 264908 (TRAV1-2, TRAJ24)
CAVGGSWGKFQF

SEQ ID NO: 529816 - protein, 15 aa, Homo sapiens
  CDR3 for beta chain variable domain of TCR clone 264908 (TRBV6-1, TRBJ2-7)
CASSEGVGNPYDQYF

SEQ ID NO: 529817 - protein, 14 aa, Homo sapiens
  CDR3 for alpha chain variable domain of TCR clone 264909 (TRAV17, TRAJ54)
CATDANQGSQKLVF

SEQ ID NO: 529818 - protein, 12 aa, Homo sapiens
  CDR3 for beta chain variable domain of TCR clone 264909 (TRBV7-9, TRBJ2-7)
CASSTKREEQYF

SEQ ID NO: 529819 - protein, 12 aa, Homo sapiens
  CDR3 for alpha chain variable domain of TCR clone 264910 (TRAV13-2, TRAJ39)
FAESRPGNMLTF

SEQ ID NO: 529820 - protein, 15 aa, Homo sapiens
  CDR3 for beta chain variable domain of TCR clone 264910 (TRBV9, TRBJ1-6)
CASSVAGTGDSPLHF

SEQ ID NO: 529821 - protein, 18 aa, Homo sapiens
  CDR3 for alpha chain variable domain of TCR clone 264911 (TRAV29/DV5, TRAJ52)
CAAGFRGAGGTSYGKLTF

SEQ ID NO: 529822 - protein, 15 aa, Homo sapiens
  CDR3 for beta chain variable domain of TCR clone 264911 (TRBV28, TRBJ2-1)
CASSIIAGGRSEQFF

SEQ ID NO: 529823 - protein, 15 aa, Homo sapiens
  CDR3 for alpha chain variable domain of TCR clone 264912 (TRAV2, TRAJ24)
CAVVRLKNSWGKLQF

SEQ ID NO: 529824 - protein, 16 aa, Homo sapiens
  CDR3 for beta chain variable domain of TCR clone 264912 (TRBV19, TRBJ1-5)
CASSTWTGGGNQPQHF

SEQ ID NO: 529825 - protein, 11 aa, Homo sapiens
  CDR3 for alpha chain variable domain of TCR clone 264913 (TRAV2, TRAJ33)
CAVESNYQLIW

SEQ ID NO: 529826 - protein, 14 aa, Homo sapiens
  CDR3 for beta chain variable domain of TCR clone 264913 (TRBV7-3, TRBJ2-1)
CASSLAGGTNEQFF

SEQ ID NO: 529827 - protein, 11 aa, Homo sapiens
  CDR3 for alpha chain variable domain of TCR clone 264914 (TRAV3, TRAJ21)
CAVVNFNKFYF

SEQ ID NO: 529828 - protein, 16 aa, Homo sapiens
  CDR3 for beta chain variable domain of TCR clone 264914 (TRBV19, TRBJ2-1)
CASSKAGPGSYNEQFF

SEQ ID NO: 529829 - protein, 14 aa, Homo sapiens
  CDR3 for alpha chain variable domain of TCR clone 264915 (TRAV1-2, TRAJ16)
CAVNRFSDGQKLLF

SEQ ID NO: 529830 - protein, 18 aa, Homo sapiens
  CDR3 for beta chain variable domain of TCR clone 264915 (TRBV12-4, TRBJ2-2)
CASSRSGGAIPNAGELFF

SEQ ID NO: 529831 - protein, 15 aa, Homo sapiens
  CDR3 for alpha chain variable domain of TCR clone 264916 (TRAV13-1, TRAJ5)
CAVYIRDTGRRALTF

SEQ ID NO: 529832 - protein, 16 aa, Homo sapiens
  CDR3 for beta chain variable domain of TCR clone 264916 (TRBV12-4, TRBJ2-1)
CASTEQGMDRSNEKFF

SEQ ID NO: 529833 - protein, 14 aa, Homo sapiens
  CDR3 for alpha chain variable domain of TCR clone 264917 (TRAV12-2, TRAJ45)
CAVYSGGGADGLTF

SEQ ID NO: 529834 - protein, 12 aa, Homo sapiens
  CDR3 for beta chain variable domain of TCR clone 264917 (TRBV11-2, TRBJ2-5)
CASSLDTQTQYF

SEQ ID NO: 529835 - protein, 13 aa, Homo sapiens
  CDR3 for alpha chain variable domain of TCR clone 264918 (TRAV16, TRAJ22)
SAMLAGSARQLTF

SEQ ID NO: 529836 - protein, 18 aa, Homo sapiens
  CDR3 for beta chain variable domain of TCR clone 264918 (TRBV7-2, TRBJ2-3)
WASSLETSRGRKADTQYF

SEQ ID NO: 529837 - protein, 13 aa, Homo sapiens
  CDR3 for alpha chain variable domain of TCR clone 264919 (TRAV12-2, TRAJ10)
CAVPTGGGNKLTF

SEQ ID NO: 529838 - protein, 11 aa, Homo sapiens
  CDR3 for beta chain variable domain of TCR clone 264919 (TRBV6-1, TRBJ2-1)
CASNSSNEQFF

SEQ ID NO: 529839 - protein, 16 aa, Homo sapiens
  CDR3 for alpha chain variable domain of TCR clone 264920 (TRAV1-1, TRAJ28)
CAVRDDSVAGSYQLTF

SEQ ID NO: 529840 - protein, 12 aa, Homo sapiens
  CDR3 for beta chain variable domain of TCR clone 264920 (TRBV11-2, TRBJ2-5)
CASSLDTQTQYF

SEQ ID NO: 529841 - protein, 12 aa, Homo sapiens
  CDR3 for alpha chain variable domain of TCR clone 264921 (TRAV38-2/DV8, TRAJ57)
CAWKGGSEKLVF

SEQ ID NO: 529842 - protein, 13 aa, Homo sapiens
  CDR3 for beta chain variable domain of TCR clone 264921 (TRBV5-1, TRBJ1-5)
CASSLAQDKPQHF

SEQ ID NO: 529843 - protein, 13 aa, Homo sapiens
  CDR3 for alpha chain variable domain of TCR clone 264922 (TRAV3, TRAJ20)
CCEAFCNDYKLSF

SEQ ID NO: 529844 - protein, 15 aa, Homo sapiens
  CDR3 for beta chain variable domain of TCR clone 264922 (TRBV6-5, TRBJ2-1)
CARSYDAGAGNEQFF

SEQ ID NO: 529845 - protein, 14 aa, Homo sapiens
  CDR3 for alpha chain variable domain of TCR clone 264923 (TRAV1-2, TRAJ16)
CAVNRFSDGQKLLF

SEQ ID NO: 529846 - protein, 15 aa, Homo sapiens
  CDR3 for beta chain variable domain of TCR clone 264923 (TRBV9, TRBJ1-6)
CASSVDGTGDSPLHV

SEQ ID NO: 529847 - protein, 12 aa, Homo sapiens
  CDR3 for alpha chain variable domain of TCR clone 264924 (TRAV13-1, TRAJ49)
CAAIIWGNQFYF

SEQ ID NO: 529848 - protein, 14 aa, Homo sapiens
  CDR3 for beta chain variable domain of TCR clone 264924 (TRBV12-4, TRBJ1-1)
CASSLDGLNTEAFF

SEQ ID NO: 529849 - protein, 11 aa, Homo sapiens
  CDR3 for alpha chain variable domain of TCR clone 264925 (TRAV1-2, TRAJ20)
CAVANDYKLSF

SEQ ID NO: 529850 - protein, 18 aa, Homo sapiens
  CDR3 for beta chain variable domain of TCR clone 264925 (TRBV20-1, TRBJ2-6)
FSAETTPTHGSGANVLTF

SEQ ID NO: 529851 - protein, 11 aa, Homo sapiens
  CDR3 for alpha chain variable domain of TCR clone 264926 (TRAV20, TRAJ31)
CAVQMRARLMF

SEQ ID NO: 529852 - protein, 14 aa, Homo sapiens
  CDR3 for beta chain variable domain of TCR clone 264926 (TRBV7-2, TRBJ2-7)
CASSPKTSFYEQYF

SEQ ID NO: 529853 - protein, 15 aa, Homo sapiens
  CDR3 for alpha chain variable domain of TCR clone 264927 (TRAV23/DV6, TRAJ44)
CAASGGTGTASKLTF

SEQ ID NO: 529854 - protein, 15 aa, Homo sapiens
  CDR3 for beta chain variable domain of TCR clone 264927 (TRBV12-4, TRBJ2-5)
CASSPPTGLQETQYF

SEQ ID NO: 529855 - protein, 12 aa, Homo sapiens
  CDR3 for alpha chain variable domain of TCR clone 264928 (TRAV4, TRAJ21)
CLVGDNFNKFYF

SEQ ID NO: 529856 - protein, 12 aa, Homo sapiens
  CDR3 for beta chain variable domain of TCR clone 264928 (TRBV11-2, TRBJ2-2)
CASSLGGGELFF

SEQ ID NO: 529857 - protein, 15 aa, Homo sapiens
  CDR3 for alpha chain variable domain of TCR clone 264929 (TRAV25, TRAJ52)
CAGRPGGTSYGKLTF

SEQ ID NO: 529858 - protein, 14 aa, Homo sapiens
  CDR3 for beta chain variable domain of TCR clone 264929 (TRBV7-9, TRBJ2-1)
CASSPRDSLYEQFF

SEQ ID NO: 529859 - protein, 21 aa, Homo sapiens
  CDR3 for alpha chain variable domain of TCR clone 264930 (TRAV1-1, TRAJ6)
CLLLLRCERLERTGESYIPTF

SEQ ID NO: 529860 - protein, 13 aa, Homo sapiens
  CDR3 for beta chain variable domain of TCR clone 264930 (TRBV10-2, TRBJ2-7)
CASGASGVYEQYF

SEQ ID NO: 529861 - protein, 12 aa, Homo sapiens
  CDR3 for alpha chain variable domain of TCR clone 264931 (TRAV12-3, TRAJ17)
CEMTLTGNKLTF

SEQ ID NO: 529862 - protein, 15 aa, Homo sapiens
  CDR3 for beta chain variable domain of TCR clone 264931 (TRBV20-1, TRBJ2-7)
CSARDRVSGIDEQYF

SEQ ID NO: 529863 - protein, 15 aa, Homo sapiens
  CDR3 for alpha chain variable domain of TCR clone 264932 (TRAV17, TRAJ10)
CATVLLTGGGNKLTF

SEQ ID NO: 529864 - protein, 16 aa, Homo sapiens
  CDR3 for beta chain variable domain of TCR clone 264932 (TRBV24-1, TRBJ2-3)
CATSDPGTGATDTQYF

SEQ ID NO: 529865 - protein, 15 aa, Homo sapiens
  CDR3 for alpha chain variable domain of TCR clone 264933 (TRAV12-1, TRAJ36)
CVGNEHQTGANNLFF

SEQ ID NO: 529866 - protein, 14 aa, Homo sapiens
  CDR3 for beta chain variable domain of TCR clone 264933 (TRBV10-3, TRBJ2-5)
CAIRTSGGQETQYF

SEQ ID NO: 529867 - protein, 11 aa, Homo sapiens
  CDR3 for alpha chain variable domain of TCR clone 264934 (TRAV21, TRAJ11)
CAVNGYSTLTF

SEQ ID NO: 529868 - protein, 15 aa, Homo sapiens
  CDR3 for beta chain variable domain of TCR clone 264934 (TRBV2, TRBJ1-2)
CASSARRGANYGYTF

SEQ ID NO: 529869 - protein, 15 aa, Homo sapiens
  CDR3 for alpha chain variable domain of TCR clone 264935 (TRAV3, TRAJ4)
CAQNMFSGGYNKLIF

SEQ ID NO: 529870 - protein, 16 aa, Homo sapiens
  CDR3 for beta chain variable domain of TCR clone 264935 (TRBV3-1, TRBJ1-6)
CASSKEFQGSYSPLHF

SEQ ID NO: 529871 - protein, 12 aa, Homo sapiens
  CDR3 for alpha chain variable domain of TCR clone 264936 (TRAV12-3, TRAJ20)
CAMVRGDYKLSF

SEQ ID NO: 529872 - protein, 16 aa, Homo sapiens
  CDR3 for beta chain variable domain of TCR clone 264936 (TRBV9, TRBJ2-1)
CASSVGGGGDYNEQFF

SEQ ID NO: 529873 - protein, 14 aa, Homo sapiens
  CDR3 for alpha chain variable domain of TCR clone 264937 (TRAV1-1, TRAJ27)
CAVIYNNNAGKSTF

SEQ ID NO: 529874 - protein, 15 aa, Homo sapiens
  CDR3 for beta chain variable domain of TCR clone 264937 (TRBV7-2, TRBJ2-1)
CTSSSGLAGGNEQFF

SEQ ID NO: 529875 - protein, 16 aa, Homo sapiens
  CDR3 for alpha chain variable domain of TCR clone 264938 (TRAV12-3, TRAJ53)
CAMSPWSGGSNYKLTF

SEQ ID NO: 529876 - protein, 13 aa, Homo sapiens
  CDR3 for beta chain variable domain of TCR clone 264938 (TRBV7-3, TRBJ1-1)
CASSQDWGAEAFF

SEQ ID NO: 529877 - protein, 12 aa, Homo sapiens
  CDR3 for alpha chain variable domain of TCR clone 264939 (TRAV12-3, TRAJ17)
CAMTLTGNKLTF

SEQ ID NO: 529878 - protein, 16 aa, Homo sapiens
  CDR3 for beta chain variable domain of TCR clone 264939 (TRBV12-4, TRBJ2-5)
CASSFFVRGRQETQFF

SEQ ID NO: 529879 - protein, 17 aa, Homo sapiens
  CDR3 for alpha chain variable domain of TCR clone 264940 (TRAV21, TRAJ52)
CCEAFPSGCTSYGKLTF

SEQ ID NO: 529880 - protein, 15 aa, Homo sapiens
  CDR3 for beta chain variable domain of TCR clone 264940 (TRBV20-1, TRBJ2-7)
CSARDRVSGMDEQYF

SEQ ID NO: 529881 - protein, 16 aa, Homo sapiens
  CDR3 for alpha chain variable domain of TCR clone 264941 (TRAV12-3, TRAJ58)
CAMTDTEETSGSRLTF

SEQ ID NO: 529882 - protein, 12 aa, Homo sapiens
  CDR3 for beta chain variable domain of TCR clone 264941 (TRBV7-8, TRBJ2-7)
CASSLGDREQYF

SEQ ID NO: 529883 - protein, 11 aa, Homo sapiens
  CDR3 for alpha chain variable domain of TCR clone 264942 (TRAV3, TRAJ21)
CAVGNCNKFYS

SEQ ID NO: 529884 - protein, 16 aa, Homo sapiens
  CDR3 for beta chain variable domain of TCR clone 264942 (TRBV19, TRBJ2-1)
CASSRAGPSSYNEQFF

SEQ ID NO: 529885 - protein, 13 aa, Homo sapiens
  CDR3 for alpha chain variable domain of TCR clone 264943 (TRAV13-1, TRAJ39)
CSKYSNAGNMLTF

SEQ ID NO: 529886 - protein, 14 aa, Homo sapiens
  CDR3 for beta chain variable domain of TCR clone 264943 (TRBV19, TRBJ2-2)
CASSTLHRSGELFF

SEQ ID NO: 529887 - protein, 14 aa, Homo sapiens
  CDR3 for alpha chain variable domain of TCR clone 264944 (TRAV8-3, TRAJ39)
CAVGANNADNMLTF

SEQ ID NO: 529888 - protein, 13 aa, Homo sapiens
  CDR3 for beta chain variable domain of TCR clone 264944 (TRBV3-1, TRBJ2-5)
CASSPVLSETQYF

SEQ ID NO: 529889 - protein, 18 aa, Homo sapiens
  CDR3 for alpha chain variable domain of TCR clone 264945 (TRAV4, TRAJ3)
CCVLLPRGPDSSASKIIF

SEQ ID NO: 529890 - protein, 13 aa, Homo sapiens
  CDR3 for beta chain variable domain of TCR clone 264945 (TRBV7-3, TRBJ1-1)
CASSQDWGAEAFF

SEQ ID NO: 529891 - protein, 13 aa, Homo sapiens
  CDR3 for alpha chain variable domain of TCR clone 264946 (TRAV8-3, TRAJ44)
CAVVPGTASKLTF

SEQ ID NO: 529892 - protein, 14 aa, Homo sapiens
  CDR3 for beta chain variable domain of TCR clone 264946 (TRBV11-2, TRBJ2-3)
CASSRLARTYTQHF

SEQ ID NO: 529893 - protein, 14 aa, Homo sapiens
  CDR3 for alpha chain variable domain of TCR clone 264947 (TRAV1-2, TRAJ16)
CAVNRFSDGQKLLF

SEQ ID NO: 529894 - protein, 13 aa, Homo sapiens
  CDR3 for beta chain variable domain of TCR clone 264947 (TRBV7-3, TRBJ1-1)
CASSQDWGAQAFF

SEQ ID NO: 529895 - protein, 12 aa, Homo sapiens
  CDR3 for alpha chain variable domain of TCR clone 264948 (TRAV12-3, TRAJ17)
CAMTLTGNKLTF

SEQ ID NO: 529896 - protein, 13 aa, Homo sapiens
  CDR3 for beta chain variable domain of TCR clone 264948 (TRBV27, TRBJ2-1)
CASRTVGVGEQFF

SEQ ID NO: 529897 - protein, 15 aa, Homo sapiens
  CDR3 for alpha chain variable domain of TCR clone 264949 (TRAV12-3, TRAJ10)
CASYILTGGGNQLTF

SEQ ID NO: 529898 - protein, 15 aa, Homo sapiens
  CDR3 for beta chain variable domain of TCR clone 264949 (TRBV7-2, TRBJ1-6)
CASSLGPDRGMPLHF

SEQ ID NO: 529899 - protein, 15 aa, Homo sapiens
  CDR3 for alpha chain variable domain of TCR clone 264950 (TRAV12-1, TRAJ45)
CVVLRGGGGADGLTF

SEQ ID NO: 529900 - protein, 14 aa, Homo sapiens
  CDR3 for beta chain variable domain of TCR clone 264950 (TRBV11-2, TRBJ2-5)
CASSRTGGIETQYL

SEQ ID NO: 529901 - protein, 16 aa, Homo sapiens
  CDR3 for alpha chain variable domain of TCR clone 264951 (TRAV30, TRAJ24)
CGTEIVDADSWGKFQF

SEQ ID NO: 529902 - protein, 15 aa, Homo sapiens
  CDR3 for beta chain variable domain of TCR clone 264951 (TRBV18, TRBJ2-1)
CASLQDRGRDNEQFF

SEQ ID NO: 529903 - protein, 14 aa, Homo sapiens
  CDR3 for alpha chain variable domain of TCR clone 264952 (TRAV1-2, TRAJ16)
CTVNRFSDGQKLLF

SEQ ID NO: 529904 - protein, 14 aa, Homo sapiens
  CDR3 for beta chain variable domain of TCR clone 264952 (TRBV12-5, TRBJ2-5)
CASGSRTHQETQYF

SEQ ID NO: 529905 - protein, 14 aa, Homo sapiens
  CDR3 for alpha chain variable domain of TCR clone 264953 (TRAV1-2, TRAJ8)
CAVREETGFQKLVF

SEQ ID NO: 529906 - protein, 15 aa, Homo sapiens
  CDR3 for beta chain variable domain of TCR clone 264953 (TRBV6-3, TRBJ2-7)
CASSSPGTVFYEQYC

SEQ ID NO: 529907 - protein, 12 aa, Homo sapiens
  CDR3 for alpha chain variable domain of TCR clone 264954 (TRAV1-2, TRAJ33)
CAALDSNYQLIW

SEQ ID NO: 529908 - protein, 16 aa, Homo sapiens
  CDR3 for beta chain variable domain of TCR clone 264954 (TRBV2, TRBJ2-1)
CASSVGGSLSYNEQFF

SEQ ID NO: 529909 - protein, 16 aa, Homo sapiens
  CDR3 for alpha chain variable domain of TCR clone 264955 (TRAV3, TRAJ10)
CAVRDMRAGGGNKLTF

SEQ ID NO: 529910 - protein, 15 aa, Homo sapiens
  CDR3 for beta chain variable domain of TCR clone 264955 (TRBV7-3, TRBJ2-1)
CASSLGQGPFGEQFF

SEQ ID NO: 529911 - protein, 13 aa, Homo sapiens
  CDR3 for alpha chain variable domain of TCR clone 264956 (TRAV8-1, TRAJ32)
CAAAGGATNKLIL

SEQ ID NO: 529912 - protein, 15 aa, Homo sapiens
  CDR3 for beta chain variable domain of TCR clone 264956 (TRBV7-9, TRBJ2-7)
CASSLALAEAYEQYF

SEQ ID NO: 529913 - protein, 14 aa, Homo sapiens
  CDR3 for alpha chain variable domain of TCR clone 264957 (TRAV26-1, TRAJ34)
CIVRVAYNTGKLIF

SEQ ID NO: 529914 - protein, 16 aa, Homo sapiens
  CDR3 for beta chain variable domain of TCR clone 264957 (TRBV7-3, TRBJ2-2)
CASSLKRGTLSGELFF

SEQ ID NO: 529915 - protein, 14 aa, Homo sapiens
  CDR3 for alpha chain variable domain of TCR clone 264958 (TRAV1-2, TRAJ8)
CAVREDTGFQKLVF

SEQ ID NO: 529916 - protein, 15 aa, Homo sapiens
  CDR3 for beta chain variable domain of TCR clone 264958 (TRBV9, TRBJ1-6)
CPSSVAGTGDSPLHF

SEQ ID NO: 529917 - protein, 14 aa, Homo sapiens
  CDR3 for alpha chain variable domain of TCR clone 264959 (TRAV26-1, TRAJ38)
CIADNACNNRKLIW

SEQ ID NO: 529918 - protein, 13 aa, Homo sapiens
  CDR3 for beta chain variable domain of TCR clone 264959 (TRBV2, TRBJ1-5)
CATAGPGNQPQHF

SEQ ID NO: 529919 - protein, 15 aa, Homo sapiens
  CDR3 for alpha chain variable domain of TCR clone 264960 (TRAV2, TRAJ15)
CAVEDWGQSGTALIF

SEQ ID NO: 529920 - protein, 13 aa, Homo sapiens
  CDR3 for beta chain variable domain of TCR clone 264960 (TRBV10-2, TRBJ2-7)
CASGASGGYEQYF

SEQ ID NO: 529921 - protein, 21 aa, Homo sapiens
  CDR3 for alpha chain variable domain of TCR clone 264961 (TRAV3, TRAJ17)
CAVRARRGGRSCRQQANYWRR

SEQ ID NO: 529922 - protein, 14 aa, Homo sapiens
  CDR3 for beta chain variable domain of TCR clone 264961 (TRBV4-1, TRBJ2-2)
CASSQAVNTGELFF

SEQ ID NO: 529923 - protein, 14 aa, Homo sapiens
  CDR3 for alpha chain variable domain of TCR clone 264962 (TRAV20, TRAJ10)
CAVRVEGGGNKLTF

SEQ ID NO: 529924 - protein, 18 aa, Homo sapiens
  CDR3 for beta chain variable domain of TCR clone 264962 (TRBV24-1, TRBJ2-1)
CATGDLMFLGRGVHEQFF

SEQ ID NO: 529925 - protein, 13 aa, Homo sapiens
  CDR3 for alpha chain variable domain of TCR clone 264963 (TRAV13-1, TRAJ6)
CARGSGGSYIPTF

SEQ ID NO: 529926 - protein, 14 aa, Homo sapiens
  CDR3 for beta chain variable domain of TCR clone 264963 (TRBV18, TRBJ2-5)
CASSPGVSQETQYF

SEQ ID NO: 529927 - protein, 12 aa, Homo sapiens
  CDR3 for alpha chain variable domain of TCR clone 264964 (TRAV2, TRAJ31)
CAVEDNNPRLMF

SEQ ID NO: 529928 - protein, 16 aa, Homo sapiens
  CDR3 for beta chain variable domain of TCR clone 264964 (TRBV10-3, TRBJ2-1)
CAISGVGDGGGGEQFF

SEQ ID NO: 529929 - protein, 14 aa, Homo sapiens
  CDR3 for alpha chain variable domain of TCR clone 264965 (TRAV1-2, TRAJ8)
CAVREDTGFLKLVF

SEQ ID NO: 529930 - protein, 12 aa, Homo sapiens
  CDR3 for beta chain variable domain of TCR clone 264965 (TRBV11-2, TRBJ2-2)
CASSLPTGELFF

SEQ ID NO: 529931 - protein, 13 aa, Homo sapiens
  CDR3 for alpha chain variable domain of TCR clone 264966 (TRAV12-2, TRAJ24)
CAVSTDSWGKLQF

SEQ ID NO: 529932 - protein, 12 aa, Homo sapiens
  CDR3 for beta chain variable domain of TCR clone 264966 (TRBV7-6, TRBJ2-7)
CDSSLADSEQYF

SEQ ID NO: 529933 - protein, 11 aa, Homo sapiens
  CDR3 for alpha chain variable domain of TCR clone 264967 (TRAV21, TRAJ34)
CAVTNTDKLIF

SEQ ID NO: 529934 - protein, 12 aa, Homo sapiens
  CDR3 for beta chain variable domain of TCR clone 264967 (TRBV19, TRBJ1-5)
CASSIAQQPQHF

SEQ ID NO: 529935 - protein, 12 aa, Homo sapiens
  CDR3 for alpha chain variable domain of TCR clone 264968 (TRAV27, TRAJ41)
CAGRNSGYALNF

SEQ ID NO: 529936 - protein, 15 aa, Homo sapiens
  CDR3 for beta chain variable domain of TCR clone 264968 (TRBV20-1, TRBJ1-5)
CSATSDRGLGHPQHF

SEQ ID NO: 529937 - protein, 20 aa, Homo sapiens
  CDR3 for alpha chain variable domain of TCR clone 264969 (TRAV12-2, TRAJ52)
SSVIQPPTSFRSTSYGKLTF

SEQ ID NO: 529938 - protein, 11 aa, Homo sapiens
  CDR3 for beta chain variable domain of TCR clone 264969 (TRBV11-2, TRBJ2-2)
CASSLPGELFF

SEQ ID NO: 529939 - protein, 14 aa, Homo sapiens
  CDR3 for alpha chain variable domain of TCR clone 264970 (TRAV12-2, TRAJ40)
CAVKIPSGTYKYIF

SEQ ID NO: 529940 - protein, 13 aa, Homo sapiens
  CDR3 for beta chain variable domain of TCR clone 264970 (TRBV7-2, TRBJ1-1)
CASNLKGAKVAFF

SEQ ID NO: 529941 - protein, 17 aa, Homo sapiens
  CDR3 for alpha chain variable domain of TCR clone 264971 (TRAV3, TRAJ6)
CAVRDVPRAGGSYIPTF

SEQ ID NO: 529942 - protein, 13 aa, Homo sapiens
  CDR3 for beta chain variable domain of TCR clone 264971 (TRBV20-1, TRBJ1-1)
CSARGGGNTEAFF

SEQ ID NO: 529943 - protein, 17 aa, Homo sapiens
  CDR3 for alpha chain variable domain of TCR clone 264972 (TRAV12-2, TRAJ18)
CAVNPLDRGSTLGRLSF

SEQ ID NO: 529944 - protein, 15 aa, Homo sapiens
  CDR3 for beta chain variable domain of TCR clone 264972 (TRBV18, TRBJ2-6)
CASSPSYAGANVLTF

SEQ ID NO: 529945 - protein, 15 aa, Homo sapiens
  CDR3 for alpha chain variable domain of TCR clone 264973 (TRAV12-3, TRAJ6)
CAMSATTGGSYIPTF

SEQ ID NO: 529946 - protein, 16 aa, Homo sapiens
  CDR3 for beta chain variable domain of TCR clone 264973 (TRBV20-1, TRBJ1-2)
CRASMGQGVANYGYIF

SEQ ID NO: 529947 - protein, 13 aa, Homo sapiens
  CDR3 for alpha chain variable domain of TCR clone 264974 (TRAV8-6, TRAJ54)
CAVSEEGAQKLVF

SEQ ID NO: 529948 - protein, 16 aa, Homo sapiens
  CDR3 for beta chain variable domain of TCR clone 264974 (TRBV12-5, TRBJ2-5)
CASGPRTSGNQETQYF

SEQ ID NO: 529949 - protein, 15 aa, Homo sapiens
  CDR3 for alpha chain variable domain of TCR clone 264975 (TRAV29/DV5, TRAJ24)
GAASGATDSWGKFQF

SEQ ID NO: 529950 - protein, 12 aa, Homo sapiens
  CDR3 for beta chain variable domain of TCR clone 264975 (TRBV11-2, TRBJ2-2)
CASSLPTGELFF

SEQ ID NO: 529951 - protein, 14 aa, Homo sapiens
  CDR3 for alpha chain variable domain of TCR clone 264976 (TRAV1-2, TRAJ8)
CAVREDTGFQKLVF

SEQ ID NO: 529952 - protein, 11 aa, Homo sapiens
  CDR3 for beta chain variable domain of TCR clone 264976 (TRBV11-2, TRBJ2-7)
CASSSDYEQYF

SEQ ID NO: 529953 - protein, 13 aa, Homo sapiens
  CDR3 for alpha chain variable domain of TCR clone 264977 (TRAV2, TRAJ29)
CAAQNSGNTPLVF

SEQ ID NO: 529954 - protein, 11 aa, Homo sapiens
  CDR3 for beta chain variable domain of TCR clone 264977 (TRBV7-8, TRBJ2-7)
CASSLSLEQYF

SEQ ID NO: 529955 - protein, 13 aa, Homo sapiens
  CDR3 for alpha chain variable domain of TCR clone 264978 (TRAV21, TRAJ57)
CAVTQGGSEKLVF

SEQ ID NO: 529956 - protein, 15 aa, Homo sapiens
  CDR3 for beta chain variable domain of TCR clone 264978 (TRBV7-2, TRBJ2-1)
CASTHGTGIYNEQFF

SEQ ID NO: 529957 - protein, 15 aa, Homo sapiens
  CDR3 for alpha chain variable domain of TCR clone 264979 (TRAV26-1, TRAJ29)
CIVRVEGSGNTHLVF

SEQ ID NO: 529958 - protein, 15 aa, Homo sapiens
  CDR3 for beta chain variable domain of TCR clone 264979 (TRBV7-9, TRBJ1-5)
CASSQGHQPNQTQHF

SEQ ID NO: 529959 - protein, 12 aa, Homo sapiens
  CDR3 for alpha chain variable domain of TCR clone 264980 (TRAV8-3, TRAJ26)
CAGDNYGQNFVF

SEQ ID NO: 529960 - protein, 16 aa, Homo sapiens
  CDR3 for beta chain variable domain of TCR clone 264980 (TRBV13, TRBJ2-7)
CASSSRESGRTYEQYF

SEQ ID NO: 529961 - protein, 15 aa, Homo sapiens
  CDR3 for alpha chain variable domain of TCR clone 264981 (TRAV21, TRAJ40)
CAVRPQTSGTYKYIF

SEQ ID NO: 529962 - protein, 13 aa, Homo sapiens
  CDR3 for beta chain variable domain of TCR clone 264981 (TRBV5-5, TRBJ1-2)
CASSFWRGEDYTF

SEQ ID NO: 529963 - protein, 11 aa, Homo sapiens
  CDR3 for alpha chain variable domain of TCR clone 264982 (TRAV12-3, TRAJ27)
CAMANAGKSTF

SEQ ID NO: 529964 - protein, 12 aa, Homo sapiens
  CDR3 for beta chain variable domain of TCR clone 264982 (TRBV11-2, TRBJ2-2)
CASSLPTGELFF

SEQ ID NO: 529965 - protein, 13 aa, Homo sapiens
  CDR3 for alpha chain variable domain of TCR clone 264983 (TRAV27, TRAJ45)
CMSSGGGADGLTF

SEQ ID NO: 529966 - protein, 17 aa, Homo sapiens
  CDR3 for beta chain variable domain of TCR clone 264983 (TRBV11-2, TRBJ2-1)
CASSLCPPGVEYNEQFF

SEQ ID NO: 529967 - protein, 12 aa, Homo sapiens
  CDR3 for alpha chain variable domain of TCR clone 264984 (TRAV3, TRAJ43)
CAVRDPNNDMRF

SEQ ID NO: 529968 - protein, 12 aa, Homo sapiens
  CDR3 for beta chain variable domain of TCR clone 264984 (TRBV24-1, TRBJ1-1)
CATSDSDRGALF

SEQ ID NO: 529969 - protein, 13 aa, Homo sapiens
  CDR3 for alpha chain variable domain of TCR clone 264985 (TRAV36/DV7, TRAJ34)
CAVGEVNTDKLIF

SEQ ID NO: 529970 - protein, 14 aa, Homo sapiens
  CDR3 for beta chain variable domain of TCR clone 264985 (TRBV12-5, TRBJ2-5)
CASGSRTHQETQYF

SEQ ID NO: 529971 - protein, 11 aa, Homo sapiens
  CDR3 for alpha chain variable domain of TCR clone 264986 (TRAV3, TRAJ21)
FAMGNFNKFYF

SEQ ID NO: 529972 - protein, 16 aa, Homo sapiens
  CDR3 for beta chain variable domain of TCR clone 264986 (TRBV19, TRBJ2-1)
CASSKAGPSSYNEQFF

SEQ ID NO: 529973 - protein, 16 aa, Homo sapiens
  CDR3 for alpha chain variable domain of TCR clone 264987 (TRAV21, TRAJ17)
CAVRPGEEAAGNKLTF

SEQ ID NO: 529974 - protein, 14 aa, Homo sapiens
  CDR3 for beta chain variable domain of TCR clone 264987 (TRBV7-2, TRBJ2-7)
CASSPKTSFYEQYF

SEQ ID NO: 529975 - protein, 15 aa, Homo sapiens
  CDR3 for alpha chain variable domain of TCR clone 264988 (TRAV2, TRAJ15)
CAVEDRGQAGTALIF

SEQ ID NO: 529976 - protein, 12 aa, Homo sapiens
  CDR3 for beta chain variable domain of TCR clone 264988 (TRBV12-4, TRBJ1-3)
CASSFSGNTIYF

SEQ ID NO: 529977 - protein, 14 aa, Homo sapiens
  CDR3 for alpha chain variable domain of TCR clone 264989 (TRAV2, TRAJ9)
CAVDPNTGGFKTIF

SEQ ID NO: 529978 - protein, 13 aa, Homo sapiens
  CDR3 for beta chain variable domain of TCR clone 264989 (TRBV20-1, TRBJ2-1)
CSASTGISNEQFF

SEQ ID NO: 529979 - protein, 15 aa, Homo sapiens
  CDR3 for alpha chain variable domain of TCR clone 264990 (TRAV26-1, TRAJ22)
CIVRVSFWFCKATDL

SEQ ID NO: 529980 - protein, 16 aa, Homo sapiens
  CDR3 for beta chain variable domain of TCR clone 264990 (TRBV24-1, TRBJ2-3)
CATSDTGTGAKDTQYF

SEQ ID NO: 529981 - protein, 15 aa, Homo sapiens
  CDR3 for alpha chain variable domain of TCR clone 264991 (TRAV3, TRAJ13)
CAVRVYSGGYQKVTF

SEQ ID NO: 529982 - protein, 16 aa, Homo sapiens
  CDR3 for beta chain variable domain of TCR clone 264991 (TRBV2, TRBJ2-3)
CASSTSVEGVTDTQYF

SEQ ID NO: 529983 - protein, 15 aa, Homo sapiens
  CDR3 for alpha chain variable domain of TCR clone 264992 (TRAV3, TRAJ3)
CAVRDISSSASKIIF

SEQ ID NO: 529984 - protein, 15 aa, Homo sapiens
  CDR3 for beta chain variable domain of TCR clone 264992 (TRBV20-1, TRBJ2-7)
CSARDRVSGMDEQYF

SEQ ID NO: 529985 - protein, 17 aa, Homo sapiens
  CDR3 for alpha chain variable domain of TCR clone 264993 (TRAV3, TRAJ6)
CAVRDGPRAGGSYIPTF

SEQ ID NO: 529986 - protein, 15 aa, Homo sapiens
  CDR3 for beta chain variable domain of TCR clone 264993 (TRBV7-6, TRBJ1-6)
CASSSPGRGNSPLHF

SEQ ID NO: 529987 - protein, 13 aa, Homo sapiens
  CDR3 for alpha chain variable domain of TCR clone 264994 (TRAV8-3, TRAJ21)
CAVGAYNFTKFYF

SEQ ID NO: 529988 - protein, 16 aa, Homo sapiens
  CDR3 for beta chain variable domain of TCR clone 264994 (TRBV19, TRBJ2-1)
CASSMGGGSSYNEQFF

SEQ ID NO: 529989 - protein, 13 aa, Homo sapiens
  CDR3 for alpha chain variable domain of TCR clone 264995 (TRAV13-1, TRAJ5)
CAASDTGRRALTF

SEQ ID NO: 529990 - protein, 15 aa, Homo sapiens
  CDR3 for beta chain variable domain of TCR clone 264995 (TRBV28, TRBJ2-1)
CASSIIAGGRSEQFF

SEQ ID NO: 529991 - protein, 14 aa, Homo sapiens
  CDR3 for alpha chain variable domain of TCR clone 264996 (TRAV1-2, TRAJ15)
CAVRDRQAGTALIC

SEQ ID NO: 529992 - protein, 17 aa, Homo sapiens
  CDR3 for beta chain variable domain of TCR clone 264996 (TRBV7-8, TRBJ2-6)
CASSAGTGGAGANVLTF

SEQ ID NO: 529993 - protein, 10 aa, Homo sapiens
  CDR3 for alpha chain variable domain of TCR clone 264997 (TRAV12-3, TRAJ18)
CAMSAEAQPW

SEQ ID NO: 529994 - protein, 13 aa, Homo sapiens
  CDR3 for beta chain variable domain of TCR clone 264997 (TRBV15, TRBJ1-6)
CGTSGGLNSPLHF

SEQ ID NO: 529995 - protein, 14 aa, Homo sapiens
  CDR3 for alpha chain variable domain of TCR clone 264998 (TRAV35, TRAJ50)
CAGHRKTSYDKVIF

SEQ ID NO: 529996 - protein, 12 aa, Homo sapiens
  CDR3 for beta chain variable domain of TCR clone 264998 (TRBV7-8, TRBJ2-7)
CASSLGDREQYF

SEQ ID NO: 529997 - protein, 13 aa, Homo sapiens
  CDR3 for alpha chain variable domain of TCR clone 264999 (TRAV13-1, TRAJ29)
CAASSGLNTPLVF

SEQ ID NO: 529998 - protein, 14 aa, Homo sapiens
  CDR3 for beta chain variable domain of TCR clone 264999 (TRBV20-1, TRBJ2-5)
CSASDSGSGETQYF

SEQ ID NO: 529999 - protein, 13 aa, Homo sapiens
  CDR3 for alpha chain variable domain of TCR clone 265000 (TRAV3, TRAJ3)
CAVADSSASKIIF

SEQ ID NO: 530000 - protein, 13 aa, Homo sapiens
  CDR3 for beta chain variable domain of TCR clone 265000 (TRBV4-2, TRBJ1-1)
CASSQAGNTEAFF

SEQ ID NO: 530001 - protein, 14 aa, Homo sapiens
  CDR3 for alpha chain variable domain of TCR clone 265001 (TRAV4, TRAJ6)
CLVGEAGGRYIPTF

SEQ ID NO: 530002 - protein, 16 aa, Homo sapiens
  CDR3 for beta chain variable domain of TCR clone 265001 (TRBV7-6, TRBJ2-1)
CASSLNEGPSYNEQFF

SEQ ID NO: 530003 - protein, 13 aa, Homo sapiens
  CDR3 for alpha chain variable domain of TCR clone 265002 (TRAV24, TRAJ37)
CAPLSSNTGKLIF

SEQ ID NO: 530004 - protein, 13 aa, Homo sapiens
  CDR3 for beta chain variable domain of TCR clone 265002 (TRBV10-3, TRBJ2-7)
CASKLAVNYEQYF

SEQ ID NO: 530005 - protein, 13 aa, Homo sapiens
  CDR3 for alpha chain variable domain of TCR clone 265003 (TRAV27, TRAJ57)
CRSAQGGSEKLVF

SEQ ID NO: 530006 - protein, 17 aa, Homo sapiens
  CDR3 for beta chain variable domain of TCR clone 265003 (TRBV13, TRBJ2-3)
CASSLSRVAGGRNTQYF

SEQ ID NO: 530007 - protein, 18 aa, Homo sapiens
  CDR3 for alpha chain variable domain of TCR clone 265004 (TRAV13-1, TRAJ28)
CAASPVPILWGWELPTHF

SEQ ID NO: 530008 - protein, 13 aa, Homo sapiens
  CDR3 for beta chain variable domain of TCR clone 265004 (TRBV15, TRBJ2-7)
CATSTTGNYEQYF

SEQ ID NO: 530009 - protein, 14 aa, Homo sapiens
  CDR3 for alpha chain variable domain of TCR clone 265005 (TRAV12-2, TRAJ45)
CAVNIGGGADGLTF

SEQ ID NO: 530010 - protein, 12 aa, Homo sapiens
  CDR3 for beta chain variable domain of TCR clone 265005 (TRBV12-4, TRBJ2-3)
CASSTLPDTQYF

SEQ ID NO: 530011 - protein, 14 aa, Homo sapiens
  CDR3 for alpha chain variable domain of TCR clone 265006 (TRAV35, TRAJ13)
CAGSPSGDYQKVTF

SEQ ID NO: 530012 - protein, 17 aa, Homo sapiens
  CDR3 for beta chain variable domain of TCR clone 265006 (TRBV7-6, TRBJ2-5)
CASSPGLADPWGETQYF

SEQ ID NO: 530013 - protein, 15 aa, Homo sapiens
  CDR3 for alpha chain variable domain of TCR clone 265007 (TRAV29/DV5, TRAJ40)
CAASEGTSGTYKYIV

SEQ ID NO: 530014 - protein, 15 aa, Homo sapiens
  CDR3 for beta chain variable domain of TCR clone 265007 (TRBV27, TRBJ1-5)
CASKIQGAGNQPQHF

SEQ ID NO: 530015 - protein, 15 aa, Homo sapiens
  CDR3 for alpha chain variable domain of TCR clone 265008 (TRAV4, TRAJ39)
CLVGPNNNAGNMLTF

SEQ ID NO: 530016 - protein, 14 aa, Homo sapiens
  CDR3 for beta chain variable domain of TCR clone 265008 (TRBV19, TRBJ1-1)
CASSIREMNTEAFF

SEQ ID NO: 530017 - protein, 17 aa, Homo sapiens
  CDR3 for alpha chain variable domain of TCR clone 265009 (TRAV3, TRAJ6)
CAVRDGPRAGGSYIPTF

SEQ ID NO: 530018 - protein, 14 aa, Homo sapiens
  CDR3 for beta chain variable domain of TCR clone 265009 (TRBV7-2, TRBJ2-7)
CASRPKTSFSEQSF

SEQ ID NO: 530019 - protein, 21 aa, Homo sapiens
  CDR3 for alpha chain variable domain of TCR clone 265010 (TRAV26-1, )
CIVSHRVEGFWNQIPDIQNPD

SEQ ID NO: 530020 - protein, 14 aa, Homo sapiens
  CDR3 for beta chain variable domain of TCR clone 265010 (TRBV20-1, TRBJ2-7)
CSAWTALSSYEHYF

SEQ ID NO: 530021 - protein, 14 aa, Homo sapiens
  CDR3 for alpha chain variable domain of TCR clone 265011 (TRAV12-2, TRAJ13)
CAVMKTGGYQKVTF

SEQ ID NO: 530022 - protein, 16 aa, Homo sapiens
  CDR3 for beta chain variable domain of TCR clone 265011 (TRBV20-1, TRBJ1-2)
CSASMGQGVANYGYAF

SEQ ID NO: 530023 - protein, 16 aa, Homo sapiens
  CDR3 for alpha chain variable domain of TCR clone 265012 (TRAV12-3, TRAJ53)
CAMSPGSGGSNYKLTI

SEQ ID NO: 530024 - protein, 16 aa, Homo sapiens
  CDR3 for beta chain variable domain of TCR clone 265012 (TRBV19, TRBJ2-1)
CASSKAGPSSYNEQFF

SEQ ID NO: 530025 - protein, 11 aa, Homo sapiens
  CDR3 for alpha chain variable domain of TCR clone 265013 (TRAV12-1, TRAJ26)
CVVTYGQNFVF

SEQ ID NO: 530026 - protein, 15 aa, Homo sapiens
  CDR3 for beta chain variable domain of TCR clone 265013 (TRBV12-4, TRBJ2-5)
CASSGTGQAQETQYF

SEQ ID NO: 530027 - protein, 15 aa, Homo sapiens
  CDR3 for alpha chain variable domain of TCR clone 265014 (TRAV14/DV4, TRAJ26)
CAMREGQNYGQNFVF

SEQ ID NO: 530028 - protein, 14 aa, Homo sapiens
  CDR3 for beta chain variable domain of TCR clone 265014 (TRBV7-2, TRBJ2-5)
CASSPRGSSETQYF

SEQ ID NO: 530029 - protein, 16 aa, Homo sapiens
  CDR3 for alpha chain variable domain of TCR clone 265015 (TRAV3, TRAJ10)
CAVRDMNAGGGNKLTF

SEQ ID NO: 530030 - protein, 21 aa, Homo sapiens
  CDR3 for beta chain variable domain of TCR clone 265015 (TRBV24-1, TRBJ2-5)
ESAIPNQTALYFCATRETQYF

SEQ ID NO: 530031 - protein, 17 aa, Homo sapiens
  CDR3 for alpha chain variable domain of TCR clone 265016 (TRAV3, TRAJ42)
CAVRDRDYGGSQGNLIF

SEQ ID NO: 530032 - protein, 16 aa, Homo sapiens
  CDR3 for beta chain variable domain of TCR clone 265016 (TRBV7-3, TRBJ2-2)
CASSLKRGTLSWELFF

SEQ ID NO: 530033 - protein, 13 aa, Homo sapiens
  CDR3 for alpha chain variable domain of TCR clone 265017 (TRAV12-2, TRAJ52)
CAVSGTSYGKLTF

SEQ ID NO: 530034 - protein, 14 aa, Homo sapiens
  CDR3 for beta chain variable domain of TCR clone 265017 (TRBV7-8, TRBJ1-2)
CASSPDSLSYGYTF

SEQ ID NO: 530035 - protein, 11 aa, Homo sapiens
  CDR3 for alpha chain variable domain of TCR clone 265018 (TRAV26-1, TRAJ37)
CIVRVGRKLIF

SEQ ID NO: 530036 - protein, 13 aa, Homo sapiens
  CDR3 for beta chain variable domain of TCR clone 265018 (TRBV7-3, TRBJ2-1)
CASSPVAYNEQFF

SEQ ID NO: 530037 - protein, 15 aa, Homo sapiens
  CDR3 for alpha chain variable domain of TCR clone 265019 (TRAV21, TRAJ37)
CAVRPTLSNKGKLIF

SEQ ID NO: 530038 - protein, 16 aa, Homo sapiens
  CDR3 for beta chain variable domain of TCR clone 265019 (TRBV24-1, TRBJ2-3)
RATSDRRQDLTDTQYF

SEQ ID NO: 530039 - protein, 14 aa, Homo sapiens
  CDR3 for alpha chain variable domain of TCR clone 265020 (TRAV34, TRAJ22)
CGADTSGYARQLTF

SEQ ID NO: 530040 - protein, 15 aa, Homo sapiens
  CDR3 for beta chain variable domain of TCR clone 265020 (TRBV27, TRBJ2-1)
CASSNGGGSSNEQFF

SEQ ID NO: 530041 - protein, 17 aa, Homo sapiens
  CDR3 for alpha chain variable domain of TCR clone 265021 (TRAV13-1, TRAJ52)
CAASSGAGGTSYGKLTF

SEQ ID NO: 530042 - protein, 16 aa, Homo sapiens
  CDR3 for beta chain variable domain of TCR clone 265021 (TRBV28, TRBJ2-7)
CASSPWVATGDLSQYF

SEQ ID NO: 530043 - protein, 11 aa, Homo sapiens
  CDR3 for alpha chain variable domain of TCR clone 265022 (TRAV23/DV6, TRAJ49)
CAVAPVTSSIL

SEQ ID NO: 530044 - protein, 13 aa, Homo sapiens
  CDR3 for beta chain variable domain of TCR clone 265022 (TRBV6-1, TRBJ1-1)
CASSRHGNTEAFF

SEQ ID NO: 530045 - protein, 14 aa, Homo sapiens
  CDR3 for alpha chain variable domain of TCR clone 265023 (TRAV13-1, TRAJ26)
CAASSAHYGQNVVF

SEQ ID NO: 530046 - protein, 17 aa, Homo sapiens
  CDR3 for beta chain variable domain of TCR clone 265023 (TRBV25-1, TRBJ2-5)
CASSRRGGRGGQETQYF

SEQ ID NO: 530047 - protein, 13 aa, Homo sapiens
  CDR3 for alpha chain variable domain of TCR clone 265024 (TRAV8-3, TRAJ37)
CAVPSSNPGKLIF

SEQ ID NO: 530048 - protein, 12 aa, Homo sapiens
  CDR3 for beta chain variable domain of TCR clone 265024 (TRBV11-2, TRBJ2-1)
CASSPGNNEQFF

SEQ ID NO: 530049 - protein, 15 aa, Homo sapiens
  CDR3 for alpha chain variable domain of TCR clone 265025 (TRAV3, TRAJ4)
CAVRDGTGGYNKLIF

SEQ ID NO: 530050 - protein, 18 aa, Homo sapiens
  CDR3 for beta chain variable domain of TCR clone 265025 (TRBV24-1, TRBJ2-1)
CATSDLMFLGRGVHEQFF

SEQ ID NO: 530051 - protein, 16 aa, Homo sapiens
  CDR3 for alpha chain variable domain of TCR clone 265026 (TRAV3, TRAJ37)
CAVRGKGSGNAGKLIF

SEQ ID NO: 530052 - protein, 13 aa, Homo sapiens
  CDR3 for beta chain variable domain of TCR clone 265026 (TRBV28, TRBJ2-5)
CASSFAGGETQYF

SEQ ID NO: 530053 - protein, 13 aa, Homo sapiens
  CDR3 for alpha chain variable domain of TCR clone 265027 (TRAV29/DV5, TRAJ31)
CAASRNNNARLMF

SEQ ID NO: 530054 - protein, 17 aa, Homo sapiens
  CDR3 for beta chain variable domain of TCR clone 265027 (TRBV18, TRBJ2-1)
CASSKGLSGGADNEQFF

SEQ ID NO: 530055 - protein, 16 aa, Homo sapiens
  CDR3 for alpha chain variable domain of TCR clone 265028 (TRAV30, TRAJ24)
CGTEIVDAGSWGKFQF

SEQ ID NO: 530056 - protein, 14 aa, Homo sapiens
  CDR3 for beta chain variable domain of TCR clone 265028 (TRBV5-5, TRBJ1-2)
CASSLDPYNYGYAF

SEQ ID NO: 530057 - protein, 14 aa, Homo sapiens
  CDR3 for alpha chain variable domain of TCR clone 265029 (TRAV1-2, TRAJ8)
CAVREDTGFQKLVF

SEQ ID NO: 530058 - protein, 15 aa, Homo sapiens
  CDR3 for beta chain variable domain of TCR clone 265029 (TRBV15, TRBJ1-5)
CATSTTGVVNQPQHF

SEQ ID NO: 530059 - protein, 15 aa, Homo sapiens
  CDR3 for alpha chain variable domain of TCR clone 265030 (TRAV13-1, TRAJ44)
CAASRSTGTASKPTF

SEQ ID NO: 530060 - protein, 14 aa, Homo sapiens
  CDR3 for beta chain variable domain of TCR clone 265030 (TRBV11-2, TRBJ1-2)
CASSLYRGNYGYTF

SEQ ID NO: 530061 - protein, 23 aa, Homo sapiens
  CDR3 for alpha chain variable domain of TCR clone 265031 (TRAV21, TRAJ32)
CAVEIMVVLQTSSSLELPLCLLS

SEQ ID NO: 530062 - protein, 13 aa, Homo sapiens
  CDR3 for beta chain variable domain of TCR clone 265031 (TRBV2, TRBJ1-6)
CASGRGGISPLHF

SEQ ID NO: 530063 - protein, 13 aa, Homo sapiens
  CDR3 for alpha chain variable domain of TCR clone 265032 (TRAV23/DV6, TRAJ12)
CAPRGDSSYKLIF

SEQ ID NO: 530064 - protein, 14 aa, Homo sapiens
  CDR3 for beta chain variable domain of TCR clone 265032 (TRBV5-4, TRBJ2-2)
CASRLDGGTGELFF

SEQ ID NO: 530065 - protein, 14 aa, Homo sapiens
  CDR3 for alpha chain variable domain of TCR clone 265033 (TRAV26-1, TRAJ49)
CIVRARHTGNQFYF

SEQ ID NO: 530066 - protein, 14 aa, Homo sapiens
  CDR3 for beta chain variable domain of TCR clone 265033 (TRBV10-3, TRBJ1-6)
CAISVDGDESPLHF

SEQ ID NO: 530067 - protein, 14 aa, Homo sapiens
  CDR3 for alpha chain variable domain of TCR clone 265034 (TRAV17, TRAJ34)
CATDSLEGTDKLIF

SEQ ID NO: 530068 - protein, 14 aa, Homo sapiens
  CDR3 for beta chain variable domain of TCR clone 265034 (TRBV7-9, TRBJ1-2)
CASSRQGANYGYTF

SEQ ID NO: 530069 - protein, 13 aa, Homo sapiens
  CDR3 for alpha chain variable domain of TCR clone 265035 (TRAV38-2/DV8, TRAJ34)
CAYRNYNTDKLIF

SEQ ID NO: 530070 - protein, 15 aa, Homo sapiens
  CDR3 for beta chain variable domain of TCR clone 265035 (TRBV20-1, TRBJ2-5)
CSAEGTGGLQDTQYF

SEQ ID NO: 530071 - protein, 11 aa, Homo sapiens
  CDR3 for alpha chain variable domain of TCR clone 265036 (TRAV3, TRAJ21)
CAVGNFNNFYF

SEQ ID NO: 530072 - protein, 13 aa, Homo sapiens
  CDR3 for beta chain variable domain of TCR clone 265036 (TRBV7-3, TRBJ1-1)
CASSQDWGAEAFF

SEQ ID NO: 530073 - protein, 13 aa, Homo sapiens
  CDR3 for alpha chain variable domain of TCR clone 265037 (TRAV12-1, TRAJ40)
CVVPTSGTYKYIF

SEQ ID NO: 530074 - protein, 16 aa, Homo sapiens
  CDR3 for beta chain variable domain of TCR clone 265037 (TRBV7-9, TRBJ1-2)
CASSLGFSSGEDSYTF

SEQ ID NO: 530075 - protein, 15 aa, Homo sapiens
  CDR3 for alpha chain variable domain of TCR clone 265038 (TRAV12-1, TRAJ44)
CVVFVNTGTASKLTF

SEQ ID NO: 530076 - protein, 13 aa, Homo sapiens
  CDR3 for beta chain variable domain of TCR clone 265038 (TRBV7-9, TRBJ2-1)
CASSLDVGNEQFF

SEQ ID NO: 530077 - protein, 12 aa, Homo sapiens
  CDR3 for alpha chain variable domain of TCR clone 265039 (TRAV12-3, TRAJ20)
CAMVRGDYKLSF

SEQ ID NO: 530078 - protein, 16 aa, Homo sapiens
  CDR3 for beta chain variable domain of TCR clone 265039 (TRBV19, TRBJ2-2)
CASSFPGQGLAGELFF

SEQ ID NO: 530079 - protein, 14 aa, Homo sapiens
  CDR3 for alpha chain variable domain of TCR clone 265040 (TRAV8-3, TRAJ4)
CTVGAAGGYNKLIF

SEQ ID NO: 530080 - protein, 17 aa, Homo sapiens
  CDR3 for beta chain variable domain of TCR clone 265040 (TRBV6-5, TRBJ2-3)
CASRDGARSWDTDTQYF

SEQ ID NO: 530081 - protein, 16 aa, Homo sapiens
  CDR3 for alpha chain variable domain of TCR clone 265041 (TRAV4, TRAJ22)
CLVGDLYSGYARQLTF

SEQ ID NO: 530082 - protein, 16 aa, Homo sapiens
  CDR3 for beta chain variable domain of TCR clone 265041 (TRBV7-9, TRBJ2-1)
CASSDVAGGSYSEQFF

SEQ ID NO: 530083 - protein, 13 aa, Homo sapiens
  CDR3 for alpha chain variable domain of TCR clone 265042 (TRAV22, TRAJ29)
CAVGGSGNSPLVF

SEQ ID NO: 530084 - protein, 18 aa, Homo sapiens
  CDR3 for beta chain variable domain of TCR clone 265042 (TRBV10-3, TRBJ2-3)
CAISESRVGPMRGDTQYF

SEQ ID NO: 530085 - protein, 12 aa, Homo sapiens
  CDR3 for alpha chain variable domain of TCR clone 265043 (TRAV12-2, TRAJ10)
WGVTGGGNKLTF

SEQ ID NO: 530086 - protein, 14 aa, Homo sapiens
  CDR3 for beta chain variable domain of TCR clone 265043 (TRBV27, TRBJ2-7)
CDSATGTERREQYF

SEQ ID NO: 530087 - protein, 17 aa, Homo sapiens
  CDR3 for alpha chain variable domain of TCR clone 265044 (TRAV8-2, TRAJ17)
CVVSDRRFKAAGNKLTF

SEQ ID NO: 530088 - protein, 18 aa, Homo sapiens
  CDR3 for beta chain variable domain of TCR clone 265044 (TRBV7-9, TRBJ2-7)
CASSLTTIGSRTWYEQYF

SEQ ID NO: 530089 - protein, 15 aa, Homo sapiens
  CDR3 for alpha chain variable domain of TCR clone 265045 (TRAV35, TRAJ23)
CAGPLGNNQGGKLIF

SEQ ID NO: 530090 - protein, 14 aa, Homo sapiens
  CDR3 for beta chain variable domain of TCR clone 265045 (TRBV7-9, TRBJ1-1)
CASTPREAYTEAFF

SEQ ID NO: 530091 - protein, 11 aa, Homo sapiens
  CDR3 for alpha chain variable domain of TCR clone 265046 (TRAV27, TRAJ40)
SLTSGTYNYIF

SEQ ID NO: 530092 - protein, 12 aa, Homo sapiens
  CDR3 for beta chain variable domain of TCR clone 265046 (TRBV18, TRBJ2-3)
CQLNQNTDTQYF

SEQ ID NO: 530093 - protein, 14 aa, Homo sapiens
  CDR3 for alpha chain variable domain of TCR clone 265047 (TRAV17, TRAJ16)
CATADFSDGQKLLF

SEQ ID NO: 530094 - protein, 16 aa, Homo sapiens
  CDR3 for beta chain variable domain of TCR clone 265047 (TRBV7-9, TRBJ2-1)
CASSLVSGPSYNEQFF

SEQ ID NO: 530095 - protein, 12 aa, Homo sapiens
  CDR3 for alpha chain variable domain of TCR clone 265048 (TRAV13-2, TRAJ23)
CAERPRGGKLIF

SEQ ID NO: 530096 - protein, 16 aa, Homo sapiens
  CDR3 for beta chain variable domain of TCR clone 265048 (TRBV20-1, TRBJ1-4)
CSAPGQGLLTNEKPFF

SEQ ID NO: 530097 - protein, 14 aa, Homo sapiens
  CDR3 for alpha chain variable domain of TCR clone 265049 (TRAV12-3, TRAJ56)
CAMSVTGANSKLTF

SEQ ID NO: 530098 - protein, 12 aa, Homo sapiens
  CDR3 for beta chain variable domain of TCR clone 265049 (TRBV5-1, TRBJ1-2)
CASSQDTYGYTF

SEQ ID NO: 530099 - protein, 16 aa, Homo sapiens
  CDR3 for alpha chain variable domain of TCR clone 265050 (TRAV12-3, TRAJ53)
CAMSPGSGGSHYKLTF

SEQ ID NO: 530100 - protein, 14 aa, Homo sapiens
  CDR3 for beta chain variable domain of TCR clone 265050 (TRBV7-6, TRBJ2-3)
CASSLGTVTDTQYF

SEQ ID NO: 530101 - protein, 15 aa, Homo sapiens
  CDR3 for alpha chain variable domain of TCR clone 265051 (TRAV8-1, TRAJ6)
CAVNTPPGGSYIPTF

SEQ ID NO: 530102 - protein, 14 aa, Homo sapiens
  CDR3 for beta chain variable domain of TCR clone 265051 (TRBV11-2, TRBJ2-7)
CASSLGAGAYEQYF

SEQ ID NO: 530103 - protein, 13 aa, Homo sapiens
  CDR3 for alpha chain variable domain of TCR clone 265052 (TRAV3, TRAJ27)
CAVRPLGEGKSTF

SEQ ID NO: 530104 - protein, 13 aa, Homo sapiens
  CDR3 for beta chain variable domain of TCR clone 265052 (TRBV7-9, TRBJ2-3)
CASSAGSTDTQYF

SEQ ID NO: 530105 - protein, 12 aa, Homo sapiens
  CDR3 for alpha chain variable domain of TCR clone 265053 (TRAV12-3, TRAJ17)
CAMTLTGNKLTF

SEQ ID NO: 530106 - protein, 16 aa, Homo sapiens
  CDR3 for beta chain variable domain of TCR clone 265053 (TRBV12-4, TRBJ2-1)
CASSAVGQGNGDDQFF

SEQ ID NO: 530107 - protein, 20 aa, Homo sapiens
  CDR3 for alpha chain variable domain of TCR clone 265054 (TRAV12-1, TRAJ42)
SSVIQPPTPVKGGSQGNLIF

SEQ ID NO: 530108 - protein, 13 aa, Homo sapiens
  CDR3 for beta chain variable domain of TCR clone 265054 (TRBV11-2, TRBJ2-5)
CASSRGPSETQYF

SEQ ID NO: 530109 - protein, 11 aa, Homo sapiens
  CDR3 for alpha chain variable domain of TCR clone 265055 (TRAV22, TRAJ20)
CAPLHDYKLSF

SEQ ID NO: 530110 - protein, 14 aa, Homo sapiens
  CDR3 for beta chain variable domain of TCR clone 265055 (TRBV12-5, TRBJ2-5)
CASGSRTHQETQYF

SEQ ID NO: 530111 - protein, 15 aa, Homo sapiens
  CDR3 for alpha chain variable domain of TCR clone 265056 (TRAV4, TRAJ39)
CLVGPNNNAGNMLTF

SEQ ID NO: 530112 - protein, 11 aa, Homo sapiens
  CDR3 for beta chain variable domain of TCR clone 265056 (TRBV11-2, TRBJ2-2)
CASSLPGELFF

SEQ ID NO: 530113 - protein, 16 aa, Homo sapiens
  CDR3 for alpha chain variable domain of TCR clone 265057 (TRAV30, TRAJ24)
CGTEIVDADSWGKFQF

SEQ ID NO: 530114 - protein, 12 aa, Homo sapiens
  CDR3 for beta chain variable domain of TCR clone 265057 (TRBV28, TRBJ1-2)
CASLTLAEGYTF

SEQ ID NO: 530115 - protein, 11 aa, Homo sapiens
  CDR3 for alpha chain variable domain of TCR clone 265058 (TRAV1-2, TRAJ20)
CAVSNAYKLSF

SEQ ID NO: 530116 - protein, 16 aa, Homo sapiens
  CDR3 for beta chain variable domain of TCR clone 265058 (TRBV29-1, TRBJ2-6)
CSVEDITYSGANVLTF

SEQ ID NO: 530117 - protein, 14 aa, Homo sapiens
  CDR3 for alpha chain variable domain of TCR clone 265059 (TRAV13-1, TRAJ6)
CAASNGGGSYIPTF

SEQ ID NO: 530118 - protein, 15 aa, Homo sapiens
  CDR3 for beta chain variable domain of TCR clone 265059 (TRBV10-3, TRBJ2-5)
CAIRPGDVDLKNQYF

SEQ ID NO: 530119 - protein, 15 aa, Homo sapiens
  CDR3 for alpha chain variable domain of TCR clone 265060 (TRAV26-1, TRAJ29)
CIVRVEGSGNTPLVF

SEQ ID NO: 530120 - protein, 15 aa, Homo sapiens
  CDR3 for beta chain variable domain of TCR clone 265060 (TRBV7-9, TRBJ1-5)
CDSSQGHQHNQPQHF

SEQ ID NO: 530121 - protein, 11 aa, Homo sapiens
  CDR3 for alpha chain variable domain of TCR clone 265061 (TRAV2, TRAJ13)
CASAGYQKVTF

SEQ ID NO: 530122 - protein, 14 aa, Homo sapiens
  CDR3 for beta chain variable domain of TCR clone 265061 (TRBV7-2, TRBJ2-7)
CASSPKTSVYEQYF

SEQ ID NO: 530123 - protein, 14 aa, Homo sapiens
  CDR3 for alpha chain variable domain of TCR clone 265062 (TRAV8-4, TRAJ48)
CAVSETFGKEKLTF

SEQ ID NO: 530124 - protein, 14 aa, Homo sapiens
  CDR3 for beta chain variable domain of TCR clone 265062 (TRBV13, TRBJ2-7)
CASSLKGASYEQYF

SEQ ID NO: 530125 - protein, 12 aa, Homo sapiens
  CDR3 for alpha chain variable domain of TCR clone 265063 (TRAV8-4, TRAJ37)
CAVRSNTGKLIF

SEQ ID NO: 530126 - protein, 15 aa, Homo sapiens
  CDR3 for beta chain variable domain of TCR clone 265063 (TRBV11-2, TRBJ2-2)
CASSSDRVNAGELFF

SEQ ID NO: 530127 - protein, 14 aa, Homo sapiens
  CDR3 for alpha chain variable domain of TCR clone 265064 (TRAV8-4, TRAJ38)
CARLNAGNNRKLIW

SEQ ID NO: 530128 - protein, 12 aa, Homo sapiens
  CDR3 for beta chain variable domain of TCR clone 265064 (TRBV6-1, TRBJ2-7)
CASSEPLYEQYL

SEQ ID NO: 530129 - protein, 23 aa, Homo sapiens
  CDR3 for alpha chain variable domain of TCR clone 265065 (TRAV23/DV6, TRAJ30)
WIPSLETQPPTSVQRARDDKIIF

SEQ ID NO: 530130 - protein, 17 aa, Homo sapiens
  CDR3 for beta chain variable domain of TCR clone 265065 (TRBV10-3, TRBJ1-2)
CAISETRDRELEYGYTF

SEQ ID NO: 530131 - protein, 15 aa, Homo sapiens
  CDR3 for alpha chain variable domain of TCR clone 265066 (TRAV8-3, TRAJ11)
CAVGLLNSGYSTLPF

SEQ ID NO: 530132 - protein, 13 aa, Homo sapiens
  CDR3 for beta chain variable domain of TCR clone 265066 (TRBV5-1, TRBJ2-2)
RASIVARTGELFF

SEQ ID NO: 530133 - protein, 14 aa, Homo sapiens
  CDR3 for alpha chain variable domain of TCR clone 265067 (TRAV8-6, TRAJ49)
CAVSDPGTGNQFYF

SEQ ID NO: 530134 - protein, 16 aa, Homo sapiens
  CDR3 for beta chain variable domain of TCR clone 265067 (TRBV24-1, TRBJ2-1)
CATSGVAGANYNEHFF

SEQ ID NO: 530135 - protein, 11 aa, Homo sapiens
  CDR3 for alpha chain variable domain of TCR clone 265068 (TRAV3, TRAJ21)
CAVGNSNKFYF

SEQ ID NO: 530136 - protein, 16 aa, Homo sapiens
  CDR3 for beta chain variable domain of TCR clone 265068 (TRBV19, TRBJ2-1)
CASSKAGLSSYNEQFF

SEQ ID NO: 530137 - protein, 13 aa, Homo sapiens
  CDR3 for alpha chain variable domain of TCR clone 265069 (TRAV23/DV6, TRAJ21)
WAASREQLQQILL

SEQ ID NO: 530138 - protein, 16 aa, Homo sapiens
  CDR3 for beta chain variable domain of TCR clone 265069 (TRBV20-1, TRBJ2-3)
CSAVRDRGPIADTQYF

SEQ ID NO: 530139 - protein, 14 aa, Homo sapiens
  CDR3 for alpha chain variable domain of TCR clone 265070 (TRAV13-2, TRAJ32)
CAENYGGATNKLIF

SEQ ID NO: 530140 - protein, 15 aa, Homo sapiens
  CDR3 for beta chain variable domain of TCR clone 265070 (TRBV12-4, TRBJ2-5)
CASTLNSVRGETQYF

SEQ ID NO: 530141 - protein, 16 aa, Homo sapiens
  CDR3 for alpha chain variable domain of TCR clone 265071 (TRAV30, TRAJ24)
CGTEIVDADSWGKFQF

SEQ ID NO: 530142 - protein, 14 aa, Homo sapiens
  CDR3 for beta chain variable domain of TCR clone 265071 (TRBV7-2, TRBJ1-1)
CASSFLTGTTQAFF

SEQ ID NO: 530143 - protein, 13 aa, Homo sapiens
  CDR3 for alpha chain variable domain of TCR clone 265072 (TRAV8-6, TRAJ21)
CAVSPSSLNTFYF

SEQ ID NO: 530144 - protein, 14 aa, Homo sapiens
  CDR3 for beta chain variable domain of TCR clone 265072 (TRBV7-9, TRBJ2-5)
CASSLGTAQETQYF

SEQ ID NO: 530145 - protein, 14 aa, Homo sapiens
  CDR3 for alpha chain variable domain of TCR clone 265073 (TRAV8-3, TRAJ6)
CAVGASGGSYIPTF

SEQ ID NO: 530146 - protein, 17 aa, Homo sapiens
  CDR3 for beta chain variable domain of TCR clone 265073 (TRBV18, TRBJ2-2)
CASSPSDPRQNTGELFF

SEQ ID NO: 530147 - protein, 15 aa, Homo sapiens
  CDR3 for alpha chain variable domain of TCR clone 265074 (TRAV3, TRAJ22)
CAVRDRGGSARQLTF

SEQ ID NO: 530148 - protein, 12 aa, Homo sapiens
  CDR3 for beta chain variable domain of TCR clone 265074 (TRBV11-3, TRBJ2-1)
CASSPGNNEQFF

SEQ ID NO: 530149 - protein, 12 aa, Homo sapiens
  CDR3 for alpha chain variable domain of TCR clone 265075 (TRAV27, TRAJ35)
CAGADFGNVLHC

SEQ ID NO: 530150 - protein, 15 aa, Homo sapiens
  CDR3 for beta chain variable domain of TCR clone 265075 (TRBV28, TRBJ2-3)
CAPTFRDWSTDTQYF

SEQ ID NO: 530151 - protein, 13 aa, Homo sapiens
  CDR3 for alpha chain variable domain of TCR clone 265076 (TRAV2, TRAJ15)
CAVASQAGTALIF

SEQ ID NO: 530152 - protein, 12 aa, Homo sapiens
  CDR3 for beta chain variable domain of TCR clone 265076 (TRBV6-3, TRBJ2-7)
CASSLTPYEQYF

SEQ ID NO: 530153 - protein, 17 aa, Homo sapiens
  CDR3 for alpha chain variable domain of TCR clone 265077 (TRAV1-2, TRAJ27)
CAVRDKTGDTNAGKSTF

SEQ ID NO: 530154 - protein, 15 aa, Homo sapiens
  CDR3 for beta chain variable domain of TCR clone 265077 (TRBV2, TRBJ2-5)
CASSGTVAARETQYF

SEQ ID NO: 530155 - protein, 14 aa, Homo sapiens
  CDR3 for alpha chain variable domain of TCR clone 265078 (TRAV21, TRAJ35)
CAVMPIGFGNVLHC

SEQ ID NO: 530156 - protein, 14 aa, Homo sapiens
  CDR3 for beta chain variable domain of TCR clone 265078 (TRBV7-9, TRBJ2-7)
CASSPKTSFYEQYF

SEQ ID NO: 530157 - protein, 11 aa, Homo sapiens
  CDR3 for alpha chain variable domain of TCR clone 265079 (TRAV21, TRAJ34)
FAHYNTDKLIF

SEQ ID NO: 530158 - protein, 11 aa, Homo sapiens
  CDR3 for beta chain variable domain of TCR clone 265079 (TRBV29-1, TRBJ2-5)
CSEDRTGTQYF

SEQ ID NO: 530159 - protein, 11 aa, Homo sapiens
  CDR3 for alpha chain variable domain of TCR clone 265080 (TRAV1-2, TRAJ20)
CAGSNDYKPSF

SEQ ID NO: 530160 - protein, 15 aa, Homo sapiens
  CDR3 for beta chain variable domain of TCR clone 265080 (TRBV5-1, TRBJ2-2)
CASSSQGGNTGELFF

SEQ ID NO: 530161 - protein, 15 aa, Homo sapiens
  CDR3 for alpha chain variable domain of TCR clone 265081 (TRAV21, TRAJ53)
CATLNSGGSNYKLTF

SEQ ID NO: 530162 - protein, 13 aa, Homo sapiens
  CDR3 for beta chain variable domain of TCR clone 265081 (TRBV12-4, TRBJ2-5)
CASSPGTEETQYF

SEQ ID NO: 530163 - protein, 14 aa, Homo sapiens
  CDR3 for alpha chain variable domain of TCR clone 265082 (TRAV13-2, TRAJ17)
CAENSKAAGNKLTF

SEQ ID NO: 530164 - protein, 14 aa, Homo sapiens
  CDR3 for beta chain variable domain of TCR clone 265082 (TRBV7-2, TRBJ2-7)
CASSPKTSFYEQYF

SEQ ID NO: 530165 - protein, 12 aa, Homo sapiens
  CDR3 for alpha chain variable domain of TCR clone 265083 (TRAV8-3, TRAJ34)
WASGYNTDKLIV

SEQ ID NO: 530166 - protein, 13 aa, Homo sapiens
  CDR3 for beta chain variable domain of TCR clone 265083 (TRBV6-4, TRBJ2-3)
CASSVSWADTQYF

SEQ ID NO: 530167 - protein, 15 aa, Homo sapiens
  CDR3 for alpha chain variable domain of TCR clone 265084 (TRAV12-1, TRAJ13)
CVVNGDSGGYQKVTF

SEQ ID NO: 530168 - protein, 14 aa, Homo sapiens
  CDR3 for beta chain variable domain of TCR clone 265084 (TRBV7-9, TRBJ2-1)
CASSPRDSLYEQFF

SEQ ID NO: 530169 - protein, 12 aa, Homo sapiens
  CDR3 for alpha chain variable domain of TCR clone 265085 (TRAV12-1, TRAJ40)
RVVYSGTYKYIF

SEQ ID NO: 530170 - protein, 16 aa, Homo sapiens
  CDR3 for beta chain variable domain of TCR clone 265085 (TRBV2, TRBJ2-3)
CASSTSAEGVTDTQYF

SEQ ID NO: 530171 - protein, 12 aa, Homo sapiens
  CDR3 for alpha chain variable domain of TCR clone 265086 (TRAV12-3, TRAJ40)
CAVSSGTYQYIF

SEQ ID NO: 530172 - protein, 15 aa, Homo sapiens
  CDR3 for beta chain variable domain of TCR clone 265086 (TRBV7-9, TRBJ2-7)
CASSPGGGLTYEQYF

SEQ ID NO: 530173 - protein, 13 aa, Homo sapiens
  CDR3 for alpha chain variable domain of TCR clone 265087 (TRAV17, TRAJ9)
CATDFTGGFKTIF

SEQ ID NO: 530174 - protein, 14 aa, Homo sapiens
  CDR3 for beta chain variable domain of TCR clone 265087 (TRBV19, TRBJ2-5)
CASSMTGQQETQYF

SEQ ID NO: 530175 - protein, 15 aa, Homo sapiens
  CDR3 for alpha chain variable domain of TCR clone 265088 (TRAV8-4, TRAJ13)
CAVSDWGGGYQKVTF

SEQ ID NO: 530176 - protein, 15 aa, Homo sapiens
  CDR3 for beta chain variable domain of TCR clone 265088 (TRBV25-1, TRBJ1-4)
CAGSPGDSTNEKLFF

SEQ ID NO: 530177 - protein, 13 aa, Homo sapiens
  CDR3 for alpha chain variable domain of TCR clone 265089 (TRAV12-1, TRAJ34)
CVVTGYNTDKLIF

SEQ ID NO: 530178 - protein, 16 aa, Homo sapiens
  CDR3 for beta chain variable domain of TCR clone 265089 (TRBV28, TRBJ2-7)
CTTVPAKRGGVYEQYF

SEQ ID NO: 530179 - protein, 14 aa, Homo sapiens
  CDR3 for alpha chain variable domain of TCR clone 265090 (TRAV13-2, TRAJ57)
CAENFQGGSEKLVF

SEQ ID NO: 530180 - protein, 17 aa, Homo sapiens
  CDR3 for beta chain variable domain of TCR clone 265090 (TRBV28, TRBJ2-5)
CASSTPEGDALQETQYF

SEQ ID NO: 530181 - protein, 17 aa, Homo sapiens
  CDR3 for alpha chain variable domain of TCR clone 265091 (TRAV3, TRAJ6)
CAVRDGPRAGGSYIPTL

SEQ ID NO: 530182 - protein, 16 aa, Homo sapiens
  CDR3 for beta chain variable domain of TCR clone 265091 (TRBV5-1, TRBJ1-1)
CASSKTGTEVGTEAFF

SEQ ID NO: 530183 - protein, 18 aa, Homo sapiens
  CDR3 for alpha chain variable domain of TCR clone 265092 (TRAV26-1, TRAJ23)
CIVRVGLEVWNQGGKLIF

SEQ ID NO: 530184 - protein, 16 aa, Homo sapiens
  CDR3 for beta chain variable domain of TCR clone 265092 (TRBV12-4, TRBJ2-5)
SASSFFVRGRQETQYF

SEQ ID NO: 530185 - protein, 14 aa, Homo sapiens
  CDR3 for alpha chain variable domain of TCR clone 265093 (TRAV1-2, TRAJ16)
CAVNRFSDGQKLLF

SEQ ID NO: 530186 - protein, 14 aa, Homo sapiens
  CDR3 for beta chain variable domain of TCR clone 265093 (TRBV19, TRBJ1-1)
CASRPRDRDTEAFF

SEQ ID NO: 530187 - protein, 16 aa, Homo sapiens
  CDR3 for alpha chain variable domain of TCR clone 265094 (TRAV30, TRAJ24)
CGTEIVDADSWGKFQF

SEQ ID NO: 530188 - protein, 12 aa, Homo sapiens
  CDR3 for beta chain variable domain of TCR clone 265094 (TRBV14, TRBJ1-1)
CASSQLKGLAFF

SEQ ID NO: 530189 - protein, 12 aa, Homo sapiens
  CDR3 for alpha chain variable domain of TCR clone 265095 (TRAV13-1, TRAJ43)
CAAGRFNNDMRF

SEQ ID NO: 530190 - protein, 12 aa, Homo sapiens
  CDR3 for beta chain variable domain of TCR clone 265095 (TRBV11-2, TRBJ2-1)
CASSPGNNEQFF

SEQ ID NO: 530191 - protein, 13 aa, Homo sapiens
  CDR3 for alpha chain variable domain of TCR clone 265096 (TRAV16, TRAJ27)
CALRRTNAGKSTF

SEQ ID NO: 530192 - protein, 15 aa, Homo sapiens
  CDR3 for beta chain variable domain of TCR clone 265096 (TRBV18, TRBJ2-1)
CASSPPSASYNKQFF

SEQ ID NO: 530193 - protein, 10 aa, Homo sapiens
  CDR3 for alpha chain variable domain of TCR clone 265097 (TRAV4, TRAJ15)
CLPFWTALIF

SEQ ID NO: 530194 - protein, 15 aa, Homo sapiens
  CDR3 for beta chain variable domain of TCR clone 265097 (TRBV5-1, TRBJ2-1)
CASSFSGTGYNEQFS

SEQ ID NO: 530195 - protein, 17 aa, Homo sapiens
  CDR3 for alpha chain variable domain of TCR clone 265098 (TRAV26-1, TRAJ58)
CLVRVGAEETSGSRLTF

SEQ ID NO: 530196 - protein, 18 aa, Homo sapiens
  CDR3 for beta chain variable domain of TCR clone 265098 (TRBV7-9, TRBJ2-7)
CASSLTTSGSRTWYEQYF

SEQ ID NO: 530197 - protein, 16 aa, Homo sapiens
  CDR3 for alpha chain variable domain of TCR clone 265099 (TRAV3, TRAJ10)
CAVRDMRAGGGNKLTF

SEQ ID NO: 530198 - protein, 12 aa, Homo sapiens
  CDR3 for beta chain variable domain of TCR clone 265099 (TRBV7-8, TRBJ2-1)
CASSLGHNEQFF

SEQ ID NO: 530199 - protein, 13 aa, Homo sapiens
  CDR3 for alpha chain variable domain of TCR clone 265100 (TRAV36/DV7, TRAJ37)
CAVFSSNTGKLIF

SEQ ID NO: 530200 - protein, 15 aa, Homo sapiens
  CDR3 for beta chain variable domain of TCR clone 265100 (TRBV12-4, TRBJ2-5)
GQQFFVRGRQETQYF

SEQ ID NO: 530201 - protein, 13 aa, Homo sapiens
  CDR3 for alpha chain variable domain of TCR clone 265101 (TRAV21, TRAJ27)
CAARPGNAGKSTF

SEQ ID NO: 530202 - protein, 17 aa, Homo sapiens
  CDR3 for beta chain variable domain of TCR clone 265101 (TRBV4-1, TRBJ1-4)
CASSQEGPRGMEEKLFF

SEQ ID NO: 530203 - protein, 14 aa, Homo sapiens
  CDR3 for alpha chain variable domain of TCR clone 265102 (TRAV8-1, TRAJ5)
CAVRTDTGRRGLTF

SEQ ID NO: 530204 - protein, 14 aa, Homo sapiens
  CDR3 for beta chain variable domain of TCR clone 265102 (TRBV7-8, TRBJ2-3)
CASSFPDGQDTQYF

SEQ ID NO: 530205 - protein, 15 aa, Homo sapiens
  CDR3 for alpha chain variable domain of TCR clone 265103 (TRAV2, TRAJ28)
CAVPYSGAGSYYLTF

SEQ ID NO: 530206 - protein, 17 aa, Homo sapiens
  CDR3 for beta chain variable domain of TCR clone 265103 (TRBV20-1, TRBJ2-4)
CSARDWASGGRENIQYF

SEQ ID NO: 530207 - protein, 13 aa, Homo sapiens
  CDR3 for alpha chain variable domain of TCR clone 265104 (TRAV13-1, TRAJ37)
CAARSGNTGKLIF

SEQ ID NO: 530208 - protein, 16 aa, Homo sapiens
  CDR3 for beta chain variable domain of TCR clone 265104 (TRBV7-9, TRBJ2-1)
CASSDVAGGSYNEQFF

SEQ ID NO: 530209 - protein, 13 aa, Homo sapiens
  CDR3 for alpha chain variable domain of TCR clone 265105 (TRAV3, TRAJ43)
CAVRDTRGGDMRF

SEQ ID NO: 530210 - protein, 15 aa, Homo sapiens
  CDR3 for beta chain variable domain of TCR clone 265105 (TRBV6-5, TRBJ1-5)
CASSYSRRSNQTQHF

SEQ ID NO: 530211 - protein, 13 aa, Homo sapiens
  CDR3 for alpha chain variable domain of TCR clone 265106 (TRAV30, TRAJ24)
CGTVTDSWGKLQF

SEQ ID NO: 530212 - protein, 15 aa, Homo sapiens
  CDR3 for beta chain variable domain of TCR clone 265106 (TRBV20-1, TRBJ1-1)
CSASRGVTGNTEAFF

SEQ ID NO: 530213 - protein, 12 aa, Homo sapiens
  CDR3 for alpha chain variable domain of TCR clone 265107 (TRAV2, TRAJ36)
CAELTGANNLFF

SEQ ID NO: 530214 - protein, 14 aa, Homo sapiens
  CDR3 for beta chain variable domain of TCR clone 265107 (TRBV18, TRBJ2-7)
CASSPRGGAYEQYL

SEQ ID NO: 530215 - protein, 15 aa, Homo sapiens
  CDR3 for alpha chain variable domain of TCR clone 265108 (TRAV3, TRAJ6)
CAVRDSRRKLHTYIL

SEQ ID NO: 530216 - protein, 15 aa, Homo sapiens
  CDR3 for beta chain variable domain of TCR clone 265108 (TRBV18, TRBJ2-7)
CASSPLQGRTYEQYF

SEQ ID NO: 530217 - protein, 15 aa, Homo sapiens
  CDR3 for alpha chain variable domain of TCR clone 265109 (TRAV21, TRAJ24)
CAARSSTDSWGKLQF

SEQ ID NO: 530218 - protein, 16 aa, Homo sapiens
  CDR3 for beta chain variable domain of TCR clone 265109 (TRBV11-3, TRBJ2-5)
CASSSVVAGSTETQYF

SEQ ID NO: 530219 - protein, 16 aa, Homo sapiens
  CDR3 for alpha chain variable domain of TCR clone 265110 (TRAV12-3, TRAJ53)
CAMSPGSGGSNYKLTF

SEQ ID NO: 530220 - protein, 15 aa, Homo sapiens
  CDR3 for beta chain variable domain of TCR clone 265110 (TRBV19, TRBJ1-6)
CASSTQGAVGSPLHS

SEQ ID NO: 530221 - protein, 17 aa, Homo sapiens
  CDR3 for alpha chain variable domain of TCR clone 265111 (TRAV13-1, TRAJ52)
CAAGRNAGGTSYGKLTF

SEQ ID NO: 530222 - protein, 12 aa, Homo sapiens
  CDR3 for beta chain variable domain of TCR clone 265111 (TRBV19, TRBJ2-7)
CASTDRGYEQYF

SEQ ID NO: 530223 - protein, 14 aa, Homo sapiens
  CDR3 for alpha chain variable domain of TCR clone 265112 (TRAV12-3, TRAJ9)
CAMSPNTGGFKTIF

SEQ ID NO: 530224 - protein, 15 aa, Homo sapiens
  CDR3 for beta chain variable domain of TCR clone 265112 (TRBV5-1, TRBJ2-1)
CASTGSGRTYNEQFF

SEQ ID NO: 530225 - protein, 12 aa, Homo sapiens
  CDR3 for alpha chain variable domain of TCR clone 265113 (TRAV36/DV7, TRAJ54)
CAVVRGAQKLVF

SEQ ID NO: 530226 - protein, 15 aa, Homo sapiens
  CDR3 for beta chain variable domain of TCR clone 265113 (TRBV4-3, TRBJ2-5)
CASSQGTGHRETQYF

SEQ ID NO: 530227 - protein, 18 aa, Homo sapiens
  CDR3 for alpha chain variable domain of TCR clone 265114 (TRAV21, TRAJ53)
CAVKGGENSGGSNYKLTF

SEQ ID NO: 530228 - protein, 13 aa, Homo sapiens
  CDR3 for beta chain variable domain of TCR clone 265114 (TRBV5-7, TRBJ2-5)
CASSLRLQETQYF

SEQ ID NO: 530229 - protein, 14 aa, Homo sapiens
  CDR3 for alpha chain variable domain of TCR clone 265115 (TRAV35, TRAJ22)
CAGLRPGSASQLTF

SEQ ID NO: 530230 - protein, 11 aa, Homo sapiens
  CDR3 for beta chain variable domain of TCR clone 265115 (TRBV29-1, TRBJ2-5)
CSEDRTGTQYF

SEQ ID NO: 530231 - protein, 19 aa, Homo sapiens
  CDR3 for alpha chain variable domain of TCR clone 265116 (TRAV26-1, TRAJ52)
CIVRAHSNAGGTSYGKLTF

SEQ ID NO: 530232 - protein, 13 aa, Homo sapiens
  CDR3 for beta chain variable domain of TCR clone 265116 (TRBV20-1, TRBJ1-6)
CSAPVGVGSPLHF

SEQ ID NO: 530233 - protein, 13 aa, Homo sapiens
  CDR3 for alpha chain variable domain of TCR clone 265117 (TRAV27, TRAJ56)
CAGKPGANSKLTF

SEQ ID NO: 530234 - protein, 18 aa, Homo sapiens
  CDR3 for beta chain variable domain of TCR clone 265117 (TRBV11-2, TRBJ2-3)
GASSLGGASRGAPNTQYF

SEQ ID NO: 530235 - protein, 15 aa, Homo sapiens
  CDR3 for alpha chain variable domain of TCR clone 265118 (TRAV2, TRAJ45)
CAVDGTGGGADGLTF

SEQ ID NO: 530236 - protein, 16 aa, Homo sapiens
  CDR3 for beta chain variable domain of TCR clone 265118 (TRBV6-5, TRBJ2-1)
CASSCSLSGGYNEQFF

SEQ ID NO: 530237 - protein, 13 aa, Homo sapiens
  CDR3 for alpha chain variable domain of TCR clone 265119 (TRAV27, TRAJ45)
CRSSGGGADGLTF

SEQ ID NO: 530238 - protein, 16 aa, Homo sapiens
  CDR3 for beta chain variable domain of TCR clone 265119 (TRBV27, TRBJ2-2)
YASSFRGLVRTGELFF

SEQ ID NO: 530239 - protein, 14 aa, Homo sapiens
  CDR3 for alpha chain variable domain of TCR clone 265120 (TRAV26-1, TRAJ45)
CIEVTGGVADGLTL

SEQ ID NO: 530240 - protein, 13 aa, Homo sapiens
  CDR3 for beta chain variable domain of TCR clone 265120 (TRBV7-6, TRBJ1-2)
CASSLVADYGYTF

SEQ ID NO: 530241 - protein, 15 aa, Homo sapiens
  CDR3 for alpha chain variable domain of TCR clone 265121 (TRAV3, TRAJ5)
CAVRDLDTGRRALTF

SEQ ID NO: 530242 - protein, 16 aa, Homo sapiens
  CDR3 for beta chain variable domain of TCR clone 265121 (TRBV15, TRBJ2-1)
CATSRERLAGAYEQFF

SEQ ID NO: 530243 - protein, 15 aa, Homo sapiens
  CDR3 for alpha chain variable domain of TCR clone 265122 (TRAV14/DV4, TRAJ46)
CAMREKKSSGDKLTF

SEQ ID NO: 530244 - protein, 13 aa, Homo sapiens
  CDR3 for beta chain variable domain of TCR clone 265122 (TRBV20-1, TRBJ2-5)
CSAREAFQETQYV

SEQ ID NO: 530245 - protein, 15 aa, Homo sapiens
  CDR3 for alpha chain variable domain of TCR clone 265123 (TRAV21, TRAJ53)
CATLNSGGSNYKLTF

SEQ ID NO: 530246 - protein, 17 aa, Homo sapiens
  CDR3 for beta chain variable domain of TCR clone 265123 (TRBV11-2, TRBJ2-6)
CASSQRDIFSGANVLTF

SEQ ID NO: 530247 - protein, 12 aa, Homo sapiens
  CDR3 for alpha chain variable domain of TCR clone 265124 (TRAV13-1, TRAJ23)
CAASKKGGKLIF

SEQ ID NO: 530248 - protein, 13 aa, Homo sapiens
  CDR3 for beta chain variable domain of TCR clone 265124 (TRBV5-7, TRBJ2-6)
CASTSSGANVLTF

SEQ ID NO: 530249 - protein, 12 aa, Homo sapiens
  CDR3 for alpha chain variable domain of TCR clone 265125 (TRAV27, TRAJ9)
CAGESGGFNTIF

SEQ ID NO: 530250 - protein, 14 aa, Homo sapiens
  CDR3 for beta chain variable domain of TCR clone 265125 (TRBV6-1, TRBJ2-1)
CASAKDGFYNEQFF

SEQ ID NO: 530251 - protein, 14 aa, Homo sapiens
  CDR3 for alpha chain variable domain of TCR clone 265126 (TRAV26-1, TRAJ26)
CIVRATLLGQNFVF

SEQ ID NO: 530252 - protein, 16 aa, Homo sapiens
  CDR3 for beta chain variable domain of TCR clone 265126 (TRBV12-4, TRBJ2-7)
CASRWTGTGPSYEQYF

SEQ ID NO: 530253 - protein, 13 aa, Homo sapiens
  CDR3 for alpha chain variable domain of TCR clone 265127 (TRAV35, TRAJ36)
CAGPRIGANNLFF

SEQ ID NO: 530254 - protein, 16 aa, Homo sapiens
  CDR3 for beta chain variable domain of TCR clone 265127 (TRBV7-9, TRBJ2-1)
CASSDVAGGSYNEQFF

SEQ ID NO: 530255 - protein, 16 aa, Homo sapiens
  CDR3 for alpha chain variable domain of TCR clone 265128 (TRAV9-2, TRAJ53)
CALRKNSGGSNDKLTF

SEQ ID NO: 530256 - protein, 14 aa, Homo sapiens
  CDR3 for beta chain variable domain of TCR clone 265128 (TRBV28, TRBJ2-1)
CASSLNGRNNEQFF

SEQ ID NO: 530257 - protein, 16 aa, Homo sapiens
  CDR3 for alpha chain variable domain of TCR clone 265129 (TRAV26-1, TRAJ33)
CIVPFWGEDSNYQLIW

SEQ ID NO: 530258 - protein, 17 aa, Homo sapiens
  CDR3 for beta chain variable domain of TCR clone 265129 (TRBV7-8, TRBJ2-6)
FASSAGTGGAGANVLTF

SEQ ID NO: 530259 - protein, 13 aa, Homo sapiens
  CDR3 for alpha chain variable domain of TCR clone 265130 (TRAV12-1, TRAJ40)
CVVPTSGTFKYIF

SEQ ID NO: 530260 - protein, 18 aa, Homo sapiens
  CDR3 for beta chain variable domain of TCR clone 265130 (TRBV7-6, TRBJ2-1)
CASSPRTSGMSSYNEQFF

SEQ ID NO: 530261 - protein, 14 aa, Homo sapiens
  CDR3 for alpha chain variable domain of TCR clone 265131 (TRAV8-1, TRAJ23)
CSVQAYNQGGKLIF

SEQ ID NO: 530262 - protein, 13 aa, Homo sapiens
  CDR3 for beta chain variable domain of TCR clone 265131 (TRBV5-1, TRBJ2-7)
CASSLEDNQEQYF

SEQ ID NO: 530263 - protein, 14 aa, Homo sapiens
  CDR3 for alpha chain variable domain of TCR clone 265132 (TRAV22, TRAJ40)
FAVAPTSGTYKYIF

SEQ ID NO: 530264 - protein, 16 aa, Homo sapiens
  CDR3 for beta chain variable domain of TCR clone 265132 (TRBV5-1, TRBJ2-7)
CASSFTTGTALVEQYF

SEQ ID NO: 530265 - protein, 16 aa, Homo sapiens
  CDR3 for alpha chain variable domain of TCR clone 265133 (TRAV30, TRAJ24)
CGTEIVDADSWGKFQF

SEQ ID NO: 530266 - protein, 15 aa, Homo sapiens
  CDR3 for beta chain variable domain of TCR clone 265133 (TRBV4-1, TRBJ1-3)
CASSQDLRVGNTMYF

SEQ ID NO: 530267 - protein, 15 aa, Homo sapiens
  CDR3 for alpha chain variable domain of TCR clone 265134 (TRAV12-1, TRAJ44)
CVADLPTGTASKLTC

SEQ ID NO: 530268 - protein, 12 aa, Homo sapiens
  CDR3 for beta chain variable domain of TCR clone 265134 (TRBV5-1, TRBJ2-7)
CASSLDSYEQYF

SEQ ID NO: 530269 - protein, 17 aa, Homo sapiens
  CDR3 for alpha chain variable domain of TCR clone 265135 (TRAV38-1, TRAJ28)
CALMKPTSGAGSYKLTF

SEQ ID NO: 530270 - protein, 15 aa, Homo sapiens
  CDR3 for beta chain variable domain of TCR clone 265135 (TRBV5-1, TRBJ2-4)
CASSLGGGGSYIQYF

SEQ ID NO: 530271 - protein, 14 aa, Homo sapiens
  CDR3 for alpha chain variable domain of TCR clone 265136 (TRAV1-2, TRAJ8)
CAVREDTGFQKLVF

SEQ ID NO: 530272 - protein, 16 aa, Homo sapiens
  CDR3 for beta chain variable domain of TCR clone 265136 (TRBV12-4, TRBJ1-5)
CASRQLVEGSNQPQHF

SEQ ID NO: 530273 - protein, 11 aa, Homo sapiens
  CDR3 for alpha chain variable domain of TCR clone 265137 (TRAV23/DV6, TRAJ48)
CAPRWGAKLTF

SEQ ID NO: 530274 - protein, 14 aa, Homo sapiens
  CDR3 for beta chain variable domain of TCR clone 265137 (TRBV29-1, TRBJ1-3)
CSVADRVVGNTIYL

SEQ ID NO: 530275 - protein, 16 aa, Homo sapiens
  CDR3 for alpha chain variable domain of TCR clone 265138 (TRAV12-2, TRAJ40)
CAVIRGGTSGTYKYIF

SEQ ID NO: 530276 - protein, 14 aa, Homo sapiens
  CDR3 for beta chain variable domain of TCR clone 265138 (TRBV7-8, TRBJ2-7)
CASTFRGGPNEQYF

SEQ ID NO: 530277 - protein, 12 aa, Homo sapiens
  CDR3 for alpha chain variable domain of TCR clone 265139 (TRAV8-2, TRAJ45)
CVQGGGADGLTF

SEQ ID NO: 530278 - protein, 18 aa, Homo sapiens
  CDR3 for beta chain variable domain of TCR clone 265139 (TRBV15, TRBJ2-3)
CATSRDGARSWDTDTQYF

SEQ ID NO: 530279 - protein, 13 aa, Homo sapiens
  CDR3 for alpha chain variable domain of TCR clone 265140 (TRAV21, TRAJ27)
CAARPGNAGQSTF

SEQ ID NO: 530280 - protein, 15 aa, Homo sapiens
  CDR3 for beta chain variable domain of TCR clone 265140 (TRBV2, TRBJ2-3)
CASSDAGGPPDTQYF

SEQ ID NO: 530281 - protein, 13 aa, Homo sapiens
  CDR3 for alpha chain variable domain of TCR clone 265141 (TRAV3, TRAJ21)
CAVREPHFNKFYF

SEQ ID NO: 530282 - protein, 15 aa, Homo sapiens
  CDR3 for beta chain variable domain of TCR clone 265141 (TRBV3-1, TRBJ2-7)
CASSQAPSGSYEQYF

SEQ ID NO: 530283 - protein, 10 aa, Homo sapiens
  CDR3 for alpha chain variable domain of TCR clone 265142 (TRAV12-3, TRAJ9)
CAMSPNTGGF

SEQ ID NO: 530284 - protein, 14 aa, Homo sapiens
  CDR3 for beta chain variable domain of TCR clone 265142 (TRBV12-4, TRBJ1-1)
CASSLRSSGTEAFF

SEQ ID NO: 530285 - protein, 17 aa, Homo sapiens
  CDR3 for alpha chain variable domain of TCR clone 265143 (TRAV3, TRAJ38)
CAVRDCLNAGNNRKLIW

SEQ ID NO: 530286 - protein, 14 aa, Homo sapiens
  CDR3 for beta chain variable domain of TCR clone 265143 (TRBV5-5, TRBJ1-5)
CASSGQGVYQPQHF

SEQ ID NO: 530287 - protein, 14 aa, Homo sapiens
  CDR3 for alpha chain variable domain of TCR clone 265144 (TRAV12-3, TRAJ10)
SHLPLTGGGNKLTF

SEQ ID NO: 530288 - protein, 11 aa, Homo sapiens
  CDR3 for beta chain variable domain of TCR clone 265144 (TRBV20-1, TRBJ2-5)
CSADRAETLYF

SEQ ID NO: 530289 - protein, 13 aa, Homo sapiens
  CDR3 for alpha chain variable domain of TCR clone 265145 (TRAV2, TRAJ29)
CDVYSSGNTPLVF

SEQ ID NO: 530290 - protein, 14 aa, Homo sapiens
  CDR3 for beta chain variable domain of TCR clone 265145 (TRBV7-9, TRBJ1-1)
CASSLGGLKTEAFF

SEQ ID NO: 530291 - protein, 14 aa, Homo sapiens
  CDR3 for alpha chain variable domain of TCR clone 265146 (TRAV12-3, TRAJ57)
CALSAWGGSEKLVF

SEQ ID NO: 530292 - protein, 16 aa, Homo sapiens
  CDR3 for beta chain variable domain of TCR clone 265146 (TRBV7-3, TRBJ2-2)
CASSLKRGTLSGELFF

SEQ ID NO: 530293 - protein, 13 aa, Homo sapiens
  CDR3 for alpha chain variable domain of TCR clone 265147 (TRAV13-1, TRAJ17)
CAADGAAGNKLTF

SEQ ID NO: 530294 - protein, 14 aa, Homo sapiens
  CDR3 for beta chain variable domain of TCR clone 265147 (TRBV11-2, TRBJ1-3)
CASSLTQGRNAIYF

SEQ ID NO: 530295 - protein, 12 aa, Homo sapiens
  CDR3 for alpha chain variable domain of TCR clone 265148 (TRAV26-1, TRAJ35)
CIGLSFGNVLHC

SEQ ID NO: 530296 - protein, 15 aa, Homo sapiens
  CDR3 for beta chain variable domain of TCR clone 265148 (TRBV29-1, TRBJ2-7)
CSVEFFDRGSYEQYF

SEQ ID NO: 530297 - protein, 16 aa, Homo sapiens
  CDR3 for alpha chain variable domain of TCR clone 265149 (TRAV3, TRAJ10)
CALRDMRAGGGNKLTF

SEQ ID NO: 530298 - protein, 13 aa, Homo sapiens
  CDR3 for beta chain variable domain of TCR clone 265149 (TRBV12-4, TRBJ2-7)
CASSPTETYEQYF

SEQ ID NO: 530299 - protein, 12 aa, Homo sapiens
  CDR3 for alpha chain variable domain of TCR clone 265150 (TRAV1-1, TRAJ9)
CAVDTGGFKTIF

SEQ ID NO: 530300 - protein, 14 aa, Homo sapiens
  CDR3 for beta chain variable domain of TCR clone 265150 (TRBV7-8, TRBJ2-5)
CASSATGGQQTQYF

SEQ ID NO: 530301 - protein, 14 aa, Homo sapiens
  CDR3 for alpha chain variable domain of TCR clone 265151 (TRAV1-2, TRAJ8)
CAVREDTGFQKLVF

SEQ ID NO: 530302 - protein, 12 aa, Homo sapiens
  CDR3 for beta chain variable domain of TCR clone 265151 (TRBV12-4, TRBJ2-2)
CQQYYRVRGAVF

SEQ ID NO: 530303 - protein, 16 aa, Homo sapiens
  CDR3 for alpha chain variable domain of TCR clone 265152 (TRAV3, TRAJ37)
CAVRPHGSGNPGQLIF

SEQ ID NO: 530304 - protein, 16 aa, Homo sapiens
  CDR3 for beta chain variable domain of TCR clone 265152 (TRBV9, TRBJ1-2)
CASSVEEKVSPYGYTF

SEQ ID NO: 530305 - protein, 12 aa, Homo sapiens
  CDR3 for alpha chain variable domain of TCR clone 265153 (TRAV2, TRAJ33)
CAFMDSNYQLIW

SEQ ID NO: 530306 - protein, 12 aa, Homo sapiens
  CDR3 for beta chain variable domain of TCR clone 265153 (TRBV5-1, TRBJ2-7)
CASSFRGYEQYF

SEQ ID NO: 530307 - protein, 11 aa, Homo sapiens
  CDR3 for alpha chain variable domain of TCR clone 265154 (TRAV16, TRAJ26)
CALTRWSEFCL

SEQ ID NO: 530308 - protein, 14 aa, Homo sapiens
  CDR3 for beta chain variable domain of TCR clone 265154 (TRBV7-9, TRBJ2-7)
CASSSRLVLHEQYF

SEQ ID NO: 530309 - protein, 14 aa, Homo sapiens
  CDR3 for alpha chain variable domain of TCR clone 265155 (TRAV2, TRAJ23)
CAVIIYNQVGKLIF

SEQ ID NO: 530310 - protein, 13 aa, Homo sapiens
  CDR3 for beta chain variable domain of TCR clone 265155 (TRBV20-1, TRBJ2-3)
CSATSGGAGTQYF

SEQ ID NO: 530311 - protein, 12 aa, Homo sapiens
  CDR3 for alpha chain variable domain of TCR clone 265156 (TRAV13-1, TRAJ21)
CAAKEGFNKFYF

SEQ ID NO: 530312 - protein, 18 aa, Homo sapiens
  CDR3 for beta chain variable domain of TCR clone 265156 (TRBV20-1, TRBJ2-6)
SAVLRRHQLTALANVLTF

SEQ ID NO: 530313 - protein, 10 aa, Homo sapiens
  CDR3 for alpha chain variable domain of TCR clone 265157 (TRAV12-1, TRAJ43)
CVVHNNDMRF

SEQ ID NO: 530314 - protein, 13 aa, Homo sapiens
  CDR3 for beta chain variable domain of TCR clone 265157 (TRBV12-4, TRBJ1-2)
CVSSSGLTVISTF

SEQ ID NO: 530315 - protein, 23 aa, Homo sapiens
  CDR3 for alpha chain variable domain of TCR clone 265158 (TRAV26-1, TRAJ38)
CIADNAGNNHIQNPDPAVYQLRD

SEQ ID NO: 530316 - protein, 12 aa, Homo sapiens
  CDR3 for beta chain variable domain of TCR clone 265158 (TRBV11-2, TRBJ2-2)
CASSLGVGELFF

SEQ ID NO: 530317 - protein, 13 aa, Homo sapiens
  CDR3 for alpha chain variable domain of TCR clone 265159 (TRAV12-2, TRAJ34)
CAVRGYNTDKLIF

SEQ ID NO: 530318 - protein, 15 aa, Homo sapiens
  CDR3 for beta chain variable domain of TCR clone 265159 (TRBV9, TRBJ2-1)
CASSLAGSSYNEQFF

SEQ ID NO: 530319 - protein, 12 aa, Homo sapiens
  CDR3 for alpha chain variable domain of TCR clone 265160 (TRAV12-3, TRAJ17)
CAMTLTGNKLTF

SEQ ID NO: 530320 - protein, 15 aa, Homo sapiens
  CDR3 for beta chain variable domain of TCR clone 265160 (TRBV12-4, TRBJ1-1)
CTSVPAVRTGFEAFF

SEQ ID NO: 530321 - protein, 14 aa, Homo sapiens
  CDR3 for alpha chain variable domain of TCR clone 265161 (TRAV26-1, TRAJ49)
CIVRLTNTGNQFYF

SEQ ID NO: 530322 - protein, 13 aa, Homo sapiens
  CDR3 for beta chain variable domain of TCR clone 265161 (TRBV4-1, TRBJ2-7)
CATSQGQAYEQYF

SEQ ID NO: 530323 - protein, 13 aa, Homo sapiens
  CDR3 for alpha chain variable domain of TCR clone 265162 (TRAV14/DV4, TRAJ20)
CAMREGRDYKLSF

SEQ ID NO: 530324 - protein, 14 aa, Homo sapiens
  CDR3 for beta chain variable domain of TCR clone 265162 (TRBV7-6, TRBJ2-3)
CASSLGTVTDTQYF

SEQ ID NO: 530325 - protein, 12 aa, Homo sapiens
  CDR3 for alpha chain variable domain of TCR clone 265163 (TRAV12-3, TRAJ20)
CAMVRGDYKLSF

SEQ ID NO: 530326 - protein, 16 aa, Homo sapiens
  CDR3 for beta chain variable domain of TCR clone 265163 (TRBV15, TRBJ1-2)
CAASRGPRTGGGGYTF

SEQ ID NO: 530327 - protein, 17 aa, Homo sapiens
  CDR3 for alpha chain variable domain of TCR clone 265164 (TRAV26-1, TRAJ10)
CIVSFRGLTGGGNKLTF

SEQ ID NO: 530328 - protein, 15 aa, Homo sapiens
  CDR3 for beta chain variable domain of TCR clone 265164 (TRBV7-2, TRBJ1-1)
CASSHNPGGSTEAFF

SEQ ID NO: 530329 - protein, 14 aa, Homo sapiens
  CDR3 for alpha chain variable domain of TCR clone 265165 (TRAV26-1, TRAJ37)
CIVPSSSNTGKLIF

SEQ ID NO: 530330 - protein, 11 aa, Homo sapiens
  CDR3 for beta chain variable domain of TCR clone 265165 (TRBV18, TRBJ2-7)
CASSRSREQYF

SEQ ID NO: 530331 - protein, 16 aa, Homo sapiens
  CDR3 for alpha chain variable domain of TCR clone 265166 (TRAV23/DV6, TRAJ9)
CAASIGGNTGGFKTIF

SEQ ID NO: 530332 - protein, 20 aa, Homo sapiens
  CDR3 for beta chain variable domain of TCR clone 265166 (TRBV19, TRBJ2-1)
CASSISRTVTSTRLNNEQLF

SEQ ID NO: 530333 - protein, 17 aa, Homo sapiens
  CDR3 for alpha chain variable domain of TCR clone 265167 (TRAV23/DV6, TRAJ57)
CAASSTLSQGGSEKLVF

SEQ ID NO: 530334 - protein, 16 aa, Homo sapiens
  CDR3 for beta chain variable domain of TCR clone 265167 (TRBV11-2, TRBJ1-2)
CASSLDRGGNNYGYTF

SEQ ID NO: 530335 - protein, 15 aa, Homo sapiens
  CDR3 for alpha chain variable domain of TCR clone 265168 (TRAV27, TRAJ38)
CAGRFNAGNNLKLIW

SEQ ID NO: 530336 - protein, 13 aa, Homo sapiens
  CDR3 for beta chain variable domain of TCR clone 265168 (TRBV12-5, TRBJ2-3)
CASQNRGTDTQYF

SEQ ID NO: 530337 - protein, 14 aa, Homo sapiens
  CDR3 for alpha chain variable domain of TCR clone 265169 (TRAV3, TRAJ26)
CAVRDYNYVQNFVF

SEQ ID NO: 530338 - protein, 15 aa, Homo sapiens
  CDR3 for beta chain variable domain of TCR clone 265169 (TRBV20-1, TRBJ2-5)
CSANPPGRGGETQYF

SEQ ID NO: 530339 - protein, 16 aa, Homo sapiens
  CDR3 for alpha chain variable domain of TCR clone 265170 (TRAV3, TRAJ37)
CAVRGEGSGNTGKLIF

SEQ ID NO: 530340 - protein, 14 aa, Homo sapiens
  CDR3 for beta chain variable domain of TCR clone 265170 (TRBV7-3, TRBJ2-1)
CASSLAGGTNEQFF

SEQ ID NO: 530341 - protein, 14 aa, Homo sapiens
  CDR3 for alpha chain variable domain of TCR clone 265171 (TRAV12-2, TRAJ4)
CAEDLSGGYNKLNF

SEQ ID NO: 530342 - protein, 13 aa, Homo sapiens
  CDR3 for beta chain variable domain of TCR clone 265171 (TRBV7-9, TRBJ1-2)
CASSLKQNYGYTF

SEQ ID NO: 530343 - protein, 17 aa, Homo sapiens
  CDR3 for alpha chain variable domain of TCR clone 265172 (TRAV4, TRAJ18)
CLVGERSVGSTLGRLYF

SEQ ID NO: 530344 - protein, 11 aa, Homo sapiens
  CDR3 for beta chain variable domain of TCR clone 265172 (TRBV12-4, TRBJ2-3)
CASTATDTQYF

SEQ ID NO: 530345 - protein, 14 aa, Homo sapiens
  CDR3 for alpha chain variable domain of TCR clone 265173 (TRAV12-3, TRAJ10)
SHLPLTGGGNKLTF

SEQ ID NO: 530346 - protein, 14 aa, Homo sapiens
  CDR3 for beta chain variable domain of TCR clone 265173 (TRBV6-1, TRBJ1-3)
CASVQGGGGNTIYL

SEQ ID NO: 530347 - protein, 13 aa, Homo sapiens
  CDR3 for alpha chain variable domain of TCR clone 265174 (TRAV8-6, TRAJ5)
CAVSDRGRRALTF

SEQ ID NO: 530348 - protein, 14 aa, Homo sapiens
  CDR3 for beta chain variable domain of TCR clone 265174 (TRBV6-1, TRBJ1-3)
CASVQGGGGNTIYF

SEQ ID NO: 530349 - protein, 14 aa, Homo sapiens
  CDR3 for alpha chain variable domain of TCR clone 265175 (TRAV12-1, TRAJ23)
CVVNIPNQGGKLIF

SEQ ID NO: 530350 - protein, 13 aa, Homo sapiens
  CDR3 for beta chain variable domain of TCR clone 265175 (TRBV7-2, TRBJ2-7)
CASSSPSGGEQYF

SEQ ID NO: 530351 - protein, 12 aa, Homo sapiens
  CDR3 for alpha chain variable domain of TCR clone 265176 (TRAV9-2, TRAJ20)
CALADNDYKLSF

SEQ ID NO: 530352 - protein, 12 aa, Homo sapiens
  CDR3 for beta chain variable domain of TCR clone 265176 (TRBV11-2, TRBJ2-2)
CASSLGGGELFF

SEQ ID NO: 530353 - protein, 16 aa, Homo sapiens
  CDR3 for alpha chain variable domain of TCR clone 265177 (TRAV12-1, TRAJ12)
CVVNTLLMDSSYKLIF

SEQ ID NO: 530354 - protein, 17 aa, Homo sapiens
  CDR3 for beta chain variable domain of TCR clone 265177 (TRBV7-2, TRBJ2-3)
CASSLEARGTSTDTQYF

SEQ ID NO: 530355 - protein, 15 aa, Homo sapiens
  CDR3 for alpha chain variable domain of TCR clone 265178 (TRAV3, TRAJ22)
CAVRDRGGSARQLTF

SEQ ID NO: 530356 - protein, 12 aa, Homo sapiens
  CDR3 for beta chain variable domain of TCR clone 265178 (TRBV12-4, TRBJ1-2)
CASSFIWLQLRF

SEQ ID NO: 530357 - protein, 14 aa, Homo sapiens
  CDR3 for alpha chain variable domain of TCR clone 265179 (TRAV23/DV6, TRAJ37)
CAASTSSNTVKLIF

SEQ ID NO: 530358 - protein, 13 aa, Homo sapiens
  CDR3 for beta chain variable domain of TCR clone 265179 (TRBV7-7, TRBJ1-1)
CASSLGANTEAFF

SEQ ID NO: 530359 - protein, 13 aa, Homo sapiens
  CDR3 for alpha chain variable domain of TCR clone 265180 (TRAV8-6, TRAJ50)
CAVIKTSYDKVIF

SEQ ID NO: 530360 - protein, 15 aa, Homo sapiens
  CDR3 for beta chain variable domain of TCR clone 265180 (TRBV7-2, TRBJ2-2)
CASRRPGQNTGELFL

SEQ ID NO: 530361 - protein, 12 aa, Homo sapiens
  CDR3 for alpha chain variable domain of TCR clone 265181 (TRAV27, TRAJ9)
CAGESGGFKTIF

SEQ ID NO: 530362 - protein, 18 aa, Homo sapiens
  CDR3 for beta chain variable domain of TCR clone 265181 (TRBV10-2, TRBJ2-2)
CISAPAVHRQADAWELFF

SEQ ID NO: 530363 - protein, 15 aa, Homo sapiens
  CDR3 for alpha chain variable domain of TCR clone 265182 (TRAV2, TRAJ15)
CAVEDRGQAGTALIF

SEQ ID NO: 530364 - protein, 18 aa, Homo sapiens
  CDR3 for beta chain variable domain of TCR clone 265182 (TRBV12-4, TRBJ2-5)
CASSLGGIYDPVLRARHA

SEQ ID NO: 530365 - protein, 14 aa, Homo sapiens
  CDR3 for alpha chain variable domain of TCR clone 265183 (TRAV12-3, TRAJ22)
CAMSLFGSARQLTF

SEQ ID NO: 530366 - protein, 11 aa, Homo sapiens
  CDR3 for beta chain variable domain of TCR clone 265183 (TRBV12-4, TRBJ2-2)
CASSSAGELFF

SEQ ID NO: 530367 - protein, 16 aa, Homo sapiens
  CDR3 for alpha chain variable domain of TCR clone 265184 (TRAV30, TRAJ24)
CGTEIVDADSWGKFQF

SEQ ID NO: 530368 - protein, 14 aa, Homo sapiens
  CDR3 for beta chain variable domain of TCR clone 265184 (TRBV6-6, TRBJ1-3)
CASSRQGSGNTIYF

SEQ ID NO: 530369 - protein, 13 aa, Homo sapiens
  CDR3 for alpha chain variable domain of TCR clone 265185 (TRAV26-2, TRAJ43)
CILRAVNNNDMRF

SEQ ID NO: 530370 - protein, 15 aa, Homo sapiens
  CDR3 for beta chain variable domain of TCR clone 265185 (TRBV7-2, TRBJ2-1)
CASTLGTGIYNEQFF

SEQ ID NO: 530371 - protein, 16 aa, Homo sapiens
  CDR3 for alpha chain variable domain of TCR clone 265186 (TRAV30, TRAJ24)
CGTETVDADSWGKFQF

SEQ ID NO: 530372 - protein, 17 aa, Homo sapiens
  CDR3 for beta chain variable domain of TCR clone 265186 (TRBV20-1, TRBJ2-2)
CSASGSGQGGLTGELFF

SEQ ID NO: 530373 - protein, 16 aa, Homo sapiens
  CDR3 for alpha chain variable domain of TCR clone 265187 (TRAV21, TRAJ45)
YAVSWGSGGGSDGLTF

SEQ ID NO: 530374 - protein, 16 aa, Homo sapiens
  CDR3 for beta chain variable domain of TCR clone 265187 (TRBV11-2, TRBJ1-2)
CASSLDTGGADYGYTF

SEQ ID NO: 530375 - protein, 12 aa, Homo sapiens
  CDR3 for alpha chain variable domain of TCR clone 265188 (TRAV12-3, TRAJ17)
CAMTLTGNKLTF

SEQ ID NO: 530376 - protein, 13 aa, Homo sapiens
  CDR3 for beta chain variable domain of TCR clone 265188 (TRBV19, TRBJ1-2)
CASSQGQVHGYTF

SEQ ID NO: 530377 - protein, 13 aa, Homo sapiens
  CDR3 for alpha chain variable domain of TCR clone 265189 (TRAV13-1, TRAJ39)
CSKYSNAGNMLTF

SEQ ID NO: 530378 - protein, 16 aa, Homo sapiens
  CDR3 for beta chain variable domain of TCR clone 265189 (TRBV11-2, TRBJ2-7)
CASSPTTGGVSYEQYF

SEQ ID NO: 530379 - protein, 10 aa, Homo sapiens
  CDR3 for alpha chain variable domain of TCR clone 265190 (TRAV23/DV6, TRAJ57)
CSASSTLSQG

SEQ ID NO: 530380 - protein, 14 aa, Homo sapiens
  CDR3 for beta chain variable domain of TCR clone 265190 (TRBV25-1, TRBJ1-1)
CASTRLGGNTEAFF

SEQ ID NO: 530381 - protein, 12 aa, Homo sapiens
  CDR3 for alpha chain variable domain of TCR clone 265191 (TRAV12-3, TRAJ17)
CAMTLTGNKLTF

SEQ ID NO: 530382 - protein, 16 aa, Homo sapiens
  CDR3 for beta chain variable domain of TCR clone 265191 (TRBV12-4, TRBJ1-5)
CASSRPVGGSNEPQHF

SEQ ID NO: 530383 - protein, 17 aa, Homo sapiens
  CDR3 for alpha chain variable domain of TCR clone 265192 (TRAV3, TRAJ6)
CAVSRRTDTGGSYIPTI

SEQ ID NO: 530384 - protein, 18 aa, Homo sapiens
  CDR3 for beta chain variable domain of TCR clone 265192 (TRBV7-2, TRBJ2-3)
CASSLETSRGRKADTQYF

SEQ ID NO: 530385 - protein, 17 aa, Homo sapiens
  CDR3 for alpha chain variable domain of TCR clone 265193 (TRAV26-1, TRAJ28)
CIVRVPDSGAGSYQLTF

SEQ ID NO: 530386 - protein, 17 aa, Homo sapiens
  CDR3 for beta chain variable domain of TCR clone 265193 (TRBV28, TRBJ2-7)
GASSPLPAGGKSYEQYF

SEQ ID NO: 530387 - protein, 14 aa, Homo sapiens
  CDR3 for alpha chain variable domain of TCR clone 265194 (TRAV1-2, TRAJ16)
CVVNRFSDGQKLLF

SEQ ID NO: 530388 - protein, 12 aa, Homo sapiens
  CDR3 for beta chain variable domain of TCR clone 265194 (TRBV6-3, TRBJ2-7)
CASSLTPYEQYF

SEQ ID NO: 530389 - protein, 15 aa, Homo sapiens
  CDR3 for alpha chain variable domain of TCR clone 265195 (TRAV12-3, TRAJ42)
CAMSGHGGSQGNRIF

SEQ ID NO: 530390 - protein, 13 aa, Homo sapiens
  CDR3 for beta chain variable domain of TCR clone 265195 (TRBV19, TRBJ2-5)
CASSGRAGETQYF

SEQ ID NO: 530391 - protein, 14 aa, Homo sapiens
  CDR3 for alpha chain variable domain of TCR clone 265196 (TRAV8-2, TRAJ5)
CVVDMDTGRRALTF

SEQ ID NO: 530392 - protein, 16 aa, Homo sapiens
  CDR3 for beta chain variable domain of TCR clone 265196 (TRBV4-3, TRBJ2-2)
CASSHLQGSGTGELFF

SEQ ID NO: 530393 - protein, 15 aa, Homo sapiens
  CDR3 for alpha chain variable domain of TCR clone 265197 (TRAV21, TRAJ53)
CAVRQSGGSNYKLTF

SEQ ID NO: 530394 - protein, 15 aa, Homo sapiens
  CDR3 for beta chain variable domain of TCR clone 265197 (TRBV5-1, TRBJ2-1)
CASSPPRAPYNEQFF

SEQ ID NO: 530395 - protein, 14 aa, Homo sapiens
  CDR3 for alpha chain variable domain of TCR clone 265198 (TRAV30, TRAJ33)
CGTVAPRSNYQLIW

SEQ ID NO: 530396 - protein, 16 aa, Homo sapiens
  CDR3 for beta chain variable domain of TCR clone 265198 (TRBV3-1, TRBJ2-5)
CASSPGLFNGFGTQYF

SEQ ID NO: 530397 - protein, 15 aa, Homo sapiens
  CDR3 for alpha chain variable domain of TCR clone 265199 (TRAV1-2, TRAJ35)
CAVRDPGGFGNVPHC

SEQ ID NO: 530398 - protein, 14 aa, Homo sapiens
  CDR3 for beta chain variable domain of TCR clone 265199 (TRBV5-1, TRBJ2-1)
CASSLDDRFDEQFF

SEQ ID NO: 530399 - protein, 13 aa, Homo sapiens
  CDR3 for alpha chain variable domain of TCR clone 265200 (TRAV12-2, TRAJ52)
CAAGGTSYGKLTF

SEQ ID NO: 530400 - protein, 15 aa, Homo sapiens
  CDR3 for beta chain variable domain of TCR clone 265200 (TRBV6-3, TRBJ2-7)
CASSSPGTVFYEQYF

SEQ ID NO: 530401 - protein, 12 aa, Homo sapiens
  CDR3 for alpha chain variable domain of TCR clone 265201 (TRAV1-2, TRAJ24)
CAVGGSWGKFQF

SEQ ID NO: 530402 - protein, 13 aa, Homo sapiens
  CDR3 for beta chain variable domain of TCR clone 265201 (TRBV19, TRBJ2-7)
CASSIDRTYEQYF

SEQ ID NO: 530403 - protein, 14 aa, Homo sapiens
  CDR3 for alpha chain variable domain of TCR clone 265202 (TRAV23/DV6, TRAJ22)
CADISSGSARQLTF

SEQ ID NO: 530404 - protein, 18 aa, Homo sapiens
  CDR3 for beta chain variable domain of TCR clone 265202 (TRBV11-2, TRBJ2-6)
CASSLNPFLGTGANVLTF

SEQ ID NO: 530405 - protein, 14 aa, Homo sapiens
  CDR3 for alpha chain variable domain of TCR clone 265203 (TRAV1-2, TRAJ16)
CAVNRFSEGQKLLF

SEQ ID NO: 530406 - protein, 11 aa, Homo sapiens
  CDR3 for beta chain variable domain of TCR clone 265203 (TRBV7-9, TRBJ2-3)
CASSGPDTQYF

SEQ ID NO: 530407 - protein, 16 aa, Homo sapiens
  CDR3 for alpha chain variable domain of TCR clone 265204 (TRAV35, TRAJ42)
GRMERYYGGSPGNLIF

SEQ ID NO: 530408 - protein, 15 aa, Homo sapiens
  CDR3 for beta chain variable domain of TCR clone 265204 (TRBV6-1, TRBJ2-7)
CASSDWDKPNYEQYF

SEQ ID NO: 530409 - protein, 14 aa, Homo sapiens
  CDR3 for alpha chain variable domain of TCR clone 265205 (TRAV12-1, TRAJ13)
SVVIDSGGYQKVTF

SEQ ID NO: 530410 - protein, 17 aa, Homo sapiens
  CDR3 for beta chain variable domain of TCR clone 265205 (TRBV15, TRBJ1-5)
CATSRAPPGTRNQPQHF

SEQ ID NO: 530411 - protein, 15 aa, Homo sapiens
  CDR3 for alpha chain variable domain of TCR clone 265206 (TRAV8-2, TRAJ16)
CVVSDGFSDGQKLLF

SEQ ID NO: 530412 - protein, 11 aa, Homo sapiens
  CDR3 for beta chain variable domain of TCR clone 265206 (TRBV11-2, TRBJ2-2)
CASSLPGELFF

SEQ ID NO: 530413 - protein, 14 aa, Homo sapiens
  CDR3 for alpha chain variable domain of TCR clone 265207 (TRAV1-2, TRAJ8)
CAVREDTGFQKLVF

SEQ ID NO: 530414 - protein, 10 aa, Homo sapiens
  CDR3 for beta chain variable domain of TCR clone 265207 (TRBV7-9, TRBJ1-2)
CASSLKQNYA

SEQ ID NO: 530415 - protein, 12 aa, Homo sapiens
  CDR3 for alpha chain variable domain of TCR clone 265208 (TRAV1-2, TRAJ26)
CAVRYYGQNFVF

SEQ ID NO: 530416 - protein, 14 aa, Homo sapiens
  CDR3 for beta chain variable domain of TCR clone 265208 (TRBV11-1, TRBJ2-7)
CASSFQQGSYEQYF

SEQ ID NO: 530417 - protein, 11 aa, Homo sapiens
  CDR3 for alpha chain variable domain of TCR clone 265209 (TRAV8-3, TRAJ15)
CAVGPGTALIF

SEQ ID NO: 530418 - protein, 18 aa, Homo sapiens
  CDR3 for beta chain variable domain of TCR clone 265209 (TRBV18, TRBJ2-3)
CASSYTSGAAGGTDTQYF

SEQ ID NO: 530419 - protein, 14 aa, Homo sapiens
  CDR3 for alpha chain variable domain of TCR clone 265210 (TRAV21, TRAJ57)
CAVSRGGGSEKLVF

SEQ ID NO: 530420 - protein, 12 aa, Homo sapiens
  CDR3 for beta chain variable domain of TCR clone 265210 (TRBV5-5, TRBJ2-5)
CASSYFGETQYF

SEQ ID NO: 530421 - protein, 11 aa, Homo sapiens
  CDR3 for alpha chain variable domain of TCR clone 265211 (TRAV12-3, TRAJ49)
CGANTGNQFYF

SEQ ID NO: 530422 - protein, 12 aa, Homo sapiens
  CDR3 for beta chain variable domain of TCR clone 265211 (TRBV6-3, TRBJ2-7)
CASSEPGFEQYF

SEQ ID NO: 530423 - protein, 14 aa, Homo sapiens
  CDR3 for alpha chain variable domain of TCR clone 265212 (TRAV13-1, TRAJ44)
CAAKATGTASKLAF

SEQ ID NO: 530424 - protein, 17 aa, Homo sapiens
  CDR3 for beta chain variable domain of TCR clone 265212 (TRBV7-3, TRBJ2-3)
RASSLMRRMRGADTQYF

SEQ ID NO: 530425 - protein, 15 aa, Homo sapiens
  CDR3 for alpha chain variable domain of TCR clone 265213 (TRAV10, TRAJ39)
CAVSAAGNAGNMLTF

SEQ ID NO: 530426 - protein, 13 aa, Homo sapiens
  CDR3 for beta chain variable domain of TCR clone 265213 (TRBV18, TRBJ2-7)
CASQSGGGYEQYF

SEQ ID NO: 530427 - protein, 14 aa, Homo sapiens
  CDR3 for alpha chain variable domain of TCR clone 265214 (TRAV1-1, TRAJ27)
CAVIYNTNAGKSTF

SEQ ID NO: 530428 - protein, 13 aa, Homo sapiens
  CDR3 for beta chain variable domain of TCR clone 265214 (TRBV7-2, TRBJ2-2)
CASSLAVTGELFF

SEQ ID NO: 530429 - protein, 19 aa, Homo sapiens
  CDR3 for alpha chain variable domain of TCR clone 265215 (TRAV17, TRAJ57)
CFLLLCYGPLQGASEKLVF

SEQ ID NO: 530430 - protein, 16 aa, Homo sapiens
  CDR3 for beta chain variable domain of TCR clone 265215 (TRBV12-4, TRBJ1-5)
CASSRPVGGSNQPQHF

SEQ ID NO: 530431 - protein, 13 aa, Homo sapiens
  CDR3 for alpha chain variable domain of TCR clone 265216 (TRAV27, TRAJ41)
CAGEGKSGYALHF

SEQ ID NO: 530432 - protein, 14 aa, Homo sapiens
  CDR3 for beta chain variable domain of TCR clone 265216 (TRBV7-2, TRBJ1-1)
CASSFLTGTTEAFF

SEQ ID NO: 530433 - protein, 16 aa, Homo sapiens
  CDR3 for alpha chain variable domain of TCR clone 265217 (TRAV16, TRAJ21)
CACGWATTSTNFTLDL

SEQ ID NO: 530434 - protein, 15 aa, Homo sapiens
  CDR3 for beta chain variable domain of TCR clone 265217 (TRBV19, TRBJ2-1)
CASSIQATSYDEQFF

SEQ ID NO: 530435 - protein, 15 aa, Homo sapiens
  CDR3 for alpha chain variable domain of TCR clone 265218 (TRAV21, TRAJ40)
CAVRPQTSGTYKYIF

SEQ ID NO: 530436 - protein, 15 aa, Homo sapiens
  CDR3 for beta chain variable domain of TCR clone 265218 (TRBV5-1, TRBJ2-3)
CASSVTSGSTDMQYF

SEQ ID NO: 530437 - protein, 11 aa, Homo sapiens
  CDR3 for alpha chain variable domain of TCR clone 265219 (TRAV23/DV6, TRAJ49)
CAVAPVTSSIL

SEQ ID NO: 530438 - protein, 13 aa, Homo sapiens
  CDR3 for beta chain variable domain of TCR clone 265219 (TRBV6-1, TRBJ1-1)
CAISRQGNTEAFF

SEQ ID NO: 530439 - protein, 15 aa, Homo sapiens
  CDR3 for alpha chain variable domain of TCR clone 265220 (TRAV30, TRAJ54)
CGIEDAAQGAQKLVF

SEQ ID NO: 530440 - protein, 13 aa, Homo sapiens
  CDR3 for beta chain variable domain of TCR clone 265220 (TRBV7-3, TRBJ1-1)
CASSQDWGAEAFF

SEQ ID NO: 530441 - protein, 13 aa, Homo sapiens
  CDR3 for alpha chain variable domain of TCR clone 265221 (TRAV21, TRAJ27)
CAARPGNAGKSTF

SEQ ID NO: 530442 - protein, 13 aa, Homo sapiens
  CDR3 for beta chain variable domain of TCR clone 265221 (TRBV18, TRBJ2-7)
CASQSGGGYEHYF

SEQ ID NO: 530443 - protein, 16 aa, Homo sapiens
  CDR3 for alpha chain variable domain of TCR clone 265222 (TRAV4, TRAJ4)
CLVVPLFSGGYNKLIF

SEQ ID NO: 530444 - protein, 12 aa, Homo sapiens
  CDR3 for beta chain variable domain of TCR clone 265222 (TRBV12-4, TRBJ2-3)
CASSTLPDTQYF

SEQ ID NO: 530445 - protein, 11 aa, Homo sapiens
  CDR3 for alpha chain variable domain of TCR clone 265223 (TRAV26-1, TRAJ27)
CIDPNEGKSTF

SEQ ID NO: 530446 - protein, 18 aa, Homo sapiens
  CDR3 for beta chain variable domain of TCR clone 265223 (TRBV7-9, TRBJ2-6)
CASSFPGAGISGANVLTF

SEQ ID NO: 530447 - protein, 12 aa, Homo sapiens
  CDR3 for alpha chain variable domain of TCR clone 265224 (TRAV1-2, TRAJ33)
CAALDSNYQLIL

SEQ ID NO: 530448 - protein, 14 aa, Homo sapiens
  CDR3 for beta chain variable domain of TCR clone 265224 (TRBV20-1, TRBJ2-1)
CSAQIGGSANEQFF

SEQ ID NO: 530449 - protein, 12 aa, Homo sapiens
  CDR3 for alpha chain variable domain of TCR clone 265225 (TRAV17, TRAJ39)
CATGAAGNMLTF

SEQ ID NO: 530450 - protein, 15 aa, Homo sapiens
  CDR3 for beta chain variable domain of TCR clone 265225 (TRBV11-3, TRBJ2-2)
CASSLGGRPTGELFF

SEQ ID NO: 530451 - protein, 11 aa, Homo sapiens
  CDR3 for alpha chain variable domain of TCR clone 265226 (TRAV35, TRAJ34)
CWARNTDKLIF

SEQ ID NO: 530452 - protein, 16 aa, Homo sapiens
  CDR3 for beta chain variable domain of TCR clone 265226 (TRBV2, TRBJ2-3)
CASSTSVEGVTDTQYF

SEQ ID NO: 530453 - protein, 15 aa, Homo sapiens
  CDR3 for alpha chain variable domain of TCR clone 265227 (TRAV21, TRAJ52)
CAVRGGGTSYGKLTF

SEQ ID NO: 530454 - protein, 16 aa, Homo sapiens
  CDR3 for beta chain variable domain of TCR clone 265227 (TRBV5-1, TRBJ2-5)
CASSLALLRAGETQYF

SEQ ID NO: 530455 - protein, 13 aa, Homo sapiens
  CDR3 for alpha chain variable domain of TCR clone 265228 (TRAV20, TRAJ15)
CATINQAGTALIF

SEQ ID NO: 530456 - protein, 13 aa, Homo sapiens
  CDR3 for beta chain variable domain of TCR clone 265228 (TRBV12-4, TRBJ2-1)
SASRQPSNNEQFF

SEQ ID NO: 530457 - protein, 13 aa, Homo sapiens
  CDR3 for alpha chain variable domain of TCR clone 265229 (TRAV1-2, TRAJ9)
CAALNTGGFKPIF

SEQ ID NO: 530458 - protein, 14 aa, Homo sapiens
  CDR3 for beta chain variable domain of TCR clone 265229 (TRBV13, TRBJ2-3)
CASSSGSATDTQYF

SEQ ID NO: 530459 - protein, 16 aa, Homo sapiens
  CDR3 for alpha chain variable domain of TCR clone 265230 (TRAV30, TRAJ24)
CGPEIVDADSWGKFQF

SEQ ID NO: 530460 - protein, 15 aa, Homo sapiens
  CDR3 for beta chain variable domain of TCR clone 265230 (TRBV15, TRBJ1-5)
CATSRDPVSNQPQHF

SEQ ID NO: 530461 - protein, 15 aa, Homo sapiens
  CDR3 for alpha chain variable domain of TCR clone 265231 (TRAV3, TRAJ22)
CAVRDRVGSARQLTF

SEQ ID NO: 530462 - protein, 14 aa, Homo sapiens
  CDR3 for beta chain variable domain of TCR clone 265231 (TRBV25-1, TRBJ1-1)
CASTHLGGNTEAFF

SEQ ID NO: 530463 - protein, 12 aa, Homo sapiens
  CDR3 for alpha chain variable domain of TCR clone 265232 (TRAV12-3, TRAJ17)
CAMTLTGNKLTF

SEQ ID NO: 530464 - protein, 13 aa, Homo sapiens
  CDR3 for beta chain variable domain of TCR clone 265232 (TRBV7-9, TRBJ1-2)
CASSLKQSYGYTV

SEQ ID NO: 530465 - protein, 12 aa, Homo sapiens
  CDR3 for alpha chain variable domain of TCR clone 265233 (TRAV12-3, TRAJ17)
CAMTLTGNKLTF

SEQ ID NO: 530466 - protein, 15 aa, Homo sapiens
  CDR3 for beta chain variable domain of TCR clone 265233 (TRBV20-1, TRBJ2-7)
CSASARVSGMDEQYF

SEQ ID NO: 530467 - protein, 14 aa, Homo sapiens
  CDR3 for alpha chain variable domain of TCR clone 265234 (TRAV13-1, TRAJ44)
CAAKATGTASKLTF

SEQ ID NO: 530468 - protein, 15 aa, Homo sapiens
  CDR3 for beta chain variable domain of TCR clone 265234 (TRBV2, TRBJ2-1)
CASRESGGAYNEQFF

SEQ ID NO: 530469 - protein, 14 aa, Homo sapiens
  CDR3 for alpha chain variable domain of TCR clone 265235 (TRAV8-3, TRAJ4)
CAVGAAGGYNKLIF

SEQ ID NO: 530470 - protein, 13 aa, Homo sapiens
  CDR3 for beta chain variable domain of TCR clone 265235 (TRBV4-1, TRBJ2-1)
CASSQAGGDEQFF

SEQ ID NO: 530471 - protein, 14 aa, Homo sapiens
  CDR3 for alpha chain variable domain of TCR clone 265236 (TRAV1-2, TRAJ8)
CAVREDTGFQKLVF

SEQ ID NO: 530472 - protein, 19 aa, Homo sapiens
  CDR3 for beta chain variable domain of TCR clone 265236 (TRBV9, TRBJ2-2)
CISVPAAPWEKGTPGSCFF

SEQ ID NO: 530473 - protein, 13 aa, Homo sapiens
  CDR3 for alpha chain variable domain of TCR clone 265237 (TRAV23/DV6, TRAJ20)
CAAGGFHDYKLSF

SEQ ID NO: 530474 - protein, 14 aa, Homo sapiens
  CDR3 for beta chain variable domain of TCR clone 265237 (TRBV9, TRBJ1-3)
CASSVVGDGNTIYF

SEQ ID NO: 530475 - protein, 12 aa, Homo sapiens
  CDR3 for alpha chain variable domain of TCR clone 265238 (TRAV35, TRAJ30)
CAGLNRDDKIIF

SEQ ID NO: 530476 - protein, 15 aa, Homo sapiens
  CDR3 for beta chain variable domain of TCR clone 265238 (TRBV9, TRBJ1-6)
CASSVAGTGDSTLHF

SEQ ID NO: 530477 - protein, 13 aa, Homo sapiens
  CDR3 for alpha chain variable domain of TCR clone 265239 (TRAV12-3, TRAJ9)
CAMRNTGGFKTIF

SEQ ID NO: 530478 - protein, 11 aa, Homo sapiens
  CDR3 for beta chain variable domain of TCR clone 265239 (TRBV5-1, TRBJ2-1)
CASSIGQEQFF

SEQ ID NO: 530479 - protein, 12 aa, Homo sapiens
  CDR3 for alpha chain variable domain of TCR clone 265240 (TRAV35, TRAJ39)
LAPNNAGNMLTV

SEQ ID NO: 530480 - protein, 13 aa, Homo sapiens
  CDR3 for beta chain variable domain of TCR clone 265240 (TRBV19, TRBJ1-3)
CASRLSLGNTIYF

SEQ ID NO: 530481 - protein, 18 aa, Homo sapiens
  CDR3 for alpha chain variable domain of TCR clone 265241 (TRAV21, TRAJ52)
CAVRPSPAGGTSYGKLTF

SEQ ID NO: 530482 - protein, 15 aa, Homo sapiens
  CDR3 for beta chain variable domain of TCR clone 265241 (TRBV9, TRBJ1-6)
CASSVAGTGESPLHF

SEQ ID NO: 530483 - protein, 14 aa, Homo sapiens
  CDR3 for alpha chain variable domain of TCR clone 265242 (TRAV4, TRAJ9)
CLVGSGTGGFKTIF

SEQ ID NO: 530484 - protein, 15 aa, Homo sapiens
  CDR3 for beta chain variable domain of TCR clone 265242 (TRBV7-2, TRBJ2-1)
CASSLARGRVNEQFF

SEQ ID NO: 530485 - protein, 12 aa, Homo sapiens
  CDR3 for alpha chain variable domain of TCR clone 265243 (TRAV23/DV6, TRAJ16)
CAATGTGQKLLF

SEQ ID NO: 530486 - protein, 15 aa, Homo sapiens
  CDR3 for beta chain variable domain of TCR clone 265243 (TRBV19, TRBJ1-5)
CATSIVWADNQPQHF

SEQ ID NO: 530487 - protein, 19 aa, Homo sapiens
  CDR3 for alpha chain variable domain of TCR clone 265244 (TRAV25, TRAJ20)
TATQTTDVGILPHDYKLSF

SEQ ID NO: 530488 - protein, 15 aa, Homo sapiens
  CDR3 for beta chain variable domain of TCR clone 265244 (TRBV6-6, TRBJ1-5)
CASSSIQWTNQPQHF

SEQ ID NO: 530489 - protein, 14 aa, Homo sapiens
  CDR3 for alpha chain variable domain of TCR clone 265245 (TRAV12-2, TRAJ24)
CAVTPADSWGKLQF

SEQ ID NO: 530490 - protein, 15 aa, Homo sapiens
  CDR3 for beta chain variable domain of TCR clone 265245 (TRBV5-4, TRBJ1-3)
CASSSGGRSGNTIYF

SEQ ID NO: 530491 - protein, 16 aa, Homo sapiens
  CDR3 for alpha chain variable domain of TCR clone 265246 (TRAV22, TRAJ45)
CAVERGKRGGADGLTF

SEQ ID NO: 530492 - protein, 13 aa, Homo sapiens
  CDR3 for beta chain variable domain of TCR clone 265246 (TRBV27, TRBJ1-1)
CASSLSFGAEAFF

SEQ ID NO: 530493 - protein, 15 aa, Homo sapiens
  CDR3 for alpha chain variable domain of TCR clone 265247 (TRAV3, TRAJ22)
CAVRDRSGSARQLTF

SEQ ID NO: 530494 - protein, 15 aa, Homo sapiens
  CDR3 for beta chain variable domain of TCR clone 265247 (TRBV19, TRBJ2-5)
CASSIVRASQETQYF

SEQ ID NO: 530495 - protein, 14 aa, Homo sapiens
  CDR3 for alpha chain variable domain of TCR clone 265248 (TRAV12-2, TRAJ40)
CAVKIPPGTYKYIF

SEQ ID NO: 530496 - protein, 16 aa, Homo sapiens
  CDR3 for beta chain variable domain of TCR clone 265248 (TRBV7-9, TRBJ1-2)
CASSLGFSSGEDGYTF

SEQ ID NO: 530497 - protein, 14 aa, Homo sapiens
  CDR3 for alpha chain variable domain of TCR clone 265249 (TRAV13-1, TRAJ6)
CAASITGGSYIPTF

SEQ ID NO: 530498 - protein, 14 aa, Homo sapiens
  CDR3 for beta chain variable domain of TCR clone 265249 (TRBV6-3, TRBJ2-1)
CASLQSAYYNEQFF

SEQ ID NO: 530499 - protein, 13 aa, Homo sapiens
  CDR3 for alpha chain variable domain of TCR clone 265250 (TRAV3, TRAJ42)
CETLGGSQGNLIF

SEQ ID NO: 530500 - protein, 14 aa, Homo sapiens
  CDR3 for beta chain variable domain of TCR clone 265250 (TRBV19, TRBJ2-5)
CASSSSGIQETQYF

SEQ ID NO: 530501 - protein, 13 aa, Homo sapiens
  CDR3 for alpha chain variable domain of TCR clone 265251 (TRAV38-1, TRAJ42)
CARGGGSQGNLIF

SEQ ID NO: 530502 - protein, 15 aa, Homo sapiens
  CDR3 for beta chain variable domain of TCR clone 265251 (TRBV6-3, TRBJ2-7)
CASSSPGTDFYEQYF

SEQ ID NO: 530503 - protein, 22 aa, Homo sapiens
  CDR3 for alpha chain variable domain of TCR clone 265252 (TRAV27, TRAJ38)
CAARRNAGNNHIQNPDPAVYQL

SEQ ID NO: 530504 - protein, 13 aa, Homo sapiens
  CDR3 for beta chain variable domain of TCR clone 265252 (TRBV12-5, TRBJ2-3)
CASGDRQSETQYF

SEQ ID NO: 530505 - protein, 12 aa, Homo sapiens
  CDR3 for alpha chain variable domain of TCR clone 265253 (TRAV13-2, TRAJ23)
CAERHRGGTLIF

SEQ ID NO: 530506 - protein, 15 aa, Homo sapiens
  CDR3 for beta chain variable domain of TCR clone 265253 (TRBV9, TRBJ1-6)
CASSVAGTGDSPLHF

SEQ ID NO: 530507 - protein, 17 aa, Homo sapiens
  CDR3 for alpha chain variable domain of TCR clone 265254 (TRAV38-2/DV8, TRAJ28)
CAFLTLYSGAGSYQLTF

SEQ ID NO: 530508 - protein, 18 aa, Homo sapiens
  CDR3 for beta chain variable domain of TCR clone 265254 (TRBV7-2, TRBJ2-5)
CASSLSGGGRPSTSGRHA

SEQ ID NO: 530509 - protein, 14 aa, Homo sapiens
  CDR3 for alpha chain variable domain of TCR clone 265255 (TRAV1-2, TRAJ17)
CAVRDMTAGNKLTF

SEQ ID NO: 530510 - protein, 15 aa, Homo sapiens
  CDR3 for beta chain variable domain of TCR clone 265255 (TRBV20-1, TRBJ2-7)
CSARERVSGMDEQYF

SEQ ID NO: 530511 - protein, 16 aa, Homo sapiens
  CDR3 for alpha chain variable domain of TCR clone 265256 (TRAV26-1, TRAJ36)
CIVRAIVRSGANNLFF

SEQ ID NO: 530512 - protein, 14 aa, Homo sapiens
  CDR3 for beta chain variable domain of TCR clone 265256 (TRBV25-1, TRBJ2-1)
CASSKTGGYNEQFF

SEQ ID NO: 530513 - protein, 23 aa, Homo sapiens
  CDR3 for alpha chain variable domain of TCR clone 265257 (TRAV1-1, TRAJ11)
LLQELQLKDSASYFCAGYSTLTF

SEQ ID NO: 530514 - protein, 15 aa, Homo sapiens
  CDR3 for beta chain variable domain of TCR clone 265257 (TRBV6-5, TRBJ2-1)
CASRGDFDSYNEQFF

SEQ ID NO: 530515 - protein, 13 aa, Homo sapiens
  CDR3 for alpha chain variable domain of TCR clone 265258 (TRAV12-1, TRAJ3)
CVVNPRGASQIIF

SEQ ID NO: 530516 - protein, 13 aa, Homo sapiens
  CDR3 for beta chain variable domain of TCR clone 265258 (TRBV28, TRBJ1-5)
CASSDRGNQPQHF

SEQ ID NO: 530517 - protein, 13 aa, Homo sapiens
  CDR3 for alpha chain variable domain of TCR clone 265259 (TRAV26-1, TRAJ33)
CIVRVEGNYQLIW

SEQ ID NO: 530518 - protein, 18 aa, Homo sapiens
  CDR3 for beta chain variable domain of TCR clone 265259 (TRBV11-2, TRBJ2-3)
CASSLGGASRGAPNTQYF

SEQ ID NO: 530519 - protein, 12 aa, Homo sapiens
  CDR3 for alpha chain variable domain of TCR clone 265260 (TRAV35, TRAJ43)
CAGAYNNNDMRF

SEQ ID NO: 530520 - protein, 14 aa, Homo sapiens
  CDR3 for beta chain variable domain of TCR clone 265260 (TRBV2, TRBJ2-2)
CASSWQGATGELLF

SEQ ID NO: 530521 - protein, 15 aa, Homo sapiens
  CDR3 for alpha chain variable domain of TCR clone 265261 (TRAV4, TRAJ26)
CLVGGLDNYGQNFVF

SEQ ID NO: 530522 - protein, 13 aa, Homo sapiens
  CDR3 for beta chain variable domain of TCR clone 265261 (TRBV20-1, TRBJ2-5)
CSASLTGRETKYF

SEQ ID NO: 530523 - protein, 13 aa, Homo sapiens
  CDR3 for alpha chain variable domain of TCR clone 265262 (TRAV20, TRAJ20)
CAVQALNDSKLSF

SEQ ID NO: 530524 - protein, 13 aa, Homo sapiens
  CDR3 for beta chain variable domain of TCR clone 265262 (TRBV7-9, TRBJ1-4)
CASSLPGIEKLFF

SEQ ID NO: 530525 - protein, 14 aa, Homo sapiens
  CDR3 for alpha chain variable domain of TCR clone 265263 (TRAV2, TRAJ37)
CAVDFTSNTGKLIF

SEQ ID NO: 530526 - protein, 13 aa, Homo sapiens
  CDR3 for beta chain variable domain of TCR clone 265263 (TRBV11-2, TRBJ2-5)
CASSRGPSETQYF

SEQ ID NO: 530527 - protein, 14 aa, Homo sapiens
  CDR3 for alpha chain variable domain of TCR clone 265264 (TRAV9-2, TRAJ39)
CALYIYNAGNMLTF

SEQ ID NO: 530528 - protein, 13 aa, Homo sapiens
  CDR3 for beta chain variable domain of TCR clone 265264 (TRBV7-2, TRBJ2-4)
CASSRGHANIQYF

SEQ ID NO: 530529 - protein, 15 aa, Homo sapiens
  CDR3 for alpha chain variable domain of TCR clone 265265 (TRAV26-1, TRAJ44)
CIVRIGTGTASKLTF

SEQ ID NO: 530530 - protein, 13 aa, Homo sapiens
  CDR3 for beta chain variable domain of TCR clone 265265 (TRBV19, TRBJ2-5)
CASSMGGAGTQYF

SEQ ID NO: 530531 - protein, 14 aa, Homo sapiens
  CDR3 for alpha chain variable domain of TCR clone 265266 (TRAV8-3, TRAJ4)
CAVGASGGYNKLIF

SEQ ID NO: 530532 - protein, 15 aa, Homo sapiens
  CDR3 for beta chain variable domain of TCR clone 265266 (TRBV11-3, TRBJ2-7)
CASSPGPASSYEQYF

SEQ ID NO: 530533 - protein, 18 aa, Homo sapiens
  CDR3 for alpha chain variable domain of TCR clone 265267 (TRAV13-1, TRAJ52)
CAAKNPNAGGTRYGTLTF

SEQ ID NO: 530534 - protein, 15 aa, Homo sapiens
  CDR3 for beta chain variable domain of TCR clone 265267 (TRBV6-1, TRBJ2-3)
CASSELGGITDTQYF

SEQ ID NO: 530535 - protein, 13 aa, Homo sapiens
  CDR3 for alpha chain variable domain of TCR clone 265268 (TRAV1-2, TRAJ12)
CAVSMDSSYKLIF

SEQ ID NO: 530536 - protein, 14 aa, Homo sapiens
  CDR3 for beta chain variable domain of TCR clone 265268 (TRBV13, TRBJ2-3)
CASSLGGPQRPQYF

SEQ ID NO: 530537 - protein, 15 aa, Homo sapiens
  CDR3 for alpha chain variable domain of TCR clone 265269 (TRAV3, TRAJ5)
CAVRDLDTGRRAITF

SEQ ID NO: 530538 - protein, 14 aa, Homo sapiens
  CDR3 for beta chain variable domain of TCR clone 265269 (TRBV25-1, TRBJ1-1)
CASTHLGGNTEAFF

SEQ ID NO: 530539 - protein, 15 aa, Homo sapiens
  CDR3 for alpha chain variable domain of TCR clone 265270 (TRAV3, TRAJ29)
CAVRDINSGNTPIVF

SEQ ID NO: 530540 - protein, 16 aa, Homo sapiens
  CDR3 for beta chain variable domain of TCR clone 265270 (TRBV4-1, TRBJ2-5)
CASSQTFYGDQETQYF

SEQ ID NO: 530541 - protein, 15 aa, Homo sapiens
  CDR3 for alpha chain variable domain of TCR clone 265271 (TRAV17, TRAJ57)
CATGPSKGGSEKLVF

SEQ ID NO: 530542 - protein, 13 aa, Homo sapiens
  CDR3 for beta chain variable domain of TCR clone 265271 (TRBV27, TRBJ1-4)
CASSLMGDEKLFF

SEQ ID NO: 530543 - protein, 15 aa, Homo sapiens
  CDR3 for alpha chain variable domain of TCR clone 265272 (TRAV25, TRAJ53)
CAATGGGGSNYKLTF

SEQ ID NO: 530544 - protein, 13 aa, Homo sapiens
  CDR3 for beta chain variable domain of TCR clone 265272 (TRBV2, TRBJ1-1)
CARNPTGGFHAFF

SEQ ID NO: 530545 - protein, 12 aa, Homo sapiens
  CDR3 for alpha chain variable domain of TCR clone 265273 (TRAV12-3, TRAJ17)
CAMTLTGNKLTF

SEQ ID NO: 530546 - protein, 15 aa, Homo sapiens
  CDR3 for beta chain variable domain of TCR clone 265273 (TRBV4-1, TRBJ2-3)
CASSQDRLPPDTQYF

SEQ ID NO: 530547 - protein, 19 aa, Homo sapiens
  CDR3 for alpha chain variable domain of TCR clone 265274 (TRAV17, TRAJ57)
CFLLLCYGPSQGGSEKLVF

SEQ ID NO: 530548 - protein, 16 aa, Homo sapiens
  CDR3 for beta chain variable domain of TCR clone 265274 (TRBV11-2, TRBJ2-7)
CASSPLAGGPRCEQYF

SEQ ID NO: 530549 - protein, 15 aa, Homo sapiens
  CDR3 for alpha chain variable domain of TCR clone 265275 (TRAV17, TRAJ16)
CATALRFSDGQKLLF

SEQ ID NO: 530550 - protein, 17 aa, Homo sapiens
  CDR3 for beta chain variable domain of TCR clone 265275 (TRBV4-1, TRBJ2-2)
CASSQEARAQNTGELFF

SEQ ID NO: 530551 - protein, 13 aa, Homo sapiens
  CDR3 for alpha chain variable domain of TCR clone 265276 (TRAV16, TRAJ11)
CALSGPSYSTLTF

SEQ ID NO: 530552 - protein, 12 aa, Homo sapiens
  CDR3 for beta chain variable domain of TCR clone 265276 (TRBV11-2, TRBJ2-1)
CASSPGNNEQFF

SEQ ID NO: 530553 - protein, 16 aa, Homo sapiens
  CDR3 for alpha chain variable domain of TCR clone 265277 (TRAV8-3, TRAJ10)
CAVGPILTGGGNKLTF

SEQ ID NO: 530554 - protein, 16 aa, Homo sapiens
  CDR3 for beta chain variable domain of TCR clone 265277 (TRBV7-2, TRBJ2-5)
CASSSKWLSCQETQYF

SEQ ID NO: 530555 - protein, 13 aa, Homo sapiens
  CDR3 for alpha chain variable domain of TCR clone 265278 (TRAV8-1, TRAJ34)
CAVNAGNTDKLIF

SEQ ID NO: 530556 - protein, 13 aa, Homo sapiens
  CDR3 for beta chain variable domain of TCR clone 265278 (TRBV20-1, TRBJ2-1)
CSAGAGTYNGQFF

SEQ ID NO: 530557 - protein, 14 aa, Homo sapiens
  CDR3 for alpha chain variable domain of TCR clone 265279 (TRAV16, TRAJ10)
CSKKHTGGGNKLTF

SEQ ID NO: 530558 - protein, 16 aa, Homo sapiens
  CDR3 for beta chain variable domain of TCR clone 265279 (TRBV7-9, TRBJ2-1)
CASSDVAGGSYNEQFF

SEQ ID NO: 530559 - protein, 13 aa, Homo sapiens
  CDR3 for alpha chain variable domain of TCR clone 265280 (TRAV35, TRAJ44)
CAGLSGTASKLTF

SEQ ID NO: 530560 - protein, 17 aa, Homo sapiens
  CDR3 for beta chain variable domain of TCR clone 265280 (TRBV7-8, TRBJ2-6)
CASSAGTGGAGANVLTF

SEQ ID NO: 530561 - protein, 13 aa, Homo sapiens
  CDR3 for alpha chain variable domain of TCR clone 265281 (TRAV21, TRAJ57)
CAVTQGGSEKLVF

SEQ ID NO: 530562 - protein, 17 aa, Homo sapiens
  CDR3 for beta chain variable domain of TCR clone 265281 (TRBV13, TRBJ2-7)
CASSLSRVAGGRNTQYF

SEQ ID NO: 530563 - protein, 14 aa, Homo sapiens
  CDR3 for alpha chain variable domain of TCR clone 265282 (TRAV9-2, TRAJ56)
CALSYTGANSKLTF

SEQ ID NO: 530564 - protein, 15 aa, Homo sapiens
  CDR3 for beta chain variable domain of TCR clone 265282 (TRBV27, TRBJ2-1)
CASSNGGGSSNEQFF

SEQ ID NO: 530565 - protein, 11 aa, Homo sapiens
  CDR3 for alpha chain variable domain of TCR clone 265283 (TRAV3, TRAJ21)
CAVGNFNKFYF

SEQ ID NO: 530566 - protein, 17 aa, Homo sapiens
  CDR3 for beta chain variable domain of TCR clone 265283 (TRBV19, TRBJ2-1)
ISVPVVRRDRSYNEQFF

SEQ ID NO: 530567 - protein, 12 aa, Homo sapiens
  CDR3 for alpha chain variable domain of TCR clone 265284 (TRAV8-3, TRAJ26)
CAGDNYGQNFVF

SEQ ID NO: 530568 - protein, 13 aa, Homo sapiens
  CDR3 for beta chain variable domain of TCR clone 265284 (TRBV10-2, TRBJ2-7)
CASGASGGYEQYF

SEQ ID NO: 530569 - protein, 10 aa, Homo sapiens
  CDR3 for alpha chain variable domain of TCR clone 265285 (TRAV2, TRAJ34)
CAVVNEKLIF

SEQ ID NO: 530570 - protein, 20 aa, Homo sapiens
  CDR3 for beta chain variable domain of TCR clone 265285 (TRBV19, TRBJ2-1)
CASSISRTVTSTRLNNEQFF

SEQ ID NO: 530571 - protein, 16 aa, Homo sapiens
  CDR3 for alpha chain variable domain of TCR clone 265286 (TRAV22, TRAJ18)
CAVEKSRGSTLGRLYF

SEQ ID NO: 530572 - protein, 16 aa, Homo sapiens
  CDR3 for beta chain variable domain of TCR clone 265286 (TRBV15, TRBJ2-2)
CAASRELAVRTGELFF

SEQ ID NO: 530573 - protein, 14 aa, Homo sapiens
  CDR3 for alpha chain variable domain of TCR clone 265287 (TRAV8-6, TRAJ54)
CAVSPALGAQKLVF

SEQ ID NO: 530574 - protein, 15 aa, Homo sapiens
  CDR3 for beta chain variable domain of TCR clone 265287 (TRBV4-1, TRBJ1-6)
CASSAGQGYNSPLHV

SEQ ID NO: 530575 - protein, 14 aa, Homo sapiens
  CDR3 for alpha chain variable domain of TCR clone 265288 (TRAV1-2, TRAJ8)
CAVREVTGFQKLVF

SEQ ID NO: 530576 - protein, 19 aa, Homo sapiens
  CDR3 for beta chain variable domain of TCR clone 265288 (TRBV28, TRBJ2-1)
CASSFSIRGSGRTRYEQFF

SEQ ID NO: 530577 - protein, 15 aa, Homo sapiens
  CDR3 for alpha chain variable domain of TCR clone 265289 (TRAV21, TRAJ53)
CATLNSGGSNYKLTF

SEQ ID NO: 530578 - protein, 16 aa, Homo sapiens
  CDR3 for beta chain variable domain of TCR clone 265289 (TRBV4-2, TRBJ2-3)
CASSQELAGDTDTQYF

SEQ ID NO: 530579 - protein, 13 aa, Homo sapiens
  CDR3 for alpha chain variable domain of TCR clone 265290 (TRAV26-1, TRAJ30)
CIVRVESNDKIIF

SEQ ID NO: 530580 - protein, 11 aa, Homo sapiens
  CDR3 for beta chain variable domain of TCR clone 265290 (TRBV12-4, TRBJ2-2)
CASSSAGELFF

SEQ ID NO: 530581 - protein, 11 aa, Homo sapiens
  CDR3 for alpha chain variable domain of TCR clone 265291 (TRAV13-1, TRAJ43)
CAASMRNDMRF

SEQ ID NO: 530582 - protein, 14 aa, Homo sapiens
  CDR3 for beta chain variable domain of TCR clone 265291 (TRBV7-9, TRBJ2-2)
CASSGLADTGELFF

SEQ ID NO: 530583 - protein, 14 aa, Homo sapiens
  CDR3 for alpha chain variable domain of TCR clone 265292 (TRAV27, TRAJ36)
CAGPPKRGANNLFF

SEQ ID NO: 530584 - protein, 16 aa, Homo sapiens
  CDR3 for beta chain variable domain of TCR clone 265292 (TRBV7-3, TRBJ2-2)
CASSLKRGTLSGELFF

SEQ ID NO: 530585 - protein, 17 aa, Homo sapiens
  CDR3 for alpha chain variable domain of TCR clone 265293 (TRAV3, TRAJ6)
CAVRDGPRAGGSYIPTF

SEQ ID NO: 530586 - protein, 10 aa, Homo sapiens
  CDR3 for beta chain variable domain of TCR clone 265293 (TRBV7-2, TRBJ2-2)
CASSPTGANT

SEQ ID NO: 530587 - protein, 12 aa, Homo sapiens
  CDR3 for alpha chain variable domain of TCR clone 265294 (TRAV17, TRAJ57)
CATDCGSEKLVF

SEQ ID NO: 530588 - protein, 12 aa, Homo sapiens
  CDR3 for beta chain variable domain of TCR clone 265294 (TRBV29-1, TRBJ2-2)
CSVDKYTGELFF

SEQ ID NO: 530589 - protein, 11 aa, Homo sapiens
  CDR3 for alpha chain variable domain of TCR clone 265295 (TRAV2, TRAJ31)
CAAGPPARLMF

SEQ ID NO: 530590 - protein, 13 aa, Homo sapiens
  CDR3 for beta chain variable domain of TCR clone 265295 (TRBV2, TRBJ1-1)
CASRWTVNTEAFF

SEQ ID NO: 530591 - protein, 14 aa, Homo sapiens
  CDR3 for alpha chain variable domain of TCR clone 265296 (TRAV38-1, TRAJ40)
CALRPTSGTYKYIF

SEQ ID NO: 530592 - protein, 18 aa, Homo sapiens
  CDR3 for beta chain variable domain of TCR clone 265296 (TRBV11-2, TRBJ2-3)
CASSLGGASRGAPNTQYF

SEQ ID NO: 530593 - protein, 14 aa, Homo sapiens
  CDR3 for alpha chain variable domain of TCR clone 265297 (TRAV8-4, TRAJ38)
CARLNAGNNRKLIW

SEQ ID NO: 530594 - protein, 12 aa, Homo sapiens
  CDR3 for beta chain variable domain of TCR clone 265297 (TRBV6-1, TRBJ2-7)
CASSEPLYEQYY

SEQ ID NO: 530595 - protein, 16 aa, Homo sapiens
  CDR3 for alpha chain variable domain of TCR clone 265298 (TRAV26-1, TRAJ21)
CIVRVDTTSTNFTLDL

SEQ ID NO: 530596 - protein, 18 aa, Homo sapiens
  CDR3 for beta chain variable domain of TCR clone 265298 (TRBV4-1, TRBJ1-5)
CASSQDPRGQGLNQPQHF

SEQ ID NO: 530597 - protein, 15 aa, Homo sapiens
  CDR3 for alpha chain variable domain of TCR clone 265299 (TRAV3, TRAJ11)
CAVRDRGSGYSTLTF

SEQ ID NO: 530598 - protein, 14 aa, Homo sapiens
  CDR3 for beta chain variable domain of TCR clone 265299 (TRBV19, TRBJ2-1)
CASPTFVLSGEQFF

SEQ ID NO: 530599 - protein, 15 aa, Homo sapiens
  CDR3 for alpha chain variable domain of TCR clone 265300 (TRAV13-1, TRAJ32)
CAASNGWWGYKQAHL

SEQ ID NO: 530600 - protein, 17 aa, Homo sapiens
  CDR3 for beta chain variable domain of TCR clone 265300 (TRBV15, TRBJ1-2)
CATSGREIDVVNYGYTF

SEQ ID NO: 530601 - protein, 14 aa, Homo sapiens
  CDR3 for alpha chain variable domain of TCR clone 265301 (TRAV8-4, TRAJ37)
CAVSEPSNTGTLIF

SEQ ID NO: 530602 - protein, 14 aa, Homo sapiens
  CDR3 for beta chain variable domain of TCR clone 265301 (TRBV28, TRBJ2-1)
CAIHRTGARTEQFF

SEQ ID NO: 530603 - protein, 14 aa, Homo sapiens
  CDR3 for alpha chain variable domain of TCR clone 265302 (TRAV12-3, TRAJ11)
CAMTTNSGYSTLTF

SEQ ID NO: 530604 - protein, 16 aa, Homo sapiens
  CDR3 for beta chain variable domain of TCR clone 265302 (TRBV20-1, TRBJ1-1)
GSARALTQGMNTEDFF

SEQ ID NO: 530605 - protein, 14 aa, Homo sapiens
  CDR3 for alpha chain variable domain of TCR clone 265303 (TRAV34, TRAJ44)
CGSDGTGTASKLTF

SEQ ID NO: 530606 - protein, 20 aa, Homo sapiens
  CDR3 for beta chain variable domain of TCR clone 265303 (TRBV7-9, TRBJ1-5)
CISVSEAGQGAPYSNQPQHF

SEQ ID NO: 530607 - protein, 13 aa, Homo sapiens
  CDR3 for alpha chain variable domain of TCR clone 265304 (TRAV13-2, TRAJ48)
CAEMGFGNEKLTF

SEQ ID NO: 530608 - protein, 16 aa, Homo sapiens
  CDR3 for beta chain variable domain of TCR clone 265304 (TRBV7-9, TRBJ2-1)
CASSDVAGGSYNEQFF

SEQ ID NO: 530609 - protein, 11 aa, Homo sapiens
  CDR3 for alpha chain variable domain of TCR clone 265305 (TRAV12-3, TRAJ43)
CAMSVSNDMRF

SEQ ID NO: 530610 - protein, 16 aa, Homo sapiens
  CDR3 for beta chain variable domain of TCR clone 265305 (TRBV2, TRBJ2-3)
CASSTSVEGVTDTQYS

SEQ ID NO: 530611 - protein, 14 aa, Homo sapiens
  CDR3 for alpha chain variable domain of TCR clone 265306 (TRAV8-3, TRAJ39)
GAVGANNAGNMLTF

SEQ ID NO: 530612 - protein, 12 aa, Homo sapiens
  CDR3 for beta chain variable domain of TCR clone 265306 (TRBV20-1, TRBJ2-1)
CSAQYTYNEQFF

SEQ ID NO: 530613 - protein, 16 aa, Homo sapiens
  CDR3 for alpha chain variable domain of TCR clone 265307 (TRAV3, TRAJ21)
CAVREIERGNFNKFYF

SEQ ID NO: 530614 - protein, 13 aa, Homo sapiens
  CDR3 for beta chain variable domain of TCR clone 265307 (TRBV27, TRBJ2-7)
CASNLTTGYEQYF

SEQ ID NO: 530615 - protein, 12 aa, Homo sapiens
  CDR3 for alpha chain variable domain of TCR clone 265308 (TRAV12-3, TRAJ20)
CAMVRGDYKLSF

SEQ ID NO: 530616 - protein, 13 aa, Homo sapiens
  CDR3 for beta chain variable domain of TCR clone 265308 (TRBV29-1, TRBJ2-1)
CSVEGGRVNEQFF

SEQ ID NO: 530617 - protein, 15 aa, Homo sapiens
  CDR3 for alpha chain variable domain of TCR clone 265309 (TRAV8-4, TRAJ29)
CAVSEGVRGNKPLVF

SEQ ID NO: 530618 - protein, 18 aa, Homo sapiens
  CDR3 for beta chain variable domain of TCR clone 265309 (TRBV20-1, TRBJ2-6)
CSARTLAGGPSGANVLTF

SEQ ID NO: 530619 - protein, 12 aa, Homo sapiens
  CDR3 for alpha chain variable domain of TCR clone 265310 (TRAV13-2, TRAJ23)
CAERHRGGELIF

SEQ ID NO: 530620 - protein, 16 aa, Homo sapiens
  CDR3 for beta chain variable domain of TCR clone 265310 (TRBV7-2, TRBJ2-6)
CAILSGVSSGANVLTF

SEQ ID NO: 530621 - protein, 15 aa, Homo sapiens
  CDR3 for alpha chain variable domain of TCR clone 265311 (TRAV8-2, TRAJ40)
CVALGTTSGTYKYIF

SEQ ID NO: 530622 - protein, 16 aa, Homo sapiens
  CDR3 for beta chain variable domain of TCR clone 265311 (TRBV7-3, TRBJ2-1)
CASSLECYRSYNEQFF

SEQ ID NO: 530623 - protein, 15 aa, Homo sapiens
  CDR3 for alpha chain variable domain of TCR clone 265312 (TRAV35, TRAJ58)
FAGRRQETSGSRLTF

SEQ ID NO: 530624 - protein, 11 aa, Homo sapiens
  CDR3 for beta chain variable domain of TCR clone 265312 (TRBV11-2, TRBJ1-1)
CASSINTEAFF

SEQ ID NO: 530625 - protein, 12 aa, Homo sapiens
  CDR3 for alpha chain variable domain of TCR clone 265313 (TRAV21, TRAJ37)
CAVSGNTGKLIF

SEQ ID NO: 530626 - protein, 14 aa, Homo sapiens
  CDR3 for beta chain variable domain of TCR clone 265313 (TRBV19, TRBJ2-1)
CASEVTGARNEQFF

SEQ ID NO: 530627 - protein, 13 aa, Homo sapiens
  CDR3 for alpha chain variable domain of TCR clone 265314 (TRAV29/DV5, TRAJ31)
CAASRNNNARLMF

SEQ ID NO: 530628 - protein, 18 aa, Homo sapiens
  CDR3 for beta chain variable domain of TCR clone 265314 (TRBV7-9, TRBJ2-7)
CASSLTTSGSRTWYEQYF

SEQ ID NO: 530629 - protein, 11 aa, Homo sapiens
  CDR3 for alpha chain variable domain of TCR clone 265315 (TRAV21, TRAJ34)
CAHYNTDKLIF

SEQ ID NO: 530630 - protein, 13 aa, Homo sapiens
  CDR3 for beta chain variable domain of TCR clone 265315 (TRBV2, TRBJ2-7)
CASSVGGSGEQYF

SEQ ID NO: 530631 - protein, 16 aa, Homo sapiens
  CDR3 for alpha chain variable domain of TCR clone 265316 (TRAV2, TRAJ10)
CCGGSTVTVGGNKLTF

SEQ ID NO: 530632 - protein, 16 aa, Homo sapiens
  CDR3 for beta chain variable domain of TCR clone 265316 (TRBV18, TRBJ1-5)
CASSPSTGNSNQPQHF

SEQ ID NO: 530633 - protein, 12 aa, Homo sapiens
  CDR3 for alpha chain variable domain of TCR clone 265317 (TRAV3, TRAJ39)
CAVIEWSNMLTS

SEQ ID NO: 530634 - protein, 14 aa, Homo sapiens
  CDR3 for beta chain variable domain of TCR clone 265317 (TRBV7-8, TRBJ2-3)
CASSFPDGQDTQYY

SEQ ID NO: 530635 - protein, 13 aa, Homo sapiens
  CDR3 for alpha chain variable domain of TCR clone 265318 (TRAV16, TRAJ11)
CALSGPSYSTLTF

SEQ ID NO: 530636 - protein, 13 aa, Homo sapiens
  CDR3 for beta chain variable domain of TCR clone 265318 (TRBV2, TRBJ1-6)
CASGRGGISPLHF

SEQ ID NO: 530637 - protein, 13 aa, Homo sapiens
  CDR3 for alpha chain variable domain of TCR clone 265319 (TRAV12-1, TRAJ17)
CVVNKAAGNKVTF

SEQ ID NO: 530638 - protein, 16 aa, Homo sapiens
  CDR3 for beta chain variable domain of TCR clone 265319 (TRBV11-2, TRBJ2-2)
CASSLRTGNLIGELFF

SEQ ID NO: 530639 - protein, 15 aa, Homo sapiens
  CDR3 for alpha chain variable domain of TCR clone 265320 (TRAV2, TRAJ28)
CAVPYSGAGSYQLTF

SEQ ID NO: 530640 - protein, 14 aa, Homo sapiens
  CDR3 for beta chain variable domain of TCR clone 265320 (TRBV7-8, TRBJ1-1)
CASGIDRADTEAFF

SEQ ID NO: 530641 - protein, 13 aa, Homo sapiens
  CDR3 for alpha chain variable domain of TCR clone 265321 (TRAV12-2, TRAJ52)
CAVGGTSYGKLTF

SEQ ID NO: 530642 - protein, 17 aa, Homo sapiens
  CDR3 for beta chain variable domain of TCR clone 265321 (TRBV11-2, TRBJ2-1)
CASSLYPPGVEYNEQFF

SEQ ID NO: 530643 - protein, 14 aa, Homo sapiens
  CDR3 for alpha chain variable domain of TCR clone 265322 (TRAV13-1, TRAJ9)
CGASALTRGFKTIF

SEQ ID NO: 530644 - protein, 13 aa, Homo sapiens
  CDR3 for beta chain variable domain of TCR clone 265322 (TRBV20-1, TRBJ1-1)
CSAGTVGNTEAFF

SEQ ID NO: 530645 - protein, 14 aa, Homo sapiens
  CDR3 for alpha chain variable domain of TCR clone 265323 (TRAV17, TRAJ45)
CATASGGGADGLTF

SEQ ID NO: 530646 - protein, 19 aa, Homo sapiens
  CDR3 for beta chain variable domain of TCR clone 265323 (TRBV7-9, TRBJ2-6)
CASSLESATVLPGANVLTF

SEQ ID NO: 530647 - protein, 15 aa, Homo sapiens
  CDR3 for alpha chain variable domain of TCR clone 265324 (TRAV13-1, TRAJ52)
CAATSPRTSYGKLTF

SEQ ID NO: 530648 - protein, 15 aa, Homo sapiens
  CDR3 for beta chain variable domain of TCR clone 265324 (TRBV7-9, TRBJ1-5)
CASSQGHQPNQPQHF

SEQ ID NO: 530649 - protein, 11 aa, Homo sapiens
  CDR3 for alpha chain variable domain of TCR clone 265325 (TRAV21, TRAJ11)
CAVNGYSTLTF

SEQ ID NO: 530650 - protein, 15 aa, Homo sapiens
  CDR3 for beta chain variable domain of TCR clone 265325 (TRBV5-1, TRBJ2-3)
CASSVTSGSTGTQYF

SEQ ID NO: 530651 - protein, 14 aa, Homo sapiens
  CDR3 for alpha chain variable domain of TCR clone 265326 (TRAV12-2, TRAJ13)
CAVKKTGGYQKVTF

SEQ ID NO: 530652 - protein, 13 aa, Homo sapiens
  CDR3 for beta chain variable domain of TCR clone 265326 (TRBV7-9, TRBJ1-2)
CARSLKQNYGYTF

SEQ ID NO: 530653 - protein, 15 aa, Homo sapiens
  CDR3 for alpha chain variable domain of TCR clone 265327 (TRAV1-2, TRAJ28)
CAVQYSGAGSYQLTF

SEQ ID NO: 530654 - protein, 18 aa, Homo sapiens
  CDR3 for beta chain variable domain of TCR clone 265327 (TRBV7-9, TRBJ2-7)
CASSLTTSGSRTWYEQYF

SEQ ID NO: 530655 - protein, 10 aa, Homo sapiens
  CDR3 for alpha chain variable domain of TCR clone 265328 (TRAV12-3, TRAJ49)
CAMNDDQFYF

SEQ ID NO: 530656 - protein, 15 aa, Homo sapiens
  CDR3 for beta chain variable domain of TCR clone 265328 (TRBV7-2, TRBJ2-3)
CASSLRGGSTDTQYF

SEQ ID NO: 530657 - protein, 13 aa, Homo sapiens
  CDR3 for alpha chain variable domain of TCR clone 265329 (TRAV21, TRAJ27)
CAARPGNAGKSTF

SEQ ID NO: 530658 - protein, 13 aa, Homo sapiens
  CDR3 for beta chain variable domain of TCR clone 265329 (TRBV7-2, TRBJ1-6)
CASSLVGSSPLHF

SEQ ID NO: 530659 - protein, 14 aa, Homo sapiens
  CDR3 for alpha chain variable domain of TCR clone 265330 (TRAV12-2, TRAJ36)
CAVNPPTGANNLFF

SEQ ID NO: 530660 - protein, 13 aa, Homo sapiens
  CDR3 for beta chain variable domain of TCR clone 265330 (TRBV20-1, TRBJ1-6)
CSAPTGLGSPIHF

SEQ ID NO: 530661 - protein, 14 aa, Homo sapiens
  CDR3 for alpha chain variable domain of TCR clone 265331 (TRAV12-1, TRAJ42)
CVVIYGGSQSNLIF

SEQ ID NO: 530662 - protein, 13 aa, Homo sapiens
  CDR3 for beta chain variable domain of TCR clone 265331 (TRBV18, TRBJ2-5)
CASSPPGKETQYF

SEQ ID NO: 530663 - protein, 14 aa, Homo sapiens
  CDR3 for alpha chain variable domain of TCR clone 265332 (TRAV1-2, TRAJ8)
CAVREDTGFQKLVF

SEQ ID NO: 530664 - protein, 13 aa, Homo sapiens
  CDR3 for beta chain variable domain of TCR clone 265332 (TRBV12-4, TRBJ1-2)
CASSLRQGKGYTV

SEQ ID NO: 530665 - protein, 15 aa, Homo sapiens
  CDR3 for alpha chain variable domain of TCR clone 265333 (TRAV26-1, TRAJ22)
CIVRGSFWFCEATDL

SEQ ID NO: 530666 - protein, 13 aa, Homo sapiens
  CDR3 for beta chain variable domain of TCR clone 265333 (TRBV7-9, TRBJ1-2)
CASSLKQNYGYTF

SEQ ID NO: 530667 - protein, 13 aa, Homo sapiens
  CDR3 for alpha chain variable domain of TCR clone 265334 (TRAV30, TRAJ34)
SGTVGYNTDKLIF

SEQ ID NO: 530668 - protein, 16 aa, Homo sapiens
  CDR3 for beta chain variable domain of TCR clone 265334 (TRBV7-9, TRBJ1-2)
CASSLGFSSGEDGYTF

SEQ ID NO: 530669 - protein, 14 aa, Homo sapiens
  CDR3 for alpha chain variable domain of TCR clone 265335 (TRAV1-2, TRAJ16)
FAVNRFSDGQKLLF

SEQ ID NO: 530670 - protein, 17 aa, Homo sapiens
  CDR3 for beta chain variable domain of TCR clone 265335 (TRBV11-2, TRBJ2-1)
CASSLYPPGVEYNEQFF

SEQ ID NO: 530671 - protein, 10 aa, Homo sapiens
  CDR3 for alpha chain variable domain of TCR clone 265336 (TRAV30, TRAJ48)
CGIGNEKLTF

SEQ ID NO: 530672 - protein, 14 aa, Homo sapiens
  CDR3 for beta chain variable domain of TCR clone 265336 (TRBV7-2, TRBJ2-7)
CASSSKTSFYEQYF

SEQ ID NO: 530673 - protein, 11 aa, Homo sapiens
  CDR3 for alpha chain variable domain of TCR clone 265337 (TRAV16, TRAJ31)
CSLFNNARLMF

SEQ ID NO: 530674 - protein, 15 aa, Homo sapiens
  CDR3 for beta chain variable domain of TCR clone 265337 (TRBV18, TRBJ1-1)
CASSPRQGENTEAFF

SEQ ID NO: 530675 - protein, 15 aa, Homo sapiens
  CDR3 for alpha chain variable domain of TCR clone 265338 (TRAV14/DV4, TRAJ47)
CAMREAMEYGNKLVF

SEQ ID NO: 530676 - protein, 13 aa, Homo sapiens
  CDR3 for beta chain variable domain of TCR clone 265338 (TRBV12-4, TRBJ2-5)
CASSLGGSRTQYF

SEQ ID NO: 530677 - protein, 12 aa, Homo sapiens
  CDR3 for alpha chain variable domain of TCR clone 265339 (TRAV29/DV5, TRAJ49)
CAATDTGNQFYF

SEQ ID NO: 530678 - protein, 14 aa, Homo sapiens
  CDR3 for beta chain variable domain of TCR clone 265339 (TRBV12-4, TRBJ2-7)
CTSASSLGGYEQYF

SEQ ID NO: 530679 - protein, 16 aa, Homo sapiens
  CDR3 for alpha chain variable domain of TCR clone 265340 (TRAV26-1, )
CIDIQNPDPAVYQLRD

SEQ ID NO: 530680 - protein, 19 aa, Homo sapiens
  CDR3 for beta chain variable domain of TCR clone 265340 (TRBV19, TRBJ2-5)
CASSIGQVTDFFLGETQYL

SEQ ID NO: 530681 - protein, 13 aa, Homo sapiens
  CDR3 for alpha chain variable domain of TCR clone 265341 (TRAV21, TRAJ20)
CAVVLRVAYKLSF

SEQ ID NO: 530682 - protein, 13 aa, Homo sapiens
  CDR3 for beta chain variable domain of TCR clone 265341 (TRBV6-1, TRBJ1-1)
CASSRQGNTEAFF

SEQ ID NO: 530683 - protein, 15 aa, Homo sapiens
  CDR3 for alpha chain variable domain of TCR clone 265342 (TRAV3, TRAJ4)
CAVRDGTGGYNKLMF

SEQ ID NO: 530684 - protein, 16 aa, Homo sapiens
  CDR3 for beta chain variable domain of TCR clone 265342 (TRBV27, TRBJ2-2)
CASSSSGLSNTGELFF

SEQ ID NO: 530685 - protein, 14 aa, Homo sapiens
  CDR3 for alpha chain variable domain of TCR clone 265343 (TRAV1-2, TRAJ8)
CAVREDTGFQKLVF

SEQ ID NO: 530686 - protein, 15 aa, Homo sapiens
  CDR3 for beta chain variable domain of TCR clone 265343 (TRBV28, TRBJ2-6)
CASSLAGYGANVLTF

SEQ ID NO: 530687 - protein, 13 aa, Homo sapiens
  CDR3 for alpha chain variable domain of TCR clone 265344 (TRAV23/DV6, TRAJ9)
CAGSYTGGFKTIF

SEQ ID NO: 530688 - protein, 13 aa, Homo sapiens
  CDR3 for beta chain variable domain of TCR clone 265344 (TRBV7-3, TRBJ2-1)
CASSLDSYNEQFF

SEQ ID NO: 530689 - protein, 16 aa, Homo sapiens
  CDR3 for alpha chain variable domain of TCR clone 265345 (TRAV12-2, TRAJ10)
CAVNRVLTGGGKKLTF

SEQ ID NO: 530690 - protein, 13 aa, Homo sapiens
  CDR3 for beta chain variable domain of TCR clone 265345 (TRBV29-1, TRBJ2-7)
CSVKRGGNYEQYF

SEQ ID NO: 530691 - protein, 15 aa, Homo sapiens
  CDR3 for alpha chain variable domain of TCR clone 265346 (TRAV34, TRAJ38)
CGADFTPGNNRKLIW

SEQ ID NO: 530692 - protein, 13 aa, Homo sapiens
  CDR3 for beta chain variable domain of TCR clone 265346 (TRBV20-1, TRBJ2-7)
CSATHTSGYEQYF

SEQ ID NO: 530693 - protein, 15 aa, Homo sapiens
  CDR3 for alpha chain variable domain of TCR clone 265347 (TRAV8-6, TRAJ10)
CAVSDQAGGGNKLTF

SEQ ID NO: 530694 - protein, 16 aa, Homo sapiens
  CDR3 for beta chain variable domain of TCR clone 265347 (TRBV20-1, TRBJ2-4)
CSATSLSELAKNIQYF

SEQ ID NO: 530695 - protein, 13 aa, Homo sapiens
  CDR3 for alpha chain variable domain of TCR clone 265348 (TRAV12-3, TRAJ33)
CAMSVNSNYQLIC

SEQ ID NO: 530696 - protein, 14 aa, Homo sapiens
  CDR3 for beta chain variable domain of TCR clone 265348 (TRBV27, TRBJ2-5)
CASSSLKGWETQYF

SEQ ID NO: 530697 - protein, 13 aa, Homo sapiens
  CDR3 for alpha chain variable domain of TCR clone 265349 (TRAV8-6, TRAJ49)
CAVITNTGNKFSF

SEQ ID NO: 530698 - protein, 14 aa, Homo sapiens
  CDR3 for beta chain variable domain of TCR clone 265349 (TRBV5-1, TRBJ2-7)
CASSRGESLYEQYF

SEQ ID NO: 530699 - protein, 11 aa, Homo sapiens
  CDR3 for alpha chain variable domain of TCR clone 265350 (TRAV13-1, TRAJ39)
CASHAGNMLTF

SEQ ID NO: 530700 - protein, 17 aa, Homo sapiens
  CDR3 for beta chain variable domain of TCR clone 265350 (TRBV20-1, TRBJ2-2)
CSASGSGQGGLTGELFF

SEQ ID NO: 530701 - protein, 13 aa, Homo sapiens
  CDR3 for alpha chain variable domain of TCR clone 265351 (TRAV12-1, TRAJ11)
CVVTRGGYSTLTF

SEQ ID NO: 530702 - protein, 17 aa, Homo sapiens
  CDR3 for beta chain variable domain of TCR clone 265351 (TRBV28, TRBJ2-5)
CASSTPEGDALQETQYF

SEQ ID NO: 530703 - protein, 13 aa, Homo sapiens
  CDR3 for alpha chain variable domain of TCR clone 265352 (TRAV38-1, TRAJ42)
CARWGGSQGNLIF

SEQ ID NO: 530704 - protein, 14 aa, Homo sapiens
  CDR3 for beta chain variable domain of TCR clone 265352 (TRBV19, TRBJ2-2)
CASSTGQGAGELFF

SEQ ID NO: 530705 - protein, 13 aa, Homo sapiens
  CDR3 for alpha chain variable domain of TCR clone 265353 (TRAV21, TRAJ37)
CAVSSGNTGKLIF

SEQ ID NO: 530706 - protein, 18 aa, Homo sapiens
  CDR3 for beta chain variable domain of TCR clone 265353 (TRBV11-2, TRBJ2-6)
CASSLNPFLGTGANVLTF

SEQ ID NO: 530707 - protein, 15 aa, Homo sapiens
  CDR3 for alpha chain variable domain of TCR clone 265354 (TRAV3, TRAJ22)
CVVRDRGGSARALNF

SEQ ID NO: 530708 - protein, 16 aa, Homo sapiens
  CDR3 for beta chain variable domain of TCR clone 265354 (TRBV5-4, TRBJ2-3)
CASQQPGAGGADTQYF

SEQ ID NO: 530709 - protein, 15 aa, Homo sapiens
  CDR3 for alpha chain variable domain of TCR clone 265355 (TRAV35, TRAJ42)
CAGQLRGGSQGNLIF

SEQ ID NO: 530710 - protein, 14 aa, Homo sapiens
  CDR3 for beta chain variable domain of TCR clone 265355 (TRBV7-6, TRBJ2-3)
CASSLGTVTDTQYF

SEQ ID NO: 530711 - protein, 18 aa, Homo sapiens
  CDR3 for alpha chain variable domain of TCR clone 265356 (TRAV36/DV7, )
CALTDIQNPDPAGYQLRD

SEQ ID NO: 530712 - protein, 13 aa, Homo sapiens
  CDR3 for beta chain variable domain of TCR clone 265356 (TRBV4-1, TRBJ2-7)
CASSQGQAYEQYF

SEQ ID NO: 530713 - protein, 10 aa, Homo sapiens
  CDR3 for alpha chain variable domain of TCR clone 265357 (TRAV23/DV6, TRAJ57)
CAAISTLSQG

SEQ ID NO: 530714 - protein, 14 aa, Homo sapiens
  CDR3 for beta chain variable domain of TCR clone 265357 (TRBV11-2, TRBJ2-1)
CASSLSGPYNEQFF

SEQ ID NO: 530715 - protein, 19 aa, Homo sapiens
  CDR3 for alpha chain variable domain of TCR clone 265358 (TRAV26-1, TRAJ28)
CIVRVAHAYSGAGSYQLTF

SEQ ID NO: 530716 - protein, 17 aa, Homo sapiens
  CDR3 for beta chain variable domain of TCR clone 265358 (TRBV9, TRBJ2-2)
CASSVGGQGTDTGEQFF

SEQ ID NO: 530717 - protein, 10 aa, Homo sapiens
  CDR3 for alpha chain variable domain of TCR clone 265359 (TRAV27, TRAJ49)
CVVPVTSSIL

SEQ ID NO: 530718 - protein, 16 aa, Homo sapiens
  CDR3 for beta chain variable domain of TCR clone 265359 (TRBV7-3, TRBJ2-1)
CASSKPLAGVYNEQFF

SEQ ID NO: 530719 - protein, 22 aa, Homo sapiens
  CDR3 for alpha chain variable domain of TCR clone 265360 (TRAV27, TRAJ38)
CAARRNAGNNHIQNPDPAVYQL

SEQ ID NO: 530720 - protein, 14 aa, Homo sapiens
  CDR3 for beta chain variable domain of TCR clone 265360 (TRBV13, TRBJ2-5)
CTSYRRLAEETQYF

SEQ ID NO: 530721 - protein, 14 aa, Homo sapiens
  CDR3 for alpha chain variable domain of TCR clone 265361 (TRAV1-2, TRAJ8)
CAVREDTGFQKLVF

SEQ ID NO: 530722 - protein, 15 aa, Homo sapiens
  CDR3 for beta chain variable domain of TCR clone 265361 (TRBV27, TRBJ2-1)
CASSNGGGSSNEQLF

SEQ ID NO: 530723 - protein, 12 aa, Homo sapiens
  CDR3 for alpha chain variable domain of TCR clone 265362 (TRAV3, TRAJ20)
CAVRDPDYKLSF

SEQ ID NO: 530724 - protein, 13 aa, Homo sapiens
  CDR3 for beta chain variable domain of TCR clone 265362 (TRBV11-3, TRBJ2-1)
CASSPPAGNEQFF

SEQ ID NO: 530725 - protein, 14 aa, Homo sapiens
  CDR3 for alpha chain variable domain of TCR clone 265363 (TRAV12-2, TRAJ13)
CAVKKTGGYQKVTF

SEQ ID NO: 530726 - protein, 20 aa, Homo sapiens
  CDR3 for beta chain variable domain of TCR clone 265363 (TRBV28, TRBJ2-1)
CASTPIGRSPGLEGGNEQFF

SEQ ID NO: 530727 - protein, 14 aa, Homo sapiens
  CDR3 for alpha chain variable domain of TCR clone 265364 (TRAV1-2, TRAJ8)
CGVREDTGFQKLVF

SEQ ID NO: 530728 - protein, 15 aa, Homo sapiens
  CDR3 for beta chain variable domain of TCR clone 265364 (TRBV11-3, TRBJ2-1)
CASSLGDSSHNEQFF

SEQ ID NO: 530729 - protein, 15 aa, Homo sapiens
  CDR3 for alpha chain variable domain of TCR clone 265365 (TRAV12-1, TRAJ45)
CVVLSGGGGAVGLTF

SEQ ID NO: 530730 - protein, 14 aa, Homo sapiens
  CDR3 for beta chain variable domain of TCR clone 265365 (TRBV11-2, TRBJ2-5)
CASSRTGGIETQYF

SEQ ID NO: 530731 - protein, 17 aa, Homo sapiens
  CDR3 for alpha chain variable domain of TCR clone 265366 (TRAV2, TRAJ32)
CCLLLWGGGGATNKLIF

SEQ ID NO: 530732 - protein, 13 aa, Homo sapiens
  CDR3 for beta chain variable domain of TCR clone 265366 (TRBV20-1, TRBJ1-1)
CRARGGGNTEAFF

SEQ ID NO: 530733 - protein, 16 aa, Homo sapiens
  CDR3 for alpha chain variable domain of TCR clone 265367 (TRAV8-6, TRAJ28)
CAVTSKAGAGSYQLTF

SEQ ID NO: 530734 - protein, 16 aa, Homo sapiens
  CDR3 for beta chain variable domain of TCR clone 265367 (TRBV12-4, TRBJ2-5)
CASSWRPSGDLETQYF

SEQ ID NO: 530735 - protein, 17 aa, Homo sapiens
  CDR3 for alpha chain variable domain of TCR clone 265368 (TRAV26-2, TRAJ37)
CILRDRGGSSNTGKLIF

SEQ ID NO: 530736 - protein, 14 aa, Homo sapiens
  CDR3 for beta chain variable domain of TCR clone 265368 (TRBV7-2, TRBJ1-6)
CASSLQGANSPLHF

SEQ ID NO: 530737 - protein, 16 aa, Homo sapiens
  CDR3 for alpha chain variable domain of TCR clone 265369 (TRAV20, TRAJ26)
CAVQHRRDNHGQNFVF

SEQ ID NO: 530738 - protein, 15 aa, Homo sapiens
  CDR3 for beta chain variable domain of TCR clone 265369 (TRBV7-2, TRBJ2-7)
CASSWGQGAIYEQYF

SEQ ID NO: 530739 - protein, 11 aa, Homo sapiens
  CDR3 for alpha chain variable domain of TCR clone 265370 (TRAV1-1, TRAJ23)
CAVRQGGKLIF

SEQ ID NO: 530740 - protein, 12 aa, Homo sapiens
  CDR3 for beta chain variable domain of TCR clone 265370 (TRBV11-2, TRBJ2-7)
CASSLPTYEQYF

SEQ ID NO: 530741 - protein, 14 aa, Homo sapiens
  CDR3 for alpha chain variable domain of TCR clone 265371 (TRAV13-1, TRAJ35)
CAASKGGFGDVLHF

SEQ ID NO: 530742 - protein, 13 aa, Homo sapiens
  CDR3 for beta chain variable domain of TCR clone 265371 (TRBV7-3, TRBJ1-1)
CASSQDWGAEGFF

SEQ ID NO: 530743 - protein, 14 aa, Homo sapiens
  CDR3 for alpha chain variable domain of TCR clone 265372 (TRAV13-1, TRAJ20)
CAARPGSNDYKLSF

SEQ ID NO: 530744 - protein, 14 aa, Homo sapiens
  CDR3 for beta chain variable domain of TCR clone 265372 (TRBV12-4, TRBJ2-7)
CASSRQGRSYEQYF

SEQ ID NO: 530745 - protein, 13 aa, Homo sapiens
  CDR3 for alpha chain variable domain of TCR clone 265373 (TRAV12-2, TRAJ9)
CAVKWAGGFKTIF

SEQ ID NO: 530746 - protein, 15 aa, Homo sapiens
  CDR3 for beta chain variable domain of TCR clone 265373 (TRBV3-1, TRBJ2-1)
CASSTGDTNYNEQFF

SEQ ID NO: 530747 - protein, 13 aa, Homo sapiens
  CDR3 for alpha chain variable domain of TCR clone 265374 (TRAV13-1, TRAJ21)
CAASIYNFNKFYF

SEQ ID NO: 530748 - protein, 15 aa, Homo sapiens
  CDR3 for beta chain variable domain of TCR clone 265374 (TRBV28, TRBJ2-5)
CASSPPWSYQETQYF

SEQ ID NO: 530749 - protein, 14 aa, Homo sapiens
  CDR3 for alpha chain variable domain of TCR clone 265375 (TRAV12-2, TRAJ40)
CAVKIPSGTYKYIF

SEQ ID NO: 530750 - protein, 12 aa, Homo sapiens
  CDR3 for beta chain variable domain of TCR clone 265375 (TRBV11-2, TRBJ2-1)
CASSPVNNEQFF

SEQ ID NO: 530751 - protein, 15 aa, Homo sapiens
  CDR3 for alpha chain variable domain of TCR clone 265376 (TRAV16, TRAJ12)
CSKWPLRDSRYKLIF

SEQ ID NO: 530752 - protein, 13 aa, Homo sapiens
  CDR3 for beta chain variable domain of TCR clone 265376 (TRBV4-2, TRBJ1-1)
CASSQAGNTEAFF

SEQ ID NO: 530753 - protein, 16 aa, Homo sapiens
  CDR3 for alpha chain variable domain of TCR clone 265377 (TRAV21, TRAJ52)
CALTNAGGTSYGKLTF

SEQ ID NO: 530754 - protein, 17 aa, Homo sapiens
  CDR3 for beta chain variable domain of TCR clone 265377 (TRBV28, TRBJ2-5)
CASSRQGGLAGAETQYF

SEQ ID NO: 530755 - protein, 13 aa, Homo sapiens
  CDR3 for alpha chain variable domain of TCR clone 265378 (TRAV13-2, TRAJ5)
CAVMDTGRRELTF

SEQ ID NO: 530756 - protein, 12 aa, Homo sapiens
  CDR3 for beta chain variable domain of TCR clone 265378 (TRBV28, TRBJ2-7)
CASSFSSYEQYF

SEQ ID NO: 530757 - protein, 11 aa, Homo sapiens
  CDR3 for alpha chain variable domain of TCR clone 265379 (TRAV27, TRAJ45)
CAGAQEEVLTD

SEQ ID NO: 530758 - protein, 17 aa, Homo sapiens
  CDR3 for beta chain variable domain of TCR clone 265379 (TRBV11-2, TRBJ2-1)
CASSLYLPGVEYNEQFF

SEQ ID NO: 530759 - protein, 13 aa, Homo sapiens
  CDR3 for alpha chain variable domain of TCR clone 265380 (TRAV29/DV5, TRAJ47)
CAASEEYGNKLFF

SEQ ID NO: 530760 - protein, 17 aa, Homo sapiens
  CDR3 for beta chain variable domain of TCR clone 265380 (TRBV20-1, TRBJ1-5)
CSASLSPGQGGNQPQHF

SEQ ID NO: 530761 - protein, 16 aa, Homo sapiens
  CDR3 for alpha chain variable domain of TCR clone 265381 (TRAV30, TRAJ24)
CGTEIVDADSWGKFQF

SEQ ID NO: 530762 - protein, 14 aa, Homo sapiens
  CDR3 for beta chain variable domain of TCR clone 265381 (TRBV9, TRBJ2-4)
CASSPSGTSGVQYF

SEQ ID NO: 530763 - protein, 12 aa, Homo sapiens
  CDR3 for alpha chain variable domain of TCR clone 265382 (TRAV12-1, TRAJ34)
CVVAGATDKLIF

SEQ ID NO: 530764 - protein, 13 aa, Homo sapiens
  CDR3 for beta chain variable domain of TCR clone 265382 (TRBV27, TRBJ2-7)
CASSFSQGYEQYF

SEQ ID NO: 530765 - protein, 16 aa, Homo sapiens
  CDR3 for alpha chain variable domain of TCR clone 265383 (TRAV8-4, TRAJ5)
CAVSPLTDTGRRALTF

SEQ ID NO: 530766 - protein, 17 aa, Homo sapiens
  CDR3 for beta chain variable domain of TCR clone 265383 (TRBV10-3, TRBJ1-2)
CAISETRDRGLEYGYTF

SEQ ID NO: 530767 - protein, 15 aa, Homo sapiens
  CDR3 for alpha chain variable domain of TCR clone 265384 (TRAV8-3, TRAJ7)
CAVGSISYGNNRLAF

SEQ ID NO: 530768 - protein, 18 aa, Homo sapiens
  CDR3 for beta chain variable domain of TCR clone 265384 (TRBV11-2, TRBJ2-3)
CASSLGGASRGAPNTQYF

SEQ ID NO: 530769 - protein, 15 aa, Homo sapiens
  CDR3 for alpha chain variable domain of TCR clone 265385 (TRAV12-3, TRAJ13)
CAMRARSGGYQKVTF

SEQ ID NO: 530770 - protein, 18 aa, Homo sapiens
  CDR3 for beta chain variable domain of TCR clone 265385 (TRBV3-1, TRBJ2-7)
CASSQEGGGRSWHYEQYF

SEQ ID NO: 530771 - protein, 13 aa, Homo sapiens
  CDR3 for alpha chain variable domain of TCR clone 265386 (TRAV12-3, TRAJ7)
CAMTPYGNNRLAF

SEQ ID NO: 530772 - protein, 16 aa, Homo sapiens
  CDR3 for beta chain variable domain of TCR clone 265386 (TRBV20-1, TRBJ1-4)
CSARPYGGDLNEKLFF

SEQ ID NO: 530773 - protein, 17 aa, Homo sapiens
  CDR3 for alpha chain variable domain of TCR clone 265387 (TRAV3, TRAJ6)
CAVSHRTDTGGSYIPTF

SEQ ID NO: 530774 - protein, 18 aa, Homo sapiens
  CDR3 for beta chain variable domain of TCR clone 265387 (TRBV7-2, TRBJ2-3)
CASSLETSRGRKADTQYF

SEQ ID NO: 530775 - protein, 22 aa, Homo sapiens
  CDR3 for alpha chain variable domain of TCR clone 265388 (TRAV8-2, TRAJ45)
HLTKPSAHMSDAAEYSADGLTF

SEQ ID NO: 530776 - protein, 13 aa, Homo sapiens
  CDR3 for beta chain variable domain of TCR clone 265388 (TRBV7-3, TRBJ2-1)
CVSSPVAYNEQFF

SEQ ID NO: 530777 - protein, 14 aa, Homo sapiens
  CDR3 for alpha chain variable domain of TCR clone 265389 (TRAV8-3, TRAJ3)
CAVVPRSSASKIIF

SEQ ID NO: 530778 - protein, 16 aa, Homo sapiens
  CDR3 for beta chain variable domain of TCR clone 265389 (TRBV4-1, TRBJ2-3)
CASSQWTSGGGDTQYF

SEQ ID NO: 530779 - protein, 13 aa, Homo sapiens
  CDR3 for alpha chain variable domain of TCR clone 265390 (TRAV13-1, TRAJ33)
CASSRAGNYQLIW

SEQ ID NO: 530780 - protein, 15 aa, Homo sapiens
  CDR3 for beta chain variable domain of TCR clone 265390 (TRBV2, TRBJ2-7)
EDSAMYFCASSEQYF

SEQ ID NO: 530781 - protein, 13 aa, Homo sapiens
  CDR3 for alpha chain variable domain of TCR clone 265391 (TRAV12-3, TRAJ13)
CAMSSGGYQKVTF

SEQ ID NO: 530782 - protein, 16 aa, Homo sapiens
  CDR3 for beta chain variable domain of TCR clone 265391 (TRBV7-2, TRBJ1-3)
CASSRLEASSGNTIYF

SEQ ID NO: 530783 - protein, 13 aa, Homo sapiens
  CDR3 for alpha chain variable domain of TCR clone 265392 (TRAV12-2, TRAJ18)
CAVGGSTLGRLYF

SEQ ID NO: 530784 - protein, 13 aa, Homo sapiens
  CDR3 for beta chain variable domain of TCR clone 265392 (TRBV19, TRBJ2-2)
CASSIWSTGELFF

SEQ ID NO: 530785 - protein, 13 aa, Homo sapiens
  CDR3 for alpha chain variable domain of TCR clone 265393 (TRAV12-1, TRAJ39)
CVVNDNAGNMLTF

SEQ ID NO: 530786 - protein, 16 aa, Homo sapiens
  CDR3 for beta chain variable domain of TCR clone 265393 (TRBV5-5, TRBJ2-2)
CASSGRREGATGELFF

SEQ ID NO: 530787 - protein, 12 aa, Homo sapiens
  CDR3 for alpha chain variable domain of TCR clone 265394 (TRAV23/DV6, TRAJ28)
CAALLVYSGAVS

SEQ ID NO: 530788 - protein, 15 aa, Homo sapiens
  CDR3 for beta chain variable domain of TCR clone 265394 (TRBV7-2, TRBJ2-1)
CASSLVAGRYNEQFF

SEQ ID NO: 530789 - protein, 15 aa, Homo sapiens
  CDR3 for alpha chain variable domain of TCR clone 265395 (TRAV20, TRAJ50)
CAVRQMKTSYDKVIF

SEQ ID NO: 530790 - protein, 17 aa, Homo sapiens
  CDR3 for beta chain variable domain of TCR clone 265395 (TRBV28, TRBJ2-7)
CASSPLHRASGVYDQYF

SEQ ID NO: 530791 - protein, 14 aa, Homo sapiens
  CDR3 for alpha chain variable domain of TCR clone 265396 (TRAV12-2, TRAJ9)
CAVNLNTGGFKTIF

SEQ ID NO: 530792 - protein, 17 aa, Homo sapiens
  CDR3 for beta chain variable domain of TCR clone 265396 (TRBV20-1, TRBJ2-2)
CSASRHVGQGYTGELFF

SEQ ID NO: 530793 - protein, 11 aa, Homo sapiens
  CDR3 for alpha chain variable domain of TCR clone 265397 (TRAV21, TRAJ20)
CAVDGDYKLSF

SEQ ID NO: 530794 - protein, 18 aa, Homo sapiens
  CDR3 for beta chain variable domain of TCR clone 265397 (TRBV4-1, TRBJ2-7)
CASSQDVQGLPTSSTSGR

SEQ ID NO: 530795 - protein, 16 aa, Homo sapiens
  CDR3 for alpha chain variable domain of TCR clone 265398 (TRAV27, TRAJ13)
CAGAKSDSGGYQKVTF

SEQ ID NO: 530796 - protein, 15 aa, Homo sapiens
  CDR3 for beta chain variable domain of TCR clone 265398 (TRBV29-1, TRBJ2-1)
CSVGRHALFFNEQFF

SEQ ID NO: 530797 - protein, 14 aa, Homo sapiens
  CDR3 for alpha chain variable domain of TCR clone 265399 (TRAV13-2, TRAJ16)
CAENNWEDDQKLLF

SEQ ID NO: 530798 - protein, 14 aa, Homo sapiens
  CDR3 for beta chain variable domain of TCR clone 265399 (TRBV7-9, TRBJ1-1)
CASSLGGLKTEALF

SEQ ID NO: 530799 - protein, 14 aa, Homo sapiens
  CDR3 for alpha chain variable domain of TCR clone 265400 (TRAV1-2, TRAJ16)
CAVNRFSDGQKLLF

SEQ ID NO: 530800 - protein, 16 aa, Homo sapiens
  CDR3 for beta chain variable domain of TCR clone 265400 (TRBV7-3, TRBJ2-1)
CASSLEGYRSYNEQLF

SEQ ID NO: 530801 - protein, 10 aa, Homo sapiens
  CDR3 for alpha chain variable domain of TCR clone 265401 (TRAV23/DV6, TRAJ57)
CAASSTLSQG

SEQ ID NO: 530802 - protein, 14 aa, Homo sapiens
  CDR3 for beta chain variable domain of TCR clone 265401 (TRBV6-1, TRBJ1-3)
CASVQGGGGNTMYF

SEQ ID NO: 530803 - protein, 12 aa, Homo sapiens
  CDR3 for alpha chain variable domain of TCR clone 265402 (TRAV12-1, TRAJ34)
CVVTFNTDKLIF

SEQ ID NO: 530804 - protein, 15 aa, Homo sapiens
  CDR3 for beta chain variable domain of TCR clone 265402 (TRBV10-1, TRBJ2-3)
CASSATSGGFDTQYF

SEQ ID NO: 530805 - protein, 16 aa, Homo sapiens
  CDR3 for alpha chain variable domain of TCR clone 265403 (TRAV16, TRAJ4)
FALSRMFSGGYNKLIF

SEQ ID NO: 530806 - protein, 16 aa, Homo sapiens
  CDR3 for beta chain variable domain of TCR clone 265403 (TRBV24-1, TRBJ2-3)
CATSDPGTGATATQYF

SEQ ID NO: 530807 - protein, 13 aa, Homo sapiens
  CDR3 for alpha chain variable domain of TCR clone 265404 (TRAV20, TRAJ17)
CAVLRDAGNKLTF

SEQ ID NO: 530808 - protein, 15 aa, Homo sapiens
  CDR3 for beta chain variable domain of TCR clone 265404 (TRBV25-1, TRBJ1-4)
CASSPGDSTNEKLFF

SEQ ID NO: 530809 - protein, 18 aa, Homo sapiens
  CDR3 for alpha chain variable domain of TCR clone 265405 (TRAV21, TRAJ52)
CAVRPSPAGGTSYGKLTF

SEQ ID NO: 530810 - protein, 15 aa, Homo sapiens
  CDR3 for beta chain variable domain of TCR clone 265405 (TRBV10-3, TRBJ2-3)
CAISRTSGGTDTQYF

SEQ ID NO: 530811 - protein, 14 aa, Homo sapiens
  CDR3 for alpha chain variable domain of TCR clone 265406 (TRAV12-3, TRAJ10)
SHLPLTVGGNKLTF

SEQ ID NO: 530812 - protein, 16 aa, Homo sapiens
  CDR3 for beta chain variable domain of TCR clone 265406 (TRBV4-1, TRBJ1-4)
CASSQDLRRGGEKLFF

SEQ ID NO: 530813 - protein, 12 aa, Homo sapiens
  CDR3 for alpha chain variable domain of TCR clone 265407 (TRAV10, TRAJ13)
CVVSKSYQKVTF

SEQ ID NO: 530814 - protein, 17 aa, Homo sapiens
  CDR3 for beta chain variable domain of TCR clone 265407 (TRBV6-5, TRBJ2-3)
CASSYTTSGQVGETQYF

SEQ ID NO: 530815 - protein, 13 aa, Homo sapiens
  CDR3 for alpha chain variable domain of TCR clone 265408 (TRAV27, TRAJ8)
CAGGPTGFQKLVF

SEQ ID NO: 530816 - protein, 16 aa, Homo sapiens
  CDR3 for beta chain variable domain of TCR clone 265408 (TRBV11-2, TRBJ2-7)
CASSTVTAPKTYEQYF

SEQ ID NO: 530817 - protein, 13 aa, Homo sapiens
  CDR3 for alpha chain variable domain of TCR clone 265409 (TRAV27, TRAJ56)
CAGKPGANSKMTF

SEQ ID NO: 530818 - protein, 18 aa, Homo sapiens
  CDR3 for beta chain variable domain of TCR clone 265409 (TRBV11-2, TRBJ2-3)
CASSLGGASRGAPNTQYF

SEQ ID NO: 530819 - protein, 14 aa, Homo sapiens
  CDR3 for alpha chain variable domain of TCR clone 265410 (TRAV12-2, TRAJ5)
CALNRSTGRRALTF

SEQ ID NO: 530820 - protein, 16 aa, Homo sapiens
  CDR3 for beta chain variable domain of TCR clone 265410 (TRBV11-2, TRBJ2-5)
CASSGQGYSPQETQYF

SEQ ID NO: 530821 - protein, 14 aa, Homo sapiens
  CDR3 for alpha chain variable domain of TCR clone 265411 (TRAV35, TRAJ22)
CARLRPGSTRQLTF

SEQ ID NO: 530822 - protein, 15 aa, Homo sapiens
  CDR3 for beta chain variable domain of TCR clone 265411 (TRBV12-4, TRBJ2-5)
CASSPPTGLQETQYF

SEQ ID NO: 530823 - protein, 15 aa, Homo sapiens
  CDR3 for alpha chain variable domain of TCR clone 265412 (TRAV25, TRAJ53)
CPTSNSGGSNYKLTF

SEQ ID NO: 530824 - protein, 11 aa, Homo sapiens
  CDR3 for beta chain variable domain of TCR clone 265412 (TRBV29-1, TRBJ2-5)
CSEDRTGTQYF

SEQ ID NO: 530825 - protein, 13 aa, Homo sapiens
  CDR3 for alpha chain variable domain of TCR clone 265413 (TRAV3, TRAJ40)
CAVRGSGAYKYIF

SEQ ID NO: 530826 - protein, 14 aa, Homo sapiens
  CDR3 for beta chain variable domain of TCR clone 265413 (TRBV4-1, TRBJ2-2)
CASSQAMNTGELFF

SEQ ID NO: 530827 - protein, 14 aa, Homo sapiens
  CDR3 for alpha chain variable domain of TCR clone 265414 (TRAV12-3, TRAJ10)
SHLPLTGGGNKLTF

SEQ ID NO: 530828 - protein, 17 aa, Homo sapiens
  CDR3 for beta chain variable domain of TCR clone 265414 (TRBV13, TRBJ2-3)
CTSSLSRVAGGRNTQYF

SEQ ID NO: 530829 - protein, 15 aa, Homo sapiens
  CDR3 for alpha chain variable domain of TCR clone 265415 (TRAV21, TRAJ53)
CATLNSGGSNYKLKF

SEQ ID NO: 530830 - protein, 15 aa, Homo sapiens
  CDR3 for beta chain variable domain of TCR clone 265415 (TRBV11-3, TRBJ2-3)
CASLKDGREGDTQYF

SEQ ID NO: 530831 - protein, 13 aa, Homo sapiens
  CDR3 for alpha chain variable domain of TCR clone 265416 (TRAV12-1, TRAJ6)
SVVYPGGSYIPTF

SEQ ID NO: 530832 - protein, 13 aa, Homo sapiens
  CDR3 for beta chain variable domain of TCR clone 265416 (TRBV20-1, TRBJ1-3)
CSAGAYSGNTIYF

SEQ ID NO: 530833 - protein, 14 aa, Homo sapiens
  CDR3 for alpha chain variable domain of TCR clone 265417 (TRAV26-1, TRAJ38)
CIADNAGNNRKLIW

SEQ ID NO: 530834 - protein, 15 aa, Homo sapiens
  CDR3 for beta chain variable domain of TCR clone 265417 (TRBV2, TRBJ2-3)
CASSDAGGPPDTQYF

SEQ ID NO: 530835 - protein, 14 aa, Homo sapiens
  CDR3 for alpha chain variable domain of TCR clone 265418 (TRAV1-1, TRAJ27)
CAVIYNTNAGKSTF

SEQ ID NO: 530836 - protein, 15 aa, Homo sapiens
  CDR3 for beta chain variable domain of TCR clone 265418 (TRBV7-2, TRBJ2-1)
CACSSGLAGGNEQFF

SEQ ID NO: 530837 - protein, 14 aa, Homo sapiens
  CDR3 for alpha chain variable domain of TCR clone 265419 (TRAV12-2, TRAJ40)
CAVKIPSGTYKYIF

SEQ ID NO: 530838 - protein, 13 aa, Homo sapiens
  CDR3 for beta chain variable domain of TCR clone 265419 (TRBV9, TRBJ2-7)
CASSASDSYEQYF

SEQ ID NO: 530839 - protein, 14 aa, Homo sapiens
  CDR3 for alpha chain variable domain of TCR clone 265420 (TRAV1-2, TRAJ8)
CAVREDTGFQKLVF

SEQ ID NO: 530840 - protein, 22 aa, Homo sapiens
  CDR3 for beta chain variable domain of TCR clone 265420 (TRBV7-3, TRBJ2-2)
GGTQPCISVPAAQEDIPGSCFF

SEQ ID NO: 530841 - protein, 13 aa, Homo sapiens
  CDR3 for alpha chain variable domain of TCR clone 265421 (TRAV12-3, TRAJ35)
CAMSIGFGNVLHC

SEQ ID NO: 530842 - protein, 14 aa, Homo sapiens
  CDR3 for beta chain variable domain of TCR clone 265421 (TRBV19, TRBJ2-7)
CASTVQGRPYEQYF

SEQ ID NO: 530843 - protein, 12 aa, Homo sapiens
  CDR3 for alpha chain variable domain of TCR clone 265422 (TRAV13-1, TRAJ21)
CAAKEGFNKFYF

SEQ ID NO: 530844 - protein, 13 aa, Homo sapiens
  CDR3 for beta chain variable domain of TCR clone 265422 (TRBV11-2, TRBJ1-5)
CQQLPDGQSAQHF

SEQ ID NO: 530845 - protein, 12 aa, Homo sapiens
  CDR3 for alpha chain variable domain of TCR clone 265423 (TRAV13-1, TRAJ21)
CAANEGFNKFYF

SEQ ID NO: 530846 - protein, 14 aa, Homo sapiens
  CDR3 for beta chain variable domain of TCR clone 265423 (TRBV9, TRBJ2-7)
CASSVGVGSYEQYF

SEQ ID NO: 530847 - protein, 16 aa, Homo sapiens
  CDR3 for alpha chain variable domain of TCR clone 265424 (TRAV12-2, TRAJ50)
CAVGTATKTSYDKVIF

SEQ ID NO: 530848 - protein, 13 aa, Homo sapiens
  CDR3 for beta chain variable domain of TCR clone 265424 (TRBV10-3, TRBJ2-7)
CASKLAVNYEQYF

SEQ ID NO: 530849 - protein, 12 aa, Homo sapiens
  CDR3 for alpha chain variable domain of TCR clone 265425 (TRAV12-2, TRAJ36)
CAAPRGANNLFF

SEQ ID NO: 530850 - protein, 17 aa, Homo sapiens
  CDR3 for beta chain variable domain of TCR clone 265425 (TRBV7-3, TRBJ2-3)
CASSLMKRMRGADTQYF

SEQ ID NO: 530851 - protein, 14 aa, Homo sapiens
  CDR3 for alpha chain variable domain of TCR clone 265426 (TRAV21, TRAJ52)
PSPAGGTSYGKLTF

SEQ ID NO: 530852 - protein, 16 aa, Homo sapiens
  CDR3 for beta chain variable domain of TCR clone 265426 (TRBV13, TRBJ2-2)
CASSPRTGEHTGELFF

SEQ ID NO: 530853 - protein, 15 aa, Homo sapiens
  CDR3 for alpha chain variable domain of TCR clone 265427 (TRAV26-1, TRAJ29)
CIVRVEGSGNTPLVF

SEQ ID NO: 530854 - protein, 12 aa, Homo sapiens
  CDR3 for beta chain variable domain of TCR clone 265427 (TRBV2, TRBJ2-1)
CAYGPTGNEQFF

SEQ ID NO: 530855 - protein, 15 aa, Homo sapiens
  CDR3 for alpha chain variable domain of TCR clone 265428 (TRAV27, TRAJ53)
CRAINSGGSNYKLSF

SEQ ID NO: 530856 - protein, 14 aa, Homo sapiens
  CDR3 for beta chain variable domain of TCR clone 265428 (TRBV7-3, TRBJ2-1)
CASSLAGGTNEQFF

SEQ ID NO: 530857 - protein, 12 aa, Homo sapiens
  CDR3 for alpha chain variable domain of TCR clone 265429 (TRAV23/DV6, TRAJ3)
CAARAPQQCFQD

SEQ ID NO: 530858 - protein, 17 aa, Homo sapiens
  CDR3 for beta chain variable domain of TCR clone 265429 (TRBV7-9, TRBJ2-3)
CASSPTVAGDLTYTQYF

SEQ ID NO: 530859 - protein, 13 aa, Homo sapiens
  CDR3 for alpha chain variable domain of TCR clone 265430 (TRAV38-2/DV8, TRAJ34)
CAYRTWNTDKLIF

SEQ ID NO: 530860 - protein, 13 aa, Homo sapiens
  CDR3 for beta chain variable domain of TCR clone 265430 (TRBV19, TRBJ2-5)
CASSMGGAGTQYF

SEQ ID NO: 530861 - protein, 13 aa, Homo sapiens
  CDR3 for alpha chain variable domain of TCR clone 265431 (TRAV16, TRAJ9)
CPLSNTGGFKTIF

SEQ ID NO: 530862 - protein, 14 aa, Homo sapiens
  CDR3 for beta chain variable domain of TCR clone 265431 (TRBV5-1, TRBJ2-1)
CASSLEGPVYEQFF

SEQ ID NO: 530863 - protein, 14 aa, Homo sapiens
  CDR3 for alpha chain variable domain of TCR clone 265432 (TRAV12-2, TRAJ13)
CAVNPSGGYQKVTF

SEQ ID NO: 530864 - protein, 14 aa, Homo sapiens
  CDR3 for beta chain variable domain of TCR clone 265432 (TRBV12-4, TRBJ1-1)
CASSLGTVGTEAFF

SEQ ID NO: 530865 - protein, 11 aa, Homo sapiens
  CDR3 for alpha chain variable domain of TCR clone 265433 (TRAV2, TRAJ13)
CASGGYQKVTF

SEQ ID NO: 530866 - protein, 16 aa, Homo sapiens
  CDR3 for beta chain variable domain of TCR clone 265433 (TRBV2, TRBJ2-1)
CASSVRGSLSYNEQFF

SEQ ID NO: 530867 - protein, 15 aa, Homo sapiens
  CDR3 for alpha chain variable domain of TCR clone 265434 (TRAV12-2, TRAJ43)
CAFDMRFGAGTRLTV

SEQ ID NO: 530868 - protein, 18 aa, Homo sapiens
  CDR3 for beta chain variable domain of TCR clone 265434 (TRBV20-1, TRBJ2-3)
CSASGRAGGAGTTDTQYF

SEQ ID NO: 530869 - protein, 16 aa, Homo sapiens
  CDR3 for alpha chain variable domain of TCR clone 265435 (TRAV12-3, TRAJ53)
CAMSPGSGGSNYKLPF

SEQ ID NO: 530870 - protein, 16 aa, Homo sapiens
  CDR3 for beta chain variable domain of TCR clone 265435 (TRBV2, TRBJ2-4)
CASSEAPGGEQNIQYF

SEQ ID NO: 530871 - protein, 14 aa, Homo sapiens
  CDR3 for alpha chain variable domain of TCR clone 265436 (TRAV17, TRAJ24)
CATLTTDSWVKFQF

SEQ ID NO: 530872 - protein, 16 aa, Homo sapiens
  CDR3 for beta chain variable domain of TCR clone 265436 (TRBV4-2, TRBJ2-7)
CASSQDGGSLRGEQYF

SEQ ID NO: 530873 - protein, 16 aa, Homo sapiens
  CDR3 for alpha chain variable domain of TCR clone 265437 (TRAV4, TRAJ22)
CLVGDLHSGSARHLTF

SEQ ID NO: 530874 - protein, 16 aa, Homo sapiens
  CDR3 for beta chain variable domain of TCR clone 265437 (TRBV7-9, TRBJ2-1)
CASSDVAGGSYNEQFF

SEQ ID NO: 530875 - protein, 15 aa, Homo sapiens
  CDR3 for alpha chain variable domain of TCR clone 265438 (TRAV21, TRAJ53)
CATLNSGGSNYKLTF

SEQ ID NO: 530876 - protein, 16 aa, Homo sapiens
  CDR3 for beta chain variable domain of TCR clone 265438 (TRBV29-1, TRBJ1-2)
CSVEANRDIANYGCTF

SEQ ID NO: 530877 - protein, 14 aa, Homo sapiens
  CDR3 for alpha chain variable domain of TCR clone 265439 (TRAV12-3, TRAJ10)
SHLPLTGGGNKLTF

SEQ ID NO: 530878 - protein, 13 aa, Homo sapiens
  CDR3 for beta chain variable domain of TCR clone 265439 (TRBV7-6, TRBJ2-3)
CASSLAGGDTQYF

SEQ ID NO: 530879 - protein, 14 aa, Homo sapiens
  CDR3 for alpha chain variable domain of TCR clone 265440 (TRAV1-2, TRAJ16)
CAVNRYSDGQKLLF

SEQ ID NO: 530880 - protein, 15 aa, Homo sapiens
  CDR3 for beta chain variable domain of TCR clone 265440 (TRBV7-2, TRBJ2-1)
CASRKTGSSYNEQFF

SEQ ID NO: 530881 - protein, 15 aa, Homo sapiens
  CDR3 for alpha chain variable domain of TCR clone 265441 (TRAV8-4, TRAJ3)
CAVTGENLVQQCFQD

SEQ ID NO: 530882 - protein, 16 aa, Homo sapiens
  CDR3 for beta chain variable domain of TCR clone 265441 (TRBV4-3, TRBJ2-1)
CASSPALDRGVNEQFF

SEQ ID NO: 530883 - protein, 16 aa, Homo sapiens
  CDR3 for alpha chain variable domain of TCR clone 265442 (TRAV30, TRAJ24)
CGTEIVDADSWGQFQF

SEQ ID NO: 530884 - protein, 15 aa, Homo sapiens
  CDR3 for beta chain variable domain of TCR clone 265442 (TRBV19, TRBJ2-1)
CASIKGRGPYNEQFF

SEQ ID NO: 530885 - protein, 17 aa, Homo sapiens
  CDR3 for alpha chain variable domain of TCR clone 265443 (TRAV3, TRAJ6)
CAVRYVPRAGGSYIPTF

SEQ ID NO: 530886 - protein, 14 aa, Homo sapiens
  CDR3 for beta chain variable domain of TCR clone 265443 (TRBV7-2, TRBJ2-7)
CASSPKTSFYEQYF

SEQ ID NO: 530887 - protein, 14 aa, Homo sapiens
  CDR3 for alpha chain variable domain of TCR clone 265444 (TRAV3, TRAJ13)
CAVSYSGGYQKVTF

SEQ ID NO: 530888 - protein, 12 aa, Homo sapiens
  CDR3 for beta chain variable domain of TCR clone 265444 (TRBV19, TRBJ1-5)
CASSIAQQPQHF

SEQ ID NO: 530889 - protein, 12 aa, Homo sapiens
  CDR3 for alpha chain variable domain of TCR clone 265445 (TRAV12-3, TRAJ20)
CAMVRGDYKLSF

SEQ ID NO: 530890 - protein, 14 aa, Homo sapiens
  CDR3 for beta chain variable domain of TCR clone 265445 (TRBV5-5, TRBJ1-5)
CASSGQGVDEPQHF

SEQ ID NO: 530891 - protein, 15 aa, Homo sapiens
  CDR3 for alpha chain variable domain of TCR clone 265446 (TRAV26-1, TRAJ56)
CIVRVATGANSKLTF

SEQ ID NO: 530892 - protein, 15 aa, Homo sapiens
  CDR3 for beta chain variable domain of TCR clone 265446 (TRBV27, TRBJ2-7)
CASMPQREGQREQYF

SEQ ID NO: 530893 - protein, 15 aa, Homo sapiens
  CDR3 for alpha chain variable domain of TCR clone 265447 (TRAV27, TRAJ38)
CAARRNAGNNRTLIW

SEQ ID NO: 530894 - protein, 13 aa, Homo sapiens
  CDR3 for beta chain variable domain of TCR clone 265447 (TRBV12-5, TRBJ2-3)
CASGDQQSDTQYF

SEQ ID NO: 530895 - protein, 13 aa, Homo sapiens
  CDR3 for alpha chain variable domain of TCR clone 265448 (TRAV8-3, TRAJ44)
CAVVPGTASKLTF

SEQ ID NO: 530896 - protein, 18 aa, Homo sapiens
  CDR3 for beta chain variable domain of TCR clone 265448 (TRBV28, TRBJ2-1)
CASSSPSGLAGAIYEQFF

SEQ ID NO: 530897 - protein, 13 aa, Homo sapiens
  CDR3 for alpha chain variable domain of TCR clone 265449 (TRAV3, TRAJ3)
CAVADSSASKIIF

SEQ ID NO: 530898 - protein, 14 aa, Homo sapiens
  CDR3 for beta chain variable domain of TCR clone 265449 (TRBV20-1, TRBJ2-3)
CSARGGTSTDTQYF

SEQ ID NO: 530899 - protein, 14 aa, Homo sapiens
  CDR3 for alpha chain variable domain of TCR clone 265450 (TRAV12-3, TRAJ10)
SQLPLTGGGNKLTF

SEQ ID NO: 530900 - protein, 12 aa, Homo sapiens
  CDR3 for beta chain variable domain of TCR clone 265450 (TRBV7-8, TRBJ2-1)
CASSLGHNEQFF

SEQ ID NO: 530901 - protein, 12 aa, Homo sapiens
  CDR3 for alpha chain variable domain of TCR clone 265451 (TRAV3, TRAJ27)
CAVRDGAGKSTF

SEQ ID NO: 530902 - protein, 15 aa, Homo sapiens
  CDR3 for beta chain variable domain of TCR clone 265451 (TRBV5-1, TRBJ1-1)
CASSSTTGTNTEAFF

SEQ ID NO: 530903 - protein, 15 aa, Homo sapiens
  CDR3 for alpha chain variable domain of TCR clone 265452 (TRAV21, TRAJ24)
FSARSSTDSWGKLQF

SEQ ID NO: 530904 - protein, 15 aa, Homo sapiens
  CDR3 for beta chain variable domain of TCR clone 265452 (TRBV20-1, TRBJ1-1)
CSASRGVTGNTEAFF

SEQ ID NO: 530905 - protein, 12 aa, Homo sapiens
  CDR3 for alpha chain variable domain of TCR clone 265453 (TRAV21, TRAJ23)
CAVMLQGGKLIF

SEQ ID NO: 530906 - protein, 16 aa, Homo sapiens
  CDR3 for beta chain variable domain of TCR clone 265453 (TRBV7-9, TRBJ1-2)
CASSLGFSSGEDGYTF

SEQ ID NO: 530907 - protein, 15 aa, Homo sapiens
  CDR3 for alpha chain variable domain of TCR clone 265454 (TRAV35, TRAJ23)
CAGQRGYNQGGKLIF

SEQ ID NO: 530908 - protein, 14 aa, Homo sapiens
  CDR3 for beta chain variable domain of TCR clone 265454 (TRBV12-4, TRBJ2-3)
CASSGQGSTDTQYF

SEQ ID NO: 530909 - protein, 13 aa, Homo sapiens
  CDR3 for alpha chain variable domain of TCR clone 265455 (TRAV21, TRAJ20)
CALGLRVDYKLSF

SEQ ID NO: 530910 - protein, 11 aa, Homo sapiens
  CDR3 for beta chain variable domain of TCR clone 265455 (TRBV25-1, TRBJ2-1)
CATTRISEQFF

SEQ ID NO: 530911 - protein, 15 aa, Homo sapiens
  CDR3 for alpha chain variable domain of TCR clone 265456 (TRAV13-1, TRAJ17)
CAASIARAAGNKLTF

SEQ ID NO: 530912 - protein, 12 aa, Homo sapiens
  CDR3 for beta chain variable domain of TCR clone 265456 (TRBV5-7, TRBJ1-1)
CASSLGRGKAFF

SEQ ID NO: 530913 - protein, 20 aa, Homo sapiens
  CDR3 for alpha chain variable domain of TCR clone 265457 (TRAV27, TRAJ17)
TAAQPGDTGLSKAAGNKLTF

SEQ ID NO: 530914 - protein, 12 aa, Homo sapiens
  CDR3 for beta chain variable domain of TCR clone 265457 (TRBV5-1, TRBJ1-1)
CASSQDRDKAFF

SEQ ID NO: 530915 - protein, 17 aa, Homo sapiens
  CDR3 for alpha chain variable domain of TCR clone 265458 (TRAV3, TRAJ6)
CAVGDGPRAGGSYIPTF

SEQ ID NO: 530916 - protein, 14 aa, Homo sapiens
  CDR3 for beta chain variable domain of TCR clone 265458 (TRBV6-1, TRBJ1-3)
CASVQGGGGNTIYF

SEQ ID NO: 530917 - protein, 13 aa, Homo sapiens
  CDR3 for alpha chain variable domain of TCR clone 265459 (TRAV23/DV6, TRAJ45)
CAARRGGADGLTF

SEQ ID NO: 530918 - protein, 14 aa, Homo sapiens
  CDR3 for beta chain variable domain of TCR clone 265459 (TRBV7-2, TRBJ2-3)
FASSLARGTDTQYF

SEQ ID NO: 530919 - protein, 16 aa, Homo sapiens
  CDR3 for alpha chain variable domain of TCR clone 265460 (TRAV30, TRAJ24)
CGTEIVDADSWGKFQF

SEQ ID NO: 530920 - protein, 15 aa, Homo sapiens
  CDR3 for beta chain variable domain of TCR clone 265460 (TRBV20-1, TRBJ2-7)
CSARDQVSGMDKQYF

SEQ ID NO: 530921 - protein, 15 aa, Homo sapiens
  CDR3 for alpha chain variable domain of TCR clone 265461 (TRAV26-1, TRAJ29)
CIVRVEGSGNTTLVV

SEQ ID NO: 530922 - protein, 15 aa, Homo sapiens
  CDR3 for beta chain variable domain of TCR clone 265461 (TRBV7-9, TRBJ1-5)
CASSQGHQPNQPQHF

SEQ ID NO: 530923 - protein, 16 aa, Homo sapiens
  CDR3 for alpha chain variable domain of TCR clone 265462 (TRAV8-3, TRAJ44)
CAVGTLMTGTASKLTF

SEQ ID NO: 530924 - protein, 16 aa, Homo sapiens
  CDR3 for beta chain variable domain of TCR clone 265462 (TRBV7-2, TRBJ2-3)
CASSLVALYSTDTQYF

SEQ ID NO: 530925 - protein, 14 aa, Homo sapiens
  CDR3 for alpha chain variable domain of TCR clone 265463 (TRAV4, TRAJ26)
CLVGPHNYGQNFVF

SEQ ID NO: 530926 - protein, 17 aa, Homo sapiens
  CDR3 for beta chain variable domain of TCR clone 265463 (TRBV24-1, TRBJ2-1)
CATSDVSTSGTYNEQYF

SEQ ID NO: 530927 - protein, 13 aa, Homo sapiens
  CDR3 for alpha chain variable domain of TCR clone 265464 (TRAV23/DV6, TRAJ6)
CAAKTGGSYIPTF

SEQ ID NO: 530928 - protein, 14 aa, Homo sapiens
  CDR3 for beta chain variable domain of TCR clone 265464 (TRBV19, TRBJ2-5)
CASSMTGQQETQYF

SEQ ID NO: 530929 - protein, 16 aa, Homo sapiens
  CDR3 for alpha chain variable domain of TCR clone 265465 (TRAV13-1, TRAJ10)
CAAGSILTGGGNKLTF

SEQ ID NO: 530930 - protein, 15 aa, Homo sapiens
  CDR3 for beta chain variable domain of TCR clone 265465 (TRBV12-4, TRBJ2-7)
CASSQTGAISYEQYF

SEQ ID NO: 530931 - protein, 12 aa, Homo sapiens
  CDR3 for alpha chain variable domain of TCR clone 265466 (TRAV21, TRAJ33)
CAKMDSNYQLIW

SEQ ID NO: 530932 - protein, 19 aa, Homo sapiens
  CDR3 for beta chain variable domain of TCR clone 265466 (TRBV4-1, TRBJ2-5)
CASSQEGSGTSKRGETQYF

SEQ ID NO: 530933 - protein, 14 aa, Homo sapiens
  CDR3 for alpha chain variable domain of TCR clone 265467 (TRAV8-1, TRAJ24)
CAVNAADSWGKLQF

SEQ ID NO: 530934 - protein, 16 aa, Homo sapiens
  CDR3 for beta chain variable domain of TCR clone 265467 (TRBV4-3, TRBJ2-1)
CASSPALDRGVNEQLV

SEQ ID NO: 530935 - protein, 15 aa, Homo sapiens
  CDR3 for alpha chain variable domain of TCR clone 265468 (TRAV25, TRAJ52)
CAGRPGGTSYGKLTF

SEQ ID NO: 530936 - protein, 17 aa, Homo sapiens
  CDR3 for beta chain variable domain of TCR clone 265468 (TRBV13, TRBJ2-3)
CASSLSRVAGGEEYAVF

SEQ ID NO: 530937 - protein, 15 aa, Homo sapiens
  CDR3 for alpha chain variable domain of TCR clone 265469 (TRAV3, TRAJ29)
CAVRDLYSGNTPLVF

SEQ ID NO: 530938 - protein, 16 aa, Homo sapiens
  CDR3 for beta chain variable domain of TCR clone 265469 (TRBV20-1, TRBJ1-4)
CSAPGQGLLTNEKLFF

SEQ ID NO: 530939 - protein, 16 aa, Homo sapiens
  CDR3 for alpha chain variable domain of TCR clone 265470 (TRAV30, TRAJ24)
CGTEIVDADSWGKFRF

SEQ ID NO: 530940 - protein, 12 aa, Homo sapiens
  CDR3 for beta chain variable domain of TCR clone 265470 (TRBV7-9, TRBJ1-5)
CASSPQGQPQHF

SEQ ID NO: 530941 - protein, 11 aa, Homo sapiens
  CDR3 for alpha chain variable domain of TCR clone 265471 (TRAV21, TRAJ9)
CAVHGGFKTIF

SEQ ID NO: 530942 - protein, 12 aa, Homo sapiens
  CDR3 for beta chain variable domain of TCR clone 265471 (TRBV20-1, TRBJ2-3)
CSARVGTDTQYF

SEQ ID NO: 530943 - protein, 12 aa, Homo sapiens
  CDR3 for alpha chain variable domain of TCR clone 265472 (TRAV3, TRAJ43)
CAVRDPNNDMRF

SEQ ID NO: 530944 - protein, 12 aa, Homo sapiens
  CDR3 for beta chain variable domain of TCR clone 265472 (TRBV28, TRBJ2-3)
CASSLYRDTQYF

SEQ ID NO: 530945 - protein, 13 aa, Homo sapiens
  CDR3 for alpha chain variable domain of TCR clone 265473 (TRAV30, TRAJ39)
CGTEKNACNMLTF

SEQ ID NO: 530946 - protein, 12 aa, Homo sapiens
  CDR3 for beta chain variable domain of TCR clone 265473 (TRBV12-4, TRBJ2-5)
CASSSAQETQYF

SEQ ID NO: 530947 - protein, 10 aa, Homo sapiens
  CDR3 for alpha chain variable domain of TCR clone 265474 (TRAV12-2, TRAJ30)
CAVIYDKIIF

SEQ ID NO: 530948 - protein, 13 aa, Homo sapiens
  CDR3 for beta chain variable domain of TCR clone 265474 (TRBV30, TRBJ2-7)
CAWSLTGSYEQYF

SEQ ID NO: 530949 - protein, 15 aa, Homo sapiens
  CDR3 for alpha chain variable domain of TCR clone 265475 (TRAV36/DV7, TRAJ4)
CAVEPLSGGYNKLIF

SEQ ID NO: 530950 - protein, 13 aa, Homo sapiens
  CDR3 for beta chain variable domain of TCR clone 265475 (TRBV4-2, TRBJ1-1)
CASSQAGNTEAFF

SEQ ID NO: 530951 - protein, 12 aa, Homo sapiens
  CDR3 for alpha chain variable domain of TCR clone 265476 (TRAV23/DV6, TRAJ49)
CAASNDGNPFYF

SEQ ID NO: 530952 - protein, 14 aa, Homo sapiens
  CDR3 for beta chain variable domain of TCR clone 265476 (TRBV18, TRBJ1-2)
CASSPSRTGNGYTF

SEQ ID NO: 530953 - protein, 18 aa, Homo sapiens
  CDR3 for alpha chain variable domain of TCR clone 265477 (TRAV26-2, TRAJ54)
CILRDEEVGIQGAQKLVF

SEQ ID NO: 530954 - protein, 14 aa, Homo sapiens
  CDR3 for beta chain variable domain of TCR clone 265477 (TRBV4-1, TRBJ2-2)
CASSQAVNTGELFF

SEQ ID NO: 530955 - protein, 11 aa, Homo sapiens
  CDR3 for alpha chain variable domain of TCR clone 265478 (TRAV6, TRAJ41)
CALNSGYALNF

SEQ ID NO: 530956 - protein, 13 aa, Homo sapiens
  CDR3 for beta chain variable domain of TCR clone 265478 (TRBV7-9, TRBJ1-2)
CASSLKQNYGYTF

SEQ ID NO: 530957 - protein, 13 aa, Homo sapiens
  CDR3 for alpha chain variable domain of TCR clone 265479 (TRAV2, TRAJ15)
CAVASQAGTALIF

SEQ ID NO: 530958 - protein, 12 aa, Homo sapiens
  CDR3 for beta chain variable domain of TCR clone 265479 (TRBV12-4, TRBJ2-1)
CASSKDRRWQFF

SEQ ID NO: 530959 - protein, 17 aa, Homo sapiens
  CDR3 for alpha chain variable domain of TCR clone 265480 (TRAV3, TRAJ28)
CAVREEYSGAGSYQLTF

SEQ ID NO: 530960 - protein, 18 aa, Homo sapiens
  CDR3 for beta chain variable domain of TCR clone 265480 (TRBV27, TRBJ2-1)
CASGSRAVGVGSKNEQFF

SEQ ID NO: 530961 - protein, 12 aa, Homo sapiens
  CDR3 for alpha chain variable domain of TCR clone 265481 (TRAV12-1, TRAJ34)
CVVAGATDKLIF

SEQ ID NO: 530962 - protein, 14 aa, Homo sapiens
  CDR3 for beta chain variable domain of TCR clone 265481 (TRBV7-9, TRBJ2-1)
CASSPRDSLYEQLF

SEQ ID NO: 530963 - protein, 11 aa, Homo sapiens
  CDR3 for alpha chain variable domain of TCR clone 265482 (TRAV35, TRAJ22)
CAGPGVGQLTF

SEQ ID NO: 530964 - protein, 14 aa, Homo sapiens
  CDR3 for beta chain variable domain of TCR clone 265482 (TRBV12-5, TRBJ2-5)
CASGSRTHQETQYF

SEQ ID NO: 530965 - protein, 11 aa, Homo sapiens
  CDR3 for alpha chain variable domain of TCR clone 265483 (TRAV12-1, TRAJ37)
CVVYNTGKLIF

SEQ ID NO: 530966 - protein, 12 aa, Homo sapiens
  CDR3 for beta chain variable domain of TCR clone 265483 (TRBV27, TRBJ2-7)
CASSGGFYEQYF

SEQ ID NO: 530967 - protein, 12 aa, Homo sapiens
  CDR3 for alpha chain variable domain of TCR clone 265484 (TRAV8-1, TRAJ26)
CAMNNYGQNFVF

SEQ ID NO: 530968 - protein, 15 aa, Homo sapiens
  CDR3 for beta chain variable domain of TCR clone 265484 (TRBV20-1, TRBJ1-1)
CSASWDRFLNTEAFF

SEQ ID NO: 530969 - protein, 12 aa, Homo sapiens
  CDR3 for alpha chain variable domain of TCR clone 265485 (TRAV12-2, TRAJ4)
GWPEGGYNKLIF

SEQ ID NO: 530970 - protein, 16 aa, Homo sapiens
  CDR3 for beta chain variable domain of TCR clone 265485 (TRBV2, TRBJ1-4)
CASNLLQGATNEKLFF

SEQ ID NO: 530971 - protein, 14 aa, Homo sapiens
  CDR3 for alpha chain variable domain of TCR clone 265486 (TRAV26-1, TRAJ38)
CIADNAGNNRKLIW

SEQ ID NO: 530972 - protein, 14 aa, Homo sapiens
  CDR3 for beta chain variable domain of TCR clone 265486 (TRBV7-2, TRBJ2-7)
CASRSQGAAYEQYF

SEQ ID NO: 530973 - protein, 19 aa, Homo sapiens
  CDR3 for alpha chain variable domain of TCR clone 265487 (TRAV25, TRAJ20)
TATQTTDVGILPHDYKLSC

SEQ ID NO: 530974 - protein, 17 aa, Homo sapiens
  CDR3 for beta chain variable domain of TCR clone 265487 (TRBV4-3, TRBJ2-1)
CASSQFSSGRASGEQFF

SEQ ID NO: 530975 - protein, 15 aa, Homo sapiens
  CDR3 for alpha chain variable domain of TCR clone 265488 (TRAV12-1, TRAJ44)
CVVFVNTDTASKLTF

SEQ ID NO: 530976 - protein, 17 aa, Homo sapiens
  CDR3 for beta chain variable domain of TCR clone 265488 (TRBV7-8, TRBJ2-6)
CASSAGTGGAGANDLTF

SEQ ID NO: 530977 - protein, 13 aa, Homo sapiens
  CDR3 for alpha chain variable domain of TCR clone 265489 (TRAV17, TRAJ29)
CATDAFRKHTSCL

SEQ ID NO: 530978 - protein, 13 aa, Homo sapiens
  CDR3 for beta chain variable domain of TCR clone 265489 (TRBV5-7, TRBJ2-6)
CASTSSGANVLTL

SEQ ID NO: 530979 - protein, 13 aa, Homo sapiens
  CDR3 for alpha chain variable domain of TCR clone 265490 (TRAV13-2, TRAJ15)
YAERPQAGTALIF

SEQ ID NO: 530980 - protein, 15 aa, Homo sapiens
  CDR3 for beta chain variable domain of TCR clone 265490 (TRBV11-2, TRBJ2-7)
CASRFPGTGGYEQYF

SEQ ID NO: 530981 - protein, 14 aa, Homo sapiens
  CDR3 for alpha chain variable domain of TCR clone 265491 (TRAV16, TRAJ32)
CPKRYGGATNKLIF

SEQ ID NO: 530982 - protein, 12 aa, Homo sapiens
  CDR3 for beta chain variable domain of TCR clone 265491 (TRBV7-9, TRBJ2-7)
CATRTDAYEQYF

SEQ ID NO: 530983 - protein, 14 aa, Homo sapiens
  CDR3 for alpha chain variable domain of TCR clone 265492 (TRAV26-1, TRAJ54)
CIVRRTQGAQKLVF

SEQ ID NO: 530984 - protein, 20 aa, Homo sapiens
  CDR3 for beta chain variable domain of TCR clone 265492 (TRBV28, TRBJ2-1)
CASTPIGRSPGLAGGNEQFF

SEQ ID NO: 530985 - protein, 16 aa, Homo sapiens
  CDR3 for alpha chain variable domain of TCR clone 265493 (TRAV29/DV5, TRAJ54)
CAARAPLIQGAQKLVF

SEQ ID NO: 530986 - protein, 13 aa, Homo sapiens
  CDR3 for beta chain variable domain of TCR clone 265493 (TRBV7-9, TRBJ1-2)
CASSLKQNYGYTF

SEQ ID NO: 530987 - protein, 15 aa, Homo sapiens
  CDR3 for alpha chain variable domain of TCR clone 265494 (TRAV22, TRAJ44)
CAVEGLGGTASKLTF

SEQ ID NO: 530988 - protein, 14 aa, Homo sapiens
  CDR3 for beta chain variable domain of TCR clone 265494 (TRBV2, TRBJ2-1)
CASSDRAYYNEQFF

SEQ ID NO: 530989 - protein, 11 aa, Homo sapiens
  CDR3 for alpha chain variable domain of TCR clone 265495 (TRAV12-3, TRAJ27)
CAMANAGKSTF

SEQ ID NO: 530990 - protein, 15 aa, Homo sapiens
  CDR3 for beta chain variable domain of TCR clone 265495 (TRBV11-2, TRBJ2-2)
CASSSDRVNAGELFF

SEQ ID NO: 530991 - protein, 15 aa, Homo sapiens
  CDR3 for alpha chain variable domain of TCR clone 265496 (TRAV3, TRAJ20)
CAVRDSRSNDYKLSF

SEQ ID NO: 530992 - protein, 14 aa, Homo sapiens
  CDR3 for beta chain variable domain of TCR clone 265496 (TRBV20-1, TRBJ2-7)
CSARRENGIYEQYF

SEQ ID NO: 530993 - protein, 11 aa, Homo sapiens
  CDR3 for alpha chain variable domain of TCR clone 265497 (TRAV20, TRAJ23)
CACNQGGKLIF

SEQ ID NO: 530994 - protein, 16 aa, Homo sapiens
  CDR3 for beta chain variable domain of TCR clone 265497 (TRBV7-8, TRBJ2-5)
CASSFGGQPAQETQHF

SEQ ID NO: 530995 - protein, 15 aa, Homo sapiens
  CDR3 for alpha chain variable domain of TCR clone 265498 (TRAV12-2, TRAJ56)
CAVNPFTGANSKLTF

SEQ ID NO: 530996 - protein, 13 aa, Homo sapiens
  CDR3 for beta chain variable domain of TCR clone 265498 (TRBV20-1, TRBJ1-2)
CSARDRGYGGYTF

SEQ ID NO: 530997 - protein, 11 aa, Homo sapiens
  CDR3 for alpha chain variable domain of TCR clone 265499 (TRAV12-1, TRAJ8)
CVVTGFQKLVF

SEQ ID NO: 530998 - protein, 17 aa, Homo sapiens
  CDR3 for beta chain variable domain of TCR clone 265499 (TRBV5-4, TRBJ1-1)
CASFPPKGRLQNTEAFF

SEQ ID NO: 530999 - protein, 20 aa, Homo sapiens
  CDR3 for alpha chain variable domain of TCR clone 265500 (TRAV30, TRAJ54)
SAAQSRSETQVVQGAQKLVF

SEQ ID NO: 531000 - protein, 13 aa, Homo sapiens
  CDR3 for beta chain variable domain of TCR clone 265500 (TRBV5-7, TRBJ1-1)
CASSLFQNTEAFF

SEQ ID NO: 531001 - protein, 15 aa, Homo sapiens
  CDR3 for alpha chain variable domain of TCR clone 265501 (TRAV20, TRAJ50)
CAVRQMKTSYDKVIF

SEQ ID NO: 531002 - protein, 12 aa, Homo sapiens
  CDR3 for beta chain variable domain of TCR clone 265501 (TRBV7-8, TRBJ2-7)
CASSLGDREQYF

SEQ ID NO: 531003 - protein, 10 aa, Homo sapiens
  CDR3 for alpha chain variable domain of TCR clone 265502 (TRAV12-1, TRAJ43)
CVVHNNDMRF

SEQ ID NO: 531004 - protein, 18 aa, Homo sapiens
  CDR3 for beta chain variable domain of TCR clone 265502 (TRBV18, TRBJ2-3)
CASSYTSGAAGGTDTQYF

SEQ ID NO: 531005 - protein, 15 aa, Homo sapiens
  CDR3 for alpha chain variable domain of TCR clone 265503 (TRAV8-3, TRAJ6)
CAVDPGSGGSYIPTF

SEQ ID NO: 531006 - protein, 13 aa, Homo sapiens
  CDR3 for beta chain variable domain of TCR clone 265503 (TRBV4-1, TRBJ2-7)
CASSQGQAYEQYF

SEQ ID NO: 531007 - protein, 12 aa, Homo sapiens
  CDR3 for alpha chain variable domain of TCR clone 265504 (TRAV27, TRAJ13)
CAGAGGYQKVTF

SEQ ID NO: 531008 - protein, 15 aa, Homo sapiens
  CDR3 for beta chain variable domain of TCR clone 265504 (TRBV20-1, TRBJ2-6)
CSARDRGAGANVLTF

SEQ ID NO: 531009 - protein, 14 aa, Homo sapiens
  CDR3 for alpha chain variable domain of TCR clone 265505 (TRAV8-3, TRAJ36)
CAVGPITGANNLFF

SEQ ID NO: 531010 - protein, 15 aa, Homo sapiens
  CDR3 for beta chain variable domain of TCR clone 265505 (TRBV4-1, TRBJ2-1)
CASSQDPGNYNEHFF

SEQ ID NO: 531011 - protein, 10 aa, Homo sapiens
  CDR3 for alpha chain variable domain of TCR clone 265506 (TRAV23/DV6, TRAJ57)
CAASSTLSQG

SEQ ID NO: 531012 - protein, 14 aa, Homo sapiens
  CDR3 for beta chain variable domain of TCR clone 265506 (TRBV28, TRBJ2-5)
CASSFRGPQETQYF

SEQ ID NO: 531013 - protein, 11 aa, Homo sapiens
  CDR3 for alpha chain variable domain of TCR clone 265507 (TRAV35, TRAJ30)
CAGPGDDKIIF

SEQ ID NO: 531014 - protein, 15 aa, Homo sapiens
  CDR3 for beta chain variable domain of TCR clone 265507 (TRBV5-1, TRBJ2-1)
CASSPPRAPYNEQFF

SEQ ID NO: 531015 - protein, 18 aa, Homo sapiens
  CDR3 for alpha chain variable domain of TCR clone 265508 (TRAV13-1, TRAJ52)
CAASKSSAGGPSYGKLTF

SEQ ID NO: 531016 - protein, 13 aa, Homo sapiens
  CDR3 for beta chain variable domain of TCR clone 265508 (TRBV12-4, TRBJ1-2)
CASSLRQGKGYTF

SEQ ID NO: 531017 - protein, 14 aa, Homo sapiens
  CDR3 for alpha chain variable domain of TCR clone 265509 (TRAV12-3, TRAJ58)
CAMSTETSGSRLTF

SEQ ID NO: 531018 - protein, 13 aa, Homo sapiens
  CDR3 for beta chain variable domain of TCR clone 265509 (TRBV29-1, TRBJ2-1)
CSVEGGRVNEQFF

SEQ ID NO: 531019 - protein, 14 aa, Homo sapiens
  CDR3 for alpha chain variable domain of TCR clone 265510 (TRAV12-2, TRAJ17)
CAVLFNAAGNKLTF

SEQ ID NO: 531020 - protein, 14 aa, Homo sapiens
  CDR3 for beta chain variable domain of TCR clone 265510 (TRBV12-5, TRBJ2-5)
CASGSWTHQETQYF

SEQ ID NO: 531021 - protein, 11 aa, Homo sapiens
  CDR3 for alpha chain variable domain of TCR clone 265511 (TRAV21, TRAJ9)
CAVPGGFKTIL

SEQ ID NO: 531022 - protein, 16 aa, Homo sapiens
  CDR3 for beta chain variable domain of TCR clone 265511 (TRBV7-9, TRBJ2-5)
CATSGGARDPVLRGHA

SEQ ID NO: 531023 - protein, 18 aa, Homo sapiens
  CDR3 for alpha chain variable domain of TCR clone 265512 (TRAV26-1, TRAJ22)
CIVRVSFWFCKATDLWIW

SEQ ID NO: 531024 - protein, 13 aa, Homo sapiens
  CDR3 for beta chain variable domain of TCR clone 265512 (TRBV7-9, TRBJ1-2)
CASSLKQNHGYSF

SEQ ID NO: 531025 - protein, 13 aa, Homo sapiens
  CDR3 for alpha chain variable domain of TCR clone 265513 (TRAV8-3, TRAJ28)
CAVGAVGSYQLTF

SEQ ID NO: 531026 - protein, 14 aa, Homo sapiens
  CDR3 for beta chain variable domain of TCR clone 265513 (TRBV7-2, TRBJ2-5)
CASSFTQGQETQYF

SEQ ID NO: 531027 - protein, 16 aa, Homo sapiens
  CDR3 for alpha chain variable domain of TCR clone 265514 (TRAV26-1, TRAJ45)
CIVEKYSGGGADGLTF

SEQ ID NO: 531028 - protein, 16 aa, Homo sapiens
  CDR3 for beta chain variable domain of TCR clone 265514 (TRBV10-3, TRBJ1-6)
CAISERRGQGNSPLHS

SEQ ID NO: 531029 - protein, 11 aa, Homo sapiens
  CDR3 for alpha chain variable domain of TCR clone 265515 (TRAV8-4, TRAJ20)
CAVTNVLTTTS

SEQ ID NO: 531030 - protein, 16 aa, Homo sapiens
  CDR3 for beta chain variable domain of TCR clone 265515 (TRBV6-1, TRBJ1-2)
CASSGAWQGRSHGYNF

SEQ ID NO: 531031 - protein, 13 aa, Homo sapiens
  CDR3 for alpha chain variable domain of TCR clone 265516 (TRAV16, TRAJ10)
CALLTGGGNKLTF

SEQ ID NO: 531032 - protein, 12 aa, Homo sapiens
  CDR3 for beta chain variable domain of TCR clone 265516 (TRBV28, TRBJ2-7)
CASTGNHYEHYF

SEQ ID NO: 531033 - protein, 13 aa, Homo sapiens
  CDR3 for alpha chain variable domain of TCR clone 265517 (TRAV8-4, TRAJ10)
CAAFTGGGNKPTF

SEQ ID NO: 531034 - protein, 12 aa, Homo sapiens
  CDR3 for beta chain variable domain of TCR clone 265517 (TRBV3-1, TRBJ2-1)
CASSQGSSGQFF

SEQ ID NO: 531035 - protein, 14 aa, Homo sapiens
  CDR3 for alpha chain variable domain of TCR clone 265518 (TRAV21, TRAJ35)
CAVMTIGFGNVLHC

SEQ ID NO: 531036 - protein, 13 aa, Homo sapiens
  CDR3 for beta chain variable domain of TCR clone 265518 (TRBV23-1, TRBJ1-4)
CASRGKFNEKLFF

SEQ ID NO: 531037 - protein, 14 aa, Homo sapiens
  CDR3 for alpha chain variable domain of TCR clone 265519 (TRAV26-2, TRAJ31)
CCVLLPLNNARLMF

SEQ ID NO: 531038 - protein, 13 aa, Homo sapiens
  CDR3 for beta chain variable domain of TCR clone 265519 (TRBV10-3, TRBJ1-2)
CAISERDSYGYTF

SEQ ID NO: 531039 - protein, 11 aa, Homo sapiens
  CDR3 for alpha chain variable domain of TCR clone 265520 (TRAV35, TRAJ30)
CAGPGDDKIIF

SEQ ID NO: 531040 - protein, 14 aa, Homo sapiens
  CDR3 for beta chain variable domain of TCR clone 265520 (TRBV7-6, TRBJ1-6)
CGSSQAGGGSTLHF

SEQ ID NO: 531041 - protein, 13 aa, Homo sapiens
  CDR3 for alpha chain variable domain of TCR clone 265521 (TRAV17, TRAJ9)
CATDGTGGFKTIF

SEQ ID NO: 531042 - protein, 13 aa, Homo sapiens
  CDR3 for beta chain variable domain of TCR clone 265521 (TRBV7-3, TRBJ1-1)
CASSQDWGAEAFF

SEQ ID NO: 531043 - protein, 14 aa, Homo sapiens
  CDR3 for alpha chain variable domain of TCR clone 265522 (TRAV1-2, TRAJ31)
CLLPLCFFDARLMF

SEQ ID NO: 531044 - protein, 17 aa, Homo sapiens
  CDR3 for beta chain variable domain of TCR clone 265522 (TRBV15, TRBJ1-2)
CATSGREIDVVNYGYTF

SEQ ID NO: 531045 - protein, 13 aa, Homo sapiens
  CDR3 for alpha chain variable domain of TCR clone 265523 (TRAV27, TRAJ29)
CAGAHSGNTPLVF

SEQ ID NO: 531046 - protein, 15 aa, Homo sapiens
  CDR3 for beta chain variable domain of TCR clone 265523 (TRBV7-9, TRBJ2-7)
CASSLALAEAYEQYF

SEQ ID NO: 531047 - protein, 14 aa, Homo sapiens
  CDR3 for alpha chain variable domain of TCR clone 265524 (TRAV12-3, TRAJ10)
SHLPLTGGGNKLTF

SEQ ID NO: 531048 - protein, 10 aa, Homo sapiens
  CDR3 for beta chain variable domain of TCR clone 265524 (TRBV10-3, TRBJ2-7)
CAATSNEQYF

SEQ ID NO: 531049 - protein, 14 aa, Homo sapiens
  CDR3 for alpha chain variable domain of TCR clone 265525 (TRAV12-2, TRAJ3)
CAVSLYSSASKIIF

SEQ ID NO: 531050 - protein, 12 aa, Homo sapiens
  CDR3 for beta chain variable domain of TCR clone 265525 (TRBV6-3, TRBJ2-7)
CASSLTPYEQYF

SEQ ID NO: 531051 - protein, 14 aa, Homo sapiens
  CDR3 for alpha chain variable domain of TCR clone 265526 (TRAV8-4, TRAJ13)
WAVTLSGGYQKVTF

SEQ ID NO: 531052 - protein, 13 aa, Homo sapiens
  CDR3 for beta chain variable domain of TCR clone 265526 (TRBV4-2, TRBJ1-1)
CASSQAGNTEAFF

SEQ ID NO: 531053 - protein, 13 aa, Homo sapiens
  CDR3 for alpha chain variable domain of TCR clone 265527 (TRAV12-2, TRAJ30)
CAVNLNRDDKIIF

SEQ ID NO: 531054 - protein, 14 aa, Homo sapiens
  CDR3 for beta chain variable domain of TCR clone 265527 (TRBV5-4, TRBJ1-1)
CASSLDSRRDEAFF

SEQ ID NO: 531055 - protein, 12 aa, Homo sapiens
  CDR3 for alpha chain variable domain of TCR clone 265528 (TRAV20, TRAJ39)
FAVGNAGNMLTF

SEQ ID NO: 531056 - protein, 16 aa, Homo sapiens
  CDR3 for beta chain variable domain of TCR clone 265528 (TRBV15, TRBJ1-2)
CATSRGPRTGGGGYTF

SEQ ID NO: 531057 - protein, 15 aa, Homo sapiens
  CDR3 for alpha chain variable domain of TCR clone 265529 (TRAV10, TRAJ10)
CVVSAYTGGGNKLTF

SEQ ID NO: 531058 - protein, 15 aa, Homo sapiens
  CDR3 for beta chain variable domain of TCR clone 265529 (TRBV11-3, TRBJ2-7)
CASSLLSGSSYEQYF

SEQ ID NO: 531059 - protein, 14 aa, Homo sapiens
  CDR3 for alpha chain variable domain of TCR clone 265530 (TRAV23/DV6, TRAJ57)
ALTLSQGGSEKLVF

SEQ ID NO: 531060 - protein, 14 aa, Homo sapiens
  CDR3 for beta chain variable domain of TCR clone 265530 (TRBV25-1, TRBJ1-1)
CASTHLGGNTEAFF

SEQ ID NO: 531061 - protein, 12 aa, Homo sapiens
  CDR3 for alpha chain variable domain of TCR clone 265531 (TRAV38-1, TRAJ47)
CAFETYGNKLVF

SEQ ID NO: 531062 - protein, 15 aa, Homo sapiens
  CDR3 for beta chain variable domain of TCR clone 265531 (TRBV7-9, TRBJ1-5)
CASSQGHQPNQPQHF

SEQ ID NO: 531063 - protein, 14 aa, Homo sapiens
  CDR3 for alpha chain variable domain of TCR clone 265532 (TRAV27, TRAJ22)
CAGVSVLGKRQLTF

SEQ ID NO: 531064 - protein, 14 aa, Homo sapiens
  CDR3 for beta chain variable domain of TCR clone 265532 (TRBV12-5, TRBJ2-5)
CASGSRTHQETQYF

SEQ ID NO: 531065 - protein, 15 aa, Homo sapiens
  CDR3 for alpha chain variable domain of TCR clone 265533 (TRAV38-1, TRAJ37)
CAFIFGSGNTGKLIF

SEQ ID NO: 531066 - protein, 15 aa, Homo sapiens
  CDR3 for beta chain variable domain of TCR clone 265533 (TRBV5-4, TRBJ2-3)
CASSLAGGITDTQYF

SEQ ID NO: 531067 - protein, 13 aa, Homo sapiens
  CDR3 for alpha chain variable domain of TCR clone 265534 (TRAV12-3, TRAJ53)
CARRGGSNYKLTF

SEQ ID NO: 531068 - protein, 15 aa, Homo sapiens
  CDR3 for beta chain variable domain of TCR clone 265534 (TRBV2, TRBJ2-1)
CATQARLVMIGEQFF

SEQ ID NO: 531069 - protein, 12 aa, Homo sapiens
  CDR3 for alpha chain variable domain of TCR clone 265535 (TRAV8-6, TRAJ57)
CALQGGSEKLVF

SEQ ID NO: 531070 - protein, 11 aa, Homo sapiens
  CDR3 for beta chain variable domain of TCR clone 265535 (TRBV19, TRBJ1-1)
CASSIGSEAFF

SEQ ID NO: 531071 - protein, 18 aa, Homo sapiens
  CDR3 for alpha chain variable domain of TCR clone 265536 (TRAV21, TRAJ52)
CAVMPSPAGGTSYGKLTF

SEQ ID NO: 531072 - protein, 17 aa, Homo sapiens
  CDR3 for beta chain variable domain of TCR clone 265536 (TRBV25-1, TRBJ2-1)
CASSAYGQGRGVYEQFF

SEQ ID NO: 531073 - protein, 13 aa, Homo sapiens
  CDR3 for alpha chain variable domain of TCR clone 265537 (TRAV27, TRAJ29)
CAGAHSGNTPLVF

SEQ ID NO: 531074 - protein, 14 aa, Homo sapiens
  CDR3 for beta chain variable domain of TCR clone 265537 (TRBV18, TRBJ2-5)
CASSPGVSQETQYL

SEQ ID NO: 531075 - protein, 13 aa, Homo sapiens
  CDR3 for alpha chain variable domain of TCR clone 265538 (TRAV2, TRAJ39)
TTVHNHAGNMLTF

SEQ ID NO: 531076 - protein, 16 aa, Homo sapiens
  CDR3 for beta chain variable domain of TCR clone 265538 (TRBV24-1, TRBJ2-3)
CATSGYRDRDTDTQYF

SEQ ID NO: 531077 - protein, 13 aa, Homo sapiens
  CDR3 for alpha chain variable domain of TCR clone 265539 (TRAV8-3, TRAJ4)
WVFYSGGYNKLIF

SEQ ID NO: 531078 - protein, 12 aa, Homo sapiens
  CDR3 for beta chain variable domain of TCR clone 265539 (TRBV7-8, TRBJ2-7)
CASSLGDREQYF

SEQ ID NO: 531079 - protein, 16 aa, Homo sapiens
  CDR3 for alpha chain variable domain of TCR clone 265540 (TRAV30, TRAJ24)
CGTEIVDADSWGNFQF

SEQ ID NO: 531080 - protein, 15 aa, Homo sapiens
  CDR3 for beta chain variable domain of TCR clone 265540 (TRBV9, TRBJ2-1)
RASSLAGSSYNEQFF

SEQ ID NO: 531081 - protein, 13 aa, Homo sapiens
  CDR3 for alpha chain variable domain of TCR clone 265541 (TRAV2, TRAJ40)
CAVVTSGTYKYIF

SEQ ID NO: 531082 - protein, 14 aa, Homo sapiens
  CDR3 for beta chain variable domain of TCR clone 265541 (TRBV5-4, TRBJ2-3)
CASSLRAGTDTQYF

SEQ ID NO: 531083 - protein, 13 aa, Homo sapiens
  CDR3 for alpha chain variable domain of TCR clone 265542 (TRAV13-1, TRAJ9)
CAASGTGGFKTIF

SEQ ID NO: 531084 - protein, 13 aa, Homo sapiens
  CDR3 for beta chain variable domain of TCR clone 265542 (TRBV12-4, TRBJ2-7)
CASSLERVWEQYF

SEQ ID NO: 531085 - protein, 11 aa, Homo sapiens
  CDR3 for alpha chain variable domain of TCR clone 265543 (TRAV25, TRAJ49)
CAGGTGNQFYF

SEQ ID NO: 531086 - protein, 12 aa, Homo sapiens
  CDR3 for beta chain variable domain of TCR clone 265543 (TRBV6-5, TRBJ2-1)
CASRNNRGQQFF

SEQ ID NO: 531087 - protein, 15 aa, Homo sapiens
  CDR3 for alpha chain variable domain of TCR clone 265544 (TRAV27, TRAJ38)
CAARRNACNNRKLIW

SEQ ID NO: 531088 - protein, 14 aa, Homo sapiens
  CDR3 for beta chain variable domain of TCR clone 265544 (TRBV7-8, TRBJ2-3)
CASSLEAGTDTQYF

SEQ ID NO: 531089 - protein, 14 aa, Homo sapiens
  CDR3 for alpha chain variable domain of TCR clone 265545 (TRAV2, TRAJ9)
CAVEDRSGGFKTIF

SEQ ID NO: 531090 - protein, 14 aa, Homo sapiens
  CDR3 for beta chain variable domain of TCR clone 265545 (TRBV27, TRBJ1-2)
CASSLSYTDYGYTF

SEQ ID NO: 531091 - protein, 13 aa, Homo sapiens
  CDR3 for alpha chain variable domain of TCR clone 265546 (TRAV1-2, TRAJ9)
CAALNTGGFKTIF

SEQ ID NO: 531092 - protein, 16 aa, Homo sapiens
  CDR3 for beta chain variable domain of TCR clone 265546 (TRBV7-2, TRBJ2-5)
CASSLAVSGRGETQYF

SEQ ID NO: 531093 - protein, 13 aa, Homo sapiens
  CDR3 for alpha chain variable domain of TCR clone 265547 (TRAV21, TRAJ15)
CAVANQAGTALIF

SEQ ID NO: 531094 - protein, 14 aa, Homo sapiens
  CDR3 for beta chain variable domain of TCR clone 265547 (TRBV24-1, TRBJ2-2)
CVSSLGAATGELFF

SEQ ID NO: 531095 - protein, 12 aa, Homo sapiens
  CDR3 for alpha chain variable domain of TCR clone 265548 (TRAV20, TRAJ34)
CAVKDNTYKLIF

SEQ ID NO: 531096 - protein, 14 aa, Homo sapiens
  CDR3 for beta chain variable domain of TCR clone 265548 (TRBV7-9, TRBJ2-7)
CASSRPGGPYEQYF

SEQ ID NO: 531097 - protein, 12 aa, Homo sapiens
  CDR3 for alpha chain variable domain of TCR clone 265549 (TRAV27, TRAJ35)
CAGADFGNVLHC

SEQ ID NO: 531098 - protein, 14 aa, Homo sapiens
  CDR3 for beta chain variable domain of TCR clone 265549 (TRBV25-1, TRBJ1-1)
CASTHLGGNTEAFF

SEQ ID NO: 531099 - protein, 14 aa, Homo sapiens
  CDR3 for alpha chain variable domain of TCR clone 265550 (TRAV8-3, TRAJ39)
CAVGANNAGNMLNF

SEQ ID NO: 531100 - protein, 16 aa, Homo sapiens
  CDR3 for beta chain variable domain of TCR clone 265550 (TRBV6-1, TRBJ2-5)
CASSETLYRGAETQYF

SEQ ID NO: 531101 - protein, 12 aa, Homo sapiens
  CDR3 for alpha chain variable domain of TCR clone 265551 (TRAV12-3, TRAJ17)
CAMTFTGNKLTF

SEQ ID NO: 531102 - protein, 15 aa, Homo sapiens
  CDR3 for beta chain variable domain of TCR clone 265551 (TRBV5-7, TRBJ2-7)
CASSPYFEGSYEQYF

SEQ ID NO: 531103 - protein, 14 aa, Homo sapiens
  CDR3 for alpha chain variable domain of TCR clone 265552 (TRAV1-2, TRAJ8)
CAVREDTGFQKLVF

SEQ ID NO: 531104 - protein, 11 aa, Homo sapiens
  CDR3 for beta chain variable domain of TCR clone 265552 (TRBV29-1, TRBJ1-4)
CSVSSGEKLIF

SEQ ID NO: 531105 - protein, 12 aa, Homo sapiens
  CDR3 for alpha chain variable domain of TCR clone 265553 (TRAV12-3, TRAJ29)
CAAREGDTPLVF

SEQ ID NO: 531106 - protein, 17 aa, Homo sapiens
  CDR3 for beta chain variable domain of TCR clone 265553 (TRBV18, TRBJ2-1)
CASSPLAAGAGDNEQFF

SEQ ID NO: 531107 - protein, 10 aa, Homo sapiens
  CDR3 for alpha chain variable domain of TCR clone 265554 (TRAV16, TRAJ22)
SAMYLRQLTF

SEQ ID NO: 531108 - protein, 15 aa, Homo sapiens
  CDR3 for beta chain variable domain of TCR clone 265554 (TRBV25-1, TRBJ1-4)
CASSPGDSTNEKLFF

SEQ ID NO: 531109 - protein, 15 aa, Homo sapiens
  CDR3 for alpha chain variable domain of TCR clone 265555 (TRAV21, TRAJ24)
CAARSSTDSWGKLQF

SEQ ID NO: 531110 - protein, 11 aa, Homo sapiens
  CDR3 for beta chain variable domain of TCR clone 265555 (TRBV12-4, TRBJ2-3)
CASTATDTQYF

SEQ ID NO: 531111 - protein, 14 aa, Homo sapiens
  CDR3 for alpha chain variable domain of TCR clone 265556 (TRAV21, TRAJ15)
CATGPNQAGTALIF

SEQ ID NO: 531112 - protein, 16 aa, Homo sapiens
  CDR3 for beta chain variable domain of TCR clone 265556 (TRBV11-2, TRBJ2-7)
CASSPTTGGVSYEQYF

SEQ ID NO: 531113 - protein, 16 aa, Homo sapiens
  CDR3 for alpha chain variable domain of TCR clone 265557 (TRAV8-2, TRAJ7)
CVVSEGPYYGNNRLAF

SEQ ID NO: 531114 - protein, 13 aa, Homo sapiens
  CDR3 for beta chain variable domain of TCR clone 265557 (TRBV9, TRBJ2-1)
CASSPSGGSEQFF

SEQ ID NO: 531115 - protein, 15 aa, Homo sapiens
  CDR3 for alpha chain variable domain of TCR clone 265558 (TRAV17, TRAJ57)
CATGPSQGGSEKLVF

SEQ ID NO: 531116 - protein, 16 aa, Homo sapiens
  CDR3 for beta chain variable domain of TCR clone 265558 (TRBV10-3, TRBJ2-7)
CAISADFADRPYEQYF

SEQ ID NO: 531117 - protein, 15 aa, Homo sapiens
  CDR3 for alpha chain variable domain of TCR clone 265559 (TRAV4, TRAJ39)
CLMGPNNNAGNMLTF

SEQ ID NO: 531118 - protein, 13 aa, Homo sapiens
  CDR3 for beta chain variable domain of TCR clone 265559 (TRBV7-3, TRBJ1-1)
CASSQDWGAEAFF

SEQ ID NO: 531119 - protein, 17 aa, Homo sapiens
  CDR3 for alpha chain variable domain of TCR clone 265560 (TRAV17, TRAJ52)
CATDRNAGGTSYGKLTF

SEQ ID NO: 531120 - protein, 16 aa, Homo sapiens
  CDR3 for beta chain variable domain of TCR clone 265560 (TRBV6-1, TRBJ2-5)
CASSETLDRGAETQHF

SEQ ID NO: 531121 - protein, 14 aa, Homo sapiens
  CDR3 for alpha chain variable domain of TCR clone 265561 (TRAV8-3, TRAJ7)
CAAIELYGNNRLAF

SEQ ID NO: 531122 - protein, 12 aa, Homo sapiens
  CDR3 for beta chain variable domain of TCR clone 265561 (TRBV11-2, TRBJ2-2)
CASSLGGGELFF

SEQ ID NO: 531123 - protein, 14 aa, Homo sapiens
  CDR3 for alpha chain variable domain of TCR clone 265562 (TRAV16, TRAJ3)
CALSQYSSASKIIF

SEQ ID NO: 531124 - protein, 22 aa, Homo sapiens
  CDR3 for beta chain variable domain of TCR clone 265562 (TRBV11-3, TRBJ2-2)
LGTRPCISVPAAQGGTPGSCFF

SEQ ID NO: 531125 - protein, 17 aa, Homo sapiens
  CDR3 for alpha chain variable domain of TCR clone 265563 (TRAV8-6, TRAJ22)
CAVRLYPSSGSARQLTF

SEQ ID NO: 531126 - protein, 17 aa, Homo sapiens
  CDR3 for beta chain variable domain of TCR clone 265563 (TRBV13, TRBJ2-3)
CASSLSRVAGGRNTQYF

SEQ ID NO: 531127 - protein, 16 aa, Homo sapiens
  CDR3 for alpha chain variable domain of TCR clone 265564 (TRAV26-1, TRAJ37)
CIYARHGSSNTGKLSF

SEQ ID NO: 531128 - protein, 16 aa, Homo sapiens
  CDR3 for beta chain variable domain of TCR clone 265564 (TRBV19, TRBJ2-4)
CATGGLAGGTKNIQYF

SEQ ID NO: 531129 - protein, 10 aa, Homo sapiens
  CDR3 for alpha chain variable domain of TCR clone 265565 (TRAV1-2, TRAJ31)
CAFFDVRLMF

SEQ ID NO: 531130 - protein, 15 aa, Homo sapiens
  CDR3 for beta chain variable domain of TCR clone 265565 (TRBV28, TRBJ2-3)
CAPTFRDWSTDTQYF

SEQ ID NO: 531131 - protein, 16 aa, Homo sapiens
  CDR3 for alpha chain variable domain of TCR clone 265566 (TRAV16, TRAJ4)
CALSRMFSGGYNKLIF

SEQ ID NO: 531132 - protein, 13 aa, Homo sapiens
  CDR3 for beta chain variable domain of TCR clone 265566 (TRBV4-1, TRBJ1-1)
CASSLRGPTEAFF

SEQ ID NO: 531133 - protein, 13 aa, Homo sapiens
  CDR3 for alpha chain variable domain of TCR clone 265567 (TRAV2, TRAJ40)
CAVVTPGTYKYIF

SEQ ID NO: 531134 - protein, 14 aa, Homo sapiens
  CDR3 for beta chain variable domain of TCR clone 265567 (TRBV19, TRBJ2-1)
CASPTFVLSSEQFF

SEQ ID NO: 531135 - protein, 12 aa, Homo sapiens
  CDR3 for alpha chain variable domain of TCR clone 265568 (TRAV8-3, TRAJ13)
CAVGAGYQKVTF

SEQ ID NO: 531136 - protein, 17 aa, Homo sapiens
  CDR3 for beta chain variable domain of TCR clone 265568 (TRBV10-3, TRBJ2-4)
CTSVPSVNKGSKNIQYF

SEQ ID NO: 531137 - protein, 14 aa, Homo sapiens
  CDR3 for alpha chain variable domain of TCR clone 265569 (TRAV12-3, TRAJ53)
CAMRSGGSNYKLTF

SEQ ID NO: 531138 - protein, 14 aa, Homo sapiens
  CDR3 for beta chain variable domain of TCR clone 265569 (TRBV18, TRBJ2-7)
CASSPPAGAPEQYV

SEQ ID NO: 531139 - protein, 12 aa, Homo sapiens
  CDR3 for alpha chain variable domain of TCR clone 265570 (TRAV12-1, TRAJ31)
CVSWNNNARLMF

SEQ ID NO: 531140 - protein, 15 aa, Homo sapiens
  CDR3 for beta chain variable domain of TCR clone 265570 (TRBV7-2, TRBJ1-5)
CASSLDRGQDHPQHF

SEQ ID NO: 531141 - protein, 14 aa, Homo sapiens
  CDR3 for alpha chain variable domain of TCR clone 265571 (TRAV13-1, TRAJ6)
CAASITGGRYIPTF

SEQ ID NO: 531142 - protein, 14 aa, Homo sapiens
  CDR3 for beta chain variable domain of TCR clone 265571 (TRBV6-3, TRBJ2-1)
CASLHSAYYNEQFF

SEQ ID NO: 531143 - protein, 18 aa, Homo sapiens
  CDR3 for alpha chain variable domain of TCR clone 265572 (TRAV13-1, TRAJ52)
CAASKRSAGGTSYGKLTF

SEQ ID NO: 531144 - protein, 13 aa, Homo sapiens
  CDR3 for beta chain variable domain of TCR clone 265572 (TRBV12-4, TRBJ1-2)
FASSLRQGKGYTF

SEQ ID NO: 531145 - protein, 14 aa, Homo sapiens
  CDR3 for alpha chain variable domain of TCR clone 265573 (TRAV1-2, TRAJ8)
CAVREDTGFQKLVF

SEQ ID NO: 531146 - protein, 18 aa, Homo sapiens
  CDR3 for beta chain variable domain of TCR clone 265573 (TRBV11-2, TRBJ2-7)
CASSWRTVQTGQSYEQYF

SEQ ID NO: 531147 - protein, 15 aa, Homo sapiens
  CDR3 for alpha chain variable domain of TCR clone 265574 (TRAV2, TRAJ9)
CAVEDRGTGGSKTIF

SEQ ID NO: 531148 - protein, 14 aa, Homo sapiens
  CDR3 for beta chain variable domain of TCR clone 265574 (TRBV4-2, TRBJ1-2)
CASSPGGSNYGYTF

SEQ ID NO: 531149 - protein, 12 aa, Homo sapiens
  CDR3 for alpha chain variable domain of TCR clone 265575 (TRAV12-1, TRAJ40)
CVFYSGTYKYIF

SEQ ID NO: 531150 - protein, 14 aa, Homo sapiens
  CDR3 for beta chain variable domain of TCR clone 265575 (TRBV11-2, TRBJ2-3)
CASSRLARTDTQYF

SEQ ID NO: 531151 - protein, 13 aa, Homo sapiens
  CDR3 for alpha chain variable domain of TCR clone 265576 (TRAV12-2, TRAJ11)
CAVPNSGYSTLTF

SEQ ID NO: 531152 - protein, 14 aa, Homo sapiens
  CDR3 for beta chain variable domain of TCR clone 265576 (TRBV19, TRBJ2-1)
CASPTFVLSGEQFF

SEQ ID NO: 531153 - protein, 15 aa, Homo sapiens
  CDR3 for alpha chain variable domain of TCR clone 265577 (TRAV38-1, TRAJ37)
CAFIFGSGNTGNLIF

SEQ ID NO: 531154 - protein, 13 aa, Homo sapiens
  CDR3 for beta chain variable domain of TCR clone 265577 (TRBV11-2, TRBJ2-5)
CASSSTGEETQYF

SEQ ID NO: 531155 - protein, 12 aa, Homo sapiens
  CDR3 for alpha chain variable domain of TCR clone 265578 (TRAV29/DV5, TRAJ49)
CAATDTGNQFYF

SEQ ID NO: 531156 - protein, 13 aa, Homo sapiens
  CDR3 for beta chain variable domain of TCR clone 265578 (TRBV11-2, TRBJ2-7)
CASSPLGSYEQYF

SEQ ID NO: 531157 - protein, 16 aa, Homo sapiens
  CDR3 for alpha chain variable domain of TCR clone 265579 (TRAV3, TRAJ37)
CAVRVRGSGNTGKLIF

SEQ ID NO: 531158 - protein, 11 aa, Homo sapiens
  CDR3 for beta chain variable domain of TCR clone 265579 (TRBV11-2, TRBJ2-2)
CASSLPGEQFF

SEQ ID NO: 531159 - protein, 16 aa, Homo sapiens
  CDR3 for alpha chain variable domain of TCR clone 265580 (TRAV3, TRAJ21)
CAVRDIERGNFSKFYF

SEQ ID NO: 531160 - protein, 18 aa, Homo sapiens
  CDR3 for beta chain variable domain of TCR clone 265580 (TRBV25-1, TRBJ1-2)
CASSGLQNGQGLIFGYTF

SEQ ID NO: 531161 - protein, 17 aa, Homo sapiens
  CDR3 for alpha chain variable domain of TCR clone 265581 (TRAV35, TRAJ38)
CAGQLQRNAGNNRKLIW

SEQ ID NO: 531162 - protein, 13 aa, Homo sapiens
  CDR3 for beta chain variable domain of TCR clone 265581 (TRBV15, TRBJ1-6)
CATSGGLNSPLHF

SEQ ID NO: 531163 - protein, 12 aa, Homo sapiens
  CDR3 for alpha chain variable domain of TCR clone 265582 (TRAV13-1, TRAJ21)
CAAKEGFNKFYF

SEQ ID NO: 531164 - protein, 14 aa, Homo sapiens
  CDR3 for beta chain variable domain of TCR clone 265582 (TRBV5-1, TRBJ2-7)
CASSRGESLNEQYF

SEQ ID NO: 531165 - protein, 12 aa, Homo sapiens
  CDR3 for alpha chain variable domain of TCR clone 265583 (TRAV12-2, TRAJ10)
WGVTGGGNKLTF

SEQ ID NO: 531166 - protein, 19 aa, Homo sapiens
  CDR3 for beta chain variable domain of TCR clone 265583 (TRBV7-2, TRBJ2-3)
CASSFLSRNWGGGTDTQYF

SEQ ID NO: 531167 - protein, 15 aa, Homo sapiens
  CDR3 for alpha chain variable domain of TCR clone 265584 (TRAV38-2/DV8, TRAJ47)
CAYRSAKGYGNKLVF

SEQ ID NO: 531168 - protein, 13 aa, Homo sapiens
  CDR3 for beta chain variable domain of TCR clone 265584 (TRBV7-2, TRBJ2-2)
CASSLAVTGELFF

SEQ ID NO: 531169 - protein, 16 aa, Homo sapiens
  CDR3 for alpha chain variable domain of TCR clone 265585 (TRAV23/DV6, TRAJ9)
CAASIGVNTGGFKTIF

SEQ ID NO: 531170 - protein, 14 aa, Homo sapiens
  CDR3 for beta chain variable domain of TCR clone 265585 (TRBV9, TRBJ2-7)
CASSVGVSSYGQYF

SEQ ID NO: 531171 - protein, 10 aa, Homo sapiens
  CDR3 for alpha chain variable domain of TCR clone 265586 (TRAV13-1, TRAJ8)
CAAPFQNLVF

SEQ ID NO: 531172 - protein, 14 aa, Homo sapiens
  CDR3 for beta chain variable domain of TCR clone 265586 (TRBV18, TRBJ2-5)
CASSPGVSQETQYF

SEQ ID NO: 531173 - protein, 14 aa, Homo sapiens
  CDR3 for alpha chain variable domain of TCR clone 265587 (TRAV1-2, TRAJ16)
CAVNRFSDGKKLLF

SEQ ID NO: 531174 - protein, 15 aa, Homo sapiens
  CDR3 for beta chain variable domain of TCR clone 265587 (TRBV5-1, TRBJ2-2)
CASSSQGGNTGELFF

SEQ ID NO: 531175 - protein, 13 aa, Homo sapiens
  CDR3 for alpha chain variable domain of TCR clone 265588 (TRAV27, TRAJ49)
CAPRPYTGNQFYF

SEQ ID NO: 531176 - protein, 15 aa, Homo sapiens
  CDR3 for beta chain variable domain of TCR clone 265588 (TRBV6-4, TRBJ2-1)
CASSDSTGGYNEQFF

SEQ ID NO: 531177 - protein, 12 aa, Homo sapiens
  CDR3 for alpha chain variable domain of TCR clone 265589 (TRAV21, TRAJ33)
CAKMDSNYQLIW

SEQ ID NO: 531178 - protein, 14 aa, Homo sapiens
  CDR3 for beta chain variable domain of TCR clone 265589 (TRBV2, TRBJ2-7)
CASSLTVGGYEQYF

SEQ ID NO: 531179 - protein, 15 aa, Homo sapiens
  CDR3 for alpha chain variable domain of TCR clone 265590 (TRAV4, TRAJ39)
CLVGPNNNAGNMLTF

SEQ ID NO: 531180 - protein, 14 aa, Homo sapiens
  CDR3 for beta chain variable domain of TCR clone 265590 (TRBV19, TRBJ2-7)
CASSMGQGAIEQYF

SEQ ID NO: 531181 - protein, 10 aa, Homo sapiens
  CDR3 for alpha chain variable domain of TCR clone 265591 (TRAV30, TRAJ48)
CGIGNEKLTF

SEQ ID NO: 531182 - protein, 14 aa, Homo sapiens
  CDR3 for beta chain variable domain of TCR clone 265591 (TRBV7-6, TRBJ2-3)
CASSIAGGTDTQYF

SEQ ID NO: 531183 - protein, 13 aa, Homo sapiens
  CDR3 for alpha chain variable domain of TCR clone 265592 (TRAV21, TRAJ45)
CAAPGGGADGLTF

SEQ ID NO: 531184 - protein, 14 aa, Homo sapiens
  CDR3 for beta chain variable domain of TCR clone 265592 (TRBV9, TRBJ2-1)
CASSVDPRGKEQFF

SEQ ID NO: 531185 - protein, 16 aa, Homo sapiens
  CDR3 for alpha chain variable domain of TCR clone 265593 (TRAV12-1, TRAJ52)
CVVPPAGGTSYGKLTF

SEQ ID NO: 531186 - protein, 14 aa, Homo sapiens
  CDR3 for beta chain variable domain of TCR clone 265593 (TRBV11-2, TRBJ2-5)
CASSRTGGIETQYF

SEQ ID NO: 531187 - protein, 15 aa, Homo sapiens
  CDR3 for alpha chain variable domain of TCR clone 265594 (TRAV25, TRAJ23)
CAGVPIYNQGGKLIF

SEQ ID NO: 531188 - protein, 14 aa, Homo sapiens
  CDR3 for beta chain variable domain of TCR clone 265594 (TRBV19, TRBJ1-4)
CASAIEAEGENLFF

SEQ ID NO: 531189 - protein, 10 aa, Homo sapiens
  CDR3 for alpha chain variable domain of TCR clone 265595 (TRAV12-2, TRAJ52)
RSTSYGKLTF

SEQ ID NO: 531190 - protein, 17 aa, Homo sapiens
  CDR3 for beta chain variable domain of TCR clone 265595 (TRBV10-3, TRBJ2-4)
CTSVPSVNKGSKNIQYF

SEQ ID NO: 531191 - protein, 13 aa, Homo sapiens
  CDR3 for alpha chain variable domain of TCR clone 265596 (TRAV8-3, TRAJ44)
CAVVPGTASKLTF

SEQ ID NO: 531192 - protein, 14 aa, Homo sapiens
  CDR3 for beta chain variable domain of TCR clone 265596 (TRBV11-2, TRBJ2-3)
CASSRPARTDTQHF

SEQ ID NO: 531193 - protein, 12 aa, Homo sapiens
  CDR3 for alpha chain variable domain of TCR clone 265597 (TRAV26-2, TRAJ21)
CILKGNFNKFYF

SEQ ID NO: 531194 - protein, 14 aa, Homo sapiens
  CDR3 for beta chain variable domain of TCR clone 265597 (TRBV7-9, TRBJ1-1)
CASTPLQSYNEAFF

SEQ ID NO: 531195 - protein, 14 aa, Homo sapiens
  CDR3 for alpha chain variable domain of TCR clone 265598 (TRAV29/DV5, TRAJ36)
CAARRKTGANNLFF

SEQ ID NO: 531196 - protein, 15 aa, Homo sapiens
  CDR3 for beta chain variable domain of TCR clone 265598 (TRBV5-1, TRBJ1-5)
CASSLLGGRNQHQHF

SEQ ID NO: 531197 - protein, 14 aa, Homo sapiens
  CDR3 for alpha chain variable domain of TCR clone 265599 (TRAV9-2, TRAJ24)
CALNPRGSWGKLQF

SEQ ID NO: 531198 - protein, 15 aa, Homo sapiens
  CDR3 for beta chain variable domain of TCR clone 265599 (TRBV7-2, TRBJ2-3)
CASSTTGLETDTQYF

SEQ ID NO: 531199 - protein, 11 aa, Homo sapiens
  CDR3 for alpha chain variable domain of TCR clone 265600 (TRAV35, TRAJ30)
CAGERDDKIIF

SEQ ID NO: 531200 - protein, 13 aa, Homo sapiens
  CDR3 for beta chain variable domain of TCR clone 265600 (TRBV12-5, TRBJ2-3)
CASGDRQSDTQYF

SEQ ID NO: 531201 - protein, 17 aa, Homo sapiens
  CDR3 for alpha chain variable domain of TCR clone 265601 (TRAV1-2, TRAJ8)
CAVRDPDENTGFQKLVF

SEQ ID NO: 531202 - protein, 11 aa, Homo sapiens
  CDR3 for beta chain variable domain of TCR clone 265601 (TRBV7-9, TRBJ2-2)
CASSGFWGANT

SEQ ID NO: 531203 - protein, 13 aa, Homo sapiens
  CDR3 for alpha chain variable domain of TCR clone 265602 (TRAV14/DV4, TRAJ4)
CAMKAGGYNKLIF

SEQ ID NO: 531204 - protein, 15 aa, Homo sapiens
  CDR3 for beta chain variable domain of TCR clone 265602 (TRBV9, TRBJ1-6)
CASSVAGTGDSALHF

SEQ ID NO: 531205 - protein, 15 aa, Homo sapiens
  CDR3 for alpha chain variable domain of TCR clone 265603 (TRAV27, TRAJ50)
CAGVWRGTSYDKVIF

SEQ ID NO: 531206 - protein, 14 aa, Homo sapiens
  CDR3 for beta chain variable domain of TCR clone 265603 (TRBV7-2, TRBJ1-1)
CASSFYDLNTEAFF

SEQ ID NO: 531207 - protein, 14 aa, Homo sapiens
  CDR3 for alpha chain variable domain of TCR clone 265604 (TRAV1-2, TRAJ8)
CAVREDKGFQKLVF

SEQ ID NO: 531208 - protein, 13 aa, Homo sapiens
  CDR3 for beta chain variable domain of TCR clone 265604 (TRBV12-4, TRBJ2-5)
CASSPGTEETQYF

SEQ ID NO: 531209 - protein, 12 aa, Homo sapiens
  CDR3 for alpha chain variable domain of TCR clone 265605 (TRAV13-2, TRAJ23)
CAERHRGGKLIF

SEQ ID NO: 531210 - protein, 11 aa, Homo sapiens
  CDR3 for beta chain variable domain of TCR clone 265605 (TRBV12-4, TRBJ2-2)
CASSSAGELFF

SEQ ID NO: 531211 - protein, 15 aa, Homo sapiens
  CDR3 for alpha chain variable domain of TCR clone 265606 (TRAV3, TRAJ4)
CAVRDGTGGYNELIF

SEQ ID NO: 531212 - protein, 16 aa, Homo sapiens
  CDR3 for beta chain variable domain of TCR clone 265606 (TRBV27, TRBJ2-2)
CASSSSGVSNTGELFF

SEQ ID NO: 531213 - protein, 21 aa, Homo sapiens
  CDR3 for alpha chain variable domain of TCR clone 265607 (TRAV12-1, TRAJ37)
CVVNGGLWQHRQTNLWARDNF

SEQ ID NO: 531214 - protein, 16 aa, Homo sapiens
  CDR3 for beta chain variable domain of TCR clone 265607 (TRBV27, TRBJ2-1)
CASSLTTSGLFDEQFF

SEQ ID NO: 531215 - protein, 17 aa, Homo sapiens
  CDR3 for alpha chain variable domain of TCR clone 265608 (TRAV3, TRAJ6)
CAVRDGPRSGGSYIPTF

SEQ ID NO: 531216 - protein, 13 aa, Homo sapiens
  CDR3 for beta chain variable domain of TCR clone 265608 (TRBV15, TRBJ2-7)
CATSTTGHYEQYF

SEQ ID NO: 531217 - protein, 14 aa, Homo sapiens
  CDR3 for alpha chain variable domain of TCR clone 265609 (TRAV13-1, TRAJ16)
CAAAYFFRWPEAAL

SEQ ID NO: 531218 - protein, 15 aa, Homo sapiens
  CDR3 for beta chain variable domain of TCR clone 265609 (TRBV10-1, TRBJ2-3)
CASSATSGGFDTQYF

SEQ ID NO: 531219 - protein, 17 aa, Homo sapiens
  CDR3 for alpha chain variable domain of TCR clone 265610 (TRAV8-4, TRAJ11)
FAVSDRGENSGYSTLTF

SEQ ID NO: 531220 - protein, 14 aa, Homo sapiens
  CDR3 for beta chain variable domain of TCR clone 265610 (TRBV20-1, TRBJ2-1)
CSPNDEASYNEQFF

SEQ ID NO: 531221 - protein, 11 aa, Homo sapiens
  CDR3 for alpha chain variable domain of TCR clone 265611 (TRAV2, TRAJ13)
CASGGYQKVTF

SEQ ID NO: 531222 - protein, 15 aa, Homo sapiens
  CDR3 for beta chain variable domain of TCR clone 265611 (TRBV20-1, TRBJ1-1)
CSASWDRFLNTEAFF

SEQ ID NO: 531223 - protein, 13 aa, Homo sapiens
  CDR3 for alpha chain variable domain of TCR clone 265612 (TRAV8-3, TRAJ44)
CAVVPGTASKLTF

SEQ ID NO: 531224 - protein, 14 aa, Homo sapiens
  CDR3 for beta chain variable domain of TCR clone 265612 (TRBV12-5, TRBJ2-5)
CASGSRTHQETQYF

SEQ ID NO: 531225 - protein, 14 aa, Homo sapiens
  CDR3 for alpha chain variable domain of TCR clone 265613 (TRAV23/DV6, TRAJ37)
CAASTSSNTGKLIF

SEQ ID NO: 531226 - protein, 13 aa, Homo sapiens
  CDR3 for beta chain variable domain of TCR clone 265613 (TRBV7-7, TRBJ1-1)
CASSLGANTEALF

SEQ ID NO: 531227 - protein, 15 aa, Homo sapiens
  CDR3 for alpha chain variable domain of TCR clone 265614 (TRAV20, TRAJ39)
CAVQALLVAGNMLTF

SEQ ID NO: 531228 - protein, 14 aa, Homo sapiens
  CDR3 for beta chain variable domain of TCR clone 265614 (TRBV19, TRBJ2-1)
CASPTFVLSGEQFF

SEQ ID NO: 531229 - protein, 14 aa, Homo sapiens
  CDR3 for alpha chain variable domain of TCR clone 265615 (TRAV29/DV5, TRAJ36)
CAARRKTGANNLFF

SEQ ID NO: 531230 - protein, 14 aa, Homo sapiens
  CDR3 for beta chain variable domain of TCR clone 265615 (TRBV19, TRBJ2-1)
CASTTFVLSGEQFF

SEQ ID NO: 531231 - protein, 11 aa, Homo sapiens
  CDR3 for alpha chain variable domain of TCR clone 265616 (TRAV3, TRAJ21)
RSVGNFNKLYF

SEQ ID NO: 531232 - protein, 16 aa, Homo sapiens
  CDR3 for beta chain variable domain of TCR clone 265616 (TRBV19, TRBJ2-1)
CASSKAGPSSYNEQFF

SEQ ID NO: 531233 - protein, 16 aa, Homo sapiens
  CDR3 for alpha chain variable domain of TCR clone 265617 (TRAV27, TRAJ52)
CAGAPAGGTSYGKLTF

SEQ ID NO: 531234 - protein, 12 aa, Homo sapiens
  CDR3 for beta chain variable domain of TCR clone 265617 (TRBV27, TRBJ2-1)
CANRGFYNEQFF

SEQ ID NO: 531235 - protein, 12 aa, Homo sapiens
  CDR3 for alpha chain variable domain of TCR clone 265618 (TRAV21, TRAJ3)
CCFDSSASKIIF

SEQ ID NO: 531236 - protein, 16 aa, Homo sapiens
  CDR3 for beta chain variable domain of TCR clone 265618 (TRBV19, TRBJ2-1)
CASSKAGPSSYNEQFF

SEQ ID NO: 531237 - protein, 16 aa, Homo sapiens
  CDR3 for alpha chain variable domain of TCR clone 265619 (TRAV21, TRAJ52)
CAVNNAGGTNYGKLTF

SEQ ID NO: 531238 - protein, 13 aa, Homo sapiens
  CDR3 for beta chain variable domain of TCR clone 265619 (TRBV7-3, TRBJ2-3)
CASSLRGSQTQYF

SEQ ID NO: 531239 - protein, 13 aa, Homo sapiens
  CDR3 for alpha chain variable domain of TCR clone 265620 (TRAV13-1, TRAJ6)
CARGSGGSYVPTF

SEQ ID NO: 531240 - protein, 17 aa, Homo sapiens
  CDR3 for beta chain variable domain of TCR clone 265620 (TRBV7-8, TRBJ2-1)
CASSPPTGTLAYNEQFF

SEQ ID NO: 531241 - protein, 14 aa, Homo sapiens
  CDR3 for alpha chain variable domain of TCR clone 265621 (TRAV8-1, TRAJ5)
CAVRTDTGRRALTF

SEQ ID NO: 531242 - protein, 14 aa, Homo sapiens
  CDR3 for beta chain variable domain of TCR clone 265621 (TRBV19, TRBJ2-1)
CASPTYVLSGEQFF

SEQ ID NO: 531243 - protein, 11 aa, Homo sapiens
  CDR3 for alpha chain variable domain of TCR clone 265622 (TRAV16, TRAJ31)
CALFNNARLMF

SEQ ID NO: 531244 - protein, 12 aa, Homo sapiens
  CDR3 for beta chain variable domain of TCR clone 265622 (TRBV5-7, TRBJ1-2)
CASSDRIHGYTF

SEQ ID NO: 531245 - protein, 11 aa, Homo sapiens
  CDR3 for alpha chain variable domain of TCR clone 265623 (TRAV3, TRAJ21)
CAVGNFNKFYF

SEQ ID NO: 531246 - protein, 16 aa, Homo sapiens
  CDR3 for beta chain variable domain of TCR clone 265623 (TRBV5-4, TRBJ2-3)
CASQQPGAGGADTQYF

SEQ ID NO: 531247 - protein, 13 aa, Homo sapiens
  CDR3 for alpha chain variable domain of TCR clone 265624 (TRAV38-2/DV8, TRAJ34)
CAYRNYDPDKLIF

SEQ ID NO: 531248 - protein, 17 aa, Homo sapiens
  CDR3 for beta chain variable domain of TCR clone 265624 (TRBV13, TRBJ2-3)
CASSLSRVAGGRNTQYF

SEQ ID NO: 531249 - protein, 15 aa, Homo sapiens
  CDR3 for alpha chain variable domain of TCR clone 265625 (TRAV26-1, TRAJ28)
CIVRVAGAVSYQLTF

SEQ ID NO: 531250 - protein, 19 aa, Homo sapiens
  CDR3 for beta chain variable domain of TCR clone 265625 (TRBV7-3, TRBJ2-7)
CASSLTGVAGGWPSYEQYF

SEQ ID NO: 531251 - protein, 16 aa, Homo sapiens
  CDR3 for alpha chain variable domain of TCR clone 265626 (TRAV12-2, TRAJ6)
CGAPLAGSGGSYIPTF

SEQ ID NO: 531252 - protein, 10 aa, Homo sapiens
  CDR3 for beta chain variable domain of TCR clone 265626 (TRBV28, TRBJ1-2)
CASSSDRAVF

SEQ ID NO: 531253 - protein, 14 aa, Homo sapiens
  CDR3 for alpha chain variable domain of TCR clone 265627 (TRAV12-2, TRAJ4)
CAEDLSGGYNKRIF

SEQ ID NO: 531254 - protein, 13 aa, Homo sapiens
  CDR3 for beta chain variable domain of TCR clone 265627 (TRBV7-9, TRBJ1-2)
CASSLKQNYGYTF

SEQ ID NO: 531255 - protein, 15 aa, Homo sapiens
  CDR3 for alpha chain variable domain of TCR clone 265628 (TRAV21, TRAJ53)
CATLNSGGSNYKLTC

SEQ ID NO: 531256 - protein, 16 aa, Homo sapiens
  CDR3 for beta chain variable domain of TCR clone 265628 (TRBV12-4, TRBJ1-5)
CASSRPVGGSNQPQHF

SEQ ID NO: 531257 - protein, 13 aa, Homo sapiens
  CDR3 for alpha chain variable domain of TCR clone 265629 (TRAV4, TRAJ20)
CLVGNPNDYKLSF

SEQ ID NO: 531258 - protein, 20 aa, Homo sapiens
  CDR3 for beta chain variable domain of TCR clone 265629 (TRBV28, TRBJ2-1)
CASTPIGRSPGLAGGNEQFF

SEQ ID NO: 531259 - protein, 15 aa, Homo sapiens
  CDR3 for alpha chain variable domain of TCR clone 265630 (TRAV34, TRAJ38)
CGADFTPGNNRKLIW

SEQ ID NO: 531260 - protein, 16 aa, Homo sapiens
  CDR3 for beta chain variable domain of TCR clone 265630 (TRBV27, TRBJ2-7)
CASSLGSGTGPYEQYF

SEQ ID NO: 531261 - protein, 11 aa, Homo sapiens
  CDR3 for alpha chain variable domain of TCR clone 265631 (TRAV2, TRAJ33)
CAVDSNYQLIW

SEQ ID NO: 531262 - protein, 12 aa, Homo sapiens
  CDR3 for beta chain variable domain of TCR clone 265631 (TRBV19, TRBJ1-5)
CASSIAQQPQHF

SEQ ID NO: 531263 - protein, 17 aa, Homo sapiens
  CDR3 for alpha chain variable domain of TCR clone 265632 (TRAV26-1, TRAJ53)
CIVRVDDSGGRNYKLTF

SEQ ID NO: 531264 - protein, 15 aa, Homo sapiens
  CDR3 for beta chain variable domain of TCR clone 265632 (TRBV20-1, TRBJ2-7)
CSARVPAPYFYEHYF

SEQ ID NO: 531265 - protein, 14 aa, Homo sapiens
  CDR3 for alpha chain variable domain of TCR clone 265633 (TRAV27, )
CADIQNPDPAVYQL

SEQ ID NO: 531266 - protein, 13 aa, Homo sapiens
  CDR3 for beta chain variable domain of TCR clone 265633 (TRBV28, TRBJ2-5)
CASSSRNQETQCF

SEQ ID NO: 531267 - protein, 14 aa, Homo sapiens
  CDR3 for alpha chain variable domain of TCR clone 265634 (TRAV38-1, TRAJ40)
CALRPTSGTYKNIF

SEQ ID NO: 531268 - protein, 14 aa, Homo sapiens
  CDR3 for beta chain variable domain of TCR clone 265634 (TRBV25-1, TRBJ1-1)
CASTHLGRNTEAFF

SEQ ID NO: 531269 - protein, 17 aa, Homo sapiens
  CDR3 for alpha chain variable domain of TCR clone 265635 (TRAV3, TRAJ6)
CAVRDDPRAGGSYIPKF

SEQ ID NO: 531270 - protein, 14 aa, Homo sapiens
  CDR3 for beta chain variable domain of TCR clone 265635 (TRBV7-2, TRBJ2-7)
CASSPKTSFYEQYF

SEQ ID NO: 531271 - protein, 12 aa, Homo sapiens
  CDR3 for alpha chain variable domain of TCR clone 265636 (TRAV21, TRAJ13)
PGPSGGYQKVTF

SEQ ID NO: 531272 - protein, 14 aa, Homo sapiens
  CDR3 for beta chain variable domain of TCR clone 265636 (TRBV19, TRBJ2-5)
CASSMTGQQETQYF

SEQ ID NO: 531273 - protein, 16 aa, Homo sapiens
  CDR3 for alpha chain variable domain of TCR clone 265637 (TRAV12-2, TRAJ32)
CAVNLGQGGATNKLIF

SEQ ID NO: 531274 - protein, 12 aa, Homo sapiens
  CDR3 for beta chain variable domain of TCR clone 265637 (TRBV29-1, TRBJ2-3)
SSVTGGADTQYF

SEQ ID NO: 531275 - protein, 13 aa, Homo sapiens
  CDR3 for alpha chain variable domain of TCR clone 265638 (TRAV8-4, TRAJ29)
CSVSATGNTPLVF

SEQ ID NO: 531276 - protein, 15 aa, Homo sapiens
  CDR3 for beta chain variable domain of TCR clone 265638 (TRBV19, TRBJ1-2)
CASSVGQVLNYGYTF

SEQ ID NO: 531277 - protein, 13 aa, Homo sapiens
  CDR3 for alpha chain variable domain of TCR clone 265639 (TRAV21, TRAJ15)
CAVADQAGTALIF

SEQ ID NO: 531278 - protein, 14 aa, Homo sapiens
  CDR3 for beta chain variable domain of TCR clone 265639 (TRBV27, TRBJ2-2)
CASSLGAATGELFF

SEQ ID NO: 531279 - protein, 14 aa, Homo sapiens
  CDR3 for alpha chain variable domain of TCR clone 265640 (TRAV8-3, TRAJ9)
CAVVYNTGGFKTIF

SEQ ID NO: 531280 - protein, 16 aa, Homo sapiens
  CDR3 for beta chain variable domain of TCR clone 265640 (TRBV7-3, TRBJ2-2)
CASSLKRGTLPGELFF

SEQ ID NO: 531281 - protein, 14 aa, Homo sapiens
  CDR3 for alpha chain variable domain of TCR clone 265641 (TRAV38-1, TRAJ45)
CASHSGGGADGHTF

SEQ ID NO: 531282 - protein, 13 aa, Homo sapiens
  CDR3 for beta chain variable domain of TCR clone 265641 (TRBV7-9, TRBJ2-2)
CASSSAGTGELFF

SEQ ID NO: 531283 - protein, 15 aa, Homo sapiens
  CDR3 for alpha chain variable domain of TCR clone 265642 (TRAV27, TRAJ38)
CAARRNAANNRKLIW

SEQ ID NO: 531284 - protein, 17 aa, Homo sapiens
  CDR3 for beta chain variable domain of TCR clone 265642 (TRBV20-1, TRBJ2-2)
CSASGSGQGGLTGELFF

SEQ ID NO: 531285 - protein, 13 aa, Homo sapiens
  CDR3 for alpha chain variable domain of TCR clone 265643 (TRAV9-2, TRAJ9)
CALSKAGGFKTIF

SEQ ID NO: 531286 - protein, 12 aa, Homo sapiens
  CDR3 for beta chain variable domain of TCR clone 265643 (TRBV28, TRBJ2-6)
CAIQAGANGLTF

SEQ ID NO: 531287 - protein, 12 aa, Homo sapiens
  CDR3 for alpha chain variable domain of TCR clone 265644 (TRAV4, TRAJ5)
RTMDTGRRALTF

SEQ ID NO: 531288 - protein, 13 aa, Homo sapiens
  CDR3 for beta chain variable domain of TCR clone 265644 (TRBV4-2, TRBJ1-2)
CASSLSASGGYTF

SEQ ID NO: 531289 - protein, 13 aa, Homo sapiens
  CDR3 for alpha chain variable domain of TCR clone 265645 (TRAV21, TRAJ27)
CAARPGNAGKSTL

SEQ ID NO: 531290 - protein, 20 aa, Homo sapiens
  CDR3 for beta chain variable domain of TCR clone 265645 (TRBV4-2, TRBJ2-7)
CASSKASGGNLRAVLRAGHQ

SEQ ID NO: 531291 - protein, 15 aa, Homo sapiens
  CDR3 for alpha chain variable domain of TCR clone 265646 (TRAV25, TRAJ23)
CALAPNYNQGGKLIF

SEQ ID NO: 531292 - protein, 13 aa, Homo sapiens
  CDR3 for beta chain variable domain of TCR clone 265646 (TRBV11-3, TRBJ1-1)
CASSWDGNTEAVF

SEQ ID NO: 531293 - protein, 14 aa, Homo sapiens
  CDR3 for alpha chain variable domain of TCR clone 265647 (TRAV12-3, TRAJ15)
CAMIPPQAGTALIF

SEQ ID NO: 531294 - protein, 14 aa, Homo sapiens
  CDR3 for beta chain variable domain of TCR clone 265647 (TRBV20-1, TRBJ2-2)
CSARKRLATGELFF

SEQ ID NO: 531295 - protein, 14 aa, Homo sapiens
  CDR3 for alpha chain variable domain of TCR clone 265648 (TRAV26-1, TRAJ54)
CIVRRTQGAQKLVF

SEQ ID NO: 531296 - protein, 15 aa, Homo sapiens
  CDR3 for beta chain variable domain of TCR clone 265648 (TRBV4-1, TRBJ2-7)
CASSQQGQGFDEQYF

SEQ ID NO: 531297 - protein, 14 aa, Homo sapiens
  CDR3 for alpha chain variable domain of TCR clone 265649 (TRAV1-2, TRAJ8)
CAVREDTGFKKLVF

SEQ ID NO: 531298 - protein, 16 aa, Homo sapiens
  CDR3 for beta chain variable domain of TCR clone 265649 (TRBV5-4, TRBJ2-3)
CASQQPGAGGADTQYF

SEQ ID NO: 531299 - protein, 11 aa, Homo sapiens
  CDR3 for alpha chain variable domain of TCR clone 265650 (TRAV35, TRAJ34)
CWARNTDKLIF

SEQ ID NO: 531300 - protein, 14 aa, Homo sapiens
  CDR3 for beta chain variable domain of TCR clone 265650 (TRBV5-1, TRBJ2-7)
CASNRGESLYEQYF

SEQ ID NO: 531301 - protein, 14 aa, Homo sapiens
  CDR3 for alpha chain variable domain of TCR clone 265651 (TRAV10, TRAJ36)
CVVKYEGGANNLFF

SEQ ID NO: 531302 - protein, 16 aa, Homo sapiens
  CDR3 for beta chain variable domain of TCR clone 265651 (TRBV7-3, TRBJ2-2)
CASSFKRGTLSGELFF

SEQ ID NO: 531303 - protein, 14 aa, Homo sapiens
  CDR3 for alpha chain variable domain of TCR clone 265652 (TRAV26-1, TRAJ39)
CIVRGSRAGNMLTF

SEQ ID NO: 531304 - protein, 15 aa, Homo sapiens
  CDR3 for beta chain variable domain of TCR clone 265652 (TRBV7-9, TRBJ1-5)
CSSSQGHQPNQPQHF

SEQ ID NO: 531305 - protein, 15 aa, Homo sapiens
  CDR3 for alpha chain variable domain of TCR clone 265653 (TRAV8-3, TRAJ27)
CAMGPSKTNAGKSTF

SEQ ID NO: 531306 - protein, 14 aa, Homo sapiens
  CDR3 for beta chain variable domain of TCR clone 265653 (TRBV12-5, TRBJ2-5)
CASGSRTHQETQYF

SEQ ID NO: 531307 - protein, 11 aa, Homo sapiens
  CDR3 for alpha chain variable domain of TCR clone 265654 (TRAV2, TRAJ33)
CAVDSNYQLIW

SEQ ID NO: 531308 - protein, 13 aa, Homo sapiens
  CDR3 for beta chain variable domain of TCR clone 265654 (TRBV19, TRBJ1-3)
CASRLSLGNTIYF

SEQ ID NO: 531309 - protein, 10 aa, Homo sapiens
  CDR3 for alpha chain variable domain of TCR clone 265655 (TRAV36/DV7, TRAJ56)
CAGPVVELTF

SEQ ID NO: 531310 - protein, 13 aa, Homo sapiens
  CDR3 for beta chain variable domain of TCR clone 265655 (TRBV7-9, TRBJ2-7)
CASSFWSSYEQYF

SEQ ID NO: 531311 - protein, 12 aa, Homo sapiens
  CDR3 for alpha chain variable domain of TCR clone 265656 (TRAV13-1, TRAJ21)
CAAKEGFNKFYF

SEQ ID NO: 531312 - protein, 15 aa, Homo sapiens
  CDR3 for beta chain variable domain of TCR clone 265656 (TRBV25-1, TRBJ1-4)
CASSPGDSTDEKLFF

SEQ ID NO: 531313 - protein, 14 aa, Homo sapiens
  CDR3 for alpha chain variable domain of TCR clone 265657 (TRAV8-6, TRAJ53)
CAVTSRGSNYKLTF

SEQ ID NO: 531314 - protein, 14 aa, Homo sapiens
  CDR3 for beta chain variable domain of TCR clone 265657 (TRBV4-2, TRBJ1-4)
CASSQGATNEKLFF

SEQ ID NO: 531315 - protein, 15 aa, Homo sapiens
  CDR3 for alpha chain variable domain of TCR clone 265658 (TRAV17, TRAJ35)
CATAFVIGFGNVLHC

SEQ ID NO: 531316 - protein, 12 aa, Homo sapiens
  CDR3 for beta chain variable domain of TCR clone 265658 (TRBV11-2, TRBJ2-1)
CASSVQREGQFF

SEQ ID NO: 531317 - protein, 11 aa, Homo sapiens
  CDR3 for alpha chain variable domain of TCR clone 265659 (TRAV8-2, TRAJ26)
CVVTLLLGSEF

SEQ ID NO: 531318 - protein, 15 aa, Homo sapiens
  CDR3 for beta chain variable domain of TCR clone 265659 (TRBV11-2, TRBJ2-2)
CSSSSDRVNAGELFF

SEQ ID NO: 531319 - protein, 14 aa, Homo sapiens
  CDR3 for alpha chain variable domain of TCR clone 265660 (TRAV17, TRAJ45)
CATASGGGADGLTF

SEQ ID NO: 531320 - protein, 17 aa, Homo sapiens
  CDR3 for beta chain variable domain of TCR clone 265660 (TRBV13, TRBJ2-3)
CASSPSRVAGGRNTQYF

SEQ ID NO: 531321 - protein, 13 aa, Homo sapiens
  CDR3 for alpha chain variable domain of TCR clone 265661 (TRAV13-1, TRAJ17)
CAADGAAGNKLTF

SEQ ID NO: 531322 - protein, 14 aa, Homo sapiens
  CDR3 for beta chain variable domain of TCR clone 265661 (TRBV11-2, TRBJ1-3)
RASSLTQGRNTIYF

SEQ ID NO: 531323 - protein, 15 aa, Homo sapiens
  CDR3 for alpha chain variable domain of TCR clone 265662 (TRAV25, TRAJ10)
CAGPLLTGGGNKLTF

SEQ ID NO: 531324 - protein, 15 aa, Homo sapiens
  CDR3 for beta chain variable domain of TCR clone 265662 (TRBV12-5, TRBJ2-2)
CASGRLGGNTGEMFF

SEQ ID NO: 531325 - protein, 12 aa, Homo sapiens
  CDR3 for alpha chain variable domain of TCR clone 265663 (TRAV17, TRAJ49)
CATVTTGNQFYF

SEQ ID NO: 531326 - protein, 16 aa, Homo sapiens
  CDR3 for beta chain variable domain of TCR clone 265663 (TRBV4-1, TRBJ2-7)
CASSQEWTSGPLEQYF

SEQ ID NO: 531327 - protein, 15 aa, Homo sapiens
  CDR3 for alpha chain variable domain of TCR clone 265664 (TRAV3, TRAJ29)
CAVRDLYSGNTPLVF

SEQ ID NO: 531328 - protein, 16 aa, Homo sapiens
  CDR3 for beta chain variable domain of TCR clone 265664 (TRBV4-2, TRBJ2-3)
CASSQELAGDTDTQYF

SEQ ID NO: 531329 - protein, 17 aa, Homo sapiens
  CDR3 for alpha chain variable domain of TCR clone 265665 (TRAV3, TRAJ6)
CAVSDGPRAGGSYIPTF

SEQ ID NO: 531330 - protein, 14 aa, Homo sapiens
  CDR3 for beta chain variable domain of TCR clone 265665 (TRBV7-2, TRBJ2-7)
CASSPKTSFYKQYF

SEQ ID NO: 531331 - protein, 12 aa, Homo sapiens
  CDR3 for alpha chain variable domain of TCR clone 265666 (TRAV35, TRAJ39)
LAPNNAGNMLTF

SEQ ID NO: 531332 - protein, 16 aa, Homo sapiens
  CDR3 for beta chain variable domain of TCR clone 265666 (TRBV2, TRBJ2-3)
CASSTSVEGVPDTQYF

SEQ ID NO: 531333 - protein, 21 aa, Homo sapiens
  CDR3 for alpha chain variable domain of TCR clone 265667 (TRAV12-1, TRAJ43)
SSVIQPPTSVWGTNNNNDMHF

SEQ ID NO: 531334 - protein, 14 aa, Homo sapiens
  CDR3 for beta chain variable domain of TCR clone 265667 (TRBV7-9, TRBJ2-2)
CASSLVQDTGELFF

SEQ ID NO: 531335 - protein, 12 aa, Homo sapiens
  CDR3 for alpha chain variable domain of TCR clone 265668 (TRAV3, TRAJ20)
CAVRDPDYKLSF

SEQ ID NO: 531336 - protein, 15 aa, Homo sapiens
  CDR3 for beta chain variable domain of TCR clone 265668 (TRBV9, TRBJ1-6)
CASSVAGTGDSPLPF

SEQ ID NO: 531337 - protein, 13 aa, Homo sapiens
  CDR3 for alpha chain variable domain of TCR clone 265669 (TRAV29/DV5, TRAJ44)
CAASTGTASKLTF

SEQ ID NO: 531338 - protein, 14 aa, Homo sapiens
  CDR3 for beta chain variable domain of TCR clone 265669 (TRBV20-1, TRBJ2-1)
CSPSDEASYNEQFF

SEQ ID NO: 531339 - protein, 13 aa, Homo sapiens
  CDR3 for alpha chain variable domain of TCR clone 265670 (TRAV2, TRAJ15)
CAVEAQAGTALIF

SEQ ID NO: 531340 - protein, 12 aa, Homo sapiens
  CDR3 for beta chain variable domain of TCR clone 265670 (TRBV28, TRBJ2-3)
CASSLYRDTQYF

SEQ ID NO: 531341 - protein, 14 aa, Homo sapiens
  CDR3 for alpha chain variable domain of TCR clone 265671 (TRAV12-3, TRAJ5)
CAMTWDTGRIALTF

SEQ ID NO: 531342 - protein, 14 aa, Homo sapiens
  CDR3 for beta chain variable domain of TCR clone 265671 (TRBV10-2, TRBJ1-5)
CASSSTGRNQPQHF

SEQ ID NO: 531343 - protein, 14 aa, Homo sapiens
  CDR3 for alpha chain variable domain of TCR clone 265672 (TRAV13-1, TRAJ44)
CAAKATGTASKLTF

SEQ ID NO: 531344 - protein, 15 aa, Homo sapiens
  CDR3 for beta chain variable domain of TCR clone 265672 (TRBV27, TRBJ2-3)
CASSLGLAATDTQYF

SEQ ID NO: 531345 - protein, 12 aa, Homo sapiens
  CDR3 for alpha chain variable domain of TCR clone 265673 (TRAV1-2, TRAJ33)
CAALDSNYQLIW

SEQ ID NO: 531346 - protein, 15 aa, Homo sapiens
  CDR3 for beta chain variable domain of TCR clone 265673 (TRBV19, TRBJ1-2)
CASSVGQVLNYGYTF

SEQ ID NO: 531347 - protein, 13 aa, Homo sapiens
  CDR3 for alpha chain variable domain of TCR clone 265674 (TRAV38-2/DV8, TRAJ34)
CPYRTWNTDKLIF

SEQ ID NO: 531348 - protein, 13 aa, Homo sapiens
  CDR3 for beta chain variable domain of TCR clone 265674 (TRBV7-2, TRBJ2-2)
CASSLAVTGELFF

SEQ ID NO: 531349 - protein, 13 aa, Homo sapiens
  CDR3 for alpha chain variable domain of TCR clone 265675 (TRAV12-2, TRAJ12)
CAVNWDSSYKLIF

SEQ ID NO: 531350 - protein, 13 aa, Homo sapiens
  CDR3 for beta chain variable domain of TCR clone 265675 (TRBV7-2, TRBJ2-2)
CASSLAVTGELFF

SEQ ID NO: 531351 - protein, 15 aa, Homo sapiens
  CDR3 for alpha chain variable domain of TCR clone 265676 (TRAV17, TRAJ42)
CATDHYGGSQGNLIF

SEQ ID NO: 531352 - protein, 13 aa, Homo sapiens
  CDR3 for beta chain variable domain of TCR clone 265676 (TRBV4-2, TRBJ1-5)
CASSRQGNQPQHF

SEQ ID NO: 531353 - protein, 10 aa, Homo sapiens
  CDR3 for alpha chain variable domain of TCR clone 265677 (TRAV12-1, TRAJ20)
CVANPRKPSF

SEQ ID NO: 531354 - protein, 15 aa, Homo sapiens
  CDR3 for beta chain variable domain of TCR clone 265677 (TRBV5-1, TRBJ2-1)
CASSPPRAPYNEQFF

SEQ ID NO: 531355 - protein, 15 aa, Homo sapiens
  CDR3 for alpha chain variable domain of TCR clone 265678 (TRAV17, TRAJ35)
CATAFVIGFGNVLHC

SEQ ID NO: 531356 - protein, 16 aa, Homo sapiens
  CDR3 for beta chain variable domain of TCR clone 265678 (TRBV11-2, TRBJ2-7)
CASSTLAGGPRYEQYF

SEQ ID NO: 531357 - protein, 23 aa, Homo sapiens
  CDR3 for alpha chain variable domain of TCR clone 265679 (TRAV26-1, TRAJ38)
CIADNAGNNRIQKPDPAVYQLRD

SEQ ID NO: 531358 - protein, 17 aa, Homo sapiens
  CDR3 for beta chain variable domain of TCR clone 265679 (TRBV11-2, TRBJ2-6)
CASSQRDIFSGANVLTF

SEQ ID NO: 531359 - protein, 16 aa, Homo sapiens
  CDR3 for alpha chain variable domain of TCR clone 265680 (TRAV30, TRAJ24)
CGTELVDADSWGKFQF

SEQ ID NO: 531360 - protein, 12 aa, Homo sapiens
  CDR3 for beta chain variable domain of TCR clone 265680 (TRBV11-2, TRBJ2-1)
CASSPGNNEQFF

SEQ ID NO: 531361 - protein, 13 aa, Homo sapiens
  CDR3 for alpha chain variable domain of TCR clone 265681 (TRAV26-1, TRAJ48)
CIVRVVGDEKLTF

SEQ ID NO: 531362 - protein, 11 aa, Homo sapiens
  CDR3 for beta chain variable domain of TCR clone 265681 (TRBV20-1, TRBJ2-5)
CSADRAETQYF

SEQ ID NO: 531363 - protein, 17 aa, Homo sapiens
  CDR3 for alpha chain variable domain of TCR clone 265682 (TRAV13-1, TRAJ31)
CAPRDRLMFGDGTQLVV

SEQ ID NO: 531364 - protein, 12 aa, Homo sapiens
  CDR3 for beta chain variable domain of TCR clone 265682 (TRBV7-9, TRBJ2-7)
CASSIEGYEQYF

SEQ ID NO: 531365 - protein, 16 aa, Homo sapiens
  CDR3 for alpha chain variable domain of TCR clone 265683 (TRAV3, TRAJ6)
CAVRDGGGRRKLHTYI

SEQ ID NO: 531366 - protein, 15 aa, Homo sapiens
  CDR3 for beta chain variable domain of TCR clone 265683 (TRBV5-1, TRBJ2-7)
CASSLGDFTTYEQYF

SEQ ID NO: 531367 - protein, 14 aa, Homo sapiens
  CDR3 for alpha chain variable domain of TCR clone 265684 (TRAV25, TRAJ39)
CGRSNKNAGNMLTF

SEQ ID NO: 531368 - protein, 15 aa, Homo sapiens
  CDR3 for beta chain variable domain of TCR clone 265684 (TRBV15, TRBJ1-5)
CATSRDPVSNQPQHF

SEQ ID NO: 531369 - protein, 15 aa, Homo sapiens
  CDR3 for alpha chain variable domain of TCR clone 265685 (TRAV8-4, TRAJ37)
CAVTHGSSNTGKLIF

SEQ ID NO: 531370 - protein, 13 aa, Homo sapiens
  CDR3 for beta chain variable domain of TCR clone 265685 (TRBV12-4, TRBJ2-5)
CASSLGGSRTQYF

SEQ ID NO: 531371 - protein, 17 aa, Homo sapiens
  CDR3 for alpha chain variable domain of TCR clone 265686 (TRAV4, TRAJ18)
CLVVAAGRGSTRGRLYF

SEQ ID NO: 531372 - protein, 17 aa, Homo sapiens
  CDR3 for beta chain variable domain of TCR clone 265686 (TRBV28, TRBJ2-2)
CASSLATGMGDAGELFF

SEQ ID NO: 531373 - protein, 16 aa, Homo sapiens
  CDR3 for alpha chain variable domain of TCR clone 265687 (TRAV1-2, TRAJ10)
CAVGGVLTGGGNKLTF

SEQ ID NO: 531374 - protein, 13 aa, Homo sapiens
  CDR3 for beta chain variable domain of TCR clone 265687 (TRBV27, TRBJ1-1)
CASSLSIGAEAFF

SEQ ID NO: 531375 - protein, 14 aa, Homo sapiens
  CDR3 for alpha chain variable domain of TCR clone 265688 (TRAV12-2, TRAJ13)
CAVAGSGGYQKVTF

SEQ ID NO: 531376 - protein, 15 aa, Homo sapiens
  CDR3 for beta chain variable domain of TCR clone 265688 (TRBV19, TRBJ1-5)
CASSIVWADNQPQHF

SEQ ID NO: 531377 - protein, 13 aa, Homo sapiens
  CDR3 for alpha chain variable domain of TCR clone 265689 (TRAV1-2, TRAJ9)
CAALNTGGFKTIF

SEQ ID NO: 531378 - protein, 15 aa, Homo sapiens
  CDR3 for beta chain variable domain of TCR clone 265689 (TRBV29-1, TRBJ2-7)
CSVEFFDRGSYEQYF

SEQ ID NO: 531379 - protein, 14 aa, Homo sapiens
  CDR3 for alpha chain variable domain of TCR clone 265690 (TRAV9-2, TRAJ39)
CALYIYNAGNMLTF

SEQ ID NO: 531380 - protein, 15 aa, Homo sapiens
  CDR3 for beta chain variable domain of TCR clone 265690 (TRBV4-3, TRBJ1-1)
CASSQELGRGTEAFF

SEQ ID NO: 531381 - protein, 12 aa, Homo sapiens
  CDR3 for alpha chain variable domain of TCR clone 265691 (TRAV3, TRAJ26)
CAERDYGQNFVF

SEQ ID NO: 531382 - protein, 16 aa, Homo sapiens
  CDR3 for beta chain variable domain of TCR clone 265691 (TRBV12-5, TRBJ2-5)
CASGPRTSGNQETQYF

SEQ ID NO: 531383 - protein, 17 aa, Homo sapiens
  CDR3 for alpha chain variable domain of TCR clone 265692 (TRAV4, TRAJ13)
CPVGVQGSSGGYQKVTF

SEQ ID NO: 531384 - protein, 13 aa, Homo sapiens
  CDR3 for beta chain variable domain of TCR clone 265692 (TRBV10-3, TRBJ2-7)
CASKLAVNYEQYF

SEQ ID NO: 531385 - protein, 14 aa, Homo sapiens
  CDR3 for alpha chain variable domain of TCR clone 265693 (TRAV16, TRAJ17)
CALSGRAAGNKLTF

SEQ ID NO: 531386 - protein, 13 aa, Homo sapiens
  CDR3 for beta chain variable domain of TCR clone 265693 (TRBV4-2, TRBJ1-1)
CASSQAGNTEAFF

SEQ ID NO: 531387 - protein, 15 aa, Homo sapiens
  CDR3 for alpha chain variable domain of TCR clone 265694 (TRAV3, TRAJ3)
CAVRDRDSSASKIIF

SEQ ID NO: 531388 - protein, 13 aa, Homo sapiens
  CDR3 for beta chain variable domain of TCR clone 265694 (TRBV4-2, TRBJ1-1)
CASSQAGNTEAFF

SEQ ID NO: 531389 - protein, 11 aa, Homo sapiens
  CDR3 for alpha chain variable domain of TCR clone 265695 (TRAV1-1, TRAJ23)
CAVRQGGKLIF

SEQ ID NO: 531390 - protein, 14 aa, Homo sapiens
  CDR3 for beta chain variable domain of TCR clone 265695 (TRBV13, TRBJ2-7)
CASSLKGASYEQYF

SEQ ID NO: 531391 - protein, 15 aa, Homo sapiens
  CDR3 for alpha chain variable domain of TCR clone 265696 (TRAV3, TRAJ4)
CAVRDGTGGYNKLIF

SEQ ID NO: 531392 - protein, 16 aa, Homo sapiens
  CDR3 for beta chain variable domain of TCR clone 265696 (TRBV27, TRBJ2-2)
CASSFRGLVRTGELFF

SEQ ID NO: 531393 - protein, 13 aa, Homo sapiens
  CDR3 for alpha chain variable domain of TCR clone 265697 (TRAV6, TRAJ37)
CSHVSGNTGKLIF

SEQ ID NO: 531394 - protein, 16 aa, Homo sapiens
  CDR3 for beta chain variable domain of TCR clone 265697 (TRBV27, TRBJ2-5)
CASSLSRTAGGETQYL

SEQ ID NO: 531395 - protein, 14 aa, Homo sapiens
  CDR3 for alpha chain variable domain of TCR clone 265698 (TRAV4, TRAJ26)
CLVGPHNYGQNFVF

SEQ ID NO: 531396 - protein, 17 aa, Homo sapiens
  CDR3 for beta chain variable domain of TCR clone 265698 (TRBV24-1, TRBJ2-1)
CATSDVSTSGTYNEQFI

SEQ ID NO: 531397 - protein, 12 aa, Homo sapiens
  CDR3 for alpha chain variable domain of TCR clone 265699 (TRAV1-1, TRAJ20)
CAVREDDYKLSF

SEQ ID NO: 531398 - protein, 14 aa, Homo sapiens
  CDR3 for beta chain variable domain of TCR clone 265699 (TRBV20-1, TRBJ2-1)
CSAQIGGSANEQFF

SEQ ID NO: 531399 - protein, 12 aa, Homo sapiens
  CDR3 for alpha chain variable domain of TCR clone 265700 (TRAV23/DV6, TRAJ39)
CAALNAGNMLTF

SEQ ID NO: 531400 - protein, 14 aa, Homo sapiens
  CDR3 for beta chain variable domain of TCR clone 265700 (TRBV20-1, TRBJ2-3)
CSARGGTSTDTQYF

SEQ ID NO: 531401 - protein, 13 aa, Homo sapiens
  CDR3 for alpha chain variable domain of TCR clone 265701 (TRAV12-1, TRAJ39)
CVARSGAGNMLTF

SEQ ID NO: 531402 - protein, 14 aa, Homo sapiens
  CDR3 for beta chain variable domain of TCR clone 265701 (TRBV7-2, TRBJ2-1)
CASSLGVGYNEQFF

SEQ ID NO: 531403 - protein, 11 aa, Homo sapiens
  CDR3 for alpha chain variable domain of TCR clone 265702 (TRAV27, TRAJ20)
CAGADDYKLSF

SEQ ID NO: 531404 - protein, 17 aa, Homo sapiens
  CDR3 for beta chain variable domain of TCR clone 265702 (TRBV13, TRBJ2-3)
CASSLSRVAGGRNTQYF

SEQ ID NO: 531405 - protein, 11 aa, Homo sapiens
  CDR3 for alpha chain variable domain of TCR clone 265703 (TRAV2, TRAJ21)
CAVFNFNKFYF

SEQ ID NO: 531406 - protein, 14 aa, Homo sapiens
  CDR3 for beta chain variable domain of TCR clone 265703 (TRBV11-2, TRBJ2-3)
CASSRLARTDTQYF

SEQ ID NO: 531407 - protein, 11 aa, Homo sapiens
  CDR3 for alpha chain variable domain of TCR clone 265704 (TRAV17, TRAJ9)
CATTGGFKTIF

SEQ ID NO: 531408 - protein, 17 aa, Homo sapiens
  CDR3 for beta chain variable domain of TCR clone 265704 (TRBV28, TRBJ2-5)
CASSRQGGLAGAETQYF

SEQ ID NO: 531409 - protein, 15 aa, Homo sapiens
  CDR3 for alpha chain variable domain of TCR clone 265705 (TRAV23/DV6, TRAJ30)
CAASSQESRDVKIIF

SEQ ID NO: 531410 - protein, 17 aa, Homo sapiens
  CDR3 for beta chain variable domain of TCR clone 265705 (TRBV4-3, TRBJ2-1)
CASSHSSSGRASGEQFF

SEQ ID NO: 531411 - protein, 13 aa, Homo sapiens
  CDR3 for alpha chain variable domain of TCR clone 265706 (TRAV21, TRAJ27)
CAARPGNAGKSTF

SEQ ID NO: 531412 - protein, 17 aa, Homo sapiens
  CDR3 for beta chain variable domain of TCR clone 265706 (TRBV4-1, TRBJ1-4)
CASSREGPRGVEEKLFF

SEQ ID NO: 531413 - protein, 14 aa, Homo sapiens
  CDR3 for alpha chain variable domain of TCR clone 265707 (TRAV13-2, TRAJ10)
CAETFTGGGNKLTF

SEQ ID NO: 531414 - protein, 16 aa, Homo sapiens
  CDR3 for beta chain variable domain of TCR clone 265707 (TRBV18, TRBJ2-7)
CASSPRSQGITYEQYF

SEQ ID NO: 531415 - protein, 15 aa, Homo sapiens
  CDR3 for alpha chain variable domain of TCR clone 265708 (TRAV25, TRAJ53)
CAATGGGGSNYKLTF

SEQ ID NO: 531416 - protein, 16 aa, Homo sapiens
  CDR3 for beta chain variable domain of TCR clone 265708 (TRBV28, TRBJ1-5)
CASSFRGGYSNEPQHF

SEQ ID NO: 531417 - protein, 16 aa, Homo sapiens
  CDR3 for alpha chain variable domain of TCR clone 265709 (TRAV4, TRAJ22)
CLVGDLYSGSATQLTF

SEQ ID NO: 531418 - protein, 16 aa, Homo sapiens
  CDR3 for beta chain variable domain of TCR clone 265709 (TRBV7-9, TRBJ2-1)
CASSDVAGGSYNEQFF

SEQ ID NO: 531419 - protein, 14 aa, Homo sapiens
  CDR3 for alpha chain variable domain of TCR clone 265710 (TRAV2, TRAJ37)
CAVVFTSNTGKLIF

SEQ ID NO: 531420 - protein, 15 aa, Homo sapiens
  CDR3 for beta chain variable domain of TCR clone 265710 (TRBV20-1, TRBJ1-1)
CIASRGVTGNTEAFF

SEQ ID NO: 531421 - protein, 18 aa, Homo sapiens
  CDR3 for alpha chain variable domain of TCR clone 265711 (TRAV21, TRAJ52)
CAVRPSPAGGTSDGKLTF

SEQ ID NO: 531422 - protein, 13 aa, Homo sapiens
  CDR3 for beta chain variable domain of TCR clone 265711 (TRBV19, TRBJ1-2)
CASSVPGQDGYTF

SEQ ID NO: 531423 - protein, 15 aa, Homo sapiens
  CDR3 for alpha chain variable domain of TCR clone 265712 (TRAV8-3, TRAJ45)
CASSYSGGGADGLTF

SEQ ID NO: 531424 - protein, 12 aa, Homo sapiens
  CDR3 for beta chain variable domain of TCR clone 265712 (TRBV24-1, TRBJ2-7)
CATSDPGYEQYF

SEQ ID NO: 531425 - protein, 11 aa, Homo sapiens
  CDR3 for alpha chain variable domain of TCR clone 265713 (TRAV12-2, TRAJ29)
CAVNLRSPLVF

SEQ ID NO: 531426 - protein, 16 aa, Homo sapiens
  CDR3 for beta chain variable domain of TCR clone 265713 (TRBV29-1, TRBJ2-2)
CSVETRASGNTGELFF

SEQ ID NO: 531427 - protein, 14 aa, Homo sapiens
  CDR3 for alpha chain variable domain of TCR clone 265714 (TRAV3, TRAJ33)
CAVRDMDSNYQLIW

SEQ ID NO: 531428 - protein, 19 aa, Homo sapiens
  CDR3 for beta chain variable domain of TCR clone 265714 (TRBV7-3, TRBJ1-2)
CANSFPQGNDGELWLHLRF

SEQ ID NO: 531429 - protein, 16 aa, Homo sapiens
  CDR3 for alpha chain variable domain of TCR clone 265715 (TRAV30, TRAJ26)
CGTESVGDNYGQNFVF

SEQ ID NO: 531430 - protein, 13 aa, Homo sapiens
  CDR3 for beta chain variable domain of TCR clone 265715 (TRBV7-2, TRBJ1-2)
CASSFQDLQGYTF

SEQ ID NO: 531431 - protein, 14 aa, Homo sapiens
  CDR3 for alpha chain variable domain of TCR clone 265716 (TRAV26-1, TRAJ39)
CIVFTNNAGNMLTF

SEQ ID NO: 531432 - protein, 13 aa, Homo sapiens
  CDR3 for beta chain variable domain of TCR clone 265716 (TRBV19, TRBJ1-2)
CASSQGQVYGYTF

SEQ ID NO: 531433 - protein, 15 aa, Homo sapiens
  CDR3 for alpha chain variable domain of TCR clone 265717 (TRAV4, TRAJ36)
CLVGDRQTGANNLFF

SEQ ID NO: 531434 - protein, 15 aa, Homo sapiens
  CDR3 for beta chain variable domain of TCR clone 265717 (TRBV7-6, TRBJ2-1)
CASSSLAGGGNEQFF

SEQ ID NO: 531435 - protein, 14 aa, Homo sapiens
  CDR3 for alpha chain variable domain of TCR clone 265718 (TRAV12-3, TRAJ10)
SHLPLTGGGNKLTF

SEQ ID NO: 531436 - protein, 14 aa, Homo sapiens
  CDR3 for beta chain variable domain of TCR clone 265718 (TRBV12-4, TRBJ1-2)
CAISPPGPGGGYTF

SEQ ID NO: 531437 - protein, 13 aa, Homo sapiens
  CDR3 for alpha chain variable domain of TCR clone 265719 (TRAV23/DV6, TRAJ47)
CAASMTRGNKLVF

SEQ ID NO: 531438 - protein, 13 aa, Homo sapiens
  CDR3 for beta chain variable domain of TCR clone 265719 (TRBV9, TRBJ2-2)
CASSTFSSVELFF

SEQ ID NO: 531439 - protein, 12 aa, Homo sapiens
  CDR3 for alpha chain variable domain of TCR clone 265720 (TRAV38-1, TRAJ20)
CSFIWNDYKLSF

SEQ ID NO: 531440 - protein, 14 aa, Homo sapiens
  CDR3 for beta chain variable domain of TCR clone 265720 (TRBV27, TRBJ1-1)
CASSPQGKRAEAFF

SEQ ID NO: 531441 - protein, 11 aa, Homo sapiens
  CDR3 for alpha chain variable domain of TCR clone 265721 (TRAV1-2, TRAJ20)
CAVVNDYKLSF

SEQ ID NO: 531442 - protein, 17 aa, Homo sapiens
  CDR3 for beta chain variable domain of TCR clone 265721 (TRBV7-8, TRBJ2-6)
CASSAGTGGAGANVLTF

SEQ ID NO: 531443 - protein, 10 aa, Homo sapiens
  CDR3 for alpha chain variable domain of TCR clone 265722 (TRAV13-1, TRAJ27)
CAPLARQINI

SEQ ID NO: 531444 - protein, 13 aa, Homo sapiens
  CDR3 for beta chain variable domain of TCR clone 265722 (TRBV28, TRBJ1-1)
CASSKQGWTEAFF

SEQ ID NO: 531445 - protein, 12 aa, Homo sapiens
  CDR3 for alpha chain variable domain of TCR clone 265723 (TRAV36/DV7, TRAJ54)
CAVVRGAQKLVF

SEQ ID NO: 531446 - protein, 14 aa, Homo sapiens
  CDR3 for beta chain variable domain of TCR clone 265723 (TRBV6-1, TRBJ1-3)
CASVQGGGGNTIYF

SEQ ID NO: 531447 - protein, 12 aa, Homo sapiens
  CDR3 for alpha chain variable domain of TCR clone 265724 (TRAV13-1, TRAJ42)
VNYGGSQGNLIF

SEQ ID NO: 531448 - protein, 15 aa, Homo sapiens
  CDR3 for beta chain variable domain of TCR clone 265724 (TRBV7-9, TRBJ1-6)
CASSSPGRGNSPLHF

SEQ ID NO: 531449 - protein, 14 aa, Homo sapiens
  CDR3 for alpha chain variable domain of TCR clone 265725 (TRAV1-1, TRAJ30)
CAVRSLHRDDKIIF

SEQ ID NO: 531450 - protein, 14 aa, Homo sapiens
  CDR3 for beta chain variable domain of TCR clone 265725 (TRBV7-8, TRBJ2-3)
CASRLEAGTDTQYF

SEQ ID NO: 531451 - protein, 13 aa, Homo sapiens
  CDR3 for alpha chain variable domain of TCR clone 265726 (TRAV27, TRAJ40)
CRSDTSGTYKYIF

SEQ ID NO: 531452 - protein, 15 aa, Homo sapiens
  CDR3 for beta chain variable domain of TCR clone 265726 (TRBV5-1, TRBJ2-1)
CASSPPRAPYNEQFF

SEQ ID NO: 531453 - protein, 16 aa, Homo sapiens
  CDR3 for alpha chain variable domain of TCR clone 265727 (TRAV3, TRAJ21)
CAVRDIERGNFNKFYF

SEQ ID NO: 531454 - protein, 16 aa, Homo sapiens
  CDR3 for beta chain variable domain of TCR clone 265727 (TRBV12-4, TRBJ1-5)
CASSRPVVGSNQPQHF

SEQ ID NO: 531455 - protein, 11 aa, Homo sapiens
  CDR3 for alpha chain variable domain of TCR clone 265728 (TRAV17, TRAJ9)
CATTAGFKTIF

SEQ ID NO: 531456 - protein, 14 aa, Homo sapiens
  CDR3 for beta chain variable domain of TCR clone 265728 (TRBV7-9, TRBJ2-2)
CASSGLADTGELFF

SEQ ID NO: 531457 - protein, 14 aa, Homo sapiens
  CDR3 for alpha chain variable domain of TCR clone 265729 (TRAV29/DV5, TRAJ57)
CAASEMGGSEKLVV

SEQ ID NO: 531458 - protein, 14 aa, Homo sapiens
  CDR3 for beta chain variable domain of TCR clone 265729 (TRBV5-4, TRBJ1-4)
CASSLNLGREKLFF

SEQ ID NO: 531459 - protein, 14 aa, Homo sapiens
  CDR3 for alpha chain variable domain of TCR clone 265730 (TRAV1-2, TRAJ16)
CAVNRFSDGQKLLF

SEQ ID NO: 531460 - protein, 14 aa, Homo sapiens
  CDR3 for beta chain variable domain of TCR clone 265730 (TRBV9, TRBJ2-1)
CASSVDPRGKEQFF

SEQ ID NO: 531461 - protein, 15 aa, Homo sapiens
  CDR3 for alpha chain variable domain of TCR clone 265731 (TRAV12-2, TRAJ53)
CAVNTGGGSNYKLTF

SEQ ID NO: 531462 - protein, 15 aa, Homo sapiens
  CDR3 for beta chain variable domain of TCR clone 265731 (TRBV5-1, TRBJ2-5)
CASRLGLGEIKTQYF

SEQ ID NO: 531463 - protein, 18 aa, Homo sapiens
  CDR3 for alpha chain variable domain of TCR clone 265732 (TRAV21, TRAJ52)
CAVRPSPAGGTSYGKLTF

SEQ ID NO: 531464 - protein, 14 aa, Homo sapiens
  CDR3 for beta chain variable domain of TCR clone 265732 (TRBV28, TRBJ1-1)
CVSSPRTRWAEAFF

SEQ ID NO: 531465 - protein, 11 aa, Homo sapiens
  CDR3 for alpha chain variable domain of TCR clone 265733 (TRAV21, TRAJ48)
CAVDGNERLTF

SEQ ID NO: 531466 - protein, 15 aa, Homo sapiens
  CDR3 for beta chain variable domain of TCR clone 265733 (TRBV5-1, TRBJ2-6)
CASSLDPSGANVLTF

SEQ ID NO: 531467 - protein, 14 aa, Homo sapiens
  CDR3 for alpha chain variable domain of TCR clone 265734 (TRAV12-2, TRAJ17)
CAVLFKAARNKLTF

SEQ ID NO: 531468 - protein, 17 aa, Homo sapiens
  CDR3 for beta chain variable domain of TCR clone 265734 (TRBV7-3, TRBJ2-3)
CASSPRVQGYGTDTQYF

SEQ ID NO: 531469 - protein, 15 aa, Homo sapiens
  CDR3 for alpha chain variable domain of TCR clone 265735 (TRAV23/DV6, )
CAADIQNPYPAVYQL

SEQ ID NO: 531470 - protein, 14 aa, Homo sapiens
  CDR3 for beta chain variable domain of TCR clone 265735 (TRBV5-7, TRBJ1-6)
CASSFAGHNSPLHF

SEQ ID NO: 531471 - protein, 15 aa, Homo sapiens
  CDR3 for alpha chain variable domain of TCR clone 265736 (TRAV30, TRAJ32)
CGTEILGGATNKLTF

SEQ ID NO: 531472 - protein, 11 aa, Homo sapiens
  CDR3 for beta chain variable domain of TCR clone 265736 (TRBV12-4, TRBJ2-3)
CASTATDTQYF

SEQ ID NO: 531473 - protein, 14 aa, Homo sapiens
  CDR3 for alpha chain variable domain of TCR clone 265737 (TRAV9-2, TRAJ39)
CALYIYNAGNMLTF

SEQ ID NO: 531474 - protein, 18 aa, Homo sapiens
  CDR3 for beta chain variable domain of TCR clone 265737 (TRBV20-1, TRBJ2-6)
CSAETTPTHGSGANVLPF

SEQ ID NO: 531475 - protein, 13 aa, Homo sapiens
  CDR3 for alpha chain variable domain of TCR clone 265738 (TRAV8-6, TRAJ50)
CAVIQTSYDKVIF

SEQ ID NO: 531476 - protein, 15 aa, Homo sapiens
  CDR3 for beta chain variable domain of TCR clone 265738 (TRBV7-2, TRBJ2-2)
CASRRPGQNTGELFF

SEQ ID NO: 531477 - protein, 16 aa, Homo sapiens
  CDR3 for alpha chain variable domain of TCR clone 265739 (TRAV27, TRAJ56)
CAGVSRKDGANSKLKF

SEQ ID NO: 531478 - protein, 15 aa, Homo sapiens
  CDR3 for beta chain variable domain of TCR clone 265739 (TRBV4-1, TRBJ2-5)
CASSQLAGGQETQYF

SEQ ID NO: 531479 - protein, 15 aa, Homo sapiens
  CDR3 for alpha chain variable domain of TCR clone 265740 (TRAV35, TRAJ23)
CAGQRGYNKGGKLIF

SEQ ID NO: 531480 - protein, 16 aa, Homo sapiens
  CDR3 for beta chain variable domain of TCR clone 265740 (TRBV27, TRBJ2-1)
CASSSRLAGNYNEQFF

SEQ ID NO: 531481 - protein, 14 aa, Homo sapiens
  CDR3 for alpha chain variable domain of TCR clone 265741 (TRAV2, TRAJ41)
CAVGASNSGYALNF

SEQ ID NO: 531482 - protein, 14 aa, Homo sapiens
  CDR3 for beta chain variable domain of TCR clone 265741 (TRBV11-2, TRBJ2-5)
CASSRTGGIETQYF

SEQ ID NO: 531483 - protein, 10 aa, Homo sapiens
  CDR3 for alpha chain variable domain of TCR clone 265742 (TRAV21, TRAJ31)
CAVDNARLMF

SEQ ID NO: 531484 - protein, 15 aa, Homo sapiens
  CDR3 for beta chain variable domain of TCR clone 265742 (TRBV28, TRBJ1-4)
CASSLGTGTKEKLFF

SEQ ID NO: 531485 - protein, 11 aa, Homo sapiens
  CDR3 for alpha chain variable domain of TCR clone 265743 (TRAV29/DV5, TRAJ31)
CAAINNARLMF

SEQ ID NO: 531486 - protein, 16 aa, Homo sapiens
  CDR3 for beta chain variable domain of TCR clone 265743 (TRBV7-3, TRBJ2-2)
CASSLKRGTLSGELFF

SEQ ID NO: 531487 - protein, 14 aa, Homo sapiens
  CDR3 for alpha chain variable domain of TCR clone 265744 (TRAV20, TRAJ22)
CAVDSGGSARQLTF

SEQ ID NO: 531488 - protein, 15 aa, Homo sapiens
  CDR3 for beta chain variable domain of TCR clone 265744 (TRBV7-2, TRBJ1-1)
CASSFAGDRDTEAFF

SEQ ID NO: 531489 - protein, 14 aa, Homo sapiens
  CDR3 for alpha chain variable domain of TCR clone 265745 (TRAV12-2, TRAJ17)
CAVLFKAAGNKLTF

SEQ ID NO: 531490 - protein, 13 aa, Homo sapiens
  CDR3 for beta chain variable domain of TCR clone 265745 (TRBV7-3, TRBJ2-1)
CASSLWPYNEQFF

SEQ ID NO: 531491 - protein, 16 aa, Homo sapiens
  CDR3 for alpha chain variable domain of TCR clone 265746 (TRAV12-1, TRAJ43)
CVVNPHRFGAGTRLTE

SEQ ID NO: 531492 - protein, 13 aa, Homo sapiens
  CDR3 for beta chain variable domain of TCR clone 265746 (TRBV20-1, TRBJ1-1)
CSARGGGNTEAFF

SEQ ID NO: 531493 - protein, 13 aa, Homo sapiens
  CDR3 for alpha chain variable domain of TCR clone 265747 (TRAV3, TRAJ30)
CAVRDRGDDNIIF

SEQ ID NO: 531494 - protein, 14 aa, Homo sapiens
  CDR3 for beta chain variable domain of TCR clone 265747 (TRBV5-1, TRBJ1-1)
CASSRTTGDTEAFF

SEQ ID NO: 531495 - protein, 13 aa, Homo sapiens
  CDR3 for alpha chain variable domain of TCR clone 265748 (TRAV8-4, TRAJ47)
CAVTALYGNKLVF

SEQ ID NO: 531496 - protein, 14 aa, Homo sapiens
  CDR3 for beta chain variable domain of TCR clone 265748 (TRBV19, TRBJ2-7)
CASSIVGAVAEQYF

SEQ ID NO: 531497 - protein, 12 aa, Homo sapiens
  CDR3 for alpha chain variable domain of TCR clone 265749 (TRAV12-3, TRAJ48)
CAMRIGNEKLTF

SEQ ID NO: 531498 - protein, 12 aa, Homo sapiens
  CDR3 for beta chain variable domain of TCR clone 265749 (TRBV13, TRBJ2-7)
CASSLQAYGQYF

SEQ ID NO: 531499 - protein, 14 aa, Homo sapiens
  CDR3 for alpha chain variable domain of TCR clone 265750 (TRAV3, TRAJ33)
CAVRDMDSNYQLIW

SEQ ID NO: 531500 - protein, 19 aa, Homo sapiens
  CDR3 for beta chain variable domain of TCR clone 265750 (TRBV7-3, TRBJ1-2)
CASSFPQGNDGDLWLHLRF

SEQ ID NO: 531501 - protein, 14 aa, Homo sapiens
  CDR3 for alpha chain variable domain of TCR clone 265751 (TRAV1-2, TRAJ16)
CAVNRFSDGQKLLF

SEQ ID NO: 531502 - protein, 12 aa, Homo sapiens
  CDR3 for beta chain variable domain of TCR clone 265751 (TRBV28, TRBJ2-6)
CAVQAGANVLTF

SEQ ID NO: 531503 - protein, 13 aa, Homo sapiens
  CDR3 for alpha chain variable domain of TCR clone 265752 (TRAV8-6, TRAJ13)
CAVSCGGYQKVTF

SEQ ID NO: 531504 - protein, 15 aa, Homo sapiens
  CDR3 for beta chain variable domain of TCR clone 265752 (TRBV7-9, TRBJ2-7)
CASSLPMGQANEQYF

SEQ ID NO: 531505 - protein, 14 aa, Homo sapiens
  CDR3 for alpha chain variable domain of TCR clone 265753 (TRAV38-2/DV8, TRAJ31)
CAYRSDNNNARLMF

SEQ ID NO: 531506 - protein, 13 aa, Homo sapiens
  CDR3 for beta chain variable domain of TCR clone 265753 (TRBV28, TRBJ1-1)
CASSKLGWTEAFF

SEQ ID NO: 531507 - protein, 11 aa, Homo sapiens
  CDR3 for alpha chain variable domain of TCR clone 265754 (TRAV2, TRAJ13)
CASGGYQKVTF

SEQ ID NO: 531508 - protein, 16 aa, Homo sapiens
  CDR3 for beta chain variable domain of TCR clone 265754 (TRBV7-3, TRBJ2-2)
CASSLKRGTFPGELFF

SEQ ID NO: 531509 - protein, 18 aa, Homo sapiens
  CDR3 for alpha chain variable domain of TCR clone 265755 (TRAV17, TRAJ45)
CATSLDLYSGGGADGLTF

SEQ ID NO: 531510 - protein, 15 aa, Homo sapiens
  CDR3 for beta chain variable domain of TCR clone 265755 (TRBV7-9, TRBJ1-3)
CASSLRSGSGNTIYF

SEQ ID NO: 531511 - protein, 14 aa, Homo sapiens
  CDR3 for alpha chain variable domain of TCR clone 265756 (TRAV17, TRAJ54)
CATDANQGAQKLVF

SEQ ID NO: 531512 - protein, 15 aa, Homo sapiens
  CDR3 for beta chain variable domain of TCR clone 265756 (TRBV19, TRBJ2-4)
CASRGPRRGENIQYF

SEQ ID NO: 531513 - protein, 15 aa, Homo sapiens
  CDR3 for alpha chain variable domain of TCR clone 265757 (TRAV12-3, TRAJ6)
CAMSATSGGSYIPTF

SEQ ID NO: 531514 - protein, 13 aa, Homo sapiens
  CDR3 for beta chain variable domain of TCR clone 265757 (TRBV27, TRBJ1-1)
CASSLSIGAEAFF

SEQ ID NO: 531515 - protein, 15 aa, Homo sapiens
  CDR3 for alpha chain variable domain of TCR clone 265758 (TRAV13-1, TRAJ17)
CAASIERAAGNKLTF

SEQ ID NO: 531516 - protein, 13 aa, Homo sapiens
  CDR3 for beta chain variable domain of TCR clone 265758 (TRBV7-7, TRBJ2-3)
CASSLSRADTHYF

SEQ ID NO: 531517 - protein, 13 aa, Homo sapiens
  CDR3 for alpha chain variable domain of TCR clone 265759 (TRAV21, TRAJ17)
CAPVKAAGNKLTF

SEQ ID NO: 531518 - protein, 13 aa, Homo sapiens
  CDR3 for beta chain variable domain of TCR clone 265759 (TRBV20-1, TRBJ1-1)
CSAVGGTLNEAFF

SEQ ID NO: 531519 - protein, 16 aa, Homo sapiens
  CDR3 for alpha chain variable domain of TCR clone 265760 (TRAV3, TRAJ37)
CAVRGKGSGNTGKLTI

SEQ ID NO: 531520 - protein, 13 aa, Homo sapiens
  CDR3 for beta chain variable domain of TCR clone 265760 (TRBV7-2, TRBJ2-2)
CASSSVRAGELFF

SEQ ID NO: 531521 - protein, 15 aa, Homo sapiens
  CDR3 for alpha chain variable domain of TCR clone 265761 (TRAV27, TRAJ38)
CAARRNAGNNRKLIW

SEQ ID NO: 531522 - protein, 13 aa, Homo sapiens
  CDR3 for beta chain variable domain of TCR clone 265761 (TRBV29-1, TRBJ2-1)
CSVEGGRVNEQFF

SEQ ID NO: 531523 - protein, 15 aa, Homo sapiens
  CDR3 for alpha chain variable domain of TCR clone 265762 (TRAV13-1, TRAJ11)
CAASNRNSGYSTLTF

SEQ ID NO: 531524 - protein, 11 aa, Homo sapiens
  CDR3 for beta chain variable domain of TCR clone 265762 (TRBV20-1, TRBJ2-7)
CSARLSSEQYF

SEQ ID NO: 531525 - protein, 14 aa, Homo sapiens
  CDR3 for alpha chain variable domain of TCR clone 265763 (TRAV26-1, TRAJ38)
CIADNAGNNRKLIW

SEQ ID NO: 531526 - protein, 16 aa, Homo sapiens
  CDR3 for beta chain variable domain of TCR clone 265763 (TRBV4-2, TRBJ2-4)
CASSQELRRAKNIQYF

SEQ ID NO: 531527 - protein, 14 aa, Homo sapiens
  CDR3 for alpha chain variable domain of TCR clone 265764 (TRAV3, TRAJ40)
CAVRDRRGTYKYIF

SEQ ID NO: 531528 - protein, 15 aa, Homo sapiens
  CDR3 for beta chain variable domain of TCR clone 265764 (TRBV11-1, TRBJ1-3)
CASTDPRAFGNTIYF

SEQ ID NO: 531529 - protein, 14 aa, Homo sapiens
  CDR3 for alpha chain variable domain of TCR clone 265765 (TRAV12-1, TRAJ17)
CVVNYRAAGNKLNF

SEQ ID NO: 531530 - protein, 17 aa, Homo sapiens
  CDR3 for beta chain variable domain of TCR clone 265765 (TRBV20-1, TRBJ2-1)
CSASSSGLAGSYNEQFF

SEQ ID NO: 531531 - protein, 16 aa, Homo sapiens
  CDR3 for alpha chain variable domain of TCR clone 265766 (TRAV3, TRAJ10)
CAVRDMRAGGGNKPTF

SEQ ID NO: 531532 - protein, 19 aa, Homo sapiens
  CDR3 for beta chain variable domain of TCR clone 265766 (TRBV7-2, TRBJ2-3)
CASSFLSRNWGGGTDTQYF

SEQ ID NO: 531533 - protein, 13 aa, Homo sapiens
  CDR3 for alpha chain variable domain of TCR clone 265767 (TRAV16, TRAJ28)
CAPTGAGGYKLTF

SEQ ID NO: 531534 - protein, 16 aa, Homo sapiens
  CDR3 for beta chain variable domain of TCR clone 265767 (TRBV28, TRBJ1-5)
CASSLTGQGWNQPQHF

SEQ ID NO: 531535 - protein, 15 aa, Homo sapiens
  CDR3 for alpha chain variable domain of TCR clone 265768 (TRAV35, TRAJ41)
CAGQLFSDSGYALNF

SEQ ID NO: 531536 - protein, 14 aa, Homo sapiens
  CDR3 for beta chain variable domain of TCR clone 265768 (TRBV7-2, TRBJ1-2)
CASSRGGTNYGYTF

SEQ ID NO: 531537 - protein, 14 aa, Homo sapiens
  CDR3 for alpha chain variable domain of TCR clone 265769 (TRAV8-1, TRAJ22)
CAAPSSGSARQLTF

SEQ ID NO: 531538 - protein, 15 aa, Homo sapiens
  CDR3 for beta chain variable domain of TCR clone 265769 (TRBV6-3, TRBJ2-7)
CASSSPGTVFYEQYF

SEQ ID NO: 531539 - protein, 17 aa, Homo sapiens
  CDR3 for alpha chain variable domain of TCR clone 265770 (TRAV3, TRAJ6)
CAMSRRTDTGGSYIPTF

SEQ ID NO: 531540 - protein, 18 aa, Homo sapiens
  CDR3 for beta chain variable domain of TCR clone 265770 (TRBV7-2, TRBJ2-3)
CASSLETSRGRKADTQYF

SEQ ID NO: 531541 - protein, 14 aa, Homo sapiens
  CDR3 for alpha chain variable domain of TCR clone 265771 (TRAV12-2, TRAJ4)
CAEDLSGVYNKLIF

SEQ ID NO: 531542 - protein, 13 aa, Homo sapiens
  CDR3 for beta chain variable domain of TCR clone 265771 (TRBV7-9, TRBJ1-2)
CASSLKQNYGYTF

SEQ ID NO: 531543 - protein, 14 aa, Homo sapiens
  CDR3 for alpha chain variable domain of TCR clone 265772 (TRAV13-2, TRAJ11)
CAETGNSGYSNLTF

SEQ ID NO: 531544 - protein, 11 aa, Homo sapiens
  CDR3 for beta chain variable domain of TCR clone 265772 (TRBV10-3, TRBJ2-7)
CAISEGLEQYF

SEQ ID NO: 531545 - protein, 15 aa, Homo sapiens
  CDR3 for alpha chain variable domain of TCR clone 265773 (TRAV20, TRAJ53)
CAVQASGGSNYKLTF

SEQ ID NO: 531546 - protein, 12 aa, Homo sapiens
  CDR3 for beta chain variable domain of TCR clone 265773 (TRBV14, TRBJ2-5)
CASSQLKETQYF

SEQ ID NO: 531547 - protein, 14 aa, Homo sapiens
  CDR3 for alpha chain variable domain of TCR clone 265774 (TRAV26-1, TRAJ38)
CIADNAGNNRKPLW

SEQ ID NO: 531548 - protein, 13 aa, Homo sapiens
  CDR3 for beta chain variable domain of TCR clone 265774 (TRBV20-1, TRBJ1-1)
CSARGGGNTEAFF

SEQ ID NO: 531549 - protein, 13 aa, Homo sapiens
  CDR3 for alpha chain variable domain of TCR clone 265775 (TRAV8-6, TRAJ32)
GAVSDRATNKLIF

SEQ ID NO: 531550 - protein, 13 aa, Homo sapiens
  CDR3 for beta chain variable domain of TCR clone 265775 (TRBV11-2, TRBJ2-7)
CASSLDLGYEQYF

SEQ ID NO: 531551 - protein, 17 aa, Homo sapiens
  CDR3 for alpha chain variable domain of TCR clone 265776 (TRAV3, TRAJ28)
CAVREAYSGDGSYQLTF

SEQ ID NO: 531552 - protein, 18 aa, Homo sapiens
  CDR3 for beta chain variable domain of TCR clone 265776 (TRBV27, TRBJ2-1)
CASGNRAVGVGSKNEQFF

SEQ ID NO: 531553 - protein, 11 aa, Homo sapiens
  CDR3 for alpha chain variable domain of TCR clone 265777 (TRAV13-1, TRAJ20)
CSPHGLYKLSF

SEQ ID NO: 531554 - protein, 14 aa, Homo sapiens
  CDR3 for beta chain variable domain of TCR clone 265777 (TRBV28, TRBJ2-5)
CASTVAGGVETQYF

SEQ ID NO: 531555 - protein, 13 aa, Homo sapiens
  CDR3 for alpha chain variable domain of TCR clone 265778 (TRAV3, TRAJ21)
CAVREPDFNKFYF

SEQ ID NO: 531556 - protein, 14 aa, Homo sapiens
  CDR3 for beta chain variable domain of TCR clone 265778 (TRBV20-1, TRBJ2-7)
CSAWTALSSYEQYF

SEQ ID NO: 531557 - protein, 14 aa, Homo sapiens
  CDR3 for alpha chain variable domain of TCR clone 265779 (TRAV30, TRAJ26)
CGTEIVSYGHNFVF

SEQ ID NO: 531558 - protein, 11 aa, Homo sapiens
  CDR3 for beta chain variable domain of TCR clone 265779 (TRBV11-2, TRBJ2-2)
CASSLPGELFF

SEQ ID NO: 531559 - protein, 14 aa, Homo sapiens
  CDR3 for alpha chain variable domain of TCR clone 265780 (TRAV12-2, TRAJ40)
CAVKIPPGTYKYIF

SEQ ID NO: 531560 - protein, 14 aa, Homo sapiens
  CDR3 for beta chain variable domain of TCR clone 265780 (TRBV20-1, TRBJ1-1)
CSAQTRIGGTEASF

SEQ ID NO: 531561 - protein, 14 aa, Homo sapiens
  CDR3 for alpha chain variable domain of TCR clone 265781 (TRAV13-2, TRAJ9)
CAEDSFTGGFKTIF

SEQ ID NO: 531562 - protein, 13 aa, Homo sapiens
  CDR3 for beta chain variable domain of TCR clone 265781 (TRBV19, TRBJ2-7)
CASSIDRTYEQYF

SEQ ID NO: 531563 - protein, 12 aa, Homo sapiens
  CDR3 for alpha chain variable domain of TCR clone 265782 (TRAV12-1, TRAJ7)
CAVMRGNNRLAF

SEQ ID NO: 531564 - protein, 15 aa, Homo sapiens
  CDR3 for beta chain variable domain of TCR clone 265782 (TRBV2, TRBJ2-1)
CASSELAGGYNEQFF

SEQ ID NO: 531565 - protein, 14 aa, Homo sapiens
  CDR3 for alpha chain variable domain of TCR clone 265783 (TRAV4, TRAJ10)
CLVGDTGGGNKLTF

SEQ ID NO: 531566 - protein, 14 aa, Homo sapiens
  CDR3 for beta chain variable domain of TCR clone 265783 (TRBV7-3, TRBJ1-1)
CASSLKGGNTEAFF

SEQ ID NO: 531567 - protein, 15 aa, Homo sapiens
  CDR3 for alpha chain variable domain of TCR clone 265784 (TRAV8-3, TRAJ15)
CAVGAPNQAGTALSF

SEQ ID NO: 531568 - protein, 14 aa, Homo sapiens
  CDR3 for beta chain variable domain of TCR clone 265784 (TRBV20-1, TRBJ2-1)
CSPNDEASYNKQFF

SEQ ID NO: 531569 - protein, 16 aa, Homo sapiens
  CDR3 for alpha chain variable domain of TCR clone 265785 (TRAV12-3, TRAJ53)
CAMSPGSGGSNYKLTF

SEQ ID NO: 531570 - protein, 16 aa, Homo sapiens
  CDR3 for beta chain variable domain of TCR clone 265785 (TRBV4-1, TRBJ2-7)
CASSRGDILNSYEQYF

SEQ ID NO: 531571 - protein, 14 aa, Homo sapiens
  CDR3 for alpha chain variable domain of TCR clone 265786 (TRAV8-6, TRAJ36)
CAVSEKDGANNLFF

SEQ ID NO: 531572 - protein, 16 aa, Homo sapiens
  CDR3 for beta chain variable domain of TCR clone 265786 (TRBV2, TRBJ1-3)
CASSGQGPSSGNTIYF

SEQ ID NO: 531573 - protein, 13 aa, Homo sapiens
  CDR3 for alpha chain variable domain of TCR clone 265787 (TRAV12-2, TRAJ20)
CSVYPSNDYKLSF

SEQ ID NO: 531574 - protein, 12 aa, Homo sapiens
  CDR3 for beta chain variable domain of TCR clone 265787 (TRBV2, TRBJ2-1)
CAYGPPGNEQFF

SEQ ID NO: 531575 - protein, 13 aa, Homo sapiens
  CDR3 for alpha chain variable domain of TCR clone 265788 (TRAV12-2, TRAJ20)
CAVTRFDDYKLSF

SEQ ID NO: 531576 - protein, 13 aa, Homo sapiens
  CDR3 for beta chain variable domain of TCR clone 265788 (TRBV15, TRBJ1-6)
CATSGGLNSPLHF

SEQ ID NO: 531577 - protein, 11 aa, Homo sapiens
  CDR3 for alpha chain variable domain of TCR clone 265789 (TRAV8-1, TRAJ7)
CAVNSYNRLAF

SEQ ID NO: 531578 - protein, 18 aa, Homo sapiens
  CDR3 for beta chain variable domain of TCR clone 265789 (TRBV4-1, TRBJ2-7)
CASSQRIPEASGAYEQYF

SEQ ID NO: 531579 - protein, 13 aa, Homo sapiens
  CDR3 for alpha chain variable domain of TCR clone 265790 (TRAV21, TRAJ57)
CAVTQGGSDKLVF

SEQ ID NO: 531580 - protein, 11 aa, Homo sapiens
  CDR3 for beta chain variable domain of TCR clone 265790 (TRBV11-2, TRBJ2-2)
CASSLPGELFF

SEQ ID NO: 531581 - protein, 12 aa, Homo sapiens
  CDR3 for alpha chain variable domain of TCR clone 265791 (TRAV8-6, TRAJ8)
CAVTPGFQKLVF

SEQ ID NO: 531582 - protein, 12 aa, Homo sapiens
  CDR3 for beta chain variable domain of TCR clone 265791 (TRBV11-2, TRBJ2-5)
CASSPPAETQYF

SEQ ID NO: 531583 - protein, 16 aa, Homo sapiens
  CDR3 for alpha chain variable domain of TCR clone 265792 (TRAV12-3, TRAJ53)
CAMSPGSGGSSYKLTF

SEQ ID NO: 531584 - protein, 11 aa, Homo sapiens
  CDR3 for beta chain variable domain of TCR clone 265792 (TRBV29-1, TRBJ2-5)
CSEDRTGNQYF

SEQ ID NO: 531585 - protein, 11 aa, Homo sapiens
  CDR3 for alpha chain variable domain of TCR clone 265793 (TRAV2, TRAJ33)
CAVDSNYQLIW

SEQ ID NO: 531586 - protein, 14 aa, Homo sapiens
  CDR3 for beta chain variable domain of TCR clone 265793 (TRBV2, TRBJ2-1)
CASRTGSSYNEQFF

SEQ ID NO: 531587 - protein, 13 aa, Homo sapiens
  CDR3 for alpha chain variable domain of TCR clone 265794 (TRAV23/DV6, TRAJ34)
CAAIENNTDKLIF

SEQ ID NO: 531588 - protein, 14 aa, Homo sapiens
  CDR3 for beta chain variable domain of TCR clone 265794 (TRBV5-4, TRBJ1-1)
CASSLDSRRDEAFF

SEQ ID NO: 531589 - protein, 12 aa, Homo sapiens
  CDR3 for alpha chain variable domain of TCR clone 265795 (TRAV8-3, TRAJ20)
CAVGANDYKLSF

SEQ ID NO: 531590 - protein, 14 aa, Homo sapiens
  CDR3 for beta chain variable domain of TCR clone 265795 (TRBV19, TRBJ2-3)
CASSRLGTTDTQYF

SEQ ID NO: 531591 - protein, 16 aa, Homo sapiens
  CDR3 for alpha chain variable domain of TCR clone 265796 (TRAV17, TRAJ28)
CASYAYSGAGSYQLTF

SEQ ID NO: 531592 - protein, 15 aa, Homo sapiens
  CDR3 for beta chain variable domain of TCR clone 265796 (TRBV4-2, TRBJ2-1)
CDSSPSGGLYNEQFF

SEQ ID NO: 531593 - protein, 13 aa, Homo sapiens
  CDR3 for alpha chain variable domain of TCR clone 265797 (TRAV3, TRAJ21)
CAVREPDFNKFYF

SEQ ID NO: 531594 - protein, 15 aa, Homo sapiens
  CDR3 for beta chain variable domain of TCR clone 265797 (TRBV4-1, TRBJ1-2)
RASSQGQGAAYGYTF

SEQ ID NO: 531595 - protein, 15 aa, Homo sapiens
  CDR3 for alpha chain variable domain of TCR clone 265798 (TRAV12-2, TRAJ53)
CAVNGGGGSNYKLKF

SEQ ID NO: 531596 - protein, 15 aa, Homo sapiens
  CDR3 for beta chain variable domain of TCR clone 265798 (TRBV7-2, TRBJ1-2)
CASSPRAGWNYGYTF

SEQ ID NO: 531597 - protein, 11 aa, Homo sapiens
  CDR3 for alpha chain variable domain of TCR clone 265799 (TRAV4, TRAJ31)
CLVGDNARLMF

SEQ ID NO: 531598 - protein, 16 aa, Homo sapiens
  CDR3 for beta chain variable domain of TCR clone 265799 (TRBV7-2, TRBJ2-5)
CASSSKWLSSQETQYF

SEQ ID NO: 531599 - protein, 14 aa, Homo sapiens
  CDR3 for alpha chain variable domain of TCR clone 265800 (TRAV12-1, TRAJ17)
CVVNYKAAVNNLTF

SEQ ID NO: 531600 - protein, 17 aa, Homo sapiens
  CDR3 for beta chain variable domain of TCR clone 265800 (TRBV20-1, TRBJ2-1)
CSASSSGLAGSYNEQFF

SEQ ID NO: 531601 - protein, 14 aa, Homo sapiens
  CDR3 for alpha chain variable domain of TCR clone 265801 (TRAV12-2, TRAJ9)
CAVSFGTGGFKTIF

SEQ ID NO: 531602 - protein, 15 aa, Homo sapiens
  CDR3 for beta chain variable domain of TCR clone 265801 (TRBV5-5, TRBJ1-5)
CASSLKGGGEQPQHF

SEQ ID NO: 531603 - protein, 13 aa, Homo sapiens
  CDR3 for alpha chain variable domain of TCR clone 265802 (TRAV29/DV5, TRAJ31)
CAASRNNNARLMF

SEQ ID NO: 531604 - protein, 13 aa, Homo sapiens
  CDR3 for beta chain variable domain of TCR clone 265802 (TRBV7-2, TRBJ2-2)
CASSLAVTGELFF

SEQ ID NO: 531605 - protein, 14 aa, Homo sapiens
  CDR3 for alpha chain variable domain of TCR clone 265803 (TRAV17, TRAJ6)
CATDASGGSYIPTF

SEQ ID NO: 531606 - protein, 12 aa, Homo sapiens
  CDR3 for beta chain variable domain of TCR clone 265803 (TRBV12-4, TRBJ1-2)
CASSFIWLHLRF

SEQ ID NO: 531607 - protein, 11 aa, Homo sapiens
  CDR3 for alpha chain variable domain of TCR clone 265804 (TRAV1-2, TRAJ31)
CAVNNNARLMF

SEQ ID NO: 531608 - protein, 17 aa, Homo sapiens
  CDR3 for beta chain variable domain of TCR clone 265804 (TRBV7-8, TRBJ2-6)
CASSAGTGGAGANGLTF

SEQ ID NO: 531609 - protein, 12 aa, Homo sapiens
  CDR3 for alpha chain variable domain of TCR clone 265805 (TRAV13-2, TRAJ23)
CAERHRGGKLIF

SEQ ID NO: 531610 - protein, 16 aa, Homo sapiens
  CDR3 for beta chain variable domain of TCR clone 265805 (TRBV19, TRBJ2-1)
CASSMGGGSSYNEQFF

SEQ ID NO: 531611 - protein, 15 aa, Homo sapiens
  CDR3 for alpha chain variable domain of TCR clone 265806 (TRAV23/DV6, TRAJ18)
CAARYRGSTLGRLYF

SEQ ID NO: 531612 - protein, 12 aa, Homo sapiens
  CDR3 for beta chain variable domain of TCR clone 265806 (TRBV7-2, TRBJ2-7)
CQQLPSGSEQYF

SEQ ID NO: 531613 - protein, 16 aa, Homo sapiens
  CDR3 for alpha chain variable domain of TCR clone 265807 (TRAV8-1, TRAJ18)
CAVNAGRGSTLGRLYF

SEQ ID NO: 531614 - protein, 14 aa, Homo sapiens
  CDR3 for beta chain variable domain of TCR clone 265807 (TRBV7-2, TRBJ2-5)
CQHPPGASGETQYF

SEQ ID NO: 531615 - protein, 14 aa, Homo sapiens
  CDR3 for alpha chain variable domain of TCR clone 265808 (TRAV16, TRAJ17)
CAPRIKAAGNKLTF

SEQ ID NO: 531616 - protein, 12 aa, Homo sapiens
  CDR3 for beta chain variable domain of TCR clone 265808 (TRBV5-1, TRBJ1-1)
CASSLTGAEAFF

SEQ ID NO: 531617 - protein, 17 aa, Homo sapiens
  CDR3 for alpha chain variable domain of TCR clone 265809 (TRAV3, TRAJ12)
CAVRDGGRMDSSYKLIF

SEQ ID NO: 531618 - protein, 14 aa, Homo sapiens
  CDR3 for beta chain variable domain of TCR clone 265809 (TRBV7-9, TRBJ1-2)
CASSRQGASYGYTF

SEQ ID NO: 531619 - protein, 18 aa, Homo sapiens
  CDR3 for alpha chain variable domain of TCR clone 265810 (TRAV13-1, TRAJ52)
SAAKNPNAGGTSYGKLTF

SEQ ID NO: 531620 - protein, 18 aa, Homo sapiens
  CDR3 for beta chain variable domain of TCR clone 265810 (TRBV4-1, TRBJ1-4)
CASSPRTGGAWTNEKLFF

SEQ ID NO: 531621 - protein, 12 aa, Homo sapiens
  CDR3 for alpha chain variable domain of TCR clone 265811 (TRAV12-3, TRAJ20)
CAMVRGDYKLSF

SEQ ID NO: 531622 - protein, 17 aa, Homo sapiens
  CDR3 for beta chain variable domain of TCR clone 265811 (TRBV13, TRBJ2-3)
CASSLSRVAGGMNTQYF

SEQ ID NO: 531623 - protein, 17 aa, Homo sapiens
  CDR3 for alpha chain variable domain of TCR clone 265812 (TRAV38-2/DV8, TRAJ32)
CAYRKGNYGGATNKLIF

SEQ ID NO: 531624 - protein, 20 aa, Homo sapiens
  CDR3 for beta chain variable domain of TCR clone 265812 (TRBV28, TRBJ2-1)
CASTPIGRSPGLAGGNEQFF

SEQ ID NO: 531625 - protein, 14 aa, Homo sapiens
  CDR3 for alpha chain variable domain of TCR clone 265813 (TRAV26-1, TRAJ39)
CIVRGSRAGTMLTF

SEQ ID NO: 531626 - protein, 15 aa, Homo sapiens
  CDR3 for beta chain variable domain of TCR clone 265813 (TRBV7-9, TRBJ1-5)
CASSQGHQPNQPHHF

SEQ ID NO: 531627 - protein, 12 aa, Homo sapiens
  CDR3 for alpha chain variable domain of TCR clone 265814 (TRAV3, TRAJ43)
CAVRDPNNDMRF

SEQ ID NO: 531628 - protein, 18 aa, Homo sapiens
  CDR3 for beta chain variable domain of TCR clone 265814 (TRBV11-2, TRBJ2-3)
CASNLGGASRGAPNTQYF

SEQ ID NO: 531629 - protein, 14 aa, Homo sapiens
  CDR3 for alpha chain variable domain of TCR clone 265815 (TRAV38-1, TRAJ29)
CAFITPSGNTPLVF

SEQ ID NO: 531630 - protein, 11 aa, Homo sapiens
  CDR3 for beta chain variable domain of TCR clone 265815 (TRBV28, TRBJ2-1)
CASRRVNEQFF

SEQ ID NO: 531631 - protein, 13 aa, Homo sapiens
  CDR3 for alpha chain variable domain of TCR clone 265816 (TRAV2, TRAJ11)
CAVEDSGYSTLTF

SEQ ID NO: 531632 - protein, 13 aa, Homo sapiens
  CDR3 for beta chain variable domain of TCR clone 265816 (TRBV10-3, TRBJ2-7)
CASKLAVNYEQYF

SEQ ID NO: 531633 - protein, 15 aa, Homo sapiens
  CDR3 for alpha chain variable domain of TCR clone 265817 (TRAV3, TRAJ36)
CAVRASQTGANNLFF

SEQ ID NO: 531634 - protein, 11 aa, Homo sapiens
  CDR3 for beta chain variable domain of TCR clone 265817 (TRBV7-8, TRBJ2-7)
CASSLSLEQYF

SEQ ID NO: 531635 - protein, 15 aa, Homo sapiens
  CDR3 for alpha chain variable domain of TCR clone 265818 (TRAV12-2, TRAJ52)
CAVTSGGTSYGKLTF

SEQ ID NO: 531636 - protein, 17 aa, Homo sapiens
  CDR3 for beta chain variable domain of TCR clone 265818 (TRBV13, TRBJ2-3)
CASSLSRVAGGRNTQYF

SEQ ID NO: 531637 - protein, 14 aa, Homo sapiens
  CDR3 for alpha chain variable domain of TCR clone 265819 (TRAV8-2, TRAJ42)
CVVSDKGSQGNLIF

SEQ ID NO: 531638 - protein, 14 aa, Homo sapiens
  CDR3 for beta chain variable domain of TCR clone 265819 (TRBV19, TRBJ2-1)
CASPTFVLSGEQFF

SEQ ID NO: 531639 - protein, 14 aa, Homo sapiens
  CDR3 for alpha chain variable domain of TCR clone 265820 (TRAV2, TRAJ16)
CAVERGSDGQKLLF

SEQ ID NO: 531640 - protein, 15 aa, Homo sapiens
  CDR3 for beta chain variable domain of TCR clone 265820 (TRBV7-3, TRBJ2-2)
CASSETGQGTGELFF

SEQ ID NO: 531641 - protein, 11 aa, Homo sapiens
  CDR3 for alpha chain variable domain of TCR clone 265821 (TRAV3, TRAJ13)
CAVTGYQKGTF

SEQ ID NO: 531642 - protein, 15 aa, Homo sapiens
  CDR3 for beta chain variable domain of TCR clone 265821 (TRBV7-9, TRBJ2-7)
CASSSSGLAVYEQYF

SEQ ID NO: 531643 - protein, 14 aa, Homo sapiens
  CDR3 for alpha chain variable domain of TCR clone 265822 (TRAV2, TRAJ37)
CAVDFTSNTGRLIF

SEQ ID NO: 531644 - protein, 15 aa, Homo sapiens
  CDR3 for beta chain variable domain of TCR clone 265822 (TRBV20-1, TRBJ1-1)
CSASQGVTGNTEAFF

SEQ ID NO: 531645 - protein, 12 aa, Homo sapiens
  CDR3 for alpha chain variable domain of TCR clone 265823 (TRAV16, TRAJ17)
CAPSAAGNKLTF

SEQ ID NO: 531646 - protein, 12 aa, Homo sapiens
  CDR3 for beta chain variable domain of TCR clone 265823 (TRBV11-2, TRBJ2-2)
CASSLGGGELFF

SEQ ID NO: 531647 - protein, 13 aa, Homo sapiens
  CDR3 for alpha chain variable domain of TCR clone 265824 (TRAV8-3, TRAJ43)
CAVGIYNNNDMRC

SEQ ID NO: 531648 - protein, 16 aa, Homo sapiens
  CDR3 for beta chain variable domain of TCR clone 265824 (TRBV7-2, TRBJ2-5)
CASSLVLWTKQETQYF

SEQ ID NO: 531649 - protein, 15 aa, Homo sapiens
  CDR3 for alpha chain variable domain of TCR clone 265825 (TRAV3, TRAJ17)
CAVRDTGAAGNKLTF

SEQ ID NO: 531650 - protein, 12 aa, Homo sapiens
  CDR3 for beta chain variable domain of TCR clone 265825 (TRBV29-1, TRBJ2-3)
CSVTGGADTQYF

SEQ ID NO: 531651 - protein, 12 aa, Homo sapiens
  CDR3 for alpha chain variable domain of TCR clone 265826 (TRAV13-2, TRAJ8)
CAERTGFQKLVF

SEQ ID NO: 531652 - protein, 13 aa, Homo sapiens
  CDR3 for beta chain variable domain of TCR clone 265826 (TRBV7-3, TRBJ1-1)
CASSQDWGAEAFF

SEQ ID NO: 531653 - protein, 14 aa, Homo sapiens
  CDR3 for alpha chain variable domain of TCR clone 265827 (TRAV16, TRAJ39)
CALSKNNAGNMLTF

SEQ ID NO: 531654 - protein, 14 aa, Homo sapiens
  CDR3 for beta chain variable domain of TCR clone 265827 (TRBV12-4, TRBJ1-1)
CASSLGTGGTEAFF

SEQ ID NO: 531655 - protein, 21 aa, Homo sapiens
  CDR3 for alpha chain variable domain of TCR clone 265828 (TRAV21, TRAJ27)
CAARPCNAGKSTFVDVTTLTV

SEQ ID NO: 531656 - protein, 14 aa, Homo sapiens
  CDR3 for beta chain variable domain of TCR clone 265828 (TRBV7-6, TRBJ2-3)
CASSLGTVTDTQYF

SEQ ID NO: 531657 - protein, 15 aa, Homo sapiens
  CDR3 for alpha chain variable domain of TCR clone 265829 (TRAV8-1, TRAJ23)
CAVNSHYNQGGKLTF

SEQ ID NO: 531658 - protein, 15 aa, Homo sapiens
  CDR3 for beta chain variable domain of TCR clone 265829 (TRBV11-2, TRBJ1-6)
CASTLRGTGNSPLHF

SEQ ID NO: 531659 - protein, 11 aa, Homo sapiens
  CDR3 for alpha chain variable domain of TCR clone 265830 (TRAV13-1, TRAJ52)
PGGTSYGKMTF

SEQ ID NO: 531660 - protein, 16 aa, Homo sapiens
  CDR3 for beta chain variable domain of TCR clone 265830 (TRBV28, TRBJ2-7)
CASSPWVATGDFAQYF

SEQ ID NO: 531661 - protein, 14 aa, Homo sapiens
  CDR3 for alpha chain variable domain of TCR clone 265831 (TRAV12-1, TRAJ43)
CVVNGRSNNTDMRF

SEQ ID NO: 531662 - protein, 12 aa, Homo sapiens
  CDR3 for beta chain variable domain of TCR clone 265831 (TRBV29-1, TRBJ2-3)
CSVTRGADTHYF

SEQ ID NO: 531663 - protein, 11 aa, Homo sapiens
  CDR3 for alpha chain variable domain of TCR clone 265832 (TRAV2, TRAJ13)
CASGGYQKVNF

SEQ ID NO: 531664 - protein, 15 aa, Homo sapiens
  CDR3 for beta chain variable domain of TCR clone 265832 (TRBV9, TRBJ1-6)
CASSVAGTGDSPLHF

SEQ ID NO: 531665 - protein, 15 aa, Homo sapiens
  CDR3 for alpha chain variable domain of TCR clone 265833 (TRAV17, TRAJ16)
CATALRFSDGQKLLF

SEQ ID NO: 531666 - protein, 12 aa, Homo sapiens
  CDR3 for beta chain variable domain of TCR clone 265833 (TRBV11-2, TRBJ2-7)
CASSLPTYEQYF

SEQ ID NO: 531667 - protein, 17 aa, Homo sapiens
  CDR3 for alpha chain variable domain of TCR clone 265834 (TRAV1-1, TRAJ11)
CAGYSTLTFGKGPMLLV

SEQ ID NO: 531668 - protein, 15 aa, Homo sapiens
  CDR3 for beta chain variable domain of TCR clone 265834 (TRBV6-5, TRBJ2-1)
CASRGDFDSYNEQFF

SEQ ID NO: 531669 - protein, 15 aa, Homo sapiens
  CDR3 for alpha chain variable domain of TCR clone 265835 (TRAV3, TRAJ29)
CAVRAPLSRNTPLVF

SEQ ID NO: 531670 - protein, 15 aa, Homo sapiens
  CDR3 for beta chain variable domain of TCR clone 265835 (TRBV28, TRBJ1-1)
CASRIKGGLNTEAFF

SEQ ID NO: 531671 - protein, 12 aa, Homo sapiens
  CDR3 for alpha chain variable domain of TCR clone 265836 (TRAV1-1, TRAJ8)
CAGGTGFQKLVF

SEQ ID NO: 531672 - protein, 14 aa, Homo sapiens
  CDR3 for beta chain variable domain of TCR clone 265836 (TRBV7-9, TRBJ1-4)
CASRTGGFNEKLFF

SEQ ID NO: 531673 - protein, 17 aa, Homo sapiens
  CDR3 for alpha chain variable domain of TCR clone 265837 (TRAV13-1, TRAJ10)
CAASIWRGTGGGNKPTF

SEQ ID NO: 531674 - protein, 13 aa, Homo sapiens
  CDR3 for beta chain variable domain of TCR clone 265837 (TRBV20-1, TRBJ1-1)
CSARGGGNTEAFF

SEQ ID NO: 531675 - protein, 13 aa, Homo sapiens
  CDR3 for alpha chain variable domain of TCR clone 265838 (TRAV8-3, TRAJ37)
CAVPSSNTGKLIF

SEQ ID NO: 531676 - protein, 16 aa, Homo sapiens
  CDR3 for beta chain variable domain of TCR clone 265838 (TRBV11-2, TRBJ2-7)
CASSLAPTGVNYEQYF

SEQ ID NO: 531677 - protein, 17 aa, Homo sapiens
  CDR3 for alpha chain variable domain of TCR clone 265839 (TRAV4, TRAJ18)
CLVGGRSVGSTLGRLYF

SEQ ID NO: 531678 - protein, 18 aa, Homo sapiens
  CDR3 for beta chain variable domain of TCR clone 265839 (TRBV11-2, TRBJ2-3)
CASSLGGASRGAPNTQYF

SEQ ID NO: 531679 - protein, 12 aa, Homo sapiens
  CDR3 for alpha chain variable domain of TCR clone 265840 (TRAV13-2, TRAJ23)
CAERHRGGKLIF

SEQ ID NO: 531680 - protein, 16 aa, Homo sapiens
  CDR3 for beta chain variable domain of TCR clone 265840 (TRBV7-9, TRBJ1-2)
CASSLGFTSGEDGYTF

SEQ ID NO: 531681 - protein, 12 aa, Homo sapiens
  CDR3 for alpha chain variable domain of TCR clone 265841 (TRAV29/DV5, TRAJ43)
CAAPYNNNDMRC

SEQ ID NO: 531682 - protein, 17 aa, Homo sapiens
  CDR3 for beta chain variable domain of TCR clone 265841 (TRBV19, TRBJ2-6)
CASSTGQVFSGANVLTF

SEQ ID NO: 531683 - protein, 16 aa, Homo sapiens
  CDR3 for alpha chain variable domain of TCR clone 265842 (TRAV21, TRAJ37)
CAVRTAGSSNTGQLIF

SEQ ID NO: 531684 - protein, 13 aa, Homo sapiens
  CDR3 for beta chain variable domain of TCR clone 265842 (TRBV7-9, TRBJ2-5)
CASLPSGRETHHF

SEQ ID NO: 531685 - protein, 14 aa, Homo sapiens
  CDR3 for alpha chain variable domain of TCR clone 265843 (TRAV17, TRAJ56)
CATVPAGANSKLTF

SEQ ID NO: 531686 - protein, 14 aa, Homo sapiens
  CDR3 for beta chain variable domain of TCR clone 265843 (TRBV7-3, TRBJ1-1)
CASSLKGGNTEAFF

SEQ ID NO: 531687 - protein, 13 aa, Homo sapiens
  CDR3 for alpha chain variable domain of TCR clone 265844 (TRAV12-3, TRAJ53)
CAIRGGSNYKLTF

SEQ ID NO: 531688 - protein, 15 aa, Homo sapiens
  CDR3 for beta chain variable domain of TCR clone 265844 (TRBV2, TRBJ2-1)
CATQARLVMIGEQFF

SEQ ID NO: 531689 - protein, 14 aa, Homo sapiens
  CDR3 for alpha chain variable domain of TCR clone 265845 (TRAV17, TRAJ31)
CATVLRNNNARLMF

SEQ ID NO: 531690 - protein, 13 aa, Homo sapiens
  CDR3 for beta chain variable domain of TCR clone 265845 (TRBV4-1, TRBJ2-2)
CASSQENTGELFF

SEQ ID NO: 531691 - protein, 11 aa, Homo sapiens
  CDR3 for alpha chain variable domain of TCR clone 265846 (TRAV27, TRAJ47)
CRSNQGNKLVF

SEQ ID NO: 531692 - protein, 15 aa, Homo sapiens
  CDR3 for beta chain variable domain of TCR clone 265846 (TRBV7-9, TRBJ2-1)
CQQRCSGGLLNEQFF

SEQ ID NO: 531693 - protein, 14 aa, Homo sapiens
  CDR3 for alpha chain variable domain of TCR clone 265847 (TRAV1-2, TRAJ8)
CAVREDTGFQKLVF

SEQ ID NO: 531694 - protein, 11 aa, Homo sapiens
  CDR3 for beta chain variable domain of TCR clone 265847 (TRBV4-1, TRBJ1-2)
CASSGRNGYTF

SEQ ID NO: 531695 - protein, 11 aa, Homo sapiens
  CDR3 for alpha chain variable domain of TCR clone 265848 (TRAV21, TRAJ34)
CAPLDTDRLIF

SEQ ID NO: 531696 - protein, 16 aa, Homo sapiens
  CDR3 for beta chain variable domain of TCR clone 265848 (TRBV5-1, TRBJ2-3)
CASSLAGDRGTDTQYF

SEQ ID NO: 531697 - protein, 16 aa, Homo sapiens
  CDR3 for alpha chain variable domain of TCR clone 265849 (TRAV12-3, TRAJ53)
CAMSPGSGGSDYKLTF

SEQ ID NO: 531698 - protein, 12 aa, Homo sapiens
  CDR3 for beta chain variable domain of TCR clone 265849 (TRBV12-4, TRBJ2-7)
CASSLGGYEQYF

SEQ ID NO: 531699 - protein, 14 aa, Homo sapiens
  CDR3 for alpha chain variable domain of TCR clone 265850 (TRAV12-3, TRAJ10)
SHLPLTGGGNKLTF

SEQ ID NO: 531700 - protein, 15 aa, Homo sapiens
  CDR3 for beta chain variable domain of TCR clone 265850 (TRBV3-1, TRBJ2-2)
CASSQGSGTFGELFF

SEQ ID NO: 531701 - protein, 16 aa, Homo sapiens
  CDR3 for alpha chain variable domain of TCR clone 265851 (TRAV1-1, TRAJ10)
CAVRGVLTGGGNKLTF

SEQ ID NO: 531702 - protein, 12 aa, Homo sapiens
  CDR3 for beta chain variable domain of TCR clone 265851 (TRBV7-8, TRBJ2-7)
CASSLGDREQYF

SEQ ID NO: 531703 - protein, 15 aa, Homo sapiens
  CDR3 for alpha chain variable domain of TCR clone 265852 (TRAV20, TRAJ58)
CAVQDLETSGSRLTF

SEQ ID NO: 531704 - protein, 11 aa, Homo sapiens
  CDR3 for beta chain variable domain of TCR clone 265852 (TRBV12-4, TRBJ2-3)
CASTATDTQYF

SEQ ID NO: 531705 - protein, 15 aa, Homo sapiens
  CDR3 for alpha chain variable domain of TCR clone 265853 (TRAV26-1, TRAJ40)
CIVRAVPSGTYKYIF

SEQ ID NO: 531706 - protein, 14 aa, Homo sapiens
  CDR3 for beta chain variable domain of TCR clone 265853 (TRBV19, TRBJ2-1)
CASKDPALANEQFF

SEQ ID NO: 531707 - protein, 12 aa, Homo sapiens
  CDR3 for alpha chain variable domain of TCR clone 265854 (TRAV12-2, TRAJ6)
CAVKVGSYIPTF

SEQ ID NO: 531708 - protein, 11 aa, Homo sapiens
  CDR3 for beta chain variable domain of TCR clone 265854 (TRBV12-4, TRBJ2-3)
CASTATDTQYF

SEQ ID NO: 531709 - protein, 12 aa, Homo sapiens
  CDR3 for alpha chain variable domain of TCR clone 265855 (TRAV13-2, TRAJ23)
CAERHRGGKLIF

SEQ ID NO: 531710 - protein, 12 aa, Homo sapiens
  CDR3 for beta chain variable domain of TCR clone 265855 (TRBV7-8, TRBJ2-7)
CASGLGDREQYF

SEQ ID NO: 531711 - protein, 12 aa, Homo sapiens
  CDR3 for alpha chain variable domain of TCR clone 265856 (TRAV17, TRAJ29)
CYASSGNTPLVF

SEQ ID NO: 531712 - protein, 15 aa, Homo sapiens
  CDR3 for beta chain variable domain of TCR clone 265856 (TRBV27, TRBJ1-6)
CASSFDRGLGSPLHF

SEQ ID NO: 531713 - protein, 12 aa, Homo sapiens
  CDR3 for alpha chain variable domain of TCR clone 265857 (TRAV8-3, TRAJ26)
CAGDNYGQNFVF

SEQ ID NO: 531714 - protein, 12 aa, Homo sapiens
  CDR3 for beta chain variable domain of TCR clone 265857 (TRBV11-2, TRBJ2-1)
CASSSGNNEQFF

SEQ ID NO: 531715 - protein, 14 aa, Homo sapiens
  CDR3 for alpha chain variable domain of TCR clone 265858 (TRAV35, TRAJ22)
CAGLMPGSARQLTF

SEQ ID NO: 531716 - protein, 15 aa, Homo sapiens
  CDR3 for beta chain variable domain of TCR clone 265858 (TRBV12-4, TRBJ2-5)
CASSPPAGLQETQYF

SEQ ID NO: 531717 - protein, 14 aa, Homo sapiens
  CDR3 for alpha chain variable domain of TCR clone 265859 (TRAV38-1, TRAJ40)
CALRPTSGTYKYSF

SEQ ID NO: 531718 - protein, 14 aa, Homo sapiens
  CDR3 for beta chain variable domain of TCR clone 265859 (TRBV5-4, TRBJ1-1)
CASSLDSRRDEAFF

SEQ ID NO: 531719 - protein, 13 aa, Homo sapiens
  CDR3 for alpha chain variable domain of TCR clone 265860 (TRAV12-1, TRAJ30)
CVVNTYRDDKIIF

SEQ ID NO: 531720 - protein, 13 aa, Homo sapiens
  CDR3 for beta chain variable domain of TCR clone 265860 (TRBV9, TRBJ1-2)
CASSRGGGGGYSF

SEQ ID NO: 531721 - protein, 15 aa, Homo sapiens
  CDR3 for alpha chain variable domain of TCR clone 265861 (TRAV26-1, TRAJ22)
CIVRVSFWFCKATDF

SEQ ID NO: 531722 - protein, 14 aa, Homo sapiens
  CDR3 for beta chain variable domain of TCR clone 265861 (TRBV18, TRBJ2-7)
CASSPRGGAYEQYF

SEQ ID NO: 531723 - protein, 14 aa, Homo sapiens
  CDR3 for alpha chain variable domain of TCR clone 265862 (TRAV38-1, TRAJ45)
CSSHSGGGAYGLTF

SEQ ID NO: 531724 - protein, 13 aa, Homo sapiens
  CDR3 for beta chain variable domain of TCR clone 265862 (TRBV10-3, TRBJ1-2)
CAISERDSYGYTF

SEQ ID NO: 531725 - protein, 13 aa, Homo sapiens
  CDR3 for alpha chain variable domain of TCR clone 265863 (TRAV36/DV7, TRAJ53)
CALSGGSNYKLTF

SEQ ID NO: 531726 - protein, 13 aa, Homo sapiens
  CDR3 for beta chain variable domain of TCR clone 265863 (TRBV28, TRBJ2-4)
CASSQSSKNIKYF

SEQ ID NO: 531727 - protein, 18 aa, Homo sapiens
  CDR3 for alpha chain variable domain of TCR clone 265864 (TRAV26-1, TRAJ30)
CCVLLDRQSTNRDDKIIF

SEQ ID NO: 531728 - protein, 18 aa, Homo sapiens
  CDR3 for beta chain variable domain of TCR clone 265864 (TRBV4-1, TRBJ1-5)
CASSQDPRGQGLNQPQHF

SEQ ID NO: 531729 - protein, 20 aa, Homo sapiens
  CDR3 for alpha chain variable domain of TCR clone 265865 (TRAV1-1, TRAJ4)
CLLLLRCEGFLSGGYNKLIF

SEQ ID NO: 531730 - protein, 16 aa, Homo sapiens
  CDR3 for beta chain variable domain of TCR clone 265865 (TRBV28, TRBJ1-4)
CASSPPYRGRSETLFF

SEQ ID NO: 531731 - protein, 18 aa, Homo sapiens
  CDR3 for alpha chain variable domain of TCR clone 265866 (TRAV13-1, TRAJ52)
CAASKRSAGGTSYGKLTF

SEQ ID NO: 531732 - protein, 15 aa, Homo sapiens
  CDR3 for beta chain variable domain of TCR clone 265866 (TRBV12-4, TRBJ2-7)
CASSQTGAISYEQYF

SEQ ID NO: 531733 - protein, 13 aa, Homo sapiens
  CDR3 for alpha chain variable domain of TCR clone 265867 (TRAV1-2, TRAJ9)
CAVLNTGGFKTIF

SEQ ID NO: 531734 - protein, 14 aa, Homo sapiens
  CDR3 for beta chain variable domain of TCR clone 265867 (TRBV7-6, TRBJ2-1)
CASSVAGEINEQFF

SEQ ID NO: 531735 - protein, 14 aa, Homo sapiens
  CDR3 for alpha chain variable domain of TCR clone 265868 (TRAV16, TRAJ33)
CALSTMDCNYQLIW

SEQ ID NO: 531736 - protein, 15 aa, Homo sapiens
  CDR3 for beta chain variable domain of TCR clone 265868 (TRBV9, TRBJ1-6)
CASSVAGTGDSPLHF

SEQ ID NO: 531737 - protein, 15 aa, Homo sapiens
  CDR3 for alpha chain variable domain of TCR clone 265869 (TRAV26-1, TRAJ48)
CIARWSWFGNEKLTF

SEQ ID NO: 531738 - protein, 12 aa, Homo sapiens
  CDR3 for beta chain variable domain of TCR clone 265869 (TRBV19, TRBJ2-5)
CTSRISEETQYF

SEQ ID NO: 531739 - protein, 12 aa, Homo sapiens
  CDR3 for alpha chain variable domain of TCR clone 265870 (TRAV1-1, TRAJ8)
CAGGTGFQKLVF

SEQ ID NO: 531740 - protein, 17 aa, Homo sapiens
  CDR3 for beta chain variable domain of TCR clone 265870 (TRBV4-3, TRBJ2-1)
CASSQFSSGRASGEQFF

SEQ ID NO: 531741 - protein, 18 aa, Homo sapiens
  CDR3 for alpha chain variable domain of TCR clone 265871 (TRAV26-1, TRAJ23)
CIVRVGLEVWNQGGKLIF

SEQ ID NO: 531742 - protein, 12 aa, Homo sapiens
  CDR3 for beta chain variable domain of TCR clone 265871 (TRBV14, TRBJ1-1)
CASSQLKGLAFF

SEQ ID NO: 531743 - protein, 14 aa, Homo sapiens
  CDR3 for alpha chain variable domain of TCR clone 265872 (TRAV24, TRAJ37)
CASDGSSHTGKLIF

SEQ ID NO: 531744 - protein, 15 aa, Homo sapiens
  CDR3 for beta chain variable domain of TCR clone 265872 (TRBV7-3, TRBJ2-2)
CASKANGANTGELFF

SEQ ID NO: 531745 - protein, 12 aa, Homo sapiens
  CDR3 for alpha chain variable domain of TCR clone 265873 (TRAV17, TRAJ20)
CATLANDYKLSF

SEQ ID NO: 531746 - protein, 16 aa, Homo sapiens
  CDR3 for beta chain variable domain of TCR clone 265873 (TRBV7-2, TRBJ1-6)
CASSLAPGNLNSPLHF

SEQ ID NO: 531747 - protein, 12 aa, Homo sapiens
  CDR3 for alpha chain variable domain of TCR clone 265874 (TRAV27, TRAJ35)
CAAADFGNVLHC

SEQ ID NO: 531748 - protein, 16 aa, Homo sapiens
  CDR3 for beta chain variable domain of TCR clone 265874 (TRBV6-1, TRBJ2-1)
CASILRQGSSYNEQFF

SEQ ID NO: 531749 - protein, 12 aa, Homo sapiens
  CDR3 for alpha chain variable domain of TCR clone 265875 (TRAV25, TRAJ11)
CAGASGYSTLTF

SEQ ID NO: 531750 - protein, 15 aa, Homo sapiens
  CDR3 for beta chain variable domain of TCR clone 265875 (TRBV20-1, TRBJ2-7)
CSAESGTSGAYEQYF

SEQ ID NO: 531751 - protein, 12 aa, Homo sapiens
  CDR3 for alpha chain variable domain of TCR clone 265876 (TRAV17, TRAJ4)
CVTRGGYNKLIF

SEQ ID NO: 531752 - protein, 13 aa, Homo sapiens
  CDR3 for beta chain variable domain of TCR clone 265876 (TRBV12-4, TRBJ2-1)
CASSLAENNEQFF

SEQ ID NO: 531753 - protein, 16 aa, Homo sapiens
  CDR3 for alpha chain variable domain of TCR clone 265877 (TRAV12-2, TRAJ43)
CAGDDMRFGAGPRLTV

SEQ ID NO: 531754 - protein, 16 aa, Homo sapiens
  CDR3 for beta chain variable domain of TCR clone 265877 (TRBV2, TRBJ2-4)
CASSEAPGGEQNIQYF

SEQ ID NO: 531755 - protein, 13 aa, Homo sapiens
  CDR3 for alpha chain variable domain of TCR clone 265878 (TRAV21, TRAJ33)
CAVAGDSNYQLIW

SEQ ID NO: 531756 - protein, 14 aa, Homo sapiens
  CDR3 for beta chain variable domain of TCR clone 265878 (TRBV2, TRBJ2-1)
CASRTGSSYNEQFF

SEQ ID NO: 531757 - protein, 14 aa, Homo sapiens
  CDR3 for alpha chain variable domain of TCR clone 265879 (TRAV8-3, TRAJ20)
CAVGPRGNDYKLSS

SEQ ID NO: 531758 - protein, 11 aa, Homo sapiens
  CDR3 for beta chain variable domain of TCR clone 265879 (TRBV10-3, TRBJ2-2)
CATKGTGELFF

SEQ ID NO: 531759 - protein, 13 aa, Homo sapiens
  CDR3 for alpha chain variable domain of TCR clone 265880 (TRAV23/DV6, TRAJ47)
CAASMTRGNKLVF

SEQ ID NO: 531760 - protein, 14 aa, Homo sapiens
  CDR3 for beta chain variable domain of TCR clone 265880 (TRBV7-3, TRBJ1-1)
YASSLKGGNTEAVF

SEQ ID NO: 531761 - protein, 18 aa, Homo sapiens
  CDR3 for alpha chain variable domain of TCR clone 265881 (TRAV16, TRAJ10)
CAPAREEETNSPLDRHSA

SEQ ID NO: 531762 - protein, 14 aa, Homo sapiens
  CDR3 for beta chain variable domain of TCR clone 265881 (TRBV7-2, TRBJ2-1)
CASSLGVGYNEQFF

SEQ ID NO: 531763 - protein, 15 aa, Homo sapiens
  CDR3 for alpha chain variable domain of TCR clone 265882 (TRAV2, TRAJ24)
CAVVRLKNSWGKLQF

SEQ ID NO: 531764 - protein, 16 aa, Homo sapiens
  CDR3 for beta chain variable domain of TCR clone 265882 (TRBV7-7, TRBJ2-3)
CASGPGTSGSTDTQYF

SEQ ID NO: 531765 - protein, 12 aa, Homo sapiens
  CDR3 for alpha chain variable domain of TCR clone 265883 (TRAV12-2, TRAJ36)
CAVRIGAKNLFF

SEQ ID NO: 531766 - protein, 16 aa, Homo sapiens
  CDR3 for beta chain variable domain of TCR clone 265883 (TRBV18, TRBJ2-7)
CASSPLPGGLSYEQYF

SEQ ID NO: 531767 - protein, 12 aa, Homo sapiens
  CDR3 for alpha chain variable domain of TCR clone 265884 (TRAV13-1, TRAJ20)
CAARQNDYKLSF

SEQ ID NO: 531768 - protein, 16 aa, Homo sapiens
  CDR3 for beta chain variable domain of TCR clone 265884 (TRBV12-5, TRBJ2-5)
CASGPRTSGNQETQYF

SEQ ID NO: 531769 - protein, 13 aa, Homo sapiens
  CDR3 for alpha chain variable domain of TCR clone 265885 (TRAV20, TRAJ49)
CAVQARTGNQFHF

SEQ ID NO: 531770 - protein, 11 aa, Homo sapiens
  CDR3 for beta chain variable domain of TCR clone 265885 (TRBV11-2, TRBJ1-1)
CASSINTEAFF

SEQ ID NO: 531771 - protein, 14 aa, Homo sapiens
  CDR3 for alpha chain variable domain of TCR clone 265886 (TRAV8-3, TRAJ4)
CAVGASGGYNKLIF

SEQ ID NO: 531772 - protein, 13 aa, Homo sapiens
  CDR3 for beta chain variable domain of TCR clone 265886 (TRBV18, TRBJ2-5)
CASSLPGQETQYF

SEQ ID NO: 531773 - protein, 15 aa, Homo sapiens
  CDR3 for alpha chain variable domain of TCR clone 265887 (TRAV23/DV6, TRAJ37)
CAAGEGSGNTGKLIF

SEQ ID NO: 531774 - protein, 17 aa, Homo sapiens
  CDR3 for beta chain variable domain of TCR clone 265887 (TRBV11-2, TRBJ2-4)
CASSSVGPGGHRNIQYF

SEQ ID NO: 531775 - protein, 13 aa, Homo sapiens
  CDR3 for alpha chain variable domain of TCR clone 265888 (TRAV8-6, TRAJ49)
CAVITNTGNQFYF

SEQ ID NO: 531776 - protein, 16 aa, Homo sapiens
  CDR3 for beta chain variable domain of TCR clone 265888 (TRBV28, TRBJ1-5)
CASSFRGGYSNQPQHF

SEQ ID NO: 531777 - protein, 14 aa, Homo sapiens
  CDR3 for alpha chain variable domain of TCR clone 265889 (TRAV12-3, TRAJ10)
SHLPLTGGGNKLTF

SEQ ID NO: 531778 - protein, 14 aa, Homo sapiens
  CDR3 for beta chain variable domain of TCR clone 265889 (TRBV24-1, TRBJ1-1)
CATSIPRGDTEAFF

SEQ ID NO: 531779 - protein, 13 aa, Homo sapiens
  CDR3 for alpha chain variable domain of TCR clone 265890 (TRAV20, TRAJ56)
CAVQAGANSKLTF

SEQ ID NO: 531780 - protein, 14 aa, Homo sapiens
  CDR3 for beta chain variable domain of TCR clone 265890 (TRBV28, TRBJ1-1)
CASSPRTRWDEAFF

SEQ ID NO: 531781 - protein, 12 aa, Homo sapiens
  CDR3 for alpha chain variable domain of TCR clone 265891 (TRAV20, TRAJ4)
CSASGGYNKLIF

SEQ ID NO: 531782 - protein, 13 aa, Homo sapiens
  CDR3 for beta chain variable domain of TCR clone 265891 (TRBV9, TRBJ2-1)
CASSPSGRNEQFF

SEQ ID NO: 531783 - protein, 12 aa, Homo sapiens
  CDR3 for alpha chain variable domain of TCR clone 265892 (TRAV27, TRAJ35)
CAGADFGNVLHC

SEQ ID NO: 531784 - protein, 15 aa, Homo sapiens
  CDR3 for beta chain variable domain of TCR clone 265892 (TRBV20-1, TRBJ2-7)
CSARDRVSGMDEQYS

SEQ ID NO: 531785 - protein, 14 aa, Homo sapiens
  CDR3 for alpha chain variable domain of TCR clone 265893 (TRAV8-6, TRAJ54)
CAVSGLQGAQKLVF

SEQ ID NO: 531786 - protein, 14 aa, Homo sapiens
  CDR3 for beta chain variable domain of TCR clone 265893 (TRBV7-8, TRBJ2-7)
CASSPRDRVYEQYF

SEQ ID NO: 531787 - protein, 11 aa, Homo sapiens
  CDR3 for alpha chain variable domain of TCR clone 265894 (TRAV2, TRAJ31)
CAAGPPARLMF

SEQ ID NO: 531788 - protein, 12 aa, Homo sapiens
  CDR3 for beta chain variable domain of TCR clone 265894 (TRBV11-2, TRBJ2-2)
CASSLPTGELFF

SEQ ID NO: 531789 - protein, 14 aa, Homo sapiens
  CDR3 for alpha chain variable domain of TCR clone 265895 (TRAV17, TRAJ35)
CATDRPGFGNELHC

SEQ ID NO: 531790 - protein, 15 aa, Homo sapiens
  CDR3 for beta chain variable domain of TCR clone 265895 (TRBV28, TRBJ2-5)
CASSSGRVIQETQYF

SEQ ID NO: 531791 - protein, 12 aa, Homo sapiens
  CDR3 for alpha chain variable domain of TCR clone 265896 (TRAV12-3, TRAJ17)
CAITLAGNKLTF

SEQ ID NO: 531792 - protein, 15 aa, Homo sapiens
  CDR3 for beta chain variable domain of TCR clone 265896 (TRBV20-1, TRBJ2-7)
CSARDRVSGMDEQYF

SEQ ID NO: 531793 - protein, 13 aa, Homo sapiens
  CDR3 for alpha chain variable domain of TCR clone 265897 (TRAV13-2, TRAJ13)
CAERPGGYQKVTF

SEQ ID NO: 531794 - protein, 15 aa, Homo sapiens
  CDR3 for beta chain variable domain of TCR clone 265897 (TRBV4-1, TRBJ1-4)
CASSDTGVTNEKLFF

SEQ ID NO: 531795 - protein, 12 aa, Homo sapiens
  CDR3 for alpha chain variable domain of TCR clone 265898 (TRAV12-3, TRAJ17)
CAMTPTGNKLTF

SEQ ID NO: 531796 - protein, 15 aa, Homo sapiens
  CDR3 for beta chain variable domain of TCR clone 265898 (TRBV20-1, TRBJ2-7)
GSARDRVSGMDEQYF

SEQ ID NO: 531797 - protein, 13 aa, Homo sapiens
  CDR3 for alpha chain variable domain of TCR clone 265899 (TRAV16, TRAJ10)
CAPAREEETNSPF

SEQ ID NO: 531798 - protein, 15 aa, Homo sapiens
  CDR3 for beta chain variable domain of TCR clone 265899 (TRBV6-3, TRBJ2-7)
CASSSPGTVCYEQYF

SEQ ID NO: 531799 - protein, 17 aa, Homo sapiens
  CDR3 for alpha chain variable domain of TCR clone 265900 (TRAV3, TRAJ12)
CAVRDGGGMDSSYKLIF

SEQ ID NO: 531800 - protein, 13 aa, Homo sapiens
  CDR3 for beta chain variable domain of TCR clone 265900 (TRBV4-2, TRBJ1-1)
CASSQAGNTEAFF

SEQ ID NO: 531801 - protein, 13 aa, Homo sapiens
  CDR3 for alpha chain variable domain of TCR clone 265901 (TRAV27, TRAJ40)
CAGPPSGTYKYIF

SEQ ID NO: 531802 - protein, 14 aa, Homo sapiens
  CDR3 for beta chain variable domain of TCR clone 265901 (TRBV23-1, TRBJ2-5)
CASSFLRSQDTQYF

SEQ ID NO: 531803 - protein, 20 aa, Homo sapiens
  CDR3 for alpha chain variable domain of TCR clone 265902 (TRAV38-2/DV8, TRAJ42)
CISVLIGARGGEGSQGNLIF

SEQ ID NO: 531804 - protein, 16 aa, Homo sapiens
  CDR3 for beta chain variable domain of TCR clone 265902 (TRBV20-1, TRBJ1-4)
CSAPGQGLLTNEKLFF

SEQ ID NO: 531805 - protein, 14 aa, Homo sapiens
  CDR3 for alpha chain variable domain of TCR clone 265903 (TRAV35, TRAJ50)
CAAHRKTSYDKVIF

SEQ ID NO: 531806 - protein, 13 aa, Homo sapiens
  CDR3 for beta chain variable domain of TCR clone 265903 (TRBV7-7, TRBJ2-3)
CASSLSRADTQYF

SEQ ID NO: 531807 - protein, 15 aa, Homo sapiens
  CDR3 for alpha chain variable domain of TCR clone 265904 (TRAV3, TRAJ3)
CAVRDGHSSASKILF

SEQ ID NO: 531808 - protein, 17 aa, Homo sapiens
  CDR3 for beta chain variable domain of TCR clone 265904 (TRBV25-1, TRBJ2-7)
CASSDARVVFSSYEQYF

SEQ ID NO: 531809 - protein, 13 aa, Homo sapiens
  CDR3 for alpha chain variable domain of TCR clone 265905 (TRAV3, TRAJ21)
CAVREPDFNKFYF

SEQ ID NO: 531810 - protein, 15 aa, Homo sapiens
  CDR3 for beta chain variable domain of TCR clone 265905 (TRBV2, TRBJ2-1)
CDSSEEREGDNEQFF

SEQ ID NO: 531811 - protein, 17 aa, Homo sapiens
  CDR3 for alpha chain variable domain of TCR clone 265906 (TRAV23/DV6, TRAJ57)
CAASSTLSQGGSEKLVS

SEQ ID NO: 531812 - protein, 14 aa, Homo sapiens
  CDR3 for beta chain variable domain of TCR clone 265906 (TRBV25-1, TRBJ1-1)
CASTHLGGNTEAFF

SEQ ID NO: 531813 - protein, 14 aa, Homo sapiens
  CDR3 for alpha chain variable domain of TCR clone 265907 (TRAV21, TRAJ15)
CAVSLNQAGTALIF

SEQ ID NO: 531814 - protein, 12 aa, Homo sapiens
  CDR3 for beta chain variable domain of TCR clone 265907 (TRBV7-8, TRBJ2-7)
CASSLGDREQYF

SEQ ID NO: 531815 - protein, 13 aa, Homo sapiens
  CDR3 for alpha chain variable domain of TCR clone 265908 (TRAV2, TRAJ29)
CAEQNSGNTPLVF

SEQ ID NO: 531816 - protein, 13 aa, Homo sapiens
  CDR3 for beta chain variable domain of TCR clone 265908 (TRBV28, TRBJ1-2)
CASSPGGRNGYTF

SEQ ID NO: 531817 - protein, 14 aa, Homo sapiens
  CDR3 for alpha chain variable domain of TCR clone 265909 (TRAV12-3, TRAJ9)
CAMSPNTGGFKTIF

SEQ ID NO: 531818 - protein, 14 aa, Homo sapiens
  CDR3 for beta chain variable domain of TCR clone 265909 (TRBV6-3, TRBJ1-1)
CASSYQRRDSEAFF

SEQ ID NO: 531819 - protein, 15 aa, Homo sapiens
  CDR3 for alpha chain variable domain of TCR clone 265910 (TRAV27, TRAJ38)
CAARRNAGNNRKLIW

SEQ ID NO: 531820 - protein, 14 aa, Homo sapiens
  CDR3 for beta chain variable domain of TCR clone 265910 (TRBV5-1, TRBJ2-1)
CASATSGAYNEQFF

SEQ ID NO: 531821 - protein, 14 aa, Homo sapiens
  CDR3 for alpha chain variable domain of TCR clone 265911 (TRAV26-1, TRAJ34)
CIVRVAYNTDKLFF

SEQ ID NO: 531822 - protein, 16 aa, Homo sapiens
  CDR3 for beta chain variable domain of TCR clone 265911 (TRBV7-3, TRBJ2-2)
CASSLKRGTLSGELFF

SEQ ID NO: 531823 - protein, 10 aa, Homo sapiens
  CDR3 for alpha chain variable domain of TCR clone 265912 (TRAV12-1, TRAJ24)
CVVNRGKFQF

SEQ ID NO: 531824 - protein, 14 aa, Homo sapiens
  CDR3 for beta chain variable domain of TCR clone 265912 (TRBV19, TRBJ2-1)
CASPTFVLSGEQFF

SEQ ID NO: 531825 - protein, 14 aa, Homo sapiens
  CDR3 for alpha chain variable domain of TCR clone 265913 (TRAV1-2, TRAJ16)
YAVNRFSDGQKLLF

SEQ ID NO: 531826 - protein, 17 aa, Homo sapiens
  CDR3 for beta chain variable domain of TCR clone 265913 (TRBV20-1, TRBJ2-1)
CSAPPRLAGTRYNEQFF

SEQ ID NO: 531827 - protein, 13 aa, Homo sapiens
  CDR3 for alpha chain variable domain of TCR clone 265914 (TRAV12-1, TRAJ29)
CVVRNSGNTPLVF

SEQ ID NO: 531828 - protein, 18 aa, Homo sapiens
  CDR3 for beta chain variable domain of TCR clone 265914 (TRBV7-2, TRBJ2-3)
CASSLKREGSGITDTQYF

SEQ ID NO: 531829 - protein, 14 aa, Homo sapiens
  CDR3 for alpha chain variable domain of TCR clone 265915 (TRAV26-2, TRAJ32)
CILFRGGATNKLIF

SEQ ID NO: 531830 - protein, 14 aa, Homo sapiens
  CDR3 for beta chain variable domain of TCR clone 265915 (TRBV2, TRBJ2-7)
CASSVLGAAYEQYF

SEQ ID NO: 531831 - protein, 14 aa, Homo sapiens
  CDR3 for alpha chain variable domain of TCR clone 265916 (TRAV12-2, TRAJ45)
CAVNIGGGAVGLTF

SEQ ID NO: 531832 - protein, 13 aa, Homo sapiens
  CDR3 for beta chain variable domain of TCR clone 265916 (TRBV19, TRBJ2-2)
CASSIWSTGELFF

SEQ ID NO: 531833 - protein, 18 aa, Homo sapiens
  CDR3 for alpha chain variable domain of TCR clone 265917 (TRAV23/DV6, TRAJ10)
CAASRLLYSRAEETNSPL

SEQ ID NO: 531834 - protein, 15 aa, Homo sapiens
  CDR3 for beta chain variable domain of TCR clone 265917 (TRBV20-1, TRBJ2-1)
CSAEGGLLAGDEQFF

SEQ ID NO: 531835 - protein, 18 aa, Homo sapiens
  CDR3 for alpha chain variable domain of TCR clone 265918 (TRAV12-1, TRAJ26)
SSVIQPPTSVPYGQNFVF

SEQ ID NO: 531836 - protein, 16 aa, Homo sapiens
  CDR3 for beta chain variable domain of TCR clone 265918 (TRBV5-1, TRBJ2-5)
CASSLRRTSGQETQYF

SEQ ID NO: 531837 - protein, 11 aa, Homo sapiens
  CDR3 for alpha chain variable domain of TCR clone 265919 (TRAV1-1, TRAJ23)
CAVRQGGQLIF

SEQ ID NO: 531838 - protein, 13 aa, Homo sapiens
  CDR3 for beta chain variable domain of TCR clone 265919 (TRBV7-3, TRBJ1-1)
CASSQDWGAEAFF

SEQ ID NO: 531839 - protein, 14 aa, Homo sapiens
  CDR3 for alpha chain variable domain of TCR clone 265920 (TRAV1-2, TRAJ8)
CAVREDTGFQKLVF

SEQ ID NO: 531840 - protein, 15 aa, Homo sapiens
  CDR3 for beta chain variable domain of TCR clone 265920 (TRBV12-4, TRBJ2-5)
CASSPPTGLQETQFF

SEQ ID NO: 531841 - protein, 15 aa, Homo sapiens
  CDR3 for alpha chain variable domain of TCR clone 265921 (TRAV12-3, TRAJ52)
CNWGAGGTSYGKLTF

SEQ ID NO: 531842 - protein, 13 aa, Homo sapiens
  CDR3 for beta chain variable domain of TCR clone 265921 (TRBV20-1, TRBJ2-5)
CSARGDYQETQYF

SEQ ID NO: 531843 - protein, 15 aa, Homo sapiens
  CDR3 for alpha chain variable domain of TCR clone 265922 (TRAV13-1, TRAJ43)
CAATPELVETMTCAL

SEQ ID NO: 531844 - protein, 15 aa, Homo sapiens
  CDR3 for beta chain variable domain of TCR clone 265922 (TRBV10-2, TRBJ2-6)
CASSEQGTGANVLTF

SEQ ID NO: 531845 - protein, 16 aa, Homo sapiens
  CDR3 for alpha chain variable domain of TCR clone 265923 (TRAV12-3, TRAJ45)
CAMGWGSGGGADGLTF

SEQ ID NO: 531846 - protein, 17 aa, Homo sapiens
  CDR3 for beta chain variable domain of TCR clone 265923 (TRBV5-4, TRBJ2-1)
CASSSAGGRGPYNEQFF

SEQ ID NO: 531847 - protein, 13 aa, Homo sapiens
  CDR3 for alpha chain variable domain of TCR clone 265924 (TRAV23/DV6, TRAJ27)
CAARYTNAGKSTF

SEQ ID NO: 531848 - protein, 14 aa, Homo sapiens
  CDR3 for beta chain variable domain of TCR clone 265924 (TRBV20-1, TRBJ2-5)
CSASGLAVQETQYF

SEQ ID NO: 531849 - protein, 15 aa, Homo sapiens
  CDR3 for alpha chain variable domain of TCR clone 265925 (TRAV2, TRAJ9)
CAVEDRGTGGFKTIF

SEQ ID NO: 531850 - protein, 19 aa, Homo sapiens
  CDR3 for beta chain variable domain of TCR clone 265925 (TRBV28, TRBJ2-7)
CASSYSGTSRMGWVYEQYF

SEQ ID NO: 531851 - protein, 15 aa, Homo sapiens
  CDR3 for alpha chain variable domain of TCR clone 265926 (TRAV8-2, TRAJ40)
CVVLGTTSGTYKYIF

SEQ ID NO: 531852 - protein, 15 aa, Homo sapiens
  CDR3 for beta chain variable domain of TCR clone 265926 (TRBV11-3, TRBJ2-3)
CASLKDGREGDTQYF

SEQ ID NO: 531853 - protein, 14 aa, Homo sapiens
  CDR3 for alpha chain variable domain of TCR clone 265927 (TRAV8-4, TRAJ13)
CAVTHSGGYQKVTF

SEQ ID NO: 531854 - protein, 14 aa, Homo sapiens
  CDR3 for beta chain variable domain of TCR clone 265927 (TRBV7-2, TRBJ1-2)
CASSQTGSTYGYTF

SEQ ID NO: 531855 - protein, 14 aa, Homo sapiens
  CDR3 for alpha chain variable domain of TCR clone 265928 (TRAV26-1, TRAJ34)
CIVRVAYNTDKLIF

SEQ ID NO: 531856 - protein, 13 aa, Homo sapiens
  CDR3 for beta chain variable domain of TCR clone 265928 (TRBV14, TRBJ1-1)
CASSQEAGTEAFF

SEQ ID NO: 531857 - protein, 12 aa, Homo sapiens
  CDR3 for alpha chain variable domain of TCR clone 265929 (TRAV29/DV5, TRAJ34)
CAARHNTDKLIV

SEQ ID NO: 531858 - protein, 15 aa, Homo sapiens
  CDR3 for beta chain variable domain of TCR clone 265929 (TRBV19, TRBJ2-7)
CASSPAGSGEALRYF

SEQ ID NO: 531859 - protein, 17 aa, Homo sapiens
  CDR3 for alpha chain variable domain of TCR clone 265930 (TRAV3, TRAJ42)
CGVRDRDYGGSQGNLIF

SEQ ID NO: 531860 - protein, 15 aa, Homo sapiens
  CDR3 for beta chain variable domain of TCR clone 265930 (TRBV2, TRBJ2-7)
CASSEGLARSYEQYF

SEQ ID NO: 531861 - protein, 13 aa, Homo sapiens
  CDR3 for alpha chain variable domain of TCR clone 265931 (TRAV35, TRAJ42)
CAGFPGSQGNLIF

SEQ ID NO: 531862 - protein, 16 aa, Homo sapiens
  CDR3 for beta chain variable domain of TCR clone 265931 (TRBV19, TRBJ2-1)
CASSKAGPSAYNEQFF

SEQ ID NO: 531863 - protein, 12 aa, Homo sapiens
  CDR3 for alpha chain variable domain of TCR clone 265932 (TRAV8-4, TRAJ43)
CAVSVNNNDMRF

SEQ ID NO: 531864 - protein, 14 aa, Homo sapiens
  CDR3 for beta chain variable domain of TCR clone 265932 (TRBV3-1, TRBJ2-5)
CASSQGPDQETQYF

SEQ ID NO: 531865 - protein, 16 aa, Homo sapiens
  CDR3 for alpha chain variable domain of TCR clone 265933 (TRAV30, TRAJ24)
CGTEIVDADSWGKFQF

SEQ ID NO: 531866 - protein, 15 aa, Homo sapiens
  CDR3 for beta chain variable domain of TCR clone 265933 (TRBV6-3, TRBJ2-7)
CVSSSPGTVFYEQYF

SEQ ID NO: 531867 - protein, 14 aa, Homo sapiens
  CDR3 for alpha chain variable domain of TCR clone 265934 (TRAV2, TRAJ9)
CAVEDRSGGVKTIF

SEQ ID NO: 531868 - protein, 17 aa, Homo sapiens
  CDR3 for beta chain variable domain of TCR clone 265934 (TRBV20-1, TRBJ2-7)
CSATRAGGVAGVEEQYF

SEQ ID NO: 531869 - protein, 13 aa, Homo sapiens
  CDR3 for alpha chain variable domain of TCR clone 265935 (TRAV27, TRAJ40)
CAVPPSGTYKYTF

SEQ ID NO: 531870 - protein, 13 aa, Homo sapiens
  CDR3 for beta chain variable domain of TCR clone 265935 (TRBV28, TRBJ1-2)
CAGRDRGNYGYTF

SEQ ID NO: 531871 - protein, 12 aa, Homo sapiens
  CDR3 for alpha chain variable domain of TCR clone 265936 (TRAV3, TRAJ31)
CAVRDGNTRLMF

SEQ ID NO: 531872 - protein, 18 aa, Homo sapiens
  CDR3 for beta chain variable domain of TCR clone 265936 (TRBV7-2, TRBJ2-3)
CASSLKREGSGITDTQYF

SEQ ID NO: 531873 - protein, 13 aa, Homo sapiens
  CDR3 for alpha chain variable domain of TCR clone 265937 (TRAV20, TRAJ20)
CAVQAFNDYKLSF

SEQ ID NO: 531874 - protein, 13 aa, Homo sapiens
  CDR3 for beta chain variable domain of TCR clone 265937 (TRBV7-9, TRBJ1-4)
CASSLPGIEKLFF

SEQ ID NO: 531875 - protein, 12 aa, Homo sapiens
  CDR3 for alpha chain variable domain of TCR clone 265938 (TRAV13-1, TRAJ21)
CAAKEGFNKFYV

SEQ ID NO: 531876 - protein, 14 aa, Homo sapiens
  CDR3 for beta chain variable domain of TCR clone 265938 (TRBV5-1, TRBJ2-7)
CASSRGESLYEQYF

SEQ ID NO: 531877 - protein, 16 aa, Homo sapiens
  CDR3 for alpha chain variable domain of TCR clone 265939 (TRAV26-1, TRAJ36)
FIVRVPDQTGANNLFF

SEQ ID NO: 531878 - protein, 12 aa, Homo sapiens
  CDR3 for beta chain variable domain of TCR clone 265939 (TRBV29-1, TRBJ2-3)
CSVTGGADTQYF

SEQ ID NO: 531879 - protein, 13 aa, Homo sapiens
  CDR3 for alpha chain variable domain of TCR clone 265940 (TRAV38-2/DV8, TRAJ34)
CAYRNYNTDKLIL

SEQ ID NO: 531880 - protein, 15 aa, Homo sapiens
  CDR3 for beta chain variable domain of TCR clone 265940 (TRBV20-1, TRBJ2-5)
CSAEGTGCLQETQYF

SEQ ID NO: 531881 - protein, 15 aa, Homo sapiens
  CDR3 for alpha chain variable domain of TCR clone 265941 (TRAV27, TRAJ53)
CAGGDSGGSNYKLTF

SEQ ID NO: 531882 - protein, 17 aa, Homo sapiens
  CDR3 for beta chain variable domain of TCR clone 265941 (TRBV11-2, TRBJ2-5)
CASSNSQENPVLRARHA

SEQ ID NO: 531883 - protein, 12 aa, Homo sapiens
  CDR3 for alpha chain variable domain of TCR clone 265942 (TRAV16, TRAJ27)
CALNTNAGKSTF

SEQ ID NO: 531884 - protein, 15 aa, Homo sapiens
  CDR3 for beta chain variable domain of TCR clone 265942 (TRBV2, TRBJ2-1)
CASSELAGGHNEQFF

SEQ ID NO: 531885 - protein, 11 aa, Homo sapiens
  CDR3 for alpha chain variable domain of TCR clone 265943 (TRAV21, TRAJ11)
CAVNGYSTLTF

SEQ ID NO: 531886 - protein, 13 aa, Homo sapiens
  CDR3 for beta chain variable domain of TCR clone 265943 (TRBV19, TRBJ1-2)
CASSVPGQDGYTF

SEQ ID NO: 531887 - protein, 12 aa, Homo sapiens
  CDR3 for alpha chain variable domain of TCR clone 265944 (TRAV1-2, TRAJ29)
RAVPSGNTPLVF

SEQ ID NO: 531888 - protein, 12 aa, Homo sapiens
  CDR3 for beta chain variable domain of TCR clone 265944 (TRBV7-9, TRBJ2-7)
CASSFGSYEQYF

SEQ ID NO: 531889 - protein, 15 aa, Homo sapiens
  CDR3 for alpha chain variable domain of TCR clone 265945 (TRAV16, TRAJ4)
CALEDPSGGYNKLIF

SEQ ID NO: 531890 - protein, 13 aa, Homo sapiens
  CDR3 for beta chain variable domain of TCR clone 265945 (TRBV7-3, TRBJ2-7)
CASSQAGGYEQCF

SEQ ID NO: 531891 - protein, 12 aa, Homo sapiens
  CDR3 for alpha chain variable domain of TCR clone 265946 (TRAV2, TRAJ31)
CAVEEGNARLMF

SEQ ID NO: 531892 - protein, 18 aa, Homo sapiens
  CDR3 for beta chain variable domain of TCR clone 265946 (TRBV7-9, TRBJ2-3)
CASSSDLAGLATPDTQYF

SEQ ID NO: 531893 - protein, 15 aa, Homo sapiens
  CDR3 for alpha chain variable domain of TCR clone 265947 (TRAV26-1, TRAJ17)
CIVRVVKAAGNKLTF

SEQ ID NO: 531894 - protein, 16 aa, Homo sapiens
  CDR3 for beta chain variable domain of TCR clone 265947 (TRBV7-9, TRBJ2-1)
CASSLVSGPSYNEKFF

SEQ ID NO: 531895 - protein, 11 aa, Homo sapiens
  CDR3 for alpha chain variable domain of TCR clone 265948 (TRAV13-1, TRAJ6)
CATLGSYIPPF

SEQ ID NO: 531896 - protein, 12 aa, Homo sapiens
  CDR3 for beta chain variable domain of TCR clone 265948 (TRBV11-2, TRBJ2-1)
CASSPGNNEQFV

SEQ ID NO: 531897 - protein, 12 aa, Homo sapiens
  CDR3 for alpha chain variable domain of TCR clone 265949 (TRAV26-1, TRAJ35)
CIGLSFGNVLHC

SEQ ID NO: 531898 - protein, 17 aa, Homo sapiens
  CDR3 for beta chain variable domain of TCR clone 265949 (TRBV11-3, TRBJ1-5)
CASSPVTGLRGNQPQHF

SEQ ID NO: 531899 - protein, 14 aa, Homo sapiens
  CDR3 for alpha chain variable domain of TCR clone 265950 (TRAV38-1, TRAJ29)
CAFITPSGNTPLFF

SEQ ID NO: 531900 - protein, 14 aa, Homo sapiens
  CDR3 for beta chain variable domain of TCR clone 265950 (TRBV18, TRBJ2-7)
CACSPRGGAYEQYF

SEQ ID NO: 531901 - protein, 15 aa, Homo sapiens
  CDR3 for alpha chain variable domain of TCR clone 265951 (TRAV17, TRAJ57)
CATGPSQGGSEKLVF

SEQ ID NO: 531902 - protein, 20 aa, Homo sapiens
  CDR3 for beta chain variable domain of TCR clone 265951 (TRBV7-9, TRBJ2-7)
CASSLTTSGVGRGTSSTSGR

SEQ ID NO: 531903 - protein, 12 aa, Homo sapiens
  CDR3 for alpha chain variable domain of TCR clone 265952 (TRAV2, TRAJ24)
CAATDSWGKFQF

SEQ ID NO: 531904 - protein, 13 aa, Homo sapiens
  CDR3 for beta chain variable domain of TCR clone 265952 (TRBV20-1, TRBJ1-1)
CSARGGGNTEAFF

SEQ ID NO: 531905 - protein, 13 aa, Homo sapiens
  CDR3 for alpha chain variable domain of TCR clone 265953 (TRAV1-2, TRAJ31)
CAVRPNNNARFMF

SEQ ID NO: 531906 - protein, 14 aa, Homo sapiens
  CDR3 for beta chain variable domain of TCR clone 265953 (TRBV11-2, TRBJ2-1)
CASSLSGPYNEQFF

SEQ ID NO: 531907 - protein, 12 aa, Homo sapiens
  CDR3 for alpha chain variable domain of TCR clone 265954 (TRAV16, TRAJ10)
CSRTGGGNKLTF

SEQ ID NO: 531908 - protein, 17 aa, Homo sapiens
  CDR3 for beta chain variable domain of TCR clone 265954 (TRBV6-3, TRBJ2-7)
CASSSPGTVFYESTSGR

SEQ ID NO: 531909 - protein, 14 aa, Homo sapiens
  CDR3 for alpha chain variable domain of TCR clone 265955 (TRAV8-6, TRAJ33)
RAVSGMDSNYQLIW

SEQ ID NO: 531910 - protein, 12 aa, Homo sapiens
  CDR3 for beta chain variable domain of TCR clone 265955 (TRBV11-2, TRBJ2-1)
CASSPGNNEQFF

SEQ ID NO: 531911 - protein, 15 aa, Homo sapiens
  CDR3 for alpha chain variable domain of TCR clone 265956 (TRAV2, TRAJ9)
CAVEDRCTGGFKTIF

SEQ ID NO: 531912 - protein, 14 aa, Homo sapiens
  CDR3 for beta chain variable domain of TCR clone 265956 (TRBV25-1, TRBJ1-1)
CASTHLGGNTEAFF

SEQ ID NO: 531913 - protein, 18 aa, Homo sapiens
  CDR3 for alpha chain variable domain of TCR clone 265957 (TRAV29/DV5, TRAJ52)
CAAGFRVAGGTSYGKMTF

SEQ ID NO: 531914 - protein, 15 aa, Homo sapiens
  CDR3 for beta chain variable domain of TCR clone 265957 (TRBV6-1, TRBJ2-2)
CASSAGQGYTGELFF

SEQ ID NO: 531915 - protein, 13 aa, Homo sapiens
  CDR3 for alpha chain variable domain of TCR clone 265958 (TRAV12-3, TRAJ40)
CAMSARGTYKYIF

SEQ ID NO: 531916 - protein, 13 aa, Homo sapiens
  CDR3 for beta chain variable domain of TCR clone 265958 (TRBV29-1, TRBJ2-1)
CSVEGGRVNEQFF

SEQ ID NO: 531917 - protein, 15 aa, Homo sapiens
  CDR3 for alpha chain variable domain of TCR clone 265959 (TRAV20, TRAJ43)
CAVQAGKSSNNDMRV

SEQ ID NO: 531918 - protein, 16 aa, Homo sapiens
  CDR3 for beta chain variable domain of TCR clone 265959 (TRBV4-2, TRBJ1-1)
CASSQAGFGMNTEAFF

SEQ ID NO: 531919 - protein, 16 aa, Homo sapiens
  CDR3 for alpha chain variable domain of TCR clone 265960 (TRAV16, TRAJ21)
CACGWATTSTNFTLDL

SEQ ID NO: 531920 - protein, 15 aa, Homo sapiens
  CDR3 for beta chain variable domain of TCR clone 265960 (TRBV19, TRBJ2-1)
CGSSIQATSYNEQFF

SEQ ID NO: 531921 - protein, 13 aa, Homo sapiens
  CDR3 for alpha chain variable domain of TCR clone 265961 (TRAV20, TRAJ34)
FAVSSYNTDKLIF

SEQ ID NO: 531922 - protein, 13 aa, Homo sapiens
  CDR3 for beta chain variable domain of TCR clone 265961 (TRBV7-9, TRBJ1-2)
CASSLKQNYGYTF

SEQ ID NO: 531923 - protein, 23 aa, Homo sapiens
  CDR3 for alpha chain variable domain of TCR clone 265962 (TRAV21, TRAJ20)
LQLLSLVTQPPTSVLPNDYKLSF

SEQ ID NO: 531924 - protein, 16 aa, Homo sapiens
  CDR3 for beta chain variable domain of TCR clone 265962 (TRBV12-5, TRBJ2-5)
CASGPRTSGNQETQYF

SEQ ID NO: 531925 - protein, 18 aa, Homo sapiens
  CDR3 for alpha chain variable domain of TCR clone 265963 (TRAV13-1, TRAJ10)
CAASKGRAVTGGGNKLTF

SEQ ID NO: 531926 - protein, 14 aa, Homo sapiens
  CDR3 for beta chain variable domain of TCR clone 265963 (TRBV18, TRBJ2-7)
CASSPRGGAYEQYL

SEQ ID NO: 531927 - protein, 14 aa, Homo sapiens
  CDR3 for alpha chain variable domain of TCR clone 265964 (TRAV12-2, TRAJ13)
CAVKKTGGYQKVTF

SEQ ID NO: 531928 - protein, 13 aa, Homo sapiens
  CDR3 for beta chain variable domain of TCR clone 265964 (TRBV28, TRBJ2-7)
CASTAGGVYEQYF

SEQ ID NO: 531929 - protein, 13 aa, Homo sapiens
  CDR3 for alpha chain variable domain of TCR clone 265965 (TRAV27, TRAJ29)
CAGAHSGNTPLVF

SEQ ID NO: 531930 - protein, 14 aa, Homo sapiens
  CDR3 for beta chain variable domain of TCR clone 265965 (TRBV7-9, TRBJ2-7)
CANSIGQGAGEQYF

SEQ ID NO: 531931 - protein, 15 aa, Homo sapiens
  CDR3 for alpha chain variable domain of TCR clone 265966 (TRAV38-1, TRAJ57)
CAFMDSQGGSEKLVF

SEQ ID NO: 531932 - protein, 14 aa, Homo sapiens
  CDR3 for beta chain variable domain of TCR clone 265966 (TRBV7-3, TRBJ2-1)
CASSLAGGTNEQFF

SEQ ID NO: 531933 - protein, 14 aa, Homo sapiens
  CDR3 for alpha chain variable domain of TCR clone 265967 (TRAV12-2, TRAJ13)
CAVKKTGGYQKVTF

SEQ ID NO: 531934 - protein, 14 aa, Homo sapiens
  CDR3 for beta chain variable domain of TCR clone 265967 (TRBV7-2, TRBJ2-3)
CASSLARGTDTQYF

SEQ ID NO: 531935 - protein, 14 aa, Homo sapiens
  CDR3 for alpha chain variable domain of TCR clone 265968 (TRAV17, TRAJ39)
CATDPVGAGNMLTF

SEQ ID NO: 531936 - protein, 15 aa, Homo sapiens
  CDR3 for beta chain variable domain of TCR clone 265968 (TRBV13, TRBJ1-5)
CASSFGQGGVQPQHF

SEQ ID NO: 531937 - protein, 11 aa, Homo sapiens
  CDR3 for alpha chain variable domain of TCR clone 265969 (TRAV8-3, TRAJ49)
CAVGGGNQFYF

SEQ ID NO: 531938 - protein, 17 aa, Homo sapiens
  CDR3 for beta chain variable domain of TCR clone 265969 (TRBV25-1, TRBJ2-1)
CASSAYGQGRGVYEQFF

SEQ ID NO: 531939 - protein, 18 aa, Homo sapiens
  CDR3 for alpha chain variable domain of TCR clone 265970 (TRAV21, TRAJ52)
CAARPSPAGGTSYGKLTF

SEQ ID NO: 531940 - protein, 17 aa, Homo sapiens
  CDR3 for beta chain variable domain of TCR clone 265970 (TRBV14, TRBJ2-3)
CASSQEPSGLSTDTQYF

SEQ ID NO: 531941 - protein, 15 aa, Homo sapiens
  CDR3 for alpha chain variable domain of TCR clone 265971 (TRAV13-1, TRAJ36)
CAGSIRQTGANNLFF

SEQ ID NO: 531942 - protein, 17 aa, Homo sapiens
  CDR3 for beta chain variable domain of TCR clone 265971 (TRBV20-1, TRBJ2-2)
CSARDRTSGRHTGELFF

SEQ ID NO: 531943 - protein, 11 aa, Homo sapiens
  CDR3 for alpha chain variable domain of TCR clone 265972 (TRAV12-1, TRAJ34)
CVVNKGRELIF

SEQ ID NO: 531944 - protein, 15 aa, Homo sapiens
  CDR3 for beta chain variable domain of TCR clone 265972 (TRBV6-3, TRBJ2-7)
CASGSPGTVFYEQYF

SEQ ID NO: 531945 - protein, 14 aa, Homo sapiens
  CDR3 for alpha chain variable domain of TCR clone 265973 (TRAV8-3, TRAJ15)
CAVGRHQAGTALIF

SEQ ID NO: 531946 - protein, 16 aa, Homo sapiens
  CDR3 for beta chain variable domain of TCR clone 265973 (TRBV28, TRBJ2-1)
CASSSPEYPRDNEQFF

SEQ ID NO: 531947 - protein, 13 aa, Homo sapiens
  CDR3 for alpha chain variable domain of TCR clone 265974 (TRAV23/DV6, TRAJ45)
CAARRGGAAGLTF

SEQ ID NO: 531948 - protein, 14 aa, Homo sapiens
  CDR3 for beta chain variable domain of TCR clone 265974 (TRBV7-2, TRBJ2-3)
CASSLARGTDTQYF

SEQ ID NO: 531949 - protein, 14 aa, Homo sapiens
  CDR3 for alpha chain variable domain of TCR clone 265975 (TRAV21, TRAJ45)
CAVVSGGGADGLTV

SEQ ID NO: 531950 - protein, 14 aa, Homo sapiens
  CDR3 for beta chain variable domain of TCR clone 265975 (TRBV20-1, TRBJ2-3)
CSALGLEGADTQYF

SEQ ID NO: 531951 - protein, 14 aa, Homo sapiens
  CDR3 for alpha chain variable domain of TCR clone 265976 (TRAV12-2, TRAJ20)
CAVKKNRNDYKLSF

SEQ ID NO: 531952 - protein, 13 aa, Homo sapiens
  CDR3 for beta chain variable domain of TCR clone 265976 (TRBV28, TRBJ2-5)
CASSFAGGETQYF

SEQ ID NO: 531953 - protein, 15 aa, Homo sapiens
  CDR3 for alpha chain variable domain of TCR clone 265977 (TRAV3, TRAJ5)
CAVRDLDTGRRALTF

SEQ ID NO: 531954 - protein, 13 aa, Homo sapiens
  CDR3 for beta chain variable domain of TCR clone 265977 (TRBV27, TRBJ2-7)
CASSLRHRYEQYF

SEQ ID NO: 531955 - protein, 17 aa, Homo sapiens
  CDR3 for alpha chain variable domain of TCR clone 265978 (TRAV3, TRAJ38)
CAVRDCLNAVNNRKLIG

SEQ ID NO: 531956 - protein, 16 aa, Homo sapiens
  CDR3 for beta chain variable domain of TCR clone 265978 (TRBV20-1, TRBJ1-4)
CSARPYGGELNEKLFF

SEQ ID NO: 531957 - protein, 16 aa, Homo sapiens
  CDR3 for alpha chain variable domain of TCR clone 265979 (TRAV12-3, TRAJ53)
CAMSTGSGGSNYKLTF

SEQ ID NO: 531958 - protein, 15 aa, Homo sapiens
  CDR3 for beta chain variable domain of TCR clone 265979 (TRBV18, TRBJ2-7)
CASSPSSTGNYEQYF

SEQ ID NO: 531959 - protein, 15 aa, Homo sapiens
  CDR3 for alpha chain variable domain of TCR clone 265980 (TRAV8-3, TRAJ37)
CAVGARASNTGKLIF

SEQ ID NO: 531960 - protein, 15 aa, Homo sapiens
  CDR3 for beta chain variable domain of TCR clone 265980 (TRBV5-4, TRBJ2-3)
CASSLAGRVTETQYF

SEQ ID NO: 531961 - protein, 14 aa, Homo sapiens
  CDR3 for alpha chain variable domain of TCR clone 265981 (TRAV13-1, TRAJ15)
SVQQINHAGTALIF

SEQ ID NO: 531962 - protein, 14 aa, Homo sapiens
  CDR3 for beta chain variable domain of TCR clone 265981 (TRBV7-9, TRBJ2-1)
CASSDNSGYNEQFF

SEQ ID NO: 531963 - protein, 17 aa, Homo sapiens
  CDR3 for alpha chain variable domain of TCR clone 265982 (TRAV3, TRAJ42)
CAVRDRDYGGSQGNLIF

SEQ ID NO: 531964 - protein, 15 aa, Homo sapiens
  CDR3 for beta chain variable domain of TCR clone 265982 (TRBV6-6, TRBJ2-7)
CASSYSEGGSYEQYF

SEQ ID NO: 531965 - protein, 16 aa, Homo sapiens
  CDR3 for alpha chain variable domain of TCR clone 265983 (TRAV30, TRAJ24)
CGTEIVDADSWGKFQF

SEQ ID NO: 531966 - protein, 14 aa, Homo sapiens
  CDR3 for beta chain variable domain of TCR clone 265983 (TRBV5-5, TRBJ2-2)
CASSLLGDTGELFF

SEQ ID NO: 531967 - protein, 13 aa, Homo sapiens
  CDR3 for alpha chain variable domain of TCR clone 265984 (TRAV21, TRAJ27)
CAALNTNEGKSTF

SEQ ID NO: 531968 - protein, 14 aa, Homo sapiens
  CDR3 for beta chain variable domain of TCR clone 265984 (TRBV27, TRBJ1-1)
CASSLLSGLSEAFF

SEQ ID NO: 531969 - protein, 15 aa, Homo sapiens
  CDR3 for alpha chain variable domain of TCR clone 265985 (TRAV29/DV5, TRAJ24)
CAASGATDRWGKFQF

SEQ ID NO: 531970 - protein, 13 aa, Homo sapiens
  CDR3 for beta chain variable domain of TCR clone 265985 (TRBV7-3, TRBJ1-1)
CASSQDWGAEAFF

SEQ ID NO: 531971 - protein, 16 aa, Homo sapiens
  CDR3 for alpha chain variable domain of TCR clone 265986 (TRAV23/DV6, TRAJ48)
CAASGVVNFGNEKLNF

SEQ ID NO: 531972 - protein, 15 aa, Homo sapiens
  CDR3 for beta chain variable domain of TCR clone 265986 (TRBV7-9, TRBJ2-1)
CASSLGWGRANEQFF

SEQ ID NO: 531973 - protein, 13 aa, Homo sapiens
  CDR3 for alpha chain variable domain of TCR clone 265987 (TRAV2, TRAJ24)
CAVSTDSWGKLQF

SEQ ID NO: 531974 - protein, 15 aa, Homo sapiens
  CDR3 for beta chain variable domain of TCR clone 265987 (TRBV10-1, TRBJ2-1)
CASSTGTELYNEQFF

SEQ ID NO: 531975 - protein, 11 aa, Homo sapiens
  CDR3 for alpha chain variable domain of TCR clone 265988 (TRAV21, TRAJ34)
CAVTNTDKLIF

SEQ ID NO: 531976 - protein, 17 aa, Homo sapiens
  CDR3 for beta chain variable domain of TCR clone 265988 (TRBV20-1, TRBJ2-1)
CSARSPSGGPPTMSSSL

SEQ ID NO: 531977 - protein, 12 aa, Homo sapiens
  CDR3 for alpha chain variable domain of TCR clone 265989 (TRAV17, TRAJ4)
CATDGGYNKLIF

SEQ ID NO: 531978 - protein, 15 aa, Homo sapiens
  CDR3 for beta chain variable domain of TCR clone 265989 (TRBV18, TRBJ2-1)
CASSPPSASYNEQFF

SEQ ID NO: 531979 - protein, 18 aa, Homo sapiens
  CDR3 for alpha chain variable domain of TCR clone 265990 (TRAV21, TRAJ52)
CAVRPSPAGGTSYGKLTF

SEQ ID NO: 531980 - protein, 14 aa, Homo sapiens
  CDR3 for beta chain variable domain of TCR clone 265990 (TRBV7-2, TRBJ2-1)
CASSLEGGYNEQLF

SEQ ID NO: 531981 - protein, 12 aa, Homo sapiens
  CDR3 for alpha chain variable domain of TCR clone 265991 (TRAV26-1, TRAJ48)
CIVSGGNEKLTF

SEQ ID NO: 531982 - protein, 13 aa, Homo sapiens
  CDR3 for beta chain variable domain of TCR clone 265991 (TRBV18, TRBJ2-7)
CASFRDSAYEQYL

SEQ ID NO: 531983 - protein, 12 aa, Homo sapiens
  CDR3 for alpha chain variable domain of TCR clone 265992 (TRAV25, TRAJ53)
CQSGGSNYKLTF

SEQ ID NO: 531984 - protein, 15 aa, Homo sapiens
  CDR3 for beta chain variable domain of TCR clone 265992 (TRBV5-1, TRBJ2-2)
CASSWTSPNTGELIF

SEQ ID NO: 531985 - protein, 13 aa, Homo sapiens
  CDR3 for alpha chain variable domain of TCR clone 265993 (TRAV26-1, TRAJ35)
CIVSRRGGEMLHC

SEQ ID NO: 531986 - protein, 17 aa, Homo sapiens
  CDR3 for beta chain variable domain of TCR clone 265993 (TRBV7-9, TRBJ2-7)
CASSFDGSRGGAYEQYF

SEQ ID NO: 531987 - protein, 14 aa, Homo sapiens
  CDR3 for alpha chain variable domain of TCR clone 265994 (TRAV1-2, TRAJ8)
CAVREDTGFQKLGF

SEQ ID NO: 531988 - protein, 13 aa, Homo sapiens
  CDR3 for beta chain variable domain of TCR clone 265994 (TRBV12-4, TRBJ1-2)
CASSSGLTVISTF

SEQ ID NO: 531989 - protein, 15 aa, Homo sapiens
  CDR3 for alpha chain variable domain of TCR clone 265995 (TRAV4, TRAJ10)
CLVGDEEGGGNKLTF

SEQ ID NO: 531990 - protein, 15 aa, Homo sapiens
  CDR3 for beta chain variable domain of TCR clone 265995 (TRBV7-2, TRBJ2-7)
CASNLTGQGTYEQYF

SEQ ID NO: 531991 - protein, 17 aa, Homo sapiens
  CDR3 for alpha chain variable domain of TCR clone 265996 (TRAV14/DV4, TRAJ57)
CAMREGRRAGGAEKLVF

SEQ ID NO: 531992 - protein, 14 aa, Homo sapiens
  CDR3 for beta chain variable domain of TCR clone 265996 (TRBV2, TRBJ2-3)
CASSEGQNTDTQYF

SEQ ID NO: 531993 - protein, 14 aa, Homo sapiens
  CDR3 for alpha chain variable domain of TCR clone 265997 (TRAV12-3, TRAJ42)
CAMNYGGSQGNLIF

SEQ ID NO: 531994 - protein, 17 aa, Homo sapiens
  CDR3 for beta chain variable domain of TCR clone 265997 (TRBV28, TRBJ1-1)
CASSLSGTGYENTEAFF

SEQ ID NO: 531995 - protein, 14 aa, Homo sapiens
  CDR3 for alpha chain variable domain of TCR clone 265998 (TRAV12-2, TRAJ6)
CAVIASGGSYIPTF

SEQ ID NO: 531996 - protein, 16 aa, Homo sapiens
  CDR3 for beta chain variable domain of TCR clone 265998 (TRBV7-2, TRBJ2-3)
CASSLAGAGSGDTQYF

SEQ ID NO: 531997 - protein, 12 aa, Homo sapiens
  CDR3 for alpha chain variable domain of TCR clone 265999 (TRAV13-1, TRAJ21)
CAAKEGFNKFYF

SEQ ID NO: 531998 - protein, 16 aa, Homo sapiens
  CDR3 for beta chain variable domain of TCR clone 265999 (TRBV15, TRBJ2-3)
CATSRDLGIVTDTQYF

SEQ ID NO: 531999 - protein, 14 aa, Homo sapiens
  CDR3 for alpha chain variable domain of TCR clone 266000 (TRAV1-2, TRAJ8)
CAVREDTGFQKLVF

SEQ ID NO: 532000 - protein, 16 aa, Homo sapiens
  CDR3 for beta chain variable domain of TCR clone 266000 (TRBV7-9, TRBJ2-1)
CASSDVAGGSYNEQFV

SEQ ID NO: 532001 - protein, 12 aa, Homo sapiens
  CDR3 for alpha chain variable domain of TCR clone 266001 (TRAV12-2, TRAJ10)
WGVTGGGNKLTF

SEQ ID NO: 532002 - protein, 15 aa, Homo sapiens
  CDR3 for beta chain variable domain of TCR clone 266001 (TRBV14, TRBJ2-3)
CASSQEMLAGATQYF

SEQ ID NO: 532003 - protein, 14 aa, Homo sapiens
  CDR3 for alpha chain variable domain of TCR clone 266002 (TRAV1-2, TRAJ8)
CAVREDTGFQKLVF

SEQ ID NO: 532004 - protein, 14 aa, Homo sapiens
  CDR3 for beta chain variable domain of TCR clone 266002 (TRBV20-1, TRBJ2-1)
CSAQIGGSANEQLF

SEQ ID NO: 532005 - protein, 16 aa, Homo sapiens
  CDR3 for alpha chain variable domain of TCR clone 266003 (TRAV30, TRAJ24)
CCTEIVDADSWGKFQF

SEQ ID NO: 532006 - protein, 14 aa, Homo sapiens
  CDR3 for beta chain variable domain of TCR clone 266003 (TRBV12-5, TRBJ2-5)
CASGARTHQETQYF

SEQ ID NO: 532007 - protein, 11 aa, Homo sapiens
  CDR3 for alpha chain variable domain of TCR clone 266004 (TRAV1-2, TRAJ20)
CAVSNDYNLSF

SEQ ID NO: 532008 - protein, 16 aa, Homo sapiens
  CDR3 for beta chain variable domain of TCR clone 266004 (TRBV12-5, TRBJ2-5)
CASGPRTSGNQETQYF

SEQ ID NO: 532009 - protein, 14 aa, Homo sapiens
  CDR3 for alpha chain variable domain of TCR clone 266005 (TRAV8-6, TRAJ49)
CAVSDPCTGTQFYF

SEQ ID NO: 532010 - protein, 16 aa, Homo sapiens
  CDR3 for beta chain variable domain of TCR clone 266005 (TRBV24-1, TRBJ2-1)
CATSGVAGANYNEQFF

SEQ ID NO: 532011 - protein, 14 aa, Homo sapiens
  CDR3 for alpha chain variable domain of TCR clone 266006 (TRAV16, TRAJ32)
CALKSGGATNKLIF

SEQ ID NO: 532012 - protein, 15 aa, Homo sapiens
  CDR3 for beta chain variable domain of TCR clone 266006 (TRBV11-2, TRBJ2-1)
CASSLGPDSYNEQFF

SEQ ID NO: 532013 - protein, 12 aa, Homo sapiens
  CDR3 for alpha chain variable domain of TCR clone 266007 (TRAV13-1, TRAJ39)
CSKYMGRNMLTF

SEQ ID NO: 532014 - protein, 13 aa, Homo sapiens
  CDR3 for beta chain variable domain of TCR clone 266007 (TRBV11-2, TRBJ1-3)
CASSLEPVNTIYF

SEQ ID NO: 532015 - protein, 15 aa, Homo sapiens
  CDR3 for alpha chain variable domain of TCR clone 266008 (TRAV8-3, TRAJ11)
CAVGLLNSGYSTLTL

SEQ ID NO: 532016 - protein, 13 aa, Homo sapiens
  CDR3 for beta chain variable domain of TCR clone 266008 (TRBV7-9, TRBJ1-2)
CASSLKQNYGYTF

SEQ ID NO: 532017 - protein, 12 aa, Homo sapiens
  CDR3 for alpha chain variable domain of TCR clone 266009 (TRAV12-2, TRAJ31)
CAVNTPDARPMF

SEQ ID NO: 532018 - protein, 15 aa, Homo sapiens
  CDR3 for beta chain variable domain of TCR clone 266009 (TRBV4-2, TRBJ1-1)
CASSQDRGLNTEASF

SEQ ID NO: 532019 - protein, 17 aa, Homo sapiens
  CDR3 for alpha chain variable domain of TCR clone 266010 (TRAV17, TRAJ15)
CFLLLCYGRGAGTALIF

SEQ ID NO: 532020 - protein, 15 aa, Homo sapiens
  CDR3 for beta chain variable domain of TCR clone 266010 (TRBV20-1, TRBJ2-7)
CSARDRVSGMDEQYF

SEQ ID NO: 532021 - protein, 10 aa, Homo sapiens
  CDR3 for alpha chain variable domain of TCR clone 266011 (TRAV3, TRAJ30)
CAVREIEIIL

SEQ ID NO: 532022 - protein, 14 aa, Homo sapiens
  CDR3 for beta chain variable domain of TCR clone 266011 (TRBV15, TRBJ2-3)
CATRSGTSTDTQYF

SEQ ID NO: 532023 - protein, 16 aa, Homo sapiens
  CDR3 for alpha chain variable domain of TCR clone 266012 (TRAV12-3, TRAJ53)
CAMSPGSGGSNYKLTF

SEQ ID NO: 532024 - protein, 11 aa, Homo sapiens
  CDR3 for beta chain variable domain of TCR clone 266012 (TRBV29-1, TRBJ2-5)
WSEDRTGTQYF

SEQ ID NO: 532025 - protein, 10 aa, Homo sapiens
  CDR3 for alpha chain variable domain of TCR clone 266013 (TRAV29/DV5, TRAJ48)
CAAGGEKLTL

SEQ ID NO: 532026 - protein, 14 aa, Homo sapiens
  CDR3 for beta chain variable domain of TCR clone 266013 (TRBV7-9, TRBJ2-5)
CASSLAPDQETQYF

SEQ ID NO: 532027 - protein, 15 aa, Homo sapiens
  CDR3 for alpha chain variable domain of TCR clone 266014 (TRAV25, TRAJ53)
CAATGGGGSNYKLTF

SEQ ID NO: 532028 - protein, 14 aa, Homo sapiens
  CDR3 for beta chain variable domain of TCR clone 266014 (TRBV3-1, TRBJ2-5)
CASSQGPDQETQYF

SEQ ID NO: 532029 - protein, 15 aa, Homo sapiens
  CDR3 for alpha chain variable domain of TCR clone 266015 (TRAV3, TRAJ22)
CAVRDRGGSARQLTF

SEQ ID NO: 532030 - protein, 14 aa, Homo sapiens
  CDR3 for beta chain variable domain of TCR clone 266015 (TRBV20-1, TRBJ2-5)
CSALVPGYEETQYF

SEQ ID NO: 532031 - protein, 14 aa, Homo sapiens
  CDR3 for alpha chain variable domain of TCR clone 266016 (TRAV13-1, TRAJ44)
CAAKATGTASKLTF

SEQ ID NO: 532032 - protein, 13 aa, Homo sapiens
  CDR3 for beta chain variable domain of TCR clone 266016 (TRBV7-9, TRBJ2-3)
CASSPGSTDTQYF

SEQ ID NO: 532033 - protein, 14 aa, Homo sapiens
  CDR3 for alpha chain variable domain of TCR clone 266017 (TRAV12-2, TRAJ53)
CAVKGGGSNYKLTF

SEQ ID NO: 532034 - protein, 12 aa, Homo sapiens
  CDR3 for beta chain variable domain of TCR clone 266017 (TRBV28, TRBJ2-3)
CASSLYRHTQYF

SEQ ID NO: 532035 - protein, 15 aa, Homo sapiens
  CDR3 for alpha chain variable domain of TCR clone 266018 (TRAV26-1, TRAJ29)
CIVRVEGSGNTPLVF

SEQ ID NO: 532036 - protein, 15 aa, Homo sapiens
  CDR3 for beta chain variable domain of TCR clone 266018 (TRBV7-9, TRBJ1-5)
CASSQGHQTNQPQHY

SEQ ID NO: 532037 - protein, 13 aa, Homo sapiens
  CDR3 for alpha chain variable domain of TCR clone 266019 (TRAV17, TRAJ21)
CATDGGNFNKFYF

SEQ ID NO: 532038 - protein, 11 aa, Homo sapiens
  CDR3 for beta chain variable domain of TCR clone 266019 (TRBV12-4, TRBJ2-3)
CASTATDTQYF

SEQ ID NO: 532039 - protein, 15 aa, Homo sapiens
  CDR3 for alpha chain variable domain of TCR clone 266020 (TRAV3, TRAJ4)
CAVRDGAGGYNKLIF

SEQ ID NO: 532040 - protein, 12 aa, Homo sapiens
  CDR3 for beta chain variable domain of TCR clone 266020 (TRBV27, TRBJ2-2)
CASSSSGVSNTG

SEQ ID NO: 532041 - protein, 11 aa, Homo sapiens
  CDR3 for alpha chain variable domain of TCR clone 266021 (TRAV17, TRAJ9)
CGFTGGFKTIF

SEQ ID NO: 532042 - protein, 14 aa, Homo sapiens
  CDR3 for beta chain variable domain of TCR clone 266021 (TRBV7-9, TRBJ2-2)
CACSLVQDTGELFF

SEQ ID NO: 532043 - protein, 13 aa, Homo sapiens
  CDR3 for alpha chain variable domain of TCR clone 266022 (TRAV27, TRAJ41)
CAGEGNSGYALNF

SEQ ID NO: 532044 - protein, 14 aa, Homo sapiens
  CDR3 for beta chain variable domain of TCR clone 266022 (TRBV7-3, TRBJ2-1)
CASSLAGATNEQFF

SEQ ID NO: 532045 - protein, 14 aa, Homo sapiens
  CDR3 for alpha chain variable domain of TCR clone 266023 (TRAV27, TRAJ49)
GAGRPEGTGNQFYF

SEQ ID NO: 532046 - protein, 15 aa, Homo sapiens
  CDR3 for beta chain variable domain of TCR clone 266023 (TRBV19, TRBJ2-1)
CASSIQATSYNEQFF

SEQ ID NO: 532047 - protein, 17 aa, Homo sapiens
  CDR3 for alpha chain variable domain of TCR clone 266024 (TRAV13-1, TRAJ52)
CAASSGAGGISYGKLTF

SEQ ID NO: 532048 - protein, 15 aa, Homo sapiens
  CDR3 for beta chain variable domain of TCR clone 266024 (TRBV2, TRBJ2-1)
CASSELAGSYNEQFF

SEQ ID NO: 532049 - protein, 17 aa, Homo sapiens
  CDR3 for alpha chain variable domain of TCR clone 266025 (TRAV3, TRAJ42)
CAVRDRDYGGSQGNLIV

SEQ ID NO: 532050 - protein, 15 aa, Homo sapiens
  CDR3 for beta chain variable domain of TCR clone 266025 (TRBV6-3, TRBJ2-7)
CASSSPGTVFYEQYF

SEQ ID NO: 532051 - protein, 16 aa, Homo sapiens
  CDR3 for alpha chain variable domain of TCR clone 266026 (TRAV12-3, TRAJ53)
CAMSPGSGGSNYKLTF

SEQ ID NO: 532052 - protein, 13 aa, Homo sapiens
  CDR3 for beta chain variable domain of TCR clone 266026 (TRBV7-2, TRBJ2-5)
CASSQTSVENQYF

SEQ ID NO: 532053 - protein, 15 aa, Homo sapiens
  CDR3 for alpha chain variable domain of TCR clone 266027 (TRAV1-2, TRAJ35)
CAVRDREGFGNVLHC

SEQ ID NO: 532054 - protein, 14 aa, Homo sapiens
  CDR3 for beta chain variable domain of TCR clone 266027 (TRBV28, TRBJ1-4)
CASSRAVGNEKLFF

SEQ ID NO: 532055 - protein, 14 aa, Homo sapiens
  CDR3 for alpha chain variable domain of TCR clone 266028 (TRAV12-1, TRAJ9)
CVVNRGTGGFKTIF

SEQ ID NO: 532056 - protein, 12 aa, Homo sapiens
  CDR3 for beta chain variable domain of TCR clone 266028 (TRBV29-1, TRBJ2-3)
CSVTGGADTQYF

SEQ ID NO: 532057 - protein, 11 aa, Homo sapiens
  CDR3 for alpha chain variable domain of TCR clone 266029 (TRAV12-3, TRAJ43)
CAMSVSNDMRF

SEQ ID NO: 532058 - protein, 15 aa, Homo sapiens
  CDR3 for beta chain variable domain of TCR clone 266029 (TRBV5-1, TRBJ2-3)
CASSYTSGSTDTQYF

SEQ ID NO: 532059 - protein, 10 aa, Homo sapiens
  CDR3 for alpha chain variable domain of TCR clone 266030 (TRAV26-1, TRAJ52)
GGTSYGKLTF

SEQ ID NO: 532060 - protein, 15 aa, Homo sapiens
  CDR3 for beta chain variable domain of TCR clone 266030 (TRBV29-1, TRBJ2-1)
CSGRDRKSSYNEQFF

SEQ ID NO: 532061 - protein, 14 aa, Homo sapiens
  CDR3 for alpha chain variable domain of TCR clone 266031 (TRAV1-2, TRAJ16)
CAVNLFSDFQKLLF

SEQ ID NO: 532062 - protein, 16 aa, Homo sapiens
  CDR3 for beta chain variable domain of TCR clone 266031 (TRBV6-6, TRBJ1-5)
CASSYSTLVGNQPQHF

SEQ ID NO: 532063 - protein, 14 aa, Homo sapiens
  CDR3 for alpha chain variable domain of TCR clone 266032 (TRAV8-4, TRAJ40)
CAVIPTSGTYKYIF

SEQ ID NO: 532064 - protein, 15 aa, Homo sapiens
  CDR3 for beta chain variable domain of TCR clone 266032 (TRBV7-2, TRBJ2-1)
CASKSASGDYNEQFF

SEQ ID NO: 532065 - protein, 14 aa, Homo sapiens
  CDR3 for alpha chain variable domain of TCR clone 266033 (TRAV20, TRAJ56)
CAVQFGGANSKLTF

SEQ ID NO: 532066 - protein, 16 aa, Homo sapiens
  CDR3 for beta chain variable domain of TCR clone 266033 (TRBV7-3, TRBJ2-1)
CASSLEGYRSYNEQFF

SEQ ID NO: 532067 - protein, 15 aa, Homo sapiens
  CDR3 for alpha chain variable domain of TCR clone 266034 (TRAV3, TRAJ13)
CAVRVYSGGYQKVTF

SEQ ID NO: 532068 - protein, 13 aa, Homo sapiens
  CDR3 for beta chain variable domain of TCR clone 266034 (TRBV10-3, TRBJ2-7)
CASKLAVNYEQYF

SEQ ID NO: 532069 - protein, 13 aa, Homo sapiens
  CDR3 for alpha chain variable domain of TCR clone 266035 (TRAV2, TRAJ40)
CAVVTAGTYKYIL

SEQ ID NO: 532070 - protein, 14 aa, Homo sapiens
  CDR3 for beta chain variable domain of TCR clone 266035 (TRBV19, TRBJ2-1)
CASPTFVLSGEQFF

SEQ ID NO: 532071 - protein, 14 aa, Homo sapiens
  CDR3 for alpha chain variable domain of TCR clone 266036 (TRAV1-2, TRAJ29)
CAVRELTSATPLVF

SEQ ID NO: 532072 - protein, 16 aa, Homo sapiens
  CDR3 for beta chain variable domain of TCR clone 266036 (TRBV6-1, TRBJ2-5)
CASSETLDRGAEAQYF

SEQ ID NO: 532073 - protein, 15 aa, Homo sapiens
  CDR3 for alpha chain variable domain of TCR clone 266037 (TRAV17, TRAJ54)
CATTRSEQGAQKLVF

SEQ ID NO: 532074 - protein, 12 aa, Homo sapiens
  CDR3 for beta chain variable domain of TCR clone 266037 (TRBV20-1, TRBJ2-3)
CSARVGTDTQYF

SEQ ID NO: 532075 - protein, 13 aa, Homo sapiens
  CDR3 for alpha chain variable domain of TCR clone 266038 (TRAV8-4, TRAJ10)
CAAFPGGGKKLTF

SEQ ID NO: 532076 - protein, 15 aa, Homo sapiens
  CDR3 for beta chain variable domain of TCR clone 266038 (TRBV2, TRBJ2-3)
CASSDFEKATDTQYF

SEQ ID NO: 532077 - protein, 12 aa, Homo sapiens
  CDR3 for alpha chain variable domain of TCR clone 266039 (TRAV29/DV5, TRAJ49)
CAATDTGNQFYF

SEQ ID NO: 532078 - protein, 12 aa, Homo sapiens
  CDR3 for beta chain variable domain of TCR clone 266039 (TRBV11-2, TRBJ2-1)
CASSPGNNEQFF

SEQ ID NO: 532079 - protein, 14 aa, Homo sapiens
  CDR3 for alpha chain variable domain of TCR clone 266040 (TRAV38-1, TRAJ45)
CASHSGGCADGLTF

SEQ ID NO: 532080 - protein, 16 aa, Homo sapiens
  CDR3 for beta chain variable domain of TCR clone 266040 (TRBV27, TRBJ2-2)
CASSFRGLVRTGELFF

SEQ ID NO: 532081 - protein, 16 aa, Homo sapiens
  CDR3 for alpha chain variable domain of TCR clone 266041 (TRAV12-3, TRAJ53)
CAMSPGGGGSNYKLTF

SEQ ID NO: 532082 - protein, 16 aa, Homo sapiens
  CDR3 for beta chain variable domain of TCR clone 266041 (TRBV20-1, TRBJ1-4)
CSAPGQGLLTNEKLFF

SEQ ID NO: 532083 - protein, 15 aa, Homo sapiens
  CDR3 for alpha chain variable domain of TCR clone 266042 (TRAV26-1, TRAJ29)
CIVRVEGTGNKPLFF

SEQ ID NO: 532084 - protein, 15 aa, Homo sapiens
  CDR3 for beta chain variable domain of TCR clone 266042 (TRBV7-9, TRBJ1-5)
CASSQGHQPNQPQHF

SEQ ID NO: 532085 - protein, 14 aa, Homo sapiens
  CDR3 for alpha chain variable domain of TCR clone 266043 (TRAV2, TRAJ9)
CAVEDRSGGFKTIF

SEQ ID NO: 532086 - protein, 16 aa, Homo sapiens
  CDR3 for beta chain variable domain of TCR clone 266043 (TRBV20-1, TRBJ2-3)
CSAVRDRGPIADTHYF

SEQ ID NO: 532087 - protein, 13 aa, Homo sapiens
  CDR3 for alpha chain variable domain of TCR clone 266044 (TRAV2, TRAJ40)
CAVVTSGTYKYIF

SEQ ID NO: 532088 - protein, 12 aa, Homo sapiens
  CDR3 for beta chain variable domain of TCR clone 266044 (TRBV7-2, TRBJ2-1)
CASSLRQNEQFF

SEQ ID NO: 532089 - protein, 18 aa, Homo sapiens
  CDR3 for alpha chain variable domain of TCR clone 266045 (TRAV21, TRAJ52)
CAVRPSPARGTSYGKLTF

SEQ ID NO: 532090 - protein, 16 aa, Homo sapiens
  CDR3 for beta chain variable domain of TCR clone 266045 (TRBV13, TRBJ2-2)
CASSPRTGEHTGELFF

SEQ ID NO: 532091 - protein, 16 aa, Homo sapiens
  CDR3 for alpha chain variable domain of TCR clone 266046 (TRAV14/DV4, TRAJ53)
CAMREGGGGSNYKLTF

SEQ ID NO: 532092 - protein, 14 aa, Homo sapiens
  CDR3 for beta chain variable domain of TCR clone 266046 (TRBV11-2, TRBJ2-7)
CASSLGAGAYEQYF

SEQ ID NO: 532093 - protein, 11 aa, Homo sapiens
  CDR3 for alpha chain variable domain of TCR clone 266047 (TRAV27, TRAJ47)
CRSNQGNKLVF

SEQ ID NO: 532094 - protein, 15 aa, Homo sapiens
  CDR3 for beta chain variable domain of TCR clone 266047 (TRBV12-4, TRBJ2-5)
CASSPPTGLQETQYF

SEQ ID NO: 532095 - protein, 13 aa, Homo sapiens
  CDR3 for alpha chain variable domain of TCR clone 266048 (TRAV27, TRAJ45)
CRSSGGGADGLTF

SEQ ID NO: 532096 - protein, 16 aa, Homo sapiens
  CDR3 for beta chain variable domain of TCR clone 266048 (TRBV12-4, TRBJ2-1)
CASSAVGQGNGDEQFF

SEQ ID NO: 532097 - protein, 16 aa, Homo sapiens
  CDR3 for alpha chain variable domain of TCR clone 266049 (TRAV3, TRAJ10)
CAVRDMWAGGGNKLTF

SEQ ID NO: 532098 - protein, 14 aa, Homo sapiens
  CDR3 for beta chain variable domain of TCR clone 266049 (TRBV25-1, TRBJ1-1)
CASTHLGGNTEAFL

SEQ ID NO: 532099 - protein, 15 aa, Homo sapiens
  CDR3 for alpha chain variable domain of TCR clone 266050 (TRAV38-1, TRAJ57)
CAFMDSQGGSEKLVF

SEQ ID NO: 532100 - protein, 15 aa, Homo sapiens
  CDR3 for beta chain variable domain of TCR clone 266050 (TRBV2, TRBJ2-1)
CASSELAGSYNEQFF

SEQ ID NO: 532101 - protein, 13 aa, Homo sapiens
  CDR3 for alpha chain variable domain of TCR clone 266051 (TRAV2, TRAJ15)
CAVASQAGTALIF

SEQ ID NO: 532102 - protein, 14 aa, Homo sapiens
  CDR3 for beta chain variable domain of TCR clone 266051 (TRBV4-2, TRBJ2-3)
CASSQERGTDTQYF

SEQ ID NO: 532103 - protein, 14 aa, Homo sapiens
  CDR3 for alpha chain variable domain of TCR clone 266052 (TRAV12-3, TRAJ9)
CAMSVETGGFKTIF

SEQ ID NO: 532104 - protein, 14 aa, Homo sapiens
  CDR3 for beta chain variable domain of TCR clone 266052 (TRBV7-2, TRBJ1-1)
CASSFLTGTTEAFF

SEQ ID NO: 532105 - protein, 14 aa, Homo sapiens
  CDR3 for alpha chain variable domain of TCR clone 266053 (TRAV1-2, TRAJ8)
CALREDTGFQKLVF

SEQ ID NO: 532106 - protein, 15 aa, Homo sapiens
  CDR3 for beta chain variable domain of TCR clone 266053 (TRBV4-1, TRBJ2-7)
CASSQNTGRLYERYF

SEQ ID NO: 532107 - protein, 11 aa, Homo sapiens
  CDR3 for alpha chain variable domain of TCR clone 266054 (TRAV23/DV6, TRAJ48)
CAPRWGEKLTF

SEQ ID NO: 532108 - protein, 13 aa, Homo sapiens
  CDR3 for beta chain variable domain of TCR clone 266054 (TRBV12-4, TRBJ2-5)
CASSPGIEETQYF

SEQ ID NO: 532109 - protein, 12 aa, Homo sapiens
  CDR3 for alpha chain variable domain of TCR clone 266055 (TRAV2, TRAJ32)
CAVGGATNKLIF

SEQ ID NO: 532110 - protein, 15 aa, Homo sapiens
  CDR3 for beta chain variable domain of TCR clone 266055 (TRBV7-2, TRBJ2-1)
CAGSSRTSREDEQFF

SEQ ID NO: 532111 - protein, 14 aa, Homo sapiens
  CDR3 for alpha chain variable domain of TCR clone 266056 (TRAV8-6, TRAJ48)
CAVRTNFGNEKLTF

SEQ ID NO: 532112 - protein, 14 aa, Homo sapiens
  CDR3 for beta chain variable domain of TCR clone 266056 (TRBV16, TRBJ1-1)
CASSQAGPNTEAFF

SEQ ID NO: 532113 - protein, 15 aa, Homo sapiens
  CDR3 for alpha chain variable domain of TCR clone 266057 (TRAV35, TRAJ40)
CAGQLGTSGTYKYIF

SEQ ID NO: 532114 - protein, 15 aa, Homo sapiens
  CDR3 for beta chain variable domain of TCR clone 266057 (TRBV7-6, TRBJ2-1)
CASSFAGRSYNEQFF

SEQ ID NO: 532115 - protein, 14 aa, Homo sapiens
  CDR3 for alpha chain variable domain of TCR clone 266058 (TRAV16, TRAJ48)
CSLTPGFGNEKLTF

SEQ ID NO: 532116 - protein, 14 aa, Homo sapiens
  CDR3 for beta chain variable domain of TCR clone 266058 (TRBV7-2, TRBJ2-7)
CASSSISGFSEQYF

SEQ ID NO: 532117 - protein, 15 aa, Homo sapiens
  CDR3 for alpha chain variable domain of TCR clone 266059 (TRAV25, TRAJ53)
CPTSNSGGSNYKLTF

SEQ ID NO: 532118 - protein, 14 aa, Homo sapiens
  CDR3 for beta chain variable domain of TCR clone 266059 (TRBV11-2, TRBJ2-1)
CASGRGLSYNEQFF

SEQ ID NO: 532119 - protein, 18 aa, Homo sapiens
  CDR3 for alpha chain variable domain of TCR clone 266060 (TRAV21, TRAJ52)
CAVRPSPAGGTSYEKLTF

SEQ ID NO: 532120 - protein, 12 aa, Homo sapiens
  CDR3 for beta chain variable domain of TCR clone 266060 (TRBV7-8, TRBJ2-7)
CASSLGDREQYF

SEQ ID NO: 532121 - protein, 14 aa, Homo sapiens
  CDR3 for alpha chain variable domain of TCR clone 266061 (TRAV29/DV5, TRAJ36)
CAARRKTGANNLFF

SEQ ID NO: 532122 - protein, 19 aa, Homo sapiens
  CDR3 for beta chain variable domain of TCR clone 266061 (TRBV25-1, TRBJ2-2)
CAILVCRVDRGRKTGELFF

SEQ ID NO: 532123 - protein, 15 aa, Homo sapiens
  CDR3 for alpha chain variable domain of TCR clone 266062 (TRAV2, TRAJ15)
CAVEDREQAGTALIF

SEQ ID NO: 532124 - protein, 14 aa, Homo sapiens
  CDR3 for beta chain variable domain of TCR clone 266062 (TRBV11-2, TRBJ2-7)
CSSSLGAGAYEQYF

SEQ ID NO: 532125 - protein, 15 aa, Homo sapiens
  CDR3 for alpha chain variable domain of TCR clone 266063 (TRAV4, TRAJ36)
CLVGDRQTGANNLFF

SEQ ID NO: 532126 - protein, 15 aa, Homo sapiens
  CDR3 for beta chain variable domain of TCR clone 266063 (TRBV7-6, TRBJ2-1)
RASSSLAGEGNEQFF

SEQ ID NO: 532127 - protein, 12 aa, Homo sapiens
  CDR3 for alpha chain variable domain of TCR clone 266064 (TRAV8-3, TRAJ26)
CAGDNYGQNFVF

SEQ ID NO: 532128 - protein, 13 aa, Homo sapiens
  CDR3 for beta chain variable domain of TCR clone 266064 (TRBV10-3, TRBJ2-7)
CASKLAVNYEPYF

SEQ ID NO: 532129 - protein, 13 aa, Homo sapiens
  CDR3 for alpha chain variable domain of TCR clone 266065 (TRAV8-3, TRAJ28)
FAVGSVGSYQLTF

SEQ ID NO: 532130 - protein, 15 aa, Homo sapiens
  CDR3 for beta chain variable domain of TCR clone 266065 (TRBV7-9, TRBJ1-5)
CASSQGHQPNQPQHF

SEQ ID NO: 532131 - protein, 16 aa, Homo sapiens
  CDR3 for alpha chain variable domain of TCR clone 266066 (TRAV4, TRAJ22)
CLAGDLYSGSARHLTF

SEQ ID NO: 532132 - protein, 16 aa, Homo sapiens
  CDR3 for beta chain variable domain of TCR clone 266066 (TRBV7-9, TRBJ2-1)
CASSDVAGGSYNEQFF

SEQ ID NO: 532133 - protein, 12 aa, Homo sapiens
  CDR3 for alpha chain variable domain of TCR clone 266067 (TRAV8-2, TRAJ45)
CVQGGGADGRTF

SEQ ID NO: 532134 - protein, 15 aa, Homo sapiens
  CDR3 for beta chain variable domain of TCR clone 266067 (TRBV19, TRBJ1-1)
CASSIRRQMNTEAFF

SEQ ID NO: 532135 - protein, 14 aa, Homo sapiens
  CDR3 for alpha chain variable domain of TCR clone 266068 (TRAV12-3, TRAJ10)
SHLPLTGGGNKLTF

SEQ ID NO: 532136 - protein, 16 aa, Homo sapiens
  CDR3 for beta chain variable domain of TCR clone 266068 (TRBV11-3, TRBJ2-6)
CASSQGAGAGANVLTF

SEQ ID NO: 532137 - protein, 14 aa, Homo sapiens
  CDR3 for alpha chain variable domain of TCR clone 266069 (TRAV14/DV4, TRAJ9)
CAMRESTGGFKTIF

SEQ ID NO: 532138 - protein, 19 aa, Homo sapiens
  CDR3 for beta chain variable domain of TCR clone 266069 (TRBV19, TRBJ2-2)
CASTRPGLAGGRVTGELLF

SEQ ID NO: 532139 - protein, 12 aa, Homo sapiens
  CDR3 for alpha chain variable domain of TCR clone 266070 (TRAV12-3, TRAJ34)
CAMGYNTDKLIF

SEQ ID NO: 532140 - protein, 15 aa, Homo sapiens
  CDR3 for beta chain variable domain of TCR clone 266070 (TRBV7-3, TRBJ2-1)
CASSPTGGGEVEQFF

SEQ ID NO: 532141 - protein, 11 aa, Homo sapiens
  CDR3 for alpha chain variable domain of TCR clone 266071 (TRAV27, TRAJ20)
CAGADDYKLSF

SEQ ID NO: 532142 - protein, 14 aa, Homo sapiens
  CDR3 for beta chain variable domain of TCR clone 266071 (TRBV7-9, TRBJ2-5)
CASSLDTAQETQYF

SEQ ID NO: 532143 - protein, 18 aa, Homo sapiens
  CDR3 for alpha chain variable domain of TCR clone 266072 (TRAV1-1, TRAJ12)
CLLLLRCERGDSSYKLIF

SEQ ID NO: 532144 - protein, 15 aa, Homo sapiens
  CDR3 for beta chain variable domain of TCR clone 266072 (TRBV18, TRBJ2-5)
CASTDRGPRQETQYC

SEQ ID NO: 532145 - protein, 15 aa, Homo sapiens
  CDR3 for alpha chain variable domain of TCR clone 266073 (TRAV3, TRAJ5)
CAVRDLDTGRRVLTF

SEQ ID NO: 532146 - protein, 13 aa, Homo sapiens
  CDR3 for beta chain variable domain of TCR clone 266073 (TRBV6-4, TRBJ1-5)
CASSADLNQPQHF

SEQ ID NO: 532147 - protein, 14 aa, Homo sapiens
  CDR3 for alpha chain variable domain of TCR clone 266074 (TRAV20, TRAJ56)
CAVQFGGANSKLTF

SEQ ID NO: 532148 - protein, 14 aa, Homo sapiens
  CDR3 for beta chain variable domain of TCR clone 266074 (TRBV20-1, TRBJ2-7)
CSAKRGRSSYDHYF

SEQ ID NO: 532149 - protein, 17 aa, Homo sapiens
  CDR3 for alpha chain variable domain of TCR clone 266075 (TRAV3, TRAJ42)
CAVRRLEEAKEISSLVK

SEQ ID NO: 532150 - protein, 14 aa, Homo sapiens
  CDR3 for beta chain variable domain of TCR clone 266075 (TRBV19, TRBJ2-5)
CASSSSGIQETQYF

SEQ ID NO: 532151 - protein, 14 aa, Homo sapiens
  CDR3 for alpha chain variable domain of TCR clone 266076 (TRAV23/DV6, TRAJ39)
CAASIGNAGNLLTF

SEQ ID NO: 532152 - protein, 14 aa, Homo sapiens
  CDR3 for beta chain variable domain of TCR clone 266076 (TRBV7-3, TRBJ1-1)
CASSLKGGNTEAFF

SEQ ID NO: 532153 - protein, 15 aa, Homo sapiens
  CDR3 for alpha chain variable domain of TCR clone 266077 (TRAV12-2, TRAJ53)
CAVNGGGGSHYTLTF

SEQ ID NO: 532154 - protein, 13 aa, Homo sapiens
  CDR3 for beta chain variable domain of TCR clone 266077 (TRBV3-1, TRBJ1-1)
CASSPGVITEAFF

SEQ ID NO: 532155 - protein, 14 aa, Homo sapiens
  CDR3 for alpha chain variable domain of TCR clone 266078 (TRAV13-1, TRAJ44)
CAAKATGTACKLTF

SEQ ID NO: 532156 - protein, 17 aa, Homo sapiens
  CDR3 for beta chain variable domain of TCR clone 266078 (TRBV7-3, TRBJ2-3)
RASSLMKRMRGADTQYF

SEQ ID NO: 532157 - protein, 17 aa, Homo sapiens
  CDR3 for alpha chain variable domain of TCR clone 266079 (TRAV17, TRAJ7)
CATLGRLAFGKGNQVGV

SEQ ID NO: 532158 - protein, 12 aa, Homo sapiens
  CDR3 for beta chain variable domain of TCR clone 266079 (TRBV14, TRBJ1-1)
CASSQLKGLAFF

SEQ ID NO: 532159 - protein, 13 aa, Homo sapiens
  CDR3 for alpha chain variable domain of TCR clone 266080 (TRAV27, TRAJ42)
CAGARGSQGNLIF

SEQ ID NO: 532160 - protein, 15 aa, Homo sapiens
  CDR3 for beta chain variable domain of TCR clone 266080 (TRBV10-3, TRBJ2-2)
CAIRTDREDTGRLFF

SEQ ID NO: 532161 - protein, 15 aa, Homo sapiens
  CDR3 for alpha chain variable domain of TCR clone 266081 (TRAV3, TRAJ5)
CAVRDRKTGRRALTF

SEQ ID NO: 532162 - protein, 15 aa, Homo sapiens
  CDR3 for beta chain variable domain of TCR clone 266081 (TRBV9, TRBJ2-1)
CASSLAGSSYNEQFF

SEQ ID NO: 532163 - protein, 15 aa, Homo sapiens
  CDR3 for alpha chain variable domain of TCR clone 266082 (TRAV4, TRAJ39)
CLVGPNNRAGNMLTF

SEQ ID NO: 532164 - protein, 13 aa, Homo sapiens
  CDR3 for beta chain variable domain of TCR clone 266082 (TRBV7-9, TRBJ1-2)
CAISLKQNYGYTF

SEQ ID NO: 532165 - protein, 12 aa, Homo sapiens
  CDR3 for alpha chain variable domain of TCR clone 266083 (TRAV29/DV5, TRAJ15)
CASNQAGTALIF

SEQ ID NO: 532166 - protein, 14 aa, Homo sapiens
  CDR3 for beta chain variable domain of TCR clone 266083 (TRBV7-2, TRBJ1-5)
CASSRDGSNQPQHF

SEQ ID NO: 532167 - protein, 13 aa, Homo sapiens
  CDR3 for alpha chain variable domain of TCR clone 266084 (TRAV30, TRAJ24)
CGAVTDSWGKLQF

SEQ ID NO: 532168 - protein, 15 aa, Homo sapiens
  CDR3 for beta chain variable domain of TCR clone 266084 (TRBV25-1, TRBJ1-4)
CASSPGDSTNEKLFF

SEQ ID NO: 532169 - protein, 13 aa, Homo sapiens
  CDR3 for alpha chain variable domain of TCR clone 266085 (TRAV12-3, TRAJ33)
CAMSLNSNYQLIW

SEQ ID NO: 532170 - protein, 12 aa, Homo sapiens
  CDR3 for beta chain variable domain of TCR clone 266085 (TRBV11-3, TRBJ1-1)
CASSLRDSEAFF

SEQ ID NO: 532171 - protein, 13 aa, Homo sapiens
  CDR3 for alpha chain variable domain of TCR clone 266086 (TRAV8-3, TRAJ43)
CAVGPDNKMTCAL

SEQ ID NO: 532172 - protein, 12 aa, Homo sapiens
  CDR3 for beta chain variable domain of TCR clone 266086 (TRBV7-2, TRBJ1-6)
CASSLSSSPLHL

SEQ ID NO: 532173 - protein, 14 aa, Homo sapiens
  CDR3 for alpha chain variable domain of TCR clone 266087 (TRAV20, TRAJ16)
CAVRFFSDGQKLLF

SEQ ID NO: 532174 - protein, 16 aa, Homo sapiens
  CDR3 for beta chain variable domain of TCR clone 266087 (TRBV5-1, TRBJ2-3)
CAGSSIGAGSTDTQYF

SEQ ID NO: 532175 - protein, 14 aa, Homo sapiens
  CDR3 for alpha chain variable domain of TCR clone 266088 (TRAV12-1, TRAJ36)
CVVNYWGKQPLLWD

SEQ ID NO: 532176 - protein, 13 aa, Homo sapiens
  CDR3 for beta chain variable domain of TCR clone 266088 (TRBV7-2, TRBJ2-3)
CASSFTSGDTQYF

SEQ ID NO: 532177 - protein, 11 aa, Homo sapiens
  CDR3 for alpha chain variable domain of TCR clone 266089 (TRAV17, TRAJ9)
CGFTGGFKTIF

SEQ ID NO: 532178 - protein, 14 aa, Homo sapiens
  CDR3 for beta chain variable domain of TCR clone 266089 (TRBV5-4, TRBJ1-1)
CASSLDSRRDEAFF

SEQ ID NO: 532179 - protein, 16 aa, Homo sapiens
  CDR3 for alpha chain variable domain of TCR clone 266090 (TRAV3, TRAJ10)
CAVRDMNAGGGNKLTF

SEQ ID NO: 532180 - protein, 10 aa, Homo sapiens
  CDR3 for beta chain variable domain of TCR clone 266090 (TRBV12-4, TRBJ2-7)
CASLTFEQYF

SEQ ID NO: 532181 - protein, 14 aa, Homo sapiens
  CDR3 for alpha chain variable domain of TCR clone 266091 (TRAV26-1, TRAJ38)
CVADNAGNNRKLIW

SEQ ID NO: 532182 - protein, 13 aa, Homo sapiens
  CDR3 for beta chain variable domain of TCR clone 266091 (TRBV20-1, TRBJ1-1)
CSASGGGNTEAFF

SEQ ID NO: 532183 - protein, 15 aa, Homo sapiens
  CDR3 for alpha chain variable domain of TCR clone 266092 (TRAV21, TRAJ24)
CAARSSTDSWGKLQF

SEQ ID NO: 532184 - protein, 15 aa, Homo sapiens
  CDR3 for beta chain variable domain of TCR clone 266092 (TRBV4-1, TRBJ2-7)
CASSQNTGCLYEQYF

SEQ ID NO: 532185 - protein, 15 aa, Homo sapiens
  CDR3 for alpha chain variable domain of TCR clone 266093 (TRAV3, TRAJ22)
CAVRDRGGSARQLTF

SEQ ID NO: 532186 - protein, 15 aa, Homo sapiens
  CDR3 for beta chain variable domain of TCR clone 266093 (TRBV7-2, TRBJ1-2)
CASSLVSGGDYGYTF

SEQ ID NO: 532187 - protein, 17 aa, Homo sapiens
  CDR3 for alpha chain variable domain of TCR clone 266094 (TRAV4, TRAJ18)
CLVGERSVGSTLGRLYF

SEQ ID NO: 532188 - protein, 16 aa, Homo sapiens
  CDR3 for beta chain variable domain of TCR clone 266094 (TRBV6-5, TRBJ2-1)
CASSYSNSGGHNEQFF

SEQ ID NO: 532189 - protein, 15 aa, Homo sapiens
  CDR3 for alpha chain variable domain of TCR clone 266095 (TRAV34, TRAJ38)
CGADFTPGNNRKLIW

SEQ ID NO: 532190 - protein, 15 aa, Homo sapiens
  CDR3 for beta chain variable domain of TCR clone 266095 (TRBV5-5, TRBJ1-5)
CASSLKGGGEQTQHF

SEQ ID NO: 532191 - protein, 13 aa, Homo sapiens
  CDR3 for alpha chain variable domain of TCR clone 266096 (TRAV1-2, TRAJ9)
CAVINTGGFKTIF

SEQ ID NO: 532192 - protein, 14 aa, Homo sapiens
  CDR3 for beta chain variable domain of TCR clone 266096 (TRBV20-1, TRBJ2-3)
CSARSGTSTDTQYF

SEQ ID NO: 532193 - protein, 18 aa, Homo sapiens
  CDR3 for alpha chain variable domain of TCR clone 266097 (TRAV13-1, TRAJ52)
CAASKRSAGCTSYGKLTF

SEQ ID NO: 532194 - protein, 15 aa, Homo sapiens
  CDR3 for beta chain variable domain of TCR clone 266097 (TRBV20-1, TRBJ1-1)
CSASRGVTGNTEAFF

SEQ ID NO: 532195 - protein, 16 aa, Homo sapiens
  CDR3 for alpha chain variable domain of TCR clone 266098 (TRAV1-2, TRAJ10)
CAVRGVLTGGGNKLTF

SEQ ID NO: 532196 - protein, 15 aa, Homo sapiens
  CDR3 for beta chain variable domain of TCR clone 266098 (TRBV20-1, TRBJ2-7)
CSARVPAAYFYEQYL

SEQ ID NO: 532197 - protein, 16 aa, Homo sapiens
  CDR3 for alpha chain variable domain of TCR clone 266099 (TRAV12-2, TRAJ32)
CAVNLGQGGATNKPIF

SEQ ID NO: 532198 - protein, 13 aa, Homo sapiens
  CDR3 for beta chain variable domain of TCR clone 266099 (TRBV19, TRBJ2-5)
CASSETAPETQYF

SEQ ID NO: 532199 - protein, 18 aa, Homo sapiens
  CDR3 for alpha chain variable domain of TCR clone 266100 (TRAV13-1, TRAJ52)
CAAKNPNAGGTIYGKLTF

SEQ ID NO: 532200 - protein, 11 aa, Homo sapiens
  CDR3 for beta chain variable domain of TCR clone 266100 (TRBV29-1, TRBJ2-5)
CSEDRTGTQYF

SEQ ID NO: 532201 - protein, 14 aa, Homo sapiens
  CDR3 for alpha chain variable domain of TCR clone 266101 (TRAV13-1, TRAJ20)
CAARPGSNDYKISF

SEQ ID NO: 532202 - protein, 15 aa, Homo sapiens
  CDR3 for beta chain variable domain of TCR clone 266101 (TRBV4-1, TRBJ2-7)
CASSQQGQGFDEQYF

SEQ ID NO: 532203 - protein, 12 aa, Homo sapiens
  CDR3 for alpha chain variable domain of TCR clone 266102 (TRAV12-3, TRAJ40)
CVVYSGTYKYIF

SEQ ID NO: 532204 - protein, 18 aa, Homo sapiens
  CDR3 for beta chain variable domain of TCR clone 266102 (TRBV11-2, TRBJ2-3)
CAGSLGGASRGAPNTQYF

SEQ ID NO: 532205 - protein, 16 aa, Homo sapiens
  CDR3 for alpha chain variable domain of TCR clone 266103 (TRAV30, TRAJ24)
CGTEIVDADSWGKFQF

SEQ ID NO: 532206 - protein, 14 aa, Homo sapiens
  CDR3 for beta chain variable domain of TCR clone 266103 (TRBV7-2, TRBJ2-7)
CASSPKTSFYEQCF

SEQ ID NO: 532207 - protein, 13 aa, Homo sapiens
  CDR3 for alpha chain variable domain of TCR clone 266104 (TRAV8-4, TRAJ39)
SPPPSDAGNMLTF

SEQ ID NO: 532208 - protein, 13 aa, Homo sapiens
  CDR3 for beta chain variable domain of TCR clone 266104 (TRBV12-4, TRBJ2-7)
CASSPTETYEQYF

SEQ ID NO: 532209 - protein, 16 aa, Homo sapiens
  CDR3 for alpha chain variable domain of TCR clone 266105 (TRAV30, TRAJ24)
CGTDIVDADSWGKFQF

SEQ ID NO: 532210 - protein, 17 aa, Homo sapiens
  CDR3 for beta chain variable domain of TCR clone 266105 (TRBV20-1, TRBJ2-1)
CTAPPRLAGTRYNEQFF

SEQ ID NO: 532211 - protein, 13 aa, Homo sapiens
  CDR3 for alpha chain variable domain of TCR clone 266106 (TRAV29/DV5, TRAJ34)
CAARVDNTDKLIF

SEQ ID NO: 532212 - protein, 20 aa, Homo sapiens
  CDR3 for beta chain variable domain of TCR clone 266106 (TRBV28, TRBJ2-1)
CASTPIGRSPGLAGGNEQFF

SEQ ID NO: 532213 - protein, 12 aa, Homo sapiens
  CDR3 for alpha chain variable domain of TCR clone 266107 (TRAV12-3, TRAJ34)
CAMGYNTDKLIF

SEQ ID NO: 532214 - protein, 14 aa, Homo sapiens
  CDR3 for beta chain variable domain of TCR clone 266107 (TRBV5-7, TRBJ1-5)
CASSRTGGGQPQHV

SEQ ID NO: 532215 - protein, 14 aa, Homo sapiens
  CDR3 for alpha chain variable domain of TCR clone 266108 (TRAV26-1, TRAJ38)
CIADNAGNNRKLIW

SEQ ID NO: 532216 - protein, 14 aa, Homo sapiens
  CDR3 for beta chain variable domain of TCR clone 266108 (TRBV7-2, TRBJ2-7)
CASSLPPGQGTQYF

SEQ ID NO: 532217 - protein, 13 aa, Homo sapiens
  CDR3 for alpha chain variable domain of TCR clone 266109 (TRAV26-1, TRAJ33)
CIVRVEGNYLLIW

SEQ ID NO: 532218 - protein, 16 aa, Homo sapiens
  CDR3 for beta chain variable domain of TCR clone 266109 (TRBV15, TRBJ2-7)
CATSRDRGRRRGEQYF

SEQ ID NO: 532219 - protein, 13 aa, Homo sapiens
  CDR3 for alpha chain variable domain of TCR clone 266110 (TRAV23/DV6, TRAJ16)
CAASISDGQKLLF

SEQ ID NO: 532220 - protein, 15 aa, Homo sapiens
  CDR3 for beta chain variable domain of TCR clone 266110 (TRBV28, TRBJ1-3)
CASSMGWASGNTIYF

SEQ ID NO: 532221 - protein, 18 aa, Homo sapiens
  CDR3 for alpha chain variable domain of TCR clone 266111 (TRAV21, TRAJ52)
CAVRPSPAGGTSYGKLTF

SEQ ID NO: 532222 - protein, 11 aa, Homo sapiens
  CDR3 for beta chain variable domain of TCR clone 266111 (TRBV6-9, TRBJ2-7)
CARRVASEQYF

SEQ ID NO: 532223 - protein, 12 aa, Homo sapiens
  CDR3 for alpha chain variable domain of TCR clone 266112 (TRAV12-3, TRAJ17)
CAMTLTGNKLTF

SEQ ID NO: 532224 - protein, 13 aa, Homo sapiens
  CDR3 for beta chain variable domain of TCR clone 266112 (TRBV11-3, TRBJ2-7)
CASSLDKLYGQYF

SEQ ID NO: 532225 - protein, 13 aa, Homo sapiens
  CDR3 for alpha chain variable domain of TCR clone 266113 (TRAV8-3, TRAJ48)
CAVVPFGNENLTF

SEQ ID NO: 532226 - protein, 12 aa, Homo sapiens
  CDR3 for beta chain variable domain of TCR clone 266113 (TRBV11-2, TRBJ2-2)
CASSLGGGELFF

SEQ ID NO: 532227 - protein, 18 aa, Homo sapiens
  CDR3 for alpha chain variable domain of TCR clone 266114 (TRAV38-2/DV8, TRAJ39)
CISVLIGAEDNAGNMLTF

SEQ ID NO: 532228 - protein, 16 aa, Homo sapiens
  CDR3 for beta chain variable domain of TCR clone 266114 (TRBV27, TRBJ2-2)
CASSSDRGTGTGELFF

SEQ ID NO: 532229 - protein, 14 aa, Homo sapiens
  CDR3 for alpha chain variable domain of TCR clone 266115 (TRAV12-1, TRAJ12)
CVVTRMDSSYKLIF

SEQ ID NO: 532230 - protein, 14 aa, Homo sapiens
  CDR3 for beta chain variable domain of TCR clone 266115 (TRBV19, TRBJ2-2)
CASSGQGIAGELFF

SEQ ID NO: 532231 - protein, 16 aa, Homo sapiens
  CDR3 for alpha chain variable domain of TCR clone 266116 (TRAV30, TRAJ24)
CGAEIVDADSWGKFQF

SEQ ID NO: 532232 - protein, 13 aa, Homo sapiens
  CDR3 for beta chain variable domain of TCR clone 266116 (TRBV4-1, TRBJ2-2)
CASSQENTGELFF

SEQ ID NO: 532233 - protein, 18 aa, Homo sapiens
  CDR3 for alpha chain variable domain of TCR clone 266117 (TRAV12-3, TRAJ52)
CAMSVGGAGGTSYEKLTF

SEQ ID NO: 532234 - protein, 14 aa, Homo sapiens
  CDR3 for beta chain variable domain of TCR clone 266117 (TRBV7-2, TRBJ2-7)
CASRSQGAAYEQYF

SEQ ID NO: 532235 - protein, 11 aa, Homo sapiens
  CDR3 for alpha chain variable domain of TCR clone 266118 (TRAV27, TRAJ43)
CAGANNNDMRF

SEQ ID NO: 532236 - protein, 15 aa, Homo sapiens
  CDR3 for beta chain variable domain of TCR clone 266118 (TRBV7-8, TRBJ2-1)
CASSLAGGLYNEQFF

SEQ ID NO: 532237 - protein, 13 aa, Homo sapiens
  CDR3 for alpha chain variable domain of TCR clone 266119 (TRAV5, TRAJ30)
CAEIANRDDKIIF

SEQ ID NO: 532238 - protein, 12 aa, Homo sapiens
  CDR3 for beta chain variable domain of TCR clone 266119 (TRBV11-2, TRBJ2-7)
CASSPPADEQYF

SEQ ID NO: 532239 - protein, 15 aa, Homo sapiens
  CDR3 for alpha chain variable domain of TCR clone 266120 (TRAV3, TRAJ22)
CAVRDRGGSARQLTF

SEQ ID NO: 532240 - protein, 16 aa, Homo sapiens
  CDR3 for beta chain variable domain of TCR clone 266120 (TRBV11-2, TRBJ2-1)
CASARGSYSHHNKQFF

SEQ ID NO: 532241 - protein, 13 aa, Homo sapiens
  CDR3 for alpha chain variable domain of TCR clone 266121 (TRAV1-2, TRAJ9)
CAALNSGGSKTIF

SEQ ID NO: 532242 - protein, 13 aa, Homo sapiens
  CDR3 for beta chain variable domain of TCR clone 266121 (TRBV19, TRBJ1-2)
CASSVPGQDGYTF

SEQ ID NO: 532243 - protein, 13 aa, Homo sapiens
  CDR3 for alpha chain variable domain of TCR clone 266122 (TRAV27, TRAJ45)
CMSSGGGADGLTF

SEQ ID NO: 532244 - protein, 17 aa, Homo sapiens
  CDR3 for beta chain variable domain of TCR clone 266122 (TRBV11-2, TRBJ2-1)
WASSLCPPGVEYNEQFF

SEQ ID NO: 532245 - protein, 15 aa, Homo sapiens
  CDR3 for alpha chain variable domain of TCR clone 266123 (TRAV17, TRAJ35)
CATAFVIGFGNVLHC

SEQ ID NO: 532246 - protein, 16 aa, Homo sapiens
  CDR3 for beta chain variable domain of TCR clone 266123 (TRBV11-2, TRBJ2-7)
CPSSPLAGGPRYEQYF

SEQ ID NO: 532247 - protein, 16 aa, Homo sapiens
  CDR3 for alpha chain variable domain of TCR clone 266124 (TRAV3, TRAJ36)
CAVRDPYQTGANNLFF

SEQ ID NO: 532248 - protein, 13 aa, Homo sapiens
  CDR3 for beta chain variable domain of TCR clone 266124 (TRBV10-3, TRBJ2-7)
CASKLAVNYEQYF

SEQ ID NO: 532249 - protein, 13 aa, Homo sapiens
  CDR3 for alpha chain variable domain of TCR clone 266125 (TRAV12-3, TRAJ9)
CAMRNTGGFKTIF

SEQ ID NO: 532250 - protein, 14 aa, Homo sapiens
  CDR3 for beta chain variable domain of TCR clone 266125 (TRBV11-2, TRBJ2-7)
CASSSTGEVYEQYF

SEQ ID NO: 532251 - protein, 11 aa, Homo sapiens
  CDR3 for alpha chain variable domain of TCR clone 266126 (TRAV1-2, TRAJ20)
CAVSNDYKLSF

SEQ ID NO: 532252 - protein, 16 aa, Homo sapiens
  CDR3 for beta chain variable domain of TCR clone 266126 (TRBV29-1, TRBJ2-6)
CSVEDNTYSGANVLTF

SEQ ID NO: 532253 - protein, 14 aa, Homo sapiens
  CDR3 for alpha chain variable domain of TCR clone 266127 (TRAV12-1, TRAJ17)
CVVNYKASANNLTF

SEQ ID NO: 532254 - protein, 17 aa, Homo sapiens
  CDR3 for beta chain variable domain of TCR clone 266127 (TRBV20-1, TRBJ2-1)
CSASSSGLAGSYNEQFF

SEQ ID NO: 532255 - protein, 13 aa, Homo sapiens
  CDR3 for alpha chain variable domain of TCR clone 266128 (TRAV36/DV7, TRAJ49)
CAGDSNTGNQVYF

SEQ ID NO: 532256 - protein, 16 aa, Homo sapiens
  CDR3 for beta chain variable domain of TCR clone 266128 (TRBV5-1, TRBJ1-1)
CASSKTGTEVGTEAFF

SEQ ID NO: 532257 - protein, 14 aa, Homo sapiens
  CDR3 for alpha chain variable domain of TCR clone 266129 (TRAV12-2, TRAJ40)
CAVKIPSGTYKYIF

SEQ ID NO: 532258 - protein, 17 aa, Homo sapiens
  CDR3 for beta chain variable domain of TCR clone 266129 (TRBV11-2, TRBJ2-1)
CASSLHPPGVEYNEQFF

SEQ ID NO: 532259 - protein, 15 aa, Homo sapiens
  CDR3 for alpha chain variable domain of TCR clone 266130 (TRAV17, TRAJ38)
CATVLNAGNNRKLIW

SEQ ID NO: 532260 - protein, 13 aa, Homo sapiens
  CDR3 for beta chain variable domain of TCR clone 266130 (TRBV7-3, TRBJ1-1)
CASSQDWGAEAFF

SEQ ID NO: 532261 - protein, 12 aa, Homo sapiens
  CDR3 for alpha chain variable domain of TCR clone 266131 (TRAV6, TRAJ9)
CALHTGGFKTIF

SEQ ID NO: 532262 - protein, 14 aa, Homo sapiens
  CDR3 for beta chain variable domain of TCR clone 266131 (TRBV7-9, TRBJ2-1)
CASSQGQAEAEQSF

SEQ ID NO: 532263 - protein, 13 aa, Homo sapiens
  CDR3 for alpha chain variable domain of TCR clone 266132 (TRAV13-1, TRAJ39)
CSKYSNAGNMLTF

SEQ ID NO: 532264 - protein, 13 aa, Homo sapiens
  CDR3 for beta chain variable domain of TCR clone 266132 (TRBV7-2, TRBJ1-1)
CASSRNTNTEAFF

SEQ ID NO: 532265 - protein, 17 aa, Homo sapiens
  CDR3 for alpha chain variable domain of TCR clone 266133 (TRAV1-2, TRAJ9)
CLLPLCCLKYWGFKTIF

SEQ ID NO: 532266 - protein, 13 aa, Homo sapiens
  CDR3 for beta chain variable domain of TCR clone 266133 (TRBV19, TRBJ1-2)
CASSVPGQDGYTF

SEQ ID NO: 532267 - protein, 12 aa, Homo sapiens
  CDR3 for alpha chain variable domain of TCR clone 266134 (TRAV5, TRAJ29)
CAESKKETQLLS

SEQ ID NO: 532268 - protein, 15 aa, Homo sapiens
  CDR3 for beta chain variable domain of TCR clone 266134 (TRBV10-1, TRBJ2-3)
CASSATSGGFDTQYF

SEQ ID NO: 532269 - protein, 21 aa, Homo sapiens
  CDR3 for alpha chain variable domain of TCR clone 266135 (TRAV1-1, TRAJ6)
CAVRREEATYLHLEEEPALLF

SEQ ID NO: 532270 - protein, 11 aa, Homo sapiens
  CDR3 for beta chain variable domain of TCR clone 266135 (TRBV7-9, TRBJ2-3)
CASSPTDTQYF

SEQ ID NO: 532271 - protein, 16 aa, Homo sapiens
  CDR3 for alpha chain variable domain of TCR clone 266136 (TRAV12-3, TRAJ53)
CAMSVGSGGSNYKLTF

SEQ ID NO: 532272 - protein, 14 aa, Homo sapiens
  CDR3 for beta chain variable domain of TCR clone 266136 (TRBV4-2, TRBJ2-1)
CASGLDRAYNEQFF

SEQ ID NO: 532273 - protein, 15 aa, Homo sapiens
  CDR3 for alpha chain variable domain of TCR clone 266137 (TRAV8-2, TRAJ40)
CGVLGTTSGTCKYIF

SEQ ID NO: 532274 - protein, 16 aa, Homo sapiens
  CDR3 for beta chain variable domain of TCR clone 266137 (TRBV7-3, TRBJ2-1)
CASSLEGYRSYNEQFF

SEQ ID NO: 532275 - protein, 14 aa, Homo sapiens
  CDR3 for alpha chain variable domain of TCR clone 266138 (TRAV2, TRAJ23)
CAVGLRNQGGKLIF

SEQ ID NO: 532276 - protein, 20 aa, Homo sapiens
  CDR3 for beta chain variable domain of TCR clone 266138 (TRBV7-8, TRBJ2-2)
CASSHLFPGPTIHITGELFF

SEQ ID NO: 532277 - protein, 18 aa, Homo sapiens
  CDR3 for alpha chain variable domain of TCR clone 266139 (TRAV26-2, TRAJ54)
CILGDVEVGIQGAQKLVF

SEQ ID NO: 532278 - protein, 17 aa, Homo sapiens
  CDR3 for beta chain variable domain of TCR clone 266139 (TRBV20-1, TRBJ1-5)
CSASLSPGQGGNQPQHF

SEQ ID NO: 532279 - protein, 14 aa, Homo sapiens
  CDR3 for alpha chain variable domain of TCR clone 266140 (TRAV13-1, TRAJ35)
CAASKGGFGNVLHC

SEQ ID NO: 532280 - protein, 14 aa, Homo sapiens
  CDR3 for beta chain variable domain of TCR clone 266140 (TRBV7-2, TRBJ2-7)
CASSPKTSFYEKYF

SEQ ID NO: 532281 - protein, 12 aa, Homo sapiens
  CDR3 for alpha chain variable domain of TCR clone 266141 (TRAV12-3, TRAJ40)
CAMSSGTYKYIF

SEQ ID NO: 532282 - protein, 15 aa, Homo sapiens
  CDR3 for beta chain variable domain of TCR clone 266141 (TRBV7-3, TRBJ2-2)
CDSSEAGQGTGELFF

SEQ ID NO: 532283 - protein, 15 aa, Homo sapiens
  CDR3 for alpha chain variable domain of TCR clone 266142 (TRAV20, TRAJ23)
CAVQAVRNQGGKLIF

SEQ ID NO: 532284 - protein, 16 aa, Homo sapiens
  CDR3 for beta chain variable domain of TCR clone 266142 (TRBV27, TRBJ2-7)
CASSKQGRGWAYDQYF

SEQ ID NO: 532285 - protein, 18 aa, Homo sapiens
  CDR3 for alpha chain variable domain of TCR clone 266143 (TRAV13-1, TRAJ52)
CAASKRSAGGTSYGKLTF

SEQ ID NO: 532286 - protein, 15 aa, Homo sapiens
  CDR3 for beta chain variable domain of TCR clone 266143 (TRBV12-4, TRBJ1-2)
CASSLRQGKGYTLVR

SEQ ID NO: 532287 - protein, 12 aa, Homo sapiens
  CDR3 for alpha chain variable domain of TCR clone 266144 (TRAV2, TRAJ33)
CAVWGSNYQLIW

SEQ ID NO: 532288 - protein, 16 aa, Homo sapiens
  CDR3 for beta chain variable domain of TCR clone 266144 (TRBV20-1, TRBJ1-4)
CSAPGQRLLTNEKLFF

SEQ ID NO: 532289 - protein, 14 aa, Homo sapiens
  CDR3 for alpha chain variable domain of TCR clone 266145 (TRAV26-1, TRAJ38)
CIADNAGNNRKLIW

SEQ ID NO: 532290 - protein, 13 aa, Homo sapiens
  CDR3 for beta chain variable domain of TCR clone 266145 (TRBV19, TRBJ1-2)
CTSSVPGQDGYTF

SEQ ID NO: 532291 - protein, 11 aa, Homo sapiens
  CDR3 for alpha chain variable domain of TCR clone 266146 (TRAV8-3, TRAJ16)
CAVVPCQKLLF

SEQ ID NO: 532292 - protein, 12 aa, Homo sapiens
  CDR3 for beta chain variable domain of TCR clone 266146 (TRBV3-1, TRBJ1-1)
CSSSQDPTEAFF

SEQ ID NO: 532293 - protein, 12 aa, Homo sapiens
  CDR3 for alpha chain variable domain of TCR clone 266147 (TRAV3, TRAJ27)
CAVRDKAGKSTF

SEQ ID NO: 532294 - protein, 16 aa, Homo sapiens
  CDR3 for beta chain variable domain of TCR clone 266147 (TRBV18, TRBJ1-1)
CASSPGVGGRGGEAFF

SEQ ID NO: 532295 - protein, 11 aa, Homo sapiens
  CDR3 for alpha chain variable domain of TCR clone 266148 (TRAV1-2, TRAJ40)
CAVPGTYKYIF

SEQ ID NO: 532296 - protein, 15 aa, Homo sapiens
  CDR3 for beta chain variable domain of TCR clone 266148 (TRBV25-1, TRBJ1-4)
CASSPGDSTNENLFF

SEQ ID NO: 532297 - protein, 15 aa, Homo sapiens
  CDR3 for alpha chain variable domain of TCR clone 266149 (TRAV13-1, TRAJ3)
CAATPGYSSASKIIF

SEQ ID NO: 532298 - protein, 15 aa, Homo sapiens
  CDR3 for beta chain variable domain of TCR clone 266149 (TRBV20-1, TRBJ2-7)
CSAKDRVSGMDEQYF

SEQ ID NO: 532299 - protein, 15 aa, Homo sapiens
  CDR3 for alpha chain variable domain of TCR clone 266150 (TRAV27, TRAJ38)
CAARRNAGNNRKLIW

SEQ ID NO: 532300 - protein, 17 aa, Homo sapiens
  CDR3 for beta chain variable domain of TCR clone 266150 (TRBV11-2, TRBJ2-1)
CASSLYPPGVEYSEQFF

SEQ ID NO: 532301 - protein, 15 aa, Homo sapiens
  CDR3 for alpha chain variable domain of TCR clone 266151 (TRAV8-3, TRAJ20)
CAVEAKGSNDYKLSF

SEQ ID NO: 532302 - protein, 22 aa, Homo sapiens
  CDR3 for beta chain variable domain of TCR clone 266151 (TRBV6-1, TRBJ1-3)
CASVQGGGWKHHIFWRGKLAHC

SEQ ID NO: 532303 - protein, 16 aa, Homo sapiens
  CDR3 for alpha chain variable domain of TCR clone 266152 (TRAV13-1, TRAJ10)
CAASNALTGGGNKLTF

SEQ ID NO: 532304 - protein, 20 aa, Homo sapiens
  CDR3 for beta chain variable domain of TCR clone 266152 (TRBV19, TRBJ2-1)
CASSISRTVTSTRLNNEQFF

SEQ ID NO: 532305 - protein, 22 aa, Homo sapiens
  CDR3 for alpha chain variable domain of TCR clone 266153 (TRAV21, )
CAVRQDAGNNHIQNPAPAVYQL

SEQ ID NO: 532306 - protein, 16 aa, Homo sapiens
  CDR3 for beta chain variable domain of TCR clone 266153 (TRBV4-2, TRBJ1-1)
CASRPLDGGGDTEAFF

SEQ ID NO: 532307 - protein, 16 aa, Homo sapiens
  CDR3 for alpha chain variable domain of TCR clone 266154 (TRAV30, TRAJ24)
CSTEIVDAHSWGKFQF

SEQ ID NO: 532308 - protein, 14 aa, Homo sapiens
  CDR3 for beta chain variable domain of TCR clone 266154 (TRBV12-5, TRBJ2-5)
CASGSRTHQETQYF

SEQ ID NO: 532309 - protein, 10 aa, Homo sapiens
  CDR3 for alpha chain variable domain of TCR clone 266155 (TRAV12-2, TRAJ22)
CSGSARQLTF

SEQ ID NO: 532310 - protein, 13 aa, Homo sapiens
  CDR3 for beta chain variable domain of TCR clone 266155 (TRBV12-4, TRBJ1-2)
CASSLDSNYGYTF

SEQ ID NO: 532311 - protein, 15 aa, Homo sapiens
  CDR3 for alpha chain variable domain of TCR clone 266156 (TRAV12-3, TRAJ6)
CVMSATSGGSYIPTF

SEQ ID NO: 532312 - protein, 11 aa, Homo sapiens
  CDR3 for beta chain variable domain of TCR clone 266156 (TRBV20-1, TRBJ1-5)
CSAQGDQHQHF

SEQ ID NO: 532313 - protein, 12 aa, Homo sapiens
  CDR3 for alpha chain variable domain of TCR clone 266157 (TRAV8-1, TRAJ6)
CASSGGSYIPTF

SEQ ID NO: 532314 - protein, 13 aa, Homo sapiens
  CDR3 for beta chain variable domain of TCR clone 266157 (TRBV12-4, TRBJ1-2)
CASSLRQGKGYTF

SEQ ID NO: 532315 - protein, 14 aa, Homo sapiens
  CDR3 for alpha chain variable domain of TCR clone 266158 (TRAV17, TRAJ40)
CATVRFTGTYKYIF

SEQ ID NO: 532316 - protein, 17 aa, Homo sapiens
  CDR3 for beta chain variable domain of TCR clone 266158 (TRBV13, TRBJ2-3)
CASSLSRVAGGRNTQYF

SEQ ID NO: 532317 - protein, 14 aa, Homo sapiens
  CDR3 for alpha chain variable domain of TCR clone 266159 (TRAV12-3, TRAJ10)
SHLPLTGGGNKLTF

SEQ ID NO: 532318 - protein, 16 aa, Homo sapiens
  CDR3 for beta chain variable domain of TCR clone 266159 (TRBV20-1, TRBJ2-3)
CSGEAGLAGGQDTQYF

SEQ ID NO: 532319 - protein, 17 aa, Homo sapiens
  CDR3 for alpha chain variable domain of TCR clone 266160 (TRAV2, TRAJ22)
ILQVRKADAAEQRQLTF

SEQ ID NO: 532320 - protein, 13 aa, Homo sapiens
  CDR3 for beta chain variable domain of TCR clone 266160 (TRBV7-2, TRBJ2-2)
CASSLAVTGELFF

SEQ ID NO: 532321 - protein, 13 aa, Homo sapiens
  CDR3 for alpha chain variable domain of TCR clone 266161 (TRAV12-2, TRAJ52)
CAVSGTSYGKLTF

SEQ ID NO: 532322 - protein, 12 aa, Homo sapiens
  CDR3 for beta chain variable domain of TCR clone 266161 (TRBV11-2, TRBJ2-2)
CASSRGGGELFF

SEQ ID NO: 532323 - protein, 13 aa, Homo sapiens
  CDR3 for alpha chain variable domain of TCR clone 266162 (TRAV21, TRAJ20)
CAVVLRVDYKLSF

SEQ ID NO: 532324 - protein, 13 aa, Homo sapiens
  CDR3 for beta chain variable domain of TCR clone 266162 (TRBV7-3, TRBJ1-1)
CASSQDWGAEAFF

SEQ ID NO: 532325 - protein, 20 aa, Homo sapiens
  CDR3 for alpha chain variable domain of TCR clone 266163 (TRAV1-2, TRAJ8)
CAVREDRLSETCIWNWHPTS

SEQ ID NO: 532326 - protein, 15 aa, Homo sapiens
  CDR3 for beta chain variable domain of TCR clone 266163 (TRBV12-4, TRBJ2-5)
CASSPPTGLQETQYF

SEQ ID NO: 532327 - protein, 14 aa, Homo sapiens
  CDR3 for alpha chain variable domain of TCR clone 266164 (TRAV29/DV5, TRAJ36)
CAARRKTGANNLFF

SEQ ID NO: 532328 - protein, 14 aa, Homo sapiens
  CDR3 for beta chain variable domain of TCR clone 266164 (TRBV4-3, TRBJ1-4)
CASSPLQRNEKLFF

SEQ ID NO: 532329 - protein, 14 aa, Homo sapiens
  CDR3 for alpha chain variable domain of TCR clone 266165 (TRAV3, TRAJ28)
CAVRRGAGGYQLTF

SEQ ID NO: 532330 - protein, 17 aa, Homo sapiens
  CDR3 for beta chain variable domain of TCR clone 266165 (TRBV13, TRBJ2-7)
CASSLKPGASGTYEQYF

SEQ ID NO: 532331 - protein, 12 aa, Homo sapiens
  CDR3 for alpha chain variable domain of TCR clone 266166 (TRAV30, TRAJ39)
CGRGNAGNMLTF

SEQ ID NO: 532332 - protein, 14 aa, Homo sapiens
  CDR3 for beta chain variable domain of TCR clone 266166 (TRBV18, TRBJ2-5)
CASSPGVSQETQYF

SEQ ID NO: 532333 - protein, 17 aa, Homo sapiens
  CDR3 for alpha chain variable domain of TCR clone 266167 (TRAV3, TRAJ6)
CAVRDGPRAGGSYIPTF

SEQ ID NO: 532334 - protein, 20 aa, Homo sapiens
  CDR3 for beta chain variable domain of TCR clone 266167 (TRBV28, TRBJ2-1)
CASTPIGRSPGLAGGNEKFF

SEQ ID NO: 532335 - protein, 15 aa, Homo sapiens
  CDR3 for alpha chain variable domain of TCR clone 266168 (TRAV8-2, TRAJ16)
CFVSDGFSDGQKLLF

SEQ ID NO: 532336 - protein, 14 aa, Homo sapiens
  CDR3 for beta chain variable domain of TCR clone 266168 (TRBV7-3, TRBJ1-1)
CASSLRTGYTEAFF

SEQ ID NO: 532337 - protein, 16 aa, Homo sapiens
  CDR3 for alpha chain variable domain of TCR clone 266169 (TRAV30, TRAJ24)
CGTEIVDADSWGKSQF

SEQ ID NO: 532338 - protein, 15 aa, Homo sapiens
  CDR3 for beta chain variable domain of TCR clone 266169 (TRBV5-1, TRBJ2-7)
CASSLDLTSSYEQYF

SEQ ID NO: 532339 - protein, 14 aa, Homo sapiens
  CDR3 for alpha chain variable domain of TCR clone 266170 (TRAV14/DV4, TRAJ54)
CAMREAPGAQKLVC

SEQ ID NO: 532340 - protein, 15 aa, Homo sapiens
  CDR3 for beta chain variable domain of TCR clone 266170 (TRBV7-2, TRBJ2-2)
CASRRPGQNTGELFF

SEQ ID NO: 532341 - protein, 12 aa, Homo sapiens
  CDR3 for alpha chain variable domain of TCR clone 266171 (TRAV13-2, TRAJ23)
CAERHRGGKLIF

SEQ ID NO: 532342 - protein, 22 aa, Homo sapiens
  CDR3 for beta chain variable domain of TCR clone 266171 (TRBV6-1, TRBJ1-3)
CASVQGGGWKHHIFWRGKLAHC

SEQ ID NO: 532343 - protein, 14 aa, Homo sapiens
  CDR3 for alpha chain variable domain of TCR clone 266172 (TRAV8-4, TRAJ39)
CAGSLNNAGNMLTF

SEQ ID NO: 532344 - protein, 16 aa, Homo sapiens
  CDR3 for beta chain variable domain of TCR clone 266172 (TRBV13, TRBJ2-7)
CASSSRESGRTYEQYF

SEQ ID NO: 532345 - protein, 12 aa, Homo sapiens
  CDR3 for alpha chain variable domain of TCR clone 266173 (TRAV1-1, TRAJ30)
CAVRGRDDKSIF

SEQ ID NO: 532346 - protein, 14 aa, Homo sapiens
  CDR3 for beta chain variable domain of TCR clone 266173 (TRBV6-1, TRBJ1-3)
CASVQGGGGNTIYF

SEQ ID NO: 532347 - protein, 12 aa, Homo sapiens
  CDR3 for alpha chain variable domain of TCR clone 266174 (TRAV12-2, TRAJ15)
CAVNQAGTALIF

SEQ ID NO: 532348 - protein, 14 aa, Homo sapiens
  CDR3 for beta chain variable domain of TCR clone 266174 (TRBV5-1, TRBJ2-7)
CASSRGESLYEQYF

SEQ ID NO: 532349 - protein, 13 aa, Homo sapiens
  CDR3 for alpha chain variable domain of TCR clone 266175 (TRAV12-1, TRAJ6)
CVVFPGGGDRPTF

SEQ ID NO: 532350 - protein, 14 aa, Homo sapiens
  CDR3 for beta chain variable domain of TCR clone 266175 (TRBV20-1, TRBJ1-3)
CSASPTGAGNTIYF

SEQ ID NO: 532351 - protein, 16 aa, Homo sapiens
  CDR3 for alpha chain variable domain of TCR clone 266176 (TRAV3, TRAJ37)
CAVRPHVSGHTGKLIF

SEQ ID NO: 532352 - protein, 16 aa, Homo sapiens
  CDR3 for beta chain variable domain of TCR clone 266176 (TRBV9, TRBJ1-2)
CASSVEEKVSPYGYTF

SEQ ID NO: 532353 - protein, 17 aa, Homo sapiens
  CDR3 for alpha chain variable domain of TCR clone 266177 (TRAV3, TRAJ42)
CAVRDRGCGGSQGNLIF

SEQ ID NO: 532354 - protein, 13 aa, Homo sapiens
  CDR3 for beta chain variable domain of TCR clone 266177 (TRBV20-1, TRBJ2-5)
CSARRGTGATQYF

SEQ ID NO: 532355 - protein, 14 aa, Homo sapiens
  CDR3 for alpha chain variable domain of TCR clone 266178 (TRAV13-1, TRAJ35)
CEASKGGFWNVLHC

SEQ ID NO: 532356 - protein, 13 aa, Homo sapiens
  CDR3 for beta chain variable domain of TCR clone 266178 (TRBV7-3, TRBJ1-1)
CASSQDWGAEAFF

SEQ ID NO: 532357 - protein, 15 aa, Homo sapiens
  CDR3 for alpha chain variable domain of TCR clone 266179 (TRAV3, TRAJ5)
CAVRDLDTGRRALTF

SEQ ID NO: 532358 - protein, 13 aa, Homo sapiens
  CDR3 for beta chain variable domain of TCR clone 266179 (TRBV12-4, TRBJ2-7)
CASSPTETFEQYF

SEQ ID NO: 532359 - protein, 16 aa, Homo sapiens
  CDR3 for alpha chain variable domain of TCR clone 266180 (TRAV30, TRAJ24)
CGSEIVDADSWGKFQF

SEQ ID NO: 532360 - protein, 13 aa, Homo sapiens
  CDR3 for beta chain variable domain of TCR clone 266180 (TRBV7-9, TRBJ1-2)
CASSLKQNYGYTF

SEQ ID NO: 532361 - protein, 13 aa, Homo sapiens
  CDR3 for alpha chain variable domain of TCR clone 266181 (TRAV12-2, TRAJ52)
CAAGGTRYGKLTF

SEQ ID NO: 532362 - protein, 14 aa, Homo sapiens
  CDR3 for beta chain variable domain of TCR clone 266181 (TRBV19, TRBJ2-1)
CASPTFVLSGEQFF

SEQ ID NO: 532363 - protein, 13 aa, Homo sapiens
  CDR3 for alpha chain variable domain of TCR clone 266182 (TRAV1-2, TRAJ9)
CAALNTGGFKTIF

SEQ ID NO: 532364 - protein, 16 aa, Homo sapiens
  CDR3 for beta chain variable domain of TCR clone 266182 (TRBV7-3, TRBJ2-1)
CASSKPLAGGYNEQFF

SEQ ID NO: 532365 - protein, 14 aa, Homo sapiens
  CDR3 for alpha chain variable domain of TCR clone 266183 (TRAV26-1, TRAJ44)
CIVRPTGTASKLTF

SEQ ID NO: 532366 - protein, 18 aa, Homo sapiens
  CDR3 for beta chain variable domain of TCR clone 266183 (TRBV11-2, TRBJ2-3)
CASSLGGASRGAPNTQYF

SEQ ID NO: 532367 - protein, 21 aa, Homo sapiens
  CDR3 for alpha chain variable domain of TCR clone 266184 (TRAV2, TRAJ26)
CAVSPGRLWPEFCLCSRNQIV

SEQ ID NO: 532368 - protein, 17 aa, Homo sapiens
  CDR3 for beta chain variable domain of TCR clone 266184 (TRBV11-2, TRBJ2-1)
CASSLYPPGVEYNEQFF

SEQ ID NO: 532369 - protein, 18 aa, Homo sapiens
  CDR3 for alpha chain variable domain of TCR clone 266185 (TRAV12-3, TRAJ52)
CAVSRTNAGGTSYGKLTF

SEQ ID NO: 532370 - protein, 16 aa, Homo sapiens
  CDR3 for beta chain variable domain of TCR clone 266185 (TRBV2, TRBJ2-1)
CASSVGGPLSYNEQFF

SEQ ID NO: 532371 - protein, 17 aa, Homo sapiens
  CDR3 for alpha chain variable domain of TCR clone 266186 (TRAV3, TRAJ6)
CAVRDGPRAGGSYIPTF

SEQ ID NO: 532372 - protein, 13 aa, Homo sapiens
  CDR3 for beta chain variable domain of TCR clone 266186 (TRBV4-1, TRBJ2-2)
CANSQENTGELFF

SEQ ID NO: 532373 - protein, 15 aa, Homo sapiens
  CDR3 for alpha chain variable domain of TCR clone 266187 (TRAV17, TRAJ57)
CATGPSQSGSAKLVF

SEQ ID NO: 532374 - protein, 16 aa, Homo sapiens
  CDR3 for beta chain variable domain of TCR clone 266187 (TRBV12-4, TRBJ1-5)
CASSRPVGGSNQPQHF

SEQ ID NO: 532375 - protein, 13 aa, Homo sapiens
  CDR3 for alpha chain variable domain of TCR clone 266188 (TRAV27, TRAJ18)
CAGRGATLGRLYF

SEQ ID NO: 532376 - protein, 14 aa, Homo sapiens
  CDR3 for beta chain variable domain of TCR clone 266188 (TRBV5-1, TRBJ2-3)
CASSASGGQDTQYF

SEQ ID NO: 532377 - protein, 13 aa, Homo sapiens
  CDR3 for alpha chain variable domain of TCR clone 266189 (TRAV23/DV6, TRAJ44)
CSINTGTASKPTF

SEQ ID NO: 532378 - protein, 14 aa, Homo sapiens
  CDR3 for beta chain variable domain of TCR clone 266189 (TRBV2, TRBJ2-1)
CASSEALDGNEQFF

SEQ ID NO: 532379 - protein, 11 aa, Homo sapiens
  CDR3 for alpha chain variable domain of TCR clone 266190 (TRAV1-1, TRAJ23)
CAVRQGGKLIF

SEQ ID NO: 532380 - protein, 14 aa, Homo sapiens
  CDR3 for beta chain variable domain of TCR clone 266190 (TRBV19, TRBJ2-1)
CASPTFVLSGEEFF

SEQ ID NO: 532381 - protein, 18 aa, Homo sapiens
  CDR3 for alpha chain variable domain of TCR clone 266191 (TRAV26-1, TRAJ5)
CIVRVVPPRDTGRRALTF

SEQ ID NO: 532382 - protein, 15 aa, Homo sapiens
  CDR3 for beta chain variable domain of TCR clone 266191 (TRBV7-9, TRBJ2-7)
CASSLPMGQASEQYF

SEQ ID NO: 532383 - protein, 14 aa, Homo sapiens
  CDR3 for alpha chain variable domain of TCR clone 266192 (TRAV23/DV6, TRAJ8)
CAASKATGFQKLVF

SEQ ID NO: 532384 - protein, 16 aa, Homo sapiens
  CDR3 for beta chain variable domain of TCR clone 266192 (TRBV7-3, TRBJ2-3)
CASSPTGYQSTDTQYF

SEQ ID NO: 532385 - protein, 10 aa, Homo sapiens
  CDR3 for alpha chain variable domain of TCR clone 266193 (TRAV21, TRAJ43)
CAVSIGDMRF

SEQ ID NO: 532386 - protein, 13 aa, Homo sapiens
  CDR3 for beta chain variable domain of TCR clone 266193 (TRBV20-1, TRBJ2-7)
CSAPGLADYEQYF

SEQ ID NO: 532387 - protein, 15 aa, Homo sapiens
  CDR3 for alpha chain variable domain of TCR clone 266194 (TRAV25, TRAJ53)
CAATGGGGSSYKLTF

SEQ ID NO: 532388 - protein, 11 aa, Homo sapiens
  CDR3 for beta chain variable domain of TCR clone 266194 (TRBV11-3, TRBJ2-2)
CASSSGGELFF

SEQ ID NO: 532389 - protein, 16 aa, Homo sapiens
  CDR3 for alpha chain variable domain of TCR clone 266195 (TRAV3, TRAJ37)
CAVRPHGSGNTGKLIF

SEQ ID NO: 532390 - protein, 15 aa, Homo sapiens
  CDR3 for beta chain variable domain of TCR clone 266195 (TRBV7-9, TRBJ2-7)
CASSLALAEAYEQYF

SEQ ID NO: 532391 - protein, 14 aa, Homo sapiens
  CDR3 for alpha chain variable domain of TCR clone 266196 (TRAV12-2, TRAJ9)
CAVNMEGGGFKTIF

SEQ ID NO: 532392 - protein, 18 aa, Homo sapiens
  CDR3 for beta chain variable domain of TCR clone 266196 (TRBV11-2, TRBJ2-3)
CASSLGGASRGAPNTQYF

SEQ ID NO: 532393 - protein, 14 aa, Homo sapiens
  CDR3 for alpha chain variable domain of TCR clone 266197 (TRAV13-1, TRAJ44)
CAAKATGTASKLTF

SEQ ID NO: 532394 - protein, 15 aa, Homo sapiens
  CDR3 for beta chain variable domain of TCR clone 266197 (TRBV13, TRBJ2-1)
CASSLLSGLNNEQFF

SEQ ID NO: 532395 - protein, 14 aa, Homo sapiens
  CDR3 for alpha chain variable domain of TCR clone 266198 (TRAV16, TRAJ37)
CALDISGNTGKLIF

SEQ ID NO: 532396 - protein, 14 aa, Homo sapiens
  CDR3 for beta chain variable domain of TCR clone 266198 (TRBV7-6, TRBJ2-7)
CASSFPQGADEQYF

SEQ ID NO: 532397 - protein, 12 aa, Homo sapiens
  CDR3 for alpha chain variable domain of TCR clone 266199 (TRAV8-3, TRAJ20)
FAVGANYYKLSF

SEQ ID NO: 532398 - protein, 16 aa, Homo sapiens
  CDR3 for beta chain variable domain of TCR clone 266199 (TRBV19, TRBJ2-2)
CASRSPGTGATGELFF

SEQ ID NO: 532399 - protein, 16 aa, Homo sapiens
  CDR3 for alpha chain variable domain of TCR clone 266200 (TRAV17, TRAJ35)
CATAEGGIGFGNVLHC

SEQ ID NO: 532400 - protein, 16 aa, Homo sapiens
  CDR3 for beta chain variable domain of TCR clone 266200 (TRBV6-5, TRBJ2-7)
CVSSSDPTSGFYEQYF

SEQ ID NO: 532401 - protein, 14 aa, Homo sapiens
  CDR3 for alpha chain variable domain of TCR clone 266201 (TRAV2, TRAJ16)
CAVERGSDGQRLLF

SEQ ID NO: 532402 - protein, 12 aa, Homo sapiens
  CDR3 for beta chain variable domain of TCR clone 266201 (TRBV6-5, TRBJ2-7)
CASYIYGYGQYF

SEQ ID NO: 532403 - protein, 15 aa, Homo sapiens
  CDR3 for alpha chain variable domain of TCR clone 266202 (TRAV3, TRAJ3)
CAVRDGHSSASKIIF

SEQ ID NO: 532404 - protein, 14 aa, Homo sapiens
  CDR3 for beta chain variable domain of TCR clone 266202 (TRBV28, TRBJ1-4)
CASSFGTFDEKLFF

SEQ ID NO: 532405 - protein, 18 aa, Homo sapiens
  CDR3 for alpha chain variable domain of TCR clone 266203 (TRAV21, TRAJ52)
CAVRPSPAGGTSYGKLTF

SEQ ID NO: 532406 - protein, 15 aa, Homo sapiens
  CDR3 for beta chain variable domain of TCR clone 266203 (TRBV5-1, TRBJ2-3)
CASSVTSGATDTQYF

SEQ ID NO: 532407 - protein, 11 aa, Homo sapiens
  CDR3 for alpha chain variable domain of TCR clone 266204 (TRAV29/DV5, TRAJ34)
CASGNTDKLIF

SEQ ID NO: 532408 - protein, 16 aa, Homo sapiens
  CDR3 for beta chain variable domain of TCR clone 266204 (TRBV12-4, TRBJ1-5)
CASRQPVEGSNQPQHF

SEQ ID NO: 532409 - protein, 15 aa, Homo sapiens
  CDR3 for alpha chain variable domain of TCR clone 266205 (TRAV22, TRAJ45)
CAAKYSGGGADGLTF

SEQ ID NO: 532410 - protein, 13 aa, Homo sapiens
  CDR3 for beta chain variable domain of TCR clone 266205 (TRBV10-3, TRBJ2-7)
CASKLAVNYEQYF

SEQ ID NO: 532411 - protein, 17 aa, Homo sapiens
  CDR3 for alpha chain variable domain of TCR clone 266206 (TRAV3, TRAJ6)
FAVRDGPRAGGSYIPTF

SEQ ID NO: 532412 - protein, 14 aa, Homo sapiens
  CDR3 for beta chain variable domain of TCR clone 266206 (TRBV7-2, TRBJ2-7)
CASNPKTSFYEQYF

SEQ ID NO: 532413 - protein, 13 aa, Homo sapiens
  CDR3 for alpha chain variable domain of TCR clone 266207 (TRAV21, TRAJ27)
CAARPGNAGKSTF

SEQ ID NO: 532414 - protein, 14 aa, Homo sapiens
  CDR3 for beta chain variable domain of TCR clone 266207 (TRBV7-2, TRBJ2-7)
CASSPKTSFYEQYI

SEQ ID NO: 532415 - protein, 15 aa, Homo sapiens
  CDR3 for alpha chain variable domain of TCR clone 266208 (TRAV8-4, TRAJ10)
CAASDGPGGGNKLTF

SEQ ID NO: 532416 - protein, 13 aa, Homo sapiens
  CDR3 for beta chain variable domain of TCR clone 266208 (TRBV28, TRBJ1-3)
CASSVLGSGTIYF

SEQ ID NO: 532417 - protein, 12 aa, Homo sapiens
  CDR3 for alpha chain variable domain of TCR clone 266209 (TRAV12-2, TRAJ52)
IGGGTSYGKLTF

SEQ ID NO: 532418 - protein, 13 aa, Homo sapiens
  CDR3 for beta chain variable domain of TCR clone 266209 (TRBV12-4, TRBJ1-1)
CASSPGTGFEVFF

SEQ ID NO: 532419 - protein, 14 aa, Homo sapiens
  CDR3 for alpha chain variable domain of TCR clone 266210 (TRAV8-4, TRAJ13)
CSVTLSGGYQKVTF

SEQ ID NO: 532420 - protein, 16 aa, Homo sapiens
  CDR3 for beta chain variable domain of TCR clone 266210 (TRBV19, TRBJ2-2)
CASRSPGTGATGELFF

SEQ ID NO: 532421 - protein, 13 aa, Homo sapiens
  CDR3 for alpha chain variable domain of TCR clone 266211 (TRAV8-1, TRAJ39)
CAVANNAGNMLTF

SEQ ID NO: 532422 - protein, 13 aa, Homo sapiens
  CDR3 for beta chain variable domain of TCR clone 266211 (TRBV7-9, TRBJ1-2)
CASSLKQNYGYTF

SEQ ID NO: 532423 - protein, 14 aa, Homo sapiens
  CDR3 for alpha chain variable domain of TCR clone 266212 (TRAV1-2, TRAJ16)
CAVNRFSDGKKLLF

SEQ ID NO: 532424 - protein, 19 aa, Homo sapiens
  CDR3 for beta chain variable domain of TCR clone 266212 (TRBV25-1, TRBJ2-2)
CAILVYRVDRGRKTGELFF

SEQ ID NO: 532425 - protein, 10 aa, Homo sapiens
  CDR3 for alpha chain variable domain of TCR clone 266213 (TRAV30, TRAJ48)
CGIGNEKLTF

SEQ ID NO: 532426 - protein, 16 aa, Homo sapiens
  CDR3 for beta chain variable domain of TCR clone 266213 (TRBV20-1, TRBJ1-4)
CSAPGQGLLTNDKLFF

SEQ ID NO: 532427 - protein, 12 aa, Homo sapiens
  CDR3 for alpha chain variable domain of TCR clone 266214 (TRAV12-3, TRAJ4)
CAMTGAGTRLAV

SEQ ID NO: 532428 - protein, 14 aa, Homo sapiens
  CDR3 for beta chain variable domain of TCR clone 266214 (TRBV10-3, TRBJ1-1)
CAISDTDRWVEAFF

SEQ ID NO: 532429 - protein, 15 aa, Homo sapiens
  CDR3 for alpha chain variable domain of TCR clone 266215 (TRAV23/DV6, TRAJ52)
CAASSPGTSYGKLTF

SEQ ID NO: 532430 - protein, 15 aa, Homo sapiens
  CDR3 for beta chain variable domain of TCR clone 266215 (TRBV6-1, TRBJ2-3)
CASSERGGITDTQYF

SEQ ID NO: 532431 - protein, 16 aa, Homo sapiens
  CDR3 for alpha chain variable domain of TCR clone 266216 (TRAV3, TRAJ37)
CAVRGKGSGNTGKLIF

SEQ ID NO: 532432 - protein, 13 aa, Homo sapiens
  CDR3 for beta chain variable domain of TCR clone 266216 (TRBV7-3, TRBJ1-1)
SASSQDWGAEAFF

SEQ ID NO: 532433 - protein, 11 aa, Homo sapiens
  CDR3 for alpha chain variable domain of TCR clone 266217 (TRAV22, TRAJ47)
CAVLYGNKLVF

SEQ ID NO: 532434 - protein, 17 aa, Homo sapiens
  CDR3 for beta chain variable domain of TCR clone 266217 (TRBV20-1, TRBJ2-7)
CSARVQPRTSTSGTSGR

SEQ ID NO: 532435 - protein, 14 aa, Homo sapiens
  CDR3 for alpha chain variable domain of TCR clone 266218 (TRAV1-2, TRAJ8)
CAVREDTGFQKLVL

SEQ ID NO: 532436 - protein, 15 aa, Homo sapiens
  CDR3 for beta chain variable domain of TCR clone 266218 (TRBV6-3, TRBJ2-7)
CASSFPGTVFYEQYF

SEQ ID NO: 532437 - protein, 14 aa, Homo sapiens
  CDR3 for alpha chain variable domain of TCR clone 266219 (TRAV12-3, TRAJ10)
SHLPLTGGGNKLTF

SEQ ID NO: 532438 - protein, 14 aa, Homo sapiens
  CDR3 for beta chain variable domain of TCR clone 266219 (TRBV7-2, TRBJ1-6)
CASSLQGANSPLHF

SEQ ID NO: 532439 - protein, 13 aa, Homo sapiens
  CDR3 for alpha chain variable domain of TCR clone 266220 (TRAV12-1, TRAJ11)
CVVTRGGYSTLTF

SEQ ID NO: 532440 - protein, 14 aa, Homo sapiens
  CDR3 for beta chain variable domain of TCR clone 266220 (TRBV7-2, TRBJ1-3)
CASSLGTAGNTIYF

SEQ ID NO: 532441 - protein, 17 aa, Homo sapiens
  CDR3 for alpha chain variable domain of TCR clone 266221 (TRAV26-1, TRAJ37)
CIVRVITASSNTGKLIF

SEQ ID NO: 532442 - protein, 13 aa, Homo sapiens
  CDR3 for beta chain variable domain of TCR clone 266221 (TRBV14, TRBJ1-2)
CASSHGPSYGYTF

SEQ ID NO: 532443 - protein, 15 aa, Homo sapiens
  CDR3 for alpha chain variable domain of TCR clone 266222 (TRAV12-2, TRAJ53)
CAVNGGGGSNYKLTF

SEQ ID NO: 532444 - protein, 12 aa, Homo sapiens
  CDR3 for beta chain variable domain of TCR clone 266222 (TRBV3-1, TRBJ2-2)
CASSLFPGELFF

SEQ ID NO: 532445 - protein, 13 aa, Homo sapiens
  CDR3 for alpha chain variable domain of TCR clone 266223 (TRAV21, TRAJ36)
CAVIKTGANNLFF

SEQ ID NO: 532446 - protein, 13 aa, Homo sapiens
  CDR3 for beta chain variable domain of TCR clone 266223 (TRBV20-1, TRBJ1-1)
CSAPLGGGTEAFF

SEQ ID NO: 532447 - protein, 15 aa, Homo sapiens
  CDR3 for alpha chain variable domain of TCR clone 266224 (TRAV12-1, TRAJ42)
SVVTRDGGSQGNLIF

SEQ ID NO: 532448 - protein, 14 aa, Homo sapiens
  CDR3 for beta chain variable domain of TCR clone 266224 (TRBV11-2, TRBJ2-3)
CASSLGGGANTQYF

SEQ ID NO: 532449 - protein, 12 aa, Homo sapiens
  CDR3 for alpha chain variable domain of TCR clone 266225 (TRAV12-3, TRAJ20)
CAMVRGDYKLSF

SEQ ID NO: 532450 - protein, 19 aa, Homo sapiens
  CDR3 for beta chain variable domain of TCR clone 266225 (TRBV25-1, TRBJ2-2)
CAILVYRVDRGRKTGELFF

SEQ ID NO: 532451 - protein, 14 aa, Homo sapiens
  CDR3 for alpha chain variable domain of TCR clone 266226 (TRAV9-2, TRAJ6)
CALSDPGGSYIPTF

SEQ ID NO: 532452 - protein, 15 aa, Homo sapiens
  CDR3 for beta chain variable domain of TCR clone 266226 (TRBV4-1, TRBJ1-4)
CASSDTGGTNEKLFF

SEQ ID NO: 532453 - protein, 14 aa, Homo sapiens
  CDR3 for alpha chain variable domain of TCR clone 266227 (TRAV12-2, TRAJ40)
CAVKIPSGTYKYIF

SEQ ID NO: 532454 - protein, 18 aa, Homo sapiens
  CDR3 for beta chain variable domain of TCR clone 266227 (TRBV20-1, TRBJ2-6)
CSAETSPTHGCGANVLTF

SEQ ID NO: 532455 - protein, 17 aa, Homo sapiens
  CDR3 for alpha chain variable domain of TCR clone 266228 (TRAV38-2/DV8, TRAJ40)
CAYRSARLTSGTYKYIF

SEQ ID NO: 532456 - protein, 16 aa, Homo sapiens
  CDR3 for beta chain variable domain of TCR clone 266228 (TRBV10-3, TRBJ2-7)
CAISADFADRPYEQYF

SEQ ID NO: 532457 - protein, 13 aa, Homo sapiens
  CDR3 for alpha chain variable domain of TCR clone 266229 (TRAV35, TRAJ20)
CAGPLSNDYKLSF

SEQ ID NO: 532458 - protein, 16 aa, Homo sapiens
  CDR3 for beta chain variable domain of TCR clone 266229 (TRBV20-1, TRBJ1-4)
CSAPGQGLLTNEKLFF

SEQ ID NO: 532459 - protein, 15 aa, Homo sapiens
  CDR3 for alpha chain variable domain of TCR clone 266230 (TRAV4, TRAJ26)
CLVGGLDNYAQNFVF

SEQ ID NO: 532460 - protein, 13 aa, Homo sapiens
  CDR3 for beta chain variable domain of TCR clone 266230 (TRBV20-1, TRBJ2-5)
CSASLTGRETQYF

SEQ ID NO: 532461 - protein, 15 aa, Homo sapiens
  CDR3 for alpha chain variable domain of TCR clone 266231 (TRAV27, TRAJ38)
CAARRNAGNNSKLIW

SEQ ID NO: 532462 - protein, 17 aa, Homo sapiens
  CDR3 for beta chain variable domain of TCR clone 266231 (TRBV20-1, TRBJ2-2)
CSASGSGQGGLTGELFF

SEQ ID NO: 532463 - protein, 15 aa, Homo sapiens
  CDR3 for alpha chain variable domain of TCR clone 266232 (TRAV21, TRAJ24)
CAARSSTDSWVKLQF

SEQ ID NO: 532464 - protein, 15 aa, Homo sapiens
  CDR3 for beta chain variable domain of TCR clone 266232 (TRBV5-1, TRBJ2-1)
GASSPPRAPYNEQFF

SEQ ID NO: 532465 - protein, 17 aa, Homo sapiens
  CDR3 for alpha chain variable domain of TCR clone 266233 (TRAV40, TRAJ43)
CLPSNDMRFGAGTRLTV

SEQ ID NO: 532466 - protein, 17 aa, Homo sapiens
  CDR3 for beta chain variable domain of TCR clone 266233 (TRBV20-1, TRBJ2-1)
CSARSPSGGPPTMSSSS

SEQ ID NO: 532467 - protein, 14 aa, Homo sapiens
  CDR3 for alpha chain variable domain of TCR clone 266234 (TRAV1-2, TRAJ16)
CAVNRFSDGQKLLF

SEQ ID NO: 532468 - protein, 13 aa, Homo sapiens
  CDR3 for beta chain variable domain of TCR clone 266234 (TRBV6-3, TRBJ1-2)
CASSYRGPDGYTF

SEQ ID NO: 532469 - protein, 11 aa, Homo sapiens
  CDR3 for alpha chain variable domain of TCR clone 266235 (TRAV1-2, TRAJ40)
CAVPGTYKYIF

SEQ ID NO: 532470 - protein, 14 aa, Homo sapiens
  CDR3 for beta chain variable domain of TCR clone 266235 (TRBV5-4, TRBJ1-1)
CASSLDSRRDEAFF

SEQ ID NO: 532471 - protein, 17 aa, Homo sapiens
  CDR3 for alpha chain variable domain of TCR clone 266236 (TRAV36/DV7, TRAJ52)
CAVAQRAGGTSYGKMTF

SEQ ID NO: 532472 - protein, 16 aa, Homo sapiens
  CDR3 for beta chain variable domain of TCR clone 266236 (TRBV20-1, TRBJ2-1)
CSARDLKQGMNNEQFF

SEQ ID NO: 532473 - protein, 16 aa, Homo sapiens
  CDR3 for alpha chain variable domain of TCR clone 266237 (TRAV3, TRAJ10)
CAVRDMNAGGGNKLTF

SEQ ID NO: 532474 - protein, 14 aa, Homo sapiens
  CDR3 for beta chain variable domain of TCR clone 266237 (TRBV25-1, TRBJ1-1)
CASTHLGGNTEAFF

SEQ ID NO: 532475 - protein, 11 aa, Homo sapiens
  CDR3 for alpha chain variable domain of TCR clone 266238 (TRAV12-1, TRAJ37)
CLVNTPGKLIF

SEQ ID NO: 532476 - protein, 13 aa, Homo sapiens
  CDR3 for beta chain variable domain of TCR clone 266238 (TRBV12-4, TRBJ1-5)
CASSPDRAQPQHF

SEQ ID NO: 532477 - protein, 14 aa, Homo sapiens
  CDR3 for alpha chain variable domain of TCR clone 266239 (TRAV12-2, TRAJ40)
CAVKIPSGPYKYIF

SEQ ID NO: 532478 - protein, 15 aa, Homo sapiens
  CDR3 for beta chain variable domain of TCR clone 266239 (TRBV3-1, TRBJ2-2)
CASSQDWTRAGELFF

SEQ ID NO: 532479 - protein, 12 aa, Homo sapiens
  CDR3 for alpha chain variable domain of TCR clone 266240 (TRAV13-1, TRAJ49)
CAAPNTGNQFYF

SEQ ID NO: 532480 - protein, 14 aa, Homo sapiens
  CDR3 for beta chain variable domain of TCR clone 266240 (TRBV19, TRBJ2-5)
CASSLTGGEETQFF

SEQ ID NO: 532481 - protein, 13 aa, Homo sapiens
  CDR3 for alpha chain variable domain of TCR clone 266241 (TRAV27, TRAJ54)
CAGAGQGAQKLVF

SEQ ID NO: 532482 - protein, 15 aa, Homo sapiens
  CDR3 for beta chain variable domain of TCR clone 266241 (TRBV18, TRBJ2-6)
CDSSPSYAGANVLTF

SEQ ID NO: 532483 - protein, 13 aa, Homo sapiens
  CDR3 for alpha chain variable domain of TCR clone 266242 (TRAV17, TRAJ4)
CATRSGGYNKLIF

SEQ ID NO: 532484 - protein, 14 aa, Homo sapiens
  CDR3 for beta chain variable domain of TCR clone 266242 (TRBV20-1, TRBJ1-5)
CSARDDRGNQPQHF

SEQ ID NO: 532485 - protein, 13 aa, Homo sapiens
  CDR3 for alpha chain variable domain of TCR clone 266243 (TRAV29/DV5, TRAJ49)
CAASTNTGNQFYF

SEQ ID NO: 532486 - protein, 20 aa, Homo sapiens
  CDR3 for beta chain variable domain of TCR clone 266243 (TRBV28, TRBJ2-1)
CASTPIGRSPGLAGGNEQFF

SEQ ID NO: 532487 - protein, 11 aa, Homo sapiens
  CDR3 for alpha chain variable domain of TCR clone 266244 (TRAV36/DV7, TRAJ54)
CAVEGAQKLVF

SEQ ID NO: 532488 - protein, 14 aa, Homo sapiens
  CDR3 for beta chain variable domain of TCR clone 266244 (TRBV7-2, TRBJ2-5)
CASSPRGSSETQYF

SEQ ID NO: 532489 - protein, 20 aa, Homo sapiens
  CDR3 for alpha chain variable domain of TCR clone 266245 (TRAV4, TRAJ29)
CCVLLPRGCVPFSGNTPLVF

SEQ ID NO: 532490 - protein, 11 aa, Homo sapiens
  CDR3 for beta chain variable domain of TCR clone 266245 (TRBV6-3, TRBJ2-3)
CATGQADTQYF

SEQ ID NO: 532491 - protein, 12 aa, Homo sapiens
  CDR3 for alpha chain variable domain of TCR clone 266246 (TRAV12-1, TRAJ50)
CVGRTSYDKVIF

SEQ ID NO: 532492 - protein, 12 aa, Homo sapiens
  CDR3 for beta chain variable domain of TCR clone 266246 (TRBV5-7, TRBJ1-1)
CASSVVGTEAFF

SEQ ID NO: 532493 - protein, 18 aa, Homo sapiens
  CDR3 for alpha chain variable domain of TCR clone 266247 (TRAV21, TRAJ52)
CAVRPSPAGGTSYGKLTF

SEQ ID NO: 532494 - protein, 17 aa, Homo sapiens
  CDR3 for beta chain variable domain of TCR clone 266247 (TRBV7-3, TRBJ2-3)
CASSRGLAGEVPDTQYF

SEQ ID NO: 532495 - protein, 14 aa, Homo sapiens
  CDR3 for alpha chain variable domain of TCR clone 266248 (TRAV8-3, TRAJ42)
CAVVKVGSQGNLIF

SEQ ID NO: 532496 - protein, 14 aa, Homo sapiens
  CDR3 for beta chain variable domain of TCR clone 266248 (TRBV11-2, TRBJ2-7)
CASSLGSGGYEQYF

SEQ ID NO: 532497 - protein, 15 aa, Homo sapiens
  CDR3 for alpha chain variable domain of TCR clone 266249 (TRAV25, TRAJ52)
CAGRPGGTSYGKLTF

SEQ ID NO: 532498 - protein, 16 aa, Homo sapiens
  CDR3 for beta chain variable domain of TCR clone 266249 (TRBV7-8, TRBJ2-2)
CASSLKRGTLSGELFF

SEQ ID NO: 532499 - protein, 12 aa, Homo sapiens
  CDR3 for alpha chain variable domain of TCR clone 266250 (TRAV1-2, TRAJ24)
CAVGGSWGNSSL

SEQ ID NO: 532500 - protein, 15 aa, Homo sapiens
  CDR3 for beta chain variable domain of TCR clone 266250 (TRBV6-1, TRBJ2-7)
CASSEGVGNPYEQYF

SEQ ID NO: 532501 - protein, 13 aa, Homo sapiens
  CDR3 for alpha chain variable domain of TCR clone 266251 (TRAV27, TRAJ29)
CAGAHSGNTPLVF

SEQ ID NO: 532502 - protein, 15 aa, Homo sapiens
  CDR3 for beta chain variable domain of TCR clone 266251 (TRBV15, TRGJ1)
CATSRDMGSYEKLFF

SEQ ID NO: 532503 - protein, 11 aa, Homo sapiens
  CDR3 for alpha chain variable domain of TCR clone 266252 (TRAV3, TRAJ21)
CAVGNLHKFYF

SEQ ID NO: 532504 - protein, 14 aa, Homo sapiens
  CDR3 for beta chain variable domain of TCR clone 266252 (TRBV18, TRBJ2-5)
CASSPGVSQETQYF

SEQ ID NO: 532505 - protein, 14 aa, Homo sapiens
  CDR3 for alpha chain variable domain of TCR clone 266253 (TRAV16, TRAJ33)
CALSAMDSNYQLMW

SEQ ID NO: 532506 - protein, 16 aa, Homo sapiens
  CDR3 for beta chain variable domain of TCR clone 266253 (TRBV12-4, TRBJ2-3)
CASSFPSNTNTDTQYF

SEQ ID NO: 532507 - protein, 15 aa, Homo sapiens
  CDR3 for alpha chain variable domain of TCR clone 266254 (TRAV25, TRAJ52)
CAGTSGGTSYGNLTF

SEQ ID NO: 532508 - protein, 16 aa, Homo sapiens
  CDR3 for beta chain variable domain of TCR clone 266254 (TRBV15, TRBJ1-2)
CATSRGPRTGGGGYTF

SEQ ID NO: 532509 - protein, 16 aa, Homo sapiens
  CDR3 for alpha chain variable domain of TCR clone 266255 (TRAV20, TRAJ28)
CAVRGPSGAGSYQLTF

SEQ ID NO: 532510 - protein, 13 aa, Homo sapiens
  CDR3 for beta chain variable domain of TCR clone 266255 (TRBV13, TRBJ2-7)
CASSLERGWKKYF

SEQ ID NO: 532511 - protein, 18 aa, Homo sapiens
  CDR3 for alpha chain variable domain of TCR clone 266256 (TRAV13-1, TRAJ10)
CAASKGRAFTGGGNKLTF

SEQ ID NO: 532512 - protein, 14 aa, Homo sapiens
  CDR3 for beta chain variable domain of TCR clone 266256 (TRBV18, TRBJ2-7)
CASSPRGGAYEQYF

SEQ ID NO: 532513 - protein, 12 aa, Homo sapiens
  CDR3 for alpha chain variable domain of TCR clone 266257 (TRAV12-3, TRAJ42)
CAPGGSQGNLIS

SEQ ID NO: 532514 - protein, 13 aa, Homo sapiens
  CDR3 for beta chain variable domain of TCR clone 266257 (TRBV5-7, TRBJ2-6)
CASTSSGANVLTF

SEQ ID NO: 532515 - protein, 17 aa, Homo sapiens
  CDR3 for alpha chain variable domain of TCR clone 266258 (TRAV26-2, TRAJ54)
CCVLLHPRVGGAQKLVF

SEQ ID NO: 532516 - protein, 16 aa, Homo sapiens
  CDR3 for beta chain variable domain of TCR clone 266258 (TRBV4-1, TRBJ1-1)
CASSSMSERPNTEAFF

SEQ ID NO: 532517 - protein, 14 aa, Homo sapiens
  CDR3 for alpha chain variable domain of TCR clone 266259 (TRAV26-2, TRAJ32)
CCVGCGGATNKLIF

SEQ ID NO: 532518 - protein, 14 aa, Homo sapiens
  CDR3 for beta chain variable domain of TCR clone 266259 (TRBV4-3, TRBJ2-1)
CASGLDRAYNEQFF

SEQ ID NO: 532519 - protein, 12 aa, Homo sapiens
  CDR3 for alpha chain variable domain of TCR clone 266260 (TRAV12-3, TRAJ17)
CAMTLTGNKLTF

SEQ ID NO: 532520 - protein, 12 aa, Homo sapiens
  CDR3 for beta chain variable domain of TCR clone 266260 (TRBV2, TRBJ1-5)
CAFGEYDQPQHF

SEQ ID NO: 532521 - protein, 14 aa, Homo sapiens
  CDR3 for alpha chain variable domain of TCR clone 266261 (TRAV12-1, TRAJ29)
CVVNEGSGNTPLVF

SEQ ID NO: 532522 - protein, 14 aa, Homo sapiens
  CDR3 for beta chain variable domain of TCR clone 266261 (TRBV4-2, TRBJ2-3)
CASSQERGTDTQYF

SEQ ID NO: 532523 - protein, 12 aa, Homo sapiens
  CDR3 for alpha chain variable domain of TCR clone 266262 (TRAV17, TRAJ4)
CAVSGGYNKLIF

SEQ ID NO: 532524 - protein, 13 aa, Homo sapiens
  CDR3 for beta chain variable domain of TCR clone 266262 (TRBV12-5, TRBJ2-3)
CASGDRQSDTQYF

SEQ ID NO: 532525 - protein, 14 aa, Homo sapiens
  CDR3 for alpha chain variable domain of TCR clone 266263 (TRAV13-1, TRAJ52)
CAANGGTSYGKLTF

SEQ ID NO: 532526 - protein, 14 aa, Homo sapiens
  CDR3 for beta chain variable domain of TCR clone 266263 (TRBV14, TRBJ2-5)
CDSSSLGSGETQYF

SEQ ID NO: 532527 - protein, 16 aa, Homo sapiens
  CDR3 for alpha chain variable domain of TCR clone 266264 (TRAV12-2, TRAJ32)
CAVNLGQGSATNKLTF

SEQ ID NO: 532528 - protein, 15 aa, Homo sapiens
  CDR3 for beta chain variable domain of TCR clone 266264 (TRBV20-1, TRBJ2-7)
CSARGPLAGGREQYF

SEQ ID NO: 532529 - protein, 10 aa, Homo sapiens
  CDR3 for alpha chain variable domain of TCR clone 266265 (TRAV1-2, TRAJ31)
CVSEDARLMF

SEQ ID NO: 532530 - protein, 14 aa, Homo sapiens
  CDR3 for beta chain variable domain of TCR clone 266265 (TRBV19, TRBJ2-1)
CASPTFVLSGEQCF

SEQ ID NO: 532531 - protein, 17 aa, Homo sapiens
  CDR3 for alpha chain variable domain of TCR clone 266266 (TRAV8-6, TRAJ58)
CSVSSWVGETSGSRLTF

SEQ ID NO: 532532 - protein, 17 aa, Homo sapiens
  CDR3 for beta chain variable domain of TCR clone 266266 (TRBV4-3, TRBJ1-2)
CASSSRLQAGGSVGYTF

SEQ ID NO: 532533 - protein, 18 aa, Homo sapiens
  CDR3 for alpha chain variable domain of TCR clone 266267 (TRAV26-2, TRAJ45)
CILRVDKYSGGGAYGLTF

SEQ ID NO: 532534 - protein, 20 aa, Homo sapiens
  CDR3 for beta chain variable domain of TCR clone 266267 (TRBV7-8, TRBJ2-2)
CASSHLFPGPTIHITGELFF

SEQ ID NO: 532535 - protein, 15 aa, Homo sapiens
  CDR3 for alpha chain variable domain of TCR clone 266268 (TRAV17, TRAJ57)
CATGPSQGGSEKLVF

SEQ ID NO: 532536 - protein, 16 aa, Homo sapiens
  CDR3 for beta chain variable domain of TCR clone 266268 (TRBV10-3, TRBJ2-1)
CAISGVGDGGGGEQFF

SEQ ID NO: 532537 - protein, 17 aa, Homo sapiens
  CDR3 for alpha chain variable domain of TCR clone 266269 (TRAV3, TRAJ6)
CAVRDGPRAGGSYIPTF

SEQ ID NO: 532538 - protein, 16 aa, Homo sapiens
  CDR3 for beta chain variable domain of TCR clone 266269 (TRBV7-9, TRBJ1-3)
CASSQTSGIRMGTIYF

SEQ ID NO: 532539 - protein, 15 aa, Homo sapiens
  CDR3 for alpha chain variable domain of TCR clone 266270 (TRAV21, TRAJ17)
CAVDEQKAAGNKLTF

SEQ ID NO: 532540 - protein, 12 aa, Homo sapiens
  CDR3 for beta chain variable domain of TCR clone 266270 (TRBV7-9, TRBJ2-7)
CATRTDAYEQYF

SEQ ID NO: 532541 - protein, 20 aa, Homo sapiens
  CDR3 for alpha chain variable domain of TCR clone 266271 (TRAV12-3, TRAJ41)
SLFIRDSQPSDSATPEALNF

SEQ ID NO: 532542 - protein, 17 aa, Homo sapiens
  CDR3 for beta chain variable domain of TCR clone 266271 (TRBV11-2, TRBJ2-1)
CASSLYPPGVEYNEQFF

SEQ ID NO: 532543 - protein, 15 aa, Homo sapiens
  CDR3 for alpha chain variable domain of TCR clone 266272 (TRAV17, TRAJ57)
CATGPSQGGSEKLVF

SEQ ID NO: 532544 - protein, 14 aa, Homo sapiens
  CDR3 for beta chain variable domain of TCR clone 266272 (TRBV28, TRBJ2-5)
CASGSRTHQETQYF

SEQ ID NO: 532545 - protein, 13 aa, Homo sapiens
  CDR3 for alpha chain variable domain of TCR clone 266273 (TRAV21, TRAJ33)
CAVRPGSNYQLIW

SEQ ID NO: 532546 - protein, 16 aa, Homo sapiens
  CDR3 for beta chain variable domain of TCR clone 266273 (TRBV13, TRBJ2-5)
CASSRGAGIRQETQYF

SEQ ID NO: 532547 - protein, 16 aa, Homo sapiens
  CDR3 for alpha chain variable domain of TCR clone 266274 (TRAV8-3, TRAJ44)
CAVGPLNTGTASKLTF

SEQ ID NO: 532548 - protein, 14 aa, Homo sapiens
  CDR3 for beta chain variable domain of TCR clone 266274 (TRBV19, TRBJ2-1)
CASPTFVLSGEQFF

SEQ ID NO: 532549 - protein, 14 aa, Homo sapiens
  CDR3 for alpha chain variable domain of TCR clone 266275 (TRAV8-4, TRAJ9)
CAVRMDTGGFKTIF

SEQ ID NO: 532550 - protein, 15 aa, Homo sapiens
  CDR3 for beta chain variable domain of TCR clone 266275 (TRBV10-2, TRBJ2-6)
CASSEQGTGANVLTF

SEQ ID NO: 532551 - protein, 13 aa, Homo sapiens
  CDR3 for alpha chain variable domain of TCR clone 266276 (TRAV17, TRAJ39)
CATEDNAGNRLTF

SEQ ID NO: 532552 - protein, 14 aa, Homo sapiens
  CDR3 for beta chain variable domain of TCR clone 266276 (TRBV19, TRBJ1-2)
CASSPTGGAGGYTF

SEQ ID NO: 532553 - protein, 16 aa, Homo sapiens
  CDR3 for alpha chain variable domain of TCR clone 266277 (TRAV12-2, TRAJ32)
CAVNLGQGGATNKLIF

SEQ ID NO: 532554 - protein, 15 aa, Homo sapiens
  CDR3 for beta chain variable domain of TCR clone 266277 (TRBV7-6, TRBJ2-1)
CASSPGQGPYNEQFF

SEQ ID NO: 532555 - protein, 13 aa, Homo sapiens
  CDR3 for alpha chain variable domain of TCR clone 266278 (TRAV27, TRAJ49)
CAPRPYTGNQFYF

SEQ ID NO: 532556 - protein, 15 aa, Homo sapiens
  CDR3 for beta chain variable domain of TCR clone 266278 (TRBV20-1, TRBJ2-7)
CSARKGLAESYEQYF

SEQ ID NO: 532557 - protein, 14 aa, Homo sapiens
  CDR3 for alpha chain variable domain of TCR clone 266279 (TRAV29/DV5, TRAJ36)
CAARRSTGANNLFF

SEQ ID NO: 532558 - protein, 15 aa, Homo sapiens
  CDR3 for beta chain variable domain of TCR clone 266279 (TRBV6-1, TRBJ2-3)
CASSERGGITDTQYF

SEQ ID NO: 532559 - protein, 15 aa, Homo sapiens
  CDR3 for alpha chain variable domain of TCR clone 266280 (TRAV2, TRAJ44)
CAVDAYTGTASKLTF

SEQ ID NO: 532560 - protein, 17 aa, Homo sapiens
  CDR3 for beta chain variable domain of TCR clone 266280 (TRBV12-4, TRBJ2-1)
CASSPGLAGGRINEQFF

SEQ ID NO: 532561 - protein, 15 aa, Homo sapiens
  CDR3 for alpha chain variable domain of TCR clone 266281 (TRAV14/DV4, TRAJ15)
CAMRGSNQAGTALIF

SEQ ID NO: 532562 - protein, 16 aa, Homo sapiens
  CDR3 for beta chain variable domain of TCR clone 266281 (TRBV19, TRBJ2-7)
CASSISAGGALYEQYF

SEQ ID NO: 532563 - protein, 13 aa, Homo sapiens
  CDR3 for alpha chain variable domain of TCR clone 266282 (TRAV17, TRAJ29)
CATDAFRKHTSRL

SEQ ID NO: 532564 - protein, 13 aa, Homo sapiens
  CDR3 for beta chain variable domain of TCR clone 266282 (TRBV5-7, TRBJ2-6)
CASTSSGANVLTF

SEQ ID NO: 532565 - protein, 13 aa, Homo sapiens
  CDR3 for alpha chain variable domain of TCR clone 266283 (TRAV8-3, TRAJ43)
CAVVPYNNNDMRF

SEQ ID NO: 532566 - protein, 16 aa, Homo sapiens
  CDR3 for beta chain variable domain of TCR clone 266283 (TRBV7-7, TRBJ1-1)
CRHRDRPDLGVTEAFF

SEQ ID NO: 532567 - protein, 12 aa, Homo sapiens
  CDR3 for alpha chain variable domain of TCR clone 266284 (TRAV13-2, TRAJ23)
CAERHRGGKLIF

SEQ ID NO: 532568 - protein, 16 aa, Homo sapiens
  CDR3 for beta chain variable domain of TCR clone 266284 (TRBV2, TRBJ1-3)
CASSRTGGSTGNTIYF

SEQ ID NO: 532569 - protein, 15 aa, Homo sapiens
  CDR3 for alpha chain variable domain of TCR clone 266285 (TRAV8-3, TRAJ7)
CAVGSISYGNNRLAF

SEQ ID NO: 532570 - protein, 16 aa, Homo sapiens
  CDR3 for beta chain variable domain of TCR clone 266285 (TRBV7-9, TRBJ1-2)
CASSLGFSSGEDGYTF

SEQ ID NO: 532571 - protein, 14 aa, Homo sapiens
  CDR3 for alpha chain variable domain of TCR clone 266286 (TRAV29/DV5, TRAJ20)
CAASAPIEDYKLSF

SEQ ID NO: 532572 - protein, 17 aa, Homo sapiens
  CDR3 for beta chain variable domain of TCR clone 266286 (TRBV7-8, TRBJ2-6)
CASSAGTGGAGANVLTF

SEQ ID NO: 532573 - protein, 14 aa, Homo sapiens
  CDR3 for alpha chain variable domain of TCR clone 266287 (TRAV12-3, TRAJ10)
SHLPLTGGGNKLTF

SEQ ID NO: 532574 - protein, 14 aa, Homo sapiens
  CDR3 for beta chain variable domain of TCR clone 266287 (TRBV28, TRBJ1-1)
CASSPRTRWAEAFF

SEQ ID NO: 532575 - protein, 15 aa, Homo sapiens
  CDR3 for alpha chain variable domain of TCR clone 266288 (TRAV29/DV5, TRAJ12)
CAAAPRMDSSYKLIF

SEQ ID NO: 532576 - protein, 13 aa, Homo sapiens
  CDR3 for beta chain variable domain of TCR clone 266288 (TRBV27, TRBJ1-4)
CASSLMGDEKLFF

SEQ ID NO: 532577 - protein, 12 aa, Homo sapiens
  CDR3 for alpha chain variable domain of TCR clone 266289 (TRAV41, TRAJ58)
CAVETSGSRLTF

SEQ ID NO: 532578 - protein, 14 aa, Homo sapiens
  CDR3 for beta chain variable domain of TCR clone 266289 (TRBV20-1, TRBJ2-3)
CSARGGTSTDTQYF

SEQ ID NO: 532579 - protein, 14 aa, Homo sapiens
  CDR3 for alpha chain variable domain of TCR clone 266290 (TRAV12-1, TRAJ6)
CVVPTSGGSYIPTF

SEQ ID NO: 532580 - protein, 12 aa, Homo sapiens
  CDR3 for beta chain variable domain of TCR clone 266290 (TRBV7-8, TRBJ2-7)
CASSLGDREQYF

SEQ ID NO: 532581 - protein, 14 aa, Homo sapiens
  CDR3 for alpha chain variable domain of TCR clone 266291 (TRAV17, TRAJ37)
CATVPSSNTGKLIF

SEQ ID NO: 532582 - protein, 15 aa, Homo sapiens
  CDR3 for beta chain variable domain of TCR clone 266291 (TRBV12-4, TRBJ2-2)
CASPRRGDLTGELFF

SEQ ID NO: 532583 - protein, 15 aa, Homo sapiens
  CDR3 for alpha chain variable domain of TCR clone 266292 (TRAV8-3, TRAJ11)
CAVGLLNSGYSTLTF

SEQ ID NO: 532584 - protein, 16 aa, Homo sapiens
  CDR3 for beta chain variable domain of TCR clone 266292 (TRBV7-9, TRBJ1-2)
CASSLGFSSGADGYTF

SEQ ID NO: 532585 - protein, 16 aa, Homo sapiens
  CDR3 for alpha chain variable domain of TCR clone 266293 (TRAV8-2, TRAJ48)
CVVSDVSNFGNEKLTF

SEQ ID NO: 532586 - protein, 12 aa, Homo sapiens
  CDR3 for beta chain variable domain of TCR clone 266293 (TRBV24-1, TRBJ1-1)
CATSDSDRGAFF

SEQ ID NO: 532587 - protein, 16 aa, Homo sapiens
  CDR3 for alpha chain variable domain of TCR clone 266294 (TRAV13-1, TRAJ37)
CAASSLGSSNTGELIF

SEQ ID NO: 532588 - protein, 12 aa, Homo sapiens
  CDR3 for beta chain variable domain of TCR clone 266294 (TRBV6-1, TRBJ2-5)
CASSEGRETQYF

SEQ ID NO: 532589 - protein, 12 aa, Homo sapiens
  CDR3 for alpha chain variable domain of TCR clone 266295 (TRAV13-2, TRAJ23)
CAERHRGGKLIF

SEQ ID NO: 532590 - protein, 13 aa, Homo sapiens
  CDR3 for beta chain variable domain of TCR clone 266295 (TRBV7-9, TRBJ1-2)
CANSLKQNYGYTF

SEQ ID NO: 532591 - protein, 12 aa, Homo sapiens
  CDR3 for alpha chain variable domain of TCR clone 266296 (TRAV29/DV5, TRAJ43)
CAATPAGNDMRF

SEQ ID NO: 532592 - protein, 14 aa, Homo sapiens
  CDR3 for beta chain variable domain of TCR clone 266296 (TRBV7-8, TRBJ2-7)
CASSPRDRVYEQYF

SEQ ID NO: 532593 - protein, 12 aa, Homo sapiens
  CDR3 for alpha chain variable domain of TCR clone 266297 (TRAV2, TRAJ9)
CAVGAGGFKTIF

SEQ ID NO: 532594 - protein, 15 aa, Homo sapiens
  CDR3 for beta chain variable domain of TCR clone 266297 (TRBV11-3, TRBJ1-1)
CASSLGGPGDTEAFF

SEQ ID NO: 532595 - protein, 16 aa, Homo sapiens
  CDR3 for alpha chain variable domain of TCR clone 266298 (TRAV26-2, TRAJ22)
CILRDGASGSARQLTF

SEQ ID NO: 532596 - protein, 14 aa, Homo sapiens
  CDR3 for beta chain variable domain of TCR clone 266298 (TRBV20-1, TRBJ2-1)
CSATPGTDYNEQFF

SEQ ID NO: 532597 - protein, 13 aa, Homo sapiens
  CDR3 for alpha chain variable domain of TCR clone 266299 (TRAV22, TRAJ29)
CAVGGSGNTPLVF

SEQ ID NO: 532598 - protein, 19 aa, Homo sapiens
  CDR3 for beta chain variable domain of TCR clone 266299 (TRBV28, TRBJ2-1)
CASSFSIRGSGRTRYEQFF

SEQ ID NO: 532599 - protein, 23 aa, Homo sapiens
  CDR3 for alpha chain variable domain of TCR clone 266300 (TRAV26-1, TRAJ38)
CIADNAGNNHIQNPDPAVYTLRD

SEQ ID NO: 532600 - protein, 12 aa, Homo sapiens
  CDR3 for beta chain variable domain of TCR clone 266300 (TRBV11-2, TRBJ2-2)
CASSLGGGELFF

SEQ ID NO: 532601 - protein, 12 aa, Homo sapiens
  CDR3 for alpha chain variable domain of TCR clone 266301 (TRAV8-3, TRAJ26)
CAGDNYGQNLFF

SEQ ID NO: 532602 - protein, 15 aa, Homo sapiens
  CDR3 for beta chain variable domain of TCR clone 266301 (TRBV9, TRBJ2-1)
CASSLAGSSSNEQFF

SEQ ID NO: 532603 - protein, 14 aa, Homo sapiens
  CDR3 for alpha chain variable domain of TCR clone 266302 (TRAV12-2, TRAJ13)
CAVKKTGGYQKVTF

SEQ ID NO: 532604 - protein, 13 aa, Homo sapiens
  CDR3 for beta chain variable domain of TCR clone 266302 (TRBV7-2, TRBJ1-6)
CASSLKFDSPLHF

SEQ ID NO: 532605 - protein, 13 aa, Homo sapiens
  CDR3 for alpha chain variable domain of TCR clone 266303 (TRAV3, TRAJ21)
CAVREPDFNKFYF

SEQ ID NO: 532606 - protein, 14 aa, Homo sapiens
  CDR3 for beta chain variable domain of TCR clone 266303 (TRBV7-2, TRBJ1-6)
CASSLQGANSPLDV

SEQ ID NO: 532607 - protein, 13 aa, Homo sapiens
  CDR3 for alpha chain variable domain of TCR clone 266304 (TRAV17, TRAJ29)
CATDAFRKHTSCL

SEQ ID NO: 532608 - protein, 15 aa, Homo sapiens
  CDR3 for beta chain variable domain of TCR clone 266304 (TRBV7-9, TRBJ2-7)
CASSPGGGLTYEQYF

SEQ ID NO: 532609 - protein, 17 aa, Homo sapiens
  CDR3 for alpha chain variable domain of TCR clone 266305 (TRAV13-1, TRAJ28)
CAASPPYSGAGSYQLTF

SEQ ID NO: 532610 - protein, 16 aa, Homo sapiens
  CDR3 for beta chain variable domain of TCR clone 266305 (TRBV7-3, TRBJ2-2)
CASSLKRGTLSGELFF

SEQ ID NO: 532611 - protein, 14 aa, Homo sapiens
  CDR3 for alpha chain variable domain of TCR clone 266306 (TRAV13-1, TRAJ20)
RAARPGSNDYKLSF

SEQ ID NO: 532612 - protein, 13 aa, Homo sapiens
  CDR3 for beta chain variable domain of TCR clone 266306 (TRBV20-1, TRBJ1-1)
CSAPPGGHTEAFF

SEQ ID NO: 532613 - protein, 12 aa, Homo sapiens
  CDR3 for alpha chain variable domain of TCR clone 266307 (TRAV17, TRAJ12)
CATLRSSHKLIF

SEQ ID NO: 532614 - protein, 18 aa, Homo sapiens
  CDR3 for beta chain variable domain of TCR clone 266307 (TRBV28, TRBJ2-7)
CASSLFLRQGAPSSTSGR

SEQ ID NO: 532615 - protein, 14 aa, Homo sapiens
  CDR3 for alpha chain variable domain of TCR clone 266308 (TRAV23/DV6, TRAJ24)
CAASLSDSWGKLQF

SEQ ID NO: 532616 - protein, 16 aa, Homo sapiens
  CDR3 for beta chain variable domain of TCR clone 266308 (TRBV7-9, TRBJ2-6)
CASSLKGSLRANVLTF

SEQ ID NO: 532617 - protein, 19 aa, Homo sapiens
  CDR3 for alpha chain variable domain of TCR clone 266309 (TRAV26-1, TRAJ52)
CIVRAHRNAGGTSYGKLTF

SEQ ID NO: 532618 - protein, 15 aa, Homo sapiens
  CDR3 for beta chain variable domain of TCR clone 266309 (TRBV12-4, TRBJ2-5)
CAISPPTGLQETQYF

SEQ ID NO: 532619 - protein, 19 aa, Homo sapiens
  CDR3 for alpha chain variable domain of TCR clone 266310 (TRAV2, TRAJ37)
WAPWLWQHRQTNLWARDNF

SEQ ID NO: 532620 - protein, 19 aa, Homo sapiens
  CDR3 for beta chain variable domain of TCR clone 266310 (TRBV20-1, TRBJ2-7)
CSARGLVEGTSGRGNEQYF

SEQ ID NO: 532621 - protein, 17 aa, Homo sapiens
  CDR3 for alpha chain variable domain of TCR clone 266311 (TRAV20, TRAJ45)
CAVQAPDSGGGADGLTF

SEQ ID NO: 532622 - protein, 12 aa, Homo sapiens
  CDR3 for beta chain variable domain of TCR clone 266311 (TRBV11-2, TRBJ2-2)
CASSLGGGELFF

SEQ ID NO: 532623 - protein, 12 aa, Homo sapiens
  CDR3 for alpha chain variable domain of TCR clone 266312 (TRAV12-3, TRAJ17)
CAMTLTGNKLTY

SEQ ID NO: 532624 - protein, 15 aa, Homo sapiens
  CDR3 for beta chain variable domain of TCR clone 266312 (TRBV2, TRBJ2-1)
CASSELAGSYNEQFF

SEQ ID NO: 532625 - protein, 11 aa, Homo sapiens
  CDR3 for alpha chain variable domain of TCR clone 266313 (TRAV17, TRAJ39)
CATNPCNMLTF

SEQ ID NO: 532626 - protein, 13 aa, Homo sapiens
  CDR3 for beta chain variable domain of TCR clone 266313 (TRBV7-8, TRBJ2-1)
CASTRDAVDEQFF

SEQ ID NO: 532627 - protein, 13 aa, Homo sapiens
  CDR3 for alpha chain variable domain of TCR clone 266314 (TRAV1-2, TRAJ9)
CAALNTGGFNTIF

SEQ ID NO: 532628 - protein, 12 aa, Homo sapiens
  CDR3 for beta chain variable domain of TCR clone 266314 (TRBV28, TRBJ2-1)
CASSVQINEQFF

SEQ ID NO: 532629 - protein, 14 aa, Homo sapiens
  CDR3 for alpha chain variable domain of TCR clone 266315 (TRAV9-2, TRAJ39)
CALYIYNAGNMLTF

SEQ ID NO: 532630 - protein, 13 aa, Homo sapiens
  CDR3 for beta chain variable domain of TCR clone 266315 (TRBV7-2, TRBJ2-5)
CASSRGGLETRYF

SEQ ID NO: 532631 - protein, 14 aa, Homo sapiens
  CDR3 for alpha chain variable domain of TCR clone 266316 (TRAV8-6, TRAJ37)
CAVRLSGNTGKLIF

SEQ ID NO: 532632 - protein, 11 aa, Homo sapiens
  CDR3 for beta chain variable domain of TCR clone 266316 (TRBV12-4, TRBJ2-3)
CASTATDTQYF

SEQ ID NO: 532633 - protein, 13 aa, Homo sapiens
  CDR3 for alpha chain variable domain of TCR clone 266317 (TRAV9-2, TRAJ9)
CALSDRGGFKTIF

SEQ ID NO: 532634 - protein, 14 aa, Homo sapiens
  CDR3 for beta chain variable domain of TCR clone 266317 (TRBV20-1, TRBJ2-2)
CDAPDTASTGELFF

SEQ ID NO: 532635 - protein, 15 aa, Homo sapiens
  CDR3 for alpha chain variable domain of TCR clone 266318 (TRAV40, TRAJ48)
CLLFISNFGNEKLTF

SEQ ID NO: 532636 - protein, 17 aa, Homo sapiens
  CDR3 for beta chain variable domain of TCR clone 266318 (TRBV28, TRBJ2-3)
CASSSPPTGLSTDTQYF

SEQ ID NO: 532637 - protein, 15 aa, Homo sapiens
  CDR3 for alpha chain variable domain of TCR clone 266319 (TRAV12-3, TRAJ27)
CAMRAYNTTAGKSTF

SEQ ID NO: 532638 - protein, 13 aa, Homo sapiens
  CDR3 for beta chain variable domain of TCR clone 266319 (TRBV20-1, TRBJ1-5)
CSAPPRANQPQHF

SEQ ID NO: 532639 - protein, 11 aa, Homo sapiens
  CDR3 for alpha chain variable domain of TCR clone 266320 (TRAV16, TRAJ26)
CALSGSEFFLR

SEQ ID NO: 532640 - protein, 12 aa, Homo sapiens
  CDR3 for beta chain variable domain of TCR clone 266320 (TRBV11-2, TRBJ2-1)
CASSPGNNEQFF

SEQ ID NO: 532641 - protein, 15 aa, Homo sapiens
  CDR3 for alpha chain variable domain of TCR clone 266321 (TRAV3, TRAJ21)
CAVREPTSTNFTLDL

SEQ ID NO: 532642 - protein, 12 aa, Homo sapiens
  CDR3 for beta chain variable domain of TCR clone 266321 (TRBV5-1, TRBJ2-4)
LAGEWTKNIQYF

SEQ ID NO: 532643 - protein, 17 aa, Homo sapiens
  CDR3 for alpha chain variable domain of TCR clone 266322 (TRAV3, TRAJ6)
CAVRDGPRAGGSYKPTF

SEQ ID NO: 532644 - protein, 13 aa, Homo sapiens
  CDR3 for beta chain variable domain of TCR clone 266322 (TRBV20-1, TRBJ2-1)
CSASTGTSNEQFF

SEQ ID NO: 532645 - protein, 13 aa, Homo sapiens
  CDR3 for alpha chain variable domain of TCR clone 266323 (TRAV2, TRAJ40)
CAVVTSGTYKYIF

SEQ ID NO: 532646 - protein, 13 aa, Homo sapiens
  CDR3 for beta chain variable domain of TCR clone 266323 (TRBV19, TRBJ1-5)
CASSMRGYQPQHF

SEQ ID NO: 532647 - protein, 16 aa, Homo sapiens
  CDR3 for alpha chain variable domain of TCR clone 266324 (TRAV30, TRAJ24)
CGTEIVDADSWENFQF

SEQ ID NO: 532648 - protein, 12 aa, Homo sapiens
  CDR3 for beta chain variable domain of TCR clone 266324 (TRBV11-2, TRBJ2-2)
CASSLPTGELFF

SEQ ID NO: 532649 - protein, 13 aa, Homo sapiens
  CDR3 for alpha chain variable domain of TCR clone 266325 (TRAV12-1, TRAJ26)
CVVRRNYGQNFVF

SEQ ID NO: 532650 - protein, 14 aa, Homo sapiens
  CDR3 for beta chain variable domain of TCR clone 266325 (TRBV4-2, TRBJ2-1)
CASGLYRAYNEQFF

SEQ ID NO: 532651 - protein, 14 aa, Homo sapiens
  CDR3 for alpha chain variable domain of TCR clone 266326 (TRAV12-2, TRAJ17)
CAVLFKAAGNKLTF

SEQ ID NO: 532652 - protein, 13 aa, Homo sapiens
  CDR3 for beta chain variable domain of TCR clone 266326 (TRBV14, TRBJ1-1)
CASSREFGTEAFF

SEQ ID NO: 532653 - protein, 15 aa, Homo sapiens
  CDR3 for alpha chain variable domain of TCR clone 266327 (TRAV27, TRAJ38)
CAARRNAGNNRKLTW

SEQ ID NO: 532654 - protein, 13 aa, Homo sapiens
  CDR3 for beta chain variable domain of TCR clone 266327 (TRBV12-4, TRBJ1-2)
CASSLRQGKGYTF

SEQ ID NO: 532655 - protein, 12 aa, Homo sapiens
  CDR3 for alpha chain variable domain of TCR clone 266328 (TRAV4, TRAJ6)
CHAPGGSYIPTF

SEQ ID NO: 532656 - protein, 17 aa, Homo sapiens
  CDR3 for beta chain variable domain of TCR clone 266328 (TRBV20-1, TRBJ2-2)
CSASGSGQGGLTGELFF

SEQ ID NO: 532657 - protein, 12 aa, Homo sapiens
  CDR3 for alpha chain variable domain of TCR clone 266329 (TRAV29/DV5, TRAJ53)
CAASGGNYKLTF

SEQ ID NO: 532658 - protein, 15 aa, Homo sapiens
  CDR3 for beta chain variable domain of TCR clone 266329 (TRBV20-1, TRBJ2-7)
CSARDRVSGMDEQYF

SEQ ID NO: 532659 - protein, 17 aa, Homo sapiens
  CDR3 for alpha chain variable domain of TCR clone 266330 (TRAV3, TRAJ6)
CAVRDGPRAGGSYIPTF

SEQ ID NO: 532660 - protein, 20 aa, Homo sapiens
  CDR3 for beta chain variable domain of TCR clone 266330 (TRBV29-1, TRBJ2-5)
SAALRTSGKSRDPVLRARHA

SEQ ID NO: 532661 - protein, 14 aa, Homo sapiens
  CDR3 for alpha chain variable domain of TCR clone 266331 (TRAV2, TRAJ33)
CAVEDQGSNYRLIW

SEQ ID NO: 532662 - protein, 15 aa, Homo sapiens
  CDR3 for beta chain variable domain of TCR clone 266331 (TRBV9, TRBJ2-3)
CASSEQGAGRDTQYF

SEQ ID NO: 532663 - protein, 11 aa, Homo sapiens
  CDR3 for alpha chain variable domain of TCR clone 266332 (TRAV12-3, TRAJ27)
CAMANAGKSTF

SEQ ID NO: 532664 - protein, 12 aa, Homo sapiens
  CDR3 for beta chain variable domain of TCR clone 266332 (TRBV12-4, TRBJ2-7)
CASSLGGYEQYV

SEQ ID NO: 532665 - protein, 14 aa, Homo sapiens
  CDR3 for alpha chain variable domain of TCR clone 266333 (TRAV12-3, TRAJ53)
CGATSGGSNDKLTF

SEQ ID NO: 532666 - protein, 13 aa, Homo sapiens
  CDR3 for beta chain variable domain of TCR clone 266333 (TRBV19, TRBJ1-5)
CASSTQDGQPQHF

SEQ ID NO: 532667 - protein, 12 aa, Homo sapiens
  CDR3 for alpha chain variable domain of TCR clone 266334 (TRAV21, TRAJ40)
CAASTGTYKYIF

SEQ ID NO: 532668 - protein, 14 aa, Homo sapiens
  CDR3 for beta chain variable domain of TCR clone 266334 (TRBV7-2, TRBJ2-7)
CASSPKTSFYEQYF

SEQ ID NO: 532669 - protein, 16 aa, Homo sapiens
  CDR3 for alpha chain variable domain of TCR clone 266335 (TRAV30, TRAJ24)
CVTEIVDADSWGKFQF

SEQ ID NO: 532670 - protein, 13 aa, Homo sapiens
  CDR3 for beta chain variable domain of TCR clone 266335 (TRBV7-9, TRBJ1-2)
CASSLKQNYGYTF

SEQ ID NO: 532671 - protein, 14 aa, Homo sapiens
  CDR3 for alpha chain variable domain of TCR clone 266336 (TRAV13-1, TRAJ35)
CAASKGGFGNVLHC

SEQ ID NO: 532672 - protein, 16 aa, Homo sapiens
  CDR3 for beta chain variable domain of TCR clone 266336 (TRBV7-6, TRBJ1-6)
CASSSLPAGEYSPLHF

SEQ ID NO: 532673 - protein, 17 aa, Homo sapiens
  CDR3 for alpha chain variable domain of TCR clone 266337 (TRAV35, TRAJ28)
CVGLQVYSGAGSYQLTF

SEQ ID NO: 532674 - protein, 15 aa, Homo sapiens
  CDR3 for beta chain variable domain of TCR clone 266337 (TRBV2, TRBJ1-2)
CASSESGGANYGYTF

SEQ ID NO: 532675 - protein, 14 aa, Homo sapiens
  CDR3 for alpha chain variable domain of TCR clone 266338 (TRAV20, TRAJ16)
CAVQENSDGQTLPF

SEQ ID NO: 532676 - protein, 13 aa, Homo sapiens
  CDR3 for beta chain variable domain of TCR clone 266338 (TRBV27, TRBJ2-3)
CASSSLPGDTQYF

SEQ ID NO: 532677 - protein, 18 aa, Homo sapiens
  CDR3 for alpha chain variable domain of TCR clone 266339 (TRAV1-2, TRAJ18)
CAVRDMGDRGSTLGRLYF

SEQ ID NO: 532678 - protein, 13 aa, Homo sapiens
  CDR3 for beta chain variable domain of TCR clone 266339 (TRBV23-1, TRBJ1-4)
CASRGKFNGKLFF

SEQ ID NO: 532679 - protein, 14 aa, Homo sapiens
  CDR3 for alpha chain variable domain of TCR clone 266340 (TRAV13-1, TRAJ10)
CAAKEPGGGNKLTF

SEQ ID NO: 532680 - protein, 14 aa, Homo sapiens
  CDR3 for beta chain variable domain of TCR clone 266340 (TRBV5-1, TRBJ2-7)
CASSFASGVNEQYF

SEQ ID NO: 532681 - protein, 12 aa, Homo sapiens
  CDR3 for alpha chain variable domain of TCR clone 266341 (TRAV12-1, TRAJ34)
RVVTFNTDKLIF

SEQ ID NO: 532682 - protein, 14 aa, Homo sapiens
  CDR3 for beta chain variable domain of TCR clone 266341 (TRBV19, TRBJ1-1)
CASLRTGLNTEAFF

SEQ ID NO: 532683 - protein, 11 aa, Homo sapiens
  CDR3 for alpha chain variable domain of TCR clone 266342 (TRAV13-1, TRAJ6)
CATLGSYIPTF

SEQ ID NO: 532684 - protein, 12 aa, Homo sapiens
  CDR3 for beta chain variable domain of TCR clone 266342 (TRBV11-2, TRBJ2-7)
CASSPGNNEQFF

SEQ ID NO: 532685 - protein, 20 aa, Homo sapiens
  CDR3 for alpha chain variable domain of TCR clone 266343 (TRAV12-3, TRAJ41)
SLFIRDSQPSDSATPEALNF

SEQ ID NO: 532686 - protein, 12 aa, Homo sapiens
  CDR3 for beta chain variable domain of TCR clone 266343 (TRBV5-1, TRBJ2-5)
CASSLGLETQYF

SEQ ID NO: 532687 - protein, 18 aa, Homo sapiens
  CDR3 for alpha chain variable domain of TCR clone 266344 (TRAV26-2, TRAJ54)
CILRDVEVGIQGAQKLVF

SEQ ID NO: 532688 - protein, 19 aa, Homo sapiens
  CDR3 for beta chain variable domain of TCR clone 266344 (TRBV7-9, TRBJ2-6)
CASSLESATVLPGANVLTF

SEQ ID NO: 532689 - protein, 12 aa, Homo sapiens
  CDR3 for alpha chain variable domain of TCR clone 266345 (TRAV13-1, TRAJ21)
CAAKEGFNKFYF

SEQ ID NO: 532690 - protein, 16 aa, Homo sapiens
  CDR3 for beta chain variable domain of TCR clone 266345 (TRBV7-8, TRBJ2-4)
WASSAERTLAKNIQYF

SEQ ID NO: 532691 - protein, 14 aa, Homo sapiens
  CDR3 for alpha chain variable domain of TCR clone 266346 (TRAV12-3, TRAJ47)
CAMSVMEYGNKLVF

SEQ ID NO: 532692 - protein, 15 aa, Homo sapiens
  CDR3 for beta chain variable domain of TCR clone 266346 (TRBV7-2, TRBJ2-3)
CASSLAGAFIDTQYF

SEQ ID NO: 532693 - protein, 13 aa, Homo sapiens
  CDR3 for alpha chain variable domain of TCR clone 266347 (TRAV2, TRAJ40)
CAVVTSGTYKYIF

SEQ ID NO: 532694 - protein, 17 aa, Homo sapiens
  CDR3 for beta chain variable domain of TCR clone 266347 (TRBV7-9, TRBJ2-3)
CASSPTVAGGPHRYAVF

SEQ ID NO: 532695 - protein, 14 aa, Homo sapiens
  CDR3 for alpha chain variable domain of TCR clone 266348 (TRAV12-3, TRAJ15)
CAMIPPQAGTALIF

SEQ ID NO: 532696 - protein, 12 aa, Homo sapiens
  CDR3 for beta chain variable domain of TCR clone 266348 (TRBV11-2, TRBJ2-2)
CASSLGGGELFC

SEQ ID NO: 532697 - protein, 16 aa, Homo sapiens
  CDR3 for alpha chain variable domain of TCR clone 266349 (TRAV8-3, TRAJ8)
CAVPRAGNTGFQKLVF

SEQ ID NO: 532698 - protein, 14 aa, Homo sapiens
  CDR3 for beta chain variable domain of TCR clone 266349 (TRBV28, TRBJ1-1)
CASSESGRGTEAFF

SEQ ID NO: 532699 - protein, 13 aa, Homo sapiens
  CDR3 for alpha chain variable domain of TCR clone 266350 (TRAV12-1, TRAJ39)
CGDDNNAGNMLTF

SEQ ID NO: 532700 - protein, 14 aa, Homo sapiens
  CDR3 for beta chain variable domain of TCR clone 266350 (TRBV7-8, TRBJ2-7)
CASSPGLADYEQYF

SEQ ID NO: 532701 - protein, 13 aa, Homo sapiens
  CDR3 for alpha chain variable domain of TCR clone 266351 (TRAV9-2, TRAJ53)
CALSGGSNYKLTF

SEQ ID NO: 532702 - protein, 17 aa, Homo sapiens
  CDR3 for beta chain variable domain of TCR clone 266351 (TRBV11-2, TRBJ2-1)
RASRLYPPGVEYNEQFF

SEQ ID NO: 532703 - protein, 14 aa, Homo sapiens
  CDR3 for alpha chain variable domain of TCR clone 266352 (TRAV2, TRAJ9)
CAVEDRSGGFKTIF

SEQ ID NO: 532704 - protein, 16 aa, Homo sapiens
  CDR3 for beta chain variable domain of TCR clone 266352 (TRBV5-7, TRBJ2-7)
CASSPTSGRELDEQYF

SEQ ID NO: 532705 - protein, 13 aa, Homo sapiens
  CDR3 for alpha chain variable domain of TCR clone 266353 (TRAV21, TRAJ3)
CCEPYSSASKIIF

SEQ ID NO: 532706 - protein, 14 aa, Homo sapiens
  CDR3 for beta chain variable domain of TCR clone 266353 (TRBV20-1, TRBJ2-7)
CSAKRGRSSYEQYF

SEQ ID NO: 532707 - protein, 14 aa, Homo sapiens
  CDR3 for alpha chain variable domain of TCR clone 266354 (TRAV8-4, TRAJ9)
WAVRINTGGFKTIF

SEQ ID NO: 532708 - protein, 15 aa, Homo sapiens
  CDR3 for beta chain variable domain of TCR clone 266354 (TRBV7-2, TRBJ1-2)
CASSPRAGWNYGYTF

SEQ ID NO: 532709 - protein, 16 aa, Homo sapiens
  CDR3 for alpha chain variable domain of TCR clone 266355 (TRAV16, TRAJ4)
CALSRMFSGGYNKLIF

SEQ ID NO: 532710 - protein, 16 aa, Homo sapiens
  CDR3 for beta chain variable domain of TCR clone 266355 (TRBV12-4, TRBJ1-5)
CASGRPVGGSNQPQHF

SEQ ID NO: 532711 - protein, 13 aa, Homo sapiens
  CDR3 for alpha chain variable domain of TCR clone 266356 (TRAV12-1, TRAJ31)
CVVIPNNNARLMF

SEQ ID NO: 532712 - protein, 16 aa, Homo sapiens
  CDR3 for beta chain variable domain of TCR clone 266356 (TRBV19, TRBJ2-1)
CASSKAGPSSYNEQFF

SEQ ID NO: 532713 - protein, 15 aa, Homo sapiens
  CDR3 for alpha chain variable domain of TCR clone 266357 (TRAV12-3, TRAJ6)
CAMSAAPGGSYIPTF

SEQ ID NO: 532714 - protein, 15 aa, Homo sapiens
  CDR3 for beta chain variable domain of TCR clone 266357 (TRBV7-2, TRBJ2-1)
CASTHGTGIYNEQFF

SEQ ID NO: 532715 - protein, 13 aa, Homo sapiens
  CDR3 for alpha chain variable domain of TCR clone 266358 (TRAV16, TRAJ52)
CALRGTSYGKLTF

SEQ ID NO: 532716 - protein, 18 aa, Homo sapiens
  CDR3 for beta chain variable domain of TCR clone 266358 (TRBV13, TRBJ2-6)
CASSPMTSGGSGAYVLTF

SEQ ID NO: 532717 - protein, 15 aa, Homo sapiens
  CDR3 for alpha chain variable domain of TCR clone 266359 (TRAV12-1, TRAJ44)
CVADLPTGTASKLTF

SEQ ID NO: 532718 - protein, 13 aa, Homo sapiens
  CDR3 for beta chain variable domain of TCR clone 266359 (TRBV6-5, TRBJ2-5)
CASRPQGGETQSF

SEQ ID NO: 532719 - protein, 23 aa, Homo sapiens
  CDR3 for alpha chain variable domain of TCR clone 266360 (TRAV8-4, TRAJ38)
CARLNAGNNHIQNPDPAVYPLID

SEQ ID NO: 532720 - protein, 12 aa, Homo sapiens
  CDR3 for beta chain variable domain of TCR clone 266360 (TRBV7-8, TRBJ2-7)
CASSEPLYEQYF

SEQ ID NO: 532721 - protein, 13 aa, Homo sapiens
  CDR3 for alpha chain variable domain of TCR clone 266361 (TRAV12-1, TRAJ34)
CVVTGYNTDKLIF

SEQ ID NO: 532722 - protein, 14 aa, Homo sapiens
  CDR3 for beta chain variable domain of TCR clone 266361 (TRBV4-1, TRBJ2-2)
CASSQAVNTGELFF

SEQ ID NO: 532723 - protein, 18 aa, Homo sapiens
  CDR3 for alpha chain variable domain of TCR clone 266362 (TRAV13-1, TRAJ52)
CSAKNPNAGGTSYGKLTF

SEQ ID NO: 532724 - protein, 18 aa, Homo sapiens
  CDR3 for beta chain variable domain of TCR clone 266362 (TRBV12-4, TRBJ2-4)
CASSRTGAVDVAKNIQYF

SEQ ID NO: 532725 - protein, 15 aa, Homo sapiens
  CDR3 for alpha chain variable domain of TCR clone 266363 (TRAV8-3, TRAJ37)
CAAGARASSTGKLIF

SEQ ID NO: 532726 - protein, 15 aa, Homo sapiens
  CDR3 for beta chain variable domain of TCR clone 266363 (TRBV5-4, TRBJ2-3)
CASSLAGRVTDTQYF

SEQ ID NO: 532727 - protein, 12 aa, Homo sapiens
  CDR3 for alpha chain variable domain of TCR clone 266364 (TRAV23/DV6, TRAJ16)
CAATGTGQKLLF

SEQ ID NO: 532728 - protein, 15 aa, Homo sapiens
  CDR3 for beta chain variable domain of TCR clone 266364 (TRBV28, TRBJ1-2)
CASSSYRGLVYGYSF

SEQ ID NO: 532729 - protein, 18 aa, Homo sapiens
  CDR3 for alpha chain variable domain of TCR clone 266365 (TRAV17, TRAJ45)
CATSLDLYSGGGADGLTF

SEQ ID NO: 532730 - protein, 15 aa, Homo sapiens
  CDR3 for beta chain variable domain of TCR clone 266365 (TRBV4-1, TRBJ2-7)
CASSQQGQGFDEQYF

SEQ ID NO: 532731 - protein, 20 aa, Homo sapiens
  CDR3 for alpha chain variable domain of TCR clone 266366 (TRAV29/DV5, TRAJ36)
CSILLCRSAGVETGANNLFF

SEQ ID NO: 532732 - protein, 16 aa, Homo sapiens
  CDR3 for beta chain variable domain of TCR clone 266366 (TRBV5-1, TRBJ2-3)
CASSLGLAVYTDTQYF

SEQ ID NO: 532733 - protein, 16 aa, Homo sapiens
  CDR3 for alpha chain variable domain of TCR clone 266367 (TRAV3, TRAJ37)
CAVRPHGSGNTGKLIF

SEQ ID NO: 532734 - protein, 15 aa, Homo sapiens
  CDR3 for beta chain variable domain of TCR clone 266367 (TRBV6-3, TRBJ2-7)
CASSSPGTVFYKQYF

SEQ ID NO: 532735 - protein, 16 aa, Homo sapiens
  CDR3 for alpha chain variable domain of TCR clone 266368 (TRAV1-2, TRAJ16)
CAVNGFQMARSCSLQG

SEQ ID NO: 532736 - protein, 17 aa, Homo sapiens
  CDR3 for beta chain variable domain of TCR clone 266368 (TRBV28, TRBJ2-5)
CASSTPEGDALQETQYF

SEQ ID NO: 532737 - protein, 15 aa, Homo sapiens
  CDR3 for alpha chain variable domain of TCR clone 266369 (TRAV8-6, TRAJ10)
CAVSDQAGGGNKLTF

SEQ ID NO: 532738 - protein, 15 aa, Homo sapiens
  CDR3 for beta chain variable domain of TCR clone 266369 (TRBV27, TRBJ2-3)
CASSLGLAATDTQYF

SEQ ID NO: 532739 - protein, 11 aa, Homo sapiens
  CDR3 for alpha chain variable domain of TCR clone 266370 (TRAV4, TRAJ31)
CLVGDNANLMF

SEQ ID NO: 532740 - protein, 16 aa, Homo sapiens
  CDR3 for beta chain variable domain of TCR clone 266370 (TRBV7-2, TRBJ2-5)
CASSSKWLSGQETQYF

SEQ ID NO: 532741 - protein, 14 aa, Homo sapiens
  CDR3 for alpha chain variable domain of TCR clone 266371 (TRAV2, TRAJ22)
CAVEDSGSARQLTF

SEQ ID NO: 532742 - protein, 14 aa, Homo sapiens
  CDR3 for beta chain variable domain of TCR clone 266371 (TRBV20-1, TRBJ1-1)
CSAQTRIGGTEAFF

SEQ ID NO: 532743 - protein, 14 aa, Homo sapiens
  CDR3 for alpha chain variable domain of TCR clone 266372 (TRAV12-3, TRAJ42)
CAMNYGGSQGNLIF

SEQ ID NO: 532744 - protein, 17 aa, Homo sapiens
  CDR3 for beta chain variable domain of TCR clone 266372 (TRBV5-1, TRBJ2-5)
CASSPVALGQNQETQYF

SEQ ID NO: 532745 - protein, 14 aa, Homo sapiens
  CDR3 for alpha chain variable domain of TCR clone 266373 (TRAV29/DV5, TRAJ36)
CTARRKTGANTLFF

SEQ ID NO: 532746 - protein, 14 aa, Homo sapiens
  CDR3 for beta chain variable domain of TCR clone 266373 (TRBV12-5, TRBJ2-5)
CASGSRTHQETQYF

SEQ ID NO: 532747 - protein, 14 aa, Homo sapiens
  CDR3 for alpha chain variable domain of TCR clone 266374 (TRAV38-1, TRAJ11)
CAFMKHEGYSTLTF

SEQ ID NO: 532748 - protein, 16 aa, Homo sapiens
  CDR3 for beta chain variable domain of TCR clone 266374 (TRBV2, TRBJ2-3)
CASSTSVEGVTDTQYF

SEQ ID NO: 532749 - protein, 12 aa, Homo sapiens
  CDR3 for alpha chain variable domain of TCR clone 266375 (TRAV16, TRAJ26)
CALRSYGQNFVF

SEQ ID NO: 532750 - protein, 14 aa, Homo sapiens
  CDR3 for beta chain variable domain of TCR clone 266375 (TRBV10-3, TRBJ2-1)
CAISYDLAYNEQFF

SEQ ID NO: 532751 - protein, 14 aa, Homo sapiens
  CDR3 for alpha chain variable domain of TCR clone 266376 (TRAV13-2, TRAJ10)
CAETFTGGGNKLTF

SEQ ID NO: 532752 - protein, 16 aa, Homo sapiens
  CDR3 for beta chain variable domain of TCR clone 266376 (TRBV18, TRBJ2-7)
CVSSPRSQGISYEQYF

SEQ ID NO: 532753 - protein, 13 aa, Homo sapiens
  CDR3 for alpha chain variable domain of TCR clone 266377 (TRAV12-2, TRAJ20)
CAVYPSNDYKLSF

SEQ ID NO: 532754 - protein, 15 aa, Homo sapiens
  CDR3 for beta chain variable domain of TCR clone 266377 (TRBV27, TRBJ2-5)
CGSSLYPRGGETQYF

SEQ ID NO: 532755 - protein, 14 aa, Homo sapiens
  CDR3 for alpha chain variable domain of TCR clone 266378 (TRAV8-4, TRAJ9)
CAVRIDTGGFKTIF

SEQ ID NO: 532756 - protein, 15 aa, Homo sapiens
  CDR3 for beta chain variable domain of TCR clone 266378 (TRBV20-1, TRBJ2-7)
CSARDRVSGMDEQYF

SEQ ID NO: 532757 - protein, 11 aa, Homo sapiens
  CDR3 for alpha chain variable domain of TCR clone 266379 (TRAV35, TRAJ57)
GPQGGSEKLVF

SEQ ID NO: 532758 - protein, 16 aa, Homo sapiens
  CDR3 for beta chain variable domain of TCR clone 266379 (TRBV7-2, TRBJ1-5)
CASSWTGGQGNQPQHF

SEQ ID NO: 532759 - protein, 14 aa, Homo sapiens
  CDR3 for alpha chain variable domain of TCR clone 266380 (TRAV2, TRAJ3)
CAVPPYSSASKIIF

SEQ ID NO: 532760 - protein, 17 aa, Homo sapiens
  CDR3 for beta chain variable domain of TCR clone 266380 (TRBV13, TRBJ2-3)
CASSLSRVAGGRNTQYF

SEQ ID NO: 532761 - protein, 14 aa, Homo sapiens
  CDR3 for alpha chain variable domain of TCR clone 266381 (TRAV8-1, TRAJ5)
CAVRTDTGRRALTF

SEQ ID NO: 532762 - protein, 15 aa, Homo sapiens
  CDR3 for beta chain variable domain of TCR clone 266381 (TRBV11-3, TRBJ2-3)
CASLKDGREGDTQYF

SEQ ID NO: 532763 - protein, 13 aa, Homo sapiens
  CDR3 for alpha chain variable domain of TCR clone 266382 (TRAV8-3, TRAJ36)
CAVGATGANNLFF

SEQ ID NO: 532764 - protein, 13 aa, Homo sapiens
  CDR3 for beta chain variable domain of TCR clone 266382 (TRBV11-2, TRBJ2-7)
CASSLEGANEQYF

SEQ ID NO: 532765 - protein, 17 aa, Homo sapiens
  CDR3 for alpha chain variable domain of TCR clone 266383 (TRAV3, TRAJ6)
YAVSRRTDTGGSYIPTF

SEQ ID NO: 532766 - protein, 18 aa, Homo sapiens
  CDR3 for beta chain variable domain of TCR clone 266383 (TRBV7-2, TRBJ2-3)
CASSLETSRGRKADTQYF

SEQ ID NO: 532767 - protein, 13 aa, Homo sapiens
  CDR3 for alpha chain variable domain of TCR clone 266384 (TRAV13-2, TRAJ53)
CAENMGSNYKLTF

SEQ ID NO: 532768 - protein, 13 aa, Homo sapiens
  CDR3 for beta chain variable domain of TCR clone 266384 (TRBV4-2, TRBJ1-1)
CASSQAGNTEAFF

SEQ ID NO: 532769 - protein, 11 aa, Homo sapiens
  CDR3 for alpha chain variable domain of TCR clone 266385 (TRAV8-4, TRAJ20)
CAVTNVLTTTS

SEQ ID NO: 532770 - protein, 14 aa, Homo sapiens
  CDR3 for beta chain variable domain of TCR clone 266385 (TRBV4-1, TRBJ2-2)
CASSQAVNTGELFF

SEQ ID NO: 532771 - protein, 15 aa, Homo sapiens
  CDR3 for alpha chain variable domain of TCR clone 266386 (TRAV21, TRAJ53)
CAALNSGGSNYKLTF

SEQ ID NO: 532772 - protein, 15 aa, Homo sapiens
  CDR3 for beta chain variable domain of TCR clone 266386 (TRBV18, TRBJ2-1)
CASSPPSASYNEQFF

SEQ ID NO: 532773 - protein, 12 aa, Homo sapiens
  CDR3 for alpha chain variable domain of TCR clone 266387 (TRAV13-2, TRAJ23)
CAERPRGGKLIF

SEQ ID NO: 532774 - protein, 16 aa, Homo sapiens
  CDR3 for beta chain variable domain of TCR clone 266387 (TRBV20-1, TRBJ1-4)
CSAPGQGLLTNERLFF

SEQ ID NO: 532775 - protein, 14 aa, Homo sapiens
  CDR3 for alpha chain variable domain of TCR clone 266388 (TRAV1-2, TRAJ8)
CAVREDTGFQKLVF

SEQ ID NO: 532776 - protein, 16 aa, Homo sapiens
  CDR3 for beta chain variable domain of TCR clone 266388 (TRBV4-3, TRBJ2-1)
CASGPALDRGVNEQFF

SEQ ID NO: 532777 - protein, 13 aa, Homo sapiens
  CDR3 for alpha chain variable domain of TCR clone 266389 (TRAV1-1, TRAJ9)
CAAKNTGGFKTIF

SEQ ID NO: 532778 - protein, 16 aa, Homo sapiens
  CDR3 for beta chain variable domain of TCR clone 266389 (TRBV12-5, TRBJ2-5)
CASGPRTSGSQETQYF

SEQ ID NO: 532779 - protein, 15 aa, Homo sapiens
  CDR3 for alpha chain variable domain of TCR clone 266390 (TRAV12-1, TRAJ42)
CVVTRDGGSQGNLIY

SEQ ID NO: 532780 - protein, 14 aa, Homo sapiens
  CDR3 for beta chain variable domain of TCR clone 266390 (TRBV11-2, TRBJ2-3)
CASSLGGGANTQYF

SEQ ID NO: 532781 - protein, 13 aa, Homo sapiens
  CDR3 for alpha chain variable domain of TCR clone 266391 (TRAV12-3, TRAJ13)
CAMSSGGYQKVTF

SEQ ID NO: 532782 - protein, 12 aa, Homo sapiens
  CDR3 for beta chain variable domain of TCR clone 266391 (TRBV2, TRBJ2-4)
CASQGDSGIQYF

SEQ ID NO: 532783 - protein, 14 aa, Homo sapiens
  CDR3 for alpha chain variable domain of TCR clone 266392 (TRAV12-2, TRAJ17)
CAVLFKAAGNKLTF

SEQ ID NO: 532784 - protein, 17 aa, Homo sapiens
  CDR3 for beta chain variable domain of TCR clone 266392 (TRBV20-1, TRBJ2-2)
CSASGSGQAGLTGELFF

SEQ ID NO: 532785 - protein, 21 aa, Homo sapiens
  CDR3 for alpha chain variable domain of TCR clone 266393 (TRAV2, TRAJ30)
ILQVREADAAVYYWGDDKIIF

SEQ ID NO: 532786 - protein, 19 aa, Homo sapiens
  CDR3 for beta chain variable domain of TCR clone 266393 (TRBV7-2, TRBJ2-3)
CASSFLSRNWGGGTDTQYF

SEQ ID NO: 532787 - protein, 15 aa, Homo sapiens
  CDR3 for alpha chain variable domain of TCR clone 266394 (TRAV2, TRAJ15)
CAVEDRDQAGTALIF

SEQ ID NO: 532788 - protein, 13 aa, Homo sapiens
  CDR3 for beta chain variable domain of TCR clone 266394 (TRBV10-2, TRBJ2-7)
CASGASGGYEQYF

SEQ ID NO: 532789 - protein, 14 aa, Homo sapiens
  CDR3 for alpha chain variable domain of TCR clone 266395 (TRAV13-1, TRAJ35)
CSASKGGCGNVLHC

SEQ ID NO: 532790 - protein, 13 aa, Homo sapiens
  CDR3 for beta chain variable domain of TCR clone 266395 (TRBV7-3, TRBJ1-1)
CASSQDWGAEAFF

SEQ ID NO: 532791 - protein, 15 aa, Homo sapiens
  CDR3 for alpha chain variable domain of TCR clone 266396 (TRAV17, TRAJ57)
CATGPSQGGSEKLVF

SEQ ID NO: 532792 - protein, 14 aa, Homo sapiens
  CDR3 for beta chain variable domain of TCR clone 266396 (TRBV12-5, TRBJ2-5)
CANGSRTHQETQYF

SEQ ID NO: 532793 - protein, 13 aa, Homo sapiens
  CDR3 for alpha chain variable domain of TCR clone 266397 (TRAV38-2/DV8, TRAJ34)
CAYRTWNTDKLIF

SEQ ID NO: 532794 - protein, 15 aa, Homo sapiens
  CDR3 for beta chain variable domain of TCR clone 266397 (TRBV6-6, TRBJ1-5)
CASSSIQGTNQPQHF

SEQ ID NO: 532795 - protein, 15 aa, Homo sapiens
  CDR3 for alpha chain variable domain of TCR clone 266398 (TRAV21, TRAJ37)
CAVRPTLSNTGKLIF

SEQ ID NO: 532796 - protein, 16 aa, Homo sapiens
  CDR3 for beta chain variable domain of TCR clone 266398 (TRBV24-1, TRBJ2-3)
CATSDRRQDLTDTQYC

SEQ ID NO: 532797 - protein, 11 aa, Homo sapiens
  CDR3 for alpha chain variable domain of TCR clone 266399 (TRAV35, TRAJ22)
CAGPGVGQLTF

SEQ ID NO: 532798 - protein, 16 aa, Homo sapiens
  CDR3 for beta chain variable domain of TCR clone 266399 (TRBV7-9, TRBJ1-2)
CASSLGFSSGEDGYTF

SEQ ID NO: 532799 - protein, 14 aa, Homo sapiens
  CDR3 for alpha chain variable domain of TCR clone 266400 (TRAV35, TRAJ22)
CAGLRPGSARQLTF

SEQ ID NO: 532800 - protein, 15 aa, Homo sapiens
  CDR3 for beta chain variable domain of TCR clone 266400 (TRBV20-1, TRBJ2-7)
CSARDRVSGIDEQYF

SEQ ID NO: 532801 - protein, 13 aa, Homo sapiens
  CDR3 for alpha chain variable domain of TCR clone 266401 (TRAV8-1, TRAJ28)
CAVSGAGSYQLTC

SEQ ID NO: 532802 - protein, 14 aa, Homo sapiens
  CDR3 for beta chain variable domain of TCR clone 266401 (TRBV19, TRBJ2-5)
CASSMTGQQETQYF

SEQ ID NO: 532803 - protein, 13 aa, Homo sapiens
  CDR3 for alpha chain variable domain of TCR clone 266402 (TRAV3, TRAJ21)
CAVGNFTNFTLDL

SEQ ID NO: 532804 - protein, 15 aa, Homo sapiens
  CDR3 for beta chain variable domain of TCR clone 266402 (TRBV19, TRBJ1-2)
CASSVGQVLNYGYTF

SEQ ID NO: 532805 - protein, 13 aa, Homo sapiens
  CDR3 for alpha chain variable domain of TCR clone 266403 (TRAV8-4, TRAJ36)
GAVSVAGANNLFF

SEQ ID NO: 532806 - protein, 15 aa, Homo sapiens
  CDR3 for beta chain variable domain of TCR clone 266403 (TRBV7-2, TRBJ2-5)
CASSLEGRGVETQYF

SEQ ID NO: 532807 - protein, 13 aa, Homo sapiens
  CDR3 for alpha chain variable domain of TCR clone 266404 (TRAV20, TRAJ34)
CAVSSYNTDKLIS

SEQ ID NO: 532808 - protein, 15 aa, Homo sapiens
  CDR3 for beta chain variable domain of TCR clone 266404 (TRBV20-1, TRBJ1-2)
CSAAGEGARIYGYTF

SEQ ID NO: 532809 - protein, 14 aa, Homo sapiens
  CDR3 for alpha chain variable domain of TCR clone 266405 (TRAV16, TRAJ33)
CALSAMDSNYQLIW

SEQ ID NO: 532810 - protein, 15 aa, Homo sapiens
  CDR3 for beta chain variable domain of TCR clone 266405 (TRBV13, TRBJ1-2)
CASSLGRQPGYGYTF

SEQ ID NO: 532811 - protein, 14 aa, Homo sapiens
  CDR3 for alpha chain variable domain of TCR clone 266406 (TRAV17, TRAJ57)
CATDPQGGSEKLVF

SEQ ID NO: 532812 - protein, 16 aa, Homo sapiens
  CDR3 for beta chain variable domain of TCR clone 266406 (TRBV20-1, TRBJ1-4)
FSAPGQGLLTNEKLFF

SEQ ID NO: 532813 - protein, 10 aa, Homo sapiens
  CDR3 for alpha chain variable domain of TCR clone 266407 (TRAV5, TRAJ34)
CAEDTDKLIF

SEQ ID NO: 532814 - protein, 15 aa, Homo sapiens
  CDR3 for beta chain variable domain of TCR clone 266407 (TRBV2, TRBJ1-5)
CASSPGPTGNQHQHF

SEQ ID NO: 532815 - protein, 15 aa, Homo sapiens
  CDR3 for alpha chain variable domain of TCR clone 266408 (TRAV8-6, TRAJ6)
CAVREASGGSYIPTF

SEQ ID NO: 532816 - protein, 13 aa, Homo sapiens
  CDR3 for beta chain variable domain of TCR clone 266408 (TRBV2, TRBJ2-2)
CASRAWRTGELFF

SEQ ID NO: 532817 - protein, 11 aa, Homo sapiens
  CDR3 for alpha chain variable domain of TCR clone 266409 (TRAV1-1, TRAJ23)
SAVRQGGKLIF

SEQ ID NO: 532818 - protein, 12 aa, Homo sapiens
  CDR3 for beta chain variable domain of TCR clone 266409 (TRBV14, TRBJ2-7)
CASSRLKGEQYF

SEQ ID NO: 532819 - protein, 14 aa, Homo sapiens
  CDR3 for alpha chain variable domain of TCR clone 266410 (TRAV29/DV5, TRAJ47)
CAASSIEYGNKLVF

SEQ ID NO: 532820 - protein, 13 aa, Homo sapiens
  CDR3 for beta chain variable domain of TCR clone 266410 (TRBV7-9, TRBJ1-2)
CASSLKQNYGYTF

SEQ ID NO: 532821 - protein, 14 aa, Homo sapiens
  CDR3 for alpha chain variable domain of TCR clone 266411 (TRAV3, TRAJ40)
CAVRDRRGTYNYIF

SEQ ID NO: 532822 - protein, 13 aa, Homo sapiens
  CDR3 for beta chain variable domain of TCR clone 266411 (TRBV7-9, TRBJ2-3)
CASGPGSTDTQYF

SEQ ID NO: 532823 - protein, 15 aa, Homo sapiens
  CDR3 for alpha chain variable domain of TCR clone 266412 (TRAV17, TRAJ57)
CATGPSQGGSEKLVF

SEQ ID NO: 532824 - protein, 15 aa, Homo sapiens
  CDR3 for beta chain variable domain of TCR clone 266412 (TRBV27, TRBJ2-2)
CASSFRGLVRTGSCF

SEQ ID NO: 532825 - protein, 17 aa, Homo sapiens
  CDR3 for alpha chain variable domain of TCR clone 266413 (TRAV3, TRAJ6)
CAVRDGPRAGGSYIPTF

SEQ ID NO: 532826 - protein, 15 aa, Homo sapiens
  CDR3 for beta chain variable domain of TCR clone 266413 (TRBV5-1, TRBJ2-7)
CASSLGDFTTYEQYF

SEQ ID NO: 532827 - protein, 14 aa, Homo sapiens
  CDR3 for alpha chain variable domain of TCR clone 266414 (TRAV14/DV4, TRAJ23)
CAMRYYNQGGKLIF

SEQ ID NO: 532828 - protein, 14 aa, Homo sapiens
  CDR3 for beta chain variable domain of TCR clone 266414 (TRBV7-2, TRBJ2-7)
CASSPKTSFYEQYF

SEQ ID NO: 532829 - protein, 15 aa, Homo sapiens
  CDR3 for alpha chain variable domain of TCR clone 266415 (TRAV21, TRAJ53)
CATLNSGGSKYKLTF

SEQ ID NO: 532830 - protein, 14 aa, Homo sapiens
  CDR3 for beta chain variable domain of TCR clone 266415 (TRBV19, TRBJ2-1)
CASPTFVLSGEQFF

SEQ ID NO: 532831 - protein, 18 aa, Homo sapiens
  CDR3 for alpha chain variable domain of TCR clone 266416 (TRAV13-1, TRAJ52)
CAAKNPNAGGTSYGKLTF

SEQ ID NO: 532832 - protein, 14 aa, Homo sapiens
  CDR3 for beta chain variable domain of TCR clone 266416 (TRBV7-3, TRBJ2-1)
CASSLAGGTIEQFF

SEQ ID NO: 532833 - protein, 12 aa, Homo sapiens
  CDR3 for alpha chain variable domain of TCR clone 266417 (TRAV17, TRAJ4)
CATDGGYNKLIF

SEQ ID NO: 532834 - protein, 18 aa, Homo sapiens
  CDR3 for beta chain variable domain of TCR clone 266417 (TRBV4-1, TRBJ2-7)
CASSQAPGTGTLGDEQYF

SEQ ID NO: 532835 - protein, 16 aa, Homo sapiens
  CDR3 for alpha chain variable domain of TCR clone 266418 (TRAV23/DV6, TRAJ9)
CAASIGGNTGGFTTIF

SEQ ID NO: 532836 - protein, 14 aa, Homo sapiens
  CDR3 for beta chain variable domain of TCR clone 266418 (TRBV19, TRBJ1-5)
CASRAPDSFLSQHF

SEQ ID NO: 532837 - protein, 14 aa, Homo sapiens
  CDR3 for alpha chain variable domain of TCR clone 266419 (TRAV29/DV5, TRAJ36)
CAARRKTGANNLFF

SEQ ID NO: 532838 - protein, 11 aa, Homo sapiens
  CDR3 for beta chain variable domain of TCR clone 266419 (TRBV11-2, TRBJ1-1)
CASSINTEAFF

SEQ ID NO: 532839 - protein, 13 aa, Homo sapiens
  CDR3 for alpha chain variable domain of TCR clone 266420 (TRAV17, TRAJ9)
CATDYTGGFKTIF

SEQ ID NO: 532840 - protein, 14 aa, Homo sapiens
  CDR3 for beta chain variable domain of TCR clone 266420 (TRBV11-3, TRBJ1-6)
CASSFSGGDSPLHF

SEQ ID NO: 532841 - protein, 17 aa, Homo sapiens
  CDR3 for alpha chain variable domain of TCR clone 266421 (TRAV35, TRAJ47)
GLLDGRTHTEYGNKLVF

SEQ ID NO: 532842 - protein, 11 aa, Homo sapiens
  CDR3 for beta chain variable domain of TCR clone 266421 (TRBV29-1, TRBJ1-1)
CSVEVGTRTFF

SEQ ID NO: 532843 - protein, 19 aa, Homo sapiens
  CDR3 for alpha chain variable domain of TCR clone 266422 (TRAV2, TRAJ20)
ILQVREADAAVYRDCKLSF

SEQ ID NO: 532844 - protein, 12 aa, Homo sapiens
  CDR3 for beta chain variable domain of TCR clone 266422 (TRBV7-2, TRBJ1-5)
CASSLWSQPQHF

SEQ ID NO: 532845 - protein, 13 aa, Homo sapiens
  CDR3 for alpha chain variable domain of TCR clone 266423 (TRAV25, TRAJ54)
CAGTIQGAQKLVF

SEQ ID NO: 532846 - protein, 13 aa, Homo sapiens
  CDR3 for beta chain variable domain of TCR clone 266423 (TRBV11-2, TRBJ1-1)
CASSLETSTEAFF

SEQ ID NO: 532847 - protein, 15 aa, Homo sapiens
  CDR3 for alpha chain variable domain of TCR clone 266424 (TRAV4, TRAJ26)
CLVGGLDHYGQNFVF

SEQ ID NO: 532848 - protein, 13 aa, Homo sapiens
  CDR3 for beta chain variable domain of TCR clone 266424 (TRBV20-1, TRBJ2-5)
CSASLTGRETQYF

SEQ ID NO: 532849 - protein, 17 aa, Homo sapiens
  CDR3 for alpha chain variable domain of TCR clone 266425 (TRAV26-2, TRAJ37)
CILRELVGSSNTGKLIF

SEQ ID NO: 532850 - protein, 14 aa, Homo sapiens
  CDR3 for beta chain variable domain of TCR clone 266425 (TRBV19, TRBJ1-1)
CASTGTGGHTEAFF

SEQ ID NO: 532851 - protein, 13 aa, Homo sapiens
  CDR3 for alpha chain variable domain of TCR clone 266426 (TRAV38-1, TRAJ52)
CAFRGTSYGKLTF

SEQ ID NO: 532852 - protein, 19 aa, Homo sapiens
  CDR3 for beta chain variable domain of TCR clone 266426 (TRBV7-8, TRBJ2-5)
CASSDAEAPKRPSTSGQAR

SEQ ID NO: 532853 - protein, 11 aa, Homo sapiens
  CDR3 for alpha chain variable domain of TCR clone 266427 (TRAV23/DV6, TRAJ58)
CASRLLRGETS

SEQ ID NO: 532854 - protein, 14 aa, Homo sapiens
  CDR3 for beta chain variable domain of TCR clone 266427 (TRBV2, TRBJ2-7)
CASSLTSGGYEQYF

SEQ ID NO: 532855 - protein, 17 aa, Homo sapiens
  CDR3 for alpha chain variable domain of TCR clone 266428 (TRAV3, TRAJ42)
CAVRDRDYGGSQRNRIF

SEQ ID NO: 532856 - protein, 15 aa, Homo sapiens
  CDR3 for beta chain variable domain of TCR clone 266428 (TRBV6-6, TRBJ2-7)
CASSYSYGGSYEQYF

SEQ ID NO: 532857 - protein, 14 aa, Homo sapiens
  CDR3 for alpha chain variable domain of TCR clone 266429 (TRAV12-2, TRAJ53)
CAVKGGGSNYKLTF

SEQ ID NO: 532858 - protein, 13 aa, Homo sapiens
  CDR3 for beta chain variable domain of TCR clone 266429 (TRBV7-7, TRBJ2-2)
CHPSGLRHRELFF

SEQ ID NO: 532859 - protein, 23 aa, Homo sapiens
  CDR3 for alpha chain variable domain of TCR clone 266430 (TRAV8-3, )
CAVVTTRIPDIQNPDPAVYQLRD

SEQ ID NO: 532860 - protein, 12 aa, Homo sapiens
  CDR3 for beta chain variable domain of TCR clone 266430 (TRBV7-9, TRBJ2-7)
CASSFGSYEQYF

SEQ ID NO: 532861 - protein, 11 aa, Homo sapiens
  CDR3 for alpha chain variable domain of TCR clone 266431 (TRAV13-1, TRAJ20)
CAASNDYKLSF

SEQ ID NO: 532862 - protein, 14 aa, Homo sapiens
  CDR3 for beta chain variable domain of TCR clone 266431 (TRBV7-2, TRBJ2-7)
CASSHKTSFYEQYF

SEQ ID NO: 532863 - protein, 13 aa, Homo sapiens
  CDR3 for alpha chain variable domain of TCR clone 266432 (TRAV21, TRAJ20)
CAVGLRVDYKLSV

SEQ ID NO: 532864 - protein, 13 aa, Homo sapiens
  CDR3 for beta chain variable domain of TCR clone 266432 (TRBV29-1, TRBJ2-1)
CSVEGGRVNEQFF

SEQ ID NO: 532865 - protein, 11 aa, Homo sapiens
  CDR3 for alpha chain variable domain of TCR clone 266433 (TRAV2, TRAJ13)
CASGGYQQVTF

SEQ ID NO: 532866 - protein, 18 aa, Homo sapiens
  CDR3 for beta chain variable domain of TCR clone 266433 (TRBV11-2, TRBJ2-3)
CASSLGGASRGAPNTQYF

SEQ ID NO: 532867 - protein, 15 aa, Homo sapiens
  CDR3 for alpha chain variable domain of TCR clone 266434 (TRAV3, TRAJ22)
CAVRDRGGSARQLNF

SEQ ID NO: 532868 - protein, 12 aa, Homo sapiens
  CDR3 for beta chain variable domain of TCR clone 266434 (TRBV12-4, TRBJ1-2)
CASSFIWLHLRF

SEQ ID NO: 532869 - protein, 14 aa, Homo sapiens
  CDR3 for alpha chain variable domain of TCR clone 266435 (TRAV13-2, TRAJ43)
CAEIPTYNNNDMRF

SEQ ID NO: 532870 - protein, 12 aa, Homo sapiens
  CDR3 for beta chain variable domain of TCR clone 266435 (TRBV12-4, TRBJ2-7)
CASSLGGYEQYF

SEQ ID NO: 532871 - protein, 14 aa, Homo sapiens
  CDR3 for alpha chain variable domain of TCR clone 266436 (TRAV8-4, TRAJ40)
CAVIPTSGTHKYIF

SEQ ID NO: 532872 - protein, 15 aa, Homo sapiens
  CDR3 for beta chain variable domain of TCR clone 266436 (TRBV7-2, TRBJ2-1)
CASTSASGDYNEQFF

SEQ ID NO: 532873 - protein, 11 aa, Homo sapiens
  CDR3 for alpha chain variable domain of TCR clone 266437 (TRAV2, TRAJ13)
CASGVYQKVTF

SEQ ID NO: 532874 - protein, 13 aa, Homo sapiens
  CDR3 for beta chain variable domain of TCR clone 266437 (TRBV20-1, TRBJ2-2)
CSASAAGTGELFF

SEQ ID NO: 532875 - protein, 14 aa, Homo sapiens
  CDR3 for alpha chain variable domain of TCR clone 266438 (TRAV17, TRAJ34)
CATDEGYNTDKLIF

SEQ ID NO: 532876 - protein, 16 aa, Homo sapiens
  CDR3 for beta chain variable domain of TCR clone 266438 (TRBV4-1, TRBJ1-4)
CASSQDLRRGGEKLFF

SEQ ID NO: 532877 - protein, 15 aa, Homo sapiens
  CDR3 for alpha chain variable domain of TCR clone 266439 (TRAV13-1, TRAJ9)
CAASTLNTGGFKTIF

SEQ ID NO: 532878 - protein, 15 aa, Homo sapiens
  CDR3 for beta chain variable domain of TCR clone 266439 (TRBV10-2, TRBJ2-6)
CASSEQGTGANVLTF

SEQ ID NO: 532879 - protein, 14 aa, Homo sapiens
  CDR3 for alpha chain variable domain of TCR clone 266440 (TRAV26-1, TRAJ34)
CIVRVAYNTDKLIF

SEQ ID NO: 532880 - protein, 15 aa, Homo sapiens
  CDR3 for beta chain variable domain of TCR clone 266440 (TRBV20-1, TRBJ2-7)
CSPRVPAAYFYEQYF

SEQ ID NO: 532881 - protein, 14 aa, Homo sapiens
  CDR3 for alpha chain variable domain of TCR clone 266441 (TRAV12-2, TRAJ13)
CAVKKTGGYQQVTF

SEQ ID NO: 532882 - protein, 14 aa, Homo sapiens
  CDR3 for beta chain variable domain of TCR clone 266441 (TRBV7-3, TRBJ2-1)
CASSLTGGANEQFF

SEQ ID NO: 532883 - protein, 14 aa, Homo sapiens
  CDR3 for alpha chain variable domain of TCR clone 266442 (TRAV41, TRAJ57)
CAVLLQGGSEKLVF

SEQ ID NO: 532884 - protein, 12 aa, Homo sapiens
  CDR3 for beta chain variable domain of TCR clone 266442 (TRBV10-3, TRBJ1-1)
CATMDRPPEAFS

SEQ ID NO: 532885 - protein, 20 aa, Homo sapiens
  CDR3 for alpha chain variable domain of TCR clone 266443 (TRAV12-1, TRAJ42)
SSVIQPPTSVKGGSQGNLIF

SEQ ID NO: 532886 - protein, 18 aa, Homo sapiens
  CDR3 for beta chain variable domain of TCR clone 266443 (TRBV11-2, TRBJ2-3)
CASSLGGASRGASNTQYF

SEQ ID NO: 532887 - protein, 15 aa, Homo sapiens
  CDR3 for alpha chain variable domain of TCR clone 266444 (TRAV12-2, TRAJ53)
CAVNGGGGSNYKLTF

SEQ ID NO: 532888 - protein, 14 aa, Homo sapiens
  CDR3 for beta chain variable domain of TCR clone 266444 (TRBV19, TRBJ2-1)
CASPTLVLSGEQFF

SEQ ID NO: 532889 - protein, 11 aa, Homo sapiens
  CDR3 for alpha chain variable domain of TCR clone 266445 (TRAV2, TRAJ33)
CAVESNYQLIW

SEQ ID NO: 532890 - protein, 12 aa, Homo sapiens
  CDR3 for beta chain variable domain of TCR clone 266445 (TRBV29-1, TRBJ2-3)
CSVTGGADTQYF

SEQ ID NO: 532891 - protein, 15 aa, Homo sapiens
  CDR3 for alpha chain variable domain of TCR clone 266446 (TRAV3, TRAJ7)
CAVRDKDNGNNRLAF

SEQ ID NO: 532892 - protein, 21 aa, Homo sapiens
  CDR3 for beta chain variable domain of TCR clone 266446 (TRBV5-8, TRBJ2-3)
CASSFLGTSGSHRTIRSILAQ

SEQ ID NO: 532893 - protein, 12 aa, Homo sapiens
  CDR3 for alpha chain variable domain of TCR clone 266447 (TRAV12-1, TRAJ20)
CVVNPDDYKLSF

SEQ ID NO: 532894 - protein, 13 aa, Homo sapiens
  CDR3 for beta chain variable domain of TCR clone 266447 (TRBV11-3, TRBJ1-1)
CASSLTRNTEAFF

SEQ ID NO: 532895 - protein, 13 aa, Homo sapiens
  CDR3 for alpha chain variable domain of TCR clone 266448 (TRAV13-1, TRAJ10)
CEAAEGGGNKLTF

SEQ ID NO: 532896 - protein, 15 aa, Homo sapiens
  CDR3 for beta chain variable domain of TCR clone 266448 (TRBV7-8, TRBJ2-2)
CASSLDQGWTGELFF

SEQ ID NO: 532897 - protein, 14 aa, Homo sapiens
  CDR3 for alpha chain variable domain of TCR clone 266449 (TRAV26-1, TRAJ34)
CIVRLAYNTDKLIF

SEQ ID NO: 532898 - protein, 15 aa, Homo sapiens
  CDR3 for beta chain variable domain of TCR clone 266449 (TRBV20-1, TRBJ2-7)
CSARVPAAYFYEQYF

SEQ ID NO: 532899 - protein, 18 aa, Homo sapiens
  CDR3 for alpha chain variable domain of TCR clone 266450 (TRAV26-1, TRAJ23)
CIVRVGMEVWNQGGKLIF

SEQ ID NO: 532900 - protein, 16 aa, Homo sapiens
  CDR3 for beta chain variable domain of TCR clone 266450 (TRBV12-4, TRBJ2-5)
CASSFFVRGGRETQYF

SEQ ID NO: 532901 - protein, 16 aa, Homo sapiens
  CDR3 for alpha chain variable domain of TCR clone 266451 (TRAV16, TRAJ21)
CACGWATTSTNFTLDL

SEQ ID NO: 532902 - protein, 15 aa, Homo sapiens
  CDR3 for beta chain variable domain of TCR clone 266451 (TRBV19, TRBJ2-1)
RASSIQATSYNEQFF

SEQ ID NO: 532903 - protein, 14 aa, Homo sapiens
  CDR3 for alpha chain variable domain of TCR clone 266452 (TRAV29/DV5, TRAJ36)
CAARRKTGANNLFF

SEQ ID NO: 532904 - protein, 14 aa, Homo sapiens
  CDR3 for beta chain variable domain of TCR clone 266452 (TRBV3-1, TRBJ2-2)
CASSQDWVQGELFF

SEQ ID NO: 532905 - protein, 13 aa, Homo sapiens
  CDR3 for alpha chain variable domain of TCR clone 266453 (TRAV3, TRAJ20)
CAVRSLNDCKLIF

SEQ ID NO: 532906 - protein, 13 aa, Homo sapiens
  CDR3 for beta chain variable domain of TCR clone 266453 (TRBV7-3, TRBJ1-1)
CASSQDWGAEAFF

SEQ ID NO: 532907 - protein, 13 aa, Homo sapiens
  CDR3 for alpha chain variable domain of TCR clone 266454 (TRAV38-2/DV8, TRAJ34)
CAYRNYNTDKLIF

SEQ ID NO: 532908 - protein, 15 aa, Homo sapiens
  CDR3 for beta chain variable domain of TCR clone 266454 (TRBV20-1, TRBJ2-5)
CSAEGTWGLQETQYF

SEQ ID NO: 532909 - protein, 13 aa, Homo sapiens
  CDR3 for alpha chain variable domain of TCR clone 266455 (TRAV8-4, TRAJ21)
CAVSDEGFNKFYF

SEQ ID NO: 532910 - protein, 15 aa, Homo sapiens
  CDR3 for beta chain variable domain of TCR clone 266455 (TRBV20-1, TRBJ2-3)
CSARDLEDSTDTQYF

SEQ ID NO: 532911 - protein, 13 aa, Homo sapiens
  CDR3 for alpha chain variable domain of TCR clone 266456 (TRAV3, TRAJ31)
CAVREGNNARLMF

SEQ ID NO: 532912 - protein, 12 aa, Homo sapiens
  CDR3 for beta chain variable domain of TCR clone 266456 (TRBV11-2, TRBJ2-2)
CASSLPTGELFF

SEQ ID NO: 532913 - protein, 15 aa, Homo sapiens
  CDR3 for alpha chain variable domain of TCR clone 266457 (TRAV8-3, TRAJ15)
CAVGAPNQAGTSLIF

SEQ ID NO: 532914 - protein, 14 aa, Homo sapiens
  CDR3 for beta chain variable domain of TCR clone 266457 (TRBV20-1, TRBJ2-1)
CSPNDEASYNEQFF

SEQ ID NO: 532915 - protein, 13 aa, Homo sapiens
  CDR3 for alpha chain variable domain of TCR clone 266458 (TRAV8-3, TRAJ23)
CAGIYNQGGKLIF

SEQ ID NO: 532916 - protein, 14 aa, Homo sapiens
  CDR3 for beta chain variable domain of TCR clone 266458 (TRBV12-4, TRBJ1-1)
CASSLGTGGTEAFF

SEQ ID NO: 532917 - protein, 14 aa, Homo sapiens
  CDR3 for alpha chain variable domain of TCR clone 266459 (TRAV29/DV5, TRAJ47)
CAASSIEYGNKLVF

SEQ ID NO: 532918 - protein, 14 aa, Homo sapiens
  CDR3 for beta chain variable domain of TCR clone 266459 (TRBV20-1, TRBJ2-1)
CSAMGQSSYNEQFF

SEQ ID NO: 532919 - protein, 15 aa, Homo sapiens
  CDR3 for alpha chain variable domain of TCR clone 266460 (TRAV12-1, TRAJ9)
CVVSFGDTGGFKTIF

SEQ ID NO: 532920 - protein, 13 aa, Homo sapiens
  CDR3 for beta chain variable domain of TCR clone 266460 (TRBV2, TRBJ1-4)
CASSERAGGKLFF

SEQ ID NO: 532921 - protein, 12 aa, Homo sapiens
  CDR3 for alpha chain variable domain of TCR clone 266461 (TRAV23/DV6, TRAJ32)
CSMPGATNQLIF

SEQ ID NO: 532922 - protein, 17 aa, Homo sapiens
  CDR3 for beta chain variable domain of TCR clone 266461 (TRBV13, TRBJ2-3)
CASSSLGTSGLTDTQYF

SEQ ID NO: 532923 - protein, 15 aa, Homo sapiens
  CDR3 for alpha chain variable domain of TCR clone 266462 (TRAV13-1, TRAJ36)
CAASIRQTGANNLFF

SEQ ID NO: 532924 - protein, 17 aa, Homo sapiens
  CDR3 for beta chain variable domain of TCR clone 266462 (TRBV20-1, TRBJ2-2)
CSARDRTSGMHTGELFF

SEQ ID NO: 532925 - protein, 12 aa, Homo sapiens
  CDR3 for alpha chain variable domain of TCR clone 266463 (TRAV8-3, TRAJ26)
CAGDNYGQNFVF

SEQ ID NO: 532926 - protein, 16 aa, Homo sapiens
  CDR3 for beta chain variable domain of TCR clone 266463 (TRBV11-2, TRBJ2-7)
CASSPTTGGVSYEQYF

SEQ ID NO: 532927 - protein, 14 aa, Homo sapiens
  CDR3 for alpha chain variable domain of TCR clone 266464 (TRAV1-2, TRAJ16)
CAVNRFSDGQKLLF

SEQ ID NO: 532928 - protein, 14 aa, Homo sapiens
  CDR3 for beta chain variable domain of TCR clone 266464 (TRBV5-1, TRBJ1-1)
CASSLERVGTEAFF

SEQ ID NO: 532929 - protein, 14 aa, Homo sapiens
  CDR3 for alpha chain variable domain of TCR clone 266465 (TRAV3, TRAJ7)
CAVREEEREQQTRF

SEQ ID NO: 532930 - protein, 14 aa, Homo sapiens
  CDR3 for beta chain variable domain of TCR clone 266465 (TRBV27, TRBJ2-2)
CASRPGVNTGELFF

SEQ ID NO: 532931 - protein, 15 aa, Homo sapiens
  CDR3 for alpha chain variable domain of TCR clone 266466 (TRAV23/DV6, TRAJ32)
CAASKMGGATNKLIF

SEQ ID NO: 532932 - protein, 14 aa, Homo sapiens
  CDR3 for beta chain variable domain of TCR clone 266466 (TRBV7-2, TRBJ2-5)
CASSTGGELKTQYF

SEQ ID NO: 532933 - protein, 15 aa, Homo sapiens
  CDR3 for alpha chain variable domain of TCR clone 266467 (TRAV21, TRAJ40)
CAMRPQTSGTYKYIF

SEQ ID NO: 532934 - protein, 13 aa, Homo sapiens
  CDR3 for beta chain variable domain of TCR clone 266467 (TRBV7-2, TRBJ2-2)
CDSSSVLAGELFF

SEQ ID NO: 532935 - protein, 16 aa, Homo sapiens
  CDR3 for alpha chain variable domain of TCR clone 266468 (TRAV1-1, TRAJ45)
CAVRAYSGGGADGITF

SEQ ID NO: 532936 - protein, 13 aa, Homo sapiens
  CDR3 for beta chain variable domain of TCR clone 266468 (TRBV20-1, TRBJ1-2)
CNARGTADYGYTF

SEQ ID NO: 532937 - protein, 12 aa, Homo sapiens
  CDR3 for alpha chain variable domain of TCR clone 266469 (TRAV12-3, TRAJ17)
CAMTLTGNKLTF

SEQ ID NO: 532938 - protein, 15 aa, Homo sapiens
  CDR3 for beta chain variable domain of TCR clone 266469 (TRBV19, TRBJ2-1)
CPSSILGEGRNEQFF

SEQ ID NO: 532939 - protein, 14 aa, Homo sapiens
  CDR3 for alpha chain variable domain of TCR clone 266470 (TRAV12-3, TRAJ10)
SHLPLTGGGNKLTF

SEQ ID NO: 532940 - protein, 14 aa, Homo sapiens
  CDR3 for beta chain variable domain of TCR clone 266470 (TRBV2, TRBJ2-2)
CASSWQGATGELVF

SEQ ID NO: 532941 - protein, 15 aa, Homo sapiens
  CDR3 for alpha chain variable domain of TCR clone 266471 (TRAV14/DV4, TRAJ9)
CAMREGNTGGFKTIF

SEQ ID NO: 532942 - protein, 16 aa, Homo sapiens
  CDR3 for beta chain variable domain of TCR clone 266471 (TRBV13, TRBJ2-5)
CASSRAAGIRQETQYF

SEQ ID NO: 532943 - protein, 15 aa, Homo sapiens
  CDR3 for alpha chain variable domain of TCR clone 266472 (TRAV26-1, TRAJ40)
RIVRVTTPGTYKYIF

SEQ ID NO: 532944 - protein, 12 aa, Homo sapiens
  CDR3 for beta chain variable domain of TCR clone 266472 (TRBV7-9, TRBJ1-4)
CASSTDREKLFF

SEQ ID NO: 532945 - protein, 15 aa, Homo sapiens
  CDR3 for alpha chain variable domain of TCR clone 266473 (TRAV8-3, TRAJ27)
CAVGPSKTNAGKSTF

SEQ ID NO: 532946 - protein, 17 aa, Homo sapiens
  CDR3 for beta chain variable domain of TCR clone 266473 (TRBV7-3, TRBJ2-3)
CASSLMKRMRGADTQYF

SEQ ID NO: 532947 - protein, 15 aa, Homo sapiens
  CDR3 for alpha chain variable domain of TCR clone 266474 (TRAV21, TRAJ53)
CATLNSGGSNYKLTF

SEQ ID NO: 532948 - protein, 14 aa, Homo sapiens
  CDR3 for beta chain variable domain of TCR clone 266474 (TRBV9, TRBJ1-2)
CASSVSTRSYGYTL

SEQ ID NO: 532949 - protein, 14 aa, Homo sapiens
  CDR3 for alpha chain variable domain of TCR clone 266475 (TRAV12-2, TRAJ45)
CAVNKGGGADGHTF

SEQ ID NO: 532950 - protein, 14 aa, Homo sapiens
  CDR3 for beta chain variable domain of TCR clone 266475 (TRBV20-1, TRBJ1-1)
CSAMGGTANTEAFF

SEQ ID NO: 532951 - protein, 13 aa, Homo sapiens
  CDR3 for alpha chain variable domain of TCR clone 266476 (TRAV27, TRAJ6)
CAGGTRGSYIPTF

SEQ ID NO: 532952 - protein, 14 aa, Homo sapiens
  CDR3 for beta chain variable domain of TCR clone 266476 (TRBV11-2, TRBJ1-1)
CASSFLTGTTEAFF

SEQ ID NO: 532953 - protein, 14 aa, Homo sapiens
  CDR3 for alpha chain variable domain of TCR clone 266477 (TRAV12-2, TRAJ13)
CAVKKTGGYQKVTF

SEQ ID NO: 532954 - protein, 13 aa, Homo sapiens
  CDR3 for beta chain variable domain of TCR clone 266477 (TRBV12-4, TRBJ1-2)
CASSFICLHLRFW

SEQ ID NO: 532955 - protein, 14 aa, Homo sapiens
  CDR3 for alpha chain variable domain of TCR clone 266478 (TRAV36/DV7, TRAJ40)
CAVETTSGTYKYIF

SEQ ID NO: 532956 - protein, 13 aa, Homo sapiens
  CDR3 for beta chain variable domain of TCR clone 266478 (TRBV10-3, TRBJ2-5)
CAMTSGARETQYL

SEQ ID NO: 532957 - protein, 12 aa, Homo sapiens
  CDR3 for alpha chain variable domain of TCR clone 266479 (TRAV17, TRAJ39)
CATGAAGNMLTF

SEQ ID NO: 532958 - protein, 14 aa, Homo sapiens
  CDR3 for beta chain variable domain of TCR clone 266479 (TRBV7-9, TRBJ1-2)
CASSRQGADYGYTL

SEQ ID NO: 532959 - protein, 17 aa, Homo sapiens
  CDR3 for alpha chain variable domain of TCR clone 266480 (TRAV26-1, TRAJ53)
CIVRVDDIGGSNYKLTF

SEQ ID NO: 532960 - protein, 12 aa, Homo sapiens
  CDR3 for beta chain variable domain of TCR clone 266480 (TRBV12-4, TRBJ2-7)
YASSLGGYEQYF

SEQ ID NO: 532961 - protein, 15 aa, Homo sapiens
  CDR3 for alpha chain variable domain of TCR clone 266481 (TRAV26-1, TRAJ17)
CIVRVVKAAGNKLTF

SEQ ID NO: 532962 - protein, 15 aa, Homo sapiens
  CDR3 for beta chain variable domain of TCR clone 266481 (TRBV6-1, TRBJ2-3)
CASSERGGITDTQYF

SEQ ID NO: 532963 - protein, 14 aa, Homo sapiens
  CDR3 for alpha chain variable domain of TCR clone 266482 (TRAV13-2, TRAJ29)
CAENIQPGNTPLVF

SEQ ID NO: 532964 - protein, 14 aa, Homo sapiens
  CDR3 for beta chain variable domain of TCR clone 266482 (TRBV19, TRBJ2-2)
CATTGHANTGELFF

SEQ ID NO: 532965 - protein, 13 aa, Homo sapiens
  CDR3 for alpha chain variable domain of TCR clone 266483 (TRAV38-1, TRAJ57)
CALVQGGSEKLVF

SEQ ID NO: 532966 - protein, 17 aa, Homo sapiens
  CDR3 for beta chain variable domain of TCR clone 266483 (TRBV29-1, TRBJ2-3)
CSVDSPPRGARTDTQYF

SEQ ID NO: 532967 - protein, 15 aa, Homo sapiens
  CDR3 for alpha chain variable domain of TCR clone 266484 (TRAV12-2, TRAJ53)
CAVNGGGGSYYKLTF

SEQ ID NO: 532968 - protein, 17 aa, Homo sapiens
  CDR3 for beta chain variable domain of TCR clone 266484 (TRBV7-3, TRBJ2-3)
RASSLMKGMRGADTQYF

SEQ ID NO: 532969 - protein, 15 aa, Homo sapiens
  CDR3 for alpha chain variable domain of TCR clone 266485 (TRAV1-1, TRAJ4)
CAVRALSGGYNKLIF

SEQ ID NO: 532970 - protein, 16 aa, Homo sapiens
  CDR3 for beta chain variable domain of TCR clone 266485 (TRBV7-2, TRBJ2-6)
CAILSGVSSGANVLTF

SEQ ID NO: 532971 - protein, 16 aa, Homo sapiens
  CDR3 for alpha chain variable domain of TCR clone 266486 (TRAV30, TRAJ24)
CGPEIGDADSWGKFKF

SEQ ID NO: 532972 - protein, 14 aa, Homo sapiens
  CDR3 for beta chain variable domain of TCR clone 266486 (TRBV12-5, TRBJ2-5)
CASGSRTHQETQYF

SEQ ID NO: 532973 - protein, 12 aa, Homo sapiens
  CDR3 for alpha chain variable domain of TCR clone 266487 (TRAV27, TRAJ35)
CAGADFGNVLHC

SEQ ID NO: 532974 - protein, 12 aa, Homo sapiens
  CDR3 for beta chain variable domain of TCR clone 266487 (TRBV7-3, TRBJ2-1)
CASSFINNEQFF

SEQ ID NO: 532975 - protein, 13 aa, Homo sapiens
  CDR3 for alpha chain variable domain of TCR clone 266488 (TRAV27, TRAJ6)
CAGGTRGSYIPTL

SEQ ID NO: 532976 - protein, 14 aa, Homo sapiens
  CDR3 for beta chain variable domain of TCR clone 266488 (TRBV12-4, TRBJ1-1)
CVSSLGTGGTEAFF

SEQ ID NO: 532977 - protein, 13 aa, Homo sapiens
  CDR3 for alpha chain variable domain of TCR clone 266489 (TRAV29/DV5, TRAJ47)
CAASAGYGNKLVF

SEQ ID NO: 532978 - protein, 15 aa, Homo sapiens
  CDR3 for beta chain variable domain of TCR clone 266489 (TRBV7-9, TRBJ1-4)
CASSARTGGNEKLFF

SEQ ID NO: 532979 - protein, 12 aa, Homo sapiens
  CDR3 for alpha chain variable domain of TCR clone 266490 (TRAV12-1, TRAJ40)
CWFYSGTYKYIF

SEQ ID NO: 532980 - protein, 18 aa, Homo sapiens
  CDR3 for beta chain variable domain of TCR clone 266490 (TRBV12-4, TRBJ2-2)
CASSLVAGTRGRTGELFF

SEQ ID NO: 532981 - protein, 13 aa, Homo sapiens
  CDR3 for alpha chain variable domain of TCR clone 266491 (TRAV12-2, TRAJ37)
CAGGPGNTGTLIF

SEQ ID NO: 532982 - protein, 17 aa, Homo sapiens
  CDR3 for beta chain variable domain of TCR clone 266491 (TRBV11-2, TRBJ2-1)
CASSLYPPGVEYNEQFF

SEQ ID NO: 532983 - protein, 13 aa, Homo sapiens
  CDR3 for alpha chain variable domain of TCR clone 266492 (TRAV8-3, TRAJ44)
CAVVPGTASKLTF

SEQ ID NO: 532984 - protein, 16 aa, Homo sapiens
  CDR3 for beta chain variable domain of TCR clone 266492 (TRBV11-3, TRBJ2-7)
CASSTVTAPKTYEQYF

SEQ ID NO: 532985 - protein, 12 aa, Homo sapiens
  CDR3 for alpha chain variable domain of TCR clone 266493 (TRAV12-3, TRAJ21)
CAMFNNFNKFYF

SEQ ID NO: 532986 - protein, 16 aa, Homo sapiens
  CDR3 for beta chain variable domain of TCR clone 266493 (TRBV7-9, TRBJ1-2)
CASSLAPLRAAYGDTF

SEQ ID NO: 532987 - protein, 18 aa, Homo sapiens
  CDR3 for alpha chain variable domain of TCR clone 266494 (TRAV26-1, TRAJ30)
CSVLLPRQSTNRDDKIIF

SEQ ID NO: 532988 - protein, 18 aa, Homo sapiens
  CDR3 for beta chain variable domain of TCR clone 266494 (TRBV4-1, TRBJ1-5)
CASSQDPRGQGLNQPQHF

SEQ ID NO: 532989 - protein, 15 aa, Homo sapiens
  CDR3 for alpha chain variable domain of TCR clone 266495 (TRAV12-2, TRAJ43)
CAFDMRFGAGTRLTV

SEQ ID NO: 532990 - protein, 15 aa, Homo sapiens
  CDR3 for beta chain variable domain of TCR clone 266495 (TRBV7-2, TRBJ2-1)
CASSSGLVGGNEQFF

SEQ ID NO: 532991 - protein, 13 aa, Homo sapiens
  CDR3 for alpha chain variable domain of TCR clone 266496 (TRAV8-6, TRAJ34)
CAVSDQCTDKLIF

SEQ ID NO: 532992 - protein, 14 aa, Homo sapiens
  CDR3 for beta chain variable domain of TCR clone 266496 (TRBV12-4, TRBJ1-1)
CASTWTGHDTEAFF

SEQ ID NO: 532993 - protein, 17 aa, Homo sapiens
  CDR3 for alpha chain variable domain of TCR clone 266497 (TRAV2, TRAJ22)
ILQVREADAAEQRQLTF

SEQ ID NO: 532994 - protein, 16 aa, Homo sapiens
  CDR3 for beta chain variable domain of TCR clone 266497 (TRBV2, TRBJ2-5)
CASSETQGVGEETQYL

SEQ ID NO: 532995 - protein, 13 aa, Homo sapiens
  CDR3 for alpha chain variable domain of TCR clone 266498 (TRAV17, TRAJ4)
CATKSGGYNKLIF

SEQ ID NO: 532996 - protein, 16 aa, Homo sapiens
  CDR3 for beta chain variable domain of TCR clone 266498 (TRBV20-1, TRBJ1-4)
CSAPGQGLLTNEKLFF

SEQ ID NO: 532997 - protein, 15 aa, Homo sapiens
  CDR3 for alpha chain variable domain of TCR clone 266499 (TRAV3, TRAJ22)
CAVRDRGGSARQLTF

SEQ ID NO: 532998 - protein, 14 aa, Homo sapiens
  CDR3 for beta chain variable domain of TCR clone 266499 (TRBV20-1, TRBJ2-5)
CSALVPGFQETQYF

SEQ ID NO: 532999 - protein, 13 aa, Homo sapiens
  CDR3 for alpha chain variable domain of TCR clone 266500 (TRAV13-2, TRAJ13)
CAERPGGYQKVTF

SEQ ID NO: 533000 - protein, 14 aa, Homo sapiens
  CDR3 for beta chain variable domain of TCR clone 266500 (TRBV23-1, TRBJ2-5)
CASGFLRSQETQYF

SEQ ID NO: 533001 - protein, 13 aa, Homo sapiens
  CDR3 for alpha chain variable domain of TCR clone 266501 (TRAV3, TRAJ27)
CAVRPLGAGESTF

SEQ ID NO: 533002 - protein, 16 aa, Homo sapiens
  CDR3 for beta chain variable domain of TCR clone 266501 (TRBV19, TRBJ2-3)
CASSTGAASRTDTQYF

SEQ ID NO: 533003 - protein, 13 aa, Homo sapiens
  CDR3 for alpha chain variable domain of TCR clone 266502 (TRAV27, TRAJ17)
CAGAATAGNKLTF

SEQ ID NO: 533004 - protein, 14 aa, Homo sapiens
  CDR3 for beta chain variable domain of TCR clone 266502 (TRBV9, TRBJ2-5)
CASSVDGAGETQYF

SEQ ID NO: 533005 - protein, 17 aa, Homo sapiens
  CDR3 for alpha chain variable domain of TCR clone 266503 (TRAV8-6, TRAJ58)
CALSSWVGETSGSRLTF

SEQ ID NO: 533006 - protein, 14 aa, Homo sapiens
  CDR3 for beta chain variable domain of TCR clone 266503 (TRBV4-2, TRBJ2-1)
CASGLDRAYNEQFL

SEQ ID NO: 533007 - protein, 13 aa, Homo sapiens
  CDR3 for alpha chain variable domain of TCR clone 266504 (TRAV35, TRAJ42)
CAGFPGSQGNLIF

SEQ ID NO: 533008 - protein, 17 aa, Homo sapiens
  CDR3 for beta chain variable domain of TCR clone 266504 (TRBV20-1, TRBJ2-2)
CSASGSGQGGLTGELFF

SEQ ID NO: 533009 - protein, 15 aa, Homo sapiens
  CDR3 for alpha chain variable domain of TCR clone 266505 (TRAV17, TRAJ57)
CATGPSQGGSEKLVF

SEQ ID NO: 533010 - protein, 14 aa, Homo sapiens
  CDR3 for beta chain variable domain of TCR clone 266505 (TRBV7-3, TRBJ2-3)
CASSFGASTDTQYF

SEQ ID NO: 533011 - protein, 12 aa, Homo sapiens
  CDR3 for alpha chain variable domain of TCR clone 266506 (TRAV16, TRAJ13)
CITLRGYQKATF

SEQ ID NO: 533012 - protein, 17 aa, Homo sapiens
  CDR3 for beta chain variable domain of TCR clone 266506 (TRBV28, TRBJ2-5)
CASSRQGGLAGAETQYF

SEQ ID NO: 533013 - protein, 18 aa, Homo sapiens
  CDR3 for alpha chain variable domain of TCR clone 266507 (TRAV3, TRAJ17)
CAVRARRGGRSCRQQANF

SEQ ID NO: 533014 - protein, 15 aa, Homo sapiens
  CDR3 for beta chain variable domain of TCR clone 266507 (TRBV2, TRBJ2-7)
CASSEGLARSYEQYF

SEQ ID NO: 533015 - protein, 15 aa, Homo sapiens
  CDR3 for alpha chain variable domain of TCR clone 266508 (TRAV3, TRAJ4)
CAVRDGTGGYNKLIF

SEQ ID NO: 533016 - protein, 16 aa, Homo sapiens
  CDR3 for beta chain variable domain of TCR clone 266508 (TRBV20-1, TRBJ2-3)
CSAVRDRGPIADTQYF

SEQ ID NO: 533017 - protein, 14 aa, Homo sapiens
  CDR3 for alpha chain variable domain of TCR clone 266509 (TRAV1-2, TRAJ16)
CAVSRFSDGQKLLF

SEQ ID NO: 533018 - protein, 12 aa, Homo sapiens
  CDR3 for beta chain variable domain of TCR clone 266509 (TRBV11-2, TRBJ2-2)
CASSLPTGELFF

SEQ ID NO: 533019 - protein, 14 aa, Homo sapiens
  CDR3 for alpha chain variable domain of TCR clone 266510 (TRAV8-3, TRAJ4)
CAVGASGGYNKPIF

SEQ ID NO: 533020 - protein, 16 aa, Homo sapiens
  CDR3 for beta chain variable domain of TCR clone 266510 (TRBV4-3, TRBJ2-2)
CASSHLQGSGTGELFF

SEQ ID NO: 533021 - protein, 12 aa, Homo sapiens
  CDR3 for alpha chain variable domain of TCR clone 266511 (TRAV17, TRAJ12)
CATLRSRSKLIF

SEQ ID NO: 533022 - protein, 16 aa, Homo sapiens
  CDR3 for beta chain variable domain of TCR clone 266511 (TRBV28, TRBJ2-7)
CASSLFFETGGPEQYF

SEQ ID NO: 533023 - protein, 14 aa, Homo sapiens
  CDR3 for alpha chain variable domain of TCR clone 266512 (TRAV8-2, TRAJ37)
CVVSISGNTGKLIF

SEQ ID NO: 533024 - protein, 11 aa, Homo sapiens
  CDR3 for beta chain variable domain of TCR clone 266512 (TRBV27, TRBJ2-7)
CASSLGYEQYF

SEQ ID NO: 533025 - protein, 14 aa, Homo sapiens
  CDR3 for alpha chain variable domain of TCR clone 266513 (TRAV12-1, TRAJ30)
CVVNIVGRDDKIIF

SEQ ID NO: 533026 - protein, 13 aa, Homo sapiens
  CDR3 for beta chain variable domain of TCR clone 266513 (TRBV12-5, TRBJ2-1)
CASGLGRGNEQFF

SEQ ID NO: 533027 - protein, 13 aa, Homo sapiens
  CDR3 for alpha chain variable domain of TCR clone 266514 (TRAV3, TRAJ41)
CAVSSNSGYALNF

SEQ ID NO: 533028 - protein, 14 aa, Homo sapiens
  CDR3 for beta chain variable domain of TCR clone 266514 (TRBV7-2, TRBJ2-7)
CASIPKTSFYEQYF

SEQ ID NO: 533029 - protein, 15 aa, Homo sapiens
  CDR3 for alpha chain variable domain of TCR clone 266515 (TRAV2, TRAJ9)
CAVEDRGTGGFKTIF

SEQ ID NO: 533030 - protein, 14 aa, Homo sapiens
  CDR3 for beta chain variable domain of TCR clone 266515 (TRBV11-2, TRBJ2-1)
CASSPSRQGGGQFF

SEQ ID NO: 533031 - protein, 10 aa, Homo sapiens
  CDR3 for alpha chain variable domain of TCR clone 266516 (TRAV12-3, TRAJ20)
CAMDKLSFGA

SEQ ID NO: 533032 - protein, 14 aa, Homo sapiens
  CDR3 for beta chain variable domain of TCR clone 266516 (TRBV5-4, TRBJ2-2)
CASSLTSRTGELFF

SEQ ID NO: 533033 - protein, 12 aa, Homo sapiens
  CDR3 for alpha chain variable domain of TCR clone 266517 (TRAV20, TRAJ4)
CRASGGYNKLIF

SEQ ID NO: 533034 - protein, 18 aa, Homo sapiens
  CDR3 for beta chain variable domain of TCR clone 266517 (TRBV19, TRBJ1-5)
CASSKGQVSIRSNQPQHF

SEQ ID NO: 533035 - protein, 14 aa, Homo sapiens
  CDR3 for alpha chain variable domain of TCR clone 266518 (TRAV17, TRAJ16)
CATADFSDGQKLLF

SEQ ID NO: 533036 - protein, 15 aa, Homo sapiens
  CDR3 for beta chain variable domain of TCR clone 266518 (TRBV10-3, TRBJ2-5)
CAISEFGRGQETQYF

SEQ ID NO: 533037 - protein, 12 aa, Homo sapiens
  CDR3 for alpha chain variable domain of TCR clone 266519 (TRAV1-1, TRAJ8)
YAGGTGIQKLVF

SEQ ID NO: 533038 - protein, 15 aa, Homo sapiens
  CDR3 for beta chain variable domain of TCR clone 266519 (TRBV7-9, TRBJ1-4)
CASSRTGGFNEKLFF

SEQ ID NO: 533039 - protein, 21 aa, Homo sapiens
  CDR3 for alpha chain variable domain of TCR clone 266520 (TRAV17, TRAJ53)
TASRAADTASQGGGSNYKLTF

SEQ ID NO: 533040 - protein, 14 aa, Homo sapiens
  CDR3 for beta chain variable domain of TCR clone 266520 (TRBV5-1, TRBJ1-2)
CASSLEPVNYGYTF

SEQ ID NO: 533041 - protein, 13 aa, Homo sapiens
  CDR3 for alpha chain variable domain of TCR clone 266521 (TRAV1-1, TRAJ13)
CSVNSGGYQKVTF

SEQ ID NO: 533042 - protein, 12 aa, Homo sapiens
  CDR3 for beta chain variable domain of TCR clone 266521 (TRBV28, TRBJ2-1)
CASSVQINEQFF

SEQ ID NO: 533043 - protein, 14 aa, Homo sapiens
  CDR3 for alpha chain variable domain of TCR clone 266522 (TRAV12-3, TRAJ10)
SHLPLTGGGNKLTF

SEQ ID NO: 533044 - protein, 14 aa, Homo sapiens
  CDR3 for beta chain variable domain of TCR clone 266522 (TRBV11-2, TRBJ2-1)
CASTTGQGNNEQFF

SEQ ID NO: 533045 - protein, 12 aa, Homo sapiens
  CDR3 for alpha chain variable domain of TCR clone 266523 (TRAV25, TRAJ5)
CAWGGGRRSLTF

SEQ ID NO: 533046 - protein, 15 aa, Homo sapiens
  CDR3 for beta chain variable domain of TCR clone 266523 (TRBV20-1, TRBJ2-7)
CSARVLASPLYEQYF

SEQ ID NO: 533047 - protein, 14 aa, Homo sapiens
  CDR3 for alpha chain variable domain of TCR clone 266524 (TRAV8-6, TRAJ12)
CAVKAADSSYKLIF

SEQ ID NO: 533048 - protein, 16 aa, Homo sapiens
  CDR3 for beta chain variable domain of TCR clone 266524 (TRBV12-5, TRBJ2-5)
CASGPRTSGNQETQYF

SEQ ID NO: 533049 - protein, 11 aa, Homo sapiens
  CDR3 for alpha chain variable domain of TCR clone 266525 (TRAV17, TRAJ21)
CATGNFNKFYF

SEQ ID NO: 533050 - protein, 11 aa, Homo sapiens
  CDR3 for beta chain variable domain of TCR clone 266525 (TRBV28, TRBJ2-7)
CASSTQGGKSC

SEQ ID NO: 533051 - protein, 12 aa, Homo sapiens
  CDR3 for alpha chain variable domain of TCR clone 266526 (TRAV2, TRAJ31)
CAVEDNNVRLMF

SEQ ID NO: 533052 - protein, 14 aa, Homo sapiens
  CDR3 for beta chain variable domain of TCR clone 266526 (TRBV19, TRBJ1-5)
CASRAPDSFLSQHF

SEQ ID NO: 533053 - protein, 18 aa, Homo sapiens
  CDR3 for alpha chain variable domain of TCR clone 266527 (TRAV21, TRAJ52)
CAVRPSPAGGASYGKLPF

SEQ ID NO: 533054 - protein, 17 aa, Homo sapiens
  CDR3 for beta chain variable domain of TCR clone 266527 (TRBV13, TRBJ2-3)
CASSLSRVAGGRNTQYF

SEQ ID NO: 533055 - protein, 12 aa, Homo sapiens
  CDR3 for alpha chain variable domain of TCR clone 266528 (TRAV12-3, TRAJ17)
WAMTLTGNKLTF

SEQ ID NO: 533056 - protein, 18 aa, Homo sapiens
  CDR3 for beta chain variable domain of TCR clone 266528 (TRBV4-3, TRBJ1-6)
CASSQETPASSYNSPLHF

SEQ ID NO: 533057 - protein, 17 aa, Homo sapiens
  CDR3 for alpha chain variable domain of TCR clone 266529 (TRAV3, TRAJ42)
CAVRDRDYGGSQGNLIF

SEQ ID NO: 533058 - protein, 16 aa, Homo sapiens
  CDR3 for beta chain variable domain of TCR clone 266529 (TRBV9, TRBJ2-1)
CASSVGGGGNYNGQFF

SEQ ID NO: 533059 - protein, 10 aa, Homo sapiens
  CDR3 for alpha chain variable domain of TCR clone 266530 (TRAV4, TRAJ29)
CLVGPRGLLS

SEQ ID NO: 533060 - protein, 14 aa, Homo sapiens
  CDR3 for beta chain variable domain of TCR clone 266530 (TRBV7-3, TRBJ2-2)
CASSLNSNTGELFF

SEQ ID NO: 533061 - protein, 15 aa, Homo sapiens
  CDR3 for alpha chain variable domain of TCR clone 266531 (TRAV13-2, TRAJ10)
CAENRDTGGGNKLTF

SEQ ID NO: 533062 - protein, 16 aa, Homo sapiens
  CDR3 for beta chain variable domain of TCR clone 266531 (TRBV2, TRBJ1-3)
CAGSRTGGSTGNTIYF

SEQ ID NO: 533063 - protein, 14 aa, Homo sapiens
  CDR3 for alpha chain variable domain of TCR clone 266532 (TRAV12-3, TRAJ35)
CAMSLISFGNVLHC

SEQ ID NO: 533064 - protein, 12 aa, Homo sapiens
  CDR3 for beta chain variable domain of TCR clone 266532 (TRBV12-4, TRBJ1-1)
CASSLAGLEAFF

SEQ ID NO: 533065 - protein, 12 aa, Homo sapiens
  CDR3 for alpha chain variable domain of TCR clone 266533 (TRAV10, TRAJ43)
CVVVRVGNDMRF

SEQ ID NO: 533066 - protein, 15 aa, Homo sapiens
  CDR3 for beta chain variable domain of TCR clone 266533 (TRBV6-3, TRBJ2-7)
CAISSPGTVFYEQYF

SEQ ID NO: 533067 - protein, 16 aa, Homo sapiens
  CDR3 for alpha chain variable domain of TCR clone 266534 (TRAV1-2, TRAJ10)
CAVRGVLTGRGNKLTF

SEQ ID NO: 533068 - protein, 13 aa, Homo sapiens
  CDR3 for beta chain variable domain of TCR clone 266534 (TRBV24-1, TRBJ2-2)
CATTATRTGELFF

SEQ ID NO: 533069 - protein, 12 aa, Homo sapiens
  CDR3 for alpha chain variable domain of TCR clone 266535 (TRAV21, TRAJ23)
CAGLLQGGKLIL

SEQ ID NO: 533070 - protein, 14 aa, Homo sapiens
  CDR3 for beta chain variable domain of TCR clone 266535 (TRBV7-9, TRBJ1-4)
CAITEGEANEKLFF

SEQ ID NO: 533071 - protein, 14 aa, Homo sapiens
  CDR3 for alpha chain variable domain of TCR clone 266536 (TRAV12-1, TRAJ17)
CVVNYKAAGNKLTF

SEQ ID NO: 533072 - protein, 14 aa, Homo sapiens
  CDR3 for beta chain variable domain of TCR clone 266536 (TRBV20-1, TRBJ1-1)
CSAQTRIGGTEAVF

SEQ ID NO: 533073 - protein, 17 aa, Homo sapiens
  CDR3 for alpha chain variable domain of TCR clone 266537 (TRAV3, TRAJ6)
CAVRDGPRAGGSYIPTF

SEQ ID NO: 533074 - protein, 15 aa, Homo sapiens
  CDR3 for beta chain variable domain of TCR clone 266537 (TRBV2, TRBJ2-7)
CASTLLGSGATEQYF

SEQ ID NO: 533075 - protein, 14 aa, Homo sapiens
  CDR3 for alpha chain variable domain of TCR clone 266538 (TRAV38-1, TRAJ29)
CAFITPSGNTPLVF

SEQ ID NO: 533076 - protein, 15 aa, Homo sapiens
  CDR3 for beta chain variable domain of TCR clone 266538 (TRBV28, TRBJ2-5)
CASSPGQGSIETQYF

SEQ ID NO: 533077 - protein, 12 aa, Homo sapiens
  CDR3 for alpha chain variable domain of TCR clone 266539 (TRAV17, TRAJ20)
CATDSNDYKLSF

SEQ ID NO: 533078 - protein, 18 aa, Homo sapiens
  CDR3 for beta chain variable domain of TCR clone 266539 (TRBV2, TRBJ2-1)
CASRGLAGGPRTYNEQFF

SEQ ID NO: 533079 - protein, 13 aa, Homo sapiens
  CDR3 for alpha chain variable domain of TCR clone 266540 (TRAV12-1, TRAJ31)
CVVNDNNNARLMF

SEQ ID NO: 533080 - protein, 14 aa, Homo sapiens
  CDR3 for beta chain variable domain of TCR clone 266540 (TRBV19, TRBJ2-5)
CASSMTGQQETQYF

SEQ ID NO: 533081 - protein, 12 aa, Homo sapiens
  CDR3 for alpha chain variable domain of TCR clone 266541 (TRAV12-1, TRAJ6)
CVVSERSYIPTF

SEQ ID NO: 533082 - protein, 21 aa, Homo sapiens
  CDR3 for beta chain variable domain of TCR clone 266541 (TRBV7-3, TRBJ2-1)
GGTQACISVPAAYGLAGAQFF

SEQ ID NO: 533083 - protein, 13 aa, Homo sapiens
  CDR3 for alpha chain variable domain of TCR clone 266542 (TRAV21, TRAJ57)
CAVTQGGSEKLVF

SEQ ID NO: 533084 - protein, 15 aa, Homo sapiens
  CDR3 for beta chain variable domain of TCR clone 266542 (TRBV10-3, TRBJ2-3)
CAISLTSGGTDTQYF

SEQ ID NO: 533085 - protein, 15 aa, Homo sapiens
  CDR3 for alpha chain variable domain of TCR clone 266543 (TRAV27, TRAJ38)
CAARRNAGNNRKLIW

SEQ ID NO: 533086 - protein, 17 aa, Homo sapiens
  CDR3 for beta chain variable domain of TCR clone 266543 (TRBV13, TRBJ2-3)
CASSRSRVAGGRNTQYF

SEQ ID NO: 533087 - protein, 13 aa, Homo sapiens
  CDR3 for alpha chain variable domain of TCR clone 266544 (TRAV6, TRAJ5)
CAPADTGRRALTF

SEQ ID NO: 533088 - protein, 15 aa, Homo sapiens
  CDR3 for beta chain variable domain of TCR clone 266544 (TRBV2, TRBJ2-1)
CASSELAGSYNEQFL

SEQ ID NO: 533089 - protein, 17 aa, Homo sapiens
  CDR3 for alpha chain variable domain of TCR clone 266545 (TRAV3, TRAJ42)
CAVRGRDYGGSQGNLIF

SEQ ID NO: 533090 - protein, 14 aa, Homo sapiens
  CDR3 for beta chain variable domain of TCR clone 266545 (TRBV5-4, TRBJ1-1)
CASGLDSRRDEAFF

SEQ ID NO: 533091 - protein, 14 aa, Homo sapiens
  CDR3 for alpha chain variable domain of TCR clone 266546 (TRAV4, TRAJ17)
CLVGPQAAGNKLTF

SEQ ID NO: 533092 - protein, 12 aa, Homo sapiens
  CDR3 for beta chain variable domain of TCR clone 266546 (TRBV12-4, TRBJ2-7)
CASSLGGYEQYF

SEQ ID NO: 533093 - protein, 17 aa, Homo sapiens
  CDR3 for alpha chain variable domain of TCR clone 266547 (TRAV3, TRAJ6)
CAVRDGPRAGGSYIPTF

SEQ ID NO: 533094 - protein, 13 aa, Homo sapiens
  CDR3 for beta chain variable domain of TCR clone 266547 (TRBV7-8, TRBJ2-2)
PGRLSISPGSCFF

SEQ ID NO: 533095 - protein, 13 aa, Homo sapiens
  CDR3 for alpha chain variable domain of TCR clone 266548 (TRAV8-3, TRAJ48)
CAVVPFGNEKVTF

SEQ ID NO: 533096 - protein, 15 aa, Homo sapiens
  CDR3 for beta chain variable domain of TCR clone 266548 (TRBV11-2, TRBJ2-1)
CASSSPSTRYNEQFF

SEQ ID NO: 533097 - protein, 13 aa, Homo sapiens
  CDR3 for alpha chain variable domain of TCR clone 266549 (TRAV21, TRAJ27)
CAARPGNAGKSTF

SEQ ID NO: 533098 - protein, 15 aa, Homo sapiens
  CDR3 for beta chain variable domain of TCR clone 266549 (TRBV20-1, TRBJ2-7)
CSARDRVSGMDERYF

SEQ ID NO: 533099 - protein, 12 aa, Homo sapiens
  CDR3 for alpha chain variable domain of TCR clone 266550 (TRAV3, TRAJ7)
CADLLWEQQTSF

SEQ ID NO: 533100 - protein, 13 aa, Homo sapiens
  CDR3 for beta chain variable domain of TCR clone 266550 (TRBV7-3, TRBJ2-5)
CASSFRGGETQYF

SEQ ID NO: 533101 - protein, 14 aa, Homo sapiens
  CDR3 for alpha chain variable domain of TCR clone 266551 (TRAV1-1, TRAJ30)
CAVRSLNRDDKIIF

SEQ ID NO: 533102 - protein, 13 aa, Homo sapiens
  CDR3 for beta chain variable domain of TCR clone 266551 (TRBV10-3, TRBJ2-7)
CASKLAVNYEQYF

SEQ ID NO: 533103 - protein, 12 aa, Homo sapiens
  CDR3 for alpha chain variable domain of TCR clone 266552 (TRAV21, TRAJ20)
CAVRRNDYKLSF

SEQ ID NO: 533104 - protein, 11 aa, Homo sapiens
  CDR3 for beta chain variable domain of TCR clone 266552 (TRBV12-4, TRBJ2-2)
CASSSAGELFF

SEQ ID NO: 533105 - protein, 13 aa, Homo sapiens
  CDR3 for alpha chain variable domain of TCR clone 266553 (TRAV12-3, TRAJ40)
CALSARGTYKYIF

SEQ ID NO: 533106 - protein, 16 aa, Homo sapiens
  CDR3 for beta chain variable domain of TCR clone 266553 (TRBV20-1, TRBJ2-3)
CSGEAGLAGGQDTQYF

SEQ ID NO: 533107 - protein, 20 aa, Homo sapiens
  CDR3 for alpha chain variable domain of TCR clone 266554 (TRAV1-2, TRAJ10)
CLLPLCCERGTHGRGNKLTF

SEQ ID NO: 533108 - protein, 13 aa, Homo sapiens
  CDR3 for beta chain variable domain of TCR clone 266554 (TRBV20-1, TRBJ1-1)
CSAGTVGNTEAFF

SEQ ID NO: 533109 - protein, 13 aa, Homo sapiens
  CDR3 for alpha chain variable domain of TCR clone 266555 (TRAV13-2, TRAJ5)
CTVMDTGRRALTF

SEQ ID NO: 533110 - protein, 12 aa, Homo sapiens
  CDR3 for beta chain variable domain of TCR clone 266555 (TRBV28, TRBJ2-7)
CASSFSSYEQYF

SEQ ID NO: 533111 - protein, 13 aa, Homo sapiens
  CDR3 for alpha chain variable domain of TCR clone 266556 (TRAV8-6, TRAJ47)
CAVSDKVWSMETN

SEQ ID NO: 533112 - protein, 17 aa, Homo sapiens
  CDR3 for beta chain variable domain of TCR clone 266556 (TRBV28, TRBJ2-5)
CASSRQGGLAGAETQYF

SEQ ID NO: 533113 - protein, 17 aa, Homo sapiens
  CDR3 for alpha chain variable domain of TCR clone 266557 (TRAV38-2/DV8, TRAJ56)
CAYRSEVGTGANSKLTF

SEQ ID NO: 533114 - protein, 14 aa, Homo sapiens
  CDR3 for beta chain variable domain of TCR clone 266557 (TRBV11-1, TRBJ1-1)
CASSLEHPNTEAVV

SEQ ID NO: 533115 - protein, 12 aa, Homo sapiens
  CDR3 for alpha chain variable domain of TCR clone 266558 (TRAV13-2, TRAJ8)
CAPWLGFQKLVF

SEQ ID NO: 533116 - protein, 14 aa, Homo sapiens
  CDR3 for beta chain variable domain of TCR clone 266558 (TRBV28, TRBJ2-2)
CASTRRSGDGELFF

SEQ ID NO: 533117 - protein, 15 aa, Homo sapiens
  CDR3 for alpha chain variable domain of TCR clone 266559 (TRAV12-3, TRAJ6)
WAMSATTGGSYIPTF

SEQ ID NO: 533118 - protein, 16 aa, Homo sapiens
  CDR3 for beta chain variable domain of TCR clone 266559 (TRBV20-1, TRBJ1-2)
CSASMGQGVATYGYTF

SEQ ID NO: 533119 - protein, 15 aa, Homo sapiens
  CDR3 for alpha chain variable domain of TCR clone 266560 (TRAV9-2, TRAJ18)
CALTDRGSTLGRLYF

SEQ ID NO: 533120 - protein, 13 aa, Homo sapiens
  CDR3 for beta chain variable domain of TCR clone 266560 (TRBV7-3, TRBJ1-1)
CASSQDWGAEAFF

SEQ ID NO: 533121 - protein, 13 aa, Homo sapiens
  CDR3 for alpha chain variable domain of TCR clone 266561 (TRAV27, TRAJ8)
CAGGPTGFQRLVC

SEQ ID NO: 533122 - protein, 15 aa, Homo sapiens
  CDR3 for beta chain variable domain of TCR clone 266561 (TRBV6-1, TRBJ2-7)
CASSESMGDFYEQYF

SEQ ID NO: 533123 - protein, 14 aa, Homo sapiens
  CDR3 for alpha chain variable domain of TCR clone 266562 (TRAV1-2, TRAJ16)
CAVNRFSDGQKLLF

SEQ ID NO: 533124 - protein, 15 aa, Homo sapiens
  CDR3 for beta chain variable domain of TCR clone 266562 (TRBV3-1, TRBJ2-5)
CASSADLGGPETQYF

SEQ ID NO: 533125 - protein, 15 aa, Homo sapiens
  CDR3 for alpha chain variable domain of TCR clone 266563 (TRAV26-1, TRAJ23)
CIVRVAGYQGGKLIF

SEQ ID NO: 533126 - protein, 18 aa, Homo sapiens
  CDR3 for beta chain variable domain of TCR clone 266563 (TRBV28, TRBJ2-1)
CASSSTSGRANSDNEQFF

SEQ ID NO: 533127 - protein, 14 aa, Homo sapiens
  CDR3 for alpha chain variable domain of TCR clone 266564 (TRAV1-2, TRAJ8)
CAVREDTGFQKLVF

SEQ ID NO: 533128 - protein, 15 aa, Homo sapiens
  CDR3 for beta chain variable domain of TCR clone 266564 (TRBV11-3, TRBJ2-3)
CASQKDGREGDTQYF

SEQ ID NO: 533129 - protein, 16 aa, Homo sapiens
  CDR3 for alpha chain variable domain of TCR clone 266565 (TRAV12-2, TRAJ52)
CRLANAGGTSYGKLTF

SEQ ID NO: 533130 - protein, 14 aa, Homo sapiens
  CDR3 for beta chain variable domain of TCR clone 266565 (TRBV7-6, TRBJ2-3)
GASSLGTVTDTQYF

SEQ ID NO: 533131 - protein, 16 aa, Homo sapiens
  CDR3 for alpha chain variable domain of TCR clone 266566 (TRAV12-1, TRAJ48)
CVVNMESNFGNEKLTF

SEQ ID NO: 533132 - protein, 18 aa, Homo sapiens
  CDR3 for beta chain variable domain of TCR clone 266566 (TRBV11-2, TRBJ2-6)
CASSLNPFLGTGANVLTF

SEQ ID NO: 533133 - protein, 16 aa, Homo sapiens
  CDR3 for alpha chain variable domain of TCR clone 266567 (TRAV12-2, TRAJ50)
CAVGTATKTAYDKVIF

SEQ ID NO: 533134 - protein, 12 aa, Homo sapiens
  CDR3 for beta chain variable domain of TCR clone 266567 (TRBV12-4, TRBJ1-5)
CASSLGRQPQHF

SEQ ID NO: 533135 - protein, 16 aa, Homo sapiens
  CDR3 for alpha chain variable domain of TCR clone 266568 (TRAV30, TRAJ24)
CGTEIVDADSWGKSQF

SEQ ID NO: 533136 - protein, 14 aa, Homo sapiens
  CDR3 for beta chain variable domain of TCR clone 266568 (TRBV7-6, TRBJ2-3)
CASSLGTVTDTQYF

SEQ ID NO: 533137 - protein, 18 aa, Homo sapiens
  CDR3 for alpha chain variable domain of TCR clone 266569 (TRAV9-2, TRAJ52)
CALCRHNAGGTSYGKLTF

SEQ ID NO: 533138 - protein, 13 aa, Homo sapiens
  CDR3 for beta chain variable domain of TCR clone 266569 (TRBV7-9, TRBJ1-2)
CASSLKQNYGYTF

SEQ ID NO: 533139 - protein, 11 aa, Homo sapiens
  CDR3 for alpha chain variable domain of TCR clone 266570 (TRAV17, TRAJ9)
CGFTGGFRTIF

SEQ ID NO: 533140 - protein, 14 aa, Homo sapiens
  CDR3 for beta chain variable domain of TCR clone 266570 (TRBV12-5, TRBJ2-5)
CASGSRTHQETQYF

SEQ ID NO: 533141 - protein, 15 aa, Homo sapiens
  CDR3 for alpha chain variable domain of TCR clone 266571 (TRAV35, TRAJ50)
CAGQLRKTSYAKVIF

SEQ ID NO: 533142 - protein, 12 aa, Homo sapiens
  CDR3 for beta chain variable domain of TCR clone 266571 (TRBV5-1, TRBJ2-5)
CVSSLGLETQYF

SEQ ID NO: 533143 - protein, 13 aa, Homo sapiens
  CDR3 for alpha chain variable domain of TCR clone 266572 (TRAV3, TRAJ29)
CAVRDGGNTPLVF

SEQ ID NO: 533144 - protein, 15 aa, Homo sapiens
  CDR3 for beta chain variable domain of TCR clone 266572 (TRBV12-4, TRBJ2-5)
CASIGRTGEGETQYF

SEQ ID NO: 533145 - protein, 14 aa, Homo sapiens
  CDR3 for alpha chain variable domain of TCR clone 266573 (TRAV16, TRAJ48)
CALTPGFGNEKLTF

SEQ ID NO: 533146 - protein, 12 aa, Homo sapiens
  CDR3 for beta chain variable domain of TCR clone 266573 (TRBV29-1, TRBJ1-3)
CSTRDSGNTIYF

SEQ ID NO: 533147 - protein, 15 aa, Homo sapiens
  CDR3 for alpha chain variable domain of TCR clone 266574 (TRAV26-1, TRAJ22)
CIVRVSFWFCKATDL

SEQ ID NO: 533148 - protein, 15 aa, Homo sapiens
  CDR3 for beta chain variable domain of TCR clone 266574 (TRBV7-6, TRBJ2-7)
CASSGRRDTFGEQYF

SEQ ID NO: 533149 - protein, 14 aa, Homo sapiens
  CDR3 for alpha chain variable domain of TCR clone 266575 (TRAV1-2, TRAJ16)
CAVNRFSDGQKLLF

SEQ ID NO: 533150 - protein, 15 aa, Homo sapiens
  CDR3 for beta chain variable domain of TCR clone 266575 (TRBV4-1, TRBJ1-1)
CASSQEWGHYTEAFF

SEQ ID NO: 533151 - protein, 16 aa, Homo sapiens
  CDR3 for alpha chain variable domain of TCR clone 266576 (TRAV17, TRAJ52)
CSTSNASGTSYGKLTF

SEQ ID NO: 533152 - protein, 13 aa, Homo sapiens
  CDR3 for beta chain variable domain of TCR clone 266576 (TRBV27, TRBJ1-6)
CASSLVLVSPLHF

SEQ ID NO: 533153 - protein, 14 aa, Homo sapiens
  CDR3 for alpha chain variable domain of TCR clone 266577 (TRAV26-1, TRAJ11)
CIVPLYSGYSTLTF

SEQ ID NO: 533154 - protein, 14 aa, Homo sapiens
  CDR3 for beta chain variable domain of TCR clone 266577 (TRBV11-2, TRBJ2-5)
CASRPLAGRETRYF

SEQ ID NO: 533155 - protein, 11 aa, Homo sapiens
  CDR3 for alpha chain variable domain of TCR clone 266578 (TRAV12-2, TRAJ43)
CASPIGNDMRF

SEQ ID NO: 533156 - protein, 20 aa, Homo sapiens
  CDR3 for beta chain variable domain of TCR clone 266578 (TRBV28, TRBJ2-1)
CASTPIGRSPGLAGGNEQFF

SEQ ID NO: 533157 - protein, 12 aa, Homo sapiens
  CDR3 for alpha chain variable domain of TCR clone 266579 (TRAV12-1, TRAJ40)
CVVYSGTYKYIF

SEQ ID NO: 533158 - protein, 19 aa, Homo sapiens
  CDR3 for beta chain variable domain of TCR clone 266579 (TRBV4-1, TRBJ2-7)
CASSPVAGGGRAVLRAGHQ

SEQ ID NO: 533159 - protein, 12 aa, Homo sapiens
  CDR3 for alpha chain variable domain of TCR clone 266580 (TRAV17, TRAJ12)
CATLRSSYKLIF

SEQ ID NO: 533160 - protein, 16 aa, Homo sapiens
  CDR3 for beta chain variable domain of TCR clone 266580 (TRBV2, TRBJ2-3)
CASSTSVEGVTDTQYF

SEQ ID NO: 533161 - protein, 15 aa, Homo sapiens
  CDR3 for alpha chain variable domain of TCR clone 266581 (TRAV23/DV6, TRAJ18)
CAARYRGSTLGRLYF

SEQ ID NO: 533162 - protein, 14 aa, Homo sapiens
  CDR3 for beta chain variable domain of TCR clone 266581 (TRBV18, TRBJ2-5)
CASSPGVSQETQYF

SEQ ID NO: 533163 - protein, 14 aa, Homo sapiens
  CDR3 for alpha chain variable domain of TCR clone 266582 (TRAV21, TRAJ35)
CTVMPIGFGNVLNC

SEQ ID NO: 533164 - protein, 12 aa, Homo sapiens
  CDR3 for beta chain variable domain of TCR clone 266582 (TRBV7-9, TRBJ2-7)
CASSIKREEQYF

SEQ ID NO: 533165 - protein, 14 aa, Homo sapiens
  CDR3 for alpha chain variable domain of TCR clone 266583 (TRAV9-2, TRAJ39)
CALYIYNAGNMLTF

SEQ ID NO: 533166 - protein, 14 aa, Homo sapiens
  CDR3 for beta chain variable domain of TCR clone 266583 (TRBV4-1, TRBJ1-1)
CASSRSGQSFEAFF

SEQ ID NO: 533167 - protein, 15 aa, Homo sapiens
  CDR3 for alpha chain variable domain of TCR clone 266584 (TRAV3, TRAJ5)
CSVRDRKTGRRALDF

SEQ ID NO: 533168 - protein, 15 aa, Homo sapiens
  CDR3 for beta chain variable domain of TCR clone 266584 (TRBV7-8, TRBJ2-1)
CASSLADSLYNEQFF

SEQ ID NO: 533169 - protein, 14 aa, Homo sapiens
  CDR3 for alpha chain variable domain of TCR clone 266585 (TRAV8-2, TRAJ37)
CVVSISGNTGKLIF

SEQ ID NO: 533170 - protein, 15 aa, Homo sapiens
  CDR3 for beta chain variable domain of TCR clone 266585 (TRBV2, TRBJ2-1)
CASSELAGSYNEQFF

SEQ ID NO: 533171 - protein, 12 aa, Homo sapiens
  CDR3 for alpha chain variable domain of TCR clone 266586 (TRAV17, TRAJ20)
CATDGDDYKLSF

SEQ ID NO: 533172 - protein, 18 aa, Homo sapiens
  CDR3 for beta chain variable domain of TCR clone 266586 (TRBV6-5, TRBJ2-5)
CASSYSHAGGSYQETQYF

SEQ ID NO: 533173 - protein, 14 aa, Homo sapiens
  CDR3 for alpha chain variable domain of TCR clone 266587 (TRAV35, TRAJ22)
CAGLRPGSARQLTF

SEQ ID NO: 533174 - protein, 13 aa, Homo sapiens
  CDR3 for beta chain variable domain of TCR clone 266587 (TRBV4-1, TRBJ2-7)
RQQPSCGGDEQYF

SEQ ID NO: 533175 - protein, 18 aa, Homo sapiens
  CDR3 for alpha chain variable domain of TCR clone 266588 (TRAV12-2, )
CAVEDIQNPDPAVYQLRD

SEQ ID NO: 533176 - protein, 17 aa, Homo sapiens
  CDR3 for beta chain variable domain of TCR clone 266588 (TRBV11-2, TRBJ2-1)
CASSLYAPGVEYNEQFF

SEQ ID NO: 533177 - protein, 10 aa, Homo sapiens
  CDR3 for alpha chain variable domain of TCR clone 266589 (TRAV13-1, TRAJ45)
SGGVADGLTF

SEQ ID NO: 533178 - protein, 14 aa, Homo sapiens
  CDR3 for beta chain variable domain of TCR clone 266589 (TRBV12-4, TRBJ1-3)
CASGQTVSGNTIYF

SEQ ID NO: 533179 - protein, 13 aa, Homo sapiens
  CDR3 for alpha chain variable domain of TCR clone 266590 (TRAV30, TRAJ24)
CGPVTDSWGKLQF

SEQ ID NO: 533180 - protein, 15 aa, Homo sapiens
  CDR3 for beta chain variable domain of TCR clone 266590 (TRBV25-1, TRBJ1-4)
CASSPGDSTNEKLFF

SEQ ID NO: 533181 - protein, 12 aa, Homo sapiens
  CDR3 for alpha chain variable domain of TCR clone 266591 (TRAV26-2, TRAJ21)
CILKGHFNKFYF

SEQ ID NO: 533182 - protein, 12 aa, Homo sapiens
  CDR3 for beta chain variable domain of TCR clone 266591 (TRBV12-4, TRBJ2-7)
CASSLGGYEQYF

SEQ ID NO: 533183 - protein, 13 aa, Homo sapiens
  CDR3 for alpha chain variable domain of TCR clone 266592 (TRAV17, TRAJ9)
CATDYTGGFKTIF

SEQ ID NO: 533184 - protein, 14 aa, Homo sapiens
  CDR3 for beta chain variable domain of TCR clone 266592 (TRBV19, TRBJ2-5)
CASSMTGEQETQYF

SEQ ID NO: 533185 - protein, 14 aa, Homo sapiens
  CDR3 for alpha chain variable domain of TCR clone 266593 (TRAV8-3, TRAJ39)
CAVGAYNAGNMLTF

SEQ ID NO: 533186 - protein, 16 aa, Homo sapiens
  CDR3 for beta chain variable domain of TCR clone 266593 (TRBV12-5, TRBJ2-5)
CASGPRTSGNQETQYF

SEQ ID NO: 533187 - protein, 15 aa, Homo sapiens
  CDR3 for alpha chain variable domain of TCR clone 266594 (TRAV3, TRAJ5)
CAVRDRKTGRRALTF

SEQ ID NO: 533188 - protein, 15 aa, Homo sapiens
  CDR3 for beta chain variable domain of TCR clone 266594 (TRBV7-9, TRBJ2-2)
CASGPLDTIPGELFF

SEQ ID NO: 533189 - protein, 15 aa, Homo sapiens
  CDR3 for alpha chain variable domain of TCR clone 266595 (TRAV16, TRAJ39)
CALSPYNNAGNMLTF

SEQ ID NO: 533190 - protein, 14 aa, Homo sapiens
  CDR3 for beta chain variable domain of TCR clone 266595 (TRBV7-7, TRBJ2-7)
CASSPGGPTYEQYF

SEQ ID NO: 533191 - protein, 11 aa, Homo sapiens
  CDR3 for alpha chain variable domain of TCR clone 266596 (TRAV3, TRAJ21)
CAVGTFNKFYF

SEQ ID NO: 533192 - protein, 17 aa, Homo sapiens
  CDR3 for beta chain variable domain of TCR clone 266596 (TRBV24-1, TRBJ2-1)
CATSDVSTSGTYNEQFF

SEQ ID NO: 533193 - protein, 15 aa, Homo sapiens
  CDR3 for alpha chain variable domain of TCR clone 266597 (TRAV26-2, TRAJ16)
CILSLRFSDGQKLLF

SEQ ID NO: 533194 - protein, 12 aa, Homo sapiens
  CDR3 for beta chain variable domain of TCR clone 266597 (TRBV28, TRBJ1-2)
CASSRPNYGYTF

SEQ ID NO: 533195 - protein, 13 aa, Homo sapiens
  CDR3 for alpha chain variable domain of TCR clone 266598 (TRAV17, TRAJ5)
CALRGTGRRELTF

SEQ ID NO: 533196 - protein, 14 aa, Homo sapiens
  CDR3 for beta chain variable domain of TCR clone 266598 (TRBV12-5, TRBJ2-5)
CASGSRTHQETQYF

SEQ ID NO: 533197 - protein, 14 aa, Homo sapiens
  CDR3 for alpha chain variable domain of TCR clone 266599 (TRAV20, TRAJ13)
CAVLNSGGYQKVTF

SEQ ID NO: 533198 - protein, 15 aa, Homo sapiens
  CDR3 for beta chain variable domain of TCR clone 266599 (TRBV11-3, TRBJ2-7)
CASSSGTVPTYEQYF

SEQ ID NO: 533199 - protein, 14 aa, Homo sapiens
  CDR3 for alpha chain variable domain of TCR clone 266600 (TRAV8-3, TRAJ6)
CAVSSSGGSYIPTF

SEQ ID NO: 533200 - protein, 13 aa, Homo sapiens
  CDR3 for beta chain variable domain of TCR clone 266600 (TRBV2, TRBJ2-1)
CASGLLRGNEQFF

SEQ ID NO: 533201 - protein, 16 aa, Homo sapiens
  CDR3 for alpha chain variable domain of TCR clone 266601 (TRAV3, TRAJ37)
FAVRGKGSGNTGKLLF

SEQ ID NO: 533202 - protein, 13 aa, Homo sapiens
  CDR3 for beta chain variable domain of TCR clone 266601 (TRBV14, TRBJ2-7)
CASSQDRRYEQYF

SEQ ID NO: 533203 - protein, 14 aa, Homo sapiens
  CDR3 for alpha chain variable domain of TCR clone 266602 (TRAV35, TRAJ33)
CAGSSQDSNYQLIW

SEQ ID NO: 533204 - protein, 17 aa, Homo sapiens
  CDR3 for beta chain variable domain of TCR clone 266602 (TRBV7-2, TRBJ2-3)
CASSLEARGTSTDTQYF

SEQ ID NO: 533205 - protein, 13 aa, Homo sapiens
  CDR3 for alpha chain variable domain of TCR clone 266603 (TRAV13-2, TRAJ49)
CAENTNTGNQFYF

SEQ ID NO: 533206 - protein, 13 aa, Homo sapiens
  CDR3 for beta chain variable domain of TCR clone 266603 (TRBV12-4, TRBJ2-5)
CASSPGTEETQYF

SEQ ID NO: 533207 - protein, 14 aa, Homo sapiens
  CDR3 for alpha chain variable domain of TCR clone 266604 (TRAV12-2, TRAJ10)
CAVRLTGGGNKLTF

SEQ ID NO: 533208 - protein, 14 aa, Homo sapiens
  CDR3 for beta chain variable domain of TCR clone 266604 (TRBV29-1, TRBJ2-1)
CSVPGTLSYNEQFF

SEQ ID NO: 533209 - protein, 12 aa, Homo sapiens
  CDR3 for alpha chain variable domain of TCR clone 266605 (TRAV35, TRAJ31)
CAAASNNARLMF

SEQ ID NO: 533210 - protein, 15 aa, Homo sapiens
  CDR3 for beta chain variable domain of TCR clone 266605 (TRBV7-3, TRBJ2-2)
CASSETGQGTGELFF

SEQ ID NO: 533211 - protein, 14 aa, Homo sapiens
  CDR3 for alpha chain variable domain of TCR clone 266606 (TRAV17, TRAJ57)
CATDPQGGSEKLVF

SEQ ID NO: 533212 - protein, 12 aa, Homo sapiens
  CDR3 for beta chain variable domain of TCR clone 266606 (TRBV18, TRBJ1-1)
CASSPGGTEAFF

SEQ ID NO: 533213 - protein, 13 aa, Homo sapiens
  CDR3 for alpha chain variable domain of TCR clone 266607 (TRAV20, TRAJ54)
CSVQAGGAQKLVF

SEQ ID NO: 533214 - protein, 14 aa, Homo sapiens
  CDR3 for beta chain variable domain of TCR clone 266607 (TRBV20-1, TRBJ2-7)
CSAKTGTGGYEQYF

SEQ ID NO: 533215 - protein, 17 aa, Homo sapiens
  CDR3 for alpha chain variable domain of TCR clone 266608 (TRAV3, TRAJ6)
FSVRDVPRAGGSYIPTF

SEQ ID NO: 533216 - protein, 14 aa, Homo sapiens
  CDR3 for beta chain variable domain of TCR clone 266608 (TRBV7-2, TRBJ2-7)
CASSPKTSFYEQYF

SEQ ID NO: 533217 - protein, 15 aa, Homo sapiens
  CDR3 for alpha chain variable domain of TCR clone 266609 (TRAV26-1, TRAJ29)
CIVRVEGSGNTPLVF

SEQ ID NO: 533218 - protein, 14 aa, Homo sapiens
  CDR3 for beta chain variable domain of TCR clone 266609 (TRBV11-2, TRBJ2-7)
CASSLGAGAYEQYF

SEQ ID NO: 533219 - protein, 13 aa, Homo sapiens
  CDR3 for alpha chain variable domain of TCR clone 266610 (TRAV3, TRAJ15)
CAVRDQAGTPLTF

SEQ ID NO: 533220 - protein, 15 aa, Homo sapiens
  CDR3 for beta chain variable domain of TCR clone 266610 (TRBV11-1, TRBJ2-7)
CASSLNYGASYEQYF

SEQ ID NO: 533221 - protein, 14 aa, Homo sapiens
  CDR3 for alpha chain variable domain of TCR clone 266611 (TRAV12-2, TRAJ40)
CAVKIPSGTYKYIF

SEQ ID NO: 533222 - protein, 16 aa, Homo sapiens
  CDR3 for beta chain variable domain of TCR clone 266611 (TRBV28, TRBJ2-5)
CASSFSPAGGCETQYF

SEQ ID NO: 533223 - protein, 12 aa, Homo sapiens
  CDR3 for alpha chain variable domain of TCR clone 266612 (TRAV21, TRAJ8)
CAVNTGFQKLVF

SEQ ID NO: 533224 - protein, 14 aa, Homo sapiens
  CDR3 for beta chain variable domain of TCR clone 266612 (TRBV7-2, TRBJ2-7)
CASSPKTSFYEQDF

SEQ ID NO: 533225 - protein, 14 aa, Homo sapiens
  CDR3 for alpha chain variable domain of TCR clone 266613 (TRAV25, TRAJ48)
CAGPGGFGNEKLTF

SEQ ID NO: 533226 - protein, 17 aa, Homo sapiens
  CDR3 for beta chain variable domain of TCR clone 266613 (TRBV20-1, TRBJ2-2)
CSASGSGQGGLTGELFF

SEQ ID NO: 533227 - protein, 18 aa, Homo sapiens
  CDR3 for alpha chain variable domain of TCR clone 266614 (TRAV21, TRAJ52)
CAVRPSPAGGTSYGKLTF

SEQ ID NO: 533228 - protein, 14 aa, Homo sapiens
  CDR3 for beta chain variable domain of TCR clone 266614 (TRBV7-3, TRBJ2-2)
CASSSGGYTGELFF

SEQ ID NO: 533229 - protein, 14 aa, Homo sapiens
  CDR3 for alpha chain variable domain of TCR clone 266615 (TRAV13-2, TRAJ17)
CAENSKAAGNKLTF

SEQ ID NO: 533230 - protein, 18 aa, Homo sapiens
  CDR3 for beta chain variable domain of TCR clone 266615 (TRBV12-4, TRBJ2-2)
CASSLVAGTRGRTGELFF

SEQ ID NO: 533231 - protein, 15 aa, Homo sapiens
  CDR3 for alpha chain variable domain of TCR clone 266616 (TRAV13-1, TRAJ17)
CAASIHGGYRQQANF

SEQ ID NO: 533232 - protein, 14 aa, Homo sapiens
  CDR3 for beta chain variable domain of TCR clone 266616 (TRBV20-1, TRBJ2-4)
CSARDRGQGGIQYL

SEQ ID NO: 533233 - protein, 12 aa, Homo sapiens
  CDR3 for alpha chain variable domain of TCR clone 266617 (TRAV1-2, TRAJ33)
CAALDSNYQLIW

SEQ ID NO: 533234 - protein, 17 aa, Homo sapiens
  CDR3 for beta chain variable domain of TCR clone 266617 (TRBV25-1, TRBJ1-2)
CARSEFGSATTNYGYTF

SEQ ID NO: 533235 - protein, 13 aa, Homo sapiens
  CDR3 for alpha chain variable domain of TCR clone 266618 (TRAV13-2, TRAJ48)
CAEMDFGNVKLTF

SEQ ID NO: 533236 - protein, 13 aa, Homo sapiens
  CDR3 for beta chain variable domain of TCR clone 266618 (TRBV7-9, TRBJ1-2)
CASSLKQNYGYAF

SEQ ID NO: 533237 - protein, 19 aa, Homo sapiens
  CDR3 for alpha chain variable domain of TCR clone 266619 (TRAV26-1, TRAJ52)
CIVRAHRNAGGTSYGKLKF

SEQ ID NO: 533238 - protein, 15 aa, Homo sapiens
  CDR3 for beta chain variable domain of TCR clone 266619 (TRBV12-4, TRBJ2-5)
CASSPPTGLQETQYF

SEQ ID NO: 533239 - protein, 15 aa, Homo sapiens
  CDR3 for alpha chain variable domain of TCR clone 266620 (TRAV21, TRAJ18)
CAVRDRGSTLGRLYF

SEQ ID NO: 533240 - protein, 16 aa, Homo sapiens
  CDR3 for beta chain variable domain of TCR clone 266620 (TRBV19, TRBJ2-1)
CASSKAGPSSYNEQFF

SEQ ID NO: 533241 - protein, 14 aa, Homo sapiens
  CDR3 for alpha chain variable domain of TCR clone 266621 (TRAV12-1, TRAJ3)
CGAARSSSASKLIF

SEQ ID NO: 533242 - protein, 15 aa, Homo sapiens
  CDR3 for beta chain variable domain of TCR clone 266621 (TRBV7-2, TRBJ2-6)
CASSREGSGANVLTF

SEQ ID NO: 533243 - protein, 15 aa, Homo sapiens
  CDR3 for alpha chain variable domain of TCR clone 266622 (TRAV27, TRAJ38)
CAARRNAGNNRKLIW

SEQ ID NO: 533244 - protein, 17 aa, Homo sapiens
  CDR3 for beta chain variable domain of TCR clone 266622 (TRBV20-1, TRBJ2-7)
CSAAPGLARGISYEQYF

SEQ ID NO: 533245 - protein, 13 aa, Homo sapiens
  CDR3 for alpha chain variable domain of TCR clone 266623 (TRAV8-1, TRAJ34)
CAVRPYNTDKLIF

SEQ ID NO: 533246 - protein, 15 aa, Homo sapiens
  CDR3 for beta chain variable domain of TCR clone 266623 (TRBV7-9, TRBJ1-3)
CVSSLRSGSGNTMYF

SEQ ID NO: 533247 - protein, 12 aa, Homo sapiens
  CDR3 for alpha chain variable domain of TCR clone 266624 (TRAV2, TRAJ9)
CAVGAGGFKTIF

SEQ ID NO: 533248 - protein, 15 aa, Homo sapiens
  CDR3 for beta chain variable domain of TCR clone 266624 (TRBV11-2, TRBJ2-1)
CASSKNRGLIYEQFF

SEQ ID NO: 533249 - protein, 12 aa, Homo sapiens
  CDR3 for alpha chain variable domain of TCR clone 266625 (TRAV9-2, TRAJ36)
CALKKGANNLFF

SEQ ID NO: 533250 - protein, 13 aa, Homo sapiens
  CDR3 for beta chain variable domain of TCR clone 266625 (TRBV27, TRBJ1-1)
CASSLSIGAEAVF

SEQ ID NO: 533251 - protein, 13 aa, Homo sapiens
  CDR3 for alpha chain variable domain of TCR clone 266626 (TRAV35, TRAJ43)
CAGYPYNNNDMRF

SEQ ID NO: 533252 - protein, 14 aa, Homo sapiens
  CDR3 for beta chain variable domain of TCR clone 266626 (TRBV7-6, TRBJ2-1)
CASSLGGGAGEQFF

SEQ ID NO: 533253 - protein, 14 aa, Homo sapiens
  CDR3 for alpha chain variable domain of TCR clone 266627 (TRAV26-1, TRAJ45)
CIEVTGGGADGLTF

SEQ ID NO: 533254 - protein, 15 aa, Homo sapiens
  CDR3 for beta chain variable domain of TCR clone 266627 (TRBV25-1, TRBJ1-4)
CASSPGDSTNEKLFF

SEQ ID NO: 533255 - protein, 16 aa, Homo sapiens
  CDR3 for alpha chain variable domain of TCR clone 266628 (TRAV1-2, TRAJ10)
CAVRGVLTGGGNKLTF

SEQ ID NO: 533256 - protein, 16 aa, Homo sapiens
  CDR3 for beta chain variable domain of TCR clone 266628 (TRBV7-9, TRBJ1-2)
CASSLGFSSGEDGYTF

SEQ ID NO: 533257 - protein, 13 aa, Homo sapiens
  CDR3 for alpha chain variable domain of TCR clone 266629 (TRAV26-2, TRAJ57)
CILSRGGSEKLVF

SEQ ID NO: 533258 - protein, 16 aa, Homo sapiens
  CDR3 for beta chain variable domain of TCR clone 266629 (TRBV18, TRBJ1-5)
CASSPRTGGSNQPQHF

SEQ ID NO: 533259 - protein, 18 aa, Homo sapiens
  CDR3 for alpha chain variable domain of TCR clone 266630 (TRAV17, TRAJ45)
CATSLDLYSGGGADGLTF

SEQ ID NO: 533260 - protein, 15 aa, Homo sapiens
  CDR3 for beta chain variable domain of TCR clone 266630 (TRBV11-2, TRBJ2-1)
CASSKNRGLIYEQFV

SEQ ID NO: 533261 - protein, 14 aa, Homo sapiens
  CDR3 for alpha chain variable domain of TCR clone 266631 (TRAV17, TRAJ12)
CAILPMDSSYKLIF

SEQ ID NO: 533262 - protein, 15 aa, Homo sapiens
  CDR3 for beta chain variable domain of TCR clone 266631 (TRBV5-1, TRBJ1-1)
CASSLGEGENTEAVF

SEQ ID NO: 533263 - protein, 14 aa, Homo sapiens
  CDR3 for alpha chain variable domain of TCR clone 266632 (TRAV12-2, TRAJ29)
CAVRGNSGNTPLVF

SEQ ID NO: 533264 - protein, 13 aa, Homo sapiens
  CDR3 for beta chain variable domain of TCR clone 266632 (TRBV12-4, TRBJ2-1)
CASSHYTDNEQFF

SEQ ID NO: 533265 - protein, 13 aa, Homo sapiens
  CDR3 for alpha chain variable domain of TCR clone 266633 (TRAV17, TRAJ6)
CATGFGGSYIPTF

SEQ ID NO: 533266 - protein, 14 aa, Homo sapiens
  CDR3 for beta chain variable domain of TCR clone 266633 (TRBV5-1, TRBJ2-5)
CASSFGGSQETQCF

SEQ ID NO: 533267 - protein, 17 aa, Homo sapiens
  CDR3 for alpha chain variable domain of TCR clone 266634 (TRAV38-2/DV8, TRAJ38)
CAYRSARGAGNNRKLIW

SEQ ID NO: 533268 - protein, 15 aa, Homo sapiens
  CDR3 for beta chain variable domain of TCR clone 266634 (TRBV4-3, TRBJ2-3)
CASSLGTRSSDTQYF

SEQ ID NO: 533269 - protein, 13 aa, Homo sapiens
  CDR3 for alpha chain variable domain of TCR clone 266635 (TRAV8-2, TRAJ36)
CVLSHLPTNNLFF

SEQ ID NO: 533270 - protein, 11 aa, Homo sapiens
  CDR3 for beta chain variable domain of TCR clone 266635 (TRBV12-4, TRBJ2-3)
RASTATDTQYF

SEQ ID NO: 533271 - protein, 13 aa, Homo sapiens
  CDR3 for alpha chain variable domain of TCR clone 266636 (TRAV17, TRAJ34)
CATDLYKTDKLIF

SEQ ID NO: 533272 - protein, 12 aa, Homo sapiens
  CDR3 for beta chain variable domain of TCR clone 266636 (TRBV11-2, TRBJ2-2)
CASSLGGGELFF

SEQ ID NO: 533273 - protein, 14 aa, Homo sapiens
  CDR3 for alpha chain variable domain of TCR clone 266637 (TRAV1-2, TRAJ16)
CAVNRFSYGQKLLF

SEQ ID NO: 533274 - protein, 11 aa, Homo sapiens
  CDR3 for beta chain variable domain of TCR clone 266637 (TRBV7-9, TRBJ2-3)
CASSPTDTQYF

SEQ ID NO: 533275 - protein, 15 aa, Homo sapiens
  CDR3 for alpha chain variable domain of TCR clone 266638 (TRAV26-2, TRAJ45)
CILRDRVDQEEVLTE

SEQ ID NO: 533276 - protein, 15 aa, Homo sapiens
  CDR3 for beta chain variable domain of TCR clone 266638 (TRBV7-6, TRBJ2-5)
CASSKPTGPQETQYF

SEQ ID NO: 533277 - protein, 14 aa, Homo sapiens
  CDR3 for alpha chain variable domain of TCR clone 266639 (TRAV20, TRAJ56)
CAVQFGGANSKLTF

SEQ ID NO: 533278 - protein, 14 aa, Homo sapiens
  CDR3 for beta chain variable domain of TCR clone 266639 (TRBV10-2, TRBJ1-5)
CASSSTGRNQPQHF

SEQ ID NO: 533279 - protein, 12 aa, Homo sapiens
  CDR3 for alpha chain variable domain of TCR clone 266640 (TRAV21, TRAJ49)
CAVNDGGNQFYF

SEQ ID NO: 533280 - protein, 12 aa, Homo sapiens
  CDR3 for beta chain variable domain of TCR clone 266640 (TRBV11-2, TRBJ2-2)
CASSLGGGELFF

SEQ ID NO: 533281 - protein, 14 aa, Homo sapiens
  CDR3 for alpha chain variable domain of TCR clone 266641 (TRAV12-3, TRAJ10)
SHLPLMGGGNKLTF

SEQ ID NO: 533282 - protein, 13 aa, Homo sapiens
  CDR3 for beta chain variable domain of TCR clone 266641 (TRBV7-7, TRBJ2-5)
CASSRSGQETQYF

SEQ ID NO: 533283 - protein, 16 aa, Homo sapiens
  CDR3 for alpha chain variable domain of TCR clone 266642 (TRAV29/DV5, TRAJ36)
CAASAHYQSGANTLFF

SEQ ID NO: 533284 - protein, 16 aa, Homo sapiens
  CDR3 for beta chain variable domain of TCR clone 266642 (TRBV4-2, TRBJ2-3)
CASSQELAGDTDTQYF

SEQ ID NO: 533285 - protein, 14 aa, Homo sapiens
  CDR3 for alpha chain variable domain of TCR clone 266643 (TRAV13-2, TRAJ17)
CAENSKTAGNKLTF

SEQ ID NO: 533286 - protein, 15 aa, Homo sapiens
  CDR3 for beta chain variable domain of TCR clone 266643 (TRBV10-3, TRBJ2-1)
CAIRNGTSGHNEQFF

SEQ ID NO: 533287 - protein, 13 aa, Homo sapiens
  CDR3 for alpha chain variable domain of TCR clone 266644 (TRAV1-2, TRAJ11)
CAVRDSGYSTLTF

SEQ ID NO: 533288 - protein, 17 aa, Homo sapiens
  CDR3 for beta chain variable domain of TCR clone 266644 (TRBV4-1, TRBJ1-4)
CASSQEGPRGVEEKLFF

SEQ ID NO: 533289 - protein, 15 aa, Homo sapiens
  CDR3 for alpha chain variable domain of TCR clone 266645 (TRAV26-1, TRAJ17)
CIVRVVKAAGNKLTF

SEQ ID NO: 533290 - protein, 16 aa, Homo sapiens
  CDR3 for beta chain variable domain of TCR clone 266645 (TRBV7-9, TRBJ2-1)
CASNLVSGPSYNEQFF

SEQ ID NO: 533291 - protein, 12 aa, Homo sapiens
  CDR3 for alpha chain variable domain of TCR clone 266646 (TRAV13-1, TRAJ53)
AASGGSNYKLTF

SEQ ID NO: 533292 - protein, 16 aa, Homo sapiens
  CDR3 for beta chain variable domain of TCR clone 266646 (TRBV12-5, TRBJ2-5)
CASGPRTSGNQETQYF

SEQ ID NO: 533293 - protein, 14 aa, Homo sapiens
  CDR3 for alpha chain variable domain of TCR clone 266647 (TRAV13-1, TRAJ20)
CAARPGSNDYKLSF

SEQ ID NO: 533294 - protein, 14 aa, Homo sapiens
  CDR3 for beta chain variable domain of TCR clone 266647 (TRBV18, TRBJ1-2)
CASSPEGDLYGYTF

SEQ ID NO: 533295 - protein, 13 aa, Homo sapiens
  CDR3 for alpha chain variable domain of TCR clone 266648 (TRAV36/DV7, TRAJ53)
CALSGCSNYKLTF

SEQ ID NO: 533296 - protein, 13 aa, Homo sapiens
  CDR3 for beta chain variable domain of TCR clone 266648 (TRBV28, TRBJ2-7)
CASSLPSRYEQYF

SEQ ID NO: 533297 - protein, 11 aa, Homo sapiens
  CDR3 for alpha chain variable domain of TCR clone 266649 (TRAV12-3, TRAJ17)
CNDAYRQQATF

SEQ ID NO: 533298 - protein, 11 aa, Homo sapiens
  CDR3 for beta chain variable domain of TCR clone 266649 (TRBV23-1, TRBJ2-7)
SSSGTGLEQYF

SEQ ID NO: 533299 - protein, 12 aa, Homo sapiens
  CDR3 for alpha chain variable domain of TCR clone 266650 (TRAV36/DV7, TRAJ54)
CAVVRGAQKLVF

SEQ ID NO: 533300 - protein, 13 aa, Homo sapiens
  CDR3 for beta chain variable domain of TCR clone 266650 (TRBV19, TRBJ1-4)
CATTARPSEKLFF

SEQ ID NO: 533301 - protein, 12 aa, Homo sapiens
  CDR3 for alpha chain variable domain of TCR clone 266651 (TRAV1-2, TRAJ11)
CAVRGGYSTLTF

SEQ ID NO: 533302 - protein, 14 aa, Homo sapiens
  CDR3 for beta chain variable domain of TCR clone 266651 (TRBV12-5, TRBJ2-5)
CASGSRTHQETQYF

SEQ ID NO: 533303 - protein, 13 aa, Homo sapiens
  CDR3 for alpha chain variable domain of TCR clone 266652 (TRAV1-2, TRAJ9)
CAALNTGGFKTIF

SEQ ID NO: 533304 - protein, 13 aa, Homo sapiens
  CDR3 for beta chain variable domain of TCR clone 266652 (TRBV19, TRBJ1-2)
CASSVPGRDGDTF

SEQ ID NO: 533305 - protein, 13 aa, Homo sapiens
  CDR3 for alpha chain variable domain of TCR clone 266653 (TRAV13-2, TRAJ53)
CAENMGSNYKLTF

SEQ ID NO: 533306 - protein, 13 aa, Homo sapiens
  CDR3 for beta chain variable domain of TCR clone 266653 (TRBV4-1, TRBJ2-2)
SASSQENTGELFF

SEQ ID NO: 533307 - protein, 14 aa, Homo sapiens
  CDR3 for alpha chain variable domain of TCR clone 266654 (TRAV26-1, TRAJ34)
CIVRVAYNTDKLIF

SEQ ID NO: 533308 - protein, 15 aa, Homo sapiens
  CDR3 for beta chain variable domain of TCR clone 266654 (TRBV7-9, TRBJ1-4)
CASSRTWGFNEKLFF

SEQ ID NO: 533309 - protein, 14 aa, Homo sapiens
  CDR3 for alpha chain variable domain of TCR clone 266655 (TRAV12-2, TRAJ9)
CAVNALEGGFKTIF

SEQ ID NO: 533310 - protein, 13 aa, Homo sapiens
  CDR3 for beta chain variable domain of TCR clone 266655 (TRBV12-5, TRBJ2-3)
CASGDRQSDTQYF

SEQ ID NO: 533311 - protein, 15 aa, Homo sapiens
  CDR3 for alpha chain variable domain of TCR clone 266656 (TRAV27, TRAJ38)
CAARRNAGNNRKLIW

SEQ ID NO: 533312 - protein, 15 aa, Homo sapiens
  CDR3 for beta chain variable domain of TCR clone 266656 (TRBV6-3, TRBJ2-7)
CASSSPGTVFYEQYF

SEQ ID NO: 533313 - protein, 18 aa, Homo sapiens
  CDR3 for alpha chain variable domain of TCR clone 266657 (TRAV17, TRAJ17)
CFLLLCYGVEAAGNKLTF

SEQ ID NO: 533314 - protein, 17 aa, Homo sapiens
  CDR3 for beta chain variable domain of TCR clone 266657 (TRBV4-1, TRBJ2-1)
CASSQGRGGGLYNEQFF

SEQ ID NO: 533315 - protein, 11 aa, Homo sapiens
  CDR3 for alpha chain variable domain of TCR clone 266658 (TRAV3, TRAJ17)
CAEAAGNKLTF

SEQ ID NO: 533316 - protein, 17 aa, Homo sapiens
  CDR3 for beta chain variable domain of TCR clone 266658 (TRBV7-8, TRBJ2-6)
CASSAGTGGAGANVLTF

SEQ ID NO: 533317 - protein, 13 aa, Homo sapiens
  CDR3 for alpha chain variable domain of TCR clone 266659 (TRAV13-1, TRAJ26)
CAIVFGPGTRLSV

SEQ ID NO: 533318 - protein, 18 aa, Homo sapiens
  CDR3 for beta chain variable domain of TCR clone 266659 (TRBV11-2, TRBJ2-6)
CASSLNTFLGTGANVLTF

SEQ ID NO: 533319 - protein, 13 aa, Homo sapiens
  CDR3 for alpha chain variable domain of TCR clone 266660 (TRAV12-2, TRAJ48)
CAAPNFGNEKLTF

SEQ ID NO: 533320 - protein, 14 aa, Homo sapiens
  CDR3 for beta chain variable domain of TCR clone 266660 (TRBV12-5, TRBJ2-5)
CASGSRTHQETQYF

SEQ ID NO: 533321 - protein, 15 aa, Homo sapiens
  CDR3 for alpha chain variable domain of TCR clone 266661 (TRAV35, TRAJ40)
CAGQLGTSGTYKYIF

SEQ ID NO: 533322 - protein, 14 aa, Homo sapiens
  CDR3 for beta chain variable domain of TCR clone 266661 (TRBV19, TRBJ2-1)
CASSRLASINEQFF

SEQ ID NO: 533323 - protein, 13 aa, Homo sapiens
  CDR3 for alpha chain variable domain of TCR clone 266662 (TRAV20, TRAJ34)
CAVRSYNTDKLIF

SEQ ID NO: 533324 - protein, 11 aa, Homo sapiens
  CDR3 for beta chain variable domain of TCR clone 266662 (TRBV29-1, TRBJ2-5)
CSEDRTGTQYF

SEQ ID NO: 533325 - protein, 14 aa, Homo sapiens
  CDR3 for alpha chain variable domain of TCR clone 266663 (TRAV23/DV6, TRAJ8)
CAASKNTGFQKLVF

SEQ ID NO: 533326 - protein, 16 aa, Homo sapiens
  CDR3 for beta chain variable domain of TCR clone 266663 (TRBV4-1, TRBJ2-6)
CASSQVGDPGANALTF

SEQ ID NO: 533327 - protein, 12 aa, Homo sapiens
  CDR3 for alpha chain variable domain of TCR clone 266664 (TRAV4, TRAJ26)
CLVGDYGQNFVF

SEQ ID NO: 533328 - protein, 15 aa, Homo sapiens
  CDR3 for beta chain variable domain of TCR clone 266664 (TRBV7-2, TRBJ1-2)
CASSPRAGWNYGYTF

SEQ ID NO: 533329 - protein, 11 aa, Homo sapiens
  CDR3 for alpha chain variable domain of TCR clone 266665 (TRAV29/DV5, TRAJ49)
CAAVPGNQFYF

SEQ ID NO: 533330 - protein, 13 aa, Homo sapiens
  CDR3 for beta chain variable domain of TCR clone 266665 (TRBV20-1, TRBJ1-1)
CSPRGGGNTEAFF

SEQ ID NO: 533331 - protein, 15 aa, Homo sapiens
  CDR3 for alpha chain variable domain of TCR clone 266666 (TRAV26-1, TRAJ29)
CIVRVEGSGNIPLVF

SEQ ID NO: 533332 - protein, 15 aa, Homo sapiens
  CDR3 for beta chain variable domain of TCR clone 266666 (TRBV7-9, TRBJ1-5)
CASSQGHQPNQHQHF

SEQ ID NO: 533333 - protein, 14 aa, Homo sapiens
  CDR3 for alpha chain variable domain of TCR clone 266667 (TRAV2, TRAJ9)
CAVEDRSGGFKTIF

SEQ ID NO: 533334 - protein, 15 aa, Homo sapiens
  CDR3 for beta chain variable domain of TCR clone 266667 (TRBV7-2, TRBJ1-2)
CASSPRAGWNYGYTF

SEQ ID NO: 533335 - protein, 14 aa, Homo sapiens
  CDR3 for alpha chain variable domain of TCR clone 266668 (TRAV13-1, TRAJ44)
CAAKATGTASKLTF

SEQ ID NO: 533336 - protein, 16 aa, Homo sapiens
  CDR3 for beta chain variable domain of TCR clone 266668 (TRBV7-3, TRBJ2-3)
CASLMKRMRGADTQYF

SEQ ID NO: 533337 - protein, 13 aa, Homo sapiens
  CDR3 for alpha chain variable domain of TCR clone 266669 (TRAV35, TRAJ44)
CAALSGTASKLTS

SEQ ID NO: 533338 - protein, 17 aa, Homo sapiens
  CDR3 for beta chain variable domain of TCR clone 266669 (TRBV7-8, TRBJ1-2)
CASSLRPLQGHLYGYIF

SEQ ID NO: 533339 - protein, 12 aa, Homo sapiens
  CDR3 for alpha chain variable domain of TCR clone 266670 (TRAV12-3, TRAJ49)
CAMSNTGNQFYF

SEQ ID NO: 533340 - protein, 14 aa, Homo sapiens
  CDR3 for beta chain variable domain of TCR clone 266670 (TRBV19, TRBJ1-1)
CASSPNRGDTEAFF

SEQ ID NO: 533341 - protein, 14 aa, Homo sapiens
  CDR3 for alpha chain variable domain of TCR clone 266671 (TRAV12-3, TRAJ10)
SHLPLTGGGNKLIF

SEQ ID NO: 533342 - protein, 15 aa, Homo sapiens
  CDR3 for beta chain variable domain of TCR clone 266671 (TRBV7-3, TRBJ2-2)
CASSETGQGTGELFF

SEQ ID NO: 533343 - protein, 14 aa, Homo sapiens
  CDR3 for alpha chain variable domain of TCR clone 266672 (TRAV2, TRAJ3)
CAVEDNSSASKLIF

SEQ ID NO: 533344 - protein, 16 aa, Homo sapiens
  CDR3 for beta chain variable domain of TCR clone 266672 (TRBV12-4, TRBJ2-5)
CASSFFVRGRQETQYF

SEQ ID NO: 533345 - protein, 16 aa, Homo sapiens
  CDR3 for alpha chain variable domain of TCR clone 266673 (TRAV22, TRAJ45)
CAVVRGKRGGADGLTF

SEQ ID NO: 533346 - protein, 13 aa, Homo sapiens
  CDR3 for beta chain variable domain of TCR clone 266673 (TRBV27, TRBJ1-1)
CASSLSIGVEAFF

SEQ ID NO: 533347 - protein, 10 aa, Homo sapiens
  CDR3 for alpha chain variable domain of TCR clone 266674 (TRAV23/DV6, TRAJ57)
CAASSTLAQG

SEQ ID NO: 533348 - protein, 14 aa, Homo sapiens
  CDR3 for beta chain variable domain of TCR clone 266674 (TRBV25-1, TRBJ1-1)
CSSTHLGGNTEAFF

SEQ ID NO: 533349 - protein, 13 aa, Homo sapiens
  CDR3 for alpha chain variable domain of TCR clone 266675 (TRAV2, TRAJ40)
CAVVTSGTYKYIF

SEQ ID NO: 533350 - protein, 16 aa, Homo sapiens
  CDR3 for beta chain variable domain of TCR clone 266675 (TRBV19, TRBJ2-2)
CASRSPGRGATGELFF

SEQ ID NO: 533351 - protein, 19 aa, Homo sapiens
  CDR3 for alpha chain variable domain of TCR clone 266676 (TRAV13-1, TRAJ52)
CAASPYQNAGCTSYGKLTF

SEQ ID NO: 533352 - protein, 13 aa, Homo sapiens
  CDR3 for beta chain variable domain of TCR clone 266676 (TRBV15, TRBJ2-7)
CATSTTGHYEQYF

SEQ ID NO: 533353 - protein, 15 aa, Homo sapiens
  CDR3 for alpha chain variable domain of TCR clone 266677 (TRAV12-2, TRAJ53)
CAVNGGGGSNYKLTF

SEQ ID NO: 533354 - protein, 13 aa, Homo sapiens
  CDR3 for beta chain variable domain of TCR clone 266677 (TRBV6-1, TRBJ1-1)
CASSRQGNTEAFF

SEQ ID NO: 533355 - protein, 18 aa, Homo sapiens
  CDR3 for alpha chain variable domain of TCR clone 266678 (TRAV12-3, TRAJ52)
CAMSVGGAGVTSYGKLTF

SEQ ID NO: 533356 - protein, 14 aa, Homo sapiens
  CDR3 for beta chain variable domain of TCR clone 266678 (TRBV7-2, TRBJ2-7)
CASRSQGAAYEQYF

SEQ ID NO: 533357 - protein, 14 aa, Homo sapiens
  CDR3 for alpha chain variable domain of TCR clone 266679 (TRAV17, TRAJ56)
CATVPAGANSKLTF

SEQ ID NO: 533358 - protein, 15 aa, Homo sapiens
  CDR3 for beta chain variable domain of TCR clone 266679 (TRBV3-1, TRBJ2-7)
CASSQAPSGSYEQYF

SEQ ID NO: 533359 - protein, 12 aa, Homo sapiens
  CDR3 for alpha chain variable domain of TCR clone 266680 (TRAV1-2, TRAJ29)
CAVPSGNTPLVF

SEQ ID NO: 533360 - protein, 16 aa, Homo sapiens
  CDR3 for beta chain variable domain of TCR clone 266680 (TRBV6-1, TRBJ1-3)
CASVQGGVETPYILER

SEQ ID NO: 533361 - protein, 14 aa, Homo sapiens
  CDR3 for alpha chain variable domain of TCR clone 266681 (TRAV8-6, TRAJ12)
CAVKAADSSYKLIF

SEQ ID NO: 533362 - protein, 12 aa, Homo sapiens
  CDR3 for beta chain variable domain of TCR clone 266681 (TRBV11-2, TRBJ2-2)
CASSLPTGELFF

SEQ ID NO: 533363 - protein, 14 aa, Homo sapiens
  CDR3 for alpha chain variable domain of TCR clone 266682 (TRAV12-3, TRAJ9)
CAMSPTTGGFKTIF

SEQ ID NO: 533364 - protein, 12 aa, Homo sapiens
  CDR3 for beta chain variable domain of TCR clone 266682 (TRBV19, TRBJ1-5)
CASRIAQQPQHF

SEQ ID NO: 533365 - protein, 14 aa, Homo sapiens
  CDR3 for alpha chain variable domain of TCR clone 266683 (TRAV17, TRAJ57)
CATDPQGGSEKLVF

SEQ ID NO: 533366 - protein, 19 aa, Homo sapiens
  CDR3 for beta chain variable domain of TCR clone 266683 (TRBV7-2, TRBJ2-3)
CASSFLSRNWGGGTDTQYF

SEQ ID NO: 533367 - protein, 13 aa, Homo sapiens
  CDR3 for alpha chain variable domain of TCR clone 266684 (TRAV27, TRAJ45)
CRSAGGGADGLTF

SEQ ID NO: 533368 - protein, 13 aa, Homo sapiens
  CDR3 for beta chain variable domain of TCR clone 266684 (TRBV7-7, TRBJ2-5)
CASSRSGQETQYF

SEQ ID NO: 533369 - protein, 11 aa, Homo sapiens
  CDR3 for alpha chain variable domain of TCR clone 266685 (TRAV27, TRAJ43)
CVRYNNNDMRF

SEQ ID NO: 533370 - protein, 17 aa, Homo sapiens
  CDR3 for beta chain variable domain of TCR clone 266685 (TRBV13, TRBJ2-3)
CASSLSRVAGGRNTQYF

SEQ ID NO: 533371 - protein, 15 aa, Homo sapiens
  CDR3 for alpha chain variable domain of TCR clone 266686 (TRAV8-1, TRAJ23)
CAVNSHYNQGGKLIF

SEQ ID NO: 533372 - protein, 15 aa, Homo sapiens
  CDR3 for beta chain variable domain of TCR clone 266686 (TRBV7-3, TRBJ2-3)
CASSLTSGETDTQYF

SEQ ID NO: 533373 - protein, 16 aa, Homo sapiens
  CDR3 for alpha chain variable domain of TCR clone 266687 (TRAV26-1, TRAJ23)
CIVRVERYKQGGKLIF

SEQ ID NO: 533374 - protein, 15 aa, Homo sapiens
  CDR3 for beta chain variable domain of TCR clone 266687 (TRBV18, TRBJ2-7)
CASSPRGGKGYEQYF

SEQ ID NO: 533375 - protein, 10 aa, Homo sapiens
  CDR3 for alpha chain variable domain of TCR clone 266688 (TRAV20, TRAJ22)
CAAPARQLTF

SEQ ID NO: 533376 - protein, 13 aa, Homo sapiens
  CDR3 for beta chain variable domain of TCR clone 266688 (TRBV7-2, TRBJ1-6)
CASSLKFDSPLHF

SEQ ID NO: 533377 - protein, 12 aa, Homo sapiens
  CDR3 for alpha chain variable domain of TCR clone 266689 (TRAV17, TRAJ20)
CARQSNDYKLSF

SEQ ID NO: 533378 - protein, 13 aa, Homo sapiens
  CDR3 for beta chain variable domain of TCR clone 266689 (TRBV10-3, TRBJ1-1)
CAIIPEGGTEAFF

SEQ ID NO: 533379 - protein, 13 aa, Homo sapiens
  CDR3 for alpha chain variable domain of TCR clone 266690 (TRAV20, TRAJ21)
CAVEGYNFNKFYF

SEQ ID NO: 533380 - protein, 14 aa, Homo sapiens
  CDR3 for beta chain variable domain of TCR clone 266690 (TRBV3-1, TRBJ2-5)
CASIQGPDQETQYF

SEQ ID NO: 533381 - protein, 15 aa, Homo sapiens
  CDR3 for alpha chain variable domain of TCR clone 266691 (TRAV8-3, TRAJ23)
CAVGDRYNQGGKLIF

SEQ ID NO: 533382 - protein, 15 aa, Homo sapiens
  CDR3 for beta chain variable domain of TCR clone 266691 (TRBV4-3, TRBJ2-1)
CASSQMRVAHNEQFF

SEQ ID NO: 533383 - protein, 16 aa, Homo sapiens
  CDR3 for alpha chain variable domain of TCR clone 266692 (TRAV12-3, TRAJ53)
CAMSPGSGGSNYKLTF

SEQ ID NO: 533384 - protein, 13 aa, Homo sapiens
  CDR3 for beta chain variable domain of TCR clone 266692 (TRBV18, TRBJ2-5)
CASSLQGQETQYF

SEQ ID NO: 533385 - protein, 18 aa, Homo sapiens
  CDR3 for alpha chain variable domain of TCR clone 266693 (TRAV21, TRAJ52)
CAVRHSPAGGTSCGKLTF

SEQ ID NO: 533386 - protein, 13 aa, Homo sapiens
  CDR3 for beta chain variable domain of TCR clone 266693 (TRBV29-1, TRBJ2-2)
CSVYREDTGELFF

SEQ ID NO: 533387 - protein, 13 aa, Homo sapiens
  CDR3 for alpha chain variable domain of TCR clone 266694 (TRAV17, TRAJ6)
CATGFGGSYIPTF

SEQ ID NO: 533388 - protein, 14 aa, Homo sapiens
  CDR3 for beta chain variable domain of TCR clone 266694 (TRBV5-1, TRBJ2-5)
CASSFGGSQETQSF

SEQ ID NO: 533389 - protein, 14 aa, Homo sapiens
  CDR3 for alpha chain variable domain of TCR clone 266695 (TRAV1-2, TRAJ28)
CVARSGAGSYQLTF

SEQ ID NO: 533390 - protein, 14 aa, Homo sapiens
  CDR3 for beta chain variable domain of TCR clone 266695 (TRBV11-2, TRBJ2-7)
CASSLGAGAYEQYF

SEQ ID NO: 533391 - protein, 14 aa, Homo sapiens
  CDR3 for alpha chain variable domain of TCR clone 266696 (TRAV12-2, TRAJ17)
CAVLFKAAGNKLTF

SEQ ID NO: 533392 - protein, 11 aa, Homo sapiens
  CDR3 for beta chain variable domain of TCR clone 266696 (TRBV7-9, TRBJ2-1)
CASSLLTEQFF

SEQ ID NO: 533393 - protein, 16 aa, Homo sapiens
  CDR3 for alpha chain variable domain of TCR clone 266697 (TRAV2, TRAJ4)
CAVEDRFSGGYNNLIF

SEQ ID NO: 533394 - protein, 13 aa, Homo sapiens
  CDR3 for beta chain variable domain of TCR clone 266697 (TRBV7-7, TRBJ2-5)
CASSRSGQETQYF

SEQ ID NO: 533395 - protein, 16 aa, Homo sapiens
  CDR3 for alpha chain variable domain of TCR clone 266698 (TRAV8-3, TRAJ10)
CAVGPGVTGGVNKLTF

SEQ ID NO: 533396 - protein, 13 aa, Homo sapiens
  CDR3 for beta chain variable domain of TCR clone 266698 (TRBV18, TRBJ1-1)
CASSPGPSGEAFF

SEQ ID NO: 533397 - protein, 15 aa, Homo sapiens
  CDR3 for alpha chain variable domain of TCR clone 266699 (TRAV27, TRAJ38)
CAARRNAGNNRKLMW

SEQ ID NO: 533398 - protein, 13 aa, Homo sapiens
  CDR3 for beta chain variable domain of TCR clone 266699 (TRBV12-5, TRBJ2-3)
CASGDRQSDKQYF

SEQ ID NO: 533399 - protein, 15 aa, Homo sapiens
  CDR3 for alpha chain variable domain of TCR clone 266700 (TRAV8-2, TRAJ23)
CVVSPLITREESLSS

SEQ ID NO: 533400 - protein, 17 aa, Homo sapiens
  CDR3 for beta chain variable domain of TCR clone 266700 (TRBV13, TRBJ2-3)
CASSLSRVAGGRNTQYF

SEQ ID NO: 533401 - protein, 14 aa, Homo sapiens
  CDR3 for alpha chain variable domain of TCR clone 266701 (TRAV8-4, TRAJ13)
CSVTLSGGYQKVTF

SEQ ID NO: 533402 - protein, 16 aa, Homo sapiens
  CDR3 for beta chain variable domain of TCR clone 266701 (TRBV5-7, TRBJ1-4)
CASSPSGGLKTEKLFF

SEQ ID NO: 533403 - protein, 13 aa, Homo sapiens
  CDR3 for alpha chain variable domain of TCR clone 266702 (TRAV13-1, TRAJ43)
CAASLSNNNDIRF

SEQ ID NO: 533404 - protein, 15 aa, Homo sapiens
  CDR3 for beta chain variable domain of TCR clone 266702 (TRBV5-1, TRBJ2-1)
CASSQAGYWWNEQFF

SEQ ID NO: 533405 - protein, 14 aa, Homo sapiens
  CDR3 for alpha chain variable domain of TCR clone 266703 (TRAV3, TRAJ9)
CAVRLNTGGFKTIF

SEQ ID NO: 533406 - protein, 16 aa, Homo sapiens
  CDR3 for beta chain variable domain of TCR clone 266703 (TRBV12-4, TRBJ2-5)
CASSWRPSGDLETQYF

SEQ ID NO: 533407 - protein, 14 aa, Homo sapiens
  CDR3 for alpha chain variable domain of TCR clone 266704 (TRAV26-1, TRAJ11)
CIVPLYSGYSTITF

SEQ ID NO: 533408 - protein, 12 aa, Homo sapiens
  CDR3 for beta chain variable domain of TCR clone 266704 (TRBV11-3, TRBJ2-2)
CASSLGGGELFF

SEQ ID NO: 533409 - protein, 14 aa, Homo sapiens
  CDR3 for alpha chain variable domain of TCR clone 266705 (TRAV12-1, TRAJ17)
CLLNYKASGNKLTF

SEQ ID NO: 533410 - protein, 17 aa, Homo sapiens
  CDR3 for beta chain variable domain of TCR clone 266705 (TRBV20-1, TRBJ2-1)
CSASSSGLAGSYNEQFF

SEQ ID NO: 533411 - protein, 12 aa, Homo sapiens
  CDR3 for alpha chain variable domain of TCR clone 266706 (TRAV13-1, TRAJ15)
CAANQAGNALIF

SEQ ID NO: 533412 - protein, 16 aa, Homo sapiens
  CDR3 for beta chain variable domain of TCR clone 266706 (TRBV19, TRBJ2-1)
CASSKAGPSSYNEQFF

SEQ ID NO: 533413 - protein, 12 aa, Homo sapiens
  CDR3 for alpha chain variable domain of TCR clone 266707 (TRAV12-1, TRAJ40)
CVVPSGTYKSIF

SEQ ID NO: 533414 - protein, 15 aa, Homo sapiens
  CDR3 for beta chain variable domain of TCR clone 266707 (TRBV12-4, TRBJ2-1)
CASSPLSGRNSEQFF

SEQ ID NO: 533415 - protein, 14 aa, Homo sapiens
  CDR3 for alpha chain variable domain of TCR clone 266708 (TRAV1-2, TRAJ8)
CAVREDTGFQKLVF

SEQ ID NO: 533416 - protein, 17 aa, Homo sapiens
  CDR3 for beta chain variable domain of TCR clone 266708 (TRBV18, TRBJ2-2)
CASSQRSSGQGPGELFF

SEQ ID NO: 533417 - protein, 15 aa, Homo sapiens
  CDR3 for alpha chain variable domain of TCR clone 266709 (TRAV20, TRAJ53)
CAVQASGGSNYKLTF

SEQ ID NO: 533418 - protein, 13 aa, Homo sapiens
  CDR3 for beta chain variable domain of TCR clone 266709 (TRBV29-1, TRBJ2-1)
CSGTSGTYNEQFF

SEQ ID NO: 533419 - protein, 17 aa, Homo sapiens
  CDR3 for alpha chain variable domain of TCR clone 266710 (TRAV27, TRAJ26)
CAGARAPLDNYGQNVVF

SEQ ID NO: 533420 - protein, 15 aa, Homo sapiens
  CDR3 for beta chain variable domain of TCR clone 266710 (TRBV11-2, TRBJ2-5)
CASSPRSGGLETQYF

SEQ ID NO: 533421 - protein, 10 aa, Homo sapiens
  CDR3 for alpha chain variable domain of TCR clone 266711 (TRAV12-2, TRAJ20)
CAVYLYKLSF

SEQ ID NO: 533422 - protein, 15 aa, Homo sapiens
  CDR3 for beta chain variable domain of TCR clone 266711 (TRBV7-2, TRBJ1-2)
CASSLVSGGDYGYTF

SEQ ID NO: 533423 - protein, 11 aa, Homo sapiens
  CDR3 for alpha chain variable domain of TCR clone 266712 (TRAV8-1, TRAJ27)
CAVNAAGKSTF

SEQ ID NO: 533424 - protein, 16 aa, Homo sapiens
  CDR3 for beta chain variable domain of TCR clone 266712 (TRBV7-9, TRBJ2-1)
CASSDVAGGSYSEQFF

SEQ ID NO: 533425 - protein, 13 aa, Homo sapiens
  CDR3 for alpha chain variable domain of TCR clone 266713 (TRAV29/DV5, TRAJ13)
CADEGGGYQKVTF

SEQ ID NO: 533426 - protein, 17 aa, Homo sapiens
  CDR3 for beta chain variable domain of TCR clone 266713 (TRBV20-1, TRBJ2-1)
CSASSSGLAGSYNEQFF

SEQ ID NO: 533427 - protein, 16 aa, Homo sapiens
  CDR3 for alpha chain variable domain of TCR clone 266714 (TRAV26-2, TRAJ45)
CTTASPIGVGADGLTF

SEQ ID NO: 533428 - protein, 20 aa, Homo sapiens
  CDR3 for beta chain variable domain of TCR clone 266714 (TRBV28, TRBJ2-1)
CASTPIGRSPGLAGGNEQFF

SEQ ID NO: 533429 - protein, 13 aa, Homo sapiens
  CDR3 for alpha chain variable domain of TCR clone 266715 (TRAV3, TRAJ41)
CAVSSNSGYALNF

SEQ ID NO: 533430 - protein, 14 aa, Homo sapiens
  CDR3 for beta chain variable domain of TCR clone 266715 (TRBV7-2, TRBJ2-7)
CASSPKTGFYEQYF

SEQ ID NO: 533431 - protein, 14 aa, Homo sapiens
  CDR3 for alpha chain variable domain of TCR clone 266716 (TRAV1-2, TRAJ16)
CAVNRFSNGQKLLF

SEQ ID NO: 533432 - protein, 14 aa, Homo sapiens
  CDR3 for beta chain variable domain of TCR clone 266716 (TRBV7-9, TRBJ2-3)
CASSLEDGTDTQYF

SEQ ID NO: 533433 - protein, 12 aa, Homo sapiens
  CDR3 for alpha chain variable domain of TCR clone 266717 (TRAV12-3, TRAJ40)
CVMSSGTYKYIF

SEQ ID NO: 533434 - protein, 15 aa, Homo sapiens
  CDR3 for beta chain variable domain of TCR clone 266717 (TRBV7-3, TRBJ2-2)
CASSETGQGTGEVFF

SEQ ID NO: 533435 - protein, 13 aa, Homo sapiens
  CDR3 for alpha chain variable domain of TCR clone 266718 (TRAV36/DV7, TRAJ49)
CAVEANTGNQFSF

SEQ ID NO: 533436 - protein, 13 aa, Homo sapiens
  CDR3 for beta chain variable domain of TCR clone 266718 (TRBV10-3, TRBJ2-7)
CASKLAVNYEQYF

SEQ ID NO: 533437 - protein, 12 aa, Homo sapiens
  CDR3 for alpha chain variable domain of TCR clone 266719 (TRAV12-3, TRAJ32)
CAGGGATNKLIF

SEQ ID NO: 533438 - protein, 13 aa, Homo sapiens
  CDR3 for beta chain variable domain of TCR clone 266719 (TRBV19, TRBJ1-5)
CASSMRGYQPQHF

SEQ ID NO: 533439 - protein, 12 aa, Homo sapiens
  CDR3 for alpha chain variable domain of TCR clone 266720 (TRAV23/DV6, TRAJ39)
CAALNAGNMLTF

SEQ ID NO: 533440 - protein, 13 aa, Homo sapiens
  CDR3 for beta chain variable domain of TCR clone 266720 (TRBV4-1, TRBJ2-1)
CASSQEVQYEQFF

SEQ ID NO: 533441 - protein, 14 aa, Homo sapiens
  CDR3 for alpha chain variable domain of TCR clone 266721 (TRAV23/DV6, TRAJ4)
CAANLSGGSNKLIF

SEQ ID NO: 533442 - protein, 11 aa, Homo sapiens
  CDR3 for beta chain variable domain of TCR clone 266721 (TRBV7-9, TRBJ2-3)
CASSPTDAQYF

SEQ ID NO: 533443 - protein, 13 aa, Homo sapiens
  CDR3 for alpha chain variable domain of TCR clone 266722 (TRAV12-3, TRAJ5)
CAMIPTGRRALTF

SEQ ID NO: 533444 - protein, 13 aa, Homo sapiens
  CDR3 for beta chain variable domain of TCR clone 266722 (TRBV2, TRBJ2-7)
CASSVVEAYEQYF

SEQ ID NO: 533445 - protein, 13 aa, Homo sapiens
  CDR3 for alpha chain variable domain of TCR clone 266723 (TRAV13-1, TRAJ39)
CSKYSNADNMLTF

SEQ ID NO: 533446 - protein, 13 aa, Homo sapiens
  CDR3 for beta chain variable domain of TCR clone 266723 (TRBV20-1, TRBJ1-1)
CSARGGGNTEAFF

SEQ ID NO: 533447 - protein, 16 aa, Homo sapiens
  CDR3 for alpha chain variable domain of TCR clone 266724 (TRAV12-3, TRAJ53)
CAMSVGSGGSNYKLTF

SEQ ID NO: 533448 - protein, 13 aa, Homo sapiens
  CDR3 for beta chain variable domain of TCR clone 266724 (TRBV7-6, TRBJ1-2)
CASSLVADYGDAF

SEQ ID NO: 533449 - protein, 15 aa, Homo sapiens
  CDR3 for alpha chain variable domain of TCR clone 266725 (TRAV2, TRAJ22)
CAVPSRGGSARQLTF

SEQ ID NO: 533450 - protein, 14 aa, Homo sapiens
  CDR3 for beta chain variable domain of TCR clone 266725 (TRBV4-1, TRBJ1-1)
CASSRSGQSFEAFF

SEQ ID NO: 533451 - protein, 14 aa, Homo sapiens
  CDR3 for alpha chain variable domain of TCR clone 266726 (TRAV8-1, TRAJ5)
CAVRTDTGRRALTF

SEQ ID NO: 533452 - protein, 13 aa, Homo sapiens
  CDR3 for beta chain variable domain of TCR clone 266726 (TRBV12-4, TRBJ2-7)
CASSPTETYEQYF

SEQ ID NO: 533453 - protein, 16 aa, Homo sapiens
  CDR3 for alpha chain variable domain of TCR clone 266727 (TRAV3, TRAJ27)
CVVRDPQGTNAGKSTF

SEQ ID NO: 533454 - protein, 17 aa, Homo sapiens
  CDR3 for beta chain variable domain of TCR clone 266727 (TRBV4-1, TRBJ2-7)
CASSQGRGLQTSYEQYF

SEQ ID NO: 533455 - protein, 13 aa, Homo sapiens
  CDR3 for alpha chain variable domain of TCR clone 266728 (TRAV6, TRAJ3)
CSTGYSSASKIIF

SEQ ID NO: 533456 - protein, 13 aa, Homo sapiens
  CDR3 for beta chain variable domain of TCR clone 266728 (TRBV14, TRBJ1-2)
CASSQQGCYGYTF

SEQ ID NO: 533457 - protein, 12 aa, Homo sapiens
  CDR3 for alpha chain variable domain of TCR clone 266729 (TRAV13-1, TRAJ9)
CASHTGGFKTIL

SEQ ID NO: 533458 - protein, 18 aa, Homo sapiens
  CDR3 for beta chain variable domain of TCR clone 266729 (TRBV11-2, TRBJ2-3)
CASSLGGAARGAPNTQYF

SEQ ID NO: 533459 - protein, 15 aa, Homo sapiens
  CDR3 for alpha chain variable domain of TCR clone 266730 (TRAV17, TRAJ57)
CATGPSQGGSETLVF

SEQ ID NO: 533460 - protein, 13 aa, Homo sapiens
  CDR3 for beta chain variable domain of TCR clone 266730 (TRBV19, TRBJ1-3)
CASRLSLGNTIYF

SEQ ID NO: 533461 - protein, 16 aa, Homo sapiens
  CDR3 for alpha chain variable domain of TCR clone 266731 (TRAV13-1, TRAJ48)
CSKYRESNFGTEKLTF

SEQ ID NO: 533462 - protein, 17 aa, Homo sapiens
  CDR3 for beta chain variable domain of TCR clone 266731 (TRBV28, TRBJ2-1)
CASSFARQALTYNEQFF

SEQ ID NO: 533463 - protein, 14 aa, Homo sapiens
  CDR3 for alpha chain variable domain of TCR clone 266732 (TRAV12-3, TRAJ10)
SHLPLTGGGNKLTF

SEQ ID NO: 533464 - protein, 19 aa, Homo sapiens
  CDR3 for beta chain variable domain of TCR clone 266732 (TRBV4-1, TRBJ1-1)
CASSRSILTPRGVNTEAFF

SEQ ID NO: 533465 - protein, 15 aa, Homo sapiens
  CDR3 for alpha chain variable domain of TCR clone 266733 (TRAV13-1, TRAJ11)
CAASNRNSGYSTITF

SEQ ID NO: 533466 - protein, 11 aa, Homo sapiens
  CDR3 for beta chain variable domain of TCR clone 266733 (TRBV20-1, TRBJ2-7)
CSARLSYEQYF

SEQ ID NO: 533467 - protein, 15 aa, Homo sapiens
  CDR3 for alpha chain variable domain of TCR clone 266734 (TRAV1-2, TRAJ9)
CAVRDDGTGGFKTIF

SEQ ID NO: 533468 - protein, 13 aa, Homo sapiens
  CDR3 for beta chain variable domain of TCR clone 266734 (TRBV12-4, TRBJ1-2)
CASSLRQGKGYTF

SEQ ID NO: 533469 - protein, 14 aa, Homo sapiens
  CDR3 for alpha chain variable domain of TCR clone 266735 (TRAV23/DV6, TRAJ24)
CAASLSDSWGKLQF

SEQ ID NO: 533470 - protein, 16 aa, Homo sapiens
  CDR3 for beta chain variable domain of TCR clone 266735 (TRBV7-9, TRBJ2-6)
CASSLKGPLRANVLTY

SEQ ID NO: 533471 - protein, 10 aa, Homo sapiens
  CDR3 for alpha chain variable domain of TCR clone 266736 (TRAV39, TRAJ49)
CAVAGHQFYF

SEQ ID NO: 533472 - protein, 14 aa, Homo sapiens
  CDR3 for beta chain variable domain of TCR clone 266736 (TRBV7-8, TRBJ2-7)
CASSPRDRVYEQYF

SEQ ID NO: 533473 - protein, 12 aa, Homo sapiens
  CDR3 for alpha chain variable domain of TCR clone 266737 (TRAV13-1, TRAJ21)
CAAKEGFNKFYF

SEQ ID NO: 533474 - protein, 11 aa, Homo sapiens
  CDR3 for beta chain variable domain of TCR clone 266737 (TRBV24-1, TRBJ1-2)
CATSDGIGDTF

SEQ ID NO: 533475 - protein, 12 aa, Homo sapiens
  CDR3 for alpha chain variable domain of TCR clone 266738 (TRAV27, TRAJ35)
CAGADFWNVLHC

SEQ ID NO: 533476 - protein, 16 aa, Homo sapiens
  CDR3 for beta chain variable domain of TCR clone 266738 (TRBV12-4, TRBJ2-3)
CASSFPSNTNTDTQYF

SEQ ID NO: 533477 - protein, 18 aa, Homo sapiens
  CDR3 for alpha chain variable domain of TCR clone 266739 (TRAV13-1, TRAJ52)
CAAKNPNAGGTSYGKLTF

SEQ ID NO: 533478 - protein, 13 aa, Homo sapiens
  CDR3 for beta chain variable domain of TCR clone 266739 (TRBV19, TRBJ2-5)
CASSIPYGETQYF

SEQ ID NO: 533479 - protein, 17 aa, Homo sapiens
  CDR3 for alpha chain variable domain of TCR clone 266740 (TRAV38-2/DV8, TRAJ23)
CALSRKLIFGQGTELSV

SEQ ID NO: 533480 - protein, 14 aa, Homo sapiens
  CDR3 for beta chain variable domain of TCR clone 266740 (TRBV4-2, TRBJ2-1)
CASGLDRAYNEQFF

SEQ ID NO: 533481 - protein, 14 aa, Homo sapiens
  CDR3 for alpha chain variable domain of TCR clone 266741 (TRAV8-3, TRAJ37)
CAVGPYDNTGKLIF

SEQ ID NO: 533482 - protein, 13 aa, Homo sapiens
  CDR3 for beta chain variable domain of TCR clone 266741 (TRBV11-3, TRBJ1-1)
CASSLALGTEAFF

SEQ ID NO: 533483 - protein, 14 aa, Homo sapiens
  CDR3 for alpha chain variable domain of TCR clone 266742 (TRAV1-2, TRAJ16)
CAVSRFSDGQKLLF

SEQ ID NO: 533484 - protein, 12 aa, Homo sapiens
  CDR3 for beta chain variable domain of TCR clone 266742 (TRBV7-8, TRBJ2-7)
CASSLGDREQYF

SEQ ID NO: 533485 - protein, 17 aa, Homo sapiens
  CDR3 for alpha chain variable domain of TCR clone 266743 (TRAV3, TRAJ12)
CAVRDGGRMDSSYKFIF

SEQ ID NO: 533486 - protein, 14 aa, Homo sapiens
  CDR3 for beta chain variable domain of TCR clone 266743 (TRBV7-9, TRBJ1-2)
CASSRQGANYGYTF

SEQ ID NO: 533487 - protein, 18 aa, Homo sapiens
  CDR3 for alpha chain variable domain of TCR clone 266744 (TRAV8-6, TRAJ52)
CAVSRVGAGGTSYGKLTF

SEQ ID NO: 533488 - protein, 14 aa, Homo sapiens
  CDR3 for beta chain variable domain of TCR clone 266744 (TRBV7-2, TRBJ1-4)
CASSHSNTNEKLFF

SEQ ID NO: 533489 - protein, 16 aa, Homo sapiens
  CDR3 for alpha chain variable domain of TCR clone 266745 (TRAV14/DV4, TRAJ53)
CAMREGGGGSNYKLTF

SEQ ID NO: 533490 - protein, 16 aa, Homo sapiens
  CDR3 for beta chain variable domain of TCR clone 266745 (TRBV12-5, TRBJ2-5)
CASGPRTSGKQETQYF

SEQ ID NO: 533491 - protein, 15 aa, Homo sapiens
  CDR3 for alpha chain variable domain of TCR clone 266746 (TRAV8-2, TRAJ40)
CVVLGTTSGTYKYIF

SEQ ID NO: 533492 - protein, 16 aa, Homo sapiens
  CDR3 for beta chain variable domain of TCR clone 266746 (TRBV4-3, TRBJ2-1)
CASSPALDRGVNEQFF

SEQ ID NO: 533493 - protein, 14 aa, Homo sapiens
  CDR3 for alpha chain variable domain of TCR clone 266747 (TRAV38-2/DV8, TRAJ31)
CAYRSDNNNARLMF

SEQ ID NO: 533494 - protein, 13 aa, Homo sapiens
  CDR3 for beta chain variable domain of TCR clone 266747 (TRBV28, TRBJ1-1)
CASSKQGWTESFF

SEQ ID NO: 533495 - protein, 14 aa, Homo sapiens
  CDR3 for alpha chain variable domain of TCR clone 266748 (TRAV27, TRAJ45)
CAGAQEEVLTDSPL

SEQ ID NO: 533496 - protein, 17 aa, Homo sapiens
  CDR3 for beta chain variable domain of TCR clone 266748 (TRBV11-2, TRBJ2-1)
CDSSLYPPGVEYNEQFF

SEQ ID NO: 533497 - protein, 14 aa, Homo sapiens
  CDR3 for alpha chain variable domain of TCR clone 266749 (TRAV38-2/DV8, TRAJ54)
CAYRRIQGAQKLVL

SEQ ID NO: 533498 - protein, 15 aa, Homo sapiens
  CDR3 for beta chain variable domain of TCR clone 266749 (TRBV6-5, TRBJ2-5)
CASREASGGIETQYF

SEQ ID NO: 533499 - protein, 14 aa, Homo sapiens
  CDR3 for alpha chain variable domain of TCR clone 266750 (TRAV35, TRAJ50)
CAGHRKTSYDKVIF

SEQ ID NO: 533500 - protein, 15 aa, Homo sapiens
  CDR3 for beta chain variable domain of TCR clone 266750 (TRBV11-2, TRBJ2-1)
CASSLGTSGLNEQFF

SEQ ID NO: 533501 - protein, 12 aa, Homo sapiens
  CDR3 for alpha chain variable domain of TCR clone 266751 (TRAV20, TRAJ56)
CAVTGANSKLTF

SEQ ID NO: 533502 - protein, 13 aa, Homo sapiens
  CDR3 for beta chain variable domain of TCR clone 266751 (TRBV20-1, TRBJ2-5)
QCPGTCYQETQYS

SEQ ID NO: 533503 - protein, 15 aa, Homo sapiens
  CDR3 for alpha chain variable domain of TCR clone 266752 (TRAV23/DV6, TRAJ18)
CAARYRGSTLGRLYF

SEQ ID NO: 533504 - protein, 16 aa, Homo sapiens
  CDR3 for beta chain variable domain of TCR clone 266752 (TRBV20-1, TRBJ1-2)
CSASMGQGVANYVYTF

SEQ ID NO: 533505 - protein, 14 aa, Homo sapiens
  CDR3 for alpha chain variable domain of TCR clone 266753 (TRAV12-2, TRAJ13)
CAVKKTGGYQKVTF

SEQ ID NO: 533506 - protein, 14 aa, Homo sapiens
  CDR3 for beta chain variable domain of TCR clone 266753 (TRBV11-2, TRBJ1-5)
CASSLDRGRQPQHF

SEQ ID NO: 533507 - protein, 16 aa, Homo sapiens
  CDR3 for alpha chain variable domain of TCR clone 266754 (TRAV20, TRAJ22)
CAVQASSAGSARQLTF

SEQ ID NO: 533508 - protein, 13 aa, Homo sapiens
  CDR3 for beta chain variable domain of TCR clone 266754 (TRBV11-2, TRBJ2-7)
CASSGTRPYEQYF

SEQ ID NO: 533509 - protein, 13 aa, Homo sapiens
  CDR3 for alpha chain variable domain of TCR clone 266755 (TRAV21, TRAJ27)
CAARPGNAGKSTF

SEQ ID NO: 533510 - protein, 13 aa, Homo sapiens
  CDR3 for beta chain variable domain of TCR clone 266755 (TRBV20-1, TRBJ1-1)
CSARGGGNTEAFF

SEQ ID NO: 533511 - protein, 14 aa, Homo sapiens
  CDR3 for alpha chain variable domain of TCR clone 266756 (TRAV26-1, TRAJ38)
CIADNAGNNRKVIW

SEQ ID NO: 533512 - protein, 13 aa, Homo sapiens
  CDR3 for beta chain variable domain of TCR clone 266756 (TRBV7-7, TRBJ2-3)
CASSLSRADTQYF

SEQ ID NO: 533513 - protein, 14 aa, Homo sapiens
  CDR3 for alpha chain variable domain of TCR clone 266757 (TRAV26-2, TRAJ38)
CILYNAGTNRKLIW

SEQ ID NO: 533514 - protein, 13 aa, Homo sapiens
  CDR3 for beta chain variable domain of TCR clone 266757 (TRBV6-6, TRBJ2-3)
CASSQGGRDTQYF

SEQ ID NO: 533515 - protein, 13 aa, Homo sapiens
  CDR3 for alpha chain variable domain of TCR clone 266758 (TRAV17, TRAJ9)
CATFLTGGFKTIF

SEQ ID NO: 533516 - protein, 16 aa, Homo sapiens
  CDR3 for beta chain variable domain of TCR clone 266758 (TRBV5-7, TRBJ1-4)
CASSPAGGLKTEKLFF

SEQ ID NO: 533517 - protein, 13 aa, Homo sapiens
  CDR3 for alpha chain variable domain of TCR clone 266759 (TRAV12-3, TRAJ10)
CAVGTGGGNKFTF

SEQ ID NO: 533518 - protein, 13 aa, Homo sapiens
  CDR3 for beta chain variable domain of TCR clone 266759 (TRBV11-3, TRBJ2-3)
CASSFTGPDTQYF

SEQ ID NO: 533519 - protein, 19 aa, Homo sapiens
  CDR3 for alpha chain variable domain of TCR clone 266760 (TRAV3, TRAJ6)
CAVRDGPGQEEATYLHLEE

SEQ ID NO: 533520 - protein, 18 aa, Homo sapiens
  CDR3 for beta chain variable domain of TCR clone 266760 (TRBV7-9, TRBJ2-7)
CASSLTTSGSRTWYEQYF

SEQ ID NO: 533521 - protein, 15 aa, Homo sapiens
  CDR3 for alpha chain variable domain of TCR clone 266761 (TRAV17, TRAJ35)
CATDFVIGFGNVLHC

SEQ ID NO: 533522 - protein, 15 aa, Homo sapiens
  CDR3 for beta chain variable domain of TCR clone 266761 (TRBV7-9, TRBJ2-7)
CASSLALAEAYEQYF

SEQ ID NO: 533523 - protein, 15 aa, Homo sapiens
  CDR3 for alpha chain variable domain of TCR clone 266762 (TRAV27, TRAJ53)
CRAINSGGSDYKLAF

SEQ ID NO: 533524 - protein, 14 aa, Homo sapiens
  CDR3 for beta chain variable domain of TCR clone 266762 (TRBV7-3, TRBJ2-1)
CASSLAGGTNEQFF

SEQ ID NO: 533525 - protein, 13 aa, Homo sapiens
  CDR3 for alpha chain variable domain of TCR clone 266763 (TRAV36/DV7, TRAJ33)
CAVDMGSNYQLIW

SEQ ID NO: 533526 - protein, 16 aa, Homo sapiens
  CDR3 for beta chain variable domain of TCR clone 266763 (TRBV15, TRBJ2-3)
CATRLSGGRAPDTQYF

SEQ ID NO: 533527 - protein, 12 aa, Homo sapiens
  CDR3 for alpha chain variable domain of TCR clone 266764 (TRAV26-1, TRAJ48)
CIAVFGNEKLTF

SEQ ID NO: 533528 - protein, 18 aa, Homo sapiens
  CDR3 for beta chain variable domain of TCR clone 266764 (TRBV7-2, TRBJ2-3)
CASSVETSRGRKADTQYF

SEQ ID NO: 533529 - protein, 18 aa, Homo sapiens
  CDR3 for alpha chain variable domain of TCR clone 266765 (TRAV13-1, TRAJ52)
CAAKNPNAGGTSYGKLTF

SEQ ID NO: 533530 - protein, 17 aa, Homo sapiens
  CDR3 for beta chain variable domain of TCR clone 266765 (TRBV20-1, TRBJ2-7)
CSARVQPRTSTSSTSGR

SEQ ID NO: 533531 - protein, 11 aa, Homo sapiens
  CDR3 for alpha chain variable domain of TCR clone 266766 (TRAV3, TRAJ21)
CAVGNFNEFYF

SEQ ID NO: 533532 - protein, 16 aa, Homo sapiens
  CDR3 for beta chain variable domain of TCR clone 266766 (TRBV19, TRBJ2-1)
CASSKAGPSSYNEKFF

SEQ ID NO: 533533 - protein, 15 aa, Homo sapiens
  CDR3 for alpha chain variable domain of TCR clone 266767 (TRAV3, TRAJ5)
CAVRDLDTCRRALTF

SEQ ID NO: 533534 - protein, 15 aa, Homo sapiens
  CDR3 for beta chain variable domain of TCR clone 266767 (TRBV20-1, TRBJ2-1)
CSARSPGGPGNEQFF

SEQ ID NO: 533535 - protein, 15 aa, Homo sapiens
  CDR3 for alpha chain variable domain of TCR clone 266768 (TRAV8-3, TRAJ27)
CAVGPSKTNAGKSTF

SEQ ID NO: 533536 - protein, 18 aa, Homo sapiens
  CDR3 for beta chain variable domain of TCR clone 266768 (TRBV12-4, TRBJ2-2)
CASSLVAGTRGRTGELFF

SEQ ID NO: 533537 - protein, 15 aa, Homo sapiens
  CDR3 for alpha chain variable domain of TCR clone 266769 (TRAV3, TRAJ22)
CAVRDRGGSARQLTF

SEQ ID NO: 533538 - protein, 13 aa, Homo sapiens
  CDR3 for beta chain variable domain of TCR clone 266769 (TRBV11-2, TRBJ2-1)
CASSLGLAGGRFF

SEQ ID NO: 533539 - protein, 13 aa, Homo sapiens
  CDR3 for alpha chain variable domain of TCR clone 266770 (TRAV8-3, TRAJ28)
CAVGAVGSYQLTF

SEQ ID NO: 533540 - protein, 15 aa, Homo sapiens
  CDR3 for beta chain variable domain of TCR clone 266770 (TRBV7-9, TRBJ1-5)
FASSQGHPPNQPQHF

SEQ ID NO: 533541 - protein, 12 aa, Homo sapiens
  CDR3 for alpha chain variable domain of TCR clone 266771 (TRAV25, TRAJ38)
CAGTGNNRKLIW

SEQ ID NO: 533542 - protein, 14 aa, Homo sapiens
  CDR3 for beta chain variable domain of TCR clone 266771 (TRBV7-9, TRBJ2-2)
CASSLVQDTGELFF

SEQ ID NO: 533543 - protein, 12 aa, Homo sapiens
  CDR3 for alpha chain variable domain of TCR clone 266772 (TRAV8-3, TRAJ20)
CAVDFNDYKLSF

SEQ ID NO: 533544 - protein, 17 aa, Homo sapiens
  CDR3 for beta chain variable domain of TCR clone 266772 (TRBV7-9, TRBJ2-3)
CASSPTVAGDLTDTQYF

SEQ ID NO: 533545 - protein, 13 aa, Homo sapiens
  CDR3 for alpha chain variable domain of TCR clone 266773 (TRAV21, TRAJ57)
CAVTQGGSEKLVF

SEQ ID NO: 533546 - protein, 16 aa, Homo sapiens
  CDR3 for beta chain variable domain of TCR clone 266773 (TRBV29-1, TRBJ2-7)
CSVEDAEDGSAYEQYF

SEQ ID NO: 533547 - protein, 14 aa, Homo sapiens
  CDR3 for alpha chain variable domain of TCR clone 266774 (TRAV27, TRAJ12)
CAGARMDSSYKLIF

SEQ ID NO: 533548 - protein, 18 aa, Homo sapiens
  CDR3 for beta chain variable domain of TCR clone 266774 (TRBV10-3, TRBJ2-7)
CAISESGRPSGGRVEHYF

SEQ ID NO: 533549 - protein, 18 aa, Homo sapiens
  CDR3 for alpha chain variable domain of TCR clone 266775 (TRAV21, TRAJ52)
CAVRPSPAGGTSYGKLTF

SEQ ID NO: 533550 - protein, 15 aa, Homo sapiens
  CDR3 for beta chain variable domain of TCR clone 266775 (TRBV3-1, TRBJ2-2)
CASSQDWTRAGELFF

SEQ ID NO: 533551 - protein, 14 aa, Homo sapiens
  CDR3 for alpha chain variable domain of TCR clone 266776 (TRAV29/DV5, TRAJ4)
CAATVLGGYNKLFF

SEQ ID NO: 533552 - protein, 17 aa, Homo sapiens
  CDR3 for beta chain variable domain of TCR clone 266776 (TRBV11-2, TRBJ2-1)
CASSLYPPGVEYNEQFF

SEQ ID NO: 533553 - protein, 13 aa, Homo sapiens
  CDR3 for alpha chain variable domain of TCR clone 266777 (TRAV3, TRAJ27)
CAVRPLGAGKSTF

SEQ ID NO: 533554 - protein, 16 aa, Homo sapiens
  CDR3 for beta chain variable domain of TCR clone 266777 (TRBV7-2, TRBJ1-2)
CASSSNQDRRGHGYTF

SEQ ID NO: 533555 - protein, 10 aa, Homo sapiens
  CDR3 for alpha chain variable domain of TCR clone 266778 (TRAV12-3, TRAJ49)
CAMNDDQFYF

SEQ ID NO: 533556 - protein, 13 aa, Homo sapiens
  CDR3 for beta chain variable domain of TCR clone 266778 (TRBV6-3, TRBJ2-3)
CASEGELKDTQYF

SEQ ID NO: 533557 - protein, 12 aa, Homo sapiens
  CDR3 for alpha chain variable domain of TCR clone 266779 (TRAV16, TRAJ26)
CASKDGGQNFVF

SEQ ID NO: 533558 - protein, 13 aa, Homo sapiens
  CDR3 for beta chain variable domain of TCR clone 266779 (TRBV25-1, TRBJ1-1)
CASSDRGWAEAFF

SEQ ID NO: 533559 - protein, 16 aa, Homo sapiens
  CDR3 for alpha chain variable domain of TCR clone 266780 (TRAV26-1, TRAJ48)
CIVRVGANFGNEKLTF

SEQ ID NO: 533560 - protein, 12 aa, Homo sapiens
  CDR3 for beta chain variable domain of TCR clone 266780 (TRBV11-2, TRBJ2-1)
CASSPGNNEQFF

SEQ ID NO: 533561 - protein, 15 aa, Homo sapiens
  CDR3 for alpha chain variable domain of TCR clone 266781 (TRAV38-1, TRAJ37)
CGFIFGSGNTGKLIF

SEQ ID NO: 533562 - protein, 12 aa, Homo sapiens
  CDR3 for beta chain variable domain of TCR clone 266781 (TRBV7-9, TRBJ2-7)
CASSLEGYEQYF

SEQ ID NO: 533563 - protein, 14 aa, Homo sapiens
  CDR3 for alpha chain variable domain of TCR clone 266782 (TRAV20, TRAJ20)
SAVRRGYNDYKLSF

SEQ ID NO: 533564 - protein, 13 aa, Homo sapiens
  CDR3 for beta chain variable domain of TCR clone 266782 (TRBV19, TRBJ2-5)
CASRETAPETQYF

SEQ ID NO: 533565 - protein, 15 aa, Homo sapiens
  CDR3 for alpha chain variable domain of TCR clone 266783 (TRAV27, TRAJ38)
CAARRNAGNNRKPIW

SEQ ID NO: 533566 - protein, 13 aa, Homo sapiens
  CDR3 for beta chain variable domain of TCR clone 266783 (TRBV12-5, TRBJ2-3)
CASGDRQSDTQCF

SEQ ID NO: 533567 - protein, 13 aa, Homo sapiens
  CDR3 for alpha chain variable domain of TCR clone 266784 (TRAV12-2, TRAJ52)
CAVGGTSYGKLTF

SEQ ID NO: 533568 - protein, 13 aa, Homo sapiens
  CDR3 for beta chain variable domain of TCR clone 266784 (TRBV3-1, TRBJ1-1)
CASSQLQGAEAFF

SEQ ID NO: 533569 - protein, 12 aa, Homo sapiens
  CDR3 for alpha chain variable domain of TCR clone 266785 (TRAV1-1, TRAJ43)
CAPRVSSNDMRF

SEQ ID NO: 533570 - protein, 18 aa, Homo sapiens
  CDR3 for beta chain variable domain of TCR clone 266785 (TRBV12-4, TRBJ2-2)
CASSLVAGTRGRTGELFF

SEQ ID NO: 533571 - protein, 12 aa, Homo sapiens
  CDR3 for alpha chain variable domain of TCR clone 266786 (TRAV12-2, TRAJ52)
IGGGTSYGKLPF

SEQ ID NO: 533572 - protein, 13 aa, Homo sapiens
  CDR3 for beta chain variable domain of TCR clone 266786 (TRBV15, TRBJ2-7)
CATSTTGHYEQYF

SEQ ID NO: 533573 - protein, 12 aa, Homo sapiens
  CDR3 for alpha chain variable domain of TCR clone 266787 (TRAV8-3, TRAJ6)
CAVARGSYIPTF

SEQ ID NO: 533574 - protein, 13 aa, Homo sapiens
  CDR3 for beta chain variable domain of TCR clone 266787 (TRBV7-8, TRBJ2-7)
CASSLTGGREQYF

SEQ ID NO: 533575 - protein, 11 aa, Homo sapiens
  CDR3 for alpha chain variable domain of TCR clone 266788 (TRAV16, TRAJ26)
CALTRWSEFCL

SEQ ID NO: 533576 - protein, 16 aa, Homo sapiens
  CDR3 for beta chain variable domain of TCR clone 266788 (TRBV9, TRBJ2-1)
CASSVGGGGNYNKQFF

SEQ ID NO: 533577 - protein, 16 aa, Homo sapiens
  CDR3 for alpha chain variable domain of TCR clone 266789 (TRAV30, TRAJ24)
CSTEIVGADSWGKFQF

SEQ ID NO: 533578 - protein, 14 aa, Homo sapiens
  CDR3 for beta chain variable domain of TCR clone 266789 (TRBV12-5, TRBJ2-5)
CASGSRTHQETQYF

SEQ ID NO: 533579 - protein, 17 aa, Homo sapiens
  CDR3 for alpha chain variable domain of TCR clone 266790 (TRAV23/DV6, TRAJ28)
CAALLAYSGAGSYQPTF

SEQ ID NO: 533580 - protein, 15 aa, Homo sapiens
  CDR3 for beta chain variable domain of TCR clone 266790 (TRBV7-2, TRBJ2-1)
CASSLVAGRYNEQFY

SEQ ID NO: 533581 - protein, 12 aa, Homo sapiens
  CDR3 for alpha chain variable domain of TCR clone 266791 (TRAV3, TRAJ43)
CAVRDPINDMRF

SEQ ID NO: 533582 - protein, 14 aa, Homo sapiens
  CDR3 for beta chain variable domain of TCR clone 266791 (TRBV5-1, TRBJ2-3)
CASSLFGPTDTQYF

SEQ ID NO: 533583 - protein, 17 aa, Homo sapiens
  CDR3 for alpha chain variable domain of TCR clone 266792 (TRAV3, TRAJ6)
CAVRDCPRAGGSYIPTF

SEQ ID NO: 533584 - protein, 16 aa, Homo sapiens
  CDR3 for beta chain variable domain of TCR clone 266792 (TRBV7-8, TRBJ2-3)
CASSAEGQRETDTQYF

SEQ ID NO: 533585 - protein, 11 aa, Homo sapiens
  CDR3 for alpha chain variable domain of TCR clone 266793 (TRAV3, TRAJ21)
CAVGNFNNFYF

SEQ ID NO: 533586 - protein, 16 aa, Homo sapiens
  CDR3 for beta chain variable domain of TCR clone 266793 (TRBV19, TRBJ2-1)
CARSKAGPSSYNEQFF

SEQ ID NO: 533587 - protein, 10 aa, Homo sapiens
  CDR3 for alpha chain variable domain of TCR clone 266794 (TRAV26-1, TRAJ22)
CIVSLNFFWF

SEQ ID NO: 533588 - protein, 15 aa, Homo sapiens
  CDR3 for beta chain variable domain of TCR clone 266794 (TRBV4-2, TRBJ1-2)
CARSQRTGGRDGYTF

SEQ ID NO: 533589 - protein, 14 aa, Homo sapiens
  CDR3 for alpha chain variable domain of TCR clone 266795 (TRAV21, TRAJ15)
CAVSLNQAGTALIF

SEQ ID NO: 533590 - protein, 11 aa, Homo sapiens
  CDR3 for beta chain variable domain of TCR clone 266795 (TRBV20-1, TRBJ2-7)
CSARTSYEHYF

SEQ ID NO: 533591 - protein, 16 aa, Homo sapiens
  CDR3 for alpha chain variable domain of TCR clone 266796 (TRAV30, TRAJ24)
CGTEIVDADSRGKFKF

SEQ ID NO: 533592 - protein, 14 aa, Homo sapiens
  CDR3 for beta chain variable domain of TCR clone 266796 (TRBV12-5, TRBJ2-5)
CASGSRTHQETQYF

SEQ ID NO: 533593 - protein, 14 aa, Homo sapiens
  CDR3 for alpha chain variable domain of TCR clone 266797 (TRAV12-2, TRAJ13)
CAVKKTGGYQKVTF

SEQ ID NO: 533594 - protein, 16 aa, Homo sapiens
  CDR3 for beta chain variable domain of TCR clone 266797 (TRBV20-1, TRBJ1-4)
GSAPGQGLLTNEKLFF

SEQ ID NO: 533595 - protein, 15 aa, Homo sapiens
  CDR3 for alpha chain variable domain of TCR clone 266798 (TRAV13-1, TRAJ18)
CAASPTGSTLGRLYF

SEQ ID NO: 533596 - protein, 13 aa, Homo sapiens
  CDR3 for beta chain variable domain of TCR clone 266798 (TRBV10-3, TRBJ2-7)
CASKLAVNYEQYF

SEQ ID NO: 533597 - protein, 14 aa, Homo sapiens
  CDR3 for alpha chain variable domain of TCR clone 266799 (TRAV6, TRAJ37)
CALGSQGNTGKLIF

SEQ ID NO: 533598 - protein, 15 aa, Homo sapiens
  CDR3 for beta chain variable domain of TCR clone 266799 (TRBV2, TRBJ2-1)
CASSEEREGDNAQFF

SEQ ID NO: 533599 - protein, 14 aa, Homo sapiens
  CDR3 for alpha chain variable domain of TCR clone 266800 (TRAV26-1, TRAJ38)
CIADNAGNNRKLIW

SEQ ID NO: 533600 - protein, 14 aa, Homo sapiens
  CDR3 for beta chain variable domain of TCR clone 266800 (TRBV4-1, TRBJ2-2)
CASSQAVNTGELFL

SEQ ID NO: 533601 - protein, 15 aa, Homo sapiens
  CDR3 for alpha chain variable domain of TCR clone 266801 (TRAV1-2, TRAJ16)
CAVRARFSDGQKLLF

SEQ ID NO: 533602 - protein, 12 aa, Homo sapiens
  CDR3 for beta chain variable domain of TCR clone 266801 (TRBV11-3, TRBJ2-3)
AGAPAGGGTQYF

SEQ ID NO: 533603 - protein, 20 aa, Homo sapiens
  CDR3 for alpha chain variable domain of TCR clone 266802 (TRAV12-3, TRAJ41)
SLFIRDSQPSDSATPEALNF

SEQ ID NO: 533604 - protein, 13 aa, Homo sapiens
  CDR3 for beta chain variable domain of TCR clone 266802 (TRBV10-3, TRBJ2-3)
CAIRDTGAETQYF

SEQ ID NO: 533605 - protein, 11 aa, Homo sapiens
  CDR3 for alpha chain variable domain of TCR clone 266803 (TRAV17, TRAJ31)
CATDRTARHMF

SEQ ID NO: 533606 - protein, 14 aa, Homo sapiens
  CDR3 for beta chain variable domain of TCR clone 266803 (TRBV4-2, TRBJ2-3)
CASSQERGTDTQYF

SEQ ID NO: 533607 - protein, 13 aa, Homo sapiens
  CDR3 for alpha chain variable domain of TCR clone 266804 (TRAV3, TRAJ9)
CCEGNTGGFKTIF

SEQ ID NO: 533608 - protein, 16 aa, Homo sapiens
  CDR3 for beta chain variable domain of TCR clone 266804 (TRBV5-4, TRBJ2-1)
CASSLVGSGQDNEQFF

SEQ ID NO: 533609 - protein, 13 aa, Homo sapiens
  CDR3 for alpha chain variable domain of TCR clone 266805 (TRAV3, TRAJ27)
CAVRPLGGGKSTF

SEQ ID NO: 533610 - protein, 13 aa, Homo sapiens
  CDR3 for beta chain variable domain of TCR clone 266805 (TRBV7-9, TRBJ2-3)
CASSPGSTDTQYF

SEQ ID NO: 533611 - protein, 10 aa, Homo sapiens
  CDR3 for alpha chain variable domain of TCR clone 266806 (TRAV8-4, TRAJ43)
CAVSADDMRF

SEQ ID NO: 533612 - protein, 16 aa, Homo sapiens
  CDR3 for beta chain variable domain of TCR clone 266806 (TRBV28, TRBJ2-7)
CASSFPDRRLTYEQYF

SEQ ID NO: 533613 - protein, 15 aa, Homo sapiens
  CDR3 for alpha chain variable domain of TCR clone 266807 (TRAV27, TRAJ24)
CAGGTSADSWGKLQF

SEQ ID NO: 533614 - protein, 15 aa, Homo sapiens
  CDR3 for beta chain variable domain of TCR clone 266807 (TRBV27, TRBJ2-1)
CASSNGGGSSNEQFF

SEQ ID NO: 533615 - protein, 15 aa, Homo sapiens
  CDR3 for alpha chain variable domain of TCR clone 266808 (TRAV8-3, TRAJ7)
CAVGSISYGNNRLAF

SEQ ID NO: 533616 - protein, 13 aa, Homo sapiens
  CDR3 for beta chain variable domain of TCR clone 266808 (TRBV15, TRBJ1-6)
CATSGGLNSPLHF

SEQ ID NO: 533617 - protein, 14 aa, Homo sapiens
  CDR3 for alpha chain variable domain of TCR clone 266809 (TRAV23/DV6, TRAJ37)
CAASTSSNTGKLIF

SEQ ID NO: 533618 - protein, 14 aa, Homo sapiens
  CDR3 for beta chain variable domain of TCR clone 266809 (TRBV4-2, TRBJ2-1)
CASGLDRAYNEQFF

SEQ ID NO: 533619 - protein, 11 aa, Homo sapiens
  CDR3 for alpha chain variable domain of TCR clone 266810 (TRAV3, TRAJ21)
CALGNFNKFYF

SEQ ID NO: 533620 - protein, 15 aa, Homo sapiens
  CDR3 for beta chain variable domain of TCR clone 266810 (TRBV4-1, TRBJ2-7)
CASSQQGQGFDEQYF

SEQ ID NO: 533621 - protein, 15 aa, Homo sapiens
  CDR3 for alpha chain variable domain of TCR clone 266811 (TRAV21, TRAJ53)
CATLNRGGSNYKLTF

SEQ ID NO: 533622 - protein, 16 aa, Homo sapiens
  CDR3 for beta chain variable domain of TCR clone 266811 (TRBV24-1, TRBJ2-3)
CVTSDPGTGATDTQYF

SEQ ID NO: 533623 - protein, 12 aa, Homo sapiens
  CDR3 for alpha chain variable domain of TCR clone 266812 (TRAV13-1, TRAJ27)
CAAHTNAGNSTF

SEQ ID NO: 533624 - protein, 15 aa, Homo sapiens
  CDR3 for beta chain variable domain of TCR clone 266812 (TRBV7-9, TRBJ1-6)
CASSSPGRGNSPLHF

SEQ ID NO: 533625 - protein, 14 aa, Homo sapiens
  CDR3 for alpha chain variable domain of TCR clone 266813 (TRAV12-2, TRAJ13)
CAVKKTGGYQKVTF

SEQ ID NO: 533626 - protein, 13 aa, Homo sapiens
  CDR3 for beta chain variable domain of TCR clone 266813 (TRBV12-4, TRBJ2-7)
CASSFVPTAEQYF

SEQ ID NO: 533627 - protein, 14 aa, Homo sapiens
  CDR3 for alpha chain variable domain of TCR clone 266814 (TRAV12-3, TRAJ47)
CAMSVMEYGNKLVF

SEQ ID NO: 533628 - protein, 14 aa, Homo sapiens
  CDR3 for beta chain variable domain of TCR clone 266814 (TRBV19, TRBJ2-1)
CASPTFVLSGEQFF

SEQ ID NO: 533629 - protein, 11 aa, Homo sapiens
  CDR3 for alpha chain variable domain of TCR clone 266815 (TRAV3, TRAJ21)
GAVSNFNKFYF

SEQ ID NO: 533630 - protein, 16 aa, Homo sapiens
  CDR3 for beta chain variable domain of TCR clone 266815 (TRBV19, TRBJ2-1)
CASSKAGPSSYNEQFF

SEQ ID NO: 533631 - protein, 14 aa, Homo sapiens
  CDR3 for alpha chain variable domain of TCR clone 266816 (TRAV1-2, TRAJ8)
CAVREDTGFQKLVF

SEQ ID NO: 533632 - protein, 15 aa, Homo sapiens
  CDR3 for beta chain variable domain of TCR clone 266816 (TRBV11-2, TRBJ1-3)
CASSLDGTVGNTIYF

SEQ ID NO: 533633 - protein, 16 aa, Homo sapiens
  CDR3 for alpha chain variable domain of TCR clone 266817 (TRAV22, TRAJ45)
CAGERGKRGGADGLTF

SEQ ID NO: 533634 - protein, 11 aa, Homo sapiens
  CDR3 for beta chain variable domain of TCR clone 266817 (TRBV29-1, TRBJ2-5)
CSEDRTGTQYF

SEQ ID NO: 533635 - protein, 14 aa, Homo sapiens
  CDR3 for alpha chain variable domain of TCR clone 266818 (TRAV1-2, TRAJ16)
RAVNRFSDGQKLLF

SEQ ID NO: 533636 - protein, 14 aa, Homo sapiens
  CDR3 for beta chain variable domain of TCR clone 266818 (TRBV7-2, TRBJ2-5)
CASSPLGQSETQYF

SEQ ID NO: 533637 - protein, 18 aa, Homo sapiens
  CDR3 for alpha chain variable domain of TCR clone 266819 (TRAV12-3, TRAJ52)
CAMSRINAGGTSYGKLTF

SEQ ID NO: 533638 - protein, 17 aa, Homo sapiens
  CDR3 for beta chain variable domain of TCR clone 266819 (TRBV7-3, TRBJ2-3)
CASSLMKRMRGADTQYF

SEQ ID NO: 533639 - protein, 11 aa, Homo sapiens
  CDR3 for alpha chain variable domain of TCR clone 266820 (TRAV17, TRAJ9)
CATTGGFKTIF

SEQ ID NO: 533640 - protein, 14 aa, Homo sapiens
  CDR3 for beta chain variable domain of TCR clone 266820 (TRBV7-9, TRBJ2-2)
CASIGLADTGELFF

SEQ ID NO: 533641 - protein, 17 aa, Homo sapiens
  CDR3 for alpha chain variable domain of TCR clone 266821 (TRAV3, TRAJ42)
CAVRDMDYGGSQGNLIF

SEQ ID NO: 533642 - protein, 15 aa, Homo sapiens
  CDR3 for beta chain variable domain of TCR clone 266821 (TRBV7-2, TRBJ2-7)
CASSWGQGAIYEQYF

SEQ ID NO: 533643 - protein, 19 aa, Homo sapiens
  CDR3 for alpha chain variable domain of TCR clone 266822 (TRAV16, )
CALSGDIQNPDPAVYQLRD

SEQ ID NO: 533644 - protein, 15 aa, Homo sapiens
  CDR3 for beta chain variable domain of TCR clone 266822 (TRBV18, TRBJ2-1)
CASLPDRGRDNEQFF

SEQ ID NO: 533645 - protein, 15 aa, Homo sapiens
  CDR3 for alpha chain variable domain of TCR clone 266823 (TRAV13-1, TRAJ44)
CAASRRGGTASKLPF

SEQ ID NO: 533646 - protein, 12 aa, Homo sapiens
  CDR3 for beta chain variable domain of TCR clone 266823 (TRBV11-2, TRBJ2-2)
CASSLGGGELFF

SEQ ID NO: 533647 - protein, 16 aa, Homo sapiens
  CDR3 for alpha chain variable domain of TCR clone 266824 (TRAV12-1, TRAJ48)
CVVNMRDNFGNEKLTF

SEQ ID NO: 533648 - protein, 16 aa, Homo sapiens
  CDR3 for beta chain variable domain of TCR clone 266824 (TRBV7-6, TRBJ2-1)
CASSSVVAGTYNEQVF

SEQ ID NO: 533649 - protein, 21 aa, Homo sapiens
  CDR3 for alpha chain variable domain of TCR clone 266825 (TRAV12-1, TRAJ32)
SSVIQPPTSMNYGGAKNKLIF

SEQ ID NO: 533650 - protein, 15 aa, Homo sapiens
  CDR3 for beta chain variable domain of TCR clone 266825 (TRBV7-9, TRBJ2-2)
CASGPLDTFPGELFF

SEQ ID NO: 533651 - protein, 15 aa, Homo sapiens
  CDR3 for alpha chain variable domain of TCR clone 266826 (TRAV12-3, TRAJ6)
CAMSATTGGSYILTF

SEQ ID NO: 533652 - protein, 16 aa, Homo sapiens
  CDR3 for beta chain variable domain of TCR clone 266826 (TRBV20-1, TRBJ1-2)
CSASMGQGVADYGYTF

SEQ ID NO: 533653 - protein, 15 aa, Homo sapiens
  CDR3 for alpha chain variable domain of TCR clone 266827 (TRAV13-2, TRAJ10)
CAENRDTGGGNKLTF

SEQ ID NO: 533654 - protein, 16 aa, Homo sapiens
  CDR3 for beta chain variable domain of TCR clone 266827 (TRBV2, TRBJ1-3)
CASSRTGGSSGNTMYF

SEQ ID NO: 533655 - protein, 17 aa, Homo sapiens
  CDR3 for alpha chain variable domain of TCR clone 266828 (TRAV4, TRAJ13)
CLVGVQGSSGGYTKVTF

SEQ ID NO: 533656 - protein, 16 aa, Homo sapiens
  CDR3 for beta chain variable domain of TCR clone 266828 (TRBV28, TRBJ2-7)
CASSLFFETGGPEQYF

SEQ ID NO: 533657 - protein, 11 aa, Homo sapiens
  CDR3 for alpha chain variable domain of TCR clone 266829 (TRAV16, TRAJ49)
CALRSGNQFYF

SEQ ID NO: 533658 - protein, 16 aa, Homo sapiens
  CDR3 for beta chain variable domain of TCR clone 266829 (TRBV20-1, TRBJ1-5)
CSARDVGGGWIQPQHF

SEQ ID NO: 533659 - protein, 14 aa, Homo sapiens
  CDR3 for alpha chain variable domain of TCR clone 266830 (TRAV12-1, TRAJ45)
CVVNVGGGADGLTF

SEQ ID NO: 533660 - protein, 14 aa, Homo sapiens
  CDR3 for beta chain variable domain of TCR clone 266830 (TRBV29-1, TRBJ2-3)
CSVEPGTRTDQQYF

SEQ ID NO: 533661 - protein, 16 aa, Homo sapiens
  CDR3 for alpha chain variable domain of TCR clone 266831 (TRAV13-2, TRAJ45)
CAENRGSGGGADGLTF

SEQ ID NO: 533662 - protein, 14 aa, Homo sapiens
  CDR3 for beta chain variable domain of TCR clone 266831 (TRBV19, TRBJ2-1)
CASPTFVLSGEQFF

SEQ ID NO: 533663 - protein, 12 aa, Homo sapiens
  CDR3 for alpha chain variable domain of TCR clone 266832 (TRAV3, TRAJ21)
CAVQYNFNKFYF

SEQ ID NO: 533664 - protein, 14 aa, Homo sapiens
  CDR3 for beta chain variable domain of TCR clone 266832 (TRBV7-8, TRBJ2-3)
CASSVEAGTDTQYF

SEQ ID NO: 533665 - protein, 15 aa, Homo sapiens
  CDR3 for alpha chain variable domain of TCR clone 266833 (TRAV34, TRAJ38)
CGADFTPGNNRKLIW

SEQ ID NO: 533666 - protein, 14 aa, Homo sapiens
  CDR3 for beta chain variable domain of TCR clone 266833 (TRBV19, TRBJ1-2)
CASSLQGQAYGYTF

SEQ ID NO: 533667 - protein, 13 aa, Homo sapiens
  CDR3 for alpha chain variable domain of TCR clone 266834 (TRAV36/DV7, TRAJ54)
CAVDIQGAQKLVF

SEQ ID NO: 533668 - protein, 13 aa, Homo sapiens
  CDR3 for beta chain variable domain of TCR clone 266834 (TRBV19, TRBJ1-2)
CASSVPGQDGYTF

SEQ ID NO: 533669 - protein, 12 aa, Homo sapiens
  CDR3 for alpha chain variable domain of TCR clone 266835 (TRAV12-3, TRAJ17)
CAMTLTGNKLTF

SEQ ID NO: 533670 - protein, 17 aa, Homo sapiens
  CDR3 for beta chain variable domain of TCR clone 266835 (TRBV2, TRBJ1-5)
CASSVGTGMRGYQPQHF

SEQ ID NO: 533671 - protein, 15 aa, Homo sapiens
  CDR3 for alpha chain variable domain of TCR clone 266836 (TRAV2, TRAJ9)
CAVAALNTGGFNTIF

SEQ ID NO: 533672 - protein, 13 aa, Homo sapiens
  CDR3 for beta chain variable domain of TCR clone 266836 (TRBV3-1, TRBJ2-3)
CASSQGGGDKQYF

SEQ ID NO: 533673 - protein, 13 aa, Homo sapiens
  CDR3 for alpha chain variable domain of TCR clone 266837 (TRAV13-1, TRAJ9)
CASALTGGFKTIF

SEQ ID NO: 533674 - protein, 13 aa, Homo sapiens
  CDR3 for beta chain variable domain of TCR clone 266837 (TRBV20-1, TRBJ1-1)
CSAGTVGNTEAFF

SEQ ID NO: 533675 - protein, 14 aa, Homo sapiens
  CDR3 for alpha chain variable domain of TCR clone 266838 (TRAV38-2/DV8, TRAJ47)
CAYRTLEYGNKLVF

SEQ ID NO: 533676 - protein, 13 aa, Homo sapiens
  CDR3 for beta chain variable domain of TCR clone 266838 (TRBV12-4, TRBJ1-2)
CASSLRQGKGYTF

SEQ ID NO: 533677 - protein, 17 aa, Homo sapiens
  CDR3 for alpha chain variable domain of TCR clone 266839 (TRAV17, TRAJ7)
CATLGRLAFGQGNQVVV

SEQ ID NO: 533678 - protein, 13 aa, Homo sapiens
  CDR3 for beta chain variable domain of TCR clone 266839 (TRBV12-4, TRBJ2-7)
CASSLERVREQYF

SEQ ID NO: 533679 - protein, 14 aa, Homo sapiens
  CDR3 for alpha chain variable domain of TCR clone 266840 (TRAV20, TRAJ26)
CAVQAAIYGQNFVF

SEQ ID NO: 533680 - protein, 14 aa, Homo sapiens
  CDR3 for beta chain variable domain of TCR clone 266840 (TRBV27, TRBJ2-2)
CASSLGYTTGELFF

SEQ ID NO: 533681 - protein, 11 aa, Homo sapiens
  CDR3 for alpha chain variable domain of TCR clone 266841 (TRAV8-3, TRAJ6)
CAVAGGSYIHI

SEQ ID NO: 533682 - protein, 14 aa, Homo sapiens
  CDR3 for beta chain variable domain of TCR clone 266841 (TRBV27, TRBJ2-7)
CASATGTERREQYF

SEQ ID NO: 533683 - protein, 14 aa, Homo sapiens
  CDR3 for alpha chain variable domain of TCR clone 266842 (TRAV12-1, TRAJ26)
CVVKGSNYGQNFVF

SEQ ID NO: 533684 - protein, 13 aa, Homo sapiens
  CDR3 for beta chain variable domain of TCR clone 266842 (TRBV10-3, TRBJ2-7)
CASKLAVNYEQYF

SEQ ID NO: 533685 - protein, 14 aa, Homo sapiens
  CDR3 for alpha chain variable domain of TCR clone 266843 (TRAV1-1, TRAJ35)
CAVRSIGFGNVLHC

SEQ ID NO: 533686 - protein, 14 aa, Homo sapiens
  CDR3 for beta chain variable domain of TCR clone 266843 (TRBV5-6, TRBJ2-7)
CASSGGLSSYEQYF

SEQ ID NO: 533687 - protein, 12 aa, Homo sapiens
  CDR3 for alpha chain variable domain of TCR clone 266844 (TRAV13-1, TRAJ21)
CAVFFNFNKFYF

SEQ ID NO: 533688 - protein, 14 aa, Homo sapiens
  CDR3 for beta chain variable domain of TCR clone 266844 (TRBV4-1, TRBJ2-7)
CASRLTSGSYEQYF

SEQ ID NO: 533689 - protein, 15 aa, Homo sapiens
  CDR3 for alpha chain variable domain of TCR clone 266845 (TRAV3, TRAJ22)
CAVRDRGGSARQLTF

SEQ ID NO: 533690 - protein, 14 aa, Homo sapiens
  CDR3 for beta chain variable domain of TCR clone 266845 (TRBV25-1, TRBJ1-1)
CASTHLGGNTEAFF

SEQ ID NO: 533691 - protein, 22 aa, Homo sapiens
  CDR3 for alpha chain variable domain of TCR clone 266846 (TRAV8-2, TRAJ45)
HLTKPSAQMSDAAEYSADGLTF

SEQ ID NO: 533692 - protein, 13 aa, Homo sapiens
  CDR3 for beta chain variable domain of TCR clone 266846 (TRBV7-3, TRBJ2-1)
CASSPVAYNEQFF

SEQ ID NO: 533693 - protein, 13 aa, Homo sapiens
  CDR3 for alpha chain variable domain of TCR clone 266847 (TRAV21, TRAJ57)
CAVTQGGSEKLVF

SEQ ID NO: 533694 - protein, 15 aa, Homo sapiens
  CDR3 for beta chain variable domain of TCR clone 266847 (TRBV10-3, TRBJ2-4)
CAIGQGGEVGNIQYF

SEQ ID NO: 533695 - protein, 14 aa, Homo sapiens
  CDR3 for alpha chain variable domain of TCR clone 266848 (TRAV9-2, TRAJ39)
FALYIYNAGNMLTF

SEQ ID NO: 533696 - protein, 15 aa, Homo sapiens
  CDR3 for beta chain variable domain of TCR clone 266848 (TRBV28, TRBJ1-3)
CASSMGWASGNTIYF

SEQ ID NO: 533697 - protein, 13 aa, Homo sapiens
  CDR3 for alpha chain variable domain of TCR clone 266849 (TRAV27, TRAJ6)
CAGGTRGSYIPTF

SEQ ID NO: 533698 - protein, 14 aa, Homo sapiens
  CDR3 for beta chain variable domain of TCR clone 266849 (TRBV6-3, TRBJ1-1)
CASSSQRRDTEAFF

SEQ ID NO: 533699 - protein, 14 aa, Homo sapiens
  CDR3 for alpha chain variable domain of TCR clone 266850 (TRAV1-2, TRAJ16)
CAVNRFSDGQKLLF

SEQ ID NO: 533700 - protein, 19 aa, Homo sapiens
  CDR3 for beta chain variable domain of TCR clone 266850 (TRBV5-1, TRBJ2-3)
CASSLWLAGGITTTDTQYF

SEQ ID NO: 533701 - protein, 15 aa, Homo sapiens
  CDR3 for alpha chain variable domain of TCR clone 266851 (TRAV3, TRAJ5)
CAVRGLDTGRRALTF

SEQ ID NO: 533702 - protein, 13 aa, Homo sapiens
  CDR3 for beta chain variable domain of TCR clone 266851 (TRBV9, TRBJ2-7)
CASSASDSYEQYF

SEQ ID NO: 533703 - protein, 15 aa, Homo sapiens
  CDR3 for alpha chain variable domain of TCR clone 266852 (TRAV13-2, TRAJ16)
YAENDRFSDGQKLLF

SEQ ID NO: 533704 - protein, 17 aa, Homo sapiens
  CDR3 for beta chain variable domain of TCR clone 266852 (TRBV20-1, TRBJ2-1)
CSAPPRLAGTRYNEQFF

SEQ ID NO: 533705 - protein, 14 aa, Homo sapiens
  CDR3 for alpha chain variable domain of TCR clone 266853 (TRAV8-3, TRAJ21)
CAVGLSPRSDKFYF

SEQ ID NO: 533706 - protein, 16 aa, Homo sapiens
  CDR3 for beta chain variable domain of TCR clone 266853 (TRBV7-9, TRBJ2-7)
CASSSPSANTVNEQYF

SEQ ID NO: 533707 - protein, 12 aa, Homo sapiens
  CDR3 for alpha chain variable domain of TCR clone 266854 (TRAV17, TRAJ57)
CATDGGSEKLVF

SEQ ID NO: 533708 - protein, 15 aa, Homo sapiens
  CDR3 for beta chain variable domain of TCR clone 266854 (TRBV11-2, TRBJ2-1)
CASSRNRGLMYEQFF

SEQ ID NO: 533709 - protein, 14 aa, Homo sapiens
  CDR3 for alpha chain variable domain of TCR clone 266855 (TRAV2, TRAJ20)
CAAEDGTNDYKLSF

SEQ ID NO: 533710 - protein, 13 aa, Homo sapiens
  CDR3 for beta chain variable domain of TCR clone 266855 (TRBV7-2, TRBJ1-1)
CASSRNTNTEAFF

SEQ ID NO: 533711 - protein, 17 aa, Homo sapiens
  CDR3 for alpha chain variable domain of TCR clone 266856 (TRAV3, TRAJ6)
CAVRDGPRAGGSYIPTF

SEQ ID NO: 533712 - protein, 14 aa, Homo sapiens
  CDR3 for beta chain variable domain of TCR clone 266856 (TRBV7-2, TRBJ2-5)
CASSFTQGQGTQYF

SEQ ID NO: 533713 - protein, 18 aa, Homo sapiens
  CDR3 for alpha chain variable domain of TCR clone 266857 (TRAV13-1, TRAJ52)
CAAKNPNAGGTSYGKLRF

SEQ ID NO: 533714 - protein, 15 aa, Homo sapiens
  CDR3 for beta chain variable domain of TCR clone 266857 (TRBV6-1, TRBJ2-3)
CASSERGGITDTQYF

SEQ ID NO: 533715 - protein, 13 aa, Homo sapiens
  CDR3 for alpha chain variable domain of TCR clone 266858 (TRAV39, TRAJ33)
CAVDRDSNYQLIW

SEQ ID NO: 533716 - protein, 16 aa, Homo sapiens
  CDR3 for beta chain variable domain of TCR clone 266858 (TRBV6-1, TRBJ2-3)
CASSEVIGQGTDTQYF

SEQ ID NO: 533717 - protein, 17 aa, Homo sapiens
  CDR3 for alpha chain variable domain of TCR clone 266859 (TRAV26-1, TRAJ36)
CIFRPPGDQTGANNLFF

SEQ ID NO: 533718 - protein, 15 aa, Homo sapiens
  CDR3 for beta chain variable domain of TCR clone 266859 (TRBV10-3, TRBJ2-6)
CATPAAASGANVLTF

SEQ ID NO: 533719 - protein, 15 aa, Homo sapiens
  CDR3 for alpha chain variable domain of TCR clone 266860 (TRAV13-1, TRAJ44)
CAASRGGGTASKITF

SEQ ID NO: 533720 - protein, 16 aa, Homo sapiens
  CDR3 for beta chain variable domain of TCR clone 266860 (TRBV24-1, TRBJ2-3)
CATSDPGTGATDTQYF

SEQ ID NO: 533721 - protein, 15 aa, Homo sapiens
  CDR3 for alpha chain variable domain of TCR clone 266861 (TRAV13-1, TRAJ52)
CAATSPRTSYGKLTF

SEQ ID NO: 533722 - protein, 14 aa, Homo sapiens
  CDR3 for beta chain variable domain of TCR clone 266861 (TRBV11-2, TRBJ1-2)
CASSLGTANYGYTF

SEQ ID NO: 533723 - protein, 13 aa, Homo sapiens
  CDR3 for alpha chain variable domain of TCR clone 266862 (TRAV26-1, TRAJ33)
CIVRVECNYQLIW

SEQ ID NO: 533724 - protein, 16 aa, Homo sapiens
  CDR3 for beta chain variable domain of TCR clone 266862 (TRBV15, TRBJ2-7)
CATSRDRGRRRGEQYF

SEQ ID NO: 533725 - protein, 18 aa, Homo sapiens
  CDR3 for alpha chain variable domain of TCR clone 266863 (TRAV21, TRAJ52)
CAVSPSPAGGNSYGKLTF

SEQ ID NO: 533726 - protein, 17 aa, Homo sapiens
  CDR3 for beta chain variable domain of TCR clone 266863 (TRBV13, TRBJ2-3)
CASSLSRVAGGRNTQYF

SEQ ID NO: 533727 - protein, 13 aa, Homo sapiens
  CDR3 for alpha chain variable domain of TCR clone 266864 (TRAV21, TRAJ57)
CAVTQGGSETLVF

SEQ ID NO: 533728 - protein, 16 aa, Homo sapiens
  CDR3 for beta chain variable domain of TCR clone 266864 (TRBV29-1, TRBJ2-7)
CSVEDAEDGTAYEQFF

SEQ ID NO: 533729 - protein, 10 aa, Homo sapiens
  CDR3 for alpha chain variable domain of TCR clone 266865 (TRAV26-1, TRAJ22)
CIVSLNFFWF

SEQ ID NO: 533730 - protein, 14 aa, Homo sapiens
  CDR3 for beta chain variable domain of TCR clone 266865 (TRBV19, TRBJ2-2)
CASTVTANTGELFF

SEQ ID NO: 533731 - protein, 12 aa, Homo sapiens
  CDR3 for alpha chain variable domain of TCR clone 266866 (TRAV8-3, TRAJ6)
CAVVGGSYIPTF

SEQ ID NO: 533732 - protein, 14 aa, Homo sapiens
  CDR3 for beta chain variable domain of TCR clone 266866 (TRBV27, TRBJ2-7)
CASATGTGRREQYF

SEQ ID NO: 533733 - protein, 15 aa, Homo sapiens
  CDR3 for alpha chain variable domain of TCR clone 266867 (TRAV3, TRAJ30)
CAVRDEYGRDDKIIF

SEQ ID NO: 533734 - protein, 16 aa, Homo sapiens
  CDR3 for beta chain variable domain of TCR clone 266867 (TRBV5-1, TRBJ2-5)
CASSLANHRGQETQYF

SEQ ID NO: 533735 - protein, 18 aa, Homo sapiens
  CDR3 for alpha chain variable domain of TCR clone 266868 (TRAV38-1, TRAJ29)
CDVFLCFITPSGNTPLVF

SEQ ID NO: 533736 - protein, 14 aa, Homo sapiens
  CDR3 for beta chain variable domain of TCR clone 266868 (TRBV18, TRBJ2-7)
CASSPRGGAYEQYF

SEQ ID NO: 533737 - protein, 13 aa, Homo sapiens
  CDR3 for alpha chain variable domain of TCR clone 266869 (TRAV23/DV6, TRAJ50)
CAASKERRDKVRF

SEQ ID NO: 533738 - protein, 17 aa, Homo sapiens
  CDR3 for beta chain variable domain of TCR clone 266869 (TRBV20-1, TRBJ2-1)
CSAPPRLAGTRYNEQFF

SEQ ID NO: 533739 - protein, 19 aa, Homo sapiens
  CDR3 for alpha chain variable domain of TCR clone 266870 (TRAV1-2, TRAJ26)
CLLPLCCERPDNYGQNFVF

SEQ ID NO: 533740 - protein, 15 aa, Homo sapiens
  CDR3 for beta chain variable domain of TCR clone 266870 (TRBV29-1, TRBJ2-1)
CSVGRHALFYNEQFF

SEQ ID NO: 533741 - protein, 15 aa, Homo sapiens
  CDR3 for alpha chain variable domain of TCR clone 266871 (TRAV3, TRAJ22)
CAVRDRGGSARQLTF

SEQ ID NO: 533742 - protein, 13 aa, Homo sapiens
  CDR3 for beta chain variable domain of TCR clone 266871 (TRBV4-2, TRBJ1-2)
CASSLSASGGYTF

SEQ ID NO: 533743 - protein, 14 aa, Homo sapiens
  CDR3 for alpha chain variable domain of TCR clone 266872 (TRAV1-2, TRAJ8)
CAVREDTGFQKLGF

SEQ ID NO: 533744 - protein, 15 aa, Homo sapiens
  CDR3 for beta chain variable domain of TCR clone 266872 (TRBV28, TRBJ2-4)
CAAGSGTLLMGIQYF

SEQ ID NO: 533745 - protein, 13 aa, Homo sapiens
  CDR3 for alpha chain variable domain of TCR clone 266873 (TRAV8-4, TRAJ27)
CAVSPRNAGKSTF

SEQ ID NO: 533746 - protein, 16 aa, Homo sapiens
  CDR3 for beta chain variable domain of TCR clone 266873 (TRBV7-3, TRBJ2-2)
CASSLKRGTLSGELFF

SEQ ID NO: 533747 - protein, 13 aa, Homo sapiens
  CDR3 for alpha chain variable domain of TCR clone 266874 (TRAV8-3, TRAJ36)
CAVCATGANNLFF

SEQ ID NO: 533748 - protein, 15 aa, Homo sapiens
  CDR3 for beta chain variable domain of TCR clone 266874 (TRBV7-2, TRBJ1-2)
CASSPRAGWNYCYTF

SEQ ID NO: 533749 - protein, 12 aa, Homo sapiens
  CDR3 for alpha chain variable domain of TCR clone 266875 (TRAV8-3, TRAJ20)
CAVGANDYKLSF

SEQ ID NO: 533750 - protein, 15 aa, Homo sapiens
  CDR3 for beta chain variable domain of TCR clone 266875 (TRBV19, TRBJ2-2)
CQPISRTGATGELFF

SEQ ID NO: 533751 - protein, 19 aa, Homo sapiens
  CDR3 for alpha chain variable domain of TCR clone 266876 (TRAV3, TRAJ6)
CAVRDGPRGGEATYLHLEE

SEQ ID NO: 533752 - protein, 14 aa, Homo sapiens
  CDR3 for beta chain variable domain of TCR clone 266876 (TRBV7-2, TRBJ2-7)
CASSPKTSFYEQYF

SEQ ID NO: 533753 - protein, 13 aa, Homo sapiens
  CDR3 for alpha chain variable domain of TCR clone 266877 (TRAV17, TRAJ5)
CAPMDTGRRALTF

SEQ ID NO: 533754 - protein, 14 aa, Homo sapiens
  CDR3 for beta chain variable domain of TCR clone 266877 (TRBV7-7, TRBJ2-7)
CASSLGRGVGEQYF

SEQ ID NO: 533755 - protein, 11 aa, Homo sapiens
  CDR3 for alpha chain variable domain of TCR clone 266878 (TRAV17, TRAJ36)
GAPTGANNLFF

SEQ ID NO: 533756 - protein, 12 aa, Homo sapiens
  CDR3 for beta chain variable domain of TCR clone 266878 (TRBV29-1, TRBJ2-3)
CSVVLGADTQYF

SEQ ID NO: 533757 - protein, 15 aa, Homo sapiens
  CDR3 for alpha chain variable domain of TCR clone 266879 (TRAV27, TRAJ38)
CAARCNAGNNRKLIW

SEQ ID NO: 533758 - protein, 17 aa, Homo sapiens
  CDR3 for beta chain variable domain of TCR clone 266879 (TRBV24-1, TRBJ2-4)
CATSDAEARGVRNIQYF

SEQ ID NO: 533759 - protein, 18 aa, Homo sapiens
  CDR3 for alpha chain variable domain of TCR clone 266880 (TRAV8-3, TRAJ4)
WVRDPTSNDPGGSNKLIF

SEQ ID NO: 533760 - protein, 14 aa, Homo sapiens
  CDR3 for beta chain variable domain of TCR clone 266880 (TRBV25-1, TRBJ1-1)
CASTHLGGNTEAFF

SEQ ID NO: 533761 - protein, 12 aa, Homo sapiens
  CDR3 for alpha chain variable domain of TCR clone 266881 (TRAV12-2, TRAJ10)
WGVTGGGSKLTF

SEQ ID NO: 533762 - protein, 16 aa, Homo sapiens
  CDR3 for beta chain variable domain of TCR clone 266881 (TRBV6-4, TRBJ1-2)
CASSEAVGDPNYGYTV

SEQ ID NO: 533763 - protein, 14 aa, Homo sapiens
  CDR3 for alpha chain variable domain of TCR clone 266882 (TRAV16, TRAJ17)
CALSGRAAGNKLTF

SEQ ID NO: 533764 - protein, 15 aa, Homo sapiens
  CDR3 for beta chain variable domain of TCR clone 266882 (TRBV3-1, TRBJ1-2)
CARSPTRLPEGGYTF

SEQ ID NO: 533765 - protein, 14 aa, Homo sapiens
  CDR3 for alpha chain variable domain of TCR clone 266883 (TRAV12-2, TRAJ13)
CAVKKTGGYQKVTF

SEQ ID NO: 533766 - protein, 12 aa, Homo sapiens
  CDR3 for beta chain variable domain of TCR clone 266883 (TRBV2, TRBJ2-7)
CASSLGDREQYF

SEQ ID NO: 533767 - protein, 11 aa, Homo sapiens
  CDR3 for alpha chain variable domain of TCR clone 266884 (TRAV21, TRAJ11)
CAVNGYSTLTF

SEQ ID NO: 533768 - protein, 14 aa, Homo sapiens
  CDR3 for beta chain variable domain of TCR clone 266884 (TRBV18, TRBJ2-1)
CASSPVRGDNEQFF

SEQ ID NO: 533769 - protein, 10 aa, Homo sapiens
  CDR3 for alpha chain variable domain of TCR clone 266885 (TRAV2, TRAJ34)
CAVVNGKLIF

SEQ ID NO: 533770 - protein, 12 aa, Homo sapiens
  CDR3 for beta chain variable domain of TCR clone 266885 (TRBV29-1, TRBJ2-3)
CSVTGGADTQYF

SEQ ID NO: 533771 - protein, 18 aa, Homo sapiens
  CDR3 for alpha chain variable domain of TCR clone 266886 (TRAV21, TRAJ52)
CAVSPSPAGGTSYGNLTF

SEQ ID NO: 533772 - protein, 16 aa, Homo sapiens
  CDR3 for beta chain variable domain of TCR clone 266886 (TRBV19, TRBJ2-1)
CASSKAGPSSYNEQFF

SEQ ID NO: 533773 - protein, 13 aa, Homo sapiens
  CDR3 for alpha chain variable domain of TCR clone 266887 (TRAV13-1, TRAJ6)
RARGSGGSYIPTF

SEQ ID NO: 533774 - protein, 17 aa, Homo sapiens
  CDR3 for beta chain variable domain of TCR clone 266887 (TRBV7-8, TRBJ2-1)
CASSPPTGTLAYHEQFF

SEQ ID NO: 533775 - protein, 16 aa, Homo sapiens
  CDR3 for alpha chain variable domain of TCR clone 266888 (TRAV12-1, TRAJ53)
CVVTSVAGGSNYKLTF

SEQ ID NO: 533776 - protein, 13 aa, Homo sapiens
  CDR3 for beta chain variable domain of TCR clone 266888 (TRBV9, TRBJ2-7)
CASSVGQGGEQYF

SEQ ID NO: 533777 - protein, 13 aa, Homo sapiens
  CDR3 for alpha chain variable domain of TCR clone 266889 (TRAV8-1, TRAJ3)
CAVTYSSASKIIF

SEQ ID NO: 533778 - protein, 15 aa, Homo sapiens
  CDR3 for beta chain variable domain of TCR clone 266889 (TRBV5-1, TRBJ2-1)
CASSPPRAPYNEQFF

SEQ ID NO: 533779 - protein, 13 aa, Homo sapiens
  CDR3 for alpha chain variable domain of TCR clone 266890 (TRAV12-3, TRAJ47)
CAMKKEYGNKLVF

SEQ ID NO: 533780 - protein, 16 aa, Homo sapiens
  CDR3 for beta chain variable domain of TCR clone 266890 (TRBV3-1, TRBJ2-6)
CASNLTWVSGANDLTF

SEQ ID NO: 533781 - protein, 13 aa, Homo sapiens
  CDR3 for alpha chain variable domain of TCR clone 266891 (TRAV21, TRAJ27)
CAARPGNAGKSTL

SEQ ID NO: 533782 - protein, 14 aa, Homo sapiens
  CDR3 for beta chain variable domain of TCR clone 266891 (TRBV7-6, TRBJ2-3)
CASSVGTVTDTQYF

SEQ ID NO: 533783 - protein, 14 aa, Homo sapiens
  CDR3 for alpha chain variable domain of TCR clone 266892 (TRAV1-2, TRAJ16)
CAVRSASDGQKLLF

SEQ ID NO: 533784 - protein, 13 aa, Homo sapiens
  CDR3 for beta chain variable domain of TCR clone 266892 (TRBV20-1, TRBJ2-2)
CSASAAGTGELFF

SEQ ID NO: 533785 - protein, 14 aa, Homo sapiens
  CDR3 for alpha chain variable domain of TCR clone 266893 (TRAV13-2, TRAJ11)
CAETGNPGYSTLTF

SEQ ID NO: 533786 - protein, 13 aa, Homo sapiens
  CDR3 for beta chain variable domain of TCR clone 266893 (TRBV24-1, TRBJ2-2)
CATSETNTGELFF

SEQ ID NO: 533787 - protein, 14 aa, Homo sapiens
  CDR3 for alpha chain variable domain of TCR clone 266894 (TRAV21, TRAJ35)
CAVMPIGFGNVLHC

SEQ ID NO: 533788 - protein, 20 aa, Homo sapiens
  CDR3 for beta chain variable domain of TCR clone 266894 (TRBV7-8, TRBJ2-2)
WASSHLFPGPTIHITGELFF

SEQ ID NO: 533789 - protein, 12 aa, Homo sapiens
  CDR3 for alpha chain variable domain of TCR clone 266895 (TRAV23/DV6, TRAJ17)
CARGSCRQQANF

SEQ ID NO: 533790 - protein, 13 aa, Homo sapiens
  CDR3 for beta chain variable domain of TCR clone 266895 (TRBV7-9, TRBJ1-2)
CASSLKQNYGYTF

SEQ ID NO: 533791 - protein, 13 aa, Homo sapiens
  CDR3 for alpha chain variable domain of TCR clone 266896 (TRAV13-1, TRAJ53)
CAASKGSNYKLTF

SEQ ID NO: 533792 - protein, 15 aa, Homo sapiens
  CDR3 for beta chain variable domain of TCR clone 266896 (TRBV6-3, TRBJ2-7)
CASSSPGTVFYEQYF

SEQ ID NO: 533793 - protein, 16 aa, Homo sapiens
  CDR3 for alpha chain variable domain of TCR clone 266897 (TRAV16, TRAJ21)
CACGWATTSKNFTLDL

SEQ ID NO: 533794 - protein, 15 aa, Homo sapiens
  CDR3 for beta chain variable domain of TCR clone 266897 (TRBV19, TRBJ2-1)
CASSIQATSYNEQFF

SEQ ID NO: 533795 - protein, 14 aa, Homo sapiens
  CDR3 for alpha chain variable domain of TCR clone 266898 (TRAV3, TRAJ22)
CAVRDYSSARQLIF

SEQ ID NO: 533796 - protein, 13 aa, Homo sapiens
  CDR3 for beta chain variable domain of TCR clone 266898 (TRBV11-2, TRBJ2-5)
CASGHGAKETQYF

SEQ ID NO: 533797 - protein, 12 aa, Homo sapiens
  CDR3 for alpha chain variable domain of TCR clone 266899 (TRAV12-3, TRAJ17)
CAMTLTGNKLNF

SEQ ID NO: 533798 - protein, 16 aa, Homo sapiens
  CDR3 for beta chain variable domain of TCR clone 266899 (TRBV13, TRBJ2-2)
CASSPRTGEHTGELFF

SEQ ID NO: 533799 - protein, 15 aa, Homo sapiens
  CDR3 for alpha chain variable domain of TCR clone 266900 (TRAV3, TRAJ37)
CAVRATSGNTGNLIF

SEQ ID NO: 533800 - protein, 14 aa, Homo sapiens
  CDR3 for beta chain variable domain of TCR clone 266900 (TRBV25-1, TRBJ1-1)
CASTHLGGNTEAFF

SEQ ID NO: 533801 - protein, 18 aa, Homo sapiens
  CDR3 for alpha chain variable domain of TCR clone 266901 (TRAV13-1, TRAJ52)
CAASKRSAGGTSYGKLTF

SEQ ID NO: 533802 - protein, 17 aa, Homo sapiens
  CDR3 for beta chain variable domain of TCR clone 266901 (TRBV4-1, TRBJ2-3)
CASSQVLQGGGTDTQYF

SEQ ID NO: 533803 - protein, 13 aa, Homo sapiens
  CDR3 for alpha chain variable domain of TCR clone 266902 (TRAV8-4, TRAJ10)
CAAFTGGGNKLTF

SEQ ID NO: 533804 - protein, 12 aa, Homo sapiens
  CDR3 for beta chain variable domain of TCR clone 266902 (TRBV12-5, TRBJ2-5)
CASGQGVETQYL

SEQ ID NO: 533805 - protein, 14 aa, Homo sapiens
  CDR3 for alpha chain variable domain of TCR clone 266903 (TRAV12-3, TRAJ12)
CAMSEVDSSYKLIF

SEQ ID NO: 533806 - protein, 14 aa, Homo sapiens
  CDR3 for beta chain variable domain of TCR clone 266903 (TRBV2, TRBJ2-1)
CASRTGSSYNEQFF

SEQ ID NO: 533807 - protein, 14 aa, Homo sapiens
  CDR3 for alpha chain variable domain of TCR clone 266904 (TRAV2, TRAJ9)
CAVEDRSGGFKTIF

SEQ ID NO: 533808 - protein, 16 aa, Homo sapiens
  CDR3 for beta chain variable domain of TCR clone 266904 (TRBV20-1, TRBJ1-2)
CSASMGQGVANYGYTF

SEQ ID NO: 533809 - protein, 12 aa, Homo sapiens
  CDR3 for alpha chain variable domain of TCR clone 266905 (TRAV8-3, TRAJ20)
CAVGANDYKLSF

SEQ ID NO: 533810 - protein, 14 aa, Homo sapiens
  CDR3 for beta chain variable domain of TCR clone 266905 (TRBV7-2, TRBJ2-7)
CASSLDPGPYEQYF

SEQ ID NO: 533811 - protein, 13 aa, Homo sapiens
  CDR3 for alpha chain variable domain of TCR clone 266906 (TRAV17, TRAJ20)
FATDAVGDYKLSF

SEQ ID NO: 533812 - protein, 15 aa, Homo sapiens
  CDR3 for beta chain variable domain of TCR clone 266906 (TRBV9, TRBJ1-3)
CASSARAGGGNTIYF

SEQ ID NO: 533813 - protein, 13 aa, Homo sapiens
  CDR3 for alpha chain variable domain of TCR clone 266907 (TRAV13-1, TRAJ37)
CAALSGNTGKLIF

SEQ ID NO: 533814 - protein, 14 aa, Homo sapiens
  CDR3 for beta chain variable domain of TCR clone 266907 (TRBV12-4, TRBJ2-3)
CASSLGQGTDTQYF

SEQ ID NO: 533815 - protein, 14 aa, Homo sapiens
  CDR3 for alpha chain variable domain of TCR clone 266908 (TRAV1-2, TRAJ16)
CAVNRFSDGQKLLF

SEQ ID NO: 533816 - protein, 13 aa, Homo sapiens
  CDR3 for beta chain variable domain of TCR clone 266908 (TRBV7-2, TRBJ1-1)
CASNLKGARVAFF

SEQ ID NO: 533817 - protein, 17 aa, Homo sapiens
  CDR3 for alpha chain variable domain of TCR clone 266909 (TRAV3, TRAJ42)
CAVRDRDYGGSQGNLIS

SEQ ID NO: 533818 - protein, 15 aa, Homo sapiens
  CDR3 for beta chain variable domain of TCR clone 266909 (TRBV4-1, TRBJ1-4)
CASSDTGGTNEKLFF

SEQ ID NO: 533819 - protein, 14 aa, Homo sapiens
  CDR3 for alpha chain variable domain of TCR clone 266910 (TRAV38-1, TRAJ45)
CASHSGGGADGLTF

SEQ ID NO: 533820 - protein, 15 aa, Homo sapiens
  CDR3 for beta chain variable domain of TCR clone 266910 (TRBV7-3, TRBJ2-1)
CASSPTGGGEVEQFF

SEQ ID NO: 533821 - protein, 14 aa, Homo sapiens
  CDR3 for alpha chain variable domain of TCR clone 266911 (TRAV9-2, TRAJ28)
CASYSGAGSYQLTF

SEQ ID NO: 533822 - protein, 16 aa, Homo sapiens
  CDR3 for beta chain variable domain of TCR clone 266911 (TRBV10-3, TRBJ2-1)
CAISGVGDGGGGEQFF

SEQ ID NO: 533823 - protein, 13 aa, Homo sapiens
  CDR3 for alpha chain variable domain of TCR clone 266912 (TRAV13-1, TRAJ40)
CAVVTSGTYKYIF

SEQ ID NO: 533824 - protein, 14 aa, Homo sapiens
  CDR3 for beta chain variable domain of TCR clone 266912 (TRBV19, TRBJ2-1)
CASPTFVLSGEQFF

SEQ ID NO: 533825 - protein, 14 aa, Homo sapiens
  CDR3 for alpha chain variable domain of TCR clone 266913 (TRAV23/DV6, TRAJ13)
CAASETGGYQKVTF

SEQ ID NO: 533826 - protein, 14 aa, Homo sapiens
  CDR3 for beta chain variable domain of TCR clone 266913 (TRBV7-3, TRBJ2-2)
CASSSGGYTGELFF

SEQ ID NO: 533827 - protein, 18 aa, Homo sapiens
  CDR3 for alpha chain variable domain of TCR clone 266914 (TRAV12-3, TRAJ52)
CAMSRTNAGGTSYGKLTF

SEQ ID NO: 533828 - protein, 12 aa, Homo sapiens
  CDR3 for beta chain variable domain of TCR clone 266914 (TRBV7-3, TRBJ2-3)
MKRMRGADTQYF

SEQ ID NO: 533829 - protein, 12 aa, Homo sapiens
  CDR3 for alpha chain variable domain of TCR clone 266915 (TRAV13-1, TRAJ40)
CAANSGTYKYIF

SEQ ID NO: 533830 - protein, 13 aa, Homo sapiens
  CDR3 for beta chain variable domain of TCR clone 266915 (TRBV7-9, TRBJ1-2)
CASSLKQNYGYTF

SEQ ID NO: 533831 - protein, 13 aa, Homo sapiens
  CDR3 for alpha chain variable domain of TCR clone 266916 (TRAV3, TRAJ27)
CVARPLGAGKSTF

SEQ ID NO: 533832 - protein, 13 aa, Homo sapiens
  CDR3 for beta chain variable domain of TCR clone 266916 (TRBV7-9, TRBJ2-3)
CASSPGSTDTQYF

SEQ ID NO: 533833 - protein, 14 aa, Homo sapiens
  CDR3 for alpha chain variable domain of TCR clone 266917 (TRAV27, TRAJ33)
CRSGSRDSNYQLIW

SEQ ID NO: 533834 - protein, 14 aa, Homo sapiens
  CDR3 for beta chain variable domain of TCR clone 266917 (TRBV20-1, TRBJ2-7)
CSAWTALSSYEQYF

SEQ ID NO: 533835 - protein, 13 aa, Homo sapiens
  CDR3 for alpha chain variable domain of TCR clone 266918 (TRAV8-3, TRAJ28)
CAVGAVGSYQLTF

SEQ ID NO: 533836 - protein, 16 aa, Homo sapiens
  CDR3 for beta chain variable domain of TCR clone 266918 (TRBV5-1, TRBJ1-5)
CASSYGTGGSNQPQHF

SEQ ID NO: 533837 - protein, 16 aa, Homo sapiens
  CDR3 for alpha chain variable domain of TCR clone 266919 (TRAV23/DV6, TRAJ12)
CSNRSGAMDSSYKLIF

SEQ ID NO: 533838 - protein, 14 aa, Homo sapiens
  CDR3 for beta chain variable domain of TCR clone 266919 (TRBV6-1, TRBJ1-3)
CASVQGGGGNTIYF

SEQ ID NO: 533839 - protein, 14 aa, Homo sapiens
  CDR3 for alpha chain variable domain of TCR clone 266920 (TRAV13-1, TRAJ35)
CAASKGGFGNVLHY

SEQ ID NO: 533840 - protein, 15 aa, Homo sapiens
  CDR3 for beta chain variable domain of TCR clone 266920 (TRBV7-3, TRBJ2-1)
CASSLGQGPFGEQFF

SEQ ID NO: 533841 - protein, 13 aa, Homo sapiens
  CDR3 for alpha chain variable domain of TCR clone 266921 (TRAV12-1, TRAJ26)
CVVRRNYGQNFVF

SEQ ID NO: 533842 - protein, 13 aa, Homo sapiens
  CDR3 for beta chain variable domain of TCR clone 266921 (TRBV20-1, TRBJ2-2)
CSASAAGTGELFV

SEQ ID NO: 533843 - protein, 13 aa, Homo sapiens
  CDR3 for alpha chain variable domain of TCR clone 266922 (TRAV12-1, TRAJ29)
CVVVVSGNTPLVF

SEQ ID NO: 533844 - protein, 14 aa, Homo sapiens
  CDR3 for beta chain variable domain of TCR clone 266922 (TRBV7-8, TRBJ2-3)
CASSLEAGTDTQYF

SEQ ID NO: 533845 - protein, 14 aa, Homo sapiens
  CDR3 for alpha chain variable domain of TCR clone 266923 (TRAV26-1, TRAJ34)
CIVRVAYNTHKLIF

SEQ ID NO: 533846 - protein, 15 aa, Homo sapiens
  CDR3 for beta chain variable domain of TCR clone 266923 (TRBV20-1, TRBJ2-7)
CSARVPAAYFYEQCF

SEQ ID NO: 533847 - protein, 13 aa, Homo sapiens
  CDR3 for alpha chain variable domain of TCR clone 266924 (TRAV20, TRAJ20)
CAVQAGSGYKLSF

SEQ ID NO: 533848 - protein, 13 aa, Homo sapiens
  CDR3 for beta chain variable domain of TCR clone 266924 (TRBV12-5, TRBJ2-3)
CASGDRQSDTQYF

SEQ ID NO: 533849 - protein, 14 aa, Homo sapiens
  CDR3 for alpha chain variable domain of TCR clone 266925 (TRAV12-2, TRAJ40)
CAVKIPSGTYKYIF

SEQ ID NO: 533850 - protein, 11 aa, Homo sapiens
  CDR3 for beta chain variable domain of TCR clone 266925 (TRBV11-2, TRBJ1-1)
CASSINTEAFF

SEQ ID NO: 533851 - protein, 14 aa, Homo sapiens
  CDR3 for alpha chain variable domain of TCR clone 266926 (TRAV34, TRAJ22)
CGADTSGSARQLTF

SEQ ID NO: 533852 - protein, 14 aa, Homo sapiens
  CDR3 for beta chain variable domain of TCR clone 266926 (TRBV6-1, TRBJ1-2)
CASSDAGASYGYTF

SEQ ID NO: 533853 - protein, 11 aa, Homo sapiens
  CDR3 for alpha chain variable domain of TCR clone 266927 (TRAV1-2, TRAJ31)
CAVNNNVRLLF

SEQ ID NO: 533854 - protein, 16 aa, Homo sapiens
  CDR3 for beta chain variable domain of TCR clone 266927 (TRBV11-2, TRBJ2-1)
WASSPRLAGVYNEQFF

SEQ ID NO: 533855 - protein, 15 aa, Homo sapiens
  CDR3 for alpha chain variable domain of TCR clone 266928 (TRAV8-4, TRAJ29)
CAVSEDSRGNTPLVF

SEQ ID NO: 533856 - protein, 12 aa, Homo sapiens
  CDR3 for beta chain variable domain of TCR clone 266928 (TRBV14, TRBJ2-7)
CASSSLKGEQYI

SEQ ID NO: 533857 - protein, 14 aa, Homo sapiens
  CDR3 for alpha chain variable domain of TCR clone 266929 (TRAV13-1, TRAJ12)
CSYYPMDSSYKLIF

SEQ ID NO: 533858 - protein, 11 aa, Homo sapiens
  CDR3 for beta chain variable domain of TCR clone 266929 (TRBV20-1, TRBJ2-1)
CSLSSGSEQFF

SEQ ID NO: 533859 - protein, 15 aa, Homo sapiens
  CDR3 for alpha chain variable domain of TCR clone 266930 (TRAV27, TRAJ38)
CAGRFNAGNNRKLIW

SEQ ID NO: 533860 - protein, 17 aa, Homo sapiens
  CDR3 for beta chain variable domain of TCR clone 266930 (TRBV20-1, TRBJ2-1)
CSARDPLAGVWDNEQFF

SEQ ID NO: 533861 - protein, 15 aa, Homo sapiens
  CDR3 for alpha chain variable domain of TCR clone 266931 (TRAV8-6, TRAJ6)
CAVSGESGGSYIPTF

SEQ ID NO: 533862 - protein, 14 aa, Homo sapiens
  CDR3 for beta chain variable domain of TCR clone 266931 (TRBV7-9, TRBJ2-1)
CAISSMVGFGEQFF

SEQ ID NO: 533863 - protein, 13 aa, Homo sapiens
  CDR3 for alpha chain variable domain of TCR clone 266932 (TRAV26-1, TRAJ29)
CIVRRSGNTPLVF

SEQ ID NO: 533864 - protein, 14 aa, Homo sapiens
  CDR3 for beta chain variable domain of TCR clone 266932 (TRBV7-8, TRBJ2-3)
CASSLEAGTDTQYF

SEQ ID NO: 533865 - protein, 13 aa, Homo sapiens
  CDR3 for alpha chain variable domain of TCR clone 266933 (TRAV1-2, TRAJ9)
CAVLNTGGFQTIF

SEQ ID NO: 533866 - protein, 14 aa, Homo sapiens
  CDR3 for beta chain variable domain of TCR clone 266933 (TRBV20-1, TRBJ2-3)
RSARGGTSTDTQYF

SEQ ID NO: 533867 - protein, 13 aa, Homo sapiens
  CDR3 for alpha chain variable domain of TCR clone 266934 (TRAV27, TRAJ54)
CAGAGQGAQKLVF

SEQ ID NO: 533868 - protein, 15 aa, Homo sapiens
  CDR3 for beta chain variable domain of TCR clone 266934 (TRBV18, TRBJ2-6)
CASSPSYAGASVLTF

SEQ ID NO: 533869 - protein, 13 aa, Homo sapiens
  CDR3 for alpha chain variable domain of TCR clone 266935 (TRAV8-6, TRAJ13)
FAVRDGGYQKVTF

SEQ ID NO: 533870 - protein, 15 aa, Homo sapiens
  CDR3 for beta chain variable domain of TCR clone 266935 (TRBV7-9, TRBJ2-2)
CASRPEGTSTGELFF

SEQ ID NO: 533871 - protein, 14 aa, Homo sapiens
  CDR3 for alpha chain variable domain of TCR clone 266936 (TRAV12-3, TRAJ58)
CAMSTETSGSRLTF

SEQ ID NO: 533872 - protein, 12 aa, Homo sapiens
  CDR3 for beta chain variable domain of TCR clone 266936 (TRBV7-8, TRBJ2-7)
CASSLGYREQYF

SEQ ID NO: 533873 - protein, 12 aa, Homo sapiens
  CDR3 for alpha chain variable domain of TCR clone 266937 (TRAV8-3, TRAJ34)
WASGYKTDKLIF

SEQ ID NO: 533874 - protein, 13 aa, Homo sapiens
  CDR3 for beta chain variable domain of TCR clone 266937 (TRBV6-4, TRBJ2-3)
CASSVSWADTQYF

SEQ ID NO: 533875 - protein, 15 aa, Homo sapiens
  CDR3 for alpha chain variable domain of TCR clone 266938 (TRAV36/DV7, TRAJ54)
CAVEKPVQGAQKLVF

SEQ ID NO: 533876 - protein, 17 aa, Homo sapiens
  CDR3 for beta chain variable domain of TCR clone 266938 (TRBV6-5, TRBJ1-2)
CASSSPWEWAFDYGYTF

SEQ ID NO: 533877 - protein, 13 aa, Homo sapiens
  CDR3 for alpha chain variable domain of TCR clone 266939 (TRAV12-1, TRAJ31)
CVVNDNNNARLLF

SEQ ID NO: 533878 - protein, 14 aa, Homo sapiens
  CDR3 for beta chain variable domain of TCR clone 266939 (TRBV7-2, TRBJ2-1)
CASSFGTSYGEQFF

SEQ ID NO: 533879 - protein, 13 aa, Homo sapiens
  CDR3 for alpha chain variable domain of TCR clone 266940 (TRAV8-3, TRAJ21)
CVVGAYNFNKFYF

SEQ ID NO: 533880 - protein, 16 aa, Homo sapiens
  CDR3 for beta chain variable domain of TCR clone 266940 (TRBV19, TRBJ2-1)
CASSMGGGSSYNEQFF

SEQ ID NO: 533881 - protein, 12 aa, Homo sapiens
  CDR3 for alpha chain variable domain of TCR clone 266941 (TRAV35, TRAJ12)
CAGMDSSYKLIF

SEQ ID NO: 533882 - protein, 14 aa, Homo sapiens
  CDR3 for beta chain variable domain of TCR clone 266941 (TRBV28, TRBJ2-5)
RASSLYRGTETQYF

SEQ ID NO: 533883 - protein, 15 aa, Homo sapiens
  CDR3 for alpha chain variable domain of TCR clone 266942 (TRAV8-3, TRAJ21)
CAVVPTTSTNFTLDL

SEQ ID NO: 533884 - protein, 15 aa, Homo sapiens
  CDR3 for beta chain variable domain of TCR clone 266942 (TRBV5-1, TRBJ2-3)
CASSVTSGSTDTQYF

SEQ ID NO: 533885 - protein, 17 aa, Homo sapiens
  CDR3 for alpha chain variable domain of TCR clone 266943 (TRAV8-1, TRAJ43)
CAVTNDMRFGAGTRLTV

SEQ ID NO: 533886 - protein, 17 aa, Homo sapiens
  CDR3 for beta chain variable domain of TCR clone 266943 (TRBV5-4, TRBJ2-1)
CASSSTGGRGPYNEQFF

SEQ ID NO: 533887 - protein, 14 aa, Homo sapiens
  CDR3 for alpha chain variable domain of TCR clone 266944 (TRAV34, TRAJ22)
CGADTSGSARQLNF

SEQ ID NO: 533888 - protein, 16 aa, Homo sapiens
  CDR3 for beta chain variable domain of TCR clone 266944 (TRBV2, TRBJ2-3)
CQHRGAPRRWTDTQYF

SEQ ID NO: 533889 - protein, 16 aa, Homo sapiens
  CDR3 for alpha chain variable domain of TCR clone 266945 (TRAV30, TRAJ24)
CGTEIVDADSWGKFQF

SEQ ID NO: 533890 - protein, 16 aa, Homo sapiens
  CDR3 for beta chain variable domain of TCR clone 266945 (TRBV4-1, TRBJ2-7)
CASSQEGTASCYEQYF

SEQ ID NO: 533891 - protein, 13 aa, Homo sapiens
  CDR3 for alpha chain variable domain of TCR clone 266946 (TRAV30, TRAJ6)
CGFIEGGSYIPTF

SEQ ID NO: 533892 - protein, 14 aa, Homo sapiens
  CDR3 for beta chain variable domain of TCR clone 266946 (TRBV7-2, TRBJ2-7)
CASSPKTSFYEQYF

SEQ ID NO: 533893 - protein, 14 aa, Homo sapiens
  CDR3 for alpha chain variable domain of TCR clone 266947 (TRAV17, TRAJ15)
CATDRGQAGTALIF

SEQ ID NO: 533894 - protein, 17 aa, Homo sapiens
  CDR3 for beta chain variable domain of TCR clone 266947 (TRBV29-1, TRBJ2-1)
CSVLGLAGAYSYNEQFF

SEQ ID NO: 533895 - protein, 14 aa, Homo sapiens
  CDR3 for alpha chain variable domain of TCR clone 266948 (TRAV2, TRAJ29)
CAGPFQYGNTPLVF

SEQ ID NO: 533896 - protein, 12 aa, Homo sapiens
  CDR3 for beta chain variable domain of TCR clone 266948 (TRBV5-1, TRBJ2-5)
CASSLGLETQYF

SEQ ID NO: 533897 - protein, 14 aa, Homo sapiens
  CDR3 for alpha chain variable domain of TCR clone 266949 (TRAV13-1, TRAJ35)
CAASKGGFGNVLHC

SEQ ID NO: 533898 - protein, 13 aa, Homo sapiens
  CDR3 for beta chain variable domain of TCR clone 266949 (TRBV7-3, TRBJ1-1)
CASSQDWGAKASF

SEQ ID NO: 533899 - protein, 14 aa, Homo sapiens
  CDR3 for alpha chain variable domain of TCR clone 266950 (TRAV2, TRAJ9)
CAVEDRSGGFKTIF

SEQ ID NO: 533900 - protein, 14 aa, Homo sapiens
  CDR3 for beta chain variable domain of TCR clone 266950 (TRBV18, TRBJ2-7)
CASSPRGWAYEQYF

SEQ ID NO: 533901 - protein, 14 aa, Homo sapiens
  CDR3 for alpha chain variable domain of TCR clone 266951 (TRAV14/DV4, TRAJ49)
CAFNRYLTGNQFYF

SEQ ID NO: 533902 - protein, 15 aa, Homo sapiens
  CDR3 for beta chain variable domain of TCR clone 266951 (TRBV5-5, TRBJ1-1)
CASSLVGKDNTEAFF

SEQ ID NO: 533903 - protein, 15 aa, Homo sapiens
  CDR3 for alpha chain variable domain of TCR clone 266952 (TRAV16, TRAJ4)
CALEDPSGGYNKLIF

SEQ ID NO: 533904 - protein, 14 aa, Homo sapiens
  CDR3 for beta chain variable domain of TCR clone 266952 (TRBV5-4, TRBJ2-3)
CASSLGQGADTQYF

SEQ ID NO: 533905 - protein, 13 aa, Homo sapiens
  CDR3 for alpha chain variable domain of TCR clone 266953 (TRAV21, TRAJ20)
CAVGLRVDYKLSF

SEQ ID NO: 533906 - protein, 13 aa, Homo sapiens
  CDR3 for beta chain variable domain of TCR clone 266953 (TRBV29-1, TRBJ2-1)
CSVEGGRVNQQFF

SEQ ID NO: 533907 - protein, 13 aa, Homo sapiens
  CDR3 for alpha chain variable domain of TCR clone 266954 (TRAV26-1, TRAJ30)
CIVRVESNDKIIF

SEQ ID NO: 533908 - protein, 14 aa, Homo sapiens
  CDR3 for beta chain variable domain of TCR clone 266954 (TRBV11-2, TRBJ2-7)
CASSLGAGAYEQYF

SEQ ID NO: 533909 - protein, 16 aa, Homo sapiens
  CDR3 for alpha chain variable domain of TCR clone 266955 (TRAV26-2, TRAJ48)
CILRPPSNFGNEKLTF

SEQ ID NO: 533910 - protein, 15 aa, Homo sapiens
  CDR3 for beta chain variable domain of TCR clone 266955 (TRBV20-1, TRBJ2-3)
CSARVEGTYTDTQYF

SEQ ID NO: 533911 - protein, 15 aa, Homo sapiens
  CDR3 for alpha chain variable domain of TCR clone 266956 (TRAV21, TRAJ53)
CATLNSGGSNYKLTF

SEQ ID NO: 533912 - protein, 16 aa, Homo sapiens
  CDR3 for beta chain variable domain of TCR clone 266956 (TRBV12-4, TRBJ2-5)
CASSFCVRGRQETQYF

SEQ ID NO: 533913 - protein, 11 aa, Homo sapiens
  CDR3 for alpha chain variable domain of TCR clone 266957 (TRAV1-2, TRAJ11)
CAVRGYSTLTF

SEQ ID NO: 533914 - protein, 15 aa, Homo sapiens
  CDR3 for beta chain variable domain of TCR clone 266957 (TRBV3-1, TRBJ2-2)
CASSQDWTRAGELFL

SEQ ID NO: 533915 - protein, 15 aa, Homo sapiens
  CDR3 for alpha chain variable domain of TCR clone 266958 (TRAV12-3, TRAJ6)
CAMSPASGGSYIPTF

SEQ ID NO: 533916 - protein, 13 aa, Homo sapiens
  CDR3 for beta chain variable domain of TCR clone 266958 (TRBV10-3, TRBJ2-7)
CASKLAVNYEQYF

SEQ ID NO: 533917 - protein, 13 aa, Homo sapiens
  CDR3 for alpha chain variable domain of TCR clone 266959 (TRAV13-1, TRAJ28)
CAANEAGSYQLTF

SEQ ID NO: 533918 - protein, 15 aa, Homo sapiens
  CDR3 for beta chain variable domain of TCR clone 266959 (TRBV7-9, TRBJ1-6)
CASSSPGLGNSPLHF

SEQ ID NO: 533919 - protein, 14 aa, Homo sapiens
  CDR3 for alpha chain variable domain of TCR clone 266960 (TRAV12-1, TRAJ12)
CVVTRMDSSYKLVF

SEQ ID NO: 533920 - protein, 14 aa, Homo sapiens
  CDR3 for beta chain variable domain of TCR clone 266960 (TRBV4-1, TRBJ2-7)
CASSPVAGGDEQYF

SEQ ID NO: 533921 - protein, 14 aa, Homo sapiens
  CDR3 for alpha chain variable domain of TCR clone 266961 (TRAV1-2, TRAJ16)
CAVNRFSNGQKLLF

SEQ ID NO: 533922 - protein, 13 aa, Homo sapiens
  CDR3 for beta chain variable domain of TCR clone 266961 (TRBV7-2, TRBJ2-2)
CASSLAVTGELFF

SEQ ID NO: 533923 - protein, 13 aa, Homo sapiens
  CDR3 for alpha chain variable domain of TCR clone 266962 (TRAV8-3, TRAJ7)
CAAGAYGNNRLAF

SEQ ID NO: 533924 - protein, 13 aa, Homo sapiens
  CDR3 for beta chain variable domain of TCR clone 266962 (TRBV7-3, TRBJ1-5)
CASSLDSNQPQHF

SEQ ID NO: 533925 - protein, 13 aa, Homo sapiens
  CDR3 for alpha chain variable domain of TCR clone 266963 (TRAV3, TRAJ27)
CAVRPLGADKSTF

SEQ ID NO: 533926 - protein, 12 aa, Homo sapiens
  CDR3 for beta chain variable domain of TCR clone 266963 (TRBV11-2, TRBJ2-2)
CASSLGGGELFF

SEQ ID NO: 533927 - protein, 14 aa, Homo sapiens
  CDR3 for alpha chain variable domain of TCR clone 266964 (TRAV2, TRAJ9)
CTVDPNTGGFKTIF

SEQ ID NO: 533928 - protein, 13 aa, Homo sapiens
  CDR3 for beta chain variable domain of TCR clone 266964 (TRBV20-1, TRBJ2-1)
CSASTGTSNEQFF

SEQ ID NO: 533929 - protein, 11 aa, Homo sapiens
  CDR3 for alpha chain variable domain of TCR clone 266965 (TRAV12-2, TRAJ23)
CARGRGGKLIF

SEQ ID NO: 533930 - protein, 14 aa, Homo sapiens
  CDR3 for beta chain variable domain of TCR clone 266965 (TRBV28, TRBJ2-5)
CASSLGDRAEAQYF

SEQ ID NO: 533931 - protein, 13 aa, Homo sapiens
  CDR3 for alpha chain variable domain of TCR clone 266966 (TRAV1-1, TRAJ31)
CASYLNNNVRLMF

SEQ ID NO: 533932 - protein, 14 aa, Homo sapiens
  CDR3 for beta chain variable domain of TCR clone 266966 (TRBV4-1, TRBJ2-5)
CASSRSGSGETQYV

SEQ ID NO: 533933 - protein, 14 aa, Homo sapiens
  CDR3 for alpha chain variable domain of TCR clone 266967 (TRAV12-2, TRAJ40)
CAVKIPTGTYKYIF

SEQ ID NO: 533934 - protein, 20 aa, Homo sapiens
  CDR3 for beta chain variable domain of TCR clone 266967 (TRBV28, TRBJ2-1)
CASTPIGRSPGLAGGNEQFF

SEQ ID NO: 533935 - protein, 12 aa, Homo sapiens
  CDR3 for alpha chain variable domain of TCR clone 266968 (TRAV12-2, TRAJ29)
CAVDSGNTPLVF

SEQ ID NO: 533936 - protein, 15 aa, Homo sapiens
  CDR3 for beta chain variable domain of TCR clone 266968 (TRBV20-1, TRBJ2-7)
CSARGPLAGGREQYF

SEQ ID NO: 533937 - protein, 15 aa, Homo sapiens
  CDR3 for alpha chain variable domain of TCR clone 266969 (TRAV3, TRAJ20)
CAVSDIKLSDYKLSF

SEQ ID NO: 533938 - protein, 15 aa, Homo sapiens
  CDR3 for beta chain variable domain of TCR clone 266969 (TRBV7-9, TRBJ1-6)
CASSSPGRGNSPLPF

SEQ ID NO: 533939 - protein, 14 aa, Homo sapiens
  CDR3 for alpha chain variable domain of TCR clone 266970 (TRAV17, TRAJ4)
CATVPSGGYNMLIF

SEQ ID NO: 533940 - protein, 15 aa, Homo sapiens
  CDR3 for beta chain variable domain of TCR clone 266970 (TRBV7-8, TRBJ1-6)
CASSLVEGAYSPLHF

SEQ ID NO: 533941 - protein, 14 aa, Homo sapiens
  CDR3 for alpha chain variable domain of TCR clone 266971 (TRAV27, TRAJ37)
CAVGRSSNTGKLIF

SEQ ID NO: 533942 - protein, 15 aa, Homo sapiens
  CDR3 for beta chain variable domain of TCR clone 266971 (TRBV11-3, TRBJ1-6)
CASSLDWGANSPLHF

SEQ ID NO: 533943 - protein, 16 aa, Homo sapiens
  CDR3 for alpha chain variable domain of TCR clone 266972 (TRAV8-3, TRAJ10)
CAVGPILTGGGNKLTF

SEQ ID NO: 533944 - protein, 16 aa, Homo sapiens
  CDR3 for beta chain variable domain of TCR clone 266972 (TRBV7-2, TRBJ2-5)
CASSSTWLSGQETQYF

SEQ ID NO: 533945 - protein, 13 aa, Homo sapiens
  CDR3 for alpha chain variable domain of TCR clone 266973 (TRAV23/DV6, TRAJ22)
CASRSGSARQLTF

SEQ ID NO: 533946 - protein, 14 aa, Homo sapiens
  CDR3 for beta chain variable domain of TCR clone 266973 (TRBV7-2, TRBJ2-7)
CASSPKTSFYEQYF

SEQ ID NO: 533947 - protein, 13 aa, Homo sapiens
  CDR3 for alpha chain variable domain of TCR clone 266974 (TRAV21, TRAJ20)
CAVGLRVYYKLSF

SEQ ID NO: 533948 - protein, 11 aa, Homo sapiens
  CDR3 for beta chain variable domain of TCR clone 266974 (TRBV29-1, TRBJ2-5)
CSEDRTGTQYF

SEQ ID NO: 533949 - protein, 17 aa, Homo sapiens
  CDR3 for alpha chain variable domain of TCR clone 266975 (TRAV36/DV7, TRAJ52)
CAVAQRAGGTSYGKLTF

SEQ ID NO: 533950 - protein, 17 aa, Homo sapiens
  CDR3 for beta chain variable domain of TCR clone 266975 (TRBV25-1, TRBJ2-5)
CASSRRGGRGGQETQYF

SEQ ID NO: 533951 - protein, 15 aa, Homo sapiens
  CDR3 for alpha chain variable domain of TCR clone 266976 (TRAV2, TRAJ24)
CAVEVLTDSWGTFQF

SEQ ID NO: 533952 - protein, 14 aa, Homo sapiens
  CDR3 for beta chain variable domain of TCR clone 266976 (TRBV19, TRBJ2-1)
CASSMGSGRRSSSS

SEQ ID NO: 533953 - protein, 12 aa, Homo sapiens
  CDR3 for alpha chain variable domain of TCR clone 266977 (TRAV12-3, TRAJ17)
CAMTLTGNKLTF

SEQ ID NO: 533954 - protein, 15 aa, Homo sapiens
  CDR3 for beta chain variable domain of TCR clone 266977 (TRBV20-1, TRBJ2-7)
CSARDRVSGMEQQYV

SEQ ID NO: 533955 - protein, 16 aa, Homo sapiens
  CDR3 for alpha chain variable domain of TCR clone 266978 (TRAV3, TRAJ37)
CAVRGKGSGNTGKLIF

SEQ ID NO: 533956 - protein, 14 aa, Homo sapiens
  CDR3 for beta chain variable domain of TCR clone 266978 (TRBV11-3, TRBJ1-1)
CASSLGGVNTEAFF

SEQ ID NO: 533957 - protein, 16 aa, Homo sapiens
  CDR3 for alpha chain variable domain of TCR clone 266979 (TRAV1-2, TRAJ16)
CAPPGFQMARSCSLQG

SEQ ID NO: 533958 - protein, 16 aa, Homo sapiens
  CDR3 for beta chain variable domain of TCR clone 266979 (TRBV20-1, TRBJ1-4)
CSAPGQGLLTNEKLFF

SEQ ID NO: 533959 - protein, 11 aa, Homo sapiens
  CDR3 for alpha chain variable domain of TCR clone 266980 (TRAV25, TRAJ43)
CAGPRNNDMRF

SEQ ID NO: 533960 - protein, 15 aa, Homo sapiens
  CDR3 for beta chain variable domain of TCR clone 266980 (TRBV7-2, TRBJ1-2)
CASSPRAGWNYGYTF

SEQ ID NO: 533961 - protein, 14 aa, Homo sapiens
  CDR3 for alpha chain variable domain of TCR clone 266981 (TRAV1-2, TRAJ16)
CAVNRFSDGQKLLL

SEQ ID NO: 533962 - protein, 12 aa, Homo sapiens
  CDR3 for beta chain variable domain of TCR clone 266981 (TRBV6-5, TRBJ2-5)
WASSEGSETQYF

SEQ ID NO: 533963 - protein, 16 aa, Homo sapiens
  CDR3 for alpha chain variable domain of TCR clone 266982 (TRAV23/DV6, TRAJ9)
CAASIGGNTGGFKTNF

SEQ ID NO: 533964 - protein, 12 aa, Homo sapiens
  CDR3 for beta chain variable domain of TCR clone 266982 (TRBV6-3, TRBJ2-7)
CASSEPGFEQYF

SEQ ID NO: 533965 - protein, 14 aa, Homo sapiens
  CDR3 for alpha chain variable domain of TCR clone 266983 (TRAV38-2/DV8, TRAJ30)
CAYMDRLGGDKIIF

SEQ ID NO: 533966 - protein, 15 aa, Homo sapiens
  CDR3 for beta chain variable domain of TCR clone 266983 (TRBV7-9, TRBJ2-2)
CASRPADRDTGELFF

SEQ ID NO: 533967 - protein, 12 aa, Homo sapiens
  CDR3 for alpha chain variable domain of TCR clone 266984 (TRAV13-2, TRAJ39)
CAENNAGNMLTF

SEQ ID NO: 533968 - protein, 12 aa, Homo sapiens
  CDR3 for beta chain variable domain of TCR clone 266984 (TRBV11-2, TRBJ2-2)
CASRLGGGELFF

SEQ ID NO: 533969 - protein, 12 aa, Homo sapiens
  CDR3 for alpha chain variable domain of TCR clone 266985 (TRAV23/DV6, TRAJ30)
CSASKGDDKIIF

SEQ ID NO: 533970 - protein, 15 aa, Homo sapiens
  CDR3 for beta chain variable domain of TCR clone 266985 (TRBV20-1, TRBJ2-7)
CSARDRVSGMDEQYF

SEQ ID NO: 533971 - protein, 19 aa, Homo sapiens
  CDR3 for alpha chain variable domain of TCR clone 266986 (TRAV1-2, TRAJ26)
CLLPLCCERPDNYGQNFVF

SEQ ID NO: 533972 - protein, 11 aa, Homo sapiens
  CDR3 for beta chain variable domain of TCR clone 266986 (TRBV29-1, TRBJ2-5)
RSEDRTGTQYF

SEQ ID NO: 533973 - protein, 16 aa, Homo sapiens
  CDR3 for alpha chain variable domain of TCR clone 266987 (TRAV21, TRAJ45)
CAVSWGSGGGADGLPF

SEQ ID NO: 533974 - protein, 14 aa, Homo sapiens
  CDR3 for beta chain variable domain of TCR clone 266987 (TRBV4-2, TRBJ1-2)
CASSPWGSNYGYTF

SEQ ID NO: 533975 - protein, 14 aa, Homo sapiens
  CDR3 for alpha chain variable domain of TCR clone 266988 (TRAV21, TRAJ35)
CAVMPIGFGNVLHC

SEQ ID NO: 533976 - protein, 12 aa, Homo sapiens
  CDR3 for beta chain variable domain of TCR clone 266988 (TRBV7-9, TRBJ2-7)
CAGSSKREEQYF

SEQ ID NO: 533977 - protein, 15 aa, Homo sapiens
  CDR3 for alpha chain variable domain of TCR clone 266989 (TRAV29/DV5, TRAJ48)
CAAKISNFGNEKLTF

SEQ ID NO: 533978 - protein, 13 aa, Homo sapiens
  CDR3 for beta chain variable domain of TCR clone 266989 (TRBV12-5, TRBJ2-3)
CASGDRQSDTQYF

SEQ ID NO: 533979 - protein, 16 aa, Homo sapiens
  CDR3 for alpha chain variable domain of TCR clone 266990 (TRAV3, TRAJ6)
CAVRDGMGRRKLHTYI

SEQ ID NO: 533980 - protein, 15 aa, Homo sapiens
  CDR3 for beta chain variable domain of TCR clone 266990 (TRBV11-2, TRBJ1-6)
CASSLDPWAVSPLHF

SEQ ID NO: 533981 - protein, 16 aa, Homo sapiens
  CDR3 for alpha chain variable domain of TCR clone 266991 (TRAV12-3, TRAJ53)
CAMSPGSGGSNYKLTF

SEQ ID NO: 533982 - protein, 14 aa, Homo sapiens
  CDR3 for beta chain variable domain of TCR clone 266991 (TRBV18, TRBJ2-5)
CASSPGVSQETQYF

SEQ ID NO: 533983 - protein, 12 aa, Homo sapiens
  CDR3 for alpha chain variable domain of TCR clone 266992 (TRAV13-2, TRAJ23)
CAERHRGGKLIF

SEQ ID NO: 533984 - protein, 10 aa, Homo sapiens
  CDR3 for beta chain variable domain of TCR clone 266992 (TRBV20-1, TRBJ2-2)
LAGGAGELFF

SEQ ID NO: 533985 - protein, 17 aa, Homo sapiens
  CDR3 for alpha chain variable domain of TCR clone 266993 (TRAV3, TRAJ6)
CAVRDGPRAGGSYIPTF

SEQ ID NO: 533986 - protein, 15 aa, Homo sapiens
  CDR3 for beta chain variable domain of TCR clone 266993 (TRBV4-2, TRBJ1-4)
CASSLVQREVEKLFF

SEQ ID NO: 533987 - protein, 15 aa, Homo sapiens
  CDR3 for alpha chain variable domain of TCR clone 266994 (TRAV29/DV5, TRAJ57)
CAASEFQGGSETLVF

SEQ ID NO: 533988 - protein, 15 aa, Homo sapiens
  CDR3 for beta chain variable domain of TCR clone 266994 (TRBV6-3, TRBJ2-7)
CASSSPGTVFYEQYF

SEQ ID NO: 533989 - protein, 14 aa, Homo sapiens
  CDR3 for alpha chain variable domain of TCR clone 266995 (TRAV9-2, TRAJ39)
CALYIYNADNMLTF

SEQ ID NO: 533990 - protein, 14 aa, Homo sapiens
  CDR3 for beta chain variable domain of TCR clone 266995 (TRBV6-1, TRBJ1-3)
CASVQGGGGNTIYF

SEQ ID NO: 533991 - protein, 14 aa, Homo sapiens
  CDR3 for alpha chain variable domain of TCR clone 266996 (TRAV12-1, TRAJ3)
CVVILYSSASKIIF

SEQ ID NO: 533992 - protein, 15 aa, Homo sapiens
  CDR3 for beta chain variable domain of TCR clone 266996 (TRBV7-3, TRBJ2-1)
CASSLTGGGEVEQFF

SEQ ID NO: 533993 - protein, 15 aa, Homo sapiens
  CDR3 for alpha chain variable domain of TCR clone 266997 (TRAV16, TRAJ57)
CALSGGQGGSEKLVF

SEQ ID NO: 533994 - protein, 14 aa, Homo sapiens
  CDR3 for beta chain variable domain of TCR clone 266997 (TRBV4-1, TRBJ2-2)
CASSQAVNTGELFF

SEQ ID NO: 533995 - protein, 12 aa, Homo sapiens
  CDR3 for alpha chain variable domain of TCR clone 266998 (TRAV3, TRAJ20)
CAVRDGDYKLSF

SEQ ID NO: 533996 - protein, 13 aa, Homo sapiens
  CDR3 for beta chain variable domain of TCR clone 266998 (TRBV9, TRBJ2-1)
CASTVGQGGEQFF

SEQ ID NO: 533997 - protein, 16 aa, Homo sapiens
  CDR3 for alpha chain variable domain of TCR clone 266999 (TRAV3, TRAJ3)
CAVRDRAKSSASKIIF

SEQ ID NO: 533998 - protein, 13 aa, Homo sapiens
  CDR3 for beta chain variable domain of TCR clone 266999 (TRBV10-3, TRBJ2-7)
CASKLAVNYQQYF

SEQ ID NO: 533999 - protein, 14 aa, Homo sapiens
  CDR3 for alpha chain variable domain of TCR clone 267000 (TRAV3, TRAJ9)
CAVRGTTGGFKTIF

SEQ ID NO: 534000 - protein, 16 aa, Homo sapiens
  CDR3 for beta chain variable domain of TCR clone 267000 (TRBV7-2, TRBJ2-7)
CASSLGLAGGAYEQYF

SEQ ID NO: 534001 - protein, 13 aa, Homo sapiens
  CDR3 for alpha chain variable domain of TCR clone 267001 (TRAV3, TRAJ28)
CCERGAGSYQLTF

SEQ ID NO: 534002 - protein, 16 aa, Homo sapiens
  CDR3 for beta chain variable domain of TCR clone 267001 (TRBV4-1, TRBJ2-7)
CASSQEWTSGPLEQYC

SEQ ID NO: 534003 - protein, 13 aa, Homo sapiens
  CDR3 for alpha chain variable domain of TCR clone 267002 (TRAV13-1, TRAJ5)
CAARVTGRRALTF

SEQ ID NO: 534004 - protein, 15 aa, Homo sapiens
  CDR3 for beta chain variable domain of TCR clone 267002 (TRBV7-9, TRBJ2-7)
GASSPGGGLTYEQYF

SEQ ID NO: 534005 - protein, 14 aa, Homo sapiens
  CDR3 for alpha chain variable domain of TCR clone 267003 (TRAV12-3, TRAJ10)
SHLPLTGGGNKLTF

SEQ ID NO: 534006 - protein, 16 aa, Homo sapiens
  CDR3 for beta chain variable domain of TCR clone 267003 (TRBV3-1, TRBJ2-7)
CASSQGATGVAYEQYF

SEQ ID NO: 534007 - protein, 13 aa, Homo sapiens
  CDR3 for alpha chain variable domain of TCR clone 267004 (TRAV12-2, TRAJ37)
CAGGPGNTGKLIF

SEQ ID NO: 534008 - protein, 14 aa, Homo sapiens
  CDR3 for beta chain variable domain of TCR clone 267004 (TRBV6-1, TRBJ2-6)
CASQQGAGANDLTF

SEQ ID NO: 534009 - protein, 14 aa, Homo sapiens
  CDR3 for alpha chain variable domain of TCR clone 267005 (TRAV4, TRAJ17)
CLVGDMAAGNKLTF

SEQ ID NO: 534010 - protein, 15 aa, Homo sapiens
  CDR3 for beta chain variable domain of TCR clone 267005 (TRBV5-5, TRBJ1-5)
CASSSTPGSNQTQHF

SEQ ID NO: 534011 - protein, 15 aa, Homo sapiens
  CDR3 for alpha chain variable domain of TCR clone 267006 (TRAV8-4, TRAJ9)
FAVSDLEGGGFKTIF

SEQ ID NO: 534012 - protein, 12 aa, Homo sapiens
  CDR3 for beta chain variable domain of TCR clone 267006 (TRBV7-8, TRBJ2-7)
CASSLGDREQYF

SEQ ID NO: 534013 - protein, 13 aa, Homo sapiens
  CDR3 for alpha chain variable domain of TCR clone 267007 (TRAV16, TRAJ22)
SAMLAVSARQLTF

SEQ ID NO: 534014 - protein, 18 aa, Homo sapiens
  CDR3 for beta chain variable domain of TCR clone 267007 (TRBV7-2, TRBJ2-3)
CAWSLETSRGRKADTQYF

SEQ ID NO: 534015 - protein, 15 aa, Homo sapiens
  CDR3 for alpha chain variable domain of TCR clone 267008 (TRAV34, TRAJ38)
CGADFTPGNNRKLIW

SEQ ID NO: 534016 - protein, 16 aa, Homo sapiens
  CDR3 for beta chain variable domain of TCR clone 267008 (TRBV12-5, TRBJ2-5)
CVSGPRTSGNQETQYF

SEQ ID NO: 534017 - protein, 14 aa, Homo sapiens
  CDR3 for alpha chain variable domain of TCR clone 267009 (TRAV8-2, TRAJ5)
CVVDMDTGRRALPF

SEQ ID NO: 534018 - protein, 15 aa, Homo sapiens
  CDR3 for beta chain variable domain of TCR clone 267009 (TRBV5-7, TRBJ2-1)
CASSYISGRGNEQFF

SEQ ID NO: 534019 - protein, 15 aa, Homo sapiens
  CDR3 for alpha chain variable domain of TCR clone 267010 (TRAV26-1, TRAJ44)
CIVRANTGTASKIIF

SEQ ID NO: 534020 - protein, 16 aa, Homo sapiens
  CDR3 for beta chain variable domain of TCR clone 267010 (TRBV7-7, TRBJ2-1)
CASSLASGTSYNEQFF

SEQ ID NO: 534021 - protein, 16 aa, Homo sapiens
  CDR3 for alpha chain variable domain of TCR clone 267011 (TRAV12-3, TRAJ53)
CAMSPGSGSSDYKLTF

SEQ ID NO: 534022 - protein, 11 aa, Homo sapiens
  CDR3 for beta chain variable domain of TCR clone 267011 (TRBV29-1, TRBJ2-5)
CSEDRAGTQYF

SEQ ID NO: 534023 - protein, 13 aa, Homo sapiens
  CDR3 for alpha chain variable domain of TCR clone 267012 (TRAV21, TRAJ27)
CAARPGNAGKSTF

SEQ ID NO: 534024 - protein, 17 aa, Homo sapiens
  CDR3 for beta chain variable domain of TCR clone 267012 (TRBV5-1, TRBJ2-2)
CASSPRTGGMNTGELFF

SEQ ID NO: 534025 - protein, 14 aa, Homo sapiens
  CDR3 for alpha chain variable domain of TCR clone 267013 (TRAV8-6, TRAJ37)
CAVRLSGNTGKLIF

SEQ ID NO: 534026 - protein, 14 aa, Homo sapiens
  CDR3 for beta chain variable domain of TCR clone 267013 (TRBV12-5, TRBJ2-5)
CASGSRTHQETQYF

SEQ ID NO: 534027 - protein, 14 aa, Homo sapiens
  CDR3 for alpha chain variable domain of TCR clone 267014 (TRAV12-2, TRAJ40)
CAVKIPSGTYKYVF

SEQ ID NO: 534028 - protein, 15 aa, Homo sapiens
  CDR3 for beta chain variable domain of TCR clone 267014 (TRBV7-9, TRBJ1-4)
CASSRTGGFNEKLFF

SEQ ID NO: 534029 - protein, 13 aa, Homo sapiens
  CDR3 for alpha chain variable domain of TCR clone 267015 (TRAV13-2, TRAJ11)
CAEGDSGYSTLAF

SEQ ID NO: 534030 - protein, 12 aa, Homo sapiens
  CDR3 for beta chain variable domain of TCR clone 267015 (TRBV7-9, TRBJ1-1)
CASSLEGTEAFF

SEQ ID NO: 534031 - protein, 16 aa, Homo sapiens
  CDR3 for alpha chain variable domain of TCR clone 267016 (TRAV3, TRAJ37)
CAVRPHGSGNTGKLIF

SEQ ID NO: 534032 - protein, 11 aa, Homo sapiens
  CDR3 for beta chain variable domain of TCR clone 267016 (TRBV7-8, TRBJ2-7)
CASSLSLEQYF

SEQ ID NO: 534033 - protein, 14 aa, Homo sapiens
  CDR3 for alpha chain variable domain of TCR clone 267017 (TRAV13-1, TRAJ20)
CAARPGSNDYKLSF

SEQ ID NO: 534034 - protein, 12 aa, Homo sapiens
  CDR3 for beta chain variable domain of TCR clone 267017 (TRBV12-4, TRBJ1-2)
CASSFIWLHLRF

SEQ ID NO: 534035 - protein, 14 aa, Homo sapiens
  CDR3 for alpha chain variable domain of TCR clone 267018 (TRAV2, TRAJ37)
CAVDFTSNTGKLIF

SEQ ID NO: 534036 - protein, 13 aa, Homo sapiens
  CDR3 for beta chain variable domain of TCR clone 267018 (TRBV20-1, TRBJ1-1)
CSAPLGWDTEAFF

SEQ ID NO: 534037 - protein, 12 aa, Homo sapiens
  CDR3 for alpha chain variable domain of TCR clone 267019 (TRAV13-1, TRAJ42)
VNYGGSQGNLIF

SEQ ID NO: 534038 - protein, 18 aa, Homo sapiens
  CDR3 for beta chain variable domain of TCR clone 267019 (TRBV12-4, TRBJ2-2)
CASSLVAGTRGRTGELFF

SEQ ID NO: 534039 - protein, 13 aa, Homo sapiens
  CDR3 for alpha chain variable domain of TCR clone 267020 (TRAV8-3, TRAJ28)
CAVGAVGSYQLTF

SEQ ID NO: 534040 - protein, 13 aa, Homo sapiens
  CDR3 for beta chain variable domain of TCR clone 267020 (TRBV15, TRBJ1-6)
CATSGGLNSPLHF

SEQ ID NO: 534041 - protein, 11 aa, Homo sapiens
  CDR3 for alpha chain variable domain of TCR clone 267021 (TRAV12-3, TRAJ43)
CAMSVSNDMRF

SEQ ID NO: 534042 - protein, 12 aa, Homo sapiens
  CDR3 for beta chain variable domain of TCR clone 267021 (TRBV7-8, TRBJ2-7)
RASSLGDREQYF

SEQ ID NO: 534043 - protein, 13 aa, Homo sapiens
  CDR3 for alpha chain variable domain of TCR clone 267022 (TRAV8-6, TRAJ49)
CAVSGQSGNQFYF

SEQ ID NO: 534044 - protein, 13 aa, Homo sapiens
  CDR3 for beta chain variable domain of TCR clone 267022 (TRBV10-2, TRBJ2-7)
CASSAESPYEQYF

SEQ ID NO: 534045 - protein, 17 aa, Homo sapiens
  CDR3 for alpha chain variable domain of TCR clone 267023 (TRAV3, TRAJ6)
CAVRDGPRAGGSYIPPF

SEQ ID NO: 534046 - protein, 15 aa, Homo sapiens
  CDR3 for beta chain variable domain of TCR clone 267023 (TRBV7-6, TRBJ2-3)
CASSPIIYSTDTQYF

SEQ ID NO: 534047 - protein, 11 aa, Homo sapiens
  CDR3 for alpha chain variable domain of TCR clone 267024 (TRAV2, TRAJ33)
CAVDSNYQLIW

SEQ ID NO: 534048 - protein, 15 aa, Homo sapiens
  CDR3 for beta chain variable domain of TCR clone 267024 (TRBV19, TRBJ1-2)
CASSVGQGLNYGYTF

SEQ ID NO: 534049 - protein, 15 aa, Homo sapiens
  CDR3 for alpha chain variable domain of TCR clone 267025 (TRAV17, TRAJ16)
CATALRFSDGQKLLS

SEQ ID NO: 534050 - protein, 16 aa, Homo sapiens
  CDR3 for beta chain variable domain of TCR clone 267025 (TRBV19, TRBJ2-1)
WASSKAGPSSYNEQFF

SEQ ID NO: 534051 - protein, 13 aa, Homo sapiens
  CDR3 for alpha chain variable domain of TCR clone 267026 (TRAV12-3, TRAJ35)
CAMAIGFGNVLHC

SEQ ID NO: 534052 - protein, 15 aa, Homo sapiens
  CDR3 for beta chain variable domain of TCR clone 267026 (TRBV20-1, TRBJ2-1)
CSARGSGTYYNEQSF

SEQ ID NO: 534053 - protein, 11 aa, Homo sapiens
  CDR3 for alpha chain variable domain of TCR clone 267027 (TRAV12-1, TRAJ21)
CVVNNFNKFYF

SEQ ID NO: 534054 - protein, 13 aa, Homo sapiens
  CDR3 for beta chain variable domain of TCR clone 267027 (TRBV20-1, TRBJ2-2)
CSASAAGTGELFF

SEQ ID NO: 534055 - protein, 13 aa, Homo sapiens
  CDR3 for alpha chain variable domain of TCR clone 267028 (TRAV13-2, TRAJ48)
CAEMDFGNEKLTF

SEQ ID NO: 534056 - protein, 13 aa, Homo sapiens
  CDR3 for beta chain variable domain of TCR clone 267028 (TRBV12-4, TRBJ2-7)
CASSLERVREQYF

SEQ ID NO: 534057 - protein, 14 aa, Homo sapiens
  CDR3 for alpha chain variable domain of TCR clone 267029 (TRAV2, TRAJ37)
TTVPGSSNTGKLIF

SEQ ID NO: 534058 - protein, 14 aa, Homo sapiens
  CDR3 for beta chain variable domain of TCR clone 267029 (TRBV7-8, TRBJ2-7)
CASSLWQSSYKQYF

SEQ ID NO: 534059 - protein, 16 aa, Homo sapiens
  CDR3 for alpha chain variable domain of TCR clone 267030 (TRAV38-1, TRAJ56)
CAFMKRQTGANSKLTF

SEQ ID NO: 534060 - protein, 15 aa, Homo sapiens
  CDR3 for beta chain variable domain of TCR clone 267030 (TRBV5-1, TRBJ2-1)
CASSPPRAPYNEQFF

SEQ ID NO: 534061 - protein, 15 aa, Homo sapiens
  CDR3 for alpha chain variable domain of TCR clone 267031 (TRAV25, TRAJ10)
CAGSLLTGGGNKLTF

SEQ ID NO: 534062 - protein, 15 aa, Homo sapiens
  CDR3 for beta chain variable domain of TCR clone 267031 (TRBV12-5, TRBJ2-2)
CASGRLGGNTGELFF

SEQ ID NO: 534063 - protein, 13 aa, Homo sapiens
  CDR3 for alpha chain variable domain of TCR clone 267032 (TRAV12-3, TRAJ47)
CAMKKEYGNKLVF

SEQ ID NO: 534064 - protein, 15 aa, Homo sapiens
  CDR3 for beta chain variable domain of TCR clone 267032 (TRBV7-2, TRBJ1-2)
CASSPRAGWNYGYTF

SEQ ID NO: 534065 - protein, 11 aa, Homo sapiens
  CDR3 for alpha chain variable domain of TCR clone 267033 (TRAV1-2, TRAJ20)
CAVSNDYKLSF

SEQ ID NO: 534066 - protein, 16 aa, Homo sapiens
  CDR3 for beta chain variable domain of TCR clone 267033 (TRBV29-1, TRBJ2-6)
CSVEDSAYSGANVLTF

SEQ ID NO: 534067 - protein, 12 aa, Homo sapiens
  CDR3 for alpha chain variable domain of TCR clone 267034 (TRAV13-1, TRAJ9)
CASHTGRFKTIF

SEQ ID NO: 534068 - protein, 18 aa, Homo sapiens
  CDR3 for beta chain variable domain of TCR clone 267034 (TRBV11-2, TRBJ2-3)
CASSLGGASRGAPNTQYF

SEQ ID NO: 534069 - protein, 17 aa, Homo sapiens
  CDR3 for alpha chain variable domain of TCR clone 267035 (TRAV29/DV5, TRAJ10)
CSVLLGRASGGGNKLTF

SEQ ID NO: 534070 - protein, 14 aa, Homo sapiens
  CDR3 for beta chain variable domain of TCR clone 267035 (TRBV18, TRBJ2-5)
CASSPGVSQETQYF

SEQ ID NO: 534071 - protein, 15 aa, Homo sapiens
  CDR3 for alpha chain variable domain of TCR clone 267036 (TRAV17, TRAJ57)
CATVSSQGGSEKLVF

SEQ ID NO: 534072 - protein, 13 aa, Homo sapiens
  CDR3 for beta chain variable domain of TCR clone 267036 (TRBV7-2, TRBJ2-2)
CASSLAVTGELFF

SEQ ID NO: 534073 - protein, 15 aa, Homo sapiens
  CDR3 for alpha chain variable domain of TCR clone 267037 (TRAV13-1, TRAJ48)
CAPLGSNFGNEKLTF

SEQ ID NO: 534074 - protein, 14 aa, Homo sapiens
  CDR3 for beta chain variable domain of TCR clone 267037 (TRBV27, TRBJ2-3)
CATGTSGRPWGQYF

SEQ ID NO: 534075 - protein, 13 aa, Homo sapiens
  CDR3 for alpha chain variable domain of TCR clone 267038 (TRAV30, TRAJ49)
CGTEPNTGNQFYF

SEQ ID NO: 534076 - protein, 19 aa, Homo sapiens
  CDR3 for beta chain variable domain of TCR clone 267038 (TRBV7-2, TRBJ2-3)
CASSSQGGPRLAGADTQYF

SEQ ID NO: 534077 - protein, 12 aa, Homo sapiens
  CDR3 for alpha chain variable domain of TCR clone 267039 (TRAV1-1, TRAJ8)
CAGGTGFQKLVF

SEQ ID NO: 534078 - protein, 13 aa, Homo sapiens
  CDR3 for beta chain variable domain of TCR clone 267039 (TRBV7-6, TRBJ1-2)
CASSLGQGRGYTF

SEQ ID NO: 534079 - protein, 15 aa, Homo sapiens
  CDR3 for alpha chain variable domain of TCR clone 267040 (TRAV21, TRAJ38)
CAVRQAAGNNRKLIW

SEQ ID NO: 534080 - protein, 16 aa, Homo sapiens
  CDR3 for beta chain variable domain of TCR clone 267040 (TRBV4-2, TRBJ1-1)
CASRPLDGGGDTEAFF

SEQ ID NO: 534081 - protein, 13 aa, Homo sapiens
  CDR3 for alpha chain variable domain of TCR clone 267041 (TRAV2, TRAJ15)
CAVASQAGTALLF

SEQ ID NO: 534082 - protein, 15 aa, Homo sapiens
  CDR3 for beta chain variable domain of TCR clone 267041 (TRBV7-8, TRBJ1-5)
CASSLEGSGNQPQHF

SEQ ID NO: 534083 - protein, 18 aa, Homo sapiens
  CDR3 for alpha chain variable domain of TCR clone 267042 (TRAV13-1, TRAJ45)
CAAPPQEYSGGGADGLTF

SEQ ID NO: 534084 - protein, 15 aa, Homo sapiens
  CDR3 for beta chain variable domain of TCR clone 267042 (TRBV7-9, TRBJ2-1)
CASSPRQGSYNEQFF

SEQ ID NO: 534085 - protein, 15 aa, Homo sapiens
  CDR3 for alpha chain variable domain of TCR clone 267043 (TRAV20, TRAJ40)
CAVQRGTSGTYKYIF

SEQ ID NO: 534086 - protein, 19 aa, Homo sapiens
  CDR3 for beta chain variable domain of TCR clone 267043 (TRBV28, TRBJ2-7)
CASSYSGTSLLGWVYEQYF

SEQ ID NO: 534087 - protein, 14 aa, Homo sapiens
  CDR3 for alpha chain variable domain of TCR clone 267044 (TRAV12-3, TRAJ43)
CAMSLGGAGTRLAV

SEQ ID NO: 534088 - protein, 13 aa, Homo sapiens
  CDR3 for beta chain variable domain of TCR clone 267044 (TRBV7-9, TRBJ1-2)
CASSLKQNYGYTF

SEQ ID NO: 534089 - protein, 18 aa, Homo sapiens
  CDR3 for alpha chain variable domain of TCR clone 267045 (TRAV26-2, TRAJ54)
CILRDVEVGIQGAQKLVF

SEQ ID NO: 534090 - protein, 15 aa, Homo sapiens
  CDR3 for beta chain variable domain of TCR clone 267045 (TRBV7-2, TRBJ2-1)
CASSLVGSSYNEQFF

SEQ ID NO: 534091 - protein, 14 aa, Homo sapiens
  CDR3 for alpha chain variable domain of TCR clone 267046 (TRAV21, TRAJ37)
CAVKGSSHTGKLIF

SEQ ID NO: 534092 - protein, 14 aa, Homo sapiens
  CDR3 for beta chain variable domain of TCR clone 267046 (TRBV7-2, TRBJ2-1)
CASSRGGARNEQFF

SEQ ID NO: 534093 - protein, 13 aa, Homo sapiens
  CDR3 for alpha chain variable domain of TCR clone 267047 (TRAV2, TRAJ29)
CAAGNSGNTPLVF

SEQ ID NO: 534094 - protein, 12 aa, Homo sapiens
  CDR3 for beta chain variable domain of TCR clone 267047 (TRBV11-2, TRBJ2-2)
CASSLGGGELFF

SEQ ID NO: 534095 - protein, 18 aa, Homo sapiens
  CDR3 for alpha chain variable domain of TCR clone 267048 (TRAV14/DV4, TRAJ3)
CAMREGSGGYSSDSKIIF

SEQ ID NO: 534096 - protein, 12 aa, Homo sapiens
  CDR3 for beta chain variable domain of TCR clone 267048 (TRBV11-3, TRBJ1-1)
CASSHRQGEAFL

SEQ ID NO: 534097 - protein, 14 aa, Homo sapiens
  CDR3 for alpha chain variable domain of TCR clone 267049 (TRAV17, TRAJ45)
CATASGGGADGLTF

SEQ ID NO: 534098 - protein, 15 aa, Homo sapiens
  CDR3 for beta chain variable domain of TCR clone 267049 (TRBV11-2, TRBJ2-1)
CVSSRNRGLMYEQFF

SEQ ID NO: 534099 - protein, 13 aa, Homo sapiens
  CDR3 for alpha chain variable domain of TCR clone 267050 (TRAV27, TRAJ6)
CAGGTRGSYIPTF

SEQ ID NO: 534100 - protein, 15 aa, Homo sapiens
  CDR3 for beta chain variable domain of TCR clone 267050 (TRBV6-1, TRBJ2-7)
CASSESMGDFYEQYF

SEQ ID NO: 534101 - protein, 16 aa, Homo sapiens
  CDR3 for alpha chain variable domain of TCR clone 267051 (TRAV26-1, TRAJ38)
CIVRAYNAGNNRKLIW

SEQ ID NO: 534102 - protein, 15 aa, Homo sapiens
  CDR3 for beta chain variable domain of TCR clone 267051 (TRBV10-2, TRBJ2-6)
CASSGQGTGANVLTF

SEQ ID NO: 534103 - protein, 14 aa, Homo sapiens
  CDR3 for alpha chain variable domain of TCR clone 267052 (TRAV26-1, TRAJ21)
CIVRPPYNFNKFYF

SEQ ID NO: 534104 - protein, 14 aa, Homo sapiens
  CDR3 for beta chain variable domain of TCR clone 267052 (TRBV18, TRBJ2-5)
CASSPGVSQETQYF

SEQ ID NO: 534105 - protein, 18 aa, Homo sapiens
  CDR3 for alpha chain variable domain of TCR clone 267053 (TRAV13-1, TRAJ52)
CAAKNPNAGGTSYGKLTF

SEQ ID NO: 534106 - protein, 16 aa, Homo sapiens
  CDR3 for beta chain variable domain of TCR clone 267053 (TRBV7-6, TRBJ2-1)
CASSAPGPSAYNEQFF

SEQ ID NO: 534107 - protein, 17 aa, Homo sapiens
  CDR3 for alpha chain variable domain of TCR clone 267054 (TRAV13-1, TRAJ31)
CAPRDRLMFVDGTQLVV

SEQ ID NO: 534108 - protein, 12 aa, Homo sapiens
  CDR3 for beta chain variable domain of TCR clone 267054 (TRBV7-9, TRBJ2-7)
CASSLEVYEQYF

SEQ ID NO: 534109 - protein, 12 aa, Homo sapiens
  CDR3 for alpha chain variable domain of TCR clone 267055 (TRAV1-1, TRAJ8)
CAGGTGFQKLVF

SEQ ID NO: 534110 - protein, 16 aa, Homo sapiens
  CDR3 for beta chain variable domain of TCR clone 267055 (TRBV20-1, TRBJ1-4)
CSAPGQGLLTNEKLFF

SEQ ID NO: 534111 - protein, 13 aa, Homo sapiens
  CDR3 for alpha chain variable domain of TCR clone 267056 (TRAV20, TRAJ48)
CAVHLFGNETLTF

SEQ ID NO: 534112 - protein, 15 aa, Homo sapiens
  CDR3 for beta chain variable domain of TCR clone 267056 (TRBV6-5, TRBJ2-6)
CASSQWEAGANVLTF

SEQ ID NO: 534113 - protein, 14 aa, Homo sapiens
  CDR3 for alpha chain variable domain of TCR clone 267057 (TRAV13-1, TRAJ35)
CAASKGGFGNVLHC

SEQ ID NO: 534114 - protein, 16 aa, Homo sapiens
  CDR3 for beta chain variable domain of TCR clone 267057 (TRBV7-2, TRBJ1-2)
CASSSNQDRRGHGYTF

SEQ ID NO: 534115 - protein, 15 aa, Homo sapiens
  CDR3 for alpha chain variable domain of TCR clone 267058 (TRAV41, TRAJ45)
CAASYSGGGADGLTF

SEQ ID NO: 534116 - protein, 19 aa, Homo sapiens
  CDR3 for beta chain variable domain of TCR clone 267058 (TRBV25-1, TRBJ2-2)
CAILVYRVDRGRKTGELFF

SEQ ID NO: 534117 - protein, 14 aa, Homo sapiens
  CDR3 for alpha chain variable domain of TCR clone 267059 (TRAV17, TRAJ53)
CATARGGSNYKLTF

SEQ ID NO: 534118 - protein, 15 aa, Homo sapiens
  CDR3 for beta chain variable domain of TCR clone 267059 (TRBV9, TRBJ1-6)
CASSVAGTGDSPLHF

SEQ ID NO: 534119 - protein, 16 aa, Homo sapiens
  CDR3 for alpha chain variable domain of TCR clone 267060 (TRAV12-2, TRAJ18)
CAVTTDRGSTLGRRYF

SEQ ID NO: 534120 - protein, 15 aa, Homo sapiens
  CDR3 for beta chain variable domain of TCR clone 267060 (TRBV9, TRBJ1-6)
CASSVAGTGDSPLHF

SEQ ID NO: 534121 - protein, 16 aa, Homo sapiens
  CDR3 for alpha chain variable domain of TCR clone 267061 (TRAV12-1, TRAJ42)
CVVTPYHGGSQGNLIF

SEQ ID NO: 534122 - protein, 15 aa, Homo sapiens
  CDR3 for beta chain variable domain of TCR clone 267061 (TRBV5-1, TRBJ2-3)
CASSVTSGSTDTQYF

SEQ ID NO: 534123 - protein, 21 aa, Homo sapiens
  CDR3 for alpha chain variable domain of TCR clone 267062 (TRAV12-1, TRAJ37)
SSVIQPPTSPWISGNTGKLIF

SEQ ID NO: 534124 - protein, 14 aa, Homo sapiens
  CDR3 for beta chain variable domain of TCR clone 267062 (TRBV19, TRBJ2-1)
CASPTFVLSGEQFF

SEQ ID NO: 534125 - protein, 14 aa, Homo sapiens
  CDR3 for alpha chain variable domain of TCR clone 267063 (TRAV26-1, TRAJ38)
CIADNAGNSRKLIW

SEQ ID NO: 534126 - protein, 15 aa, Homo sapiens
  CDR3 for beta chain variable domain of TCR clone 267063 (TRBV7-6, TRBJ1-4)
CASSLGAGAGEKLFF

SEQ ID NO: 534127 - protein, 16 aa, Homo sapiens
  CDR3 for alpha chain variable domain of TCR clone 267064 (TRAV8-3, TRAJ8)
CSVPRDGNTGFQKLVF

SEQ ID NO: 534128 - protein, 14 aa, Homo sapiens
  CDR3 for beta chain variable domain of TCR clone 267064 (TRBV28, TRBJ1-1)
CASSESGRGTEAFF

SEQ ID NO: 534129 - protein, 14 aa, Homo sapiens
  CDR3 for alpha chain variable domain of TCR clone 267065 (TRAV8-3, TRAJ4)
CAVVAAGGYNKLMF

SEQ ID NO: 534130 - protein, 15 aa, Homo sapiens
  CDR3 for beta chain variable domain of TCR clone 267065 (TRBV6-5, TRBJ2-1)
CASSYDAGAGNEQFF

SEQ ID NO: 534131 - protein, 15 aa, Homo sapiens
  CDR3 for alpha chain variable domain of TCR clone 267066 (TRAV13-1, TRAJ44)
CAASRGGGTASKLTC

SEQ ID NO: 534132 - protein, 14 aa, Homo sapiens
  CDR3 for beta chain variable domain of TCR clone 267066 (TRBV7-2, TRBJ2-5)
CASSPSGSSETQYF

SEQ ID NO: 534133 - protein, 14 aa, Homo sapiens
  CDR3 for alpha chain variable domain of TCR clone 267067 (TRAV12-3, TRAJ10)
SHLPLTGGGNKLTF

SEQ ID NO: 534134 - protein, 17 aa, Homo sapiens
  CDR3 for beta chain variable domain of TCR clone 267067 (TRBV3-1, TRBJ2-2)
CASSLRPPASGTGELFF

SEQ ID NO: 534135 - protein, 15 aa, Homo sapiens
  CDR3 for alpha chain variable domain of TCR clone 267068 (TRAV35, TRAJ58)
CAGRRQETSGSRLTF

SEQ ID NO: 534136 - protein, 17 aa, Homo sapiens
  CDR3 for beta chain variable domain of TCR clone 267068 (TRBV7-8, TRBJ2-6)
CASSAGTGGAGANVLTF

SEQ ID NO: 534137 - protein, 11 aa, Homo sapiens
  CDR3 for alpha chain variable domain of TCR clone 267069 (TRAV8-3, TRAJ15)
CAVGPGTALIF

SEQ ID NO: 534138 - protein, 15 aa, Homo sapiens
  CDR3 for beta chain variable domain of TCR clone 267069 (TRBV6-3, TRBJ2-7)
CASSSPGTVFYEQYF

SEQ ID NO: 534139 - protein, 17 aa, Homo sapiens
  CDR3 for alpha chain variable domain of TCR clone 267070 (TRAV23/DV6, TRAJ53)
CAASKLGSGGRNYKLKF

SEQ ID NO: 534140 - protein, 14 aa, Homo sapiens
  CDR3 for beta chain variable domain of TCR clone 267070 (TRBV7-9, TRBJ2-3)
CASSLEQGTNTQYF

SEQ ID NO: 534141 - protein, 17 aa, Homo sapiens
  CDR3 for alpha chain variable domain of TCR clone 267071 (TRAV3, TRAJ6)
CALRDGPRAGGSYIPTF

SEQ ID NO: 534142 - protein, 14 aa, Homo sapiens
  CDR3 for beta chain variable domain of TCR clone 267071 (TRBV7-2, TRBJ2-7)
CAGSPKTSFYEQYF

SEQ ID NO: 534143 - protein, 15 aa, Homo sapiens
  CDR3 for alpha chain variable domain of TCR clone 267072 (TRAV8-1, TRAJ37)
CAVKKGSGNTGKLIF

SEQ ID NO: 534144 - protein, 17 aa, Homo sapiens
  CDR3 for beta chain variable domain of TCR clone 267072 (TRBV12-4, TRBJ1-1)
CASSLSGFRTMNTEAFY

SEQ ID NO: 534145 - protein, 15 aa, Homo sapiens
  CDR3 for alpha chain variable domain of TCR clone 267073 (TRAV8-3, TRAJ37)
CAVGARASNTGILIF

SEQ ID NO: 534146 - protein, 15 aa, Homo sapiens
  CDR3 for beta chain variable domain of TCR clone 267073 (TRBV5-4, TRBJ2-3)
CASSLAGRVTDTQYF

SEQ ID NO: 534147 - protein, 14 aa, Homo sapiens
  CDR3 for alpha chain variable domain of TCR clone 267074 (TRAV1-2, TRAJ16)
CAVNRFSDGQKLPF

SEQ ID NO: 534148 - protein, 13 aa, Homo sapiens
  CDR3 for beta chain variable domain of TCR clone 267074 (TRBV12-4, TRBJ2-7)
CASSPTETYEQYF

SEQ ID NO: 534149 - protein, 15 aa, Homo sapiens
  CDR3 for alpha chain variable domain of TCR clone 267075 (TRAV26-1, TRAJ23)
CIVRVAGYQGGKLIF

SEQ ID NO: 534150 - protein, 18 aa, Homo sapiens
  CDR3 for beta chain variable domain of TCR clone 267075 (TRBV28, TRBJ2-1)
CASSSTSGRANSYNEQFL

SEQ ID NO: 534151 - protein, 13 aa, Homo sapiens
  CDR3 for alpha chain variable domain of TCR clone 267076 (TRAV23/DV6, TRAJ31)
CAARRGNNARLMF

SEQ ID NO: 534152 - protein, 15 aa, Homo sapiens
  CDR3 for beta chain variable domain of TCR clone 267076 (TRBV5-4, TRBJ2-3)
CASSLAGRDTDTQYF

SEQ ID NO: 534153 - protein, 13 aa, Homo sapiens
  CDR3 for alpha chain variable domain of TCR clone 267077 (TRAV12-2, TRAJ20)
CAVYPSNDYKLSF

SEQ ID NO: 534154 - protein, 15 aa, Homo sapiens
  CDR3 for beta chain variable domain of TCR clone 267077 (TRBV6-1, TRBJ2-5)
CASSEGWGIQETQYC

SEQ ID NO: 534155 - protein, 15 aa, Homo sapiens
  CDR3 for alpha chain variable domain of TCR clone 267078 (TRAV17, TRAJ57)
CATGPSQGGSEKLVF

SEQ ID NO: 534156 - protein, 16 aa, Homo sapiens
  CDR3 for beta chain variable domain of TCR clone 267078 (TRBV12-4, TRBJ1-5)
CASSRLVGGSNQPQHF

SEQ ID NO: 534157 - protein, 15 aa, Homo sapiens
  CDR3 for alpha chain variable domain of TCR clone 267079 (TRAV21, TRAJ24)
CAARSSTDSWGKLQF

SEQ ID NO: 534158 - protein, 13 aa, Homo sapiens
  CDR3 for beta chain variable domain of TCR clone 267079 (TRBV11-2, TRBJ2-5)
WASSSTGEETQYF

SEQ ID NO: 534159 - protein, 13 aa, Homo sapiens
  CDR3 for alpha chain variable domain of TCR clone 267080 (TRAV17, TRAJ15)
CATVNQAGTALIF

SEQ ID NO: 534160 - protein, 13 aa, Homo sapiens
  CDR3 for beta chain variable domain of TCR clone 267080 (TRBV10-3, TRBJ2-7)
CASKLAVNYEQYF

SEQ ID NO: 534161 - protein, 12 aa, Homo sapiens
  CDR3 for alpha chain variable domain of TCR clone 267081 (TRAV21, TRAJ58)
CALSASGSRLTF

SEQ ID NO: 534162 - protein, 13 aa, Homo sapiens
  CDR3 for beta chain variable domain of TCR clone 267081 (TRBV5-7, TRBJ1-2)
CASSLVVFNGYTF

SEQ ID NO: 534163 - protein, 14 aa, Homo sapiens
  CDR3 for alpha chain variable domain of TCR clone 267082 (TRAV26-1, TRAJ38)
RIADNAGNNRKLIW

SEQ ID NO: 534164 - protein, 17 aa, Homo sapiens
  CDR3 for beta chain variable domain of TCR clone 267082 (TRBV15, TRBJ1-1)
CATSRVGGADGDTEDFF

SEQ ID NO: 534165 - protein, 15 aa, Homo sapiens
  CDR3 for alpha chain variable domain of TCR clone 267083 (TRAV4, TRAJ15)
CLVGDGNQAGTALIF

SEQ ID NO: 534166 - protein, 14 aa, Homo sapiens
  CDR3 for beta chain variable domain of TCR clone 267083 (TRBV5-1, TRBJ2-7)
CASSRGESLYEQYF

SEQ ID NO: 534167 - protein, 16 aa, Homo sapiens
  CDR3 for alpha chain variable domain of TCR clone 267084 (TRAV30, TRAJ24)
CGTEIVDADSWGKFQF

SEQ ID NO: 534168 - protein, 15 aa, Homo sapiens
  CDR3 for beta chain variable domain of TCR clone 267084 (TRBV19, TRBJ1-2)
CASSVGQVLDYGYTF

SEQ ID NO: 534169 - protein, 16 aa, Homo sapiens
  CDR3 for alpha chain variable domain of TCR clone 267085 (TRAV12-2, TRAJ45)
CAVKRNPGGGADGLTF

SEQ ID NO: 534170 - protein, 12 aa, Homo sapiens
  CDR3 for beta chain variable domain of TCR clone 267085 (TRBV6-1, TRBJ2-5)
CASSERRETQYF

SEQ ID NO: 534171 - protein, 15 aa, Homo sapiens
  CDR3 for alpha chain variable domain of TCR clone 267086 (TRAV26-1, TRAJ29)
CIVRVEGSGNTPLVF

SEQ ID NO: 534172 - protein, 16 aa, Homo sapiens
  CDR3 for beta chain variable domain of TCR clone 267086 (TRBV4-2, TRBJ2-3)
CASSQELAGDTDTQYF

SEQ ID NO: 534173 - protein, 14 aa, Homo sapiens
  CDR3 for alpha chain variable domain of TCR clone 267087 (TRAV38-2/DV8, TRAJ30)
CAYMDGLGGDRLIF

SEQ ID NO: 534174 - protein, 15 aa, Homo sapiens
  CDR3 for beta chain variable domain of TCR clone 267087 (TRBV7-9, TRBJ2-2)
CASRPADRDTGELFF

SEQ ID NO: 534175 - protein, 13 aa, Homo sapiens
  CDR3 for alpha chain variable domain of TCR clone 267088 (TRAV13-1, TRAJ10)
CAAAEGGRNKLTF

SEQ ID NO: 534176 - protein, 15 aa, Homo sapiens
  CDR3 for beta chain variable domain of TCR clone 267088 (TRBV7-8, TRBJ2-2)
CASSLDQGWTGELFF

SEQ ID NO: 534177 - protein, 12 aa, Homo sapiens
  CDR3 for alpha chain variable domain of TCR clone 267089 (TRAV22, TRAJ54)
CAVVQGAQKLVF

SEQ ID NO: 534178 - protein, 15 aa, Homo sapiens
  CDR3 for beta chain variable domain of TCR clone 267089 (TRBV7-9, TRBJ2-2)
CASGPLDTFPGELFF

SEQ ID NO: 534179 - protein, 14 aa, Homo sapiens
  CDR3 for alpha chain variable domain of TCR clone 267090 (TRAV12-1, TRAJ43)
CVVNIKGDNNDMRF

SEQ ID NO: 534180 - protein, 11 aa, Homo sapiens
  CDR3 for beta chain variable domain of TCR clone 267090 (TRBV12-4, TRBJ2-3)
CASTATDTQYF

SEQ ID NO: 534181 - protein, 13 aa, Homo sapiens
  CDR3 for alpha chain variable domain of TCR clone 267091 (TRAV2, TRAJ40)
RAVVTSGTYKYIF

SEQ ID NO: 534182 - protein, 16 aa, Homo sapiens
  CDR3 for beta chain variable domain of TCR clone 267091 (TRBV19, TRBJ2-2)
CASRSPGTGATGELFF

SEQ ID NO: 534183 - protein, 13 aa, Homo sapiens
  CDR3 for alpha chain variable domain of TCR clone 267092 (TRAV21, TRAJ27)
CAARPRNAGKSTF

SEQ ID NO: 534184 - protein, 14 aa, Homo sapiens
  CDR3 for beta chain variable domain of TCR clone 267092 (TRBV7-7, TRBJ2-3)
CASSLGTVTDTQYF

SEQ ID NO: 534185 - protein, 11 aa, Homo sapiens
  CDR3 for alpha chain variable domain of TCR clone 267093 (TRAV2, TRAJ33)
CAVDSNYQLIW

SEQ ID NO: 534186 - protein, 15 aa, Homo sapiens
  CDR3 for beta chain variable domain of TCR clone 267093 (TRBV20-1, TRBJ2-1)
CSARDAGTSEILGFF

SEQ ID NO: 534187 - protein, 11 aa, Homo sapiens
  CDR3 for alpha chain variable domain of TCR clone 267094 (TRAV2, TRAJ31)
CAAGPPARLMF

SEQ ID NO: 534188 - protein, 16 aa, Homo sapiens
  CDR3 for beta chain variable domain of TCR clone 267094 (TRBV12-5, TRBJ2-5)
CASGPRTSGNQETQYF

SEQ ID NO: 534189 - protein, 11 aa, Homo sapiens
  CDR3 for alpha chain variable domain of TCR clone 267095 (TRAV12-2, TRAJ49)
CAVHTGNQFYF

SEQ ID NO: 534190 - protein, 17 aa, Homo sapiens
  CDR3 for beta chain variable domain of TCR clone 267095 (TRBV4-2, TRBJ1-1)
CASSQQGAGDTEAFLDK

SEQ ID NO: 534191 - protein, 14 aa, Homo sapiens
  CDR3 for alpha chain variable domain of TCR clone 267096 (TRAV16, TRAJ15)
CALSLNQAGTALIF

SEQ ID NO: 534192 - protein, 16 aa, Homo sapiens
  CDR3 for beta chain variable domain of TCR clone 267096 (TRBV9, TRBJ2-7)
CASSAGPDRSPYEQYF

SEQ ID NO: 534193 - protein, 11 aa, Homo sapiens
  CDR3 for alpha chain variable domain of TCR clone 267097 (TRAV2, TRAJ13)
CASGGYEKVTF

SEQ ID NO: 534194 - protein, 14 aa, Homo sapiens
  CDR3 for beta chain variable domain of TCR clone 267097 (TRBV7-2, TRBJ2-7)
CASRSQGAAYEQYF

SEQ ID NO: 534195 - protein, 14 aa, Homo sapiens
  CDR3 for alpha chain variable domain of TCR clone 267098 (TRAV12-2, TRAJ13)
CAVKKTGGYQKVTF

SEQ ID NO: 534196 - protein, 13 aa, Homo sapiens
  CDR3 for beta chain variable domain of TCR clone 267098 (TRBV10-3, TRBJ2-7)
CAAKLAVNYEQYF

SEQ ID NO: 534197 - protein, 12 aa, Homo sapiens
  CDR3 for alpha chain variable domain of TCR clone 267099 (TRAV23/DV6, TRAJ11)
CAASWGYSTPTF

SEQ ID NO: 534198 - protein, 15 aa, Homo sapiens
  CDR3 for beta chain variable domain of TCR clone 267099 (TRBV3-1, TRBJ2-2)
CASSQGSGTFGELFF

SEQ ID NO: 534199 - protein, 11 aa, Homo sapiens
  CDR3 for alpha chain variable domain of TCR clone 267100 (TRAV9-2, TRAJ11)
CVPAGYRTLTF

SEQ ID NO: 534200 - protein, 14 aa, Homo sapiens
  CDR3 for beta chain variable domain of TCR clone 267100 (TRBV2, TRBJ2-7)
CASSLTSGGYEQYF

SEQ ID NO: 534201 - protein, 18 aa, Homo sapiens
  CDR3 for alpha chain variable domain of TCR clone 267101 (TRAV16, TRAJ45)
CAQASYPSSGGGADVLTC

SEQ ID NO: 534202 - protein, 12 aa, Homo sapiens
  CDR3 for beta chain variable domain of TCR clone 267101 (TRBV11-3, TRBJ2-4)
CASSAGRVIQYF

SEQ ID NO: 534203 - protein, 11 aa, Homo sapiens
  CDR3 for alpha chain variable domain of TCR clone 267102 (TRAV26-1, TRAJ37)
CIVRVGRKLIF

SEQ ID NO: 534204 - protein, 13 aa, Homo sapiens
  CDR3 for beta chain variable domain of TCR clone 267102 (TRBV14, TRBJ1-2)
CACSEDRRYGYTF

SEQ ID NO: 534205 - protein, 15 aa, Homo sapiens
  CDR3 for alpha chain variable domain of TCR clone 267103 (TRAV8-1, TRAJ37)
CAVKKGSGNTGKLIF

SEQ ID NO: 534206 - protein, 17 aa, Homo sapiens
  CDR3 for beta chain variable domain of TCR clone 267103 (TRBV12-4, TRBJ1-1)
CASSLSGFRTVNTEAFF

SEQ ID NO: 534207 - protein, 15 aa, Homo sapiens
  CDR3 for alpha chain variable domain of TCR clone 267104 (TRAV21, TRAJ38)
CAVRQDAGNNRKLIW

SEQ ID NO: 534208 - protein, 16 aa, Homo sapiens
  CDR3 for beta chain variable domain of TCR clone 267104 (TRBV7-3, TRBJ2-2)
CASSLKRGTLSGELFF

SEQ ID NO: 534209 - protein, 15 aa, Homo sapiens
  CDR3 for alpha chain variable domain of TCR clone 267105 (TRAV3, TRAJ5)
CAVRDLDTGRRALTF

SEQ ID NO: 534210 - protein, 14 aa, Homo sapiens
  CDR3 for beta chain variable domain of TCR clone 267105 (TRBV19, TRBJ1-5)
CASGTEVYNQPQHF

SEQ ID NO: 534211 - protein, 16 aa, Homo sapiens
  CDR3 for alpha chain variable domain of TCR clone 267106 (TRAV23/DV6, TRAJ57)
CAESSTLSQGGSEKLF

SEQ ID NO: 534212 - protein, 14 aa, Homo sapiens
  CDR3 for beta chain variable domain of TCR clone 267106 (TRBV25-1, TRBJ1-1)
CASTHLGGNTEAFF

SEQ ID NO: 534213 - protein, 11 aa, Homo sapiens
  CDR3 for alpha chain variable domain of TCR clone 267107 (TRAV12-1, TRAJ37)
CMVNTPGKLIF

SEQ ID NO: 534214 - protein, 13 aa, Homo sapiens
  CDR3 for beta chain variable domain of TCR clone 267107 (TRBV12-4, TRBJ1-5)
CASSPDRAQPQHF

SEQ ID NO: 534215 - protein, 14 aa, Homo sapiens
  CDR3 for alpha chain variable domain of TCR clone 267108 (TRAV17, TRAJ39)
CATDPVRAGNMLTF

SEQ ID NO: 534216 - protein, 13 aa, Homo sapiens
  CDR3 for beta chain variable domain of TCR clone 267108 (TRBV5-7, TRBJ2-6)
CASTSSGANVLTF

SEQ ID NO: 534217 - protein, 13 aa, Homo sapiens
  CDR3 for alpha chain variable domain of TCR clone 267109 (TRAV2, TRAJ40)
CAVVTSGTYKYIF

SEQ ID NO: 534218 - protein, 14 aa, Homo sapiens
  CDR3 for beta chain variable domain of TCR clone 267109 (TRBV12-4, TRBJ2-5)
CASNYSGYFETQYF

SEQ ID NO: 534219 - protein, 13 aa, Homo sapiens
  CDR3 for alpha chain variable domain of TCR clone 267110 (TRAV14/DV4, TRAJ20)
CTMREGRDYKLSF

SEQ ID NO: 534220 - protein, 15 aa, Homo sapiens
  CDR3 for beta chain variable domain of TCR clone 267110 (TRBV7-3, TRBJ2-1)
CASSLSSGSFDEQFF

SEQ ID NO: 534221 - protein, 14 aa, Homo sapiens
  CDR3 for alpha chain variable domain of TCR clone 267111 (TRAV13-1, TRAJ40)
CAASMTSGTYKYIF

SEQ ID NO: 534222 - protein, 13 aa, Homo sapiens
  CDR3 for beta chain variable domain of TCR clone 267111 (TRBV2, TRBJ1-6)
CASGRGGISPLHF

SEQ ID NO: 534223 - protein, 18 aa, Homo sapiens
  CDR3 for alpha chain variable domain of TCR clone 267112 (TRAV13-1, TRAJ52)
CAAKNPNAGGTSYGKLTF

SEQ ID NO: 534224 - protein, 16 aa, Homo sapiens
  CDR3 for beta chain variable domain of TCR clone 267112 (TRBV27, TRBJ2-2)
CASSFRGLVRTGELFF

SEQ ID NO: 534225 - protein, 12 aa, Homo sapiens
  CDR3 for alpha chain variable domain of TCR clone 267113 (TRAV1-2, TRAJ24)
CAVGGSWGKFQF

SEQ ID NO: 534226 - protein, 15 aa, Homo sapiens
  CDR3 for beta chain variable domain of TCR clone 267113 (TRBV7-9, TRBJ2-2)
CASGSLDTFPGELFF

SEQ ID NO: 534227 - protein, 15 aa, Homo sapiens
  CDR3 for alpha chain variable domain of TCR clone 267114 (TRAV38-1, TRAJ45)
CAFMKGGGGADGLTF

SEQ ID NO: 534228 - protein, 13 aa, Homo sapiens
  CDR3 for beta chain variable domain of TCR clone 267114 (TRBV7-9, TRBJ1-2)
CASSLKQNYGYAF

SEQ ID NO: 534229 - protein, 14 aa, Homo sapiens
  CDR3 for alpha chain variable domain of TCR clone 267115 (TRAV12-2, TRAJ13)
CAVKKTGGYQKVTF

SEQ ID NO: 534230 - protein, 15 aa, Homo sapiens
  CDR3 for beta chain variable domain of TCR clone 267115 (TRBV18, TRBJ2-1)
CASLPDRGRDNEQFF

SEQ ID NO: 534231 - protein, 16 aa, Homo sapiens
  CDR3 for alpha chain variable domain of TCR clone 267116 (TRAV26-1, TRAJ45)
CIVEKYSGGGADGLTF

SEQ ID NO: 534232 - protein, 14 aa, Homo sapiens
  CDR3 for beta chain variable domain of TCR clone 267116 (TRBV19, TRBJ2-1)
CASGKSTQYNEQFF

SEQ ID NO: 534233 - protein, 14 aa, Homo sapiens
  CDR3 for alpha chain variable domain of TCR clone 267117 (TRAV13-2, TRAJ17)
CAENGKAAGNKLTF

SEQ ID NO: 534234 - protein, 12 aa, Homo sapiens
  CDR3 for beta chain variable domain of TCR clone 267117 (TRBV27, TRBJ2-1)
CASRGFYNEQFF

SEQ ID NO: 534235 - protein, 16 aa, Homo sapiens
  CDR3 for alpha chain variable domain of TCR clone 267118 (TRAV26-1, TRAJ23)
CIVRVHPYNQGGKLIF

SEQ ID NO: 534236 - protein, 15 aa, Homo sapiens
  CDR3 for beta chain variable domain of TCR clone 267118 (TRBV5-7, TRBJ2-7)
CASSPYFEGSYEQYI

SEQ ID NO: 534237 - protein, 14 aa, Homo sapiens
  CDR3 for alpha chain variable domain of TCR clone 267119 (TRAV1-2, TRAJ8)
CAVREDTGFQKLVF

SEQ ID NO: 534238 - protein, 12 aa, Homo sapiens
  CDR3 for beta chain variable domain of TCR clone 267119 (TRBV5-1, TRBJ2-3)
CASSLAADTQYF

SEQ ID NO: 534239 - protein, 11 aa, Homo sapiens
  CDR3 for alpha chain variable domain of TCR clone 267120 (TRAV3, TRAJ21)
CAVRDIERGNF

SEQ ID NO: 534240 - protein, 13 aa, Homo sapiens
  CDR3 for beta chain variable domain of TCR clone 267120 (TRBV28, TRBJ2-5)
CASSSRNQETQYF

SEQ ID NO: 534241 - protein, 13 aa, Homo sapiens
  CDR3 for alpha chain variable domain of TCR clone 267121 (TRAV13-2, TRAJ53)
CAENMGSNYKLTF

SEQ ID NO: 534242 - protein, 15 aa, Homo sapiens
  CDR3 for beta chain variable domain of TCR clone 267121 (TRBV27, TRBJ1-6)
CASSFDRGLGSPLHF

SEQ ID NO: 534243 - protein, 17 aa, Homo sapiens
  CDR3 for alpha chain variable domain of TCR clone 267122 (TRAV3, TRAJ6)
CAVRDGPRAGGSYIPTF

SEQ ID NO: 534244 - protein, 17 aa, Homo sapiens
  CDR3 for beta chain variable domain of TCR clone 267122 (TRBV14, TRBJ2-5)
CASSQASGRPSTSGQAR

SEQ ID NO: 534245 - protein, 17 aa, Homo sapiens
  CDR3 for alpha chain variable domain of TCR clone 267123 (TRAV3, TRAJ6)
CAVRGVPRAGGSYIPTF

SEQ ID NO: 534246 - protein, 14 aa, Homo sapiens
  CDR3 for beta chain variable domain of TCR clone 267123 (TRBV7-2, TRBJ2-7)
CASSPKTSFYEQYF

SEQ ID NO: 534247 - protein, 11 aa, Homo sapiens
  CDR3 for alpha chain variable domain of TCR clone 267124 (TRAV17, TRAJ9)
CGFTGDFKTIF

SEQ ID NO: 534248 - protein, 14 aa, Homo sapiens
  CDR3 for beta chain variable domain of TCR clone 267124 (TRBV7-9, TRBJ2-2)
CASSLVQDTGELFF

SEQ ID NO: 534249 - protein, 14 aa, Homo sapiens
  CDR3 for alpha chain variable domain of TCR clone 267125 (TRAV12-3, TRAJ12)
CAMSEVDSSYKLIY

SEQ ID NO: 534250 - protein, 12 aa, Homo sapiens
  CDR3 for beta chain variable domain of TCR clone 267125 (TRBV18, TRBJ1-4)
CASSPSREKLFF

SEQ ID NO: 534251 - protein, 13 aa, Homo sapiens
  CDR3 for alpha chain variable domain of TCR clone 267126 (TRAV27, TRAJ41)
CAGEGNFGYALNF

SEQ ID NO: 534252 - protein, 14 aa, Homo sapiens
  CDR3 for beta chain variable domain of TCR clone 267126 (TRBV7-2, TRBJ1-1)
RASSFLTGTTEAFF

SEQ ID NO: 534253 - protein, 14 aa, Homo sapiens
  CDR3 for alpha chain variable domain of TCR clone 267127 (TRAV12-2, TRAJ13)
FAVKKTGGYQKVTF

SEQ ID NO: 534254 - protein, 14 aa, Homo sapiens
  CDR3 for beta chain variable domain of TCR clone 267127 (TRBV5-5, TRBJ2-7)
CASSLGQGTYEQYF

SEQ ID NO: 534255 - protein, 12 aa, Homo sapiens
  CDR3 for alpha chain variable domain of TCR clone 267128 (TRAV13-1, TRAJ21)
CAAKEGFNKFYF

SEQ ID NO: 534256 - protein, 13 aa, Homo sapiens
  CDR3 for beta chain variable domain of TCR clone 267128 (TRBV19, TRBJ2-7)
CASSPRQSYEQYF

SEQ ID NO: 534257 - protein, 14 aa, Homo sapiens
  CDR3 for alpha chain variable domain of TCR clone 267129 (TRAV23/DV6, TRAJ36)
CAASRRTGANNPFF

SEQ ID NO: 534258 - protein, 15 aa, Homo sapiens
  CDR3 for beta chain variable domain of TCR clone 267129 (TRBV5-1, TRBJ2-1)
CASSPPRAPYNEQFF

SEQ ID NO: 534259 - protein, 16 aa, Homo sapiens
  CDR3 for alpha chain variable domain of TCR clone 267130 (TRAV8-3, TRAJ28)
CAVQPQRGAGSYQLTF

SEQ ID NO: 534260 - protein, 13 aa, Homo sapiens
  CDR3 for beta chain variable domain of TCR clone 267130 (TRBV7-6, TRBJ2-3)
CASSLRSDNTQYF

SEQ ID NO: 534261 - protein, 13 aa, Homo sapiens
  CDR3 for alpha chain variable domain of TCR clone 267131 (TRAV12-3, TRAJ43)
CAMIRPNNNDMRC

SEQ ID NO: 534262 - protein, 12 aa, Homo sapiens
  CDR3 for beta chain variable domain of TCR clone 267131 (TRBV11-2, TRBJ2-5)
CASSLGQETQYF

SEQ ID NO: 534263 - protein, 17 aa, Homo sapiens
  CDR3 for alpha chain variable domain of TCR clone 267132 (TRAV3, TRAJ42)
CAVRDRDYGGSQGNLIF

SEQ ID NO: 534264 - protein, 13 aa, Homo sapiens
  CDR3 for beta chain variable domain of TCR clone 267132 (TRBV12-4, TRBJ2-7)
CACSPTETYEQYF

SEQ ID NO: 534265 - protein, 16 aa, Homo sapiens
  CDR3 for alpha chain variable domain of TCR clone 267133 (TRAV3, TRAJ5)
CAVRNLMDTGRRALTY

SEQ ID NO: 534266 - protein, 16 aa, Homo sapiens
  CDR3 for beta chain variable domain of TCR clone 267133 (TRBV4-2, TRBJ2-7)
CASSQEGLANSYEQYF

SEQ ID NO: 534267 - protein, 11 aa, Homo sapiens
  CDR3 for alpha chain variable domain of TCR clone 267134 (TRAV12-3, TRAJ49)
CAANTGNQLYL

SEQ ID NO: 534268 - protein, 12 aa, Homo sapiens
  CDR3 for beta chain variable domain of TCR clone 267134 (TRBV6-3, TRBJ2-7)
CASSEPGFEQYF

SEQ ID NO: 534269 - protein, 13 aa, Homo sapiens
  CDR3 for alpha chain variable domain of TCR clone 267135 (TRAV8-3, TRAJ48)
CAVVPFGNEKLTF

SEQ ID NO: 534270 - protein, 15 aa, Homo sapiens
  CDR3 for beta chain variable domain of TCR clone 267135 (TRBV11-2, TRBJ2-1)
CASRSPSPRYNEQFF

SEQ ID NO: 534271 - protein, 13 aa, Homo sapiens
  CDR3 for alpha chain variable domain of TCR clone 267136 (TRAV2, TRAJ15)
CAVASQAGTALIF

SEQ ID NO: 534272 - protein, 16 aa, Homo sapiens
  CDR3 for beta chain variable domain of TCR clone 267136 (TRBV20-1, TRBJ1-4)
CSAPGQGLLTNEELFF

SEQ ID NO: 534273 - protein, 12 aa, Homo sapiens
  CDR3 for alpha chain variable domain of TCR clone 267137 (TRAV12-3, TRAJ20)
CAMVRGDYKLSF

SEQ ID NO: 534274 - protein, 14 aa, Homo sapiens
  CDR3 for beta chain variable domain of TCR clone 267137 (TRBV5-5, TRBJ1-5)
CASSGHGVDQPQHF

SEQ ID NO: 534275 - protein, 14 aa, Homo sapiens
  CDR3 for alpha chain variable domain of TCR clone 267138 (TRAV26-2, TRAJ32)
CWVGYGGATNKLIF

SEQ ID NO: 534276 - protein, 14 aa, Homo sapiens
  CDR3 for beta chain variable domain of TCR clone 267138 (TRBV7-6, TRBJ2-3)
CASSLGTVTDTQYF

SEQ ID NO: 534277 - protein, 18 aa, Homo sapiens
  CDR3 for alpha chain variable domain of TCR clone 267139 (TRAV26-2, TRAJ54)
CILRDVEVGIQGAQKLVF

SEQ ID NO: 534278 - protein, 13 aa, Homo sapiens
  CDR3 for beta chain variable domain of TCR clone 267139 (TRBV9, TRBJ2-7)
CASSVAEYYEQYF

SEQ ID NO: 534279 - protein, 13 aa, Homo sapiens
  CDR3 for alpha chain variable domain of TCR clone 267140 (TRAV27, TRAJ45)
CRSSGGGADGLTF

SEQ ID NO: 534280 - protein, 14 aa, Homo sapiens
  CDR3 for beta chain variable domain of TCR clone 267140 (TRBV12-4, TRBJ1-1)
CASSLGTGGTEAFF

SEQ ID NO: 534281 - protein, 14 aa, Homo sapiens
  CDR3 for alpha chain variable domain of TCR clone 267141 (TRAV12-3, TRAJ10)
SHLPLTGGGNKFTF

SEQ ID NO: 534282 - protein, 13 aa, Homo sapiens
  CDR3 for beta chain variable domain of TCR clone 267141 (TRBV12-4, TRBJ1-1)
CASSPGTGFEAFF

SEQ ID NO: 534283 - protein, 15 aa, Homo sapiens
  CDR3 for alpha chain variable domain of TCR clone 267142 (TRAV35, TRAJ40)
CAGQLGTSGTYKYIF

SEQ ID NO: 534284 - protein, 16 aa, Homo sapiens
  CDR3 for beta chain variable domain of TCR clone 267142 (TRBV11-2, TRBJ2-7)
CASSPTTGGVSYEQYF

SEQ ID NO: 534285 - protein, 14 aa, Homo sapiens
  CDR3 for alpha chain variable domain of TCR clone 267143 (TRAV13-1, TRAJ44)
CAAKATGTASILTF

SEQ ID NO: 534286 - protein, 17 aa, Homo sapiens
  CDR3 for beta chain variable domain of TCR clone 267143 (TRBV7-3, TRBJ2-3)
RASSLMKRMRGADTQYF

SEQ ID NO: 534287 - protein, 14 aa, Homo sapiens
  CDR3 for alpha chain variable domain of TCR clone 267144 (TRAV13-1, TRAJ21)
CAAKEGLTNFTLDL

SEQ ID NO: 534288 - protein, 14 aa, Homo sapiens
  CDR3 for beta chain variable domain of TCR clone 267144 (TRBV5-4, TRBJ1-1)
CASSLDSRRDEAFF

SEQ ID NO: 534289 - protein, 14 aa, Homo sapiens
  CDR3 for alpha chain variable domain of TCR clone 267145 (TRAV27, TRAJ44)
CAGARTGTASKLTF

SEQ ID NO: 534290 - protein, 20 aa, Homo sapiens
  CDR3 for beta chain variable domain of TCR clone 267145 (TRBV7-8, TRBJ2-2)
CASSHLFPGPTIHITGELFF

SEQ ID NO: 534291 - protein, 13 aa, Homo sapiens
  CDR3 for alpha chain variable domain of TCR clone 267146 (TRAV3, TRAJ3)
CAMRALGDSKIIF

SEQ ID NO: 534292 - protein, 18 aa, Homo sapiens
  CDR3 for beta chain variable domain of TCR clone 267146 (TRBV12-4, TRBJ2-5)
CASSPSGGRDPVLRARHA

SEQ ID NO: 534293 - protein, 15 aa, Homo sapiens
  CDR3 for alpha chain variable domain of TCR clone 267147 (TRAV38-1, TRAJ37)
CAFIHVSGNTGKLIC

SEQ ID NO: 534294 - protein, 12 aa, Homo sapiens
  CDR3 for beta chain variable domain of TCR clone 267147 (TRBV7-9, TRBJ2-7)
CASSFGSYEQYF

SEQ ID NO: 534295 - protein, 16 aa, Homo sapiens
  CDR3 for alpha chain variable domain of TCR clone 267148 (TRAV13-1, TRAJ17)
CAASKGVQAAGNKLTF

SEQ ID NO: 534296 - protein, 15 aa, Homo sapiens
  CDR3 for beta chain variable domain of TCR clone 267148 (TRBV20-1, TRBJ1-5)
CSAREGGYSNQPQHF

SEQ ID NO: 534297 - protein, 13 aa, Homo sapiens
  CDR3 for alpha chain variable domain of TCR clone 267149 (TRAV13-2, TRAJ48)
CAEMGFGNEKLNF

SEQ ID NO: 534298 - protein, 15 aa, Homo sapiens
  CDR3 for beta chain variable domain of TCR clone 267149 (TRBV7-9, TRBJ1-6)
CASSSPGRGNSPLHF

SEQ ID NO: 534299 - protein, 16 aa, Homo sapiens
  CDR3 for alpha chain variable domain of TCR clone 267150 (TRAV38-1, TRAJ32)
CAFMPFLGGATNKLIF

SEQ ID NO: 534300 - protein, 14 aa, Homo sapiens
  CDR3 for beta chain variable domain of TCR clone 267150 (TRBV6-1, TRBJ1-3)
CASVQGGGGNTIYC

SEQ ID NO: 534301 - protein, 16 aa, Homo sapiens
  CDR3 for alpha chain variable domain of TCR clone 267151 (TRAV12-3, TRAJ53)
CAMSPGSRGSNYKLTF

SEQ ID NO: 534302 - protein, 11 aa, Homo sapiens
  CDR3 for beta chain variable domain of TCR clone 267151 (TRBV29-1, TRBJ2-5)
YSEDRTGTQYF

SEQ ID NO: 534303 - protein, 15 aa, Homo sapiens
  CDR3 for alpha chain variable domain of TCR clone 267152 (TRAV34, TRAJ38)
CGADFTPGNNRKLLW

SEQ ID NO: 534304 - protein, 14 aa, Homo sapiens
  CDR3 for beta chain variable domain of TCR clone 267152 (TRBV12-5, TRBJ2-5)
CASGSRTHQETQYF

SEQ ID NO: 534305 - protein, 17 aa, Homo sapiens
  CDR3 for alpha chain variable domain of TCR clone 267153 (TRAV26-1, TRAJ36)
CIVRPPGDQTGANNPFF

SEQ ID NO: 534306 - protein, 16 aa, Homo sapiens
  CDR3 for beta chain variable domain of TCR clone 267153 (TRBV19, TRBJ2-1)
CASSKAGPSSYNEQFL

SEQ ID NO: 534307 - protein, 13 aa, Homo sapiens
  CDR3 for alpha chain variable domain of TCR clone 267154 (TRAV3, TRAJ27)
CAVRPLGAGKSTF

SEQ ID NO: 534308 - protein, 15 aa, Homo sapiens
  CDR3 for beta chain variable domain of TCR clone 267154 (TRBV7-9, TRBJ1-2)
CASSLDREPNYGYTF

SEQ ID NO: 534309 - protein, 17 aa, Homo sapiens
  CDR3 for alpha chain variable domain of TCR clone 267155 (TRAV13-1, TRAJ3)
CAASKAGRGSSASKIIF

SEQ ID NO: 534310 - protein, 15 aa, Homo sapiens
  CDR3 for beta chain variable domain of TCR clone 267155 (TRBV20-1, TRBJ1-5)
CSAREGGHSKQPQHF

SEQ ID NO: 534311 - protein, 11 aa, Homo sapiens
  CDR3 for alpha chain variable domain of TCR clone 267156 (TRAV20, TRAJ34)
CTRDNTDKLTF

SEQ ID NO: 534312 - protein, 15 aa, Homo sapiens
  CDR3 for beta chain variable domain of TCR clone 267156 (TRBV2, TRBJ2-1)
CASSVTSEGTDEQFF

SEQ ID NO: 534313 - protein, 14 aa, Homo sapiens
  CDR3 for alpha chain variable domain of TCR clone 267157 (TRAV2, TRAJ9)
CAVDPHTGGFKTIF

SEQ ID NO: 534314 - protein, 16 aa, Homo sapiens
  CDR3 for beta chain variable domain of TCR clone 267157 (TRBV13, TRBJ2-2)
CASSPRTGEHTGEPFL

SEQ ID NO: 534315 - protein, 12 aa, Homo sapiens
  CDR3 for alpha chain variable domain of TCR clone 267158 (TRAV25, TRAJ31)
CAGHLNNARLMF

SEQ ID NO: 534316 - protein, 15 aa, Homo sapiens
  CDR3 for beta chain variable domain of TCR clone 267158 (TRBV5-1, TRBJ2-7)
CASSLMTSGSNEQYF

SEQ ID NO: 534317 - protein, 13 aa, Homo sapiens
  CDR3 for alpha chain variable domain of TCR clone 267159 (TRAV27, TRAJ42)
CAGARGSQGNLIF

SEQ ID NO: 534318 - protein, 15 aa, Homo sapiens
  CDR3 for beta chain variable domain of TCR clone 267159 (TRBV10-3, TRBJ2-2)
CAIRTDREDPGELFF

SEQ ID NO: 534319 - protein, 13 aa, Homo sapiens
  CDR3 for alpha chain variable domain of TCR clone 267160 (TRAV3, TRAJ3)
CAVRALGASKINF

SEQ ID NO: 534320 - protein, 18 aa, Homo sapiens
  CDR3 for beta chain variable domain of TCR clone 267160 (TRBV12-4, TRBJ2-5)
CASSPSGGRDPVLRARHA

SEQ ID NO: 534321 - protein, 15 aa, Homo sapiens
  CDR3 for alpha chain variable domain of TCR clone 267161 (TRAV8-6, TRAJ9)
CAVSDRDTGGFKTSF

SEQ ID NO: 534322 - protein, 16 aa, Homo sapiens
  CDR3 for beta chain variable domain of TCR clone 267161 (TRBV19, TRBJ2-3)
CASSPEWDRGTDTQYF

SEQ ID NO: 534323 - protein, 12 aa, Homo sapiens
  CDR3 for alpha chain variable domain of TCR clone 267162 (TRAV13-2, TRAJ8)
CAPWLGFQKLVF

SEQ ID NO: 534324 - protein, 15 aa, Homo sapiens
  CDR3 for beta chain variable domain of TCR clone 267162 (TRBV12-4, TRBJ2-5)
CASSLGGAFQETQYF

SEQ ID NO: 534325 - protein, 14 aa, Homo sapiens
  CDR3 for alpha chain variable domain of TCR clone 267163 (TRAV16, TRAJ33)
CALSAMDSNYQLIW

SEQ ID NO: 534326 - protein, 16 aa, Homo sapiens
  CDR3 for beta chain variable domain of TCR clone 267163 (TRBV25-1, TRBJ2-7)
CASSELTGGGICEQYF

SEQ ID NO: 534327 - protein, 14 aa, Homo sapiens
  CDR3 for alpha chain variable domain of TCR clone 267164 (TRAV8-4, TRAJ13)
CAVTLSGGYQKVTF

SEQ ID NO: 534328 - protein, 16 aa, Homo sapiens
  CDR3 for beta chain variable domain of TCR clone 267164 (TRBV20-1, TRBJ1-2)
CSASMGQGVANYGYTF

SEQ ID NO: 534329 - protein, 11 aa, Homo sapiens
  CDR3 for alpha chain variable domain of TCR clone 267165 (TRAV12-1, TRAJ43)
CVEYDNNEMRF

SEQ ID NO: 534330 - protein, 17 aa, Homo sapiens
  CDR3 for beta chain variable domain of TCR clone 267165 (TRBV20-1, TRBJ2-1)
CSARDPLAGVWDNEQFF

SEQ ID NO: 534331 - protein, 12 aa, Homo sapiens
  CDR3 for alpha chain variable domain of TCR clone 267166 (TRAV13-2, TRAJ8)
CAPWLGFQKLVF

SEQ ID NO: 534332 - protein, 14 aa, Homo sapiens
  CDR3 for beta chain variable domain of TCR clone 267166 (TRBV3-1, TRBJ2-1)
CASSLSTRQGKEFF

SEQ ID NO: 534333 - protein, 20 aa, Homo sapiens
  CDR3 for alpha chain variable domain of TCR clone 267167 (TRAV21, TRAJ22)
SLVTQPPTLKSSGSARQLTF

SEQ ID NO: 534334 - protein, 16 aa, Homo sapiens
  CDR3 for beta chain variable domain of TCR clone 267167 (TRBV7-3, TRBJ2-2)
CASSLKRGTLSGELFF

SEQ ID NO: 534335 - protein, 14 aa, Homo sapiens
  CDR3 for alpha chain variable domain of TCR clone 267168 (TRAV17, TRAJ16)
CATADFSDGQKLLC

SEQ ID NO: 534336 - protein, 15 aa, Homo sapiens
  CDR3 for beta chain variable domain of TCR clone 267168 (TRBV18, TRBJ2-1)
CASSPPSASYNEQFF

SEQ ID NO: 534337 - protein, 13 aa, Homo sapiens
  CDR3 for alpha chain variable domain of TCR clone 267169 (TRAV1-2, TRAJ20)
CAVRDGNDYTLSF

SEQ ID NO: 534338 - protein, 14 aa, Homo sapiens
  CDR3 for beta chain variable domain of TCR clone 267169 (TRBV7-2, TRBJ2-3)
CQQLRGGGRDTQYF

SEQ ID NO: 534339 - protein, 15 aa, Homo sapiens
  CDR3 for alpha chain variable domain of TCR clone 267170 (TRAV21, TRAJ53)
CATLNSGGSNYKLTF

SEQ ID NO: 534340 - protein, 15 aa, Homo sapiens
  CDR3 for beta chain variable domain of TCR clone 267170 (TRBV12-4, TRBJ1-5)
CQQPTGRGSNQPQHF

SEQ ID NO: 534341 - protein, 11 aa, Homo sapiens
  CDR3 for alpha chain variable domain of TCR clone 267171 (TRAV2, TRAJ13)
CASGGYQKVTF

SEQ ID NO: 534342 - protein, 16 aa, Homo sapiens
  CDR3 for beta chain variable domain of TCR clone 267171 (TRBV5-1, TRBJ2-5)
CASSSSGLGGAETQYF

SEQ ID NO: 534343 - protein, 15 aa, Homo sapiens
  CDR3 for alpha chain variable domain of TCR clone 267172 (TRAV8-3, TRAJ23)
CAVGDRYNQGGKLIF

SEQ ID NO: 534344 - protein, 22 aa, Homo sapiens
  CDR3 for beta chain variable domain of TCR clone 267172 (TRBV29-1, TRBJ2-5)
TVSNMSPEDSSIYPCSAGTQYF

SEQ ID NO: 534345 - protein, 14 aa, Homo sapiens
  CDR3 for alpha chain variable domain of TCR clone 267173 (TRAV16, TRAJ33)
CALSAMDSNYQLIW

SEQ ID NO: 534346 - protein, 17 aa, Homo sapiens
  CDR3 for beta chain variable domain of TCR clone 267173 (TRBV25-1, TRBJ2-7)
CASSDARVVFSSYKQYF

SEQ ID NO: 534347 - protein, 14 aa, Homo sapiens
  CDR3 for alpha chain variable domain of TCR clone 267174 (TRAV12-3, TRAJ33)
CAMSVPGSNYQLIW

SEQ ID NO: 534348 - protein, 16 aa, Homo sapiens
  CDR3 for beta chain variable domain of TCR clone 267174 (TRBV10-3, TRBJ2-3)
CAISVSRLALTDTQYF

SEQ ID NO: 534349 - protein, 13 aa, Homo sapiens
  CDR3 for alpha chain variable domain of TCR clone 267175 (TRAV27, TRAJ3)
ASLRGSSASKIIF

SEQ ID NO: 534350 - protein, 13 aa, Homo sapiens
  CDR3 for beta chain variable domain of TCR clone 267175 (TRBV7-9, TRBJ1-1)
CASNNREGTEAFF

SEQ ID NO: 534351 - protein, 10 aa, Homo sapiens
  CDR3 for alpha chain variable domain of TCR clone 267176 (TRAV23/DV6, TRAJ57)
CAASSTLSQG

SEQ ID NO: 534352 - protein, 15 aa, Homo sapiens
  CDR3 for beta chain variable domain of TCR clone 267176 (TRBV11-2, TRBJ2-2)
CASSSDRVNAGELFF

SEQ ID NO: 534353 - protein, 14 aa, Homo sapiens
  CDR3 for alpha chain variable domain of TCR clone 267177 (TRAV17, TRAJ12)
CGILPMDSSYKLIF

SEQ ID NO: 534354 - protein, 14 aa, Homo sapiens
  CDR3 for beta chain variable domain of TCR clone 267177 (TRBV6-7, TRBJ2-3)
VTPRRGTNTDTQYF

SEQ ID NO: 534355 - protein, 13 aa, Homo sapiens
  CDR3 for alpha chain variable domain of TCR clone 267178 (TRAV21, TRAJ36)
CAVIKTGADNLFF

SEQ ID NO: 534356 - protein, 13 aa, Homo sapiens
  CDR3 for beta chain variable domain of TCR clone 267178 (TRBV29-1, TRBJ2-3)
CSATRGGRDTQYF

SEQ ID NO: 534357 - protein, 10 aa, Homo sapiens
  CDR3 for alpha chain variable domain of TCR clone 267179 (TRAV23/DV6, TRAJ57)
CAASSTLSQA

SEQ ID NO: 534358 - protein, 15 aa, Homo sapiens
  CDR3 for beta chain variable domain of TCR clone 267179 (TRBV7-9, TRBJ2-2)
CASGPLDTFPGELFF

SEQ ID NO: 534359 - protein, 14 aa, Homo sapiens
  CDR3 for alpha chain variable domain of TCR clone 267180 (TRAV13-1, TRAJ35)
CAASKGGFGNVLHC

SEQ ID NO: 534360 - protein, 12 aa, Homo sapiens
  CDR3 for beta chain variable domain of TCR clone 267180 (TRBV19, TRBJ1-4)
CASKDWPGGLFF

SEQ ID NO: 534361 - protein, 16 aa, Homo sapiens
  CDR3 for alpha chain variable domain of TCR clone 267181 (TRAV8-2, TRAJ50)
CVVSDHMKTSYDKVIF

SEQ ID NO: 534362 - protein, 15 aa, Homo sapiens
  CDR3 for beta chain variable domain of TCR clone 267181 (TRBV7-2, TRBJ2-1)
CASTFQADEYNEQFF

SEQ ID NO: 534363 - protein, 15 aa, Homo sapiens
  CDR3 for alpha chain variable domain of TCR clone 267182 (TRAV12-2, TRAJ53)
CAVNGWGGSHYKLTF

SEQ ID NO: 534364 - protein, 13 aa, Homo sapiens
  CDR3 for beta chain variable domain of TCR clone 267182 (TRBV3-1, TRBJ1-1)
CASSPGVITEAFF

SEQ ID NO: 534365 - protein, 13 aa, Homo sapiens
  CDR3 for alpha chain variable domain of TCR clone 267183 (TRAV12-1, TRAJ7)
CVVNMRWNNRLAF

SEQ ID NO: 534366 - protein, 15 aa, Homo sapiens
  CDR3 for beta chain variable domain of TCR clone 267183 (TRBV27, TRBJ2-3)
CASSLGLAATDTQYF

SEQ ID NO: 534367 - protein, 19 aa, Homo sapiens
  CDR3 for alpha chain variable domain of TCR clone 267184 (TRAV12-1, TRAJ17)
IQPPTSVVNYKAAGNKLTF

SEQ ID NO: 534368 - protein, 17 aa, Homo sapiens
  CDR3 for beta chain variable domain of TCR clone 267184 (TRBV20-1, TRBJ2-1)
CSASSSGLAGSYNEQFF

SEQ ID NO: 534369 - protein, 17 aa, Homo sapiens
  CDR3 for alpha chain variable domain of TCR clone 267185 (TRAV3, TRAJ6)
CAVRDGPRAGGSYIPKS

SEQ ID NO: 534370 - protein, 14 aa, Homo sapiens
  CDR3 for beta chain variable domain of TCR clone 267185 (TRBV7-2, TRBJ2-7)
CASSPKTSFYEQYF

SEQ ID NO: 534371 - protein, 13 aa, Homo sapiens
  CDR3 for alpha chain variable domain of TCR clone 267186 (TRAV36/DV7, TRAJ34)
CAVGEVNTDKLIF

SEQ ID NO: 534372 - protein, 12 aa, Homo sapiens
  CDR3 for beta chain variable domain of TCR clone 267186 (TRBV12-4, TRBJ2-7)
CASSLGGYEQYF

SEQ ID NO: 534373 - protein, 18 aa, Homo sapiens
  CDR3 for alpha chain variable domain of TCR clone 267187 (TRAV9-2, TRAJ52)
CALSRPNAGGTSYGKLTF

SEQ ID NO: 534374 - protein, 16 aa, Homo sapiens
  CDR3 for beta chain variable domain of TCR clone 267187 (TRBV19, TRBJ2-1)
CASSKAGPSSYNEQFF

SEQ ID NO: 534375 - protein, 13 aa, Homo sapiens
  CDR3 for alpha chain variable domain of TCR clone 267188 (TRAV23/DV6, TRAJ10)
ASVRTGGGNKLTF

SEQ ID NO: 534376 - protein, 13 aa, Homo sapiens
  CDR3 for beta chain variable domain of TCR clone 267188 (TRBV11-1, TRBJ1-2)
CASVGSWGYGYTF

SEQ ID NO: 534377 - protein, 13 aa, Homo sapiens
  CDR3 for alpha chain variable domain of TCR clone 267189 (TRAV12-3, TRAJ21)
CAPGPHNFNKFYF

SEQ ID NO: 534378 - protein, 16 aa, Homo sapiens
  CDR3 for beta chain variable domain of TCR clone 267189 (TRBV5-1, TRBJ2-2)
CASSSYRVGDTGELFF

SEQ ID NO: 534379 - protein, 12 aa, Homo sapiens
  CDR3 for alpha chain variable domain of TCR clone 267190 (TRAV35, TRAJ39)
LAPNNAGNMLTF

SEQ ID NO: 534380 - protein, 13 aa, Homo sapiens
  CDR3 for beta chain variable domain of TCR clone 267190 (TRBV19, TRBJ1-3)
CASGLSLGNTIYF

SEQ ID NO: 534381 - protein, 10 aa, Homo sapiens
  CDR3 for alpha chain variable domain of TCR clone 267191 (TRAV1-2, TRAJ18)
CAVRGEAQPW

SEQ ID NO: 534382 - protein, 16 aa, Homo sapiens
  CDR3 for beta chain variable domain of TCR clone 267191 (TRBV6-3, TRBJ2-1)
CASSYRTSGIGNEQFF

SEQ ID NO: 534383 - protein, 13 aa, Homo sapiens
  CDR3 for alpha chain variable domain of TCR clone 267192 (TRAV17, TRAJ8)
CATGPVGFQKVVF

SEQ ID NO: 534384 - protein, 15 aa, Homo sapiens
  CDR3 for beta chain variable domain of TCR clone 267192 (TRBV20-1, TRBJ2-5)
CSAGRLPSGQETQYF

SEQ ID NO: 534385 - protein, 12 aa, Homo sapiens
  CDR3 for alpha chain variable domain of TCR clone 267193 (TRAV23/DV6, TRAJ31)
CATHRIGARLMF

SEQ ID NO: 534386 - protein, 13 aa, Homo sapiens
  CDR3 for beta chain variable domain of TCR clone 267193 (TRBV28, TRBJ2-7)
CASKAGGVYEQYF

SEQ ID NO: 534387 - protein, 16 aa, Homo sapiens
  CDR3 for alpha chain variable domain of TCR clone 267194 (TRAV3, TRAJ10)
CAVRDMRAEGGNKLTF

SEQ ID NO: 534388 - protein, 16 aa, Homo sapiens
  CDR3 for beta chain variable domain of TCR clone 267194 (TRBV7-3, TRBJ2-2)
CASSLKRGTLSGELFF

SEQ ID NO: 534389 - protein, 13 aa, Homo sapiens
  CDR3 for alpha chain variable domain of TCR clone 267195 (TRAV1-2, TRAJ9)
CAVLNTGGFKTLF

SEQ ID NO: 534390 - protein, 15 aa, Homo sapiens
  CDR3 for beta chain variable domain of TCR clone 267195 (TRBV7-3, TRBJ2-1)
CASSPTGGGEVEQFF

SEQ ID NO: 534391 - protein, 15 aa, Homo sapiens
  CDR3 for alpha chain variable domain of TCR clone 267196 (TRAV8-3, TRAJ41)
CAVGSNSNSGYALNF

SEQ ID NO: 534392 - protein, 17 aa, Homo sapiens
  CDR3 for beta chain variable domain of TCR clone 267196 (TRBV25-1, TRBJ2-1)
CASSAYGQGRWVYEQFF

SEQ ID NO: 534393 - protein, 18 aa, Homo sapiens
  CDR3 for alpha chain variable domain of TCR clone 267197 (TRAV21, TRAJ53)
CAVKGGENSGCSNYKLTF

SEQ ID NO: 534394 - protein, 14 aa, Homo sapiens
  CDR3 for beta chain variable domain of TCR clone 267197 (TRBV6-1, TRBJ1-5)
CASSAGAGSQPQHF

SEQ ID NO: 534395 - protein, 14 aa, Homo sapiens
  CDR3 for alpha chain variable domain of TCR clone 267198 (TRAV35, TRAJ50)
CAGHRKISYDKVIF

SEQ ID NO: 534396 - protein, 13 aa, Homo sapiens
  CDR3 for beta chain variable domain of TCR clone 267198 (TRBV7-7, TRBJ2-3)
CASSLSRADTQYF

SEQ ID NO: 534397 - protein, 14 aa, Homo sapiens
  CDR3 for alpha chain variable domain of TCR clone 267199 (TRAV26-1, TRAJ6)
CIVSPVGGSDIPTF

SEQ ID NO: 534398 - protein, 16 aa, Homo sapiens
  CDR3 for beta chain variable domain of TCR clone 267199 (TRBV4-1, TRBJ2-5)
CASSSGLAGVLGTQYF

SEQ ID NO: 534399 - protein, 14 aa, Homo sapiens
  CDR3 for alpha chain variable domain of TCR clone 267200 (TRAV1-2, TRAJ16)
CAVNRFSDGQKLLF

SEQ ID NO: 534400 - protein, 16 aa, Homo sapiens
  CDR3 for beta chain variable domain of TCR clone 267200 (TRBV12-4, TRBJ1-5)
CASSRPVGGANQPQHF

SEQ ID NO: 534401 - protein, 18 aa, Homo sapiens
  CDR3 for alpha chain variable domain of TCR clone 267201 (TRAV12-3, TRAJ52)
CAMSRTNAGGTSYGTLTF

SEQ ID NO: 534402 - protein, 13 aa, Homo sapiens
  CDR3 for beta chain variable domain of TCR clone 267201 (TRBV7-9, TRBJ1-2)
CASSLKQNYGYTF

SEQ ID NO: 534403 - protein, 15 aa, Homo sapiens
  CDR3 for alpha chain variable domain of TCR clone 267202 (TRAV8-1, TRAJ6)
CAVNANPGGSYIPKF

SEQ ID NO: 534404 - protein, 12 aa, Homo sapiens
  CDR3 for beta chain variable domain of TCR clone 267202 (TRBV5-7, TRBJ2-7)
CASSVQGGEQYF

SEQ ID NO: 534405 - protein, 13 aa, Homo sapiens
  CDR3 for alpha chain variable domain of TCR clone 267203 (TRAV8-3, TRAJ28)
CDVGAVGSYQLTF

SEQ ID NO: 534406 - protein, 15 aa, Homo sapiens
  CDR3 for beta chain variable domain of TCR clone 267203 (TRBV7-9, TRBJ1-5)
CASSQGYQPNQPQHF

SEQ ID NO: 534407 - protein, 15 aa, Homo sapiens
  CDR3 for alpha chain variable domain of TCR clone 267204 (TRAV17, TRAJ52)
CATEAGGNSYGKLTF

SEQ ID NO: 534408 - protein, 14 aa, Homo sapiens
  CDR3 for beta chain variable domain of TCR clone 267204 (TRBV28, TRBJ1-5)
CVSSLGVLVKPQHF

SEQ ID NO: 534409 - protein, 14 aa, Homo sapiens
  CDR3 for alpha chain variable domain of TCR clone 267205 (TRAV1-2, TRAJ8)
FAVREDTGFQKLVF

SEQ ID NO: 534410 - protein, 15 aa, Homo sapiens
  CDR3 for beta chain variable domain of TCR clone 267205 (TRBV5-5, TRBJ1-5)
CASSSTPGSNQPQHF

SEQ ID NO: 534411 - protein, 11 aa, Homo sapiens
  CDR3 for alpha chain variable domain of TCR clone 267206 (TRAV1-2, TRAJ31)
CAVINNARLMF

SEQ ID NO: 534412 - protein, 17 aa, Homo sapiens
  CDR3 for beta chain variable domain of TCR clone 267206 (TRBV15, TRBJ1-1)
CATSRVGGADGDTEAFF

SEQ ID NO: 534413 - protein, 14 aa, Homo sapiens
  CDR3 for alpha chain variable domain of TCR clone 267207 (TRAV13-1, TRAJ35)
CAASKGGFGNVLHC

SEQ ID NO: 534414 - protein, 15 aa, Homo sapiens
  CDR3 for beta chain variable domain of TCR clone 267207 (TRBV18, TRBJ1-1)
CASSPRQGENTEAFF

SEQ ID NO: 534415 - protein, 14 aa, Homo sapiens
  CDR3 for alpha chain variable domain of TCR clone 267208 (TRAV9-2, TRAJ39)
CALYIYNAGDMLTS

SEQ ID NO: 534416 - protein, 14 aa, Homo sapiens
  CDR3 for beta chain variable domain of TCR clone 267208 (TRBV9, TRBJ2-7)
CASSPLRAVGEQYF

SEQ ID NO: 534417 - protein, 13 aa, Homo sapiens
  CDR3 for alpha chain variable domain of TCR clone 267209 (TRAV13-1, TRAJ33)
CAASRAGNYQLIW

SEQ ID NO: 534418 - protein, 12 aa, Homo sapiens
  CDR3 for beta chain variable domain of TCR clone 267209 (TRBV11-2, TRBJ1-2)
CASSRERDGYTF

SEQ ID NO: 534419 - protein, 14 aa, Homo sapiens
  CDR3 for alpha chain variable domain of TCR clone 267210 (TRAV2, TRAJ9)
CAVEDRSGGFNTIF

SEQ ID NO: 534420 - protein, 12 aa, Homo sapiens
  CDR3 for beta chain variable domain of TCR clone 267210 (TRBV12-5, TRBJ2-5)
CASGQGVETQYF

SEQ ID NO: 534421 - protein, 14 aa, Homo sapiens
  CDR3 for alpha chain variable domain of TCR clone 267211 (TRAV12-2, TRAJ15)
CAPHTGPAGTALIF

SEQ ID NO: 534422 - protein, 14 aa, Homo sapiens
  CDR3 for beta chain variable domain of TCR clone 267211 (TRBV7-2, TRBJ2-7)
CASSPKTSFYEQYF

SEQ ID NO: 534423 - protein, 11 aa, Homo sapiens
  CDR3 for alpha chain variable domain of TCR clone 267212 (TRAV21, TRAJ34)
RAHYNTDKLIF

SEQ ID NO: 534424 - protein, 13 aa, Homo sapiens
  CDR3 for beta chain variable domain of TCR clone 267212 (TRBV20-1, TRBJ2-7)
CSADPGATYEQYF

SEQ ID NO: 534425 - protein, 20 aa, Homo sapiens
  CDR3 for alpha chain variable domain of TCR clone 267213 (TRAV26-1, TRAJ30)
CIVRVEMTRSSLEKGHDFIF

SEQ ID NO: 534426 - protein, 14 aa, Homo sapiens
  CDR3 for beta chain variable domain of TCR clone 267213 (TRBV19, TRBJ2-2)
CASSTGQGAGELFF

SEQ ID NO: 534427 - protein, 14 aa, Homo sapiens
  CDR3 for alpha chain variable domain of TCR clone 267214 (TRAV1-2, TRAJ16)
CAVNRFSDGQKLLF

SEQ ID NO: 534428 - protein, 15 aa, Homo sapiens
  CDR3 for beta chain variable domain of TCR clone 267214 (TRBV9, TRBJ1-6)
CASSVAGTGDSHVHF

SEQ ID NO: 534429 - protein, 13 aa, Homo sapiens
  CDR3 for alpha chain variable domain of TCR clone 267215 (TRAV1-2, TRAJ9)
CAALNTGGFKTIF

SEQ ID NO: 534430 - protein, 14 aa, Homo sapiens
  CDR3 for beta chain variable domain of TCR clone 267215 (TRBV13, TRBJ2-3)
CASCSGSPTDTQYF

SEQ ID NO: 534431 - protein, 13 aa, Homo sapiens
  CDR3 for alpha chain variable domain of TCR clone 267216 (TRAV20, TRAJ37)
CAGCSSNTGKLIF

SEQ ID NO: 534432 - protein, 15 aa, Homo sapiens
  CDR3 for beta chain variable domain of TCR clone 267216 (TRBV18, TRBJ2-1)
CASSPPSASYNEQFF

SEQ ID NO: 534433 - protein, 14 aa, Homo sapiens
  CDR3 for alpha chain variable domain of TCR clone 267217 (TRAV13-1, TRAJ35)
CAASKGGFGNVLHC

SEQ ID NO: 534434 - protein, 14 aa, Homo sapiens
  CDR3 for beta chain variable domain of TCR clone 267217 (TRBV9, TRBJ2-1)
CASSVVAAYNEQFF

SEQ ID NO: 534435 - protein, 14 aa, Homo sapiens
  CDR3 for alpha chain variable domain of TCR clone 267218 (TRAV27, TRAJ23)
CAGAFDNQGGTLIF

SEQ ID NO: 534436 - protein, 15 aa, Homo sapiens
  CDR3 for beta chain variable domain of TCR clone 267218 (TRBV7-3, TRBJ2-7)
CASSLTGQGKYEQYF

SEQ ID NO: 534437 - protein, 14 aa, Homo sapiens
  CDR3 for alpha chain variable domain of TCR clone 267219 (TRAV8-3, TRAJ15)
CAVGRHQAGTALIF

SEQ ID NO: 534438 - protein, 14 aa, Homo sapiens
  CDR3 for beta chain variable domain of TCR clone 267219 (TRBV11-2, TRBJ2-3)
CASRRLARTDTQYF

SEQ ID NO: 534439 - protein, 13 aa, Homo sapiens
  CDR3 for alpha chain variable domain of TCR clone 267220 (TRAV27, TRAJ56)
CAGKPGSNSKLTF

SEQ ID NO: 534440 - protein, 15 aa, Homo sapiens
  CDR3 for beta chain variable domain of TCR clone 267220 (TRBV6-1, TRBJ2-3)
CASSERWDSTDTQYF

SEQ ID NO: 534441 - protein, 11 aa, Homo sapiens
  CDR3 for alpha chain variable domain of TCR clone 267221 (TRAV12-3, TRAJ17)
CNDATGNKLTF

SEQ ID NO: 534442 - protein, 15 aa, Homo sapiens
  CDR3 for beta chain variable domain of TCR clone 267221 (TRBV20-1, TRBJ2-7)
CSARYRVSGMDEQYF

SEQ ID NO: 534443 - protein, 14 aa, Homo sapiens
  CDR3 for alpha chain variable domain of TCR clone 267222 (TRAV12-2, TRAJ5)
CAANRSTGRRALTF

SEQ ID NO: 534444 - protein, 12 aa, Homo sapiens
  CDR3 for beta chain variable domain of TCR clone 267222 (TRBV19, TRBJ1-5)
SASSIAQQPQHF

SEQ ID NO: 534445 - protein, 18 aa, Homo sapiens
  CDR3 for alpha chain variable domain of TCR clone 267223 (TRAV26-1, TRAJ22)
CIVRVSFWFCKATDLLIW

SEQ ID NO: 534446 - protein, 14 aa, Homo sapiens
  CDR3 for beta chain variable domain of TCR clone 267223 (TRBV4-1, TRBJ2-2)
CASSQAVNTGELFF

SEQ ID NO: 534447 - protein, 15 aa, Homo sapiens
  CDR3 for alpha chain variable domain of TCR clone 267224 (TRAV17, TRAJ4)
CATGTWSSGYNKLIF

SEQ ID NO: 534448 - protein, 13 aa, Homo sapiens
  CDR3 for beta chain variable domain of TCR clone 267224 (TRBV6-6, TRBJ2-7)
CASSPKHLAEQYF

SEQ ID NO: 534449 - protein, 16 aa, Homo sapiens
  CDR3 for alpha chain variable domain of TCR clone 267225 (TRAV12-2, TRAJ18)
CAVTTDRGSTLGRLYF

SEQ ID NO: 534450 - protein, 14 aa, Homo sapiens
  CDR3 for beta chain variable domain of TCR clone 267225 (TRBV4-2, TRBJ1-5)
CARSQDSINQPQHF

SEQ ID NO: 534451 - protein, 14 aa, Homo sapiens
  CDR3 for alpha chain variable domain of TCR clone 267226 (TRAV12-2, TRAJ33)
CAVDYPDSNYQLIW

SEQ ID NO: 534452 - protein, 14 aa, Homo sapiens
  CDR3 for beta chain variable domain of TCR clone 267226 (TRBV4-2, TRBJ2-1)
CASGLDRAYNEQFF

SEQ ID NO: 534453 - protein, 14 aa, Homo sapiens
  CDR3 for alpha chain variable domain of TCR clone 267227 (TRAV12-2, TRAJ40)
CAVKIPSGTYKYIF

SEQ ID NO: 534454 - protein, 16 aa, Homo sapiens
  CDR3 for beta chain variable domain of TCR clone 267227 (TRBV18, TRBJ2-7)
CASSPTVGQGTYEQYF

SEQ ID NO: 534455 - protein, 14 aa, Homo sapiens
  CDR3 for alpha chain variable domain of TCR clone 267228 (TRAV8-2, TRAJ4)
CVVSPSGGYNKLIF

SEQ ID NO: 534456 - protein, 15 aa, Homo sapiens
  CDR3 for beta chain variable domain of TCR clone 267228 (TRBV7-9, TRBJ1-6)
CASSSPGRGNSPLHF

SEQ ID NO: 534457 - protein, 14 aa, Homo sapiens
  CDR3 for alpha chain variable domain of TCR clone 267229 (TRAV17, TRAJ57)
CATDPQGGSEKLVF

SEQ ID NO: 534458 - protein, 13 aa, Homo sapiens
  CDR3 for beta chain variable domain of TCR clone 267229 (TRBV19, TRBJ2-7)
CASSPRQSYEQYV

SEQ ID NO: 534459 - protein, 11 aa, Homo sapiens
  CDR3 for alpha chain variable domain of TCR clone 267230 (TRAV3, TRAJ49)
CAPITGNQFSF

SEQ ID NO: 534460 - protein, 16 aa, Homo sapiens
  CDR3 for beta chain variable domain of TCR clone 267230 (TRBV5-1, TRBJ2-3)
CASSVFPMSSTDTQYF

SEQ ID NO: 534461 - protein, 17 aa, Homo sapiens
  CDR3 for alpha chain variable domain of TCR clone 267231 (TRAV3, TRAJ38)
CAVRDCLNAGNNRKLIW

SEQ ID NO: 534462 - protein, 14 aa, Homo sapiens
  CDR3 for beta chain variable domain of TCR clone 267231 (TRBV7-6, TRBJ2-3)
CASSVAGGTDTQYF

SEQ ID NO: 534463 - protein, 16 aa, Homo sapiens
  CDR3 for alpha chain variable domain of TCR clone 267232 (TRAV20, TRAJ28)
CAVRDPSGAGSYQPTF

SEQ ID NO: 534464 - protein, 13 aa, Homo sapiens
  CDR3 for beta chain variable domain of TCR clone 267232 (TRBV3-1, TRBJ2-2)
CASLARGSGELFF

SEQ ID NO: 534465 - protein, 12 aa, Homo sapiens
  CDR3 for alpha chain variable domain of TCR clone 267233 (TRAV27, TRAJ35)
CAGADFGNVLHC

SEQ ID NO: 534466 - protein, 16 aa, Homo sapiens
  CDR3 for beta chain variable domain of TCR clone 267233 (TRBV6-1, TRBJ2-1)
CASILSQGSSYNEQFF

SEQ ID NO: 534467 - protein, 14 aa, Homo sapiens
  CDR3 for alpha chain variable domain of TCR clone 267234 (TRAV35, TRAJ34)
CAGRGTPTSPSLGL

SEQ ID NO: 534468 - protein, 13 aa, Homo sapiens
  CDR3 for beta chain variable domain of TCR clone 267234 (TRBV10-3, TRBJ2-7)
CASKLAVNYEQYF

SEQ ID NO: 534469 - protein, 14 aa, Homo sapiens
  CDR3 for alpha chain variable domain of TCR clone 267235 (TRAV12-1, TRAJ23)
CVVIVYNQGGKLIF

SEQ ID NO: 534470 - protein, 17 aa, Homo sapiens
  CDR3 for beta chain variable domain of TCR clone 267235 (TRBV11-2, TRBJ2-5)
CASSCSSQETSTSGQAR

SEQ ID NO: 534471 - protein, 16 aa, Homo sapiens
  CDR3 for alpha chain variable domain of TCR clone 267236 (TRAV30, TRAJ24)
CGTEIVDADCWGKFQF

SEQ ID NO: 534472 - protein, 15 aa, Homo sapiens
  CDR3 for beta chain variable domain of TCR clone 267236 (TRBV19, TRBJ1-1)
CASTSGQIQNTEAFF

SEQ ID NO: 534473 - protein, 16 aa, Homo sapiens
  CDR3 for alpha chain variable domain of TCR clone 267237 (TRAV8-2, TRAJ50)
CVVSDHMKTSYVKVIF

SEQ ID NO: 534474 - protein, 15 aa, Homo sapiens
  CDR3 for beta chain variable domain of TCR clone 267237 (TRBV7-2, TRBJ2-1)
CASSFQADEYNEQFF

SEQ ID NO: 534475 - protein, 13 aa, Homo sapiens
  CDR3 for alpha chain variable domain of TCR clone 267238 (TRAV1-1, TRAJ13)
CAVNSGGYHKVTF

SEQ ID NO: 534476 - protein, 12 aa, Homo sapiens
  CDR3 for beta chain variable domain of TCR clone 267238 (TRBV28, TRBJ2-1)
CASSVQINEQFF

SEQ ID NO: 534477 - protein, 13 aa, Homo sapiens
  CDR3 for alpha chain variable domain of TCR clone 267239 (TRAV8-3, TRAJ10)
WAILTGVGNKLTF

SEQ ID NO: 534478 - protein, 10 aa, Homo sapiens
  CDR3 for beta chain variable domain of TCR clone 267239 (TRBV20-1, TRBJ2-5)
CSARFETQYF

SEQ ID NO: 534479 - protein, 14 aa, Homo sapiens
  CDR3 for alpha chain variable domain of TCR clone 267240 (TRAV26-1, TRAJ39)
CIVRGSRAGNVLTF

SEQ ID NO: 534480 - protein, 12 aa, Homo sapiens
  CDR3 for beta chain variable domain of TCR clone 267240 (TRBV11-2, TRBJ2-2)
CASSLGGGELFF

SEQ ID NO: 534481 - protein, 18 aa, Homo sapiens
  CDR3 for alpha chain variable domain of TCR clone 267241 (TRAV21, TRAJ52)
CAVRPSPAGGTSYGKLTF

SEQ ID NO: 534482 - protein, 17 aa, Homo sapiens
  CDR3 for beta chain variable domain of TCR clone 267241 (TRBV13, TRBJ2-3)
WASSLSGVAGGRNTQYF

SEQ ID NO: 534483 - protein, 18 aa, Homo sapiens
  CDR3 for alpha chain variable domain of TCR clone 267242 (TRAV38-1, TRAJ54)
CDVFLCFPPNSGSQKLVF

SEQ ID NO: 534484 - protein, 14 aa, Homo sapiens
  CDR3 for beta chain variable domain of TCR clone 267242 (TRBV7-7, TRBJ2-2)
CATRQDSDTGELFF

SEQ ID NO: 534485 - protein, 17 aa, Homo sapiens
  CDR3 for alpha chain variable domain of TCR clone 267243 (TRAV1-1, TRAJ32)
CAVRVDELWWCYKQAHL

SEQ ID NO: 534486 - protein, 14 aa, Homo sapiens
  CDR3 for beta chain variable domain of TCR clone 267243 (TRBV7-9, TRBJ1-4)
CASSRAGFGEKLFF

SEQ ID NO: 534487 - protein, 13 aa, Homo sapiens
  CDR3 for alpha chain variable domain of TCR clone 267244 (TRAV23/DV6, TRAJ47)
CAASIRNGIWKQT

SEQ ID NO: 534488 - protein, 15 aa, Homo sapiens
  CDR3 for beta chain variable domain of TCR clone 267244 (TRBV9, TRBJ1-6)
CASSVAGTGDSPLHF

SEQ ID NO: 534489 - protein, 13 aa, Homo sapiens
  CDR3 for alpha chain variable domain of TCR clone 267245 (TRAV29/DV5, TRAJ31)
CAASRNNNARLMF

SEQ ID NO: 534490 - protein, 13 aa, Homo sapiens
  CDR3 for beta chain variable domain of TCR clone 267245 (TRBV7-9, TRBJ1-4)
CATQIGPNEKLFF

SEQ ID NO: 534491 - protein, 21 aa, Homo sapiens
  CDR3 for alpha chain variable domain of TCR clone 267246 (TRAV1-1, TRAJ6)
CLLLLRCERLERTGGSYIPTF

SEQ ID NO: 534492 - protein, 13 aa, Homo sapiens
  CDR3 for beta chain variable domain of TCR clone 267246 (TRBV20-1, TRBJ2-2)
CSALSGGAGELFF

SEQ ID NO: 534493 - protein, 14 aa, Homo sapiens
  CDR3 for alpha chain variable domain of TCR clone 267247 (TRAV12-2, TRAJ17)
CAALFKAACNKLTF

SEQ ID NO: 534494 - protein, 16 aa, Homo sapiens
  CDR3 for beta chain variable domain of TCR clone 267247 (TRBV20-1, TRBJ2-2)
CSASASGILGAGELFF

SEQ ID NO: 534495 - protein, 11 aa, Homo sapiens
  CDR3 for alpha chain variable domain of TCR clone 267248 (TRAV26-1, TRAJ37)
CIVRAGRKLIF

SEQ ID NO: 534496 - protein, 13 aa, Homo sapiens
  CDR3 for beta chain variable domain of TCR clone 267248 (TRBV14, TRBJ1-2)
CASSEDRRYGYTF

SEQ ID NO: 534497 - protein, 14 aa, Homo sapiens
  CDR3 for alpha chain variable domain of TCR clone 267249 (TRAV21, TRAJ23)
CAIMIYNQGGKLIF

SEQ ID NO: 534498 - protein, 18 aa, Homo sapiens
  CDR3 for beta chain variable domain of TCR clone 267249 (TRBV20-1, TRBJ2-6)
RSAETTPTHGSGANVLTF

SEQ ID NO: 534499 - protein, 13 aa, Homo sapiens
  CDR3 for alpha chain variable domain of TCR clone 267250 (TRAV3, TRAJ21)
CAVREPDLNKFYF

SEQ ID NO: 534500 - protein, 11 aa, Homo sapiens
  CDR3 for beta chain variable domain of TCR clone 267250 (TRBV29-1, TRBJ2-5)
CSEDRTGTQYF

SEQ ID NO: 534501 - protein, 14 aa, Homo sapiens
  CDR3 for alpha chain variable domain of TCR clone 267251 (TRAV4, TRAJ32)
CLVNYGGATNTLIF

SEQ ID NO: 534502 - protein, 14 aa, Homo sapiens
  CDR3 for beta chain variable domain of TCR clone 267251 (TRBV15, TRBJ2-5)
CATSGGTRTENQYF

SEQ ID NO: 534503 - protein, 13 aa, Homo sapiens
  CDR3 for alpha chain variable domain of TCR clone 267252 (TRAV12-2, TRAJ20)
CAVNRLDDYKPSF

SEQ ID NO: 534504 - protein, 12 aa, Homo sapiens
  CDR3 for beta chain variable domain of TCR clone 267252 (TRBV28, TRBJ2-3)
CASSLYRDTQYF

SEQ ID NO: 534505 - protein, 14 aa, Homo sapiens
  CDR3 for alpha chain variable domain of TCR clone 267253 (TRAV12-2, TRAJ4)
CAEDLPGGYNKLIF

SEQ ID NO: 534506 - protein, 13 aa, Homo sapiens
  CDR3 for beta chain variable domain of TCR clone 267253 (TRBV7-9, TRBJ1-2)
CASSLKQNYGYTF

SEQ ID NO: 534507 - protein, 14 aa, Homo sapiens
  CDR3 for alpha chain variable domain of TCR clone 267254 (TRAV12-3, TRAJ10)
SHLHLTGGGNKLTF

SEQ ID NO: 534508 - protein, 13 aa, Homo sapiens
  CDR3 for beta chain variable domain of TCR clone 267254 (TRBV9, TRBJ2-1)
CASSPSGGNEQFF

SEQ ID NO: 534509 - protein, 15 aa, Homo sapiens
  CDR3 for alpha chain variable domain of TCR clone 267255 (TRAV17, TRAJ13)
CATDAGSGGYQKVTF

SEQ ID NO: 534510 - protein, 15 aa, Homo sapiens
  CDR3 for beta chain variable domain of TCR clone 267255 (TRBV7-9, TRBJ1-5)
CASSQGHQPNQPQHF

SEQ ID NO: 534511 - protein, 13 aa, Homo sapiens
  CDR3 for alpha chain variable domain of TCR clone 267256 (TRAV27, TRAJ45)
CRSSGGGADGLTF

SEQ ID NO: 534512 - protein, 12 aa, Homo sapiens
  CDR3 for beta chain variable domain of TCR clone 267256 (TRBV7-9, TRBJ1-5)
CASSPQGQTQHF

SEQ ID NO: 534513 - protein, 14 aa, Homo sapiens
  CDR3 for alpha chain variable domain of TCR clone 267257 (TRAV38-2/DV8, TRAJ30)
CAYMDGLGGDKIIF

SEQ ID NO: 534514 - protein, 15 aa, Homo sapiens
  CDR3 for beta chain variable domain of TCR clone 267257 (TRBV7-9, TRBJ1-6)
CASSSPGRGNSPLHF

SEQ ID NO: 534515 - protein, 14 aa, Homo sapiens
  CDR3 for alpha chain variable domain of TCR clone 267258 (TRAV13-1, TRAJ35)
CAASKGGFGNVLHC

SEQ ID NO: 534516 - protein, 14 aa, Homo sapiens
  CDR3 for beta chain variable domain of TCR clone 267258 (TRBV23-1, TRBJ2-5)
CASSFLRSQETQYF

SEQ ID NO: 534517 - protein, 16 aa, Homo sapiens
  CDR3 for alpha chain variable domain of TCR clone 267259 (TRAV3, TRAJ37)
CAVRGKGSGNTGKLIF

SEQ ID NO: 534518 - protein, 14 aa, Homo sapiens
  CDR3 for beta chain variable domain of TCR clone 267259 (TRBV7-2, TRBJ2-7)
CASSPKTSVYEQYF

SEQ ID NO: 534519 - protein, 14 aa, Homo sapiens
  CDR3 for alpha chain variable domain of TCR clone 267260 (TRAV26-1, TRAJ38)
CIADNAGNNRKLIW

SEQ ID NO: 534520 - protein, 13 aa, Homo sapiens
  CDR3 for beta chain variable domain of TCR clone 267260 (TRBV20-1, TRBJ1-1)
CSATGGGNTEAFF

SEQ ID NO: 534521 - protein, 14 aa, Homo sapiens
  CDR3 for alpha chain variable domain of TCR clone 267261 (TRAV12-1, TRAJ42)
CVVIYGGSQGNLIF

SEQ ID NO: 534522 - protein, 12 aa, Homo sapiens
  CDR3 for beta chain variable domain of TCR clone 267261 (TRBV7-8, TRBJ2-7)
CASSLGDREQYF

SEQ ID NO: 534523 - protein, 15 aa, Homo sapiens
  CDR3 for alpha chain variable domain of TCR clone 267262 (TRAV3, TRAJ5)
CAVRDLDTGRRALTF

SEQ ID NO: 534524 - protein, 15 aa, Homo sapiens
  CDR3 for beta chain variable domain of TCR clone 267262 (TRBV12-4, TRBJ2-7)
CASSPTETYEGTSGR

SEQ ID NO: 534525 - protein, 10 aa, Homo sapiens
  CDR3 for alpha chain variable domain of TCR clone 267263 (TRAV36/DV7, TRAJ48)
CAVGNEKLTF

SEQ ID NO: 534526 - protein, 16 aa, Homo sapiens
  CDR3 for beta chain variable domain of TCR clone 267263 (TRBV19, TRBJ2-2)
CASRSPWTGATGELFF

SEQ ID NO: 534527 - protein, 12 aa, Homo sapiens
  CDR3 for alpha chain variable domain of TCR clone 267264 (TRAV12-3, TRAJ17)
CAMTLTVNKLTF

SEQ ID NO: 534528 - protein, 11 aa, Homo sapiens
  CDR3 for beta chain variable domain of TCR clone 267264 (TRBV12-4, TRBJ2-2)
CASSSAGELFF

SEQ ID NO: 534529 - protein, 12 aa, Homo sapiens
  CDR3 for alpha chain variable domain of TCR clone 267265 (TRAV35, TRAJ39)
LAPNNAGNMLTF

SEQ ID NO: 534530 - protein, 15 aa, Homo sapiens
  CDR3 for beta chain variable domain of TCR clone 267265 (TRBV19, TRBJ1-1)
CASTSGQIQNTEAFF

SEQ ID NO: 534531 - protein, 15 aa, Homo sapiens
  CDR3 for alpha chain variable domain of TCR clone 267266 (TRAV12-2, TRAJ53)
CAVNGGGGSNYKLTF

SEQ ID NO: 534532 - protein, 13 aa, Homo sapiens
  CDR3 for beta chain variable domain of TCR clone 267266 (TRBV3-1, TRBJ1-1)
CASSPGVISEAFF

SEQ ID NO: 534533 - protein, 20 aa, Homo sapiens
  CDR3 for alpha chain variable domain of TCR clone 267267 (TRAV3, TRAJ17)
CAVRARRGGRSCRQQANFWR

SEQ ID NO: 534534 - protein, 14 aa, Homo sapiens
  CDR3 for beta chain variable domain of TCR clone 267267 (TRBV4-1, TRBJ2-2)
CASSQAVNTGELFF

SEQ ID NO: 534535 - protein, 14 aa, Homo sapiens
  CDR3 for alpha chain variable domain of TCR clone 267268 (TRAV1-2, TRAJ28)
CVARSGAGSYQLTF

SEQ ID NO: 534536 - protein, 16 aa, Homo sapiens
  CDR3 for beta chain variable domain of TCR clone 267268 (TRBV7-3, TRBJ2-2)
CASSLKRGTLSGELFF

SEQ ID NO: 534537 - protein, 10 aa, Homo sapiens
  CDR3 for alpha chain variable domain of TCR clone 267269 (TRAV1-2, TRAJ34)
CAVSTDKLIF

SEQ ID NO: 534538 - protein, 18 aa, Homo sapiens
  CDR3 for beta chain variable domain of TCR clone 267269 (TRBV7-9, TRBJ2-7)
CAGSLTTSGSRTWYEQYF

SEQ ID NO: 534539 - protein, 19 aa, Homo sapiens
  CDR3 for alpha chain variable domain of TCR clone 267270 (TRAV26-1, TRAJ38)
CIADNAGNNHIQNPDPAVY

SEQ ID NO: 534540 - protein, 12 aa, Homo sapiens
  CDR3 for beta chain variable domain of TCR clone 267270 (TRBV7-8, TRBJ2-7)
CASSLGDREQYF

SEQ ID NO: 534541 - protein, 16 aa, Homo sapiens
  CDR3 for alpha chain variable domain of TCR clone 267271 (TRAV30, TRAJ24)
CGTEIVDADSWGKFQF

SEQ ID NO: 534542 - protein, 13 aa, Homo sapiens
  CDR3 for beta chain variable domain of TCR clone 267271 (TRBV10-3, TRBJ2-7)
CASKLSVNYEQYF

SEQ ID NO: 534543 - protein, 15 aa, Homo sapiens
  CDR3 for alpha chain variable domain of TCR clone 267272 (TRAV26-2, TRAJ54)
CILRDVGQGAQKLVF

SEQ ID NO: 534544 - protein, 11 aa, Homo sapiens
  CDR3 for beta chain variable domain of TCR clone 267272 (TRBV7-9, TRBJ2-3)
CASSGPDTQYF

SEQ ID NO: 534545 - protein, 13 aa, Homo sapiens
  CDR3 for alpha chain variable domain of TCR clone 267273 (TRAV20, TRAJ37)
CAGCSSNTGKQIF

SEQ ID NO: 534546 - protein, 11 aa, Homo sapiens
  CDR3 for beta chain variable domain of TCR clone 267273 (TRBV12-4, TRBJ2-3)
CASTAADTQYF

SEQ ID NO: 534547 - protein, 15 aa, Homo sapiens
  CDR3 for alpha chain variable domain of TCR clone 267274 (TRAV3, TRAJ4)
CAVRDGTGGYNKLIF

SEQ ID NO: 534548 - protein, 15 aa, Homo sapiens
  CDR3 for beta chain variable domain of TCR clone 267274 (TRBV12-4, TRBJ2-7)
CASSQRTSGNYEQYF

SEQ ID NO: 534549 - protein, 10 aa, Homo sapiens
  CDR3 for alpha chain variable domain of TCR clone 267275 (TRAV1-2, TRAJ23)
CAGQGGKLIF

SEQ ID NO: 534550 - protein, 17 aa, Homo sapiens
  CDR3 for beta chain variable domain of TCR clone 267275 (TRBV28, TRBJ2-5)
CASSTPEGDALQETQYF

SEQ ID NO: 534551 - protein, 11 aa, Homo sapiens
  CDR3 for alpha chain variable domain of TCR clone 267276 (TRAV12-3, TRAJ43)
CAMSVSNDMRF

SEQ ID NO: 534552 - protein, 14 aa, Homo sapiens
  CDR3 for beta chain variable domain of TCR clone 267276 (TRBV27, TRBJ2-2)
CASSLGAATGELFF

SEQ ID NO: 534553 - protein, 17 aa, Homo sapiens
  CDR3 for alpha chain variable domain of TCR clone 267277 (TRAV3, TRAJ42)
CAVRDRDYGISQGNLIF

SEQ ID NO: 534554 - protein, 15 aa, Homo sapiens
  CDR3 for beta chain variable domain of TCR clone 267277 (TRBV6-6, TRBJ2-7)
CASSYSYGGSYEQYF

SEQ ID NO: 534555 - protein, 16 aa, Homo sapiens
  CDR3 for alpha chain variable domain of TCR clone 267278 (TRAV13-1, TRAJ45)
CAARGSRKGGADGLTF

SEQ ID NO: 534556 - protein, 14 aa, Homo sapiens
  CDR3 for beta chain variable domain of TCR clone 267278 (TRBV18, TRBJ2-5)
CASSPGVSQETQYF

SEQ ID NO: 534557 - protein, 14 aa, Homo sapiens
  CDR3 for alpha chain variable domain of TCR clone 267279 (TRAV35, TRAJ39)
CAGQLGNAGNMLTF

SEQ ID NO: 534558 - protein, 14 aa, Homo sapiens
  CDR3 for beta chain variable domain of TCR clone 267279 (TRBV13, TRBJ2-5)
CASSLDYPQETQYF

SEQ ID NO: 534559 - protein, 12 aa, Homo sapiens
  CDR3 for alpha chain variable domain of TCR clone 267280 (TRAV13-1, TRAJ49)
CAAPNTGNQFYF

SEQ ID NO: 534560 - protein, 17 aa, Homo sapiens
  CDR3 for beta chain variable domain of TCR clone 267280 (TRBV25-1, TRBJ2-7)
CASSDARGVFSSYEQYF

SEQ ID NO: 534561 - protein, 14 aa, Homo sapiens
  CDR3 for alpha chain variable domain of TCR clone 267281 (TRAV8-2, TRAJ4)
CVVSPSGCFNKLIF

SEQ ID NO: 534562 - protein, 15 aa, Homo sapiens
  CDR3 for beta chain variable domain of TCR clone 267281 (TRBV4-1, TRBJ1-4)
CASSDTGGTNEKLFF

SEQ ID NO: 534563 - protein, 14 aa, Homo sapiens
  CDR3 for alpha chain variable domain of TCR clone 267282 (TRAV1-2, TRAJ8)
CAVREDTGFQKLVF

SEQ ID NO: 534564 - protein, 14 aa, Homo sapiens
  CDR3 for beta chain variable domain of TCR clone 267282 (TRBV28, TRBJ2-3)
CASSWRGRADTQYF

SEQ ID NO: 534565 - protein, 12 aa, Homo sapiens
  CDR3 for alpha chain variable domain of TCR clone 267283 (TRAV21, TRAJ49)
CAVRNTGNQFYL

SEQ ID NO: 534566 - protein, 12 aa, Homo sapiens
  CDR3 for beta chain variable domain of TCR clone 267283 (TRBV7-9, TRBJ2-7)
CATRTDAYEQYF

SEQ ID NO: 534567 - protein, 15 aa, Homo sapiens
  CDR3 for alpha chain variable domain of TCR clone 267284 (TRAV3, TRAJ22)
CAVRDRGGSARQLTF

SEQ ID NO: 534568 - protein, 17 aa, Homo sapiens
  CDR3 for beta chain variable domain of TCR clone 267284 (TRBV28, TRBJ2-5)
CASSTPEGDALKETQYF

SEQ ID NO: 534569 - protein, 17 aa, Homo sapiens
  CDR3 for alpha chain variable domain of TCR clone 267285 (TRAV3, TRAJ6)
CAVRDGPRVGGSYIPTF

SEQ ID NO: 534570 - protein, 12 aa, Homo sapiens
  CDR3 for beta chain variable domain of TCR clone 267285 (TRBV11-2, TRBJ2-2)
CASSLRGGELFL

SEQ ID NO: 534571 - protein, 15 aa, Homo sapiens
  CDR3 for alpha chain variable domain of TCR clone 267286 (TRAV8-4, TRAJ8)
CAGSDLNTGFQKLVF

SEQ ID NO: 534572 - protein, 14 aa, Homo sapiens
  CDR3 for beta chain variable domain of TCR clone 267286 (TRBV7-2, TRBJ2-3)
CASSQTGSSYTQYF

SEQ ID NO: 534573 - protein, 13 aa, Homo sapiens
  CDR3 for alpha chain variable domain of TCR clone 267287 (TRAV1-2, TRAJ9)
CAALNTVGFKTIF

SEQ ID NO: 534574 - protein, 19 aa, Homo sapiens
  CDR3 for beta chain variable domain of TCR clone 267287 (TRBV7-2, TRBJ2-3)
CASSFLSRNWGGGTDTQYF

SEQ ID NO: 534575 - protein, 15 aa, Homo sapiens
  CDR3 for alpha chain variable domain of TCR clone 267288 (TRAV23/DV6, TRAJ18)
CAARYRGSTLGRLYF

SEQ ID NO: 534576 - protein, 13 aa, Homo sapiens
  CDR3 for beta chain variable domain of TCR clone 267288 (TRBV12-4, TRBJ2-7)
CASSFSQGYEQYF

SEQ ID NO: 534577 - protein, 14 aa, Homo sapiens
  CDR3 for alpha chain variable domain of TCR clone 267289 (TRAV12-1, TRAJ30)
CVVNIGGRDDKIIF

SEQ ID NO: 534578 - protein, 15 aa, Homo sapiens
  CDR3 for beta chain variable domain of TCR clone 267289 (TRBV11-3, TRBJ2-7)
CASSPGPASSYEQYF

SEQ ID NO: 534579 - protein, 18 aa, Homo sapiens
  CDR3 for alpha chain variable domain of TCR clone 267290 (TRAV26-2, TRAJ45)
CILRVNKYSGGGAEGLTF

SEQ ID NO: 534580 - protein, 16 aa, Homo sapiens
  CDR3 for beta chain variable domain of TCR clone 267290 (TRBV2, TRBJ1-4)
CASNLLQGATNEKLFF

SEQ ID NO: 534581 - protein, 11 aa, Homo sapiens
  CDR3 for alpha chain variable domain of TCR clone 267291 (TRAV8-3, TRAJ49)
CAVNTGNQFYF

SEQ ID NO: 534582 - protein, 14 aa, Homo sapiens
  CDR3 for beta chain variable domain of TCR clone 267291 (TRBV7-2, TRBJ2-5)
CASSPRGSSETQYF

SEQ ID NO: 534583 - protein, 14 aa, Homo sapiens
  CDR3 for alpha chain variable domain of TCR clone 267292 (TRAV17, TRAJ57)
CATDPQGGSEKLVF

SEQ ID NO: 534584 - protein, 14 aa, Homo sapiens
  CDR3 for beta chain variable domain of TCR clone 267292 (TRBV11-2, TRBJ1-5)
CASSLDRGRQPQHF

SEQ ID NO: 534585 - protein, 12 aa, Homo sapiens
  CDR3 for alpha chain variable domain of TCR clone 267293 (TRAV17, TRAJ49)
CATVTTGNQFYF

SEQ ID NO: 534586 - protein, 16 aa, Homo sapiens
  CDR3 for beta chain variable domain of TCR clone 267293 (TRBV7-2, TRBJ1-2)
CASSSNQDRRGHGYTF

SEQ ID NO: 534587 - protein, 14 aa, Homo sapiens
  CDR3 for alpha chain variable domain of TCR clone 267294 (TRAV8-6, TRAJ49)
CDVSVRYTGNQFYF

SEQ ID NO: 534588 - protein, 19 aa, Homo sapiens
  CDR3 for beta chain variable domain of TCR clone 267294 (TRBV28, TRBJ2-1)
CASSFSIRGSGRTRYEQFF

SEQ ID NO: 534589 - protein, 14 aa, Homo sapiens
  CDR3 for alpha chain variable domain of TCR clone 267295 (TRAV8-3, TRAJ39)
CAVGANNAGNMLTF

SEQ ID NO: 534590 - protein, 15 aa, Homo sapiens
  CDR3 for beta chain variable domain of TCR clone 267295 (TRBV20-1, TRBJ1-1)
CSASWDRFLNTEAFF

SEQ ID NO: 534591 - protein, 18 aa, Homo sapiens
  CDR3 for alpha chain variable domain of TCR clone 267296 (TRAV12-2, TRAJ30)
CAVRMTRSSLEKGHDFIF

SEQ ID NO: 534592 - protein, 13 aa, Homo sapiens
  CDR3 for beta chain variable domain of TCR clone 267296 (TRBV6-6, TRBJ2-7)
CASSPKHLAEQYF

SEQ ID NO: 534593 - protein, 14 aa, Homo sapiens
  CDR3 for alpha chain variable domain of TCR clone 267297 (TRAV12-1, TRAJ17)
CVVNYKAAGNKLTF

SEQ ID NO: 534594 - protein, 14 aa, Homo sapiens
  CDR3 for beta chain variable domain of TCR clone 267297 (TRBV27, TRBJ2-5)
CASSSLKGWETQYF

SEQ ID NO: 534595 - protein, 17 aa, Homo sapiens
  CDR3 for alpha chain variable domain of TCR clone 267298 (TRAV26-1, TRAJ37)
CIVRVTTVSSNTGKLIF

SEQ ID NO: 534596 - protein, 13 aa, Homo sapiens
  CDR3 for beta chain variable domain of TCR clone 267298 (TRBV20-1, TRBJ1-1)
CSARGGGNTEAFF

SEQ ID NO: 534597 - protein, 13 aa, Homo sapiens
  CDR3 for alpha chain variable domain of TCR clone 267299 (TRAV21, TRAJ27)
CAARPGNAGKSTF

SEQ ID NO: 534598 - protein, 13 aa, Homo sapiens
  CDR3 for beta chain variable domain of TCR clone 267299 (TRBV19, TRBJ2-2)
CASSIWSTGELFF

SEQ ID NO: 534599 - protein, 12 aa, Homo sapiens
  CDR3 for alpha chain variable domain of TCR clone 267300 (TRAV8-3, TRAJ41)
CAVGALGYALYF

SEQ ID NO: 534600 - protein, 16 aa, Homo sapiens
  CDR3 for beta chain variable domain of TCR clone 267300 (TRBV7-6, TRBJ2-3)
CASSDSRGEGTDTQYF

SEQ ID NO: 534601 - protein, 14 aa, Homo sapiens
  CDR3 for alpha chain variable domain of TCR clone 267301 (TRAV8-3, TRAJ21)
CAVDARDNFNKFYF

SEQ ID NO: 534602 - protein, 16 aa, Homo sapiens
  CDR3 for beta chain variable domain of TCR clone 267301 (TRBV20-1, TRBJ2-1)
FSARDLAGHSYNEQFF

SEQ ID NO: 534603 - protein, 15 aa, Homo sapiens
  CDR3 for alpha chain variable domain of TCR clone 267302 (TRAV27, TRAJ38)
CAGRFNAGNNRKLIC

SEQ ID NO: 534604 - protein, 13 aa, Homo sapiens
  CDR3 for beta chain variable domain of TCR clone 267302 (TRBV20-1, TRBJ1-1)
CSARVGGNTEAFF

SEQ ID NO: 534605 - protein, 14 aa, Homo sapiens
  CDR3 for alpha chain variable domain of TCR clone 267303 (TRAV12-3, TRAJ29)
CAMSPYSGNTPLVF

SEQ ID NO: 534606 - protein, 16 aa, Homo sapiens
  CDR3 for beta chain variable domain of TCR clone 267303 (TRBV7-3, TRBJ2-2)
CASSLKRGTLSGELFF

SEQ ID NO: 534607 - protein, 17 aa, Homo sapiens
  CDR3 for alpha chain variable domain of TCR clone 267304 (TRAV4, TRAJ18)
CLVGERSVGSTLGRLYV

SEQ ID NO: 534608 - protein, 16 aa, Homo sapiens
  CDR3 for beta chain variable domain of TCR clone 267304 (TRBV15, TRBJ1-4)
CATSRDSPPGREKLFF

SEQ ID NO: 534609 - protein, 10 aa, Homo sapiens
  CDR3 for alpha chain variable domain of TCR clone 267305 (TRAV23/DV6, TRAJ57)
CSASSTLSQS

SEQ ID NO: 534610 - protein, 14 aa, Homo sapiens
  CDR3 for beta chain variable domain of TCR clone 267305 (TRBV25-1, TRBJ1-1)
CASTHLGGNTEAFF

SEQ ID NO: 534611 - protein, 14 aa, Homo sapiens
  CDR3 for alpha chain variable domain of TCR clone 267306 (TRAV4, TRAJ11)
CLVGEYSGYSTLTF

SEQ ID NO: 534612 - protein, 15 aa, Homo sapiens
  CDR3 for beta chain variable domain of TCR clone 267306 (TRBV7-9, TRBJ2-2)
CASSPETGAGGELFF

SEQ ID NO: 534613 - protein, 16 aa, Homo sapiens
  CDR3 for alpha chain variable domain of TCR clone 267307 (TRAV8-3, TRAJ48)
CAGGLISNFGNEKLTF

SEQ ID NO: 534614 - protein, 13 aa, Homo sapiens
  CDR3 for beta chain variable domain of TCR clone 267307 (TRBV20-1, TRBJ1-5)
CSASWGRSQPQHF

SEQ ID NO: 534615 - protein, 11 aa, Homo sapiens
  CDR3 for alpha chain variable domain of TCR clone 267308 (TRAV12-3, TRAJ43)
CAMSVSNDMRF

SEQ ID NO: 534616 - protein, 12 aa, Homo sapiens
  CDR3 for beta chain variable domain of TCR clone 267308 (TRBV20-1, TRBJ1-1)
QCSTWGCTEAFF

SEQ ID NO: 534617 - protein, 10 aa, Homo sapiens
  CDR3 for alpha chain variable domain of TCR clone 267309 (TRAV27, TRAJ43)
CAGANNDMRF

SEQ ID NO: 534618 - protein, 16 aa, Homo sapiens
  CDR3 for beta chain variable domain of TCR clone 267309 (TRBV13, TRBJ2-2)
CASSPRTGEHTGELFF

SEQ ID NO: 534619 - protein, 13 aa, Homo sapiens
  CDR3 for alpha chain variable domain of TCR clone 267310 (TRAV12-2, TRAJ50)
CAVIVTSYDKVIF

SEQ ID NO: 534620 - protein, 11 aa, Homo sapiens
  CDR3 for beta chain variable domain of TCR clone 267310 (TRBV7-9, TRBJ2-3)
CASSYTDTQYF

SEQ ID NO: 534621 - protein, 18 aa, Homo sapiens
  CDR3 for alpha chain variable domain of TCR clone 267311 (TRAV12-3, TRAJ52)
CAMSVGGAGGTSYGKLTF

SEQ ID NO: 534622 - protein, 18 aa, Homo sapiens
  CDR3 for beta chain variable domain of TCR clone 267311 (TRBV4-1, TRBJ2-7)
CASSQDTGAGSGLNEQYF

SEQ ID NO: 534623 - protein, 12 aa, Homo sapiens
  CDR3 for alpha chain variable domain of TCR clone 267312 (TRAV2, TRAJ33)
CAFMDSNYQLIW

SEQ ID NO: 534624 - protein, 16 aa, Homo sapiens
  CDR3 for beta chain variable domain of TCR clone 267312 (TRBV2, TRBJ2-7)
CASSEPLTGPSYEQYF

SEQ ID NO: 534625 - protein, 14 aa, Homo sapiens
  CDR3 for alpha chain variable domain of TCR clone 267313 (TRAV1-2, TRAJ8)
CAVREDTGFQKLVF

SEQ ID NO: 534626 - protein, 12 aa, Homo sapiens
  CDR3 for beta chain variable domain of TCR clone 267313 (TRBV9, TRBJ2-2)
CASSVVNGELFF

SEQ ID NO: 534627 - protein, 15 aa, Homo sapiens
  CDR3 for alpha chain variable domain of TCR clone 267314 (TRAV27, TRAJ38)
CAARRNAGNNRKLIW

SEQ ID NO: 534628 - protein, 14 aa, Homo sapiens
  CDR3 for beta chain variable domain of TCR clone 267314 (TRBV19, TRBJ2-1)
CASPTFVLSGEQFL

SEQ ID NO: 534629 - protein, 13 aa, Homo sapiens
  CDR3 for alpha chain variable domain of TCR clone 267315 (TRAV38-1, TRAJ42)
CARWGGSQGNLIF

SEQ ID NO: 534630 - protein, 14 aa, Homo sapiens
  CDR3 for beta chain variable domain of TCR clone 267315 (TRBV7-9, TRBJ2-5)
CASSLAFGQETQYF

SEQ ID NO: 534631 - protein, 14 aa, Homo sapiens
  CDR3 for alpha chain variable domain of TCR clone 267316 (TRAV3, TRAJ28)
CAVRRGAGSYQLTF

SEQ ID NO: 534632 - protein, 16 aa, Homo sapiens
  CDR3 for beta chain variable domain of TCR clone 267316 (TRBV4-1, TRBJ2-7)
CVSSQEWTSGPLEQYF

SEQ ID NO: 534633 - protein, 12 aa, Homo sapiens
  CDR3 for alpha chain variable domain of TCR clone 267317 (TRAV12-2, TRAJ42)
CAVGGSQGNLIF

SEQ ID NO: 534634 - protein, 12 aa, Homo sapiens
  CDR3 for beta chain variable domain of TCR clone 267317 (TRBV5-4, TRBJ2-5)
CASSSTRETQYF

SEQ ID NO: 534635 - protein, 12 aa, Homo sapiens
  CDR3 for alpha chain variable domain of TCR clone 267318 (TRAV12-2, TRAJ43)
CAVNVNNNDMRF

SEQ ID NO: 534636 - protein, 15 aa, Homo sapiens
  CDR3 for beta chain variable domain of TCR clone 267318 (TRBV28, TRBJ1-4)
CASSVSGSGLEKLFF

SEQ ID NO: 534637 - protein, 17 aa, Homo sapiens
  CDR3 for alpha chain variable domain of TCR clone 267319 (TRAV4, TRAJ13)
CLVGVQGSSGGYQKVTF

SEQ ID NO: 534638 - protein, 18 aa, Homo sapiens
  CDR3 for beta chain variable domain of TCR clone 267319 (TRBV15, TRBJ2-3)
GATSRDGARSWDTDTQYF

SEQ ID NO: 534639 - protein, 21 aa, Homo sapiens
  CDR3 for alpha chain variable domain of TCR clone 267320 (TRAV1-1, TRAJ6)
CLLLLRCERLERTGGSYIPTF

SEQ ID NO: 534640 - protein, 13 aa, Homo sapiens
  CDR3 for beta chain variable domain of TCR clone 267320 (TRBV20-1, TRBJ1-1)
CSARGGGNTEAFF

SEQ ID NO: 534641 - protein, 23 aa, Homo sapiens
  CDR3 for alpha chain variable domain of TCR clone 267321 (TRAV26-1, TRAJ38)
CIADNAGNNHIQNPDPAVYQLID

SEQ ID NO: 534642 - protein, 12 aa, Homo sapiens
  CDR3 for beta chain variable domain of TCR clone 267321 (TRBV7-8, TRBJ2-7)
CASSLGDREQYF

SEQ ID NO: 534643 - protein, 13 aa, Homo sapiens
  CDR3 for alpha chain variable domain of TCR clone 267322 (TRAV21, TRAJ57)
RAVTQGGSEKLVF

SEQ ID NO: 534644 - protein, 15 aa, Homo sapiens
  CDR3 for beta chain variable domain of TCR clone 267322 (TRBV7-3, TRBJ2-2)
CASSETGQGTGELFF

SEQ ID NO: 534645 - protein, 14 aa, Homo sapiens
  CDR3 for alpha chain variable domain of TCR clone 267323 (TRAV12-2, TRAJ13)
CAVNPSGGYQKDTF

SEQ ID NO: 534646 - protein, 14 aa, Homo sapiens
  CDR3 for beta chain variable domain of TCR clone 267323 (TRBV12-4, TRBJ1-1)
CASSLGTGGTEAFF

SEQ ID NO: 534647 - protein, 15 aa, Homo sapiens
  CDR3 for alpha chain variable domain of TCR clone 267324 (TRAV8-3, TRAJ27)
CAVGPSKTNAGKSTF

SEQ ID NO: 534648 - protein, 16 aa, Homo sapiens
  CDR3 for beta chain variable domain of TCR clone 267324 (TRBV3-1, TRBJ2-5)
CASSQDWASGQETQYF

SEQ ID NO: 534649 - protein, 10 aa, Homo sapiens
  CDR3 for alpha chain variable domain of TCR clone 267325 (TRAV23/DV6, TRAJ3)
CAATPFALGG

SEQ ID NO: 534650 - protein, 15 aa, Homo sapiens
  CDR3 for beta chain variable domain of TCR clone 267325 (TRBV19, TRBJ1-6)
CASSTQGAVGSPLHF

SEQ ID NO: 534651 - protein, 14 aa, Homo sapiens
  CDR3 for alpha chain variable domain of TCR clone 267326 (TRAV35, TRAJ50)
CAGPRKTSYDKVIF

SEQ ID NO: 534652 - protein, 13 aa, Homo sapiens
  CDR3 for beta chain variable domain of TCR clone 267326 (TRBV7-7, TRBJ2-3)
CASSVSRADTQYF

SEQ ID NO: 534653 - protein, 14 aa, Homo sapiens
  CDR3 for alpha chain variable domain of TCR clone 267327 (TRAV39, TRAJ54)
CAVVLIQGAQTLVF

SEQ ID NO: 534654 - protein, 14 aa, Homo sapiens
  CDR3 for beta chain variable domain of TCR clone 267327 (TRBV11-2, TRBJ1-5)
CASSLDRGRQPQHF

SEQ ID NO: 534655 - protein, 14 aa, Homo sapiens
  CDR3 for alpha chain variable domain of TCR clone 267328 (TRAV12-2, TRAJ45)
CALPERGGADGLTF

SEQ ID NO: 534656 - protein, 14 aa, Homo sapiens
  CDR3 for beta chain variable domain of TCR clone 267328 (TRBV18, TRBJ1-5)
CASSPGNSNQPQHS

SEQ ID NO: 534657 - protein, 13 aa, Homo sapiens
  CDR3 for alpha chain variable domain of TCR clone 267329 (TRAV12-1, TRAJ40)
CVVNSSGTYKYIF

SEQ ID NO: 534658 - protein, 15 aa, Homo sapiens
  CDR3 for beta chain variable domain of TCR clone 267329 (TRBV20-1, TRBJ2-7)
CSARDRVSGMDEQYF

SEQ ID NO: 534659 - protein, 12 aa, Homo sapiens
  CDR3 for alpha chain variable domain of TCR clone 267330 (TRAV12-3, TRAJ21)
CAVRYNFNKFYF

SEQ ID NO: 534660 - protein, 14 aa, Homo sapiens
  CDR3 for beta chain variable domain of TCR clone 267330 (TRBV28, TRBJ2-1)
CASSYYTAYNEQFF

SEQ ID NO: 534661 - protein, 14 aa, Homo sapiens
  CDR3 for alpha chain variable domain of TCR clone 267331 (TRAV12-3, TRAJ29)
CAMSPYSGNTPLVF

SEQ ID NO: 534662 - protein, 14 aa, Homo sapiens
  CDR3 for beta chain variable domain of TCR clone 267331 (TRBV19, TRBJ2-2)
CASSKLGTTGELFF

SEQ ID NO: 534663 - protein, 17 aa, Homo sapiens
  CDR3 for alpha chain variable domain of TCR clone 267332 (TRAV16, TRAJ42)
CALIPQLYGGSQGNLIF

SEQ ID NO: 534664 - protein, 13 aa, Homo sapiens
  CDR3 for beta chain variable domain of TCR clone 267332 (TRBV19, TRBJ1-5)
CASSTRRDQPQHF

SEQ ID NO: 534665 - protein, 13 aa, Homo sapiens
  CDR3 for alpha chain variable domain of TCR clone 267333 (TRAV12-3, TRAJ49)
CAMSRNTGNQFYL

SEQ ID NO: 534666 - protein, 16 aa, Homo sapiens
  CDR3 for beta chain variable domain of TCR clone 267333 (TRBV5-8, TRBJ2-2)
CASSLINPGGAGELFF

SEQ ID NO: 534667 - protein, 15 aa, Homo sapiens
  CDR3 for alpha chain variable domain of TCR clone 267334 (TRAV8-4, TRAJ9)
CAVSDLEGGGFKTIF

SEQ ID NO: 534668 - protein, 14 aa, Homo sapiens
  CDR3 for beta chain variable domain of TCR clone 267334 (TRBV11-2, TRBJ2-7)
CASSLGAGAYEQYF

SEQ ID NO: 534669 - protein, 14 aa, Homo sapiens
  CDR3 for alpha chain variable domain of TCR clone 267335 (TRAV13-1, TRAJ13)
CVASRVGGYHKVTF

SEQ ID NO: 534670 - protein, 17 aa, Homo sapiens
  CDR3 for beta chain variable domain of TCR clone 267335 (TRBV15, TRBJ1-5)
CATSRAPPVTRNQPQHF

SEQ ID NO: 534671 - protein, 13 aa, Homo sapiens
  CDR3 for alpha chain variable domain of TCR clone 267336 (TRAV8-1, TRAJ15)
CAVKNQAGTALIC

SEQ ID NO: 534672 - protein, 15 aa, Homo sapiens
  CDR3 for beta chain variable domain of TCR clone 267336 (TRBV7-3, TRBJ2-7)
CASSLTPTGYDEQYF

SEQ ID NO: 534673 - protein, 23 aa, Homo sapiens
  CDR3 for alpha chain variable domain of TCR clone 267337 (TRAV1-1, TRAJ11)
LLQELQMKDSASYFCAGYSTLTF

SEQ ID NO: 534674 - protein, 16 aa, Homo sapiens
  CDR3 for beta chain variable domain of TCR clone 267337 (TRBV27, TRBJ2-2)
CASSFRGLVRTGELFF

SEQ ID NO: 534675 - protein, 13 aa, Homo sapiens
  CDR3 for alpha chain variable domain of TCR clone 267338 (TRAV12-2, TRAJ10)
CAVRTGGGNKLTF

SEQ ID NO: 534676 - protein, 13 aa, Homo sapiens
  CDR3 for beta chain variable domain of TCR clone 267338 (TRBV7-9, TRBJ1-2)
CASSLKQNYGYTF

SEQ ID NO: 534677 - protein, 13 aa, Homo sapiens
  CDR3 for alpha chain variable domain of TCR clone 267339 (TRAV30, TRAJ49)
CGTEPNTGTSSIL

SEQ ID NO: 534678 - protein, 14 aa, Homo sapiens
  CDR3 for beta chain variable domain of TCR clone 267339 (TRBV29-1, TRBJ2-1)
CSVEFRGIPFEQFF

SEQ ID NO: 534679 - protein, 12 aa, Homo sapiens
  CDR3 for alpha chain variable domain of TCR clone 267340 (TRAV12-3, TRAJ42)
CTPGGSQGNLIF

SEQ ID NO: 534680 - protein, 15 aa, Homo sapiens
  CDR3 for beta chain variable domain of TCR clone 267340 (TRBV9, TRBJ2-1)
CASSLAGSSYNEQFF

SEQ ID NO: 534681 - protein, 11 aa, Homo sapiens
  CDR3 for alpha chain variable domain of TCR clone 267341 (TRAV23/DV6, TRAJ58)
CAARLLRGETS

SEQ ID NO: 534682 - protein, 15 aa, Homo sapiens
  CDR3 for beta chain variable domain of TCR clone 267341 (TRBV15, TRBJ2-2)
CATSGTGGRVGELFF

SEQ ID NO: 534683 - protein, 15 aa, Homo sapiens
  CDR3 for alpha chain variable domain of TCR clone 267342 (TRAV2, TRAJ9)
CAVEDRGTAGFKTIF

SEQ ID NO: 534684 - protein, 16 aa, Homo sapiens
  CDR3 for beta chain variable domain of TCR clone 267342 (TRBV24-1, TRBJ2-3)
CATSDPGTGATDTQYF

SEQ ID NO: 534685 - protein, 12 aa, Homo sapiens
  CDR3 for alpha chain variable domain of TCR clone 267343 (TRAV10, TRAJ34)
CVVSGKLRQAHL

SEQ ID NO: 534686 - protein, 14 aa, Homo sapiens
  CDR3 for beta chain variable domain of TCR clone 267343 (TRBV19, TRBJ2-1)
CASPTFVLSGEQFF

SEQ ID NO: 534687 - protein, 16 aa, Homo sapiens
  CDR3 for alpha chain variable domain of TCR clone 267344 (TRAV3, TRAJ18)
CAVRDGRGSTLGGLDF

SEQ ID NO: 534688 - protein, 15 aa, Homo sapiens
  CDR3 for beta chain variable domain of TCR clone 267344 (TRBV7-9, TRBJ1-6)
CASSSPGRGNSPLHF

SEQ ID NO: 534689 - protein, 13 aa, Homo sapiens
  CDR3 for alpha chain variable domain of TCR clone 267345 (TRAV2, TRAJ15)
CAVASQAGTALIF

SEQ ID NO: 534690 - protein, 12 aa, Homo sapiens
  CDR3 for beta chain variable domain of TCR clone 267345 (TRBV2, TRBJ2-1)
CAKREGYNEQFF

SEQ ID NO: 534691 - protein, 12 aa, Homo sapiens
  CDR3 for alpha chain variable domain of TCR clone 267346 (TRAV12-3, TRAJ41)
CAMSYSGYALNF

SEQ ID NO: 534692 - protein, 13 aa, Homo sapiens
  CDR3 for beta chain variable domain of TCR clone 267346 (TRBV7-3, TRBJ2-1)
CASSLYSYNEQFF

SEQ ID NO: 534693 - protein, 15 aa, Homo sapiens
  CDR3 for alpha chain variable domain of TCR clone 267347 (TRAV21, TRAJ53)
CATLNSGGSNYKLTF

SEQ ID NO: 534694 - protein, 16 aa, Homo sapiens
  CDR3 for beta chain variable domain of TCR clone 267347 (TRBV28, IGHJ2)
CASSPPYRGRSEKLFF

SEQ ID NO: 534695 - protein, 12 aa, Homo sapiens
  CDR3 for alpha chain variable domain of TCR clone 267348 (TRAV12-3, TRAJ31)
CAMSVPNARLMF

SEQ ID NO: 534696 - protein, 13 aa, Homo sapiens
  CDR3 for beta chain variable domain of TCR clone 267348 (TRBV20-1, TRBJ2-5)
CSAREAFQETQYF

SEQ ID NO: 534697 - protein, 15 aa, Homo sapiens
  CDR3 for alpha chain variable domain of TCR clone 267349 (TRAV8-6, TRAJ37)
CAVIFSSGNTGKLIF

SEQ ID NO: 534698 - protein, 15 aa, Homo sapiens
  CDR3 for beta chain variable domain of TCR clone 267349 (TRBV25-1, TRBJ2-4)
CASSETESAKNIQYC

SEQ ID NO: 534699 - protein, 12 aa, Homo sapiens
  CDR3 for alpha chain variable domain of TCR clone 267350 (TRAV16, TRAJ10)
CSRTGGGNKLTF

SEQ ID NO: 534700 - protein, 11 aa, Homo sapiens
  CDR3 for beta chain variable domain of TCR clone 267350 (TRBV19, TRBJ1-1)
CASSIGSEAFF

SEQ ID NO: 534701 - protein, 16 aa, Homo sapiens
  CDR3 for alpha chain variable domain of TCR clone 267351 (TRAV21, TRAJ37)
CAVRTAGSSNTGNLIF

SEQ ID NO: 534702 - protein, 13 aa, Homo sapiens
  CDR3 for beta chain variable domain of TCR clone 267351 (TRBV7-9, TRBJ2-5)
CASLPSGRETQCF

SEQ ID NO: 534703 - protein, 12 aa, Homo sapiens
  CDR3 for alpha chain variable domain of TCR clone 267352 (TRAV40, TRAJ20)
CLRGFNDYKLSF

SEQ ID NO: 534704 - protein, 14 aa, Homo sapiens
  CDR3 for beta chain variable domain of TCR clone 267352 (TRBV19, TRBJ2-7)
CASTVQGRPYEQYF

SEQ ID NO: 534705 - protein, 13 aa, Homo sapiens
  CDR3 for alpha chain variable domain of TCR clone 267353 (TRAV12-2, TRAJ9)
CAVKWAGGFKTIF

SEQ ID NO: 534706 - protein, 16 aa, Homo sapiens
  CDR3 for beta chain variable domain of TCR clone 267353 (TRBV7-9, TRBJ2-1)
CASSDVAGGSYNEQFF

SEQ ID NO: 534707 - protein, 18 aa, Homo sapiens
  CDR3 for alpha chain variable domain of TCR clone 267354 (TRAV26-1, TRAJ30)
CSVLLHRQSTNRDDKIIF

SEQ ID NO: 534708 - protein, 18 aa, Homo sapiens
  CDR3 for beta chain variable domain of TCR clone 267354 (TRBV4-1, TRBJ1-5)
CASSQDPRGQGLNQPQHF

SEQ ID NO: 534709 - protein, 15 aa, Homo sapiens
  CDR3 for alpha chain variable domain of TCR clone 267355 (TRAV17, TRAJ4)
CATGTWSGGYNKLIF

SEQ ID NO: 534710 - protein, 15 aa, Homo sapiens
  CDR3 for beta chain variable domain of TCR clone 267355 (TRBV27, TRBJ2-5)
CASSLYPRGGETQYF

SEQ ID NO: 534711 - protein, 14 aa, Homo sapiens
  CDR3 for alpha chain variable domain of TCR clone 267356 (TRAV12-1, TRAJ17)
YVVNYKAAGNKLTF

SEQ ID NO: 534712 - protein, 17 aa, Homo sapiens
  CDR3 for beta chain variable domain of TCR clone 267356 (TRBV20-1, TRBJ2-1)
CSASSSGLAGSYNAQFF

SEQ ID NO: 534713 - protein, 13 aa, Homo sapiens
  CDR3 for alpha chain variable domain of TCR clone 267357 (TRAV35, TRAJ48)
CAGHEFGNEKLTF

SEQ ID NO: 534714 - protein, 14 aa, Homo sapiens
  CDR3 for beta chain variable domain of TCR clone 267357 (TRBV19, TRBJ2-1)
CASTTFVLSGEQFF

SEQ ID NO: 534715 - protein, 13 aa, Homo sapiens
  CDR3 for alpha chain variable domain of TCR clone 267358 (TRAV3, TRAJ21)
CAVRETDFNKFYF

SEQ ID NO: 534716 - protein, 13 aa, Homo sapiens
  CDR3 for beta chain variable domain of TCR clone 267358 (TRBV9, TRBJ2-1)
CASSLSGGNEQFF

SEQ ID NO: 534717 - protein, 12 aa, Homo sapiens
  CDR3 for alpha chain variable domain of TCR clone 267359 (TRAV13-1, TRAJ42)
SVLRGSQGNLIF

SEQ ID NO: 534718 - protein, 13 aa, Homo sapiens
  CDR3 for beta chain variable domain of TCR clone 267359 (TRBV10-3, TRBJ2-7)
CASKLAVNYEQYF

SEQ ID NO: 534719 - protein, 17 aa, Homo sapiens
  CDR3 for alpha chain variable domain of TCR clone 267360 (TRAV3, TRAJ6)
CAVRDGPRAGGSYTPTF

SEQ ID NO: 534720 - protein, 13 aa, Homo sapiens
  CDR3 for beta chain variable domain of TCR clone 267360 (TRBV19, TRBJ1-1)
CASSITGESEAFF

SEQ ID NO: 534721 - protein, 14 aa, Homo sapiens
  CDR3 for alpha chain variable domain of TCR clone 267361 (TRAV2, TRAJ37)
CAVDFTSNIGKLIF

SEQ ID NO: 534722 - protein, 14 aa, Homo sapiens
  CDR3 for beta chain variable domain of TCR clone 267361 (TRBV20-1, TRBJ1-1)
CSAQTRIGGTEAFF

SEQ ID NO: 534723 - protein, 15 aa, Homo sapiens
  CDR3 for alpha chain variable domain of TCR clone 267362 (TRAV3, TRAJ3)
CAVRDRRSSASKIIF

SEQ ID NO: 534724 - protein, 13 aa, Homo sapiens
  CDR3 for beta chain variable domain of TCR clone 267362 (TRBV12-4, TRBJ2-7)
CASSPTETYEQYF

SEQ ID NO: 534725 - protein, 14 aa, Homo sapiens
  CDR3 for alpha chain variable domain of TCR clone 267363 (TRAV26-1, TRAJ38)
CIADNAGNNCKPIW

SEQ ID NO: 534726 - protein, 13 aa, Homo sapiens
  CDR3 for beta chain variable domain of TCR clone 267363 (TRBV20-1, TRBJ1-1)
CSARGGGNTEAFF

SEQ ID NO: 534727 - protein, 13 aa, Homo sapiens
  CDR3 for alpha chain variable domain of TCR clone 267364 (TRAV8-3, TRAJ31)
CAVGARNNARRMF

SEQ ID NO: 534728 - protein, 14 aa, Homo sapiens
  CDR3 for beta chain variable domain of TCR clone 267364 (TRBV12-5, TRBJ2-5)
CASGSRTHQETQYF

SEQ ID NO: 534729 - protein, 12 aa, Homo sapiens
  CDR3 for alpha chain variable domain of TCR clone 267365 (TRAV8-6, TRAJ36)
CAVSDWLGQTTS

SEQ ID NO: 534730 - protein, 15 aa, Homo sapiens
  CDR3 for beta chain variable domain of TCR clone 267365 (TRBV5-1, TRBJ2-1)
CASSPPRAPYNEQFF

SEQ ID NO: 534731 - protein, 14 aa, Homo sapiens
  CDR3 for alpha chain variable domain of TCR clone 267366 (TRAV8-6, TRAJ9)
CAVSSYTGGFKTIF

SEQ ID NO: 534732 - protein, 12 aa, Homo sapiens
  CDR3 for beta chain variable domain of TCR clone 267366 (TRBV7-8, TRBJ2-7)
CASSLGDREQYF

SEQ ID NO: 534733 - protein, 14 aa, Homo sapiens
  CDR3 for alpha chain variable domain of TCR clone 267367 (TRAV1-2, TRAJ16)
CAVNRFSDGQKLLF

SEQ ID NO: 534734 - protein, 14 aa, Homo sapiens
  CDR3 for beta chain variable domain of TCR clone 267367 (TRBV7-2, TRBJ2-7)
CASSSISGFSEQYF

SEQ ID NO: 534735 - protein, 13 aa, Homo sapiens
  CDR3 for alpha chain variable domain of TCR clone 267368 (TRAV12-2, TRAJ20)
CAVYPSNDYKLSF

SEQ ID NO: 534736 - protein, 14 aa, Homo sapiens
  CDR3 for beta chain variable domain of TCR clone 267368 (TRBV7-3, TRBJ1-1)
CASSLKGGNTEAFF

SEQ ID NO: 534737 - protein, 14 aa, Homo sapiens
  CDR3 for alpha chain variable domain of TCR clone 267369 (TRAV29/DV5, TRAJ36)
CAARRKTGANNPFF

SEQ ID NO: 534738 - protein, 14 aa, Homo sapiens
  CDR3 for beta chain variable domain of TCR clone 267369 (TRBV4-2, TRBJ2-1)
CASGLDRAYNEQFF

SEQ ID NO: 534739 - protein, 13 aa, Homo sapiens
  CDR3 for alpha chain variable domain of TCR clone 267370 (TRAV3, TRAJ21)
RAAREPDFNKFYF

SEQ ID NO: 534740 - protein, 16 aa, Homo sapiens
  CDR3 for beta chain variable domain of TCR clone 267370 (TRBV6-1, TRBJ2-5)
CASSETLDRGAETQYF

SEQ ID NO: 534741 - protein, 15 aa, Homo sapiens
  CDR3 for alpha chain variable domain of TCR clone 267371 (TRAV12-3, TRAJ6)
CAMSATTGGSYIPTF

SEQ ID NO: 534742 - protein, 13 aa, Homo sapiens
  CDR3 for beta chain variable domain of TCR clone 267371 (TRBV20-1, TRBJ2-2)
CSASAAGTGELFF

SEQ ID NO: 534743 - protein, 15 aa, Homo sapiens
  CDR3 for alpha chain variable domain of TCR clone 267372 (TRAV12-1, TRAJ10)
CVVNKLTGGGNKLTF

SEQ ID NO: 534744 - protein, 14 aa, Homo sapiens
  CDR3 for beta chain variable domain of TCR clone 267372 (TRBV18, TRBJ2-7)
CASSPRGGAYEQYF

SEQ ID NO: 534745 - protein, 10 aa, Homo sapiens
  CDR3 for alpha chain variable domain of TCR clone 267373 (TRAV1-2, TRAJ20)
CALNDYKLSF

SEQ ID NO: 534746 - protein, 16 aa, Homo sapiens
  CDR3 for beta chain variable domain of TCR clone 267373 (TRBV20-1, TRBJ1-1)
CSARALTQVMNTEAFF

SEQ ID NO: 534747 - protein, 13 aa, Homo sapiens
  CDR3 for alpha chain variable domain of TCR clone 267374 (TRAV2, TRAJ15)
CAVASQAGTALIF

SEQ ID NO: 534748 - protein, 15 aa, Homo sapiens
  CDR3 for beta chain variable domain of TCR clone 267374 (TRBV5-1, TRBJ1-1)
RSSSGGNSLNTEAFF

SEQ ID NO: 534749 - protein, 14 aa, Homo sapiens
  CDR3 for alpha chain variable domain of TCR clone 267375 (TRAV1-2, TRAJ8)
CAVREDTGFHKLVF

SEQ ID NO: 534750 - protein, 13 aa, Homo sapiens
  CDR3 for beta chain variable domain of TCR clone 267375 (TRBV19, TRBJ1-2)
CASSVPGQDGYTF

SEQ ID NO: 534751 - protein, 22 aa, Homo sapiens
  CDR3 for alpha chain variable domain of TCR clone 267376 (TRAV3, )
CAVRDCLNSGNNHIQNPDPAVY

SEQ ID NO: 534752 - protein, 19 aa, Homo sapiens
  CDR3 for beta chain variable domain of TCR clone 267376 (TRBV7-2, TRBJ2-3)
CASSFLSRNWGGGTDTQYF

SEQ ID NO: 534753 - protein, 17 aa, Homo sapiens
  CDR3 for alpha chain variable domain of TCR clone 267377 (TRAV3, TRAJ6)
CAVRDGPRAGGSYIPTL

SEQ ID NO: 534754 - protein, 13 aa, Homo sapiens
  CDR3 for beta chain variable domain of TCR clone 267377 (TRBV20-1, TRBJ1-1)
CSARGGGNTEAFF

SEQ ID NO: 534755 - protein, 12 aa, Homo sapiens
  CDR3 for alpha chain variable domain of TCR clone 267378 (TRAV12-3, TRAJ40)
CAMSSGTYKYIF

SEQ ID NO: 534756 - protein, 16 aa, Homo sapiens
  CDR3 for beta chain variable domain of TCR clone 267378 (TRBV7-6, TRBJ2-5)
CASSETSGRAVETQYF

SEQ ID NO: 534757 - protein, 15 aa, Homo sapiens
  CDR3 for alpha chain variable domain of TCR clone 267379 (TRAV20, TRAJ50)
CAVRQMKTSYDKVIF

SEQ ID NO: 534758 - protein, 16 aa, Homo sapiens
  CDR3 for beta chain variable domain of TCR clone 267379 (TRBV15, TRBJ1-2)
CATSRGPMTGGGGYTF

SEQ ID NO: 534759 - protein, 15 aa, Homo sapiens
  CDR3 for alpha chain variable domain of TCR clone 267380 (TRAV38-1, TRAJ57)
CAFMDSQGGGEKLVF

SEQ ID NO: 534760 - protein, 16 aa, Homo sapiens
  CDR3 for beta chain variable domain of TCR clone 267380 (TRBV10-3, TRBJ2-1)
CAIRGGGRGDYNEQFF

SEQ ID NO: 534761 - protein, 15 aa, Homo sapiens
  CDR3 for alpha chain variable domain of TCR clone 267381 (TRAV3, TRAJ17)
CAVRDAGAAGNKLTF

SEQ ID NO: 534762 - protein, 14 aa, Homo sapiens
  CDR3 for beta chain variable domain of TCR clone 267381 (TRBV6-3, TRBJ1-1)
CASSNLLPGAEAFF

SEQ ID NO: 534763 - protein, 15 aa, Homo sapiens
  CDR3 for alpha chain variable domain of TCR clone 267382 (TRAV12-3, TRAJ47)
CAMSALVEYGNKLVF

SEQ ID NO: 534764 - protein, 16 aa, Homo sapiens
  CDR3 for beta chain variable domain of TCR clone 267382 (TRBV12-4, TRBJ1-5)
CASRQPVEGSNQPQHF

SEQ ID NO: 534765 - protein, 14 aa, Homo sapiens
  CDR3 for alpha chain variable domain of TCR clone 267383 (TRAV23/DV6, TRAJ40)
CAARKNSGTYKYTF

SEQ ID NO: 534766 - protein, 14 aa, Homo sapiens
  CDR3 for beta chain variable domain of TCR clone 267383 (TRBV10-3, TRBJ2-5)
CAISERDYQETQYF

SEQ ID NO: 534767 - protein, 16 aa, Homo sapiens
  CDR3 for alpha chain variable domain of TCR clone 267384 (TRAV3, TRAJ10)
CAVRDMRAGGGNKLTF

SEQ ID NO: 534768 - protein, 14 aa, Homo sapiens
  CDR3 for beta chain variable domain of TCR clone 267384 (TRBV13, TRBJ2-5)
CASSLGTAQETQYF

SEQ ID NO: 534769 - protein, 17 aa, Homo sapiens
  CDR3 for alpha chain variable domain of TCR clone 267385 (TRAV3, TRAJ42)
CAVRDRDYGGSQGNLIL

SEQ ID NO: 534770 - protein, 14 aa, Homo sapiens
  CDR3 for beta chain variable domain of TCR clone 267385 (TRBV25-1, TRBJ1-1)
CASTHLGGNTEAFF

SEQ ID NO: 534771 - protein, 14 aa, Homo sapiens
  CDR3 for alpha chain variable domain of TCR clone 267386 (TRAV1-2, TRAJ16)
RAVNRFSDGQKLLF

SEQ ID NO: 534772 - protein, 10 aa, Homo sapiens
  CDR3 for beta chain variable domain of TCR clone 267386 (TRBV20-1, TRBJ1-4)
PQGANEKLFF

SEQ ID NO: 534773 - protein, 13 aa, Homo sapiens
  CDR3 for alpha chain variable domain of TCR clone 267387 (TRAV12-2, TRAJ20)
CAVYPSNDYKLSF

SEQ ID NO: 534774 - protein, 17 aa, Homo sapiens
  CDR3 for beta chain variable domain of TCR clone 267387 (TRBV24-1, TRBJ2-4)
CATSDAEARGVRNIQYF

SEQ ID NO: 534775 - protein, 14 aa, Homo sapiens
  CDR3 for alpha chain variable domain of TCR clone 267388 (TRAV29/DV5, TRAJ47)
CAASSIEYGNKLVF

SEQ ID NO: 534776 - protein, 14 aa, Homo sapiens
  CDR3 for beta chain variable domain of TCR clone 267388 (TRBV4-1, TRBJ2-2)
CASSQAVNTGELFF

SEQ ID NO: 534777 - protein, 13 aa, Homo sapiens
  CDR3 for alpha chain variable domain of TCR clone 267389 (TRAV13-2, TRAJ21)
FAENVGQLQQILL

SEQ ID NO: 534778 - protein, 16 aa, Homo sapiens
  CDR3 for beta chain variable domain of TCR clone 267389 (TRBV3-1, TRBJ2-5)
CASSQDWASGQETQYF

SEQ ID NO: 534779 - protein, 12 aa, Homo sapiens
  CDR3 for alpha chain variable domain of TCR clone 267390 (TRAV1-1, TRAJ8)
CAGGTGFQKLVF

SEQ ID NO: 534780 - protein, 23 aa, Homo sapiens
  CDR3 for beta chain variable domain of TCR clone 267390 (TRBV7-9, TRBJ1-4)
RGTRPCISVPAAGQGAFNEKLFF

SEQ ID NO: 534781 - protein, 15 aa, Homo sapiens
  CDR3 for alpha chain variable domain of TCR clone 267391 (TRAV8-4, TRAJ37)
CAVTYGSSNTGKLIF

SEQ ID NO: 534782 - protein, 13 aa, Homo sapiens
  CDR3 for beta chain variable domain of TCR clone 267391 (TRBV12-4, TRBJ2-5)
CASSLGGSKTQYF

SEQ ID NO: 534783 - protein, 17 aa, Homo sapiens
  CDR3 for alpha chain variable domain of TCR clone 267392 (TRAV13-1, TRAJ52)
CAAGRNAGGTSYGKLTF

SEQ ID NO: 534784 - protein, 13 aa, Homo sapiens
  CDR3 for beta chain variable domain of TCR clone 267392 (TRBV7-2, TRBJ1-1)
CDSNLKGAKGAFF

SEQ ID NO: 534785 - protein, 12 aa, Homo sapiens
  CDR3 for alpha chain variable domain of TCR clone 267393 (TRAV27, TRAJ20)
CAENLGDYKLSF

SEQ ID NO: 534786 - protein, 14 aa, Homo sapiens
  CDR3 for beta chain variable domain of TCR clone 267393 (TRBV7-6, TRBJ2-3)
CASSLGTVTDTQYF

SEQ ID NO: 534787 - protein, 16 aa, Homo sapiens
  CDR3 for alpha chain variable domain of TCR clone 267394 (TRAV3, TRAJ10)
CAVRDMRAGGGNKLTF

SEQ ID NO: 534788 - protein, 13 aa, Homo sapiens
  CDR3 for beta chain variable domain of TCR clone 267394 (TRBV7-9, TRBJ2-7)
CASSAGLQYEQYF

SEQ ID NO: 534789 - protein, 13 aa, Homo sapiens
  CDR3 for alpha chain variable domain of TCR clone 267395 (TRAV36/DV7, TRAJ49)
CAGDSNTGNQFDF

SEQ ID NO: 534790 - protein, 12 aa, Homo sapiens
  CDR3 for beta chain variable domain of TCR clone 267395 (TRBV11-2, TRBJ2-2)
CASSLGGGELFF

SEQ ID NO: 534791 - protein, 14 aa, Homo sapiens
  CDR3 for alpha chain variable domain of TCR clone 267396 (TRAV12-1, TRAJ4)
CVVPLKSGYNKLIF

SEQ ID NO: 534792 - protein, 13 aa, Homo sapiens
  CDR3 for beta chain variable domain of TCR clone 267396 (TRBV27, TRBJ2-7)
CASGRGGAYAQYF

SEQ ID NO: 534793 - protein, 14 aa, Homo sapiens
  CDR3 for alpha chain variable domain of TCR clone 267397 (TRAV12-2, TRAJ15)
CAPHTGQAGTALTF

SEQ ID NO: 534794 - protein, 14 aa, Homo sapiens
  CDR3 for beta chain variable domain of TCR clone 267397 (TRBV25-1, TRBJ1-1)
CASTHLGGNTEAFF

SEQ ID NO: 534795 - protein, 15 aa, Homo sapiens
  CDR3 for alpha chain variable domain of TCR clone 267398 (TRAV12-3, TRAJ52)
CSGGAGGTSYGKLTF

SEQ ID NO: 534796 - protein, 13 aa, Homo sapiens
  CDR3 for beta chain variable domain of TCR clone 267398 (TRBV20-1, TRBJ2-5)
CSARGDYQETQYF

SEQ ID NO: 534797 - protein, 14 aa, Homo sapiens
  CDR3 for alpha chain variable domain of TCR clone 267399 (TRAV8-4, TRAJ9)
CAVTFNTVGFKTIF

SEQ ID NO: 534798 - protein, 15 aa, Homo sapiens
  CDR3 for beta chain variable domain of TCR clone 267399 (TRBV7-9, TRBJ2-2)
CASSPETGAGGELFF

SEQ ID NO: 534799 - protein, 10 aa, Homo sapiens
  CDR3 for alpha chain variable domain of TCR clone 267400 (TRAV1-2, TRAJ20)
CACNDYKLSF

SEQ ID NO: 534800 - protein, 14 aa, Homo sapiens
  CDR3 for beta chain variable domain of TCR clone 267400 (TRBV19, TRBJ1-5)
CASRAPDSFLSQHF

SEQ ID NO: 534801 - protein, 14 aa, Homo sapiens
  CDR3 for alpha chain variable domain of TCR clone 267401 (TRAV1-2, TRAJ16)
CAVNLCSDGQKLLF

SEQ ID NO: 534802 - protein, 12 aa, Homo sapiens
  CDR3 for beta chain variable domain of TCR clone 267401 (TRBV11-2, TRBJ2-1)
CASSPGNNEQFF

SEQ ID NO: 534803 - protein, 12 aa, Homo sapiens
  CDR3 for alpha chain variable domain of TCR clone 267402 (TRAV12-3, TRAJ17)
CAMTLTGKKLTF

SEQ ID NO: 534804 - protein, 12 aa, Homo sapiens
  CDR3 for beta chain variable domain of TCR clone 267402 (TRBV11-2, TRBJ2-2)
CASSLGGGELFF

SEQ ID NO: 534805 - protein, 11 aa, Homo sapiens
  CDR3 for alpha chain variable domain of TCR clone 267403 (TRAV3, TRAJ13)
CAVTSYQKVTF

SEQ ID NO: 534806 - protein, 15 aa, Homo sapiens
  CDR3 for beta chain variable domain of TCR clone 267403 (TRBV28, TRBJ2-1)
CASSIIAGGRSEQFF

SEQ ID NO: 534807 - protein, 12 aa, Homo sapiens
  CDR3 for alpha chain variable domain of TCR clone 267404 (TRAV12-1, TRAJ40)
CVVYSGTYKYIF

SEQ ID NO: 534808 - protein, 15 aa, Homo sapiens
  CDR3 for beta chain variable domain of TCR clone 267404 (TRBV7-9, TRBJ1-6)
CAISSPGRGNSPLHF

SEQ ID NO: 534809 - protein, 15 aa, Homo sapiens
  CDR3 for alpha chain variable domain of TCR clone 267405 (TRAV8-6, TRAJ57)
CAVSLTQGGSEKLGF

SEQ ID NO: 534810 - protein, 12 aa, Homo sapiens
  CDR3 for beta chain variable domain of TCR clone 267405 (TRBV7-6, TRBJ2-3)
CASSTGTDTQYF

SEQ ID NO: 534811 - protein, 15 aa, Homo sapiens
  CDR3 for alpha chain variable domain of TCR clone 267406 (TRAV12-3, TRAJ27)
CAMRAYNTNAGKSTF

SEQ ID NO: 534812 - protein, 13 aa, Homo sapiens
  CDR3 for beta chain variable domain of TCR clone 267406 (TRBV7-3, TRBJ1-1)
CASSQDWGAEAFF

SEQ ID NO: 534813 - protein, 11 aa, Homo sapiens
  CDR3 for alpha chain variable domain of TCR clone 267407 (TRAV21, TRAJ48)
CAVDGNEKLTF

SEQ ID NO: 534814 - protein, 15 aa, Homo sapiens
  CDR3 for beta chain variable domain of TCR clone 267407 (TRBV12-4, TRBJ1-2)
CASSLAHRDGQAYTF

SEQ ID NO: 534815 - protein, 14 aa, Homo sapiens
  CDR3 for alpha chain variable domain of TCR clone 267408 (TRAV30, TRAJ33)
CGTDRRFSNYQLIW

SEQ ID NO: 534816 - protein, 16 aa, Homo sapiens
  CDR3 for beta chain variable domain of TCR clone 267408 (TRBV7-3, TRBJ2-2)
CASSLKRGALSGELFF

SEQ ID NO: 534817 - protein, 15 aa, Homo sapiens
  CDR3 for alpha chain variable domain of TCR clone 267409 (TRAV4, TRAJ39)
CLVGPNNNACNMLTF

SEQ ID NO: 534818 - protein, 13 aa, Homo sapiens
  CDR3 for beta chain variable domain of TCR clone 267409 (TRBV11-3, TRBJ2-5)
CASSSTGEETQYF

SEQ ID NO: 534819 - protein, 17 aa, Homo sapiens
  CDR3 for alpha chain variable domain of TCR clone 267410 (TRAV13-1, TRAJ28)
CAASPPNSGAGSYQLTF

SEQ ID NO: 534820 - protein, 15 aa, Homo sapiens
  CDR3 for beta chain variable domain of TCR clone 267410 (TRBV6-3, TRBJ2-2)
CARSFLATLTGELFF

SEQ ID NO: 534821 - protein, 10 aa, Homo sapiens
  CDR3 for alpha chain variable domain of TCR clone 267411 (TRAV30, TRAJ48)
CGIGNEKLTF

SEQ ID NO: 534822 - protein, 17 aa, Homo sapiens
  CDR3 for beta chain variable domain of TCR clone 267411 (TRBV7-6, TRBJ2-3)
CIAVPAAGGGGADTQYF

SEQ ID NO: 534823 - protein, 15 aa, Homo sapiens
  CDR3 for alpha chain variable domain of TCR clone 267412 (TRAV17, TRAJ23)
CATDAEDNQGGKHIF

SEQ ID NO: 534824 - protein, 17 aa, Homo sapiens
  CDR3 for beta chain variable domain of TCR clone 267412 (TRBV13, TRBJ2-3)
CASSLSRVAGGRNTQYF

SEQ ID NO: 534825 - protein, 19 aa, Homo sapiens
  CDR3 for alpha chain variable domain of TCR clone 267413 (TRAV38-1, TRAJ53)
CAFMKHGLEGGGSNYKLTF

SEQ ID NO: 534826 - protein, 13 aa, Homo sapiens
  CDR3 for beta chain variable domain of TCR clone 267413 (TRBV19, TRBJ2-7)
CASSPRQSYEQYF

SEQ ID NO: 534827 - protein, 14 aa, Homo sapiens
  CDR3 for alpha chain variable domain of TCR clone 267414 (TRAV14/DV4, TRAJ15)
CAMRRDQAGTALIF

SEQ ID NO: 534828 - protein, 14 aa, Homo sapiens
  CDR3 for beta chain variable domain of TCR clone 267414 (TRBV11-2, TRBJ2-7)
CASSSTGEGYEQYF

SEQ ID NO: 534829 - protein, 15 aa, Homo sapiens
  CDR3 for alpha chain variable domain of TCR clone 267415 (TRAV3, TRAJ36)
CAVRASQTGANNLLF

SEQ ID NO: 534830 - protein, 16 aa, Homo sapiens
  CDR3 for beta chain variable domain of TCR clone 267415 (TRBV19, TRBJ2-2)
CASRSPGTGATGELFF

SEQ ID NO: 534831 - protein, 14 aa, Homo sapiens
  CDR3 for alpha chain variable domain of TCR clone 267416 (TRAV12-2, TRAJ13)
CAVKKTGGYQTVTF

SEQ ID NO: 534832 - protein, 18 aa, Homo sapiens
  CDR3 for beta chain variable domain of TCR clone 267416 (TRBV20-1, TRBJ2-3)
CSASGLAGGPGTTDTQYF

SEQ ID NO: 534833 - protein, 15 aa, Homo sapiens
  CDR3 for alpha chain variable domain of TCR clone 267417 (TRAV3, TRAJ13)
CAVRDIPGGYQKVTF

SEQ ID NO: 534834 - protein, 13 aa, Homo sapiens
  CDR3 for beta chain variable domain of TCR clone 267417 (TRBV2, TRBJ2-2)
CASSKKNTGELFF

SEQ ID NO: 534835 - protein, 13 aa, Homo sapiens
  CDR3 for alpha chain variable domain of TCR clone 267418 (TRAV29/DV5, TRAJ31)
CAASRNNNPRLVF

SEQ ID NO: 534836 - protein, 12 aa, Homo sapiens
  CDR3 for beta chain variable domain of TCR clone 267418 (TRBV11-2, TRBJ2-1)
CASSPGNNEQFF

SEQ ID NO: 534837 - protein, 15 aa, Homo sapiens
  CDR3 for alpha chain variable domain of TCR clone 267419 (TRAV21, TRAJ38)
CAVRQDAGNNRKLIW

SEQ ID NO: 534838 - protein, 16 aa, Homo sapiens
  CDR3 for beta chain variable domain of TCR clone 267419 (TRBV4-2, TRBJ1-1)
CASRPFDGGGDTEAFF

SEQ ID NO: 534839 - protein, 11 aa, Homo sapiens
  CDR3 for alpha chain variable domain of TCR clone 267420 (TRAV21, TRAJ32)
CAVEIMVALQT

SEQ ID NO: 534840 - protein, 13 aa, Homo sapiens
  CDR3 for beta chain variable domain of TCR clone 267420 (TRBV2, TRBJ1-6)
CASGRGGISPLHF

SEQ ID NO: 534841 - protein, 15 aa, Homo sapiens
  CDR3 for alpha chain variable domain of TCR clone 267421 (TRAV26-1, TRAJ29)
CVVRVEGSGNTPLVF

SEQ ID NO: 534842 - protein, 15 aa, Homo sapiens
  CDR3 for beta chain variable domain of TCR clone 267421 (TRBV7-9, TRBJ1-5)
CASSQGHQPKQPQHF

SEQ ID NO: 534843 - protein, 15 aa, Homo sapiens
  CDR3 for alpha chain variable domain of TCR clone 267422 (TRAV13-1, TRAJ32)
CAASNGWWCYKQAHL

SEQ ID NO: 534844 - protein, 14 aa, Homo sapiens
  CDR3 for beta chain variable domain of TCR clone 267422 (TRBV5-1, TRBJ1-1)
CASSRTTGDTEAFF

SEQ ID NO: 534845 - protein, 14 aa, Homo sapiens
  CDR3 for alpha chain variable domain of TCR clone 267423 (TRAV26-1, TRAJ40)
CIVRVARGTYKYIF

SEQ ID NO: 534846 - protein, 16 aa, Homo sapiens
  CDR3 for beta chain variable domain of TCR clone 267423 (TRBV5-1, TRBJ1-1)
CASSSGGNSLNTEAFF

SEQ ID NO: 534847 - protein, 14 aa, Homo sapiens
  CDR3 for alpha chain variable domain of TCR clone 267424 (TRAV12-3, TRAJ10)
SHLPLTGGGNKITF

SEQ ID NO: 534848 - protein, 15 aa, Homo sapiens
  CDR3 for beta chain variable domain of TCR clone 267424 (TRBV4-1, TRBJ1-4)
CASSDTGGTNEKLFF

SEQ ID NO: 534849 - protein, 14 aa, Homo sapiens
  CDR3 for alpha chain variable domain of TCR clone 267425 (TRAV3, TRAJ9)
CAVRLNTGGFKTIF

SEQ ID NO: 534850 - protein, 16 aa, Homo sapiens
  CDR3 for beta chain variable domain of TCR clone 267425 (TRBV7-9, TRBJ2-1)
CASSDVAGGSYNEQFF

SEQ ID NO: 534851 - protein, 14 aa, Homo sapiens
  CDR3 for alpha chain variable domain of TCR clone 267426 (TRAV1-2, TRAJ8)
CAVREDTGFQKLAF

SEQ ID NO: 534852 - protein, 15 aa, Homo sapiens
  CDR3 for beta chain variable domain of TCR clone 267426 (TRBV5-5, TRBJ1-5)
CASSSTPGSNQPQHF

SEQ ID NO: 534853 - protein, 10 aa, Homo sapiens
  CDR3 for alpha chain variable domain of TCR clone 267427 (TRAV17, TRAJ36)
CATVAGNLFF

SEQ ID NO: 534854 - protein, 14 aa, Homo sapiens
  CDR3 for beta chain variable domain of TCR clone 267427 (TRBV11-2, TRBJ2-7)
CASSSTGEGYEQYF

SEQ ID NO: 534855 - protein, 14 aa, Homo sapiens
  CDR3 for alpha chain variable domain of TCR clone 267428 (TRAV23/DV6, TRAJ37)
LAASTSSNTGKLIF

SEQ ID NO: 534856 - protein, 13 aa, Homo sapiens
  CDR3 for beta chain variable domain of TCR clone 267428 (TRBV7-7, TRBJ1-1)
CASSLGANTEAFF

SEQ ID NO: 534857 - protein, 14 aa, Homo sapiens
  CDR3 for alpha chain variable domain of TCR clone 267429 (TRAV12-2, TRAJ13)
CAVKKTGGYQKVTF

SEQ ID NO: 534858 - protein, 13 aa, Homo sapiens
  CDR3 for beta chain variable domain of TCR clone 267429 (TRBV4-2, TRBJ1-1)
CASSQAGNTKAFF

SEQ ID NO: 534859 - protein, 11 aa, Homo sapiens
  CDR3 for alpha chain variable domain of TCR clone 267430 (TRAV12-3, TRAJ7)
CAMRGNNRLAF

SEQ ID NO: 534860 - protein, 15 aa, Homo sapiens
  CDR3 for beta chain variable domain of TCR clone 267430 (TRBV11-2, TRBJ1-2)
CASSLEGVQRNGYTF

SEQ ID NO: 534861 - protein, 12 aa, Homo sapiens
  CDR3 for alpha chain variable domain of TCR clone 267431 (TRAV16, TRAJ20)
CALVSNDYKLSF

SEQ ID NO: 534862 - protein, 16 aa, Homo sapiens
  CDR3 for beta chain variable domain of TCR clone 267431 (TRBV7-2, TRBJ2-5)
CASSSGLRRYQETQYF

SEQ ID NO: 534863 - protein, 16 aa, Homo sapiens
  CDR3 for alpha chain variable domain of TCR clone 267432 (TRAV20, TRAJ53)
CAVQGNNGGSNYKLTF

SEQ ID NO: 534864 - protein, 14 aa, Homo sapiens
  CDR3 for beta chain variable domain of TCR clone 267432 (TRBV6-5, TRBJ2-7)
CASSPHRGLREQYF

SEQ ID NO: 534865 - protein, 15 aa, Homo sapiens
  CDR3 for alpha chain variable domain of TCR clone 267433 (TRAV16, TRAJ17)
CALSGQEAAGNKLTF

SEQ ID NO: 534866 - protein, 16 aa, Homo sapiens
  CDR3 for beta chain variable domain of TCR clone 267433 (TRBV7-2, TRBJ2-7)
CASSLDPGGGSSTSGR

SEQ ID NO: 534867 - protein, 16 aa, Homo sapiens
  CDR3 for alpha chain variable domain of TCR clone 267434 (TRAV21, TRAJ52)
CAVTNASGTSYGKLTF

SEQ ID NO: 534868 - protein, 11 aa, Homo sapiens
  CDR3 for beta chain variable domain of TCR clone 267434 (TRBV2, TRBJ1-1)
CASREGTEAFF

SEQ ID NO: 534869 - protein, 15 aa, Homo sapiens
  CDR3 for alpha chain variable domain of TCR clone 267435 (TRAV3, TRAJ22)
CAVRDRGGSARQLTF

SEQ ID NO: 534870 - protein, 16 aa, Homo sapiens
  CDR3 for beta chain variable domain of TCR clone 267435 (TRBV5-4, TRBJ2-3)
CASQQPGAGGADTQDF

SEQ ID NO: 534871 - protein, 12 aa, Homo sapiens
  CDR3 for alpha chain variable domain of TCR clone 267436 (TRAV29/DV5, TRAJ41)
CAAISSGYELNF

SEQ ID NO: 534872 - protein, 17 aa, Homo sapiens
  CDR3 for beta chain variable domain of TCR clone 267436 (TRBV18, TRBJ2-1)
CASSKGLSGGADNEQFF

SEQ ID NO: 534873 - protein, 15 aa, Homo sapiens
  CDR3 for alpha chain variable domain of TCR clone 267437 (TRAV12-1, TRAJ44)
CVADLPTGTASKLTF

SEQ ID NO: 534874 - protein, 16 aa, Homo sapiens
  CDR3 for beta chain variable domain of TCR clone 267437 (TRBV2, TRBJ2-1)
CASRSPAGGKYNEQFF

SEQ ID NO: 534875 - protein, 10 aa, Homo sapiens
  CDR3 for alpha chain variable domain of TCR clone 267438 (TRAV12-3, TRAJ34)
CAMSADKLIF

SEQ ID NO: 534876 - protein, 16 aa, Homo sapiens
  CDR3 for beta chain variable domain of TCR clone 267438 (TRBV19, TRBJ2-1)
CASSKAGPSSYNEQFF

SEQ ID NO: 534877 - protein, 10 aa, Homo sapiens
  CDR3 for alpha chain variable domain of TCR clone 267439 (TRAV23/DV6, TRAJ57)
CAASPTLSQR

SEQ ID NO: 534878 - protein, 14 aa, Homo sapiens
  CDR3 for beta chain variable domain of TCR clone 267439 (TRBV7-8, TRBJ2-5)
CASSATGGQETQYF

SEQ ID NO: 534879 - protein, 14 aa, Homo sapiens
  CDR3 for alpha chain variable domain of TCR clone 267440 (TRAV23/DV6, TRAJ37)
CAASTSSNTGKLIF

SEQ ID NO: 534880 - protein, 14 aa, Homo sapiens
  CDR3 for beta chain variable domain of TCR clone 267440 (TRBV25-1, TRBJ2-7)
CASSEYRAPHEQYF

SEQ ID NO: 534881 - protein, 16 aa, Homo sapiens
  CDR3 for alpha chain variable domain of TCR clone 267441 (TRAV8-2, TRAJ7)
CVVSEGPCYGNNRLAF

SEQ ID NO: 534882 - protein, 16 aa, Homo sapiens
  CDR3 for beta chain variable domain of TCR clone 267441 (TRBV20-1, TRBJ1-4)
CSAPGQGLLTNEKLFF

SEQ ID NO: 534883 - protein, 15 aa, Homo sapiens
  CDR3 for alpha chain variable domain of TCR clone 267442 (TRAV27, TRAJ33)
CAGADIMDSNYQLIW

SEQ ID NO: 534884 - protein, 13 aa, Homo sapiens
  CDR3 for beta chain variable domain of TCR clone 267442 (TRBV28, TRBJ1-2)
CASSLQGRGGYSF

SEQ ID NO: 534885 - protein, 13 aa, Homo sapiens
  CDR3 for alpha chain variable domain of TCR clone 267443 (TRAV23/DV6, TRAJ22)
CASRAGSSRQLTF

SEQ ID NO: 534886 - protein, 14 aa, Homo sapiens
  CDR3 for beta chain variable domain of TCR clone 267443 (TRBV7-2, TRBJ2-7)
CASSPKTSFYEQYF

SEQ ID NO: 534887 - protein, 12 aa, Homo sapiens
  CDR3 for alpha chain variable domain of TCR clone 267444 (TRAV27, TRAJ9)
CAGESGGVKTIF

SEQ ID NO: 534888 - protein, 18 aa, Homo sapiens
  CDR3 for beta chain variable domain of TCR clone 267444 (TRBV11-2, TRBJ2-3)
CASSLGGASRGAPNTQYF

SEQ ID NO: 534889 - protein, 13 aa, Homo sapiens
  CDR3 for alpha chain variable domain of TCR clone 267445 (TRAV29/DV5, TRAJ31)
CAASRNNNATLMF

SEQ ID NO: 534890 - protein, 12 aa, Homo sapiens
  CDR3 for beta chain variable domain of TCR clone 267445 (TRBV28, TRBJ2-3)
CASSLYRDTQYF

SEQ ID NO: 534891 - protein, 14 aa, Homo sapiens
  CDR3 for alpha chain variable domain of TCR clone 267446 (TRAV12-3, TRAJ10)
SHLPLTGGGNKLTF

SEQ ID NO: 534892 - protein, 15 aa, Homo sapiens
  CDR3 for beta chain variable domain of TCR clone 267446 (TRBV7-9, TRBJ1-4)
YASSRTGGFNEKLFF

SEQ ID NO: 534893 - protein, 12 aa, Homo sapiens
  CDR3 for alpha chain variable domain of TCR clone 267447 (TRAV2, TRAJ9)
CAVGAGGFKTIF

SEQ ID NO: 534894 - protein, 11 aa, Homo sapiens
  CDR3 for beta chain variable domain of TCR clone 267447 (TRBV13, TRBJ2-2)
CASSQDRGAHR

SEQ ID NO: 534895 - protein, 11 aa, Homo sapiens
  CDR3 for alpha chain variable domain of TCR clone 267448 (TRAV12-1, TRAJ26)
CVVAYGQNFVF

SEQ ID NO: 534896 - protein, 15 aa, Homo sapiens
  CDR3 for beta chain variable domain of TCR clone 267448 (TRBV7-2, TRBJ2-1)
CASSSGLAGGNEQFF

SEQ ID NO: 534897 - protein, 15 aa, Homo sapiens
  CDR3 for alpha chain variable domain of TCR clone 267449 (TRAV8-3, TRAJ40)
CAAPSLGSGTYKYIF

SEQ ID NO: 534898 - protein, 12 aa, Homo sapiens
  CDR3 for beta chain variable domain of TCR clone 267449 (TRBV11-2, TRBJ2-2)
CASSLGGGKLFF

SEQ ID NO: 534899 - protein, 11 aa, Homo sapiens
  CDR3 for alpha chain variable domain of TCR clone 267450 (TRAV1-2, TRAJ20)
CAVANDSKLSF

SEQ ID NO: 534900 - protein, 13 aa, Homo sapiens
  CDR3 for beta chain variable domain of TCR clone 267450 (TRBV7-3, TRBJ1-1)
CASSQDWGAEAFF

SEQ ID NO: 534901 - protein, 12 aa, Homo sapiens
  CDR3 for alpha chain variable domain of TCR clone 267451 (TRAV21, TRAJ33)
RAKMDSNYQLIW

SEQ ID NO: 534902 - protein, 15 aa, Homo sapiens
  CDR3 for beta chain variable domain of TCR clone 267451 (TRBV19, TRBJ2-7)
CASSTGLAGTYEQYF

SEQ ID NO: 534903 - protein, 18 aa, Homo sapiens
  CDR3 for alpha chain variable domain of TCR clone 267452 (TRAV26-2, TRAJ17)
CCVLLHPAIKAAGNKLTF

SEQ ID NO: 534904 - protein, 15 aa, Homo sapiens
  CDR3 for beta chain variable domain of TCR clone 267452 (TRBV27, TRBJ2-7)
CASSAAGTGSYEQYF

SEQ ID NO: 534905 - protein, 16 aa, Homo sapiens
  CDR3 for alpha chain variable domain of TCR clone 267453 (TRAV30, TRAJ24)
CGTEIVDADSWGKFQF

SEQ ID NO: 534906 - protein, 16 aa, Homo sapiens
  CDR3 for beta chain variable domain of TCR clone 267453 (TRBV12-5, TRBJ2-5)
CASGPRTSGNQATQYF

SEQ ID NO: 534907 - protein, 15 aa, Homo sapiens
  CDR3 for alpha chain variable domain of TCR clone 267454 (TRAV8-3, TRAJ41)
CAVGSNSNSGYALNF

SEQ ID NO: 534908 - protein, 17 aa, Homo sapiens
  CDR3 for beta chain variable domain of TCR clone 267454 (TRBV25-1, TRBJ2-1)
CASSAYGQGGGVYEQFF

SEQ ID NO: 534909 - protein, 12 aa, Homo sapiens
  CDR3 for alpha chain variable domain of TCR clone 267455 (TRAV8-6, TRAJ11)
CAVSSGYSTLTF

SEQ ID NO: 534910 - protein, 10 aa, Homo sapiens
  CDR3 for beta chain variable domain of TCR clone 267455 (TRBV20-1, TRBJ1-5)
QCPGDQPQHF

SEQ ID NO: 534911 - protein, 15 aa, Homo sapiens
  CDR3 for alpha chain variable domain of TCR clone 267456 (TRAV21, TRAJ40)
CAVRSQTSGTYNYIF

SEQ ID NO: 534912 - protein, 13 aa, Homo sapiens
  CDR3 for beta chain variable domain of TCR clone 267456 (TRBV7-2, TRBJ2-2)
CASSSVRAGELFF

SEQ ID NO: 534913 - protein, 12 aa, Homo sapiens
  CDR3 for alpha chain variable domain of TCR clone 267457 (TRAV12-3, TRAJ49)
CAKFKTGNQFYF

SEQ ID NO: 534914 - protein, 14 aa, Homo sapiens
  CDR3 for beta chain variable domain of TCR clone 267457 (TRBV19, TRBJ2-1)
CASPTFVLSGEQFF

SEQ ID NO: 534915 - protein, 15 aa, Homo sapiens
  CDR3 for alpha chain variable domain of TCR clone 267458 (TRAV3, TRAJ22)
CAVRDRGGSARQLTF

SEQ ID NO: 534916 - protein, 15 aa, Homo sapiens
  CDR3 for beta chain variable domain of TCR clone 267458 (TRBV5-4, TRBJ2-1)
CASSFSGGSYNEQFF

SEQ ID NO: 534917 - protein, 17 aa, Homo sapiens
  CDR3 for alpha chain variable domain of TCR clone 267459 (TRAV12-2, TRAJ52)
CAVNPYAGGTSYGKLTF

SEQ ID NO: 534918 - protein, 13 aa, Homo sapiens
  CDR3 for beta chain variable domain of TCR clone 267459 (TRBV19, TRBJ1-2)
CASSVPGQDGDTF

SEQ ID NO: 534919 - protein, 12 aa, Homo sapiens
  CDR3 for alpha chain variable domain of TCR clone 267460 (TRAV17, TRAJ4)
CATDGGYNKLIF

SEQ ID NO: 534920 - protein, 16 aa, Homo sapiens
  CDR3 for beta chain variable domain of TCR clone 267460 (TRBV6-1, TRBJ2-5)
CASSETLDRGAETQYF

SEQ ID NO: 534921 - protein, 11 aa, Homo sapiens
  CDR3 for alpha chain variable domain of TCR clone 267461 (TRAV1-1, TRAJ20)
CAVFNDYKLGF

SEQ ID NO: 534922 - protein, 16 aa, Homo sapiens
  CDR3 for beta chain variable domain of TCR clone 267461 (TRBV29-1, TRBJ2-2)
CSVEKTSEGNTGELFF

SEQ ID NO: 534923 - protein, 13 aa, Homo sapiens
  CDR3 for alpha chain variable domain of TCR clone 267462 (TRAV16, TRAJ31)
CALSAHNNARLMF

SEQ ID NO: 534924 - protein, 17 aa, Homo sapiens
  CDR3 for beta chain variable domain of TCR clone 267462 (TRBV12-4, TRBJ2-1)
YASSPGLAGGRINEQFF

SEQ ID NO: 534925 - protein, 12 aa, Homo sapiens
  CDR3 for alpha chain variable domain of TCR clone 267463 (TRAV17, TRAJ39)
CATGAAGNMLTF

SEQ ID NO: 534926 - protein, 15 aa, Homo sapiens
  CDR3 for beta chain variable domain of TCR clone 267463 (TRBV2, TRBJ2-1)
CASSELVGSYNDQFF

SEQ ID NO: 534927 - protein, 14 aa, Homo sapiens
  CDR3 for alpha chain variable domain of TCR clone 267464 (TRAV17, TRAJ56)
CATVPAGANSKLTL

SEQ ID NO: 534928 - protein, 14 aa, Homo sapiens
  CDR3 for beta chain variable domain of TCR clone 267464 (TRBV2, TRBJ1-5)
CASSGTVSNQPQHF

SEQ ID NO: 534929 - protein, 14 aa, Homo sapiens
  CDR3 for alpha chain variable domain of TCR clone 267465 (TRAV1-2, TRAJ8)
CAVREDTGFQKLVF

SEQ ID NO: 534930 - protein, 16 aa, Homo sapiens
  CDR3 for beta chain variable domain of TCR clone 267465 (TRBV7-3, TRBJ2-3)
CASSSGLAGGTDTQYF

SEQ ID NO: 534931 - protein, 15 aa, Homo sapiens
  CDR3 for alpha chain variable domain of TCR clone 267466 (TRAV12-1, TRAJ44)
CVVDTPQGTASKLTF

SEQ ID NO: 534932 - protein, 14 aa, Homo sapiens
  CDR3 for beta chain variable domain of TCR clone 267466 (TRBV7-9, TRBJ2-1)
CASSPWDSLYEQFF

SEQ ID NO: 534933 - protein, 13 aa, Homo sapiens
  CDR3 for alpha chain variable domain of TCR clone 267467 (TRAV12-1, TRAJ7)
CVVNMRGNNRLAF

SEQ ID NO: 534934 - protein, 14 aa, Homo sapiens
  CDR3 for beta chain variable domain of TCR clone 267467 (TRBV7-2, TRBJ2-7)
CASRSQGAAYEQYF

SEQ ID NO: 534935 - protein, 13 aa, Homo sapiens
  CDR3 for alpha chain variable domain of TCR clone 267468 (TRAV13-2, TRAJ15)
CAEKNHAGTALIF

SEQ ID NO: 534936 - protein, 15 aa, Homo sapiens
  CDR3 for beta chain variable domain of TCR clone 267468 (TRBV29-1, TRBJ2-5)
CSVAPGQGARETQYF

SEQ ID NO: 534937 - protein, 17 aa, Homo sapiens
  CDR3 for alpha chain variable domain of TCR clone 267469 (TRAV26-1, TRAJ22)
CIVRVPSRSGSARQLTF

SEQ ID NO: 534938 - protein, 13 aa, Homo sapiens
  CDR3 for beta chain variable domain of TCR clone 267469 (TRBV7-3, TRBJ1-1)
CASSLTQGTEAFF

SEQ ID NO: 534939 - protein, 11 aa, Homo sapiens
  CDR3 for alpha chain variable domain of TCR clone 267470 (TRAV8-1, TRAJ8)
CAMTGFQKLVF

SEQ ID NO: 534940 - protein, 14 aa, Homo sapiens
  CDR3 for beta chain variable domain of TCR clone 267470 (TRBV5-4, TRBJ1-2)
CASTRQTYNYGYTF

SEQ ID NO: 534941 - protein, 11 aa, Homo sapiens
  CDR3 for alpha chain variable domain of TCR clone 267471 (TRAV21, TRAJ31)
CAVRNNARLMV

SEQ ID NO: 534942 - protein, 17 aa, Homo sapiens
  CDR3 for beta chain variable domain of TCR clone 267471 (TRBV28, TRBJ1-5)
CASSLSWLVSSNQPQHF

SEQ ID NO: 534943 - protein, 14 aa, Homo sapiens
  CDR3 for alpha chain variable domain of TCR clone 267472 (TRAV12-3, TRAJ10)
SHLPLTGGGNKLTF

SEQ ID NO: 534944 - protein, 13 aa, Homo sapiens
  CDR3 for beta chain variable domain of TCR clone 267472 (TRBV7-9, TRBJ1-2)
CASSVKQNYGYTF

SEQ ID NO: 534945 - protein, 14 aa, Homo sapiens
  CDR3 for alpha chain variable domain of TCR clone 267473 (TRAV12-3, TRAJ56)
CAMSVTGANSKLTF

SEQ ID NO: 534946 - protein, 17 aa, Homo sapiens
  CDR3 for beta chain variable domain of TCR clone 267473 (TRBV20-1, TRBJ2-3)
CSASLPGRGGSADTQYF

SEQ ID NO: 534947 - protein, 16 aa, Homo sapiens
  CDR3 for alpha chain variable domain of TCR clone 267474 (TRAV30, TRAJ24)
CGTEMVDADSWGKLQF

SEQ ID NO: 534948 - protein, 17 aa, Homo sapiens
  CDR3 for beta chain variable domain of TCR clone 267474 (TRBV20-1, TRBJ2-1)
CSARDPLAGVWDNEQFF

SEQ ID NO: 534949 - protein, 14 aa, Homo sapiens
  CDR3 for alpha chain variable domain of TCR clone 267475 (TRAV35, TRAJ40)
CAGSTTSGTYKYIF

SEQ ID NO: 534950 - protein, 13 aa, Homo sapiens
  CDR3 for beta chain variable domain of TCR clone 267475 (TRBV20-1, TRBJ1-6)
CSAPLGVVSPLHF

SEQ ID NO: 534951 - protein, 14 aa, Homo sapiens
  CDR3 for alpha chain variable domain of TCR clone 267476 (TRAV12-2, TRAJ15)
CAPHTGQAGTALIF

SEQ ID NO: 534952 - protein, 14 aa, Homo sapiens
  CDR3 for beta chain variable domain of TCR clone 267476 (TRBV7-2, TRBJ2-7)
CASSLDPGGGEQYF

SEQ ID NO: 534953 - protein, 15 aa, Homo sapiens
  CDR3 for alpha chain variable domain of TCR clone 267477 (TRAV8-3, TRAJ40)
SAVGGRTSGTYKYIF

SEQ ID NO: 534954 - protein, 15 aa, Homo sapiens
  CDR3 for beta chain variable domain of TCR clone 267477 (TRBV19, TRBJ1-1)
CASSGDGLGNTEVFF

SEQ ID NO: 534955 - protein, 18 aa, Homo sapiens
  CDR3 for alpha chain variable domain of TCR clone 267478 (TRAV12-3, TRAJ52)
CAMSRTNAGGASYGKLTF

SEQ ID NO: 534956 - protein, 17 aa, Homo sapiens
  CDR3 for beta chain variable domain of TCR clone 267478 (TRBV7-3, TRBJ2-3)
CASSLMKRMRGADTQYF

SEQ ID NO: 534957 - protein, 13 aa, Homo sapiens
  CDR3 for alpha chain variable domain of TCR clone 267479 (TRAV12-3, TRAJ6)
CANPSGGSYIPTF

SEQ ID NO: 534958 - protein, 14 aa, Homo sapiens
  CDR3 for beta chain variable domain of TCR clone 267479 (TRBV19, TRBJ1-1)
CASSFLTGTTEAFF

SEQ ID NO: 534959 - protein, 12 aa, Homo sapiens
  CDR3 for alpha chain variable domain of TCR clone 267480 (TRAV26-1, TRAJ17)
CIVRSAGNKLTF

SEQ ID NO: 534960 - protein, 14 aa, Homo sapiens
  CDR3 for beta chain variable domain of TCR clone 267480 (TRBV19, TRBJ2-1)
CASPTFVLSGEQFF

SEQ ID NO: 534961 - protein, 15 aa, Homo sapiens
  CDR3 for alpha chain variable domain of TCR clone 267481 (TRAV3, TRAJ5)
CAVRDRKTGRRALTF

SEQ ID NO: 534962 - protein, 13 aa, Homo sapiens
  CDR3 for beta chain variable domain of TCR clone 267481 (TRBV19, TRBJ2-1)
CATSRGVYNEQFF

SEQ ID NO: 534963 - protein, 12 aa, Homo sapiens
  CDR3 for alpha chain variable domain of TCR clone 267482 (TRAV13-1, TRAJ27)
CAAHTNAGKSTF

SEQ ID NO: 534964 - protein, 13 aa, Homo sapiens
  CDR3 for beta chain variable domain of TCR clone 267482 (TRBV24-1, TRBJ2-1)
CATSAGPYNEQFF

SEQ ID NO: 534965 - protein, 16 aa, Homo sapiens
  CDR3 for alpha chain variable domain of TCR clone 267483 (TRAV3, TRAJ23)
CAVESLIYNQGGKLIF

SEQ ID NO: 534966 - protein, 15 aa, Homo sapiens
  CDR3 for beta chain variable domain of TCR clone 267483 (TRBV19, TRBJ1-5)
CASSPEGRPNQPQHF

SEQ ID NO: 534967 - protein, 15 aa, Homo sapiens
  CDR3 for alpha chain variable domain of TCR clone 267484 (TRAV26-1, TRAJ39)
CIVRVYNNAGNMLTF

SEQ ID NO: 534968 - protein, 15 aa, Homo sapiens
  CDR3 for beta chain variable domain of TCR clone 267484 (TRBV7-2, TRBJ2-5)
CASSGILAGAETQYF

SEQ ID NO: 534969 - protein, 15 aa, Homo sapiens
  CDR3 for alpha chain variable domain of TCR clone 267485 (TRAV17, TRAJ35)
CATAFVIAFGNVLHC

SEQ ID NO: 534970 - protein, 15 aa, Homo sapiens
  CDR3 for beta chain variable domain of TCR clone 267485 (TRBV7-9, TRBJ2-7)
CASSLALAEAYEQYV

SEQ ID NO: 534971 - protein, 18 aa, Homo sapiens
  CDR3 for alpha chain variable domain of TCR clone 267486 (TRAV21, TRAJ52)
CAVRPSPAGGTSYGKLTL

SEQ ID NO: 534972 - protein, 15 aa, Homo sapiens
  CDR3 for beta chain variable domain of TCR clone 267486 (TRBV20-1, TRBJ2-7)
CSARDRVAGMDEQYF

SEQ ID NO: 534973 - protein, 14 aa, Homo sapiens
  CDR3 for alpha chain variable domain of TCR clone 267487 (TRAV12-1, TRAJ30)
CVVNIGGRDYKIIF

SEQ ID NO: 534974 - protein, 14 aa, Homo sapiens
  CDR3 for beta chain variable domain of TCR clone 267487 (TRBV20-1, TRBJ2-1)
CSAQIGGSANEQFF

SEQ ID NO: 534975 - protein, 17 aa, Homo sapiens
  CDR3 for alpha chain variable domain of TCR clone 267488 (TRAV4, TRAJ13)
CLVGVQGASGGYQKVTF

SEQ ID NO: 534976 - protein, 18 aa, Homo sapiens
  CDR3 for beta chain variable domain of TCR clone 267488 (TRBV15, TRBJ2-3)
CVTSRDGARSWDTDTQYF

SEQ ID NO: 534977 - protein, 11 aa, Homo sapiens
  CDR3 for alpha chain variable domain of TCR clone 267489 (TRAV29/DV5, TRAJ31)
CAASYRDRLMF

SEQ ID NO: 534978 - protein, 13 aa, Homo sapiens
  CDR3 for beta chain variable domain of TCR clone 267489 (TRBV7-9, TRBJ2-7)
CASSFAGAYEQYF

SEQ ID NO: 534979 - protein, 16 aa, Homo sapiens
  CDR3 for alpha chain variable domain of TCR clone 267490 (TRAV13-2, TRAJ32)
CAENMNYGGATNKLIF

SEQ ID NO: 534980 - protein, 17 aa, Homo sapiens
  CDR3 for beta chain variable domain of TCR clone 267490 (TRBV11-2, TRBJ2-7)
CASSLPGQRATSSTPGR

SEQ ID NO: 534981 - protein, 15 aa, Homo sapiens
  CDR3 for alpha chain variable domain of TCR clone 267491 (TRAV8-3, TRAJ23)
CAVGDRYNQGGKLIF

SEQ ID NO: 534982 - protein, 17 aa, Homo sapiens
  CDR3 for beta chain variable domain of TCR clone 267491 (TRBV4-1, TRBJ1-4)
CASSQEGPRGVEEKVFF

SEQ ID NO: 534983 - protein, 16 aa, Homo sapiens
  CDR3 for alpha chain variable domain of TCR clone 267492 (TRAV21, TRAJ52)
CAVTNAGGTSFGKLTF

SEQ ID NO: 534984 - protein, 16 aa, Homo sapiens
  CDR3 for beta chain variable domain of TCR clone 267492 (TRBV2, TRBJ2-1)
CASSVGGSLSYNEQFF

SEQ ID NO: 534985 - protein, 15 aa, Homo sapiens
  CDR3 for alpha chain variable domain of TCR clone 267493 (TRAV2, TRAJ22)
CAVPSLGGSARQLTF

SEQ ID NO: 534986 - protein, 11 aa, Homo sapiens
  CDR3 for beta chain variable domain of TCR clone 267493 (TRBV11-2, TRBJ2-2)
CASSLPGELFF

SEQ ID NO: 534987 - protein, 14 aa, Homo sapiens
  CDR3 for alpha chain variable domain of TCR clone 267494 (TRAV30, TRAJ26)
CGTEIVSYGQNFVF

SEQ ID NO: 534988 - protein, 13 aa, Homo sapiens
  CDR3 for beta chain variable domain of TCR clone 267494 (TRBV19, TRBJ1-3)
CARRLSLGNTIYF

SEQ ID NO: 534989 - protein, 13 aa, Homo sapiens
  CDR3 for alpha chain variable domain of TCR clone 267495 (TRAV12-2, TRAJ3)
CAAPYSSASKLIF

SEQ ID NO: 534990 - protein, 18 aa, Homo sapiens
  CDR3 for beta chain variable domain of TCR clone 267495 (TRBV4-1, TRBJ1-5)
CASSQDPPGAGGNQPQHF

SEQ ID NO: 534991 - protein, 14 aa, Homo sapiens
  CDR3 for alpha chain variable domain of TCR clone 267496 (TRAV13-1, TRAJ35)
CAASKGGFGNVLHC

SEQ ID NO: 534992 - protein, 12 aa, Homo sapiens
  CDR3 for beta chain variable domain of TCR clone 267496 (TRBV11-2, TRBJ2-1)
CASSVQREGQFF

SEQ ID NO: 534993 - protein, 15 aa, Homo sapiens
  CDR3 for alpha chain variable domain of TCR clone 267497 (TRAV16, TRAJ12)
CSKWPLRDSRYKLIF

SEQ ID NO: 534994 - protein, 12 aa, Homo sapiens
  CDR3 for beta chain variable domain of TCR clone 267497 (TRBV7-9, TRBJ2-7)
CASSIKREEQYF

SEQ ID NO: 534995 - protein, 14 aa, Homo sapiens
  CDR3 for alpha chain variable domain of TCR clone 267498 (TRAV12-3, TRAJ58)
CAMSTETSGSRLTF

SEQ ID NO: 534996 - protein, 15 aa, Homo sapiens
  CDR3 for beta chain variable domain of TCR clone 267498 (TRBV5-4, TRBJ2-1)
CASSPTSGGDVGQFF

SEQ ID NO: 534997 - protein, 16 aa, Homo sapiens
  CDR3 for alpha chain variable domain of TCR clone 267499 (TRAV8-1, TRAJ39)
CAVNVPSYNASNMLTL

SEQ ID NO: 534998 - protein, 15 aa, Homo sapiens
  CDR3 for beta chain variable domain of TCR clone 267499 (TRBV4-1, TRBJ2-3)
CASRSTRAGTDTQYF

SEQ ID NO: 534999 - protein, 15 aa, Homo sapiens
  CDR3 for alpha chain variable domain of TCR clone 267500 (TRAV25, TRAJ53)
CAATGGGGSNYKLTF

SEQ ID NO: 535000 - protein, 13 aa, Homo sapiens
  CDR3 for beta chain variable domain of TCR clone 267500 (TRBV4-1, TRBJ2-7)
CASSQGQAYEQYF

SEQ ID NO: 535001 - protein, 19 aa, Homo sapiens
  CDR3 for alpha chain variable domain of TCR clone 267501 (TRAV26-1, TRAJ52)
CIVRAHRNAGGTSYGKLTF

SEQ ID NO: 535002 - protein, 16 aa, Homo sapiens
  CDR3 for beta chain variable domain of TCR clone 267501 (TRBV11-2, TRBJ2-1)
CASSPRLAGVYNEQFF

SEQ ID NO: 535003 - protein, 18 aa, Homo sapiens
  CDR3 for alpha chain variable domain of TCR clone 267502 (TRAV21, TRAJ52)
CAVRPSPAGGTSYGKLTF

SEQ ID NO: 535004 - protein, 15 aa, Homo sapiens
  CDR3 for beta chain variable domain of TCR clone 267502 (TRBV5-1, TRBJ2-1)
CASKGLAGVYNEQFF

SEQ ID NO: 535005 - protein, 13 aa, Homo sapiens
  CDR3 for alpha chain variable domain of TCR clone 267503 (TRAV13-1, TRAJ21)
CAASIYNFNKFYF

SEQ ID NO: 535006 - protein, 14 aa, Homo sapiens
  CDR3 for beta chain variable domain of TCR clone 267503 (TRBV7-8, TRBJ2-3)
CASSFKSSTDTQYF

SEQ ID NO: 535007 - protein, 11 aa, Homo sapiens
  CDR3 for alpha chain variable domain of TCR clone 267504 (TRAV12-3, TRAJ43)
CAMSVSNDIRF

SEQ ID NO: 535008 - protein, 13 aa, Homo sapiens
  CDR3 for beta chain variable domain of TCR clone 267504 (TRBV20-1, TRBJ1-1)
CSAPLGGGTEAFS

SEQ ID NO: 535009 - protein, 15 aa, Homo sapiens
  CDR3 for alpha chain variable domain of TCR clone 267505 (TRAV17, TRAJ13)
CATDAGSGGYQKVTF

SEQ ID NO: 535010 - protein, 17 aa, Homo sapiens
  CDR3 for beta chain variable domain of TCR clone 267505 (TRBV11-2, TRBJ2-1)
CASSLYPPGVEYNEQVF

SEQ ID NO: 535011 - protein, 14 aa, Homo sapiens
  CDR3 for alpha chain variable domain of TCR clone 267506 (TRAV12-3, TRAJ29)
CAMILLSGNTPLVF

SEQ ID NO: 535012 - protein, 16 aa, Homo sapiens
  CDR3 for beta chain variable domain of TCR clone 267506 (TRBV28, TRBJ2-7)
CSSSSGTSGRGYEQYF

SEQ ID NO: 535013 - protein, 14 aa, Homo sapiens
  CDR3 for alpha chain variable domain of TCR clone 267507 (TRAV12-2, TRAJ53)
CAVKGGGSNYKLTF

SEQ ID NO: 535014 - protein, 15 aa, Homo sapiens
  CDR3 for beta chain variable domain of TCR clone 267507 (TRBV2, TRBJ2-7)
CASSEGLARSYEQYF

SEQ ID NO: 535015 - protein, 15 aa, Homo sapiens
  CDR3 for alpha chain variable domain of TCR clone 267508 (TRAV23/DV6, TRAJ18)
CAAGYRGSTLGRLYF

SEQ ID NO: 535016 - protein, 15 aa, Homo sapiens
  CDR3 for beta chain variable domain of TCR clone 267508 (TRBV6-6, TRBJ2-1)
CATRQGVSAYNEQFF

SEQ ID NO: 535017 - protein, 16 aa, Homo sapiens
  CDR3 for alpha chain variable domain of TCR clone 267509 (TRAV13-1, TRAJ10)
CAASSHFTGGGNKPTF

SEQ ID NO: 535018 - protein, 15 aa, Homo sapiens
  CDR3 for beta chain variable domain of TCR clone 267509 (TRBV7-9, TRBJ1-6)
CASSSPGRGNSPLHF

SEQ ID NO: 535019 - protein, 15 aa, Homo sapiens
  CDR3 for alpha chain variable domain of TCR clone 267510 (TRAV3, TRAJ29)
CAVRDLYSGNTPLVF

SEQ ID NO: 535020 - protein, 17 aa, Homo sapiens
  CDR3 for beta chain variable domain of TCR clone 267510 (TRBV20-1, TRBJ2-1)
CSARDPLAGFWDNEQFF

SEQ ID NO: 535021 - protein, 14 aa, Homo sapiens
  CDR3 for alpha chain variable domain of TCR clone 267511 (TRAV12-2, TRAJ13)
CAVKKTGGYQKVTF

SEQ ID NO: 535022 - protein, 15 aa, Homo sapiens
  CDR3 for beta chain variable domain of TCR clone 267511 (TRBV20-1, TRBJ2-7)
CSARDPTEVGHEQYF

SEQ ID NO: 535023 - protein, 17 aa, Homo sapiens
  CDR3 for alpha chain variable domain of TCR clone 267512 (TRAV4, TRAJ13)
CLVGVQGSSGGYQKVTF

SEQ ID NO: 535024 - protein, 18 aa, Homo sapiens
  CDR3 for beta chain variable domain of TCR clone 267512 (TRBV15, TRBJ2-3)
GATSRDGARSWDTDTQYF

SEQ ID NO: 535025 - protein, 15 aa, Homo sapiens
  CDR3 for alpha chain variable domain of TCR clone 267513 (TRAV38-1, TRAJ37)
CAFIFGSGNTGKLIF

SEQ ID NO: 535026 - protein, 15 aa, Homo sapiens
  CDR3 for beta chain variable domain of TCR clone 267513 (TRBV6-1, TRBJ2-3)
CASSEVIGRGRYAVF

SEQ ID NO: 535027 - protein, 13 aa, Homo sapiens
  CDR3 for alpha chain variable domain of TCR clone 267514 (TRAV8-4, TRAJ10)
CAAFTGGGNKLTF

SEQ ID NO: 535028 - protein, 12 aa, Homo sapiens
  CDR3 for beta chain variable domain of TCR clone 267514 (TRBV3-1, TRBJ2-1)
CASSKGSSGQFF

SEQ ID NO: 535029 - protein, 15 aa, Homo sapiens
  CDR3 for alpha chain variable domain of TCR clone 267515 (TRAV3, TRAJ47)
CAVRDIGEYGNKLVF

SEQ ID NO: 535030 - protein, 15 aa, Homo sapiens
  CDR3 for beta chain variable domain of TCR clone 267515 (TRBV9, TRBJ1-6)
CASSVAGTGDSPLHF

SEQ ID NO: 535031 - protein, 15 aa, Homo sapiens
  CDR3 for alpha chain variable domain of TCR clone 267516 (TRAV21, TRAJ53)
CATLNSRGSNYKLTF

SEQ ID NO: 535032 - protein, 16 aa, Homo sapiens
  CDR3 for beta chain variable domain of TCR clone 267516 (TRBV9, TRBJ2-1)
WASSVGGGGNYNEQFF

SEQ ID NO: 535033 - protein, 18 aa, Homo sapiens
  CDR3 for alpha chain variable domain of TCR clone 267517 (TRAV21, TRAJ52)
CAVRPSPAGGTSYGKLTY

SEQ ID NO: 535034 - protein, 15 aa, Homo sapiens
  CDR3 for beta chain variable domain of TCR clone 267517 (TRBV19, TRBJ1-1)
CASTSGQIQNTEAFF

SEQ ID NO: 535035 - protein, 13 aa, Homo sapiens
  CDR3 for alpha chain variable domain of TCR clone 267518 (TRAV29/DV5, TRAJ31)
CAASRNNNARLMF

SEQ ID NO: 535036 - protein, 14 aa, Homo sapiens
  CDR3 for beta chain variable domain of TCR clone 267518 (TRBV19, TRBJ2-2)
CASSGQGIAGELFF

SEQ ID NO: 535037 - protein, 14 aa, Homo sapiens
  CDR3 for alpha chain variable domain of TCR clone 267519 (TRAV34, TRAJ44)
CGADGTGTASKLTF

SEQ ID NO: 535038 - protein, 15 aa, Homo sapiens
  CDR3 for beta chain variable domain of TCR clone 267519 (TRBV7-9, TRBJ1-4)
CASSARTGVNEKLFF

SEQ ID NO: 535039 - protein, 17 aa, Homo sapiens
  CDR3 for alpha chain variable domain of TCR clone 267520 (TRAV13-1, TRAJ52)
CAAGRNAGGTSYGKLTF

SEQ ID NO: 535040 - protein, 11 aa, Homo sapiens
  CDR3 for beta chain variable domain of TCR clone 267520 (TRBV12-4, TRBJ2-3)
CASTATDTQYF

SEQ ID NO: 535041 - protein, 14 aa, Homo sapiens
  CDR3 for alpha chain variable domain of TCR clone 267521 (TRAV12-2, TRAJ40)
CAVKIPSGTYKYIF

SEQ ID NO: 535042 - protein, 13 aa, Homo sapiens
  CDR3 for beta chain variable domain of TCR clone 267521 (TRBV20-1, TRBJ1-1)
CSAPPGGHTEAFF

SEQ ID NO: 535043 - protein, 18 aa, Homo sapiens
  CDR3 for alpha chain variable domain of TCR clone 267522 (TRAV13-1, TRAJ52)
CAASKRSAGGTSYGKLTF

SEQ ID NO: 535044 - protein, 18 aa, Homo sapiens
  CDR3 for beta chain variable domain of TCR clone 267522 (TRBV11-2, TRBJ2-6)
CASSLNPFLGTGANDLTF

SEQ ID NO: 535045 - protein, 14 aa, Homo sapiens
  CDR3 for alpha chain variable domain of TCR clone 267523 (TRAV2, TRAJ22)
CAVGRGGSARQLTF

SEQ ID NO: 535046 - protein, 15 aa, Homo sapiens
  CDR3 for beta chain variable domain of TCR clone 267523 (TRBV10-2, TRBJ2-6)
CASSEQGTGANVLTF

SEQ ID NO: 535047 - protein, 12 aa, Homo sapiens
  CDR3 for alpha chain variable domain of TCR clone 267524 (TRAV16, TRAJ49)
CALNEGGNQFYF

SEQ ID NO: 535048 - protein, 14 aa, Homo sapiens
  CDR3 for beta chain variable domain of TCR clone 267524 (TRBV7-9, TRBJ2-1)
CASRPTGLRNGQFF

SEQ ID NO: 535049 - protein, 11 aa, Homo sapiens
  CDR3 for alpha chain variable domain of TCR clone 267525 (TRAV35, TRAJ30)
CAGPGDDKIIV

SEQ ID NO: 535050 - protein, 14 aa, Homo sapiens
  CDR3 for beta chain variable domain of TCR clone 267525 (TRBV7-6, TRBJ1-6)
CASSQAGGGSPLHF

SEQ ID NO: 535051 - protein, 14 aa, Homo sapiens
  CDR3 for alpha chain variable domain of TCR clone 267526 (TRAV27, TRAJ58)
CAGDGETSGSRLTF

SEQ ID NO: 535052 - protein, 16 aa, Homo sapiens
  CDR3 for beta chain variable domain of TCR clone 267526 (TRBV7-2, TRBJ2-3)
CASSLAGAGSGDTQYF

SEQ ID NO: 535053 - protein, 12 aa, Homo sapiens
  CDR3 for alpha chain variable domain of TCR clone 267527 (TRAV23/DV6, TRAJ17)
CAAKAAGNKLTF

SEQ ID NO: 535054 - protein, 17 aa, Homo sapiens
  CDR3 for beta chain variable domain of TCR clone 267527 (TRBV5-5, TRBJ1-1)
CASSLRFRGLMHTEAFF

SEQ ID NO: 535055 - protein, 14 aa, Homo sapiens
  CDR3 for alpha chain variable domain of TCR clone 267528 (TRAV8-6, TRAJ30)
CAVWPVNRDDKIIF

SEQ ID NO: 535056 - protein, 17 aa, Homo sapiens
  CDR3 for beta chain variable domain of TCR clone 267528 (TRBV7-8, TRBJ2-6)
CASSAGTGGAGANVLTF

SEQ ID NO: 535057 - protein, 13 aa, Homo sapiens
  CDR3 for alpha chain variable domain of TCR clone 267529 (TRAV29/DV5, TRAJ33)
CAASVESNYQLIW

SEQ ID NO: 535058 - protein, 15 aa, Homo sapiens
  CDR3 for beta chain variable domain of TCR clone 267529 (TRBV7-6, TRBJ2-5)
CASSKPTGPQETQYF

SEQ ID NO: 535059 - protein, 21 aa, Homo sapiens
  CDR3 for alpha chain variable domain of TCR clone 267530 (TRAV25, TRAJ47)
TATQTTDVGTYFWEYGNKLVF

SEQ ID NO: 535060 - protein, 16 aa, Homo sapiens
  CDR3 for beta chain variable domain of TCR clone 267530 (TRBV6-6, TRBJ2-1)
CASSWGGQCPYNEQFF

SEQ ID NO: 535061 - protein, 11 aa, Homo sapiens
  CDR3 for alpha chain variable domain of TCR clone 267531 (TRAV12-3, TRAJ43)
CAMSVSNDMRF

SEQ ID NO: 535062 - protein, 15 aa, Homo sapiens
  CDR3 for beta chain variable domain of TCR clone 267531 (TRBV7-2, TRBJ2-7)
CASSLKGALTYEQYF

SEQ ID NO: 535063 - protein, 13 aa, Homo sapiens
  CDR3 for alpha chain variable domain of TCR clone 267532 (TRAV12-1, TRAJ13)
CVVALLGYQKVTF

SEQ ID NO: 535064 - protein, 14 aa, Homo sapiens
  CDR3 for beta chain variable domain of TCR clone 267532 (TRBV18, TRBJ2-7)
CASSPRGGAYEQYF

SEQ ID NO: 535065 - protein, 14 aa, Homo sapiens
  CDR3 for alpha chain variable domain of TCR clone 267533 (TRAV3, TRAJ7)
CAVREEEREQQTRF

SEQ ID NO: 535066 - protein, 15 aa, Homo sapiens
  CDR3 for beta chain variable domain of TCR clone 267533 (TRBV7-9, TRBJ1-5)
CASRQGHQPNQPQHF

SEQ ID NO: 535067 - protein, 13 aa, Homo sapiens
  CDR3 for alpha chain variable domain of TCR clone 267534 (TRAV13-2, TRAJ48)
CAEMDFGNGKLTF

SEQ ID NO: 535068 - protein, 15 aa, Homo sapiens
  CDR3 for beta chain variable domain of TCR clone 267534 (TRBV7-9, TRBJ1-6)
CARSSPGRGNSPLHF

SEQ ID NO: 535069 - protein, 13 aa, Homo sapiens
  CDR3 for alpha chain variable domain of TCR clone 267535 (TRAV29/DV5, TRAJ47)
CAASEEYGNKLVF

SEQ ID NO: 535070 - protein, 12 aa, Homo sapiens
  CDR3 for beta chain variable domain of TCR clone 267535 (TRBV29-1, TRBJ2-3)
CSVTGGADTHYF

SEQ ID NO: 535071 - protein, 12 aa, Homo sapiens
  CDR3 for alpha chain variable domain of TCR clone 267536 (TRAV12-1, TRAJ40)
CVVYSGTYKYIF

SEQ ID NO: 535072 - protein, 16 aa, Homo sapiens
  CDR3 for beta chain variable domain of TCR clone 267536 (TRBV11-3, TRBJ2-5)
CASSSVVAGSTETQYF

SEQ ID NO: 535073 - protein, 13 aa, Homo sapiens
  CDR3 for alpha chain variable domain of TCR clone 267537 (TRAV27, TRAJ56)
CAGLTGANSKLTL

SEQ ID NO: 535074 - protein, 17 aa, Homo sapiens
  CDR3 for beta chain variable domain of TCR clone 267537 (TRBV7-9, TRBJ2-7)
CASSWQGRWREAYEQYF

SEQ ID NO: 535075 - protein, 13 aa, Homo sapiens
  CDR3 for alpha chain variable domain of TCR clone 267538 (TRAV26-2, TRAJ43)
CILRAVNNNDMRL

SEQ ID NO: 535076 - protein, 15 aa, Homo sapiens
  CDR3 for beta chain variable domain of TCR clone 267538 (TRBV5-7, TRBJ1-5)
CASSYGKLWDQPQHF

SEQ ID NO: 535077 - protein, 15 aa, Homo sapiens
  CDR3 for alpha chain variable domain of TCR clone 267539 (TRAV21, TRAJ24)
CAARSSTDSWGKLQF

SEQ ID NO: 535078 - protein, 14 aa, Homo sapiens
  CDR3 for beta chain variable domain of TCR clone 267539 (TRBV11-2, TRBJ2-3)
CASSRLARTDTQYF

SEQ ID NO: 535079 - protein, 14 aa, Homo sapiens
  CDR3 for alpha chain variable domain of TCR clone 267540 (TRAV1-1, TRAJ28)
CAAPSGAGNYQLTF

SEQ ID NO: 535080 - protein, 15 aa, Homo sapiens
  CDR3 for beta chain variable domain of TCR clone 267540 (TRBV7-2, TRBJ1-2)
CASSLVSGGDYGYTF

SEQ ID NO: 535081 - protein, 14 aa, Homo sapiens
  CDR3 for alpha chain variable domain of TCR clone 267541 (TRAV1-2, TRAJ8)
CAVREDTGFQKLVF

SEQ ID NO: 535082 - protein, 12 aa, Homo sapiens
  CDR3 for beta chain variable domain of TCR clone 267541 (TRBV7-2, TRBJ2-1)
CASSLRQNEQFF

SEQ ID NO: 535083 - protein, 14 aa, Homo sapiens
  CDR3 for alpha chain variable domain of TCR clone 267542 (TRAV26-1, TRAJ38)
CIADNAGNNRKLVW

SEQ ID NO: 535084 - protein, 13 aa, Homo sapiens
  CDR3 for beta chain variable domain of TCR clone 267542 (TRBV4-1, TRBJ2-7)
CASSQGQAYEQYF

SEQ ID NO: 535085 - protein, 15 aa, Homo sapiens
  CDR3 for alpha chain variable domain of TCR clone 267543 (TRAV4, TRAJ36)
CLVGDRQPGANNLFF

SEQ ID NO: 535086 - protein, 15 aa, Homo sapiens
  CDR3 for beta chain variable domain of TCR clone 267543 (TRBV7-6, TRBJ2-1)
CASSSLAGEGNEQFF

SEQ ID NO: 535087 - protein, 14 aa, Homo sapiens
  CDR3 for alpha chain variable domain of TCR clone 267544 (TRAV8-3, TRAJ16)
CAVDRFSDGQKLLF

SEQ ID NO: 535088 - protein, 13 aa, Homo sapiens
  CDR3 for beta chain variable domain of TCR clone 267544 (TRBV4-1, TRBJ2-5)
CASSLTRGETQYF

SEQ ID NO: 535089 - protein, 13 aa, Homo sapiens
  CDR3 for alpha chain variable domain of TCR clone 267545 (TRAV41, TRAJ54)
CAVRIQGAKQLVF

SEQ ID NO: 535090 - protein, 14 aa, Homo sapiens
  CDR3 for beta chain variable domain of TCR clone 267545 (TRBV2, TRBJ2-1)
CASRTGSSYNEQFF

SEQ ID NO: 535091 - protein, 19 aa, Homo sapiens
  CDR3 for alpha chain variable domain of TCR clone 267546 (TRAV1-1, TRAJ32)
CAVRVDELWWCYKQAHLRN

SEQ ID NO: 535092 - protein, 16 aa, Homo sapiens
  CDR3 for beta chain variable domain of TCR clone 267546 (TRBV5-4, TRBJ2-3)
CASQQPGAGGADTQYF

SEQ ID NO: 535093 - protein, 12 aa, Homo sapiens
  CDR3 for alpha chain variable domain of TCR clone 267547 (TRAV12-1, TRAJ40)
CVVYSGTYKYIF

SEQ ID NO: 535094 - protein, 14 aa, Homo sapiens
  CDR3 for beta chain variable domain of TCR clone 267547 (TRBV5-1, TRBJ1-1)
CASSLQGASTEAFF

SEQ ID NO: 535095 - protein, 14 aa, Homo sapiens
  CDR3 for alpha chain variable domain of TCR clone 267548 (TRAV12-2, TRAJ13)
CAVKKTGGYQKFTF

SEQ ID NO: 535096 - protein, 13 aa, Homo sapiens
  CDR3 for beta chain variable domain of TCR clone 267548 (TRBV15, TRBJ1-6)
CATSGGLNSPLHF

SEQ ID NO: 535097 - protein, 14 aa, Homo sapiens
  CDR3 for alpha chain variable domain of TCR clone 267549 (TRAV12-2, TRAJ40)
CAVKIPSGTYKYIF

SEQ ID NO: 535098 - protein, 17 aa, Homo sapiens
  CDR3 for beta chain variable domain of TCR clone 267549 (TRBV7-2, TRBJ2-3)
CASSSYSGTRRADTQYF

SEQ ID NO: 535099 - protein, 16 aa, Homo sapiens
  CDR3 for alpha chain variable domain of TCR clone 267550 (TRAV14/DV4, TRAJ20)
CAMRESRSRDDYKLSF

SEQ ID NO: 535100 - protein, 17 aa, Homo sapiens
  CDR3 for beta chain variable domain of TCR clone 267550 (TRBV15, TRBJ1-1)
CATSRVGGADGDTEAFF

SEQ ID NO: 535101 - protein, 23 aa, Homo sapiens
  CDR3 for alpha chain variable domain of TCR clone 267551 (TRAV9-2, )
CSLSRAGNNHIQNPDPAVYQLRD

SEQ ID NO: 535102 - protein, 15 aa, Homo sapiens
  CDR3 for beta chain variable domain of TCR clone 267551 (TRBV27, TRBJ2-3)
CASSSLAGVIDTQYF

SEQ ID NO: 535103 - protein, 12 aa, Homo sapiens
  CDR3 for alpha chain variable domain of TCR clone 267552 (TRAV17, TRAJ39)
CATGAAGNMLTF

SEQ ID NO: 535104 - protein, 14 aa, Homo sapiens
  CDR3 for beta chain variable domain of TCR clone 267552 (TRBV7-9, TRBJ1-2)
CATSRQGANYGYTF

SEQ ID NO: 535105 - protein, 14 aa, Homo sapiens
  CDR3 for alpha chain variable domain of TCR clone 267553 (TRAV1-2, TRAJ8)
CAVREDAGFQKLVF

SEQ ID NO: 535106 - protein, 15 aa, Homo sapiens
  CDR3 for beta chain variable domain of TCR clone 267553 (TRBV6-3, TRBJ2-7)
CASSSPGTVCYEQYF

SEQ ID NO: 535107 - protein, 12 aa, Homo sapiens
  CDR3 for alpha chain variable domain of TCR clone 267554 (TRAV13-1, TRAJ21)
CAAKEGLNKFYF

SEQ ID NO: 535108 - protein, 13 aa, Homo sapiens
  CDR3 for beta chain variable domain of TCR clone 267554 (TRBV7-3, TRBJ1-1)
CASSQDWGAEAFF

SEQ ID NO: 535109 - protein, 15 aa, Homo sapiens
  CDR3 for alpha chain variable domain of TCR clone 267555 (TRAV35, TRAJ20)
CAGQLVWSNDYKLSF

SEQ ID NO: 535110 - protein, 13 aa, Homo sapiens
  CDR3 for beta chain variable domain of TCR clone 267555 (TRBV19, TRBJ2-7)
CASSKTGTHEQYF

SEQ ID NO: 535111 - protein, 16 aa, Homo sapiens
  CDR3 for alpha chain variable domain of TCR clone 267556 (TRAV27, TRAJ52)
CAARVAGGTSYGKLTF

SEQ ID NO: 535112 - protein, 13 aa, Homo sapiens
  CDR3 for beta chain variable domain of TCR clone 267556 (TRBV11-2, TRBJ2-7)
CASSLEGANEQYF

SEQ ID NO: 535113 - protein, 16 aa, Homo sapiens
  CDR3 for alpha chain variable domain of TCR clone 267557 (TRAV26-1, TRAJ11)
CIVRVVLGFRIQHPHL

SEQ ID NO: 535114 - protein, 14 aa, Homo sapiens
  CDR3 for beta chain variable domain of TCR clone 267557 (TRBV25-1, TRBJ1-4)
CASSGGGRPEKLFF

SEQ ID NO: 535115 - protein, 16 aa, Homo sapiens
  CDR3 for alpha chain variable domain of TCR clone 267558 (TRAV2, TRAJ42)
TTVLPRDGGSQGNLIF

SEQ ID NO: 535116 - protein, 15 aa, Homo sapiens
  CDR3 for beta chain variable domain of TCR clone 267558 (TRBV7-9, TRBJ2-7)
CASSLRTSGSYEQYF

SEQ ID NO: 535117 - protein, 17 aa, Homo sapiens
  CDR3 for alpha chain variable domain of TCR clone 267559 (TRAV12-2, TRAJ42)
CAVNILNYGGSQGNLIF

SEQ ID NO: 535118 - protein, 13 aa, Homo sapiens
  CDR3 for beta chain variable domain of TCR clone 267559 (TRBV3-1, TRBJ1-5)
CASSQDLDKPQHF

SEQ ID NO: 535119 - protein, 16 aa, Homo sapiens
  CDR3 for alpha chain variable domain of TCR clone 267560 (TRAV23/DV6, TRAJ9)
CAASIGGNTGGFETIF

SEQ ID NO: 535120 - protein, 15 aa, Homo sapiens
  CDR3 for beta chain variable domain of TCR clone 267560 (TRBV20-1, TRBJ2-5)
CSATRTSGSLETQYF

SEQ ID NO: 535121 - protein, 15 aa, Homo sapiens
  CDR3 for alpha chain variable domain of TCR clone 267561 (TRAV27, TRAJ38)
CAARRNAGNNRKLTW

SEQ ID NO: 535122 - protein, 13 aa, Homo sapiens
  CDR3 for beta chain variable domain of TCR clone 267561 (TRBV20-1, TRBJ1-1)
CSARAGGNTEAFF

SEQ ID NO: 535123 - protein, 17 aa, Homo sapiens
  CDR3 for alpha chain variable domain of TCR clone 267562 (TRAV3, TRAJ12)
CAVRDGGRMDSSYKLVF

SEQ ID NO: 535124 - protein, 13 aa, Homo sapiens
  CDR3 for beta chain variable domain of TCR clone 267562 (TRBV20-1, TRBJ1-1)
CSAPLGGGTEAFF

SEQ ID NO: 535125 - protein, 14 aa, Homo sapiens
  CDR3 for alpha chain variable domain of TCR clone 267563 (TRAV13-1, TRAJ35)
CAASKGGFGNVLHC

SEQ ID NO: 535126 - protein, 13 aa, Homo sapiens
  CDR3 for beta chain variable domain of TCR clone 267563 (TRBV7-6, TRBJ2-1)
CQQLGGGADEQFF

SEQ ID NO: 535127 - protein, 13 aa, Homo sapiens
  CDR3 for alpha chain variable domain of TCR clone 267564 (TRAV12-3, TRAJ33)
CAMSVNSNYQLIW

SEQ ID NO: 535128 - protein, 17 aa, Homo sapiens
  CDR3 for beta chain variable domain of TCR clone 267564 (TRBV11-3, TRBJ1-5)
CASSPLTGLRGNQPQHF

SEQ ID NO: 535129 - protein, 12 aa, Homo sapiens
  CDR3 for alpha chain variable domain of TCR clone 267565 (TRAV21, TRAJ3)
CCFYSSASKIIF

SEQ ID NO: 535130 - protein, 14 aa, Homo sapiens
  CDR3 for beta chain variable domain of TCR clone 267565 (TRBV11-2, TRBJ2-3)
CASSLYAGRDTQYF

SEQ ID NO: 535131 - protein, 14 aa, Homo sapiens
  CDR3 for alpha chain variable domain of TCR clone 267566 (TRAV13-1, TRAJ35)
CAASKGGFGNVLHC

SEQ ID NO: 535132 - protein, 13 aa, Homo sapiens
  CDR3 for beta chain variable domain of TCR clone 267566 (TRBV7-3, TRBJ1-1)
CASRQDWGDEDFF

SEQ ID NO: 535133 - protein, 18 aa, Homo sapiens
  CDR3 for alpha chain variable domain of TCR clone 267567 (TRAV21, TRAJ52)
CAVRPSPAGGTSYGKLTF

SEQ ID NO: 535134 - protein, 13 aa, Homo sapiens
  CDR3 for beta chain variable domain of TCR clone 267567 (TRBV7-2, TRBJ2-4)
CASSREHANIQYF

SEQ ID NO: 535135 - protein, 16 aa, Homo sapiens
  CDR3 for alpha chain variable domain of TCR clone 267568 (TRAV3, TRAJ37)
CAVRGKGSGNTGKLIF

SEQ ID NO: 535136 - protein, 20 aa, Homo sapiens
  CDR3 for beta chain variable domain of TCR clone 267568 (TRBV7-8, TRBJ2-2)
WASSHLFPGPTIHITGELFF

SEQ ID NO: 535137 - protein, 14 aa, Homo sapiens
  CDR3 for alpha chain variable domain of TCR clone 267569 (TRAV9-2, TRAJ39)
CALYIYNAGNMLTF

SEQ ID NO: 535138 - protein, 12 aa, Homo sapiens
  CDR3 for beta chain variable domain of TCR clone 267569 (TRBV7-9, TRBJ1-1)
CASSLVRGEAFF

SEQ ID NO: 535139 - protein, 13 aa, Homo sapiens
  CDR3 for alpha chain variable domain of TCR clone 267570 (TRAV3, TRAJ36)
CAVRDTGANNLFF

SEQ ID NO: 535140 - protein, 15 aa, Homo sapiens
  CDR3 for beta chain variable domain of TCR clone 267570 (TRBV24-1, TRBJ2-1)
CATSGSGGCYNEQFF

SEQ ID NO: 535141 - protein, 19 aa, Homo sapiens
  CDR3 for alpha chain variable domain of TCR clone 267571 (TRAV40, )
CLPIPDIQNPDPAVYQLRY

SEQ ID NO: 535142 - protein, 15 aa, Homo sapiens
  CDR3 for beta chain variable domain of TCR clone 267571 (TRBV2, TRBJ1-2)
CASSEIGGANYGYTF

SEQ ID NO: 535143 - protein, 16 aa, Homo sapiens
  CDR3 for alpha chain variable domain of TCR clone 267572 (TRAV16, TRAJ4)
CALSRMFSGGYNKLIF

SEQ ID NO: 535144 - protein, 15 aa, Homo sapiens
  CDR3 for beta chain variable domain of TCR clone 267572 (TRBV7-9, TRBJ1-5)
CASSQGHQPNQPQHF

SEQ ID NO: 535145 - protein, 15 aa, Homo sapiens
  CDR3 for alpha chain variable domain of TCR clone 267573 (TRAV12-2, TRAJ53)
CAVNGGGGSNYKLTF

SEQ ID NO: 535146 - protein, 14 aa, Homo sapiens
  CDR3 for beta chain variable domain of TCR clone 267573 (TRBV4-2, TRBJ2-3)
CASRETRAPGMQYF

SEQ ID NO: 535147 - protein, 11 aa, Homo sapiens
  CDR3 for alpha chain variable domain of TCR clone 267574 (TRAV29/DV5, TRAJ31)
CAAMNNARLMF

SEQ ID NO: 535148 - protein, 15 aa, Homo sapiens
  CDR3 for beta chain variable domain of TCR clone 267574 (TRBV19, TRBJ1-1)
CASSIRRQMNTEAFF

SEQ ID NO: 535149 - protein, 13 aa, Homo sapiens
  CDR3 for alpha chain variable domain of TCR clone 267575 (TRAV13-1, TRAJ39)
CAASIWAGDVLTL

SEQ ID NO: 535150 - protein, 15 aa, Homo sapiens
  CDR3 for beta chain variable domain of TCR clone 267575 (TRBV7-9, TRBJ1-1)
CASSLLEQGGTEAFF

SEQ ID NO: 535151 - protein, 14 aa, Homo sapiens
  CDR3 for alpha chain variable domain of TCR clone 267576 (TRAV1-2, TRAJ8)
CAVREDTGFQKLVF

SEQ ID NO: 535152 - protein, 17 aa, Homo sapiens
  CDR3 for beta chain variable domain of TCR clone 267576 (TRBV6-3, TRBJ2-2)
CASSYAGQGINTGELFF

SEQ ID NO: 535153 - protein, 14 aa, Homo sapiens
  CDR3 for alpha chain variable domain of TCR clone 267577 (TRAV12-3, TRAJ10)
SHLPLTGGGNKLTF

SEQ ID NO: 535154 - protein, 12 aa, Homo sapiens
  CDR3 for beta chain variable domain of TCR clone 267577 (TRBV5-6, TRBJ1-2)
CASSLVQNGYTF

SEQ ID NO: 535155 - protein, 13 aa, Homo sapiens
  CDR3 for alpha chain variable domain of TCR clone 267578 (TRAV27, TRAJ40)
CAGVLASTYNYIF

SEQ ID NO: 535156 - protein, 16 aa, Homo sapiens
  CDR3 for beta chain variable domain of TCR clone 267578 (TRBV11-3, TRBJ2-3)
CASSSISGAGTDTQYF

SEQ ID NO: 535157 - protein, 11 aa, Homo sapiens
  CDR3 for alpha chain variable domain of TCR clone 267579 (TRAV21, TRAJ23)
CAPQRRGKLIF

SEQ ID NO: 535158 - protein, 12 aa, Homo sapiens
  CDR3 for beta chain variable domain of TCR clone 267579 (TRBV11-2, TRBJ2-2)
CASSLPTGELFF

SEQ ID NO: 535159 - protein, 13 aa, Homo sapiens
  CDR3 for alpha chain variable domain of TCR clone 267580 (TRAV13-1, TRAJ39)
CSKYSNAGNMLTF

SEQ ID NO: 535160 - protein, 16 aa, Homo sapiens
  CDR3 for beta chain variable domain of TCR clone 267580 (TRBV7-2, TRBJ2-3)
CASSLVALYSTDTQYC

SEQ ID NO: 535161 - protein, 12 aa, Homo sapiens
  CDR3 for alpha chain variable domain of TCR clone 267581 (TRAV13-1, TRAJ15)
CAASQAGTALNF

SEQ ID NO: 535162 - protein, 18 aa, Homo sapiens
  CDR3 for beta chain variable domain of TCR clone 267581 (TRBV7-9, TRBJ2-3)
CASSLPINGQISTDTQYF

SEQ ID NO: 535163 - protein, 15 aa, Homo sapiens
  CDR3 for alpha chain variable domain of TCR clone 267582 (TRAV4, TRAJ39)
CLVGPNNNAGNILPF

SEQ ID NO: 535164 - protein, 13 aa, Homo sapiens
  CDR3 for beta chain variable domain of TCR clone 267582 (TRBV11-2, TRBJ2-5)
CASSSTGEETQYF

SEQ ID NO: 535165 - protein, 13 aa, Homo sapiens
  CDR3 for alpha chain variable domain of TCR clone 267583 (TRAV21, TRAJ20)
CAVGLRVDYKLSF

SEQ ID NO: 535166 - protein, 14 aa, Homo sapiens
  CDR3 for beta chain variable domain of TCR clone 267583 (TRBV12-4, TRBJ2-2)
CQQFQVREHRGAVF

SEQ ID NO: 535167 - protein, 14 aa, Homo sapiens
  CDR3 for alpha chain variable domain of TCR clone 267584 (TRAV12-1, TRAJ13)
CVVIDSGCYQKVTF

SEQ ID NO: 535168 - protein, 13 aa, Homo sapiens
  CDR3 for beta chain variable domain of TCR clone 267584 (TRBV4-2, TRBJ1-1)
CASSQAGNTEAFF

SEQ ID NO: 535169 - protein, 13 aa, Homo sapiens
  CDR3 for alpha chain variable domain of TCR clone 267585 (TRAV21, TRAJ56)
CAVRLGANSKLTF

SEQ ID NO: 535170 - protein, 12 aa, Homo sapiens
  CDR3 for beta chain variable domain of TCR clone 267585 (TRBV12-4, TRBJ2-3)
SASSSTTDTQYF

SEQ ID NO: 535171 - protein, 13 aa, Homo sapiens
  CDR3 for alpha chain variable domain of TCR clone 267586 (TRAV12-3, TRAJ47)
CAMKKEYGNKLVL

SEQ ID NO: 535172 - protein, 16 aa, Homo sapiens
  CDR3 for beta chain variable domain of TCR clone 267586 (TRBV3-1, TRBJ2-6)
CASSRTWVSGANVLTF

SEQ ID NO: 535173 - protein, 12 aa, Homo sapiens
  CDR3 for alpha chain variable domain of TCR clone 267587 (TRAV17, TRAJ12)
CATLRSSYKLIF

SEQ ID NO: 535174 - protein, 16 aa, Homo sapiens
  CDR3 for beta chain variable domain of TCR clone 267587 (TRBV28, TRBJ2-7)
CASSLFFETGGPAQYF

SEQ ID NO: 535175 - protein, 19 aa, Homo sapiens
  CDR3 for alpha chain variable domain of TCR clone 267588 (TRAV1-2, TRAJ26)
CLLPLCCERPDNYCQNFVF

SEQ ID NO: 535176 - protein, 17 aa, Homo sapiens
  CDR3 for beta chain variable domain of TCR clone 267588 (TRBV13, TRBJ2-3)
CASSLSRVAGGRDTQYF

SEQ ID NO: 535177 - protein, 11 aa, Homo sapiens
  CDR3 for alpha chain variable domain of TCR clone 267589 (TRAV12-1, TRAJ21)
CVVNNFNKFYF

SEQ ID NO: 535178 - protein, 11 aa, Homo sapiens
  CDR3 for beta chain variable domain of TCR clone 267589 (TRBV29-1, TRBJ2-5)
CSEDRTGTQYF

SEQ ID NO: 535179 - protein, 16 aa, Homo sapiens
  CDR3 for alpha chain variable domain of TCR clone 267590 (TRAV14/DV4, TRAJ10)
CAMREGRPGGGNKLTF

SEQ ID NO: 535180 - protein, 14 aa, Homo sapiens
  CDR3 for beta chain variable domain of TCR clone 267590 (TRBV19, TRBJ2-1)
CASPTFVLSGEQFF

SEQ ID NO: 535181 - protein, 11 aa, Homo sapiens
  CDR3 for alpha chain variable domain of TCR clone 267591 (TRAV22, TRAJ24)
YQLTAGGKLQF

SEQ ID NO: 535182 - protein, 16 aa, Homo sapiens
  CDR3 for beta chain variable domain of TCR clone 267591 (TRBV28, TRBJ2-7)
CASSFPDRRLTYEQYF

SEQ ID NO: 535183 - protein, 14 aa, Homo sapiens
  CDR3 for alpha chain variable domain of TCR clone 267592 (TRAV2, TRAJ37)
CAVDFPSNTGKLIF

SEQ ID NO: 535184 - protein, 16 aa, Homo sapiens
  CDR3 for beta chain variable domain of TCR clone 267592 (TRBV20-1, TRBJ1-2)
CSASMGQGVANYGYTF

SEQ ID NO: 535185 - protein, 14 aa, Homo sapiens
  CDR3 for alpha chain variable domain of TCR clone 267593 (TRAV3, TRAJ5)
CAVRDLTGRRALTF

SEQ ID NO: 535186 - protein, 14 aa, Homo sapiens
  CDR3 for beta chain variable domain of TCR clone 267593 (TRBV25-1, TRBJ2-7)
CASSEYGRGYEQYF

SEQ ID NO: 535187 - protein, 13 aa, Homo sapiens
  CDR3 for alpha chain variable domain of TCR clone 267594 (TRAV1-2, TRAJ9)
CAALNTGGFKTIF

SEQ ID NO: 535188 - protein, 14 aa, Homo sapiens
  CDR3 for beta chain variable domain of TCR clone 267594 (TRBV28, TRBJ1-1)
CASSPRTRWAEAFF

SEQ ID NO: 535189 - protein, 12 aa, Homo sapiens
  CDR3 for alpha chain variable domain of TCR clone 267595 (TRAV13-2, TRAJ39)
CAENNAGNMLTF

SEQ ID NO: 535190 - protein, 19 aa, Homo sapiens
  CDR3 for beta chain variable domain of TCR clone 267595 (TRBV28, TRBJ2-1)
CASSFSIRGSGRTRYEQFF

SEQ ID NO: 535191 - protein, 11 aa, Homo sapiens
  CDR3 for alpha chain variable domain of TCR clone 267596 (TRAV12-3, TRAJ27)
CAMANAGKSTF

SEQ ID NO: 535192 - protein, 15 aa, Homo sapiens
  CDR3 for beta chain variable domain of TCR clone 267596 (TRBV6-3, TRBJ2-7)
CASSSPGTVLYEQYF

SEQ ID NO: 535193 - protein, 15 aa, Homo sapiens
  CDR3 for alpha chain variable domain of TCR clone 267597 (TRAV25, TRAJ52)
CAGRPGGTSYGELTF

SEQ ID NO: 535194 - protein, 14 aa, Homo sapiens
  CDR3 for beta chain variable domain of TCR clone 267597 (TRBV7-2, TRBJ2-7)
CASSLYPGRYEQYF

SEQ ID NO: 535195 - protein, 11 aa, Homo sapiens
  CDR3 for alpha chain variable domain of TCR clone 267598 (TRAV12-3, TRAJ20)
CAMSYDYKLSS

SEQ ID NO: 535196 - protein, 14 aa, Homo sapiens
  CDR3 for beta chain variable domain of TCR clone 267598 (TRBV7-2, TRBJ2-7)
CASSPKTSFYEQYF

SEQ ID NO: 535197 - protein, 12 aa, Homo sapiens
  CDR3 for alpha chain variable domain of TCR clone 267599 (TRAV3, TRAJ34)
CAVLGNTDKLIF

SEQ ID NO: 535198 - protein, 14 aa, Homo sapiens
  CDR3 for beta chain variable domain of TCR clone 267599 (TRBV7-2, TRBJ2-7)
CASSPKTSFYEQYF

SEQ ID NO: 535199 - protein, 11 aa, Homo sapiens
  CDR3 for alpha chain variable domain of TCR clone 267600 (TRAV12-1, TRAJ30)
CVVNGQDKIIF

SEQ ID NO: 535200 - protein, 15 aa, Homo sapiens
  CDR3 for beta chain variable domain of TCR clone 267600 (TRBV28, TRBJ2-5)
CASSSGRKIQETQYF

SEQ ID NO: 535201 - protein, 14 aa, Homo sapiens
  CDR3 for alpha chain variable domain of TCR clone 267601 (TRAV3, TRAJ40)
CAVRDRRGAYKYIF

SEQ ID NO: 535202 - protein, 15 aa, Homo sapiens
  CDR3 for beta chain variable domain of TCR clone 267601 (TRBV28, TRBJ2-1)
CASSIIAGGRSEQFF

SEQ ID NO: 535203 - protein, 14 aa, Homo sapiens
  CDR3 for alpha chain variable domain of TCR clone 267602 (TRAV21, TRAJ37)
CAVKGSSDTGKLIF

SEQ ID NO: 535204 - protein, 14 aa, Homo sapiens
  CDR3 for beta chain variable domain of TCR clone 267602 (TRBV7-2, TRBJ2-1)
CASSRGGARNERFF

SEQ ID NO: 535205 - protein, 17 aa, Homo sapiens
  CDR3 for alpha chain variable domain of TCR clone 267603 (TRAV36/DV7, TRAJ52)
CAVAQRDGGTSYGKLTF

SEQ ID NO: 535206 - protein, 15 aa, Homo sapiens
  CDR3 for beta chain variable domain of TCR clone 267603 (TRBV6-5, TRBJ1-2)
CASSYSQAFNYGYTF

SEQ ID NO: 535207 - protein, 15 aa, Homo sapiens
  CDR3 for alpha chain variable domain of TCR clone 267604 (TRAV8-3, TRAJ45)
CAFSYSGGGADGLTS

SEQ ID NO: 535208 - protein, 13 aa, Homo sapiens
  CDR3 for beta chain variable domain of TCR clone 267604 (TRBV10-3, TRBJ2-7)
CASKLAVNYEQYF

SEQ ID NO: 535209 - protein, 16 aa, Homo sapiens
  CDR3 for alpha chain variable domain of TCR clone 267605 (TRAV3, TRAJ37)
CAARGTGSGNTGKLIF

SEQ ID NO: 535210 - protein, 13 aa, Homo sapiens
  CDR3 for beta chain variable domain of TCR clone 267605 (TRBV14, TRBJ2-7)
CASSQDRRYEQYF

SEQ ID NO: 535211 - protein, 13 aa, Homo sapiens
  CDR3 for alpha chain variable domain of TCR clone 267606 (TRAV3, TRAJ36)
CAVRDTGANILFF

SEQ ID NO: 535212 - protein, 15 aa, Homo sapiens
  CDR3 for beta chain variable domain of TCR clone 267606 (TRBV24-1, TRBJ2-1)
CATSGSGGFYNEQFF

SEQ ID NO: 535213 - protein, 13 aa, Homo sapiens
  CDR3 for alpha chain variable domain of TCR clone 267607 (TRAV2, TRAJ36)
CAVDHTGANNLFF

SEQ ID NO: 535214 - protein, 12 aa, Homo sapiens
  CDR3 for beta chain variable domain of TCR clone 267607 (TRBV19, TRBJ1-1)
YASMNRYTEAFF

SEQ ID NO: 535215 - protein, 14 aa, Homo sapiens
  CDR3 for alpha chain variable domain of TCR clone 267608 (TRAV8-3, TRAJ36)
CAVGPITGANNLFF

SEQ ID NO: 535216 - protein, 15 aa, Homo sapiens
  CDR3 for beta chain variable domain of TCR clone 267608 (TRBV4-1, TRBJ2-1)
CASSQDLGNYNEQFF

SEQ ID NO: 535217 - protein, 17 aa, Homo sapiens
  CDR3 for alpha chain variable domain of TCR clone 267609 (TRAV26-2, TRAJ42)
SILRDVGYGGSQGNLIF

SEQ ID NO: 535218 - protein, 16 aa, Homo sapiens
  CDR3 for beta chain variable domain of TCR clone 267609 (TRBV12-4, TRBJ1-5)
CASSRPVGGSNQPQHF

SEQ ID NO: 535219 - protein, 12 aa, Homo sapiens
  CDR3 for alpha chain variable domain of TCR clone 267610 (TRAV13-1, TRAJ9)
FASHTGGFKTIF

SEQ ID NO: 535220 - protein, 13 aa, Homo sapiens
  CDR3 for beta chain variable domain of TCR clone 267610 (TRBV12-4, TRBJ1-2)
CASSSGSKDGYTF

SEQ ID NO: 535221 - protein, 17 aa, Homo sapiens
  CDR3 for alpha chain variable domain of TCR clone 267611 (TRAV13-1, TRAJ52)
CAASSGAGGTSYGKLTF

SEQ ID NO: 535222 - protein, 16 aa, Homo sapiens
  CDR3 for beta chain variable domain of TCR clone 267611 (TRBV11-2, TRBJ1-2)
CASSLDTGGADYGYTF

SEQ ID NO: 535223 - protein, 15 aa, Homo sapiens
  CDR3 for alpha chain variable domain of TCR clone 267612 (TRAV26-1, TRAJ33)
CIVRVAKGSNYQLIW

SEQ ID NO: 535224 - protein, 14 aa, Homo sapiens
  CDR3 for beta chain variable domain of TCR clone 267612 (TRBV7-3, TRBJ1-1)
CASSLGTGYTEAFF

SEQ ID NO: 535225 - protein, 18 aa, Homo sapiens
  CDR3 for alpha chain variable domain of TCR clone 267613 (TRAV21, TRAJ52)
CAVMPSPAGGTSYGKLTF

SEQ ID NO: 535226 - protein, 13 aa, Homo sapiens
  CDR3 for beta chain variable domain of TCR clone 267613 (TRBV29-1, TRBJ2-1)
CSVEGGRVNEQFF

SEQ ID NO: 535227 - protein, 14 aa, Homo sapiens
  CDR3 for alpha chain variable domain of TCR clone 267614 (TRAV20, TRAJ56)
CAVQFGVSNSKLTF

SEQ ID NO: 535228 - protein, 14 aa, Homo sapiens
  CDR3 for beta chain variable domain of TCR clone 267614 (TRBV20-1, TRBJ2-7)
CSAKRGRSSYEQYF

SEQ ID NO: 535229 - protein, 11 aa, Homo sapiens
  CDR3 for alpha chain variable domain of TCR clone 267615 (TRAV23/DV6, TRAJ58)
CAARLLRGETN

SEQ ID NO: 535230 - protein, 13 aa, Homo sapiens
  CDR3 for beta chain variable domain of TCR clone 267615 (TRBV11-2, TRBJ2-5)
CASSRGPSETQYF

SEQ ID NO: 535231 - protein, 14 aa, Homo sapiens
  CDR3 for alpha chain variable domain of TCR clone 267616 (TRAV12-3, TRAJ6)
CAMSATGGSDIPTF

SEQ ID NO: 535232 - protein, 16 aa, Homo sapiens
  CDR3 for beta chain variable domain of TCR clone 267616 (TRBV4-2, TRBJ2-1)
CASSPRAGQGANEQFF

SEQ ID NO: 535233 - protein, 18 aa, Homo sapiens
  CDR3 for alpha chain variable domain of TCR clone 267617 (TRAV21, TRAJ52)
RAVRPSPAGGTSYGKLTF

SEQ ID NO: 535234 - protein, 17 aa, Homo sapiens
  CDR3 for beta chain variable domain of TCR clone 267617 (TRBV11-2, TRBJ2-1)
CASSLYPPGVEYNEQFF

SEQ ID NO: 535235 - protein, 11 aa, Homo sapiens
  CDR3 for alpha chain variable domain of TCR clone 267618 (TRAV21, TRAJ11)
CSVNGYSTLAF

SEQ ID NO: 535236 - protein, 11 aa, Homo sapiens
  CDR3 for beta chain variable domain of TCR clone 267618 (TRBV19, TRBJ1-1)
CASSIGSEAFF

SEQ ID NO: 535237 - protein, 12 aa, Homo sapiens
  CDR3 for alpha chain variable domain of TCR clone 267619 (TRAV21, TRAJ39)
CAVDNAGNMLTF

SEQ ID NO: 535238 - protein, 13 aa, Homo sapiens
  CDR3 for beta chain variable domain of TCR clone 267619 (TRBV12-4, TRBJ1-1)
CASSPGTGFEAFF

SEQ ID NO: 535239 - protein, 12 aa, Homo sapiens
  CDR3 for alpha chain variable domain of TCR clone 267620 (TRAV12-2, TRAJ20)
CALRPSDYKLSF

SEQ ID NO: 535240 - protein, 14 aa, Homo sapiens
  CDR3 for beta chain variable domain of TCR clone 267620 (TRBV6-1, TRBJ2-7)
CASNRARPDYEQYF

SEQ ID NO: 535241 - protein, 14 aa, Homo sapiens
  CDR3 for alpha chain variable domain of TCR clone 267621 (TRAV12-2, TRAJ13)
GAVKKTGGYQKVTF

SEQ ID NO: 535242 - protein, 15 aa, Homo sapiens
  CDR3 for beta chain variable domain of TCR clone 267621 (TRBV9, TRBJ1-6)
CASSVAGTGDSPLHF

SEQ ID NO: 535243 - protein, 15 aa, Homo sapiens
  CDR3 for alpha chain variable domain of TCR clone 267622 (TRAV35, TRAJ23)
CAGQRGYNQGGKLIF

SEQ ID NO: 535244 - protein, 16 aa, Homo sapiens
  CDR3 for beta chain variable domain of TCR clone 267622 (TRBV27, TRBJ2-1)
CASSSRLSGNYNEQFF

SEQ ID NO: 535245 - protein, 10 aa, Homo sapiens
  CDR3 for alpha chain variable domain of TCR clone 267623 (TRAV30, TRAJ48)
CGIGDEKLTF

SEQ ID NO: 535246 - protein, 16 aa, Homo sapiens
  CDR3 for beta chain variable domain of TCR clone 267623 (TRBV27, TRBJ2-1)
SMNVEPGTSGDNEQFF

SEQ ID NO: 535247 - protein, 14 aa, Homo sapiens
  CDR3 for alpha chain variable domain of TCR clone 267624 (TRAV8-4, TRAJ9)
CAVRINTGGFKTIF

SEQ ID NO: 535248 - protein, 11 aa, Homo sapiens
  CDR3 for beta chain variable domain of TCR clone 267624 (TRBV19, TRBJ1-1)
CASSIGSEAFF

SEQ ID NO: 535249 - protein, 12 aa, Homo sapiens
  CDR3 for alpha chain variable domain of TCR clone 267625 (TRAV12-3, TRAJ17)
GAMTLTGNKLTF

SEQ ID NO: 535250 - protein, 15 aa, Homo sapiens
  CDR3 for beta chain variable domain of TCR clone 267625 (TRBV5-7, TRBJ2-7)
CASSPYLEGSYEQYF

SEQ ID NO: 535251 - protein, 14 aa, Homo sapiens
  CDR3 for alpha chain variable domain of TCR clone 267626 (TRAV17, TRAJ57)
CATDPQGGSEKLVF

SEQ ID NO: 535252 - protein, 18 aa, Homo sapiens
  CDR3 for beta chain variable domain of TCR clone 267626 (TRBV20-1, TRBJ2-3)
CSASGPAGGPGTTDTQYF

SEQ ID NO: 535253 - protein, 13 aa, Homo sapiens
  CDR3 for alpha chain variable domain of TCR clone 267627 (TRAV13-1, TRAJ37)
CAARSGNTGKLIF

SEQ ID NO: 535254 - protein, 14 aa, Homo sapiens
  CDR3 for beta chain variable domain of TCR clone 267627 (TRBV12-4, TRBJ2-3)
CASSLGQGTNTQYF

SEQ ID NO: 535255 - protein, 12 aa, Homo sapiens
  CDR3 for alpha chain variable domain of TCR clone 267628 (TRAV17, TRAJ20)
CATDSNDYKLSF

SEQ ID NO: 535256 - protein, 14 aa, Homo sapiens
  CDR3 for beta chain variable domain of TCR clone 267628 (TRBV6-5, TRBJ1-1)
CASSLGQGLSAAFF

SEQ ID NO: 535257 - protein, 11 aa, Homo sapiens
  CDR3 for alpha chain variable domain of TCR clone 267629 (TRAV16, TRAJ49)
CALGTGNQFYF

SEQ ID NO: 535258 - protein, 16 aa, Homo sapiens
  CDR3 for beta chain variable domain of TCR clone 267629 (TRBV29-1, TRBJ2-7)
CSVEVVGTSGSYEQYF

SEQ ID NO: 535259 - protein, 13 aa, Homo sapiens
  CDR3 for alpha chain variable domain of TCR clone 267630 (TRAV27, TRAJ42)
CAGARGSQGNLIF

SEQ ID NO: 535260 - protein, 15 aa, Homo sapiens
  CDR3 for beta chain variable domain of TCR clone 267630 (TRBV10-3, TRBJ2-2)
CAISTDREDTGELFF

SEQ ID NO: 535261 - protein, 13 aa, Homo sapiens
  CDR3 for alpha chain variable domain of TCR clone 267631 (TRAV21, TRAJ10)
CAVPTGGGNKLTF

SEQ ID NO: 535262 - protein, 22 aa, Homo sapiens
  CDR3 for beta chain variable domain of TCR clone 267631 (TRBV19, TRBJ2-1)
CASSVRDRVTGTSGRIYTEQFF

SEQ ID NO: 535263 - protein, 15 aa, Homo sapiens
  CDR3 for alpha chain variable domain of TCR clone 267632 (TRAV23/DV6, TRAJ18)
CAARYRGSTLGRLYF

SEQ ID NO: 535264 - protein, 15 aa, Homo sapiens
  CDR3 for beta chain variable domain of TCR clone 267632 (TRBV28, TRBJ2-5)
CASSSGRTIQETQYF

SEQ ID NO: 535265 - protein, 14 aa, Homo sapiens
  CDR3 for alpha chain variable domain of TCR clone 267633 (TRAV26-1, TRAJ38)
RIADNAGNNRKLIW

SEQ ID NO: 535266 - protein, 14 aa, Homo sapiens
  CDR3 for beta chain variable domain of TCR clone 267633 (TRBV6-1, TRBJ1-3)
CASVQGGGGNTIYF

SEQ ID NO: 535267 - protein, 15 aa, Homo sapiens
  CDR3 for alpha chain variable domain of TCR clone 267634 (TRAV3, TRAJ4)
CAQNMFSGCYNKLIF

SEQ ID NO: 535268 - protein, 16 aa, Homo sapiens
  CDR3 for beta chain variable domain of TCR clone 267634 (TRBV3-1, TRBJ1-6)
CASSQEFQGSYSPLHF

SEQ ID NO: 535269 - protein, 16 aa, Homo sapiens
  CDR3 for alpha chain variable domain of TCR clone 267635 (TRAV12-3, TRAJ53)
CAMSPGSGGSNYKLTF

SEQ ID NO: 535270 - protein, 16 aa, Homo sapiens
  CDR3 for beta chain variable domain of TCR clone 267635 (TRBV7-2, TRBJ2-1)
CASSYPSGGAGDEQFF

SEQ ID NO: 535271 - protein, 14 aa, Homo sapiens
  CDR3 for alpha chain variable domain of TCR clone 267636 (TRAV10, TRAJ36)
CVVKYEGRANNLFF

SEQ ID NO: 535272 - protein, 16 aa, Homo sapiens
  CDR3 for beta chain variable domain of TCR clone 267636 (TRBV7-3, TRBJ2-2)
CASSLKRGTLSGELFF

SEQ ID NO: 535273 - protein, 12 aa, Homo sapiens
  CDR3 for alpha chain variable domain of TCR clone 267637 (TRAV12-3, TRAJ17)
CAMTLTGNKLTF

SEQ ID NO: 535274 - protein, 15 aa, Homo sapiens
  CDR3 for beta chain variable domain of TCR clone 267637 (TRBV29-1, TRBJ2-6)
CSFTWGRSGANVLTF

SEQ ID NO: 535275 - protein, 14 aa, Homo sapiens
  CDR3 for alpha chain variable domain of TCR clone 267638 (TRAV9-2, TRAJ36)
CALPWRTGAHNLFF

SEQ ID NO: 535276 - protein, 14 aa, Homo sapiens
  CDR3 for beta chain variable domain of TCR clone 267638 (TRBV2, TRBJ1-2)
CASSELQVNYGYTF

SEQ ID NO: 535277 - protein, 14 aa, Homo sapiens
  CDR3 for alpha chain variable domain of TCR clone 267639 (TRAV1-2, TRAJ8)
CAVREDTGFQKLVF

SEQ ID NO: 535278 - protein, 12 aa, Homo sapiens
  CDR3 for beta chain variable domain of TCR clone 267639 (TRBV12-4, TRBJ1-1)
CASSLAGLEAFF

SEQ ID NO: 535279 - protein, 10 aa, Homo sapiens
  CDR3 for alpha chain variable domain of TCR clone 267640 (TRAV1-2, TRAJ20)
CALNDYKLSF

SEQ ID NO: 535280 - protein, 13 aa, Homo sapiens
  CDR3 for beta chain variable domain of TCR clone 267640 (TRBV7-9, TRBJ2-5)
CASTPVGQETQYF

SEQ ID NO: 535281 - protein, 14 aa, Homo sapiens
  CDR3 for alpha chain variable domain of TCR clone 267641 (TRAV12-2, TRAJ13)
CVVKKTGGYQKVTF

SEQ ID NO: 535282 - protein, 15 aa, Homo sapiens
  CDR3 for beta chain variable domain of TCR clone 267641 (TRBV19, TRBJ1-6)
CASSTQGAVGSPLHF

SEQ ID NO: 535283 - protein, 15 aa, Homo sapiens
  CDR3 for alpha chain variable domain of TCR clone 267642 (TRAV27, TRAJ38)
CAARRNAGKNRKLIC

SEQ ID NO: 535284 - protein, 13 aa, Homo sapiens
  CDR3 for beta chain variable domain of TCR clone 267642 (TRBV12-5, TRBJ2-3)
CASGDRQSDTQYF

SEQ ID NO: 535285 - protein, 14 aa, Homo sapiens
  CDR3 for alpha chain variable domain of TCR clone 267643 (TRAV12-3, TRAJ10)
SHLPLTGGGSKLTF

SEQ ID NO: 535286 - protein, 13 aa, Homo sapiens
  CDR3 for beta chain variable domain of TCR clone 267643 (TRBV7-9, TRBJ1-2)
CASSLKQNYGYTF

SEQ ID NO: 535287 - protein, 18 aa, Homo sapiens
  CDR3 for alpha chain variable domain of TCR clone 267644 (TRAV26-1, TRAJ23)
CIVRVGLEVWNQGGKLIF

SEQ ID NO: 535288 - protein, 14 aa, Homo sapiens
  CDR3 for beta chain variable domain of TCR clone 267644 (TRBV4-1, TRBJ2-2)
CASSQAVNTGELFF

SEQ ID NO: 535289 - protein, 10 aa, Homo sapiens
  CDR3 for alpha chain variable domain of TCR clone 267645 (TRAV12-3, TRAJ49)
RALNDDRFYF

SEQ ID NO: 535290 - protein, 13 aa, Homo sapiens
  CDR3 for beta chain variable domain of TCR clone 267645 (TRBV12-4, TRBJ1-1)
CASSPGTGFEAFF

SEQ ID NO: 535291 - protein, 15 aa, Homo sapiens
  CDR3 for alpha chain variable domain of TCR clone 267646 (TRAV2, TRAJ15)
CAVEDREQAGTALIF

SEQ ID NO: 535292 - protein, 11 aa, Homo sapiens
  CDR3 for beta chain variable domain of TCR clone 267646 (TRBV11-2, TRBJ2-2)
CASSLPGELFF

SEQ ID NO: 535293 - protein, 12 aa, Homo sapiens
  CDR3 for alpha chain variable domain of TCR clone 267647 (TRAV13-1, TRAJ21)
CAAKEGFNKFYF

SEQ ID NO: 535294 - protein, 14 aa, Homo sapiens
  CDR3 for beta chain variable domain of TCR clone 267647 (TRBV5-4, TRBJ1-1)
CASSLDSRRDAAFF

SEQ ID NO: 535295 - protein, 15 aa, Homo sapiens
  CDR3 for alpha chain variable domain of TCR clone 267648 (TRAV3, TRAJ22)
CVVRDRGGSARQLTF

SEQ ID NO: 535296 - protein, 15 aa, Homo sapiens
  CDR3 for beta chain variable domain of TCR clone 267648 (TRBV6-3, TRBJ2-7)
CASSSPGTVFYEQYF

SEQ ID NO: 535297 - protein, 14 aa, Homo sapiens
  CDR3 for alpha chain variable domain of TCR clone 267649 (TRAV1-2, TRAJ8)
CAEREDTGFQKLVF

SEQ ID NO: 535298 - protein, 17 aa, Homo sapiens
  CDR3 for beta chain variable domain of TCR clone 267649 (TRBV11-2, TRBJ2-1)
CASSLYPPGVEYNEQFF

SEQ ID NO: 535299 - protein, 13 aa, Homo sapiens
  CDR3 for alpha chain variable domain of TCR clone 267650 (TRAV13-1, TRAJ4)
CAASIGGYTKLIF

SEQ ID NO: 535300 - protein, 16 aa, Homo sapiens
  CDR3 for beta chain variable domain of TCR clone 267650 (TRBV20-1, TRBJ2-1)
CSAPGLAGSYSDEQFF

SEQ ID NO: 535301 - protein, 15 aa, Homo sapiens
  CDR3 for alpha chain variable domain of TCR clone 267651 (TRAV8-3, TRAJ27)
CAVGPSKTNAGKSTF

SEQ ID NO: 535302 - protein, 13 aa, Homo sapiens
  CDR3 for beta chain variable domain of TCR clone 267651 (TRBV12-4, TRBJ2-5)
CASSLQGRETQYF

SEQ ID NO: 535303 - protein, 13 aa, Homo sapiens
  CDR3 for alpha chain variable domain of TCR clone 267652 (TRAV13-1, TRAJ10)
GAALEGGGNKLAF

SEQ ID NO: 535304 - protein, 19 aa, Homo sapiens
  CDR3 for beta chain variable domain of TCR clone 267652 (TRBV25-1, TRBJ2-2)
CAILVYRVDRGRKTGELFF

SEQ ID NO: 535305 - protein, 12 aa, Homo sapiens
  CDR3 for alpha chain variable domain of TCR clone 267653 (TRAV1-1, TRAJ8)
CAGGTGSQKLVF

SEQ ID NO: 535306 - protein, 16 aa, Homo sapiens
  CDR3 for beta chain variable domain of TCR clone 267653 (TRBV12-5, TRBJ2-5)
CASGPRTSGNQETQYF

SEQ ID NO: 535307 - protein, 16 aa, Homo sapiens
  CDR3 for alpha chain variable domain of TCR clone 267654 (TRAV3, TRAJ5)
CAVRNLMDTGRRTLTF

SEQ ID NO: 535308 - protein, 16 aa, Homo sapiens
  CDR3 for beta chain variable domain of TCR clone 267654 (TRBV4-2, TRBJ2-7)
CASSQEGLANSYEQYF

SEQ ID NO: 535309 - protein, 11 aa, Homo sapiens
  CDR3 for alpha chain variable domain of TCR clone 267655 (TRAV35, TRAJ30)
CAGERDDKIIF

SEQ ID NO: 535310 - protein, 14 aa, Homo sapiens
  CDR3 for beta chain variable domain of TCR clone 267655 (TRBV7-3, TRBJ2-1)
CASSLSGSYNEQFF

SEQ ID NO: 535311 - protein, 14 aa, Homo sapiens
  CDR3 for alpha chain variable domain of TCR clone 267656 (TRAV12-1, TRAJ12)
CVVTRMDSSNKLIF

SEQ ID NO: 535312 - protein, 14 aa, Homo sapiens
  CDR3 for beta chain variable domain of TCR clone 267656 (TRBV4-1, TRBJ2-7)
CASSPVAGGDEQYF

SEQ ID NO: 535313 - protein, 11 aa, Homo sapiens
  CDR3 for alpha chain variable domain of TCR clone 267657 (TRAV1-1, TRAJ23)
CAVRQGGRLIF

SEQ ID NO: 535314 - protein, 20 aa, Homo sapiens
  CDR3 for beta chain variable domain of TCR clone 267657 (TRBV7-8, TRBJ2-2)
CASSHLFPVPTIHITGELFF

SEQ ID NO: 535315 - protein, 17 aa, Homo sapiens
  CDR3 for alpha chain variable domain of TCR clone 267658 (TRAV12-1, TRAJ52)
CVVTPNAGGTSYGKLTF

SEQ ID NO: 535316 - protein, 15 aa, Homo sapiens
  CDR3 for beta chain variable domain of TCR clone 267658 (TRBV5-1, TRBJ2-1)
CASTGSGRTYNEQFF

SEQ ID NO: 535317 - protein, 14 aa, Homo sapiens
  CDR3 for alpha chain variable domain of TCR clone 267659 (TRAV12-1, TRAJ26)
CVVKGSNYGQNFVF

SEQ ID NO: 535318 - protein, 14 aa, Homo sapiens
  CDR3 for beta chain variable domain of TCR clone 267659 (TRBV5-4, TRBJ1-1)
CASRLDSRRDEAFF

SEQ ID NO: 535319 - protein, 14 aa, Homo sapiens
  CDR3 for alpha chain variable domain of TCR clone 267660 (TRAV2, TRAJ29)
CAVTPPSGNTPLVF

SEQ ID NO: 535320 - protein, 11 aa, Homo sapiens
  CDR3 for beta chain variable domain of TCR clone 267660 (TRBV11-2, TRBJ2-3)
CASSTTDTQYF

SEQ ID NO: 535321 - protein, 16 aa, Homo sapiens
  CDR3 for alpha chain variable domain of TCR clone 267661 (TRAV8-3, TRAJ8)
CSVPRDGNTGFQKLVF

SEQ ID NO: 535322 - protein, 15 aa, Homo sapiens
  CDR3 for beta chain variable domain of TCR clone 267661 (TRBV19, TRBJ1-5)
CASSIVWADNQPQHF

SEQ ID NO: 535323 - protein, 13 aa, Homo sapiens
  CDR3 for alpha chain variable domain of TCR clone 267662 (TRAV5, TRAJ30)
CAEIANRDDKIIF

SEQ ID NO: 535324 - protein, 12 aa, Homo sapiens
  CDR3 for beta chain variable domain of TCR clone 267662 (TRBV11-2, TRBJ2-1)
CASSPGNNEQFF

SEQ ID NO: 535325 - protein, 15 aa, Homo sapiens
  CDR3 for alpha chain variable domain of TCR clone 267663 (TRAV19, TRAJ11)
CALSEGSGGYSTLTF

SEQ ID NO: 535326 - protein, 13 aa, Homo sapiens
  CDR3 for beta chain variable domain of TCR clone 267663 (TRBV7-2, TRBJ2-1)
CASSSQTSGEQFF

SEQ ID NO: 535327 - protein, 15 aa, Homo sapiens
  CDR3 for alpha chain variable domain of TCR clone 267664 (TRAV21, TRAJ38)
CAVRQDAGNNRKLIW

SEQ ID NO: 535328 - protein, 15 aa, Homo sapiens
  CDR3 for beta chain variable domain of TCR clone 267664 (TRBV28, TRBJ2-1)
CASSGLAEVDNEQFF

SEQ ID NO: 535329 - protein, 13 aa, Homo sapiens
  CDR3 for alpha chain variable domain of TCR clone 267665 (TRAV27, TRAJ3)
ASLRGSSASKIIF

SEQ ID NO: 535330 - protein, 16 aa, Homo sapiens
  CDR3 for beta chain variable domain of TCR clone 267665 (TRBV5-1, TRBJ2-7)
CASSLEGLAGLYEQYF

SEQ ID NO: 535331 - protein, 15 aa, Homo sapiens
  CDR3 for alpha chain variable domain of TCR clone 267666 (TRAV2, TRAJ11)
CAVGGRNSGYSTLTF

SEQ ID NO: 535332 - protein, 14 aa, Homo sapiens
  CDR3 for beta chain variable domain of TCR clone 267666 (TRBV5-1, TRBJ2-7)
CASSLTQGLRGQYF

SEQ ID NO: 535333 - protein, 18 aa, Homo sapiens
  CDR3 for alpha chain variable domain of TCR clone 267667 (TRAV16, TRAJ52)
CALSGVDAGVTSYGKLTF

SEQ ID NO: 535334 - protein, 13 aa, Homo sapiens
  CDR3 for beta chain variable domain of TCR clone 267667 (TRBV12-5, TRBJ2-3)
CASGDRQSDTQYF

SEQ ID NO: 535335 - protein, 15 aa, Homo sapiens
  CDR3 for alpha chain variable domain of TCR clone 267668 (TRAV36/DV7, TRAJ53)
GAVEGSGGSNYKLTF

SEQ ID NO: 535336 - protein, 12 aa, Homo sapiens
  CDR3 for beta chain variable domain of TCR clone 267668 (TRBV29-1, TRBJ2-3)
CSVTGGADTQYF

SEQ ID NO: 535337 - protein, 16 aa, Homo sapiens
  CDR3 for alpha chain variable domain of TCR clone 267669 (TRAV36/DV7, TRAJ33)
RRPGNKVQDSNYQLIW

SEQ ID NO: 535338 - protein, 15 aa, Homo sapiens
  CDR3 for beta chain variable domain of TCR clone 267669 (TRBV29-1, TRBJ2-1)
CSVGRHALFYNEQFF

SEQ ID NO: 535339 - protein, 13 aa, Homo sapiens
  CDR3 for alpha chain variable domain of TCR clone 267670 (TRAV2, TRAJ40)
CAVVTSGTYKYIF

SEQ ID NO: 535340 - protein, 12 aa, Homo sapiens
  CDR3 for beta chain variable domain of TCR clone 267670 (TRBV20-1, TRBJ2-7)
CSAGLKMGEQYF

SEQ ID NO: 535341 - protein, 16 aa, Homo sapiens
  CDR3 for alpha chain variable domain of TCR clone 267671 (TRAV3, TRAJ10)
CAVRDMRAGGGNKLTF

SEQ ID NO: 535342 - protein, 12 aa, Homo sapiens
  CDR3 for beta chain variable domain of TCR clone 267671 (TRBV6-1, TRBJ1-1)
CQSRQGNTEAFF

SEQ ID NO: 535343 - protein, 13 aa, Homo sapiens
  CDR3 for alpha chain variable domain of TCR clone 267672 (TRAV12-2, TRAJ26)
CAGNENYGQNFVF

SEQ ID NO: 535344 - protein, 13 aa, Homo sapiens
  CDR3 for beta chain variable domain of TCR clone 267672 (TRBV18, TRBJ2-2)
CASSPTRGGELFF

SEQ ID NO: 535345 - protein, 16 aa, Homo sapiens
  CDR3 for alpha chain variable domain of TCR clone 267673 (TRAV38-1, TRAJ37)
CAFMKYGGGTTGKLIF

SEQ ID NO: 535346 - protein, 11 aa, Homo sapiens
  CDR3 for beta chain variable domain of TCR clone 267673 (TRBV11-2, TRBJ2-2)
CASSLPGELFF

SEQ ID NO: 535347 - protein, 13 aa, Homo sapiens
  CDR3 for alpha chain variable domain of TCR clone 267674 (TRAV13-1, TRAJ39)
CSKYSNAGNMLTF

SEQ ID NO: 535348 - protein, 12 aa, Homo sapiens
  CDR3 for beta chain variable domain of TCR clone 267674 (TRBV6-1, TRBJ2-7)
CASSDYSYEQYF

SEQ ID NO: 535349 - protein, 11 aa, Homo sapiens
  CDR3 for alpha chain variable domain of TCR clone 267675 (TRAV23/DV6, TRAJ49)
CAASTGNQFYF

SEQ ID NO: 535350 - protein, 12 aa, Homo sapiens
  CDR3 for beta chain variable domain of TCR clone 267675 (TRBV6-3, TRBJ2-7)
CASSEPGFEQYF

SEQ ID NO: 535351 - protein, 10 aa, Homo sapiens
  CDR3 for alpha chain variable domain of TCR clone 267676 (TRAV25, TRAJ17)
CQAAGNKLSF

SEQ ID NO: 535352 - protein, 13 aa, Homo sapiens
  CDR3 for beta chain variable domain of TCR clone 267676 (TRBV6-5, TRBJ2-2)
CASSLPGVGELFF

SEQ ID NO: 535353 - protein, 14 aa, Homo sapiens
  CDR3 for alpha chain variable domain of TCR clone 267677 (TRAV36/DV7, TRAJ53)
CAVVDGGSNYKLTF

SEQ ID NO: 535354 - protein, 13 aa, Homo sapiens
  CDR3 for beta chain variable domain of TCR clone 267677 (TRBV5-1, TRBJ1-2)
CASSFSGNLGYTF

SEQ ID NO: 535355 - protein, 17 aa, Homo sapiens
  CDR3 for alpha chain variable domain of TCR clone 267678 (TRAV3, TRAJ42)
CAVRDRDYGGSQGNLSF

SEQ ID NO: 535356 - protein, 17 aa, Homo sapiens
  CDR3 for beta chain variable domain of TCR clone 267678 (TRBV24-1, TRBJ2-1)
CATSDVSTSGTYNEQFF

SEQ ID NO: 535357 - protein, 14 aa, Homo sapiens
  CDR3 for alpha chain variable domain of TCR clone 267679 (TRAV13-2, TRAJ52)
CAETGGTSYGKLTF

SEQ ID NO: 535358 - protein, 16 aa, Homo sapiens
  CDR3 for beta chain variable domain of TCR clone 267679 (TRBV19, TRBJ1-1)
CASRFGGPVTGTEAFF

SEQ ID NO: 535359 - protein, 14 aa, Homo sapiens
  CDR3 for alpha chain variable domain of TCR clone 267680 (TRAV12-1, TRAJ12)
CVVTRMDSSYKLIF

SEQ ID NO: 535360 - protein, 17 aa, Homo sapiens
  CDR3 for beta chain variable domain of TCR clone 267680 (TRBV13, TRBJ2-7)
CASSLKPGASGTYEQYF

SEQ ID NO: 535361 - protein, 12 aa, Homo sapiens
  CDR3 for alpha chain variable domain of TCR clone 267681 (TRAV17, TRAJ12)
CATLRSSYKLIF

SEQ ID NO: 535362 - protein, 16 aa, Homo sapiens
  CDR3 for beta chain variable domain of TCR clone 267681 (TRBV18, TRBJ2-7)
CASSPLQSGTHYEQYF

SEQ ID NO: 535363 - protein, 15 aa, Homo sapiens
  CDR3 for alpha chain variable domain of TCR clone 267682 (TRAV26-1, TRAJ56)
CIVRVATGANSKLTF

SEQ ID NO: 535364 - protein, 14 aa, Homo sapiens
  CDR3 for beta chain variable domain of TCR clone 267682 (TRBV24-1, TRBJ2-2)
CATGGLGNTGELFF

SEQ ID NO: 535365 - protein, 12 aa, Homo sapiens
  CDR3 for alpha chain variable domain of TCR clone 267683 (TRAV13-1, TRAJ36)
WCGGAGANNLFF

SEQ ID NO: 535366 - protein, 16 aa, Homo sapiens
  CDR3 for beta chain variable domain of TCR clone 267683 (TRBV7-9, TRBJ2-5)
CASRLEIGTRKETQYF

SEQ ID NO: 535367 - protein, 13 aa, Homo sapiens
  CDR3 for alpha chain variable domain of TCR clone 267684 (TRAV13-2, TRAJ15)
CAERPQAGTALIF

SEQ ID NO: 535368 - protein, 11 aa, Homo sapiens
  CDR3 for beta chain variable domain of TCR clone 267684 (TRBV11-2, TRBJ2-2)
CASSLPGELFF

SEQ ID NO: 535369 - protein, 12 aa, Homo sapiens
  CDR3 for alpha chain variable domain of TCR clone 267685 (TRAV30, TRAJ15)
CGTNQAGTALIF

SEQ ID NO: 535370 - protein, 14 aa, Homo sapiens
  CDR3 for beta chain variable domain of TCR clone 267685 (TRBV24-1, TRBJ2-7)
TSVPPVIWPYEQYF

SEQ ID NO: 535371 - protein, 11 aa, Homo sapiens
  CDR3 for alpha chain variable domain of TCR clone 267686 (TRAV41, TRAJ49)
CAVRSRNQLYF

SEQ ID NO: 535372 - protein, 15 aa, Homo sapiens
  CDR3 for beta chain variable domain of TCR clone 267686 (TRBV12-4, TRBJ2-5)
CASSFSSGGGETQYF

SEQ ID NO: 535373 - protein, 15 aa, Homo sapiens
  CDR3 for alpha chain variable domain of TCR clone 267687 (TRAV20, TRAJ41)
CAMQANSNSGYALNF

SEQ ID NO: 535374 - protein, 18 aa, Homo sapiens
  CDR3 for beta chain variable domain of TCR clone 267687 (TRBV7-9, TRBJ2-7)
CASSLTTSGSRTWYEQYF

SEQ ID NO: 535375 - protein, 14 aa, Homo sapiens
  CDR3 for alpha chain variable domain of TCR clone 267688 (TRAV13-1, TRAJ35)
CAASKGGFGNVLHC

SEQ ID NO: 535376 - protein, 15 aa, Homo sapiens
  CDR3 for beta chain variable domain of TCR clone 267688 (TRBV7-3, TRBJ1-1)
CASSQDWGADASLDK

SEQ ID NO: 535377 - protein, 16 aa, Homo sapiens
  CDR3 for alpha chain variable domain of TCR clone 267689 (TRAV14/DV4, TRAJ20)
CAMREGRSRDDYKLSF

SEQ ID NO: 535378 - protein, 14 aa, Homo sapiens
  CDR3 for beta chain variable domain of TCR clone 267689 (TRBV7-3, TRBJ2-1)
CASSLTGGANEQFF

SEQ ID NO: 535379 - protein, 15 aa, Homo sapiens
  CDR3 for alpha chain variable domain of TCR clone 267690 (TRAV12-2, TRAJ43)
CAFDMRFGAGTRLTV

SEQ ID NO: 535380 - protein, 12 aa, Homo sapiens
  CDR3 for beta chain variable domain of TCR clone 267690 (TRBV11-2, TRBJ2-3)
GASRGAPNTQYF

SEQ ID NO: 535381 - protein, 15 aa, Homo sapiens
  CDR3 for alpha chain variable domain of TCR clone 267691 (TRAV3, TRAJ11)
CAVRDRGSGYSTLTF

SEQ ID NO: 535382 - protein, 15 aa, Homo sapiens
  CDR3 for beta chain variable domain of TCR clone 267691 (TRBV27, TRBJ2-1)
CASSNGGGSSNEQFF

SEQ ID NO: 535383 - protein, 16 aa, Homo sapiens
  CDR3 for alpha chain variable domain of TCR clone 267692 (TRAV8-2, TRAJ45)
CVVREGTGGGADGLTF

SEQ ID NO: 535384 - protein, 20 aa, Homo sapiens
  CDR3 for beta chain variable domain of TCR clone 267692 (TRBV7-9, TRBJ2-5)
CASSLVAGGAGDPVLRARHA

SEQ ID NO: 535385 - protein, 15 aa, Homo sapiens
  CDR3 for alpha chain variable domain of TCR clone 267693 (TRAV27, TRAJ38)
CAARRNAGNDRKLIW

SEQ ID NO: 535386 - protein, 13 aa, Homo sapiens
  CDR3 for beta chain variable domain of TCR clone 267693 (TRBV12-5, TRBJ2-3)
CASGDRQSDTQYF

SEQ ID NO: 535387 - protein, 21 aa, Homo sapiens
  CDR3 for alpha chain variable domain of TCR clone 267694 (TRAV1-1, TRAJ6)
CLLLLRCERLERTGGSYIPTF

SEQ ID NO: 535388 - protein, 13 aa, Homo sapiens
  CDR3 for beta chain variable domain of TCR clone 267694 (TRBV12-4, TRBJ2-7)
CASSPTETYEQYF

SEQ ID NO: 535389 - protein, 15 aa, Homo sapiens
  CDR3 for alpha chain variable domain of TCR clone 267695 (TRAV17, TRAJ56)
CATDANTGANSKLTF

SEQ ID NO: 535390 - protein, 12 aa, Homo sapiens
  CDR3 for beta chain variable domain of TCR clone 267695 (TRBV7-8, TRBJ2-7)
CASSLEDREQYL

SEQ ID NO: 535391 - protein, 15 aa, Homo sapiens
  CDR3 for alpha chain variable domain of TCR clone 267696 (TRAV38-1, TRAJ37)
CAFIHGSGNTGKLIF

SEQ ID NO: 535392 - protein, 15 aa, Homo sapiens
  CDR3 for beta chain variable domain of TCR clone 267696 (TRBV9, TRBJ1-6)
CASSVAGTGDSPLHF

SEQ ID NO: 535393 - protein, 21 aa, Homo sapiens
  CDR3 for alpha chain variable domain of TCR clone 267697 (TRAV26-1, TRAJ22)
CIVRVSFWFCKATDLWIWYTI

SEQ ID NO: 535394 - protein, 13 aa, Homo sapiens
  CDR3 for beta chain variable domain of TCR clone 267697 (TRBV7-9, TRBJ1-2)
CASSLKQNYGYAF

SEQ ID NO: 535395 - protein, 16 aa, Homo sapiens
  CDR3 for alpha chain variable domain of TCR clone 267698 (TRAV3, TRAJ37)
CAVRPHGSGNTGKPIV

SEQ ID NO: 535396 - protein, 17 aa, Homo sapiens
  CDR3 for beta chain variable domain of TCR clone 267698 (TRBV5-1, TRBJ2-5)
CASSPVALGQNQETQYF

SEQ ID NO: 535397 - protein, 13 aa, Homo sapiens
  CDR3 for alpha chain variable domain of TCR clone 267699 (TRAV3, TRAJ21)
CAVREPDFNKFYF

SEQ ID NO: 535398 - protein, 13 aa, Homo sapiens
  CDR3 for beta chain variable domain of TCR clone 267699 (TRBV28, TRBJ1-1)
CASMGLSGSEAFF

SEQ ID NO: 535399 - protein, 16 aa, Homo sapiens
  CDR3 for alpha chain variable domain of TCR clone 267700 (TRAV27, TRAJ52)
CAGAPAGGTSYGKLTF

SEQ ID NO: 535400 - protein, 15 aa, Homo sapiens
  CDR3 for beta chain variable domain of TCR clone 267700 (TRBV5-4, TRBJ2-7)
CASSRFGTGSYEQYF

SEQ ID NO: 535401 - protein, 14 aa, Homo sapiens
  CDR3 for alpha chain variable domain of TCR clone 267701 (TRAV35, TRAJ33)
CSGSSQDSNYQLIW

SEQ ID NO: 535402 - protein, 14 aa, Homo sapiens
  CDR3 for beta chain variable domain of TCR clone 267701 (TRBV18, TRBJ2-7)
CASSPRGGAYEQYF

SEQ ID NO: 535403 - protein, 14 aa, Homo sapiens
  CDR3 for alpha chain variable domain of TCR clone 267702 (TRAV8-1, TRAJ37)
CAVTLSSNTGKLIF

SEQ ID NO: 535404 - protein, 14 aa, Homo sapiens
  CDR3 for beta chain variable domain of TCR clone 267702 (TRBV18, TRBJ1-1)
CASSQGQGNTEAFF

SEQ ID NO: 535405 - protein, 18 aa, Homo sapiens
  CDR3 for alpha chain variable domain of TCR clone 267703 (TRAV21, TRAJ52)
CAVRPSPAGGTSYGKLTF

SEQ ID NO: 535406 - protein, 13 aa, Homo sapiens
  CDR3 for beta chain variable domain of TCR clone 267703 (TRBV20-1, TRBJ2-5)
CSAREAFQETQCF

SEQ ID NO: 535407 - protein, 10 aa, Homo sapiens
  CDR3 for alpha chain variable domain of TCR clone 267704 (TRAV16, TRAJ22)
SAMYPRQLTF

SEQ ID NO: 535408 - protein, 11 aa, Homo sapiens
  CDR3 for beta chain variable domain of TCR clone 267704 (TRBV7-2, TRBJ2-2)
CASSIRGELFF

SEQ ID NO: 535409 - protein, 13 aa, Homo sapiens
  CDR3 for alpha chain variable domain of TCR clone 267705 (TRAV12-1, TRAJ33)
CGDAPVSNYQLIW

SEQ ID NO: 535410 - protein, 12 aa, Homo sapiens
  CDR3 for beta chain variable domain of TCR clone 267705 (TRBV11-2, TRBJ2-2)
CASSLGGGELFF

SEQ ID NO: 535411 - protein, 15 aa, Homo sapiens
  CDR3 for alpha chain variable domain of TCR clone 267706 (TRAV25, TRAJ52)
CAGRPGGTSYGKLTF

SEQ ID NO: 535412 - protein, 15 aa, Homo sapiens
  CDR3 for beta chain variable domain of TCR clone 267706 (TRBV4-1, TRBJ1-1)
CASSQEWGHYTEAFF

SEQ ID NO: 535413 - protein, 14 aa, Homo sapiens
  CDR3 for alpha chain variable domain of TCR clone 267707 (TRAV17, TRAJ45)
CATASVGGADGLTF

SEQ ID NO: 535414 - protein, 17 aa, Homo sapiens
  CDR3 for beta chain variable domain of TCR clone 267707 (TRBV13, TRBJ2-3)
CASSLSRVAGGRNTQYF

SEQ ID NO: 535415 - protein, 13 aa, Homo sapiens
  CDR3 for alpha chain variable domain of TCR clone 267708 (TRAV1-2, TRAJ9)
CAALNTGGFKTIF

SEQ ID NO: 535416 - protein, 11 aa, Homo sapiens
  CDR3 for beta chain variable domain of TCR clone 267708 (TRBV7-9, TRBJ2-3)
CASSPTDTQYF

SEQ ID NO: 535417 - protein, 14 aa, Homo sapiens
  CDR3 for alpha chain variable domain of TCR clone 267709 (TRAV21, TRAJ35)
CAVMPIGFGNVLHC

SEQ ID NO: 535418 - protein, 16 aa, Homo sapiens
  CDR3 for beta chain variable domain of TCR clone 267709 (TRBV20-1, TRBJ1-4)
CSAPGQGLLTNEKLFF

SEQ ID NO: 535419 - protein, 12 aa, Homo sapiens
  CDR3 for alpha chain variable domain of TCR clone 267710 (TRAV13-2, TRAJ8)
CAPWLGFQKLVF

SEQ ID NO: 535420 - protein, 13 aa, Homo sapiens
  CDR3 for beta chain variable domain of TCR clone 267710 (TRBV12-4, TRBJ1-5)
CASSPDRAQPQHL

SEQ ID NO: 535421 - protein, 12 aa, Homo sapiens
  CDR3 for alpha chain variable domain of TCR clone 267711 (TRAV12-3, TRAJ17)
CAMTLTGNKLTF

SEQ ID NO: 535422 - protein, 17 aa, Homo sapiens
  CDR3 for beta chain variable domain of TCR clone 267711 (TRBV4-1, TRBJ2-5)
CASSQDLTGGPIETQYF

SEQ ID NO: 535423 - protein, 15 aa, Homo sapiens
  CDR3 for alpha chain variable domain of TCR clone 267712 (TRAV1-1, TRAJ20)
CAVRDNVANDYKLSF

SEQ ID NO: 535424 - protein, 16 aa, Homo sapiens
  CDR3 for beta chain variable domain of TCR clone 267712 (TRBV15, TRBJ1-2)
CATSRGPRTGGGGYTF

SEQ ID NO: 535425 - protein, 16 aa, Homo sapiens
  CDR3 for alpha chain variable domain of TCR clone 267713 (TRAV8-2, TRAJ7)
CVVSEGPYYGNNRPAF

SEQ ID NO: 535426 - protein, 13 aa, Homo sapiens
  CDR3 for beta chain variable domain of TCR clone 267713 (TRBV19, TRBJ2-1)
CASSMYRVNEQFF

SEQ ID NO: 535427 - protein, 13 aa, Homo sapiens
  CDR3 for alpha chain variable domain of TCR clone 267714 (TRAV20, TRAJ48)
CAVQVVGNEKLTF

SEQ ID NO: 535428 - protein, 14 aa, Homo sapiens
  CDR3 for beta chain variable domain of TCR clone 267714 (TRBV27, TRBJ2-7)
CASSFRDGPYEQYF

SEQ ID NO: 535429 - protein, 20 aa, Homo sapiens
  CDR3 for alpha chain variable domain of TCR clone 267715 (TRAV25, TRAJ21)
TATQTTDVGTYPLSFNKFYF

SEQ ID NO: 535430 - protein, 14 aa, Homo sapiens
  CDR3 for beta chain variable domain of TCR clone 267715 (TRBV19, TRBJ2-1)
CASSKDRGQDEQFF

SEQ ID NO: 535431 - protein, 16 aa, Homo sapiens
  CDR3 for alpha chain variable domain of TCR clone 267716 (TRAV12-2, TRAJ6)
CAAPLAGSGGSYIPTF

SEQ ID NO: 535432 - protein, 10 aa, Homo sapiens
  CDR3 for beta chain variable domain of TCR clone 267716 (TRBV28, TRBJ1-2)
CPSSSDRAVF

SEQ ID NO: 535433 - protein, 17 aa, Homo sapiens
  CDR3 for alpha chain variable domain of TCR clone 267717 (TRAV13-1, TRAJ28)
CEASPPYSGAGGYQLTF

SEQ ID NO: 535434 - protein, 16 aa, Homo sapiens
  CDR3 for beta chain variable domain of TCR clone 267717 (TRBV19, TRBJ2-2)
CASRSPGTGATGELFF

SEQ ID NO: 535435 - protein, 14 aa, Homo sapiens
  CDR3 for alpha chain variable domain of TCR clone 267718 (TRAV38-1, TRAJ40)
CALRPTSGTYKYIF

SEQ ID NO: 535436 - protein, 15 aa, Homo sapiens
  CDR3 for beta chain variable domain of TCR clone 267718 (TRBV7-9, TRBJ1-4)
CASSRTGGFNEKLFF

SEQ ID NO: 535437 - protein, 14 aa, Homo sapiens
  CDR3 for alpha chain variable domain of TCR clone 267719 (TRAV9-2, TRAJ39)
CALYIYNAGKMLTF

SEQ ID NO: 535438 - protein, 13 aa, Homo sapiens
  CDR3 for beta chain variable domain of TCR clone 267719 (TRBV7-9, TRBJ1-2)
CASSLKQNYGYTF

SEQ ID NO: 535439 - protein, 13 aa, Homo sapiens
  CDR3 for alpha chain variable domain of TCR clone 267720 (TRAV12-3, TRAJ53)
CPMRGGSNYKLTF

SEQ ID NO: 535440 - protein, 15 aa, Homo sapiens
  CDR3 for beta chain variable domain of TCR clone 267720 (TRBV2, TRBJ2-1)
CATQARLVMIGEQFF

SEQ ID NO: 535441 - protein, 14 aa, Homo sapiens
  CDR3 for alpha chain variable domain of TCR clone 267721 (TRAV1-2, TRAJ16)
CAVNRFSDGQKLLS

SEQ ID NO: 535442 - protein, 13 aa, Homo sapiens
  CDR3 for beta chain variable domain of TCR clone 267721 (TRBV5-5, TRBJ1-2)
CASSFWRGEDYTF

SEQ ID NO: 535443 - protein, 12 aa, Homo sapiens
  CDR3 for alpha chain variable domain of TCR clone 267722 (TRAV30, TRAJ43)
CGTEERGNDMRF

SEQ ID NO: 535444 - protein, 13 aa, Homo sapiens
  CDR3 for beta chain variable domain of TCR clone 267722 (TRBV27, TRBJ2-7)
CASSFSQGCEQYF

SEQ ID NO: 535445 - protein, 14 aa, Homo sapiens
  CDR3 for alpha chain variable domain of TCR clone 267723 (TRAV29/DV5, TRAJ36)
CAARRKTGANNLFF

SEQ ID NO: 535446 - protein, 15 aa, Homo sapiens
  CDR3 for beta chain variable domain of TCR clone 267723 (TRBV7-6, TRBJ1-2)
CASSSGGRGGYGYTF

SEQ ID NO: 535447 - protein, 14 aa, Homo sapiens
  CDR3 for alpha chain variable domain of TCR clone 267724 (TRAV2, TRAJ37)
CAVDFTSNTGKLIF

SEQ ID NO: 535448 - protein, 13 aa, Homo sapiens
  CDR3 for beta chain variable domain of TCR clone 267724 (TRBV20-1, TRBJ1-1)
CCAPLGGGTEAFF

SEQ ID NO: 535449 - protein, 11 aa, Homo sapiens
  CDR3 for alpha chain variable domain of TCR clone 267725 (TRAV2, TRAJ13)
CASGGYQKVTF

SEQ ID NO: 535450 - protein, 16 aa, Homo sapiens
  CDR3 for beta chain variable domain of TCR clone 267725 (TRBV20-1, TRBJ2-1)
CSARDLKQGMNNEQFF

SEQ ID NO: 535451 - protein, 12 aa, Homo sapiens
  CDR3 for alpha chain variable domain of TCR clone 267726 (TRAV21, TRAJ58)
CALSASGSGLTF

SEQ ID NO: 535452 - protein, 13 aa, Homo sapiens
  CDR3 for beta chain variable domain of TCR clone 267726 (TRBV5-7, TRBJ1-2)
CASSLGVFNGYTF

SEQ ID NO: 535453 - protein, 11 aa, Homo sapiens
  CDR3 for alpha chain variable domain of TCR clone 267727 (TRAV21, TRAJ4)
HVSGGYNKLTF

SEQ ID NO: 535454 - protein, 13 aa, Homo sapiens
  CDR3 for beta chain variable domain of TCR clone 267727 (TRBV7-3, TRBJ2-5)
CASSVTAGETQYF

SEQ ID NO: 535455 - protein, 13 aa, Homo sapiens
  CDR3 for alpha chain variable domain of TCR clone 267728 (TRAV25, TRAJ54)
CAGTIQGAQKLGF

SEQ ID NO: 535456 - protein, 15 aa, Homo sapiens
  CDR3 for beta chain variable domain of TCR clone 267728 (TRBV19, TRBJ1-5)
CASSILTVENQPQHF

SEQ ID NO: 535457 - protein, 15 aa, Homo sapiens
  CDR3 for alpha chain variable domain of TCR clone 267729 (TRAV3, TRAJ27)
CAVRDHLTNAGKSTF

SEQ ID NO: 535458 - protein, 15 aa, Homo sapiens
  CDR3 for beta chain variable domain of TCR clone 267729 (TRBV28, TRBJ2-1)
CASSIIAGGRSEQFF

SEQ ID NO: 535459 - protein, 14 aa, Homo sapiens
  CDR3 for alpha chain variable domain of TCR clone 267730 (TRAV2, TRAJ37)
CAVDFTSNTGKLIF

SEQ ID NO: 535460 - protein, 14 aa, Homo sapiens
  CDR3 for beta chain variable domain of TCR clone 267730 (TRBV5-1, TRBJ2-5)
CASSFGCSQETQYF

SEQ ID NO: 535461 - protein, 14 aa, Homo sapiens
  CDR3 for alpha chain variable domain of TCR clone 267731 (TRAV23/DV6, TRAJ4)
CAAILSGGYNKLIF

SEQ ID NO: 535462 - protein, 17 aa, Homo sapiens
  CDR3 for beta chain variable domain of TCR clone 267731 (TRBV4-1, TRBJ1-3)
CASSPQRGIRFGNTIYF

SEQ ID NO: 535463 - protein, 14 aa, Homo sapiens
  CDR3 for alpha chain variable domain of TCR clone 267732 (TRAV3, TRAJ8)
CAVSLNTGFQKLVF

SEQ ID NO: 535464 - protein, 13 aa, Homo sapiens
  CDR3 for beta chain variable domain of TCR clone 267732 (TRBV2, TRBJ2-7)
CASSVVEAYEQYF

SEQ ID NO: 535465 - protein, 15 aa, Homo sapiens
  CDR3 for alpha chain variable domain of TCR clone 267733 (TRAV21, TRAJ53)
CATLNSGGSNYKLTF

SEQ ID NO: 535466 - protein, 14 aa, Homo sapiens
  CDR3 for beta chain variable domain of TCR clone 267733 (TRBV12-5, TRBJ2-5)
CASGSRKHQETQYF

SEQ ID NO: 535467 - protein, 11 aa, Homo sapiens
  CDR3 for alpha chain variable domain of TCR clone 267734 (TRAV12-1, TRAJ43)
CVEYDKNDMRF

SEQ ID NO: 535468 - protein, 17 aa, Homo sapiens
  CDR3 for beta chain variable domain of TCR clone 267734 (TRBV20-1, TRBJ2-1)
CSARDPLAGVWDNEQFF

SEQ ID NO: 535469 - protein, 15 aa, Homo sapiens
  CDR3 for alpha chain variable domain of TCR clone 267735 (TRAV20, TRAJ40)
CAVQRGTSGTYKYSF

SEQ ID NO: 535470 - protein, 15 aa, Homo sapiens
  CDR3 for beta chain variable domain of TCR clone 267735 (TRBV25-1, TRBJ1-4)
CASSPGDSTNEKLFF

SEQ ID NO: 535471 - protein, 14 aa, Homo sapiens
  CDR3 for alpha chain variable domain of TCR clone 267736 (TRAV8-3, TRAJ4)
CAVGASGGYNKLIF

SEQ ID NO: 535472 - protein, 17 aa, Homo sapiens
  CDR3 for beta chain variable domain of TCR clone 267736 (TRBV13, TRBJ2-3)
CASSLSRVAGGRNTQYF

SEQ ID NO: 535473 - protein, 13 aa, Homo sapiens
  CDR3 for alpha chain variable domain of TCR clone 267737 (TRAV17, TRAJ5)
CAPMDTGRRALTF

SEQ ID NO: 535474 - protein, 15 aa, Homo sapiens
  CDR3 for beta chain variable domain of TCR clone 267737 (TRBV27, TRBJ2-5)
CASSLYPRGGETQYF

SEQ ID NO: 535475 - protein, 14 aa, Homo sapiens
  CDR3 for alpha chain variable domain of TCR clone 267738 (TRAV8-4, TRAJ24)
CCERQNDSWGKLQF

SEQ ID NO: 535476 - protein, 14 aa, Homo sapiens
  CDR3 for beta chain variable domain of TCR clone 267738 (TRBV7-2, TRBJ2-3)
RASSQTGSSYTQYF

SEQ ID NO: 535477 - protein, 12 aa, Homo sapiens
  CDR3 for alpha chain variable domain of TCR clone 267739 (TRAV12-2, TRAJ10)
WGVTGGGNKLTF

SEQ ID NO: 535478 - protein, 13 aa, Homo sapiens
  CDR3 for beta chain variable domain of TCR clone 267739 (TRBV5-7, TRBJ2-3)
CASSLGRTDTQYF

SEQ ID NO: 535479 - protein, 13 aa, Homo sapiens
  CDR3 for alpha chain variable domain of TCR clone 267740 (TRAV3, TRAJ21)
CAVREPDFNKFYF

SEQ ID NO: 535480 - protein, 11 aa, Homo sapiens
  CDR3 for beta chain variable domain of TCR clone 267740 (TRBV5-1, TRBJ2-4)
AGEWTKNIQYF

SEQ ID NO: 535481 - protein, 16 aa, Homo sapiens
  CDR3 for alpha chain variable domain of TCR clone 267741 (TRAV21, TRAJ17)
CAVRPGEEAAGDKLTF

SEQ ID NO: 535482 - protein, 16 aa, Homo sapiens
  CDR3 for beta chain variable domain of TCR clone 267741 (TRBV2, TRBJ2-7)
CASSEPWTGPSYEQYF

SEQ ID NO: 535483 - protein, 15 aa, Homo sapiens
  CDR3 for alpha chain variable domain of TCR clone 267742 (TRAV16, TRAJ39)
CALSPPNNAGNMLTF

SEQ ID NO: 535484 - protein, 14 aa, Homo sapiens
  CDR3 for beta chain variable domain of TCR clone 267742 (TRBV7-7, TRBJ2-7)
CASSPGGPTYEQYF

SEQ ID NO: 535485 - protein, 14 aa, Homo sapiens
  CDR3 for alpha chain variable domain of TCR clone 267743 (TRAV12-3, TRAJ10)
SHLPLTGGGNKLTF

SEQ ID NO: 535486 - protein, 16 aa, Homo sapiens
  CDR3 for beta chain variable domain of TCR clone 267743 (TRBV7-9, TRBJ2-2)
CASSVATGVGTGELFF

SEQ ID NO: 535487 - protein, 21 aa, Homo sapiens
  CDR3 for alpha chain variable domain of TCR clone 267744 (TRAV26-1, TRAJ17)
CCVLLHRQSSGSKAAGNKLTL

SEQ ID NO: 535488 - protein, 14 aa, Homo sapiens
  CDR3 for beta chain variable domain of TCR clone 267744 (TRBV28, TRBJ1-2)
CASRIQGANYGYTF

SEQ ID NO: 535489 - protein, 11 aa, Homo sapiens
  CDR3 for alpha chain variable domain of TCR clone 267745 (TRAV4, TRAJ31)
CLVGDNARLMF

SEQ ID NO: 535490 - protein, 20 aa, Homo sapiens
  CDR3 for beta chain variable domain of TCR clone 267745 (TRBV28, TRBJ2-1)
CASTPIGRSPGLAGGNEQFF

SEQ ID NO: 535491 - protein, 15 aa, Homo sapiens
  CDR3 for alpha chain variable domain of TCR clone 267746 (TRAV12-3, TRAJ11)
CAMSEENSGYSTLTF

SEQ ID NO: 535492 - protein, 15 aa, Homo sapiens
  CDR3 for beta chain variable domain of TCR clone 267746 (TRBV9, TRBJ1-6)
CASSVAGTGDSPLHF

SEQ ID NO: 535493 - protein, 14 aa, Homo sapiens
  CDR3 for alpha chain variable domain of TCR clone 267747 (TRAV3, TRAJ21)
CAVRGAYNFNKFYF

SEQ ID NO: 535494 - protein, 15 aa, Homo sapiens
  CDR3 for beta chain variable domain of TCR clone 267747 (TRBV6-5, TRBJ1-5)
CASSYSWESNQPQHF

SEQ ID NO: 535495 - protein, 15 aa, Homo sapiens
  CDR3 for alpha chain variable domain of TCR clone 267748 (TRAV26-1, TRAJ56)
CIVRVDNGANSKLTF

SEQ ID NO: 535496 - protein, 15 aa, Homo sapiens
  CDR3 for beta chain variable domain of TCR clone 267748 (TRBV20-1, TRBJ2-7)
CSARDPTEEGHEQYF

SEQ ID NO: 535497 - protein, 16 aa, Homo sapiens
  CDR3 for alpha chain variable domain of TCR clone 267749 (TRAV26-1, TRAJ32)
CIVRTNYGGATNKLIF

SEQ ID NO: 535498 - protein, 13 aa, Homo sapiens
  CDR3 for beta chain variable domain of TCR clone 267749 (TRBV7-3, TRBJ1-1)
CASSQDWGAEAFF

SEQ ID NO: 535499 - protein, 12 aa, Homo sapiens
  CDR3 for alpha chain variable domain of TCR clone 267750 (TRAV8-3, TRAJ20)
CAVGANDYKLRF

SEQ ID NO: 535500 - protein, 15 aa, Homo sapiens
  CDR3 for beta chain variable domain of TCR clone 267750 (TRBV19, TRBJ2-2)
CQPISRDRGHRGAVF

SEQ ID NO: 535501 - protein, 17 aa, Homo sapiens
  CDR3 for alpha chain variable domain of TCR clone 267751 (TRAV17, TRAJ7)
CATLGRSAFGKGNQVVV

SEQ ID NO: 535502 - protein, 13 aa, Homo sapiens
  CDR3 for beta chain variable domain of TCR clone 267751 (TRBV12-4, TRBJ2-7)
CASSLERVREQYF

SEQ ID NO: 535503 - protein, 14 aa, Homo sapiens
  CDR3 for alpha chain variable domain of TCR clone 267752 (TRAV3, TRAJ8)
CAVSLNTGFPKLEF

SEQ ID NO: 535504 - protein, 14 aa, Homo sapiens
  CDR3 for beta chain variable domain of TCR clone 267752 (TRBV6-6, TRBJ1-5)
CASVDSGFNQPQHF

SEQ ID NO: 535505 - protein, 15 aa, Homo sapiens
  CDR3 for alpha chain variable domain of TCR clone 267753 (TRAV16, TRAJ57)
CALSGGQGGSERLVF

SEQ ID NO: 535506 - protein, 12 aa, Homo sapiens
  CDR3 for beta chain variable domain of TCR clone 267753 (TRBV7-8, TRBJ2-7)
CASSLGDREQYF

SEQ ID NO: 535507 - protein, 13 aa, Homo sapiens
  CDR3 for alpha chain variable domain of TCR clone 267754 (TRAV2, TRAJ15)
CSVASQAGTALIF

SEQ ID NO: 535508 - protein, 17 aa, Homo sapiens
  CDR3 for beta chain variable domain of TCR clone 267754 (TRBV20-1, TRBJ2-2)
CSAGGSGQGGLTGELFF

SEQ ID NO: 535509 - protein, 14 aa, Homo sapiens
  CDR3 for alpha chain variable domain of TCR clone 267755 (TRAV16, TRAJ17)
CALSGRAAGNKLTF

SEQ ID NO: 535510 - protein, 12 aa, Homo sapiens
  CDR3 for beta chain variable domain of TCR clone 267755 (TRBV12-4, TRBJ2-7)
CASSLGGYEQYF

SEQ ID NO: 535511 - protein, 13 aa, Homo sapiens
  CDR3 for alpha chain variable domain of TCR clone 267756 (TRAV25, TRAJ48)
CAGPKGGNEKLTF

SEQ ID NO: 535512 - protein, 16 aa, Homo sapiens
  CDR3 for beta chain variable domain of TCR clone 267756 (TRBV11-2, TRBJ1-1)
CASSLRQGGEHSKAFF

SEQ ID NO: 535513 - protein, 14 aa, Homo sapiens
  CDR3 for alpha chain variable domain of TCR clone 267757 (TRAV13-1, TRAJ35)
CAASKGGIGYVLHC

SEQ ID NO: 535514 - protein, 16 aa, Homo sapiens
  CDR3 for beta chain variable domain of TCR clone 267757 (TRBV2, TRBJ1-4)
CASNLLQGATNEKLFF

SEQ ID NO: 535515 - protein, 15 aa, Homo sapiens
  CDR3 for alpha chain variable domain of TCR clone 267758 (TRAV14/DV4, TRAJ21)
CAMREGVYNFNKFYF

SEQ ID NO: 535516 - protein, 13 aa, Homo sapiens
  CDR3 for beta chain variable domain of TCR clone 267758 (TRBV6-1, TRBJ2-1)
CASREDGGHEQFV

SEQ ID NO: 535517 - protein, 15 aa, Homo sapiens
  CDR3 for alpha chain variable domain of TCR clone 267759 (TRAV8-3, TRAJ23)
CAVGDRYNQGGKLIF

SEQ ID NO: 535518 - protein, 22 aa, Homo sapiens
  CDR3 for beta chain variable domain of TCR clone 267759 (TRBV29-1, TRBJ2-5)
TVSNMSPEDSSIYLCSAGTQFF

SEQ ID NO: 535519 - protein, 14 aa, Homo sapiens
  CDR3 for alpha chain variable domain of TCR clone 267760 (TRAV20, TRAJ42)
CAVQAGGSQGKLLF

SEQ ID NO: 535520 - protein, 14 aa, Homo sapiens
  CDR3 for beta chain variable domain of TCR clone 267760 (TRBV28, TRBJ1-2)
CASRIQGANYGYTF

SEQ ID NO: 535521 - protein, 12 aa, Homo sapiens
  CDR3 for alpha chain variable domain of TCR clone 267761 (TRAV3, TRAJ26)
CAVRAYGQNFVF

SEQ ID NO: 535522 - protein, 16 aa, Homo sapiens
  CDR3 for beta chain variable domain of TCR clone 267761 (TRBV11-2, TRBJ1-2)
CASSPSGSEANYGYIF

SEQ ID NO: 535523 - protein, 13 aa, Homo sapiens
  CDR3 for alpha chain variable domain of TCR clone 267762 (TRAV21, TRAJ27)
CAALNTNAGKSTF

SEQ ID NO: 535524 - protein, 15 aa, Homo sapiens
  CDR3 for beta chain variable domain of TCR clone 267762 (TRBV7-9, TRBJ1-6)
CASSSPGRGNSPLHF

SEQ ID NO: 535525 - protein, 14 aa, Homo sapiens
  CDR3 for alpha chain variable domain of TCR clone 267763 (TRAV12-2, TRAJ6)
CASKWGGGSYKPPF

SEQ ID NO: 535526 - protein, 13 aa, Homo sapiens
  CDR3 for beta chain variable domain of TCR clone 267763 (TRBV2, TRBJ1-1)
CASSEGGNTEAFF

SEQ ID NO: 535527 - protein, 14 aa, Homo sapiens
  CDR3 for alpha chain variable domain of TCR clone 267764 (TRAV38-2/DV8, TRAJ49)
CAYRSWDTGNQFYF

SEQ ID NO: 535528 - protein, 16 aa, Homo sapiens
  CDR3 for beta chain variable domain of TCR clone 267764 (TRBV13, TRBJ2-2)
CASSPRTGEHTGELFF

SEQ ID NO: 535529 - protein, 16 aa, Homo sapiens
  CDR3 for alpha chain variable domain of TCR clone 267765 (TRAV26-1, TRAJ37)
CIVRGDGSGNTGKLIF

SEQ ID NO: 535530 - protein, 12 aa, Homo sapiens
  CDR3 for beta chain variable domain of TCR clone 267765 (TRBV7-8, TRBJ2-7)
CASSLGDREQYF

SEQ ID NO: 535531 - protein, 13 aa, Homo sapiens
  CDR3 for alpha chain variable domain of TCR clone 267766 (TRAV8-3, TRAJ28)
CAVGAVGSYQLTF

SEQ ID NO: 535532 - protein, 17 aa, Homo sapiens
  CDR3 for beta chain variable domain of TCR clone 267766 (TRBV11-2, TRBJ2-1)
CGSSLYPPGVEYNEQFF

SEQ ID NO: 535533 - protein, 17 aa, Homo sapiens
  CDR3 for alpha chain variable domain of TCR clone 267767 (TRAV12-3, TRAJ52)
CASPPFAGGTSYVKLTF

SEQ ID NO: 535534 - protein, 16 aa, Homo sapiens
  CDR3 for beta chain variable domain of TCR clone 267767 (TRBV6-5, TRBJ2-5)
CASSSVGRWGRETQYF

SEQ ID NO: 535535 - protein, 12 aa, Homo sapiens
  CDR3 for alpha chain variable domain of TCR clone 267768 (TRAV29/DV5, TRAJ53)
CAASGGNYKLTF

SEQ ID NO: 535536 - protein, 12 aa, Homo sapiens
  CDR3 for beta chain variable domain of TCR clone 267768 (TRBV24-1, TRBJ1-1)
CATLYPDTEAFF

SEQ ID NO: 535537 - protein, 14 aa, Homo sapiens
  CDR3 for alpha chain variable domain of TCR clone 267769 (TRAV17, TRAJ39)
CATDPVRPGNLLTF

SEQ ID NO: 535538 - protein, 15 aa, Homo sapiens
  CDR3 for beta chain variable domain of TCR clone 267769 (TRBV13, TRBJ1-5)
CASSFGQGGVQPQHF

SEQ ID NO: 535539 - protein, 15 aa, Homo sapiens
  CDR3 for alpha chain variable domain of TCR clone 267770 (TRAV27, TRAJ38)
CVARRNAGNNRKLIW

SEQ ID NO: 535540 - protein, 13 aa, Homo sapiens
  CDR3 for beta chain variable domain of TCR clone 267770 (TRBV20-1, TRBJ1-1)
CSARAGGNTEAFF

SEQ ID NO: 535541 - protein, 14 aa, Homo sapiens
  CDR3 for alpha chain variable domain of TCR clone 267771 (TRAV35, TRAJ50)
CAGHRKTSYDKVIF

SEQ ID NO: 535542 - protein, 16 aa, Homo sapiens
  CDR3 for beta chain variable domain of TCR clone 267771 (TRBV18, TRBJ1-5)
CASSPSTGNSNQPQHF

SEQ ID NO: 535543 - protein, 14 aa, Homo sapiens
  CDR3 for alpha chain variable domain of TCR clone 267772 (TRAV12-2, TRAJ40)
CAVKIPSGTYKYIF

SEQ ID NO: 535544 - protein, 14 aa, Homo sapiens
  CDR3 for beta chain variable domain of TCR clone 267772 (TRBV28, TRBJ2-1)
CASSLLQGTNEQFF

SEQ ID NO: 535545 - protein, 13 aa, Homo sapiens
  CDR3 for alpha chain variable domain of TCR clone 267773 (TRAV13-1, TRAJ5)
CAASDTGRRALTF

SEQ ID NO: 535546 - protein, 16 aa, Homo sapiens
  CDR3 for beta chain variable domain of TCR clone 267773 (TRBV29-1, TRBJ2-7)
CSVEVVGTSGSYEQYF

SEQ ID NO: 535547 - protein, 12 aa, Homo sapiens
  CDR3 for alpha chain variable domain of TCR clone 267774 (TRAV21, TRAJ13)
PGPSGGYQKVTF

SEQ ID NO: 535548 - protein, 15 aa, Homo sapiens
  CDR3 for beta chain variable domain of TCR clone 267774 (TRBV7-9, TRBJ1-6)
CASSSPGRGNSPLDF

SEQ ID NO: 535549 - protein, 15 aa, Homo sapiens
  CDR3 for alpha chain variable domain of TCR clone 267775 (TRAV25, TRAJ10)
CAGQLFTGGGNKPTF

SEQ ID NO: 535550 - protein, 15 aa, Homo sapiens
  CDR3 for beta chain variable domain of TCR clone 267775 (TRBV12-5, TRBJ2-2)
CASGRLGGNTGELFF

SEQ ID NO: 535551 - protein, 14 aa, Homo sapiens
  CDR3 for alpha chain variable domain of TCR clone 267776 (TRAV12-3, TRAJ10)
SDLPLTGGGNKLTF

SEQ ID NO: 535552 - protein, 14 aa, Homo sapiens
  CDR3 for beta chain variable domain of TCR clone 267776 (TRBV6-1, TRBJ1-3)
CASVQGGGGNTIYF

SEQ ID NO: 535553 - protein, 21 aa, Homo sapiens
  CDR3 for alpha chain variable domain of TCR clone 267777 (TRAV16, TRAJ22)
HLKKPFAQGEDSAMYLRQLTF

SEQ ID NO: 535554 - protein, 15 aa, Homo sapiens
  CDR3 for beta chain variable domain of TCR clone 267777 (TRBV7-9, TRBJ1-6)
GASSSPGRGNSPLHF

SEQ ID NO: 535555 - protein, 14 aa, Homo sapiens
  CDR3 for alpha chain variable domain of TCR clone 267778 (TRAV12-2, TRAJ53)
CAVKGGGRNYKLTF

SEQ ID NO: 535556 - protein, 17 aa, Homo sapiens
  CDR3 for beta chain variable domain of TCR clone 267778 (TRBV7-7, TRBJ2-2)
CIAVPPVRTPTPGSCFF

SEQ ID NO: 535557 - protein, 11 aa, Homo sapiens
  CDR3 for alpha chain variable domain of TCR clone 267779 (TRAV20, TRAJ40)
CAVGGTYKYIF

SEQ ID NO: 535558 - protein, 17 aa, Homo sapiens
  CDR3 for beta chain variable domain of TCR clone 267779 (TRBV24-1, TRBJ2-1)
CATSDVSTSGTYNEQFF

SEQ ID NO: 535559 - protein, 14 aa, Homo sapiens
  CDR3 for alpha chain variable domain of TCR clone 267780 (TRAV29/DV5, TRAJ29)
CAARSNSGNTPLVF

SEQ ID NO: 535560 - protein, 20 aa, Homo sapiens
  CDR3 for beta chain variable domain of TCR clone 267780 (TRBV7-8, TRBJ2-2)
CASSHLFPGPTIHITGELFF

SEQ ID NO: 535561 - protein, 14 aa, Homo sapiens
  CDR3 for alpha chain variable domain of TCR clone 267781 (TRAV8-1, TRAJ6)
CAVNASGGSYIPTF

SEQ ID NO: 535562 - protein, 16 aa, Homo sapiens
  CDR3 for beta chain variable domain of TCR clone 267781 (TRBV5-1, TRBJ2-2)
CASSSRTGGRTGELFF

SEQ ID NO: 535563 - protein, 16 aa, Homo sapiens
  CDR3 for alpha chain variable domain of TCR clone 267782 (TRAV26-1, TRAJ53)
CIVRVAMGVSNYKLTF

SEQ ID NO: 535564 - protein, 12 aa, Homo sapiens
  CDR3 for beta chain variable domain of TCR clone 267782 (TRBV7-9, TRBJ1-5)
CASSPQGQPQHF

SEQ ID NO: 535565 - protein, 16 aa, Homo sapiens
  CDR3 for alpha chain variable domain of TCR clone 267783 (TRAV30, TRAJ24)
CGTEIVDADSWGKFQF

SEQ ID NO: 535566 - protein, 15 aa, Homo sapiens
  CDR3 for beta chain variable domain of TCR clone 267783 (TRBV7-2, TRBJ1-3)
CASSPGGADGNTIYF

SEQ ID NO: 535567 - protein, 17 aa, Homo sapiens
  CDR3 for alpha chain variable domain of TCR clone 267784 (TRAV23/DV6, TRAJ57)
CAASSTLSQGGSEQLVF

SEQ ID NO: 535568 - protein, 14 aa, Homo sapiens
  CDR3 for beta chain variable domain of TCR clone 267784 (TRBV25-1, TRBJ1-1)
CASTHLGGNTEAVF

SEQ ID NO: 535569 - protein, 14 aa, Homo sapiens
  CDR3 for alpha chain variable domain of TCR clone 267785 (TRAV26-1, TRAJ38)
CIADNAGNNRKLIW

SEQ ID NO: 535570 - protein, 15 aa, Homo sapiens
  CDR3 for beta chain variable domain of TCR clone 267785 (TRBV20-1, TRBJ2-6)
CSAYGQVSGANVLTF

SEQ ID NO: 535571 - protein, 14 aa, Homo sapiens
  CDR3 for alpha chain variable domain of TCR clone 267786 (TRAV8-1, TRAJ32)
CAVNARGATNKLIF

SEQ ID NO: 535572 - protein, 16 aa, Homo sapiens
  CDR3 for beta chain variable domain of TCR clone 267786 (TRBV11-3, TRBJ2-5)
CASSSVVAGSTETQYF

SEQ ID NO: 535573 - protein, 14 aa, Homo sapiens
  CDR3 for alpha chain variable domain of TCR clone 267787 (TRAV1-2, TRAJ8)
CAVREDTGFQKLVS

SEQ ID NO: 535574 - protein, 12 aa, Homo sapiens
  CDR3 for beta chain variable domain of TCR clone 267787 (TRBV24-1, TRBJ1-1)
CATLYPDTEAFF

SEQ ID NO: 535575 - protein, 12 aa, Homo sapiens
  CDR3 for alpha chain variable domain of TCR clone 267788 (TRAV12-3, TRAJ17)
CAMTLTGNKLTF

SEQ ID NO: 535576 - protein, 13 aa, Homo sapiens
  CDR3 for beta chain variable domain of TCR clone 267788 (TRBV3-1, TRBJ1-5)
CASSQAGGQPQHF

SEQ ID NO: 535577 - protein, 14 aa, Homo sapiens
  CDR3 for alpha chain variable domain of TCR clone 267789 (TRAV1-2, TRAJ16)
CAVNRFSDGQKLLF

SEQ ID NO: 535578 - protein, 13 aa, Homo sapiens
  CDR3 for beta chain variable domain of TCR clone 267789 (TRBV7-2, TRBJ2-5)
CASSQTSVETQYY

SEQ ID NO: 535579 - protein, 13 aa, Homo sapiens
  CDR3 for alpha chain variable domain of TCR clone 267790 (TRAV17, TRAJ5)
CATGDTGSRALTF

SEQ ID NO: 535580 - protein, 13 aa, Homo sapiens
  CDR3 for beta chain variable domain of TCR clone 267790 (TRBV19, TRBJ1-5)
CASSIEPVQPQHF

SEQ ID NO: 535581 - protein, 15 aa, Homo sapiens
  CDR3 for alpha chain variable domain of TCR clone 267791 (TRAV27, TRAJ38)
CAARRNAGNNRKRIW

SEQ ID NO: 535582 - protein, 17 aa, Homo sapiens
  CDR3 for beta chain variable domain of TCR clone 267791 (TRBV7-8, TRBJ2-6)
CASSAGTGGAGANVLTF

SEQ ID NO: 535583 - protein, 15 aa, Homo sapiens
  CDR3 for alpha chain variable domain of TCR clone 267792 (TRAV12-3, TRAJ5)
CAMSGLGTGRRALTF

SEQ ID NO: 535584 - protein, 15 aa, Homo sapiens
  CDR3 for beta chain variable domain of TCR clone 267792 (TRBV5-1, TRBJ1-1)
CASTRGGVMNTEAFF

SEQ ID NO: 535585 - protein, 15 aa, Homo sapiens
  CDR3 for alpha chain variable domain of TCR clone 267793 (TRAV20, TRAJ4)
CAVQVFSGGYNKLIF

SEQ ID NO: 535586 - protein, 14 aa, Homo sapiens
  CDR3 for beta chain variable domain of TCR clone 267793 (TRBV7-6, TRBJ2-3)
GASNSGGDANTQYF

SEQ ID NO: 535587 - protein, 12 aa, Homo sapiens
  CDR3 for alpha chain variable domain of TCR clone 267794 (TRAV17, TRAJ49)
CATVTTGNQFYF

SEQ ID NO: 535588 - protein, 18 aa, Homo sapiens
  CDR3 for beta chain variable domain of TCR clone 267794 (TRBV11-2, TRBJ2-6)
CASSFNPFLGTGANVLTF

SEQ ID NO: 535589 - protein, 12 aa, Homo sapiens
  CDR3 for alpha chain variable domain of TCR clone 267795 (TRAV12-3, TRAJ17)
CAMTLTGNKLTF

SEQ ID NO: 535590 - protein, 12 aa, Homo sapiens
  CDR3 for beta chain variable domain of TCR clone 267795 (TRBV12-4, TRBJ2-7)
CASSLGGYEQYV

SEQ ID NO: 535591 - protein, 15 aa, Homo sapiens
  CDR3 for alpha chain variable domain of TCR clone 267796 (TRAV3, TRAJ22)
CAVRYRGGSARQLTF

SEQ ID NO: 535592 - protein, 16 aa, Homo sapiens
  CDR3 for beta chain variable domain of TCR clone 267796 (TRBV11-2, TRBJ2-1)
CASARGSYSHHNEQFF

SEQ ID NO: 535593 - protein, 13 aa, Homo sapiens
  CDR3 for alpha chain variable domain of TCR clone 267797 (TRAV13-1, TRAJ6)
CAASKGGSYTPTF

SEQ ID NO: 535594 - protein, 13 aa, Homo sapiens
  CDR3 for beta chain variable domain of TCR clone 267797 (TRBV7-9, TRBJ2-5)
CASLPSGRETQYF

SEQ ID NO: 535595 - protein, 15 aa, Homo sapiens
  CDR3 for alpha chain variable domain of TCR clone 267798 (TRAV8-4, TRAJ40)
CAVSSITSGTYKYIF

SEQ ID NO: 535596 - protein, 15 aa, Homo sapiens
  CDR3 for beta chain variable domain of TCR clone 267798 (TRBV6-1, TRBJ2-4)
CASSEAVWTINIQYF

SEQ ID NO: 535597 - protein, 15 aa, Homo sapiens
  CDR3 for alpha chain variable domain of TCR clone 267799 (TRAV21, TRAJ37)
CAVRPTLSNTGKLIF

SEQ ID NO: 535598 - protein, 16 aa, Homo sapiens
  CDR3 for beta chain variable domain of TCR clone 267799 (TRBV24-1, TRBJ2-3)
CATSDRRHDLTDTQYF

SEQ ID NO: 535599 - protein, 13 aa, Homo sapiens
  CDR3 for alpha chain variable domain of TCR clone 267800 (TRAV3, TRAJ21)
CAVREPDFNKFYF

SEQ ID NO: 535600 - protein, 17 aa, Homo sapiens
  CDR3 for beta chain variable domain of TCR clone 267800 (TRBV7-8, TRBJ2-6)
GASSAGTGGAGANVLTF

SEQ ID NO: 535601 - protein, 19 aa, Homo sapiens
  CDR3 for alpha chain variable domain of TCR clone 267801 (TRAV21, TRAJ40)
SLVTQPPTSVISGTYKYIF

SEQ ID NO: 535602 - protein, 16 aa, Homo sapiens
  CDR3 for beta chain variable domain of TCR clone 267801 (TRBV28, TRBJ2-3)
CPSSFFRDPRLGTQYF

SEQ ID NO: 535603 - protein, 13 aa, Homo sapiens
  CDR3 for alpha chain variable domain of TCR clone 267802 (TRAV16, TRAJ48)
CSPLNFGNEKLPF

SEQ ID NO: 535604 - protein, 11 aa, Homo sapiens
  CDR3 for beta chain variable domain of TCR clone 267802 (TRBV7-9, TRBJ2-3)
CASSPTDTQYF

SEQ ID NO: 535605 - protein, 13 aa, Homo sapiens
  CDR3 for alpha chain variable domain of TCR clone 267803 (TRAV8-6, TRAJ13)
CAVRDGGYQKVTF

SEQ ID NO: 535606 - protein, 15 aa, Homo sapiens
  CDR3 for beta chain variable domain of TCR clone 267803 (TRBV7-9, TRBJ2-2)
CASRPEGSSTGELFF

SEQ ID NO: 535607 - protein, 15 aa, Homo sapiens
  CDR3 for alpha chain variable domain of TCR clone 267804 (TRAV12-1, TRAJ10)
CGADILTGGGNKLTF

SEQ ID NO: 535608 - protein, 16 aa, Homo sapiens
  CDR3 for beta chain variable domain of TCR clone 267804 (TRBV20-1, TRBJ2-1)
CSARSTSESAYNEQFF

SEQ ID NO: 535609 - protein, 14 aa, Homo sapiens
  CDR3 for alpha chain variable domain of TCR clone 267805 (TRAV30, TRAJ26)
CGTEIVSYGQNFVF

SEQ ID NO: 535610 - protein, 13 aa, Homo sapiens
  CDR3 for beta chain variable domain of TCR clone 267805 (TRBV24-1, TRBJ2-2)
CDTSDWSTGELFF

SEQ ID NO: 535611 - protein, 11 aa, Homo sapiens
  CDR3 for alpha chain variable domain of TCR clone 267806 (TRAV13-1, TRAJ40)
CAVSGTYQYIF

SEQ ID NO: 535612 - protein, 12 aa, Homo sapiens
  CDR3 for beta chain variable domain of TCR clone 267806 (TRBV7-9, TRBJ1-5)
CASSPQGQPQHF

SEQ ID NO: 535613 - protein, 14 aa, Homo sapiens
  CDR3 for alpha chain variable domain of TCR clone 267807 (TRAV12-2, TRAJ40)
CAVKIPSGTYKYIF

SEQ ID NO: 535614 - protein, 13 aa, Homo sapiens
  CDR3 for beta chain variable domain of TCR clone 267807 (TRBV20-1, TRBJ1-1)
QCTNTDLGTEAFF

SEQ ID NO: 535615 - protein, 20 aa, Homo sapiens
  CDR3 for alpha chain variable domain of TCR clone 267808 (TRAV12-3, TRAJ41)
SLFIRDSQPSDSATPEALNF

SEQ ID NO: 535616 - protein, 15 aa, Homo sapiens
  CDR3 for beta chain variable domain of TCR clone 267808 (TRBV11-2, TRBJ2-1)
CASSSPSTRYNEQFF

SEQ ID NO: 535617 - protein, 14 aa, Homo sapiens
  CDR3 for alpha chain variable domain of TCR clone 267809 (TRAV2, TRAJ9)
CAVVDRSGGFKTIF

SEQ ID NO: 535618 - protein, 19 aa, Homo sapiens
  CDR3 for beta chain variable domain of TCR clone 267809 (TRBV25-1, TRBJ2-2)
CAILVYRVDRGRKTGELFF

SEQ ID NO: 535619 - protein, 16 aa, Homo sapiens
  CDR3 for alpha chain variable domain of TCR clone 267810 (TRAV1-2, TRAJ10)
CAVRGVLTGGGNKLTF

SEQ ID NO: 535620 - protein, 12 aa, Homo sapiens
  CDR3 for beta chain variable domain of TCR clone 267810 (TRBV7-8, TRBJ2-5)
CASSLRAETQYF

SEQ ID NO: 535621 - protein, 17 aa, Homo sapiens
  CDR3 for alpha chain variable domain of TCR clone 267811 (TRAV3, TRAJ6)
CAARDGPRAGGSYIPTF

SEQ ID NO: 535622 - protein, 14 aa, Homo sapiens
  CDR3 for beta chain variable domain of TCR clone 267811 (TRBV7-2, TRBJ2-7)
CASSPNTSFYEQYF

SEQ ID NO: 535623 - protein, 14 aa, Homo sapiens
  CDR3 for alpha chain variable domain of TCR clone 267812 (TRAV17, TRAJ34)
CATVPTSNTDKLIF

SEQ ID NO: 535624 - protein, 18 aa, Homo sapiens
  CDR3 for beta chain variable domain of TCR clone 267812 (TRBV23-1, TRBJ2-1)
TVSLRQRSEKWLKNEQFF

SEQ ID NO: 535625 - protein, 17 aa, Homo sapiens
  CDR3 for alpha chain variable domain of TCR clone 267813 (TRAV26-1, TRAJ37)
CIVRVITVSSNTGRLIF

SEQ ID NO: 535626 - protein, 12 aa, Homo sapiens
  CDR3 for beta chain variable domain of TCR clone 267813 (TRBV11-2, TRBJ2-1)
CASSPGNNEQFF

SEQ ID NO: 535627 - protein, 16 aa, Homo sapiens
  CDR3 for alpha chain variable domain of TCR clone 267814 (TRAV3, TRAJ4)
CAVRPSPSGGYNKPIF

SEQ ID NO: 535628 - protein, 12 aa, Homo sapiens
  CDR3 for beta chain variable domain of TCR clone 267814 (TRBV7-9, TRBJ2-7)
CASSQGAYEQYF

SEQ ID NO: 535629 - protein, 15 aa, Homo sapiens
  CDR3 for alpha chain variable domain of TCR clone 267815 (TRAV35, TRAJ37)
WAFLRGSSNTGKLIF

SEQ ID NO: 535630 - protein, 13 aa, Homo sapiens
  CDR3 for beta chain variable domain of TCR clone 267815 (TRBV7-9, TRBJ1-2)
CASSLKQNYGYTF

SEQ ID NO: 535631 - protein, 14 aa, Homo sapiens
  CDR3 for alpha chain variable domain of TCR clone 267816 (TRAV1-2, TRAJ8)
CAVREDTGFQKLVC

SEQ ID NO: 535632 - protein, 13 aa, Homo sapiens
  CDR3 for beta chain variable domain of TCR clone 267816 (TRBV5-1, TRBJ1-2)
CASSIDRPEGYTF

SEQ ID NO: 535633 - protein, 16 aa, Homo sapiens
  CDR3 for alpha chain variable domain of TCR clone 267817 (TRAV26-1, TRAJ41)
CIVRVAVANSGYALNF

SEQ ID NO: 535634 - protein, 14 aa, Homo sapiens
  CDR3 for beta chain variable domain of TCR clone 267817 (TRBV7-2, TRBJ2-7)
CASSPKTSFYEQYF

SEQ ID NO: 535635 - protein, 11 aa, Homo sapiens
  CDR3 for alpha chain variable domain of TCR clone 267818 (TRAV12-1, TRAJ31)
CVGRVQCQTHV

SEQ ID NO: 535636 - protein, 15 aa, Homo sapiens
  CDR3 for beta chain variable domain of TCR clone 267818 (TRBV7-2, TRBJ2-1)
CASSLVAGRYNEQFF

SEQ ID NO: 535637 - protein, 14 aa, Homo sapiens
  CDR3 for alpha chain variable domain of TCR clone 267819 (TRAV12-2, TRAJ13)
CAVKKTGGYQKVTF

SEQ ID NO: 535638 - protein, 14 aa, Homo sapiens
  CDR3 for beta chain variable domain of TCR clone 267819 (TRBV27, TRBJ2-7)
CASSFRDGPYEQYF

SEQ ID NO: 535639 - protein, 16 aa, Homo sapiens
  CDR3 for alpha chain variable domain of TCR clone 267820 (TRAV38-1, TRAJ37)
CAFKGDGSSNTGKLIF

SEQ ID NO: 535640 - protein, 13 aa, Homo sapiens
  CDR3 for beta chain variable domain of TCR clone 267820 (TRBV12-4, TRBJ2-5)
CAISLFRRETQYF

SEQ ID NO: 535641 - protein, 14 aa, Homo sapiens
  CDR3 for alpha chain variable domain of TCR clone 267821 (TRAV17, TRAJ56)
CATDYPGANSKLTF

SEQ ID NO: 535642 - protein, 14 aa, Homo sapiens
  CDR3 for beta chain variable domain of TCR clone 267821 (TRBV18, TRBJ2-1)
CASSPVRGDNEQFF

SEQ ID NO: 535643 - protein, 14 aa, Homo sapiens
  CDR3 for alpha chain variable domain of TCR clone 267822 (TRAV1-2, TRAJ16)
CAVNRFSDGQKLLF

SEQ ID NO: 535644 - protein, 15 aa, Homo sapiens
  CDR3 for beta chain variable domain of TCR clone 267822 (TRBV20-1, TRBJ2-7)
CSARDRVSGMDEQNF

SEQ ID NO: 535645 - protein, 15 aa, Homo sapiens
  CDR3 for alpha chain variable domain of TCR clone 267823 (TRAV16, TRAJ48)
CALFISNIGNEKLTF

SEQ ID NO: 535646 - protein, 15 aa, Homo sapiens
  CDR3 for beta chain variable domain of TCR clone 267823 (TRBV5-4, TRBJ2-7)
CASSRFGTGSYEQYF

SEQ ID NO: 535647 - protein, 16 aa, Homo sapiens
  CDR3 for alpha chain variable domain of TCR clone 267824 (TRAV1-2, TRAJ10)
CAVRGVLTGGGNKLTF

SEQ ID NO: 535648 - protein, 15 aa, Homo sapiens
  CDR3 for beta chain variable domain of TCR clone 267824 (TRBV2, TRBJ1-6)
CASRIMAGENSPLHF

SEQ ID NO: 535649 - protein, 12 aa, Homo sapiens
  CDR3 for alpha chain variable domain of TCR clone 267825 (TRAV8-3, TRAJ5)
CAVGGGLRALTF

SEQ ID NO: 535650 - protein, 15 aa, Homo sapiens
  CDR3 for beta chain variable domain of TCR clone 267825 (TRBV20-1, TRBJ2-7)
CSARVPAAYFYEQYF

SEQ ID NO: 535651 - protein, 12 aa, Homo sapiens
  CDR3 for alpha chain variable domain of TCR clone 267826 (TRAV12-3, TRAJ17)
CAMTLTGNKLTF

SEQ ID NO: 535652 - protein, 15 aa, Homo sapiens
  CDR3 for beta chain variable domain of TCR clone 267826 (TRBV27, TRBJ2-1)
CASSNGGGSSNEQFV

SEQ ID NO: 535653 - protein, 10 aa, Homo sapiens
  CDR3 for alpha chain variable domain of TCR clone 267827 (TRAV1-2, TRAJ10)
CAVRALTPVT

SEQ ID NO: 535654 - protein, 14 aa, Homo sapiens
  CDR3 for beta chain variable domain of TCR clone 267827 (TRBV4-1, TRBJ1-1)
CASSQQGNGNEAFF

SEQ ID NO: 535655 - protein, 14 aa, Homo sapiens
  CDR3 for alpha chain variable domain of TCR clone 267828 (TRAV1-2, TRAJ16)
CAVNRFSDGQKRLF

SEQ ID NO: 535656 - protein, 17 aa, Homo sapiens
  CDR3 for beta chain variable domain of TCR clone 267828 (TRBV28, TRBJ2-5)
CASSTPEGDALQETQYF

SEQ ID NO: 535657 - protein, 13 aa, Homo sapiens
  CDR3 for alpha chain variable domain of TCR clone 267829 (TRAV29/DV5, TRAJ31)
CAASRNNNARLMF

SEQ ID NO: 535658 - protein, 13 aa, Homo sapiens
  CDR3 for beta chain variable domain of TCR clone 267829 (TRBV14, TRBJ2-4)
CASSREHANIQYF

SEQ ID NO: 535659 - protein, 12 aa, Homo sapiens
  CDR3 for alpha chain variable domain of TCR clone 267830 (TRAV16, TRAJ26)
FALRSYGQNFVF

SEQ ID NO: 535660 - protein, 14 aa, Homo sapiens
  CDR3 for beta chain variable domain of TCR clone 267830 (TRBV10-3, TRBJ2-1)
CASSSDLAYNEQFS

SEQ ID NO: 535661 - protein, 15 aa, Homo sapiens
  CDR3 for alpha chain variable domain of TCR clone 267831 (TRAV8-3, TRAJ27)
CAVGPSKTNAGKSTF

SEQ ID NO: 535662 - protein, 13 aa, Homo sapiens
  CDR3 for beta chain variable domain of TCR clone 267831 (TRBV12-5, TRBJ2-3)
CASQNRGTDTQYF

SEQ ID NO: 535663 - protein, 15 aa, Homo sapiens
  CDR3 for alpha chain variable domain of TCR clone 267832 (TRAV12-2, TRAJ43)
CAFDMLFGAGTRLTV

SEQ ID NO: 535664 - protein, 13 aa, Homo sapiens
  CDR3 for beta chain variable domain of TCR clone 267832 (TRBV4-2, TRBJ1-1)
CASSQAGNTEAFF

SEQ ID NO: 535665 - protein, 14 aa, Homo sapiens
  CDR3 for alpha chain variable domain of TCR clone 267833 (TRAV14/DV4, TRAJ32)
SNVLPLTPTNKLIF

SEQ ID NO: 535666 - protein, 13 aa, Homo sapiens
  CDR3 for beta chain variable domain of TCR clone 267833 (TRBV3-1, TRBJ2-2)
CASLARGSGELFF

SEQ ID NO: 535667 - protein, 14 aa, Homo sapiens
  CDR3 for alpha chain variable domain of TCR clone 267834 (TRAV2, TRAJ3)
CAVRPYSSASKIIF

SEQ ID NO: 535668 - protein, 17 aa, Homo sapiens
  CDR3 for beta chain variable domain of TCR clone 267834 (TRBV7-6, TRBJ2-5)
CAGSSPQAGDPSENQYF

SEQ ID NO: 535669 - protein, 14 aa, Homo sapiens
  CDR3 for alpha chain variable domain of TCR clone 267835 (TRAV16, TRAJ31)
CALSGKNNNARLMF

SEQ ID NO: 535670 - protein, 12 aa, Homo sapiens
  CDR3 for beta chain variable domain of TCR clone 267835 (TRBV11-2, TRBJ1-2)
CASSREGDGYTF

SEQ ID NO: 535671 - protein, 16 aa, Homo sapiens
  CDR3 for alpha chain variable domain of TCR clone 267836 (TRAV13-2, TRAJ53)
CAENANIGGSNYKLTF

SEQ ID NO: 535672 - protein, 19 aa, Homo sapiens
  CDR3 for beta chain variable domain of TCR clone 267836 (TRBV28, TRBJ2-7)
CASSYSGTSRLGWVYEQYF

SEQ ID NO: 535673 - protein, 13 aa, Homo sapiens
  CDR3 for alpha chain variable domain of TCR clone 267837 (TRAV12-3, TRAJ53)
YAMRGGSNYKLTF

SEQ ID NO: 535674 - protein, 15 aa, Homo sapiens
  CDR3 for beta chain variable domain of TCR clone 267837 (TRBV2, TRBJ2-1)
CATQARLVMIGEQFF

SEQ ID NO: 535675 - protein, 10 aa, Homo sapiens
  CDR3 for alpha chain variable domain of TCR clone 267838 (TRAV12-3, TRAJ49)
CAMNDDQFYF

SEQ ID NO: 535676 - protein, 13 aa, Homo sapiens
  CDR3 for beta chain variable domain of TCR clone 267838 (TRBV12-4, TRBJ1-1)
CASSSRAGAEAFF

SEQ ID NO: 535677 - protein, 12 aa, Homo sapiens
  CDR3 for alpha chain variable domain of TCR clone 267839 (TRAV23/DV6, TRAJ4)
CAARDFWSRDQA

SEQ ID NO: 535678 - protein, 13 aa, Homo sapiens
  CDR3 for beta chain variable domain of TCR clone 267839 (TRBV7-2, TRBJ1-1)
CASSRNTNTEAFF

SEQ ID NO: 535679 - protein, 14 aa, Homo sapiens
  CDR3 for alpha chain variable domain of TCR clone 267840 (TRAV13-2, TRAJ26)
CAENLGNYGQNFVF

SEQ ID NO: 535680 - protein, 14 aa, Homo sapiens
  CDR3 for beta chain variable domain of TCR clone 267840 (TRBV19, TRBJ1-3)
CASNRGNSGDTIYF

SEQ ID NO: 535681 - protein, 11 aa, Homo sapiens
  CDR3 for alpha chain variable domain of TCR clone 267841 (TRAV12-3, TRAJ17)
CNDAYRQKLTF

SEQ ID NO: 535682 - protein, 15 aa, Homo sapiens
  CDR3 for beta chain variable domain of TCR clone 267841 (TRBV20-1, TRBJ2-7)
CSARDRVSGMDEQHF

SEQ ID NO: 535683 - protein, 16 aa, Homo sapiens
  CDR3 for alpha chain variable domain of TCR clone 267842 (TRAV30, TRAJ24)
CGTEIVDADSLGKFQF

SEQ ID NO: 535684 - protein, 13 aa, Homo sapiens
  CDR3 for beta chain variable domain of TCR clone 267842 (TRBV18, TRBJ1-2)
CASSASATEGYTF

SEQ ID NO: 535685 - protein, 12 aa, Homo sapiens
  CDR3 for alpha chain variable domain of TCR clone 267843 (TRAV13-2, TRAJ8)
CAERTGFQKLVF

SEQ ID NO: 535686 - protein, 15 aa, Homo sapiens
  CDR3 for beta chain variable domain of TCR clone 267843 (TRBV5-7, TRBJ1-5)
CASSYGKLWDQPQHF

SEQ ID NO: 535687 - protein, 12 aa, Homo sapiens
  CDR3 for alpha chain variable domain of TCR clone 267844 (TRAV12-2, TRAJ8)
CAVNTGFQKLVF

SEQ ID NO: 535688 - protein, 16 aa, Homo sapiens
  CDR3 for beta chain variable domain of TCR clone 267844 (TRBV19, TRBJ2-2)
CASSGVPRPNTGELFF

SEQ ID NO: 535689 - protein, 14 aa, Homo sapiens
  CDR3 for alpha chain variable domain of TCR clone 267845 (TRAV1-2, TRAJ16)
CAVNRFSDGQKLLF

SEQ ID NO: 535690 - protein, 11 aa, Homo sapiens
  CDR3 for beta chain variable domain of TCR clone 267845 (TRBV4-1, TRBJ2-2)
CASEHTVELFF

SEQ ID NO: 535691 - protein, 16 aa, Homo sapiens
  CDR3 for alpha chain variable domain of TCR clone 267846 (TRAV14/DV4, TRAJ53)
CAMREGGGGSNYKLTF

SEQ ID NO: 535692 - protein, 15 aa, Homo sapiens
  CDR3 for beta chain variable domain of TCR clone 267846 (TRBV28, TRBJ2-4)
CAAGSGTLLMGSQYF

SEQ ID NO: 535693 - protein, 14 aa, Homo sapiens
  CDR3 for alpha chain variable domain of TCR clone 267847 (TRAV22, TRAJ28)
FAVYSGAGSYQLTF

SEQ ID NO: 535694 - protein, 16 aa, Homo sapiens
  CDR3 for beta chain variable domain of TCR clone 267847 (TRBV24-1, TRBJ2-3)
CATSDPGTGATDTQYL

SEQ ID NO: 535695 - protein, 15 aa, Homo sapiens
  CDR3 for alpha chain variable domain of TCR clone 267848 (TRAV17, TRAJ57)
CATGPSQGGSEKLVF

SEQ ID NO: 535696 - protein, 16 aa, Homo sapiens
  CDR3 for beta chain variable domain of TCR clone 267848 (TRBV4-2, TRBJ2-1)
CASSQETATPYNEQFF

SEQ ID NO: 535697 - protein, 12 aa, Homo sapiens
  CDR3 for alpha chain variable domain of TCR clone 267849 (TRAV12-1, TRAJ40)
CVIYSGTYKYIF

SEQ ID NO: 535698 - protein, 12 aa, Homo sapiens
  CDR3 for beta chain variable domain of TCR clone 267849 (TRBV11-2, TRBJ2-2)
CASSLGGGELFF

SEQ ID NO: 535699 - protein, 14 aa, Homo sapiens
  CDR3 for alpha chain variable domain of TCR clone 267850 (TRAV17, TRAJ34)
CATDSLEGTDKLIF

SEQ ID NO: 535700 - protein, 18 aa, Homo sapiens
  CDR3 for beta chain variable domain of TCR clone 267850 (TRBV11-2, TRBJ2-3)
CASSLGGASRGAPNTQYF

SEQ ID NO: 535701 - protein, 12 aa, Homo sapiens
  CDR3 for alpha chain variable domain of TCR clone 267851 (TRAV8-3, TRAJ26)
CSGDNYGQNFVF

SEQ ID NO: 535702 - protein, 16 aa, Homo sapiens
  CDR3 for beta chain variable domain of TCR clone 267851 (TRBV28, TRBJ2-6)
CASSNRRGSGANVLTF

SEQ ID NO: 535703 - protein, 15 aa, Homo sapiens
  CDR3 for alpha chain variable domain of TCR clone 267852 (TRAV26-1, TRAJ56)
CIVRVDNGANSKLTF

SEQ ID NO: 535704 - protein, 15 aa, Homo sapiens
  CDR3 for beta chain variable domain of TCR clone 267852 (TRBV20-1, TRBJ2-7)
CSARDRTEVGHEQYF

SEQ ID NO: 535705 - protein, 16 aa, Homo sapiens
  CDR3 for alpha chain variable domain of TCR clone 267853 (TRAV3, TRAJ37)
CAVRGKGSGNTVKLIF

SEQ ID NO: 535706 - protein, 16 aa, Homo sapiens
  CDR3 for beta chain variable domain of TCR clone 267853 (TRBV2, TRBJ2-5)
CASSETQGVGEETQYF

SEQ ID NO: 535707 - protein, 17 aa, Homo sapiens
  CDR3 for alpha chain variable domain of TCR clone 267854 (TRAV26-1, TRAJ47)
CIVPSLLYMDYGNKLVF

SEQ ID NO: 535708 - protein, 14 aa, Homo sapiens
  CDR3 for beta chain variable domain of TCR clone 267854 (TRBV7-3, TRBJ1-5)
RASSCSGCNQPQHF

SEQ ID NO: 535709 - protein, 13 aa, Homo sapiens
  CDR3 for alpha chain variable domain of TCR clone 267855 (TRAV3, TRAJ15)
CAVRDQAGTALIF

SEQ ID NO: 535710 - protein, 16 aa, Homo sapiens
  CDR3 for beta chain variable domain of TCR clone 267855 (TRBV11-1, TRBJ1-2)
CASSLGFSSGEDGYTF

SEQ ID NO: 535711 - protein, 16 aa, Homo sapiens
  CDR3 for alpha chain variable domain of TCR clone 267856 (TRAV12-3, TRAJ53)
CAMSPGSGGSNYKLTF

SEQ ID NO: 535712 - protein, 13 aa, Homo sapiens
  CDR3 for beta chain variable domain of TCR clone 267856 (TRBV2, TRBJ1-1)
CASSVLMNTEAFF

SEQ ID NO: 535713 - protein, 14 aa, Homo sapiens
  CDR3 for alpha chain variable domain of TCR clone 267857 (TRAV23/DV6, TRAJ39)
CAASIGNAGNMLTF

SEQ ID NO: 535714 - protein, 15 aa, Homo sapiens
  CDR3 for beta chain variable domain of TCR clone 267857 (TRBV6-3, TRBJ2-7)
CASSSPGTVFYEQYF

SEQ ID NO: 535715 - protein, 14 aa, Homo sapiens
  CDR3 for alpha chain variable domain of TCR clone 267858 (TRAV12-2, TRAJ44)
CAVNPAGTASKLTW

SEQ ID NO: 535716 - protein, 16 aa, Homo sapiens
  CDR3 for beta chain variable domain of TCR clone 267858 (TRBV2, TRBJ2-6)
CASSEVGGAGANVLTF

SEQ ID NO: 535717 - protein, 15 aa, Homo sapiens
  CDR3 for alpha chain variable domain of TCR clone 267859 (TRAV13-1, TRAJ32)
CAACIYGGATNKLIF

SEQ ID NO: 535718 - protein, 14 aa, Homo sapiens
  CDR3 for beta chain variable domain of TCR clone 267859 (TRBV7-9, TRBJ2-1)
CASSLASGSNEQFF

SEQ ID NO: 535719 - protein, 14 aa, Homo sapiens
  CDR3 for alpha chain variable domain of TCR clone 267860 (TRAV26-1, TRAJ21)
CIVRVVYNFNKFYS

SEQ ID NO: 535720 - protein, 11 aa, Homo sapiens
  CDR3 for beta chain variable domain of TCR clone 267860 (TRBV5-6, TRBJ2-5)
CASSLERTQYC

SEQ ID NO: 535721 - protein, 14 aa, Homo sapiens
  CDR3 for alpha chain variable domain of TCR clone 267861 (TRAV13-2, TRAJ22)
CADGTLGSARQLTF

SEQ ID NO: 535722 - protein, 16 aa, Homo sapiens
  CDR3 for beta chain variable domain of TCR clone 267861 (TRBV19, TRBJ2-1)
CASSSKGTRSYDEQFF

SEQ ID NO: 535723 - protein, 14 aa, Homo sapiens
  CDR3 for alpha chain variable domain of TCR clone 267862 (TRAV12-2, TRAJ45)
CAVYPGGGADGLTF

SEQ ID NO: 535724 - protein, 13 aa, Homo sapiens
  CDR3 for beta chain variable domain of TCR clone 267862 (TRBV7-7, TRBJ2-3)
CASSLSRADTQYF

SEQ ID NO: 535725 - protein, 11 aa, Homo sapiens
  CDR3 for alpha chain variable domain of TCR clone 267863 (TRAV39, TRAJ49)
CAVDISTQFYF

SEQ ID NO: 535726 - protein, 19 aa, Homo sapiens
  CDR3 for beta chain variable domain of TCR clone 267863 (TRBV25-1, TRBJ2-2)
CAILVYRVDRGRKTGELFF

SEQ ID NO: 535727 - protein, 14 aa, Homo sapiens
  CDR3 for alpha chain variable domain of TCR clone 267864 (TRAV12-2, TRAJ17)
CAVLFKAAGNKLTF

SEQ ID NO: 535728 - protein, 17 aa, Homo sapiens
  CDR3 for beta chain variable domain of TCR clone 267864 (TRBV20-1, TRBJ2-2)
CSASGSGQGGLPGELFF

SEQ ID NO: 535729 - protein, 12 aa, Homo sapiens
  CDR3 for alpha chain variable domain of TCR clone 267865 (TRAV8-3, TRAJ26)
CAGDNYGQNFVL

SEQ ID NO: 535730 - protein, 12 aa, Homo sapiens
  CDR3 for beta chain variable domain of TCR clone 267865 (TRBV12-4, TRBJ2-7)
CASSLGGYEQYF

SEQ ID NO: 535731 - protein, 16 aa, Homo sapiens
  CDR3 for alpha chain variable domain of TCR clone 267866 (TRAV30, TRAJ24)
CGTEIVDADSWGKSQF

SEQ ID NO: 535732 - protein, 14 aa, Homo sapiens
  CDR3 for beta chain variable domain of TCR clone 267866 (TRBV7-2, TRBJ2-7)
CARSPKTSFYEQYF

SEQ ID NO: 535733 - protein, 15 aa, Homo sapiens
  CDR3 for alpha chain variable domain of TCR clone 267867 (TRAV3, TRAJ13)
CAVRVYSGGYQKVTF

SEQ ID NO: 535734 - protein, 15 aa, Homo sapiens
  CDR3 for beta chain variable domain of TCR clone 267867 (TRBV5-7, TRBJ1-2)
YASSLGVAANYGYTF

SEQ ID NO: 535735 - protein, 12 aa, Homo sapiens
  CDR3 for alpha chain variable domain of TCR clone 267868 (TRAV3, TRAJ31)
CAVRDGNARLMF

SEQ ID NO: 535736 - protein, 15 aa, Homo sapiens
  CDR3 for beta chain variable domain of TCR clone 267868 (TRBV7-2, TRBJ2-1)
CASSSGLAGGYEQFF

SEQ ID NO: 535737 - protein, 15 aa, Homo sapiens
  CDR3 for alpha chain variable domain of TCR clone 267869 (TRAV13-1, TRAJ44)
CAASRGGGTASKLTF

SEQ ID NO: 535738 - protein, 16 aa, Homo sapiens
  CDR3 for beta chain variable domain of TCR clone 267869 (TRBV11-2, TRBJ2-5)
CASSGQGYSPQETQYF

SEQ ID NO: 535739 - protein, 12 aa, Homo sapiens
  CDR3 for alpha chain variable domain of TCR clone 267870 (TRAV1-2, TRAJ33)
CAALDSNYQLIW

SEQ ID NO: 535740 - protein, 13 aa, Homo sapiens
  CDR3 for beta chain variable domain of TCR clone 267870 (TRBV5-5, TRBJ1-2)
CASSFWRGEDYTF

SEQ ID NO: 535741 - protein, 13 aa, Homo sapiens
  CDR3 for alpha chain variable domain of TCR clone 267871 (TRAV21, TRAJ27)
CAARPGNAGKSTF

SEQ ID NO: 535742 - protein, 18 aa, Homo sapiens
  CDR3 for beta chain variable domain of TCR clone 267871 (TRBV5-4, TRBJ2-3)
CASSPTAGFLPSTDTQYF

SEQ ID NO: 535743 - protein, 13 aa, Homo sapiens
  CDR3 for alpha chain variable domain of TCR clone 267872 (TRAV3, TRAJ21)
CAVREPDFNKFYF

SEQ ID NO: 535744 - protein, 12 aa, Homo sapiens
  CDR3 for beta chain variable domain of TCR clone 267872 (TRBV13, TRBJ2-1)
CQHLGGRGEQFF

SEQ ID NO: 535745 - protein, 15 aa, Homo sapiens
  CDR3 for alpha chain variable domain of TCR clone 267873 (TRAV12-2, TRAJ9)
CAVNTERTGGFKTIF

SEQ ID NO: 535746 - protein, 14 aa, Homo sapiens
  CDR3 for beta chain variable domain of TCR clone 267873 (TRBV4-1, TRBJ1-4)
CASSQERKNEKLFF

SEQ ID NO: 535747 - protein, 14 aa, Homo sapiens
  CDR3 for alpha chain variable domain of TCR clone 267874 (TRAV20, TRAJ17)
CAVQARAAGNKLTF

SEQ ID NO: 535748 - protein, 16 aa, Homo sapiens
  CDR3 for beta chain variable domain of TCR clone 267874 (TRBV19, TRBJ2-3)
CASSPEWDRGTDTQYF

SEQ ID NO: 535749 - protein, 12 aa, Homo sapiens
  CDR3 for alpha chain variable domain of TCR clone 267875 (TRAV16, TRAJ56)
FAPTGANSKLTF

SEQ ID NO: 535750 - protein, 17 aa, Homo sapiens
  CDR3 for beta chain variable domain of TCR clone 267875 (TRBV27, TRBJ2-6)
CASSLTRFASGANVLTF

SEQ ID NO: 535751 - protein, 11 aa, Homo sapiens
  CDR3 for alpha chain variable domain of TCR clone 267876 (TRAV3, TRAJ21)
CAVGNFNKFYF

SEQ ID NO: 535752 - protein, 16 aa, Homo sapiens
  CDR3 for beta chain variable domain of TCR clone 267876 (TRBV19, TRBJ2-1)
CASSKARPSSYNEQLF

SEQ ID NO: 535753 - protein, 12 aa, Homo sapiens
  CDR3 for alpha chain variable domain of TCR clone 267877 (TRAV17, TRAJ12)
CATLRSSYKLIF

SEQ ID NO: 535754 - protein, 16 aa, Homo sapiens
  CDR3 for beta chain variable domain of TCR clone 267877 (TRBV28, TRBJ2-7)
WASSLFFETGGPEQYF

SEQ ID NO: 535755 - protein, 15 aa, Homo sapiens
  CDR3 for alpha chain variable domain of TCR clone 267878 (TRAV34, TRAJ36)
CGAPSRLGGANNLFF

SEQ ID NO: 535756 - protein, 17 aa, Homo sapiens
  CDR3 for beta chain variable domain of TCR clone 267878 (TRBV11-2, TRBJ2-1)
CASSLYPPGVEYNEQFF

SEQ ID NO: 535757 - protein, 15 aa, Homo sapiens
  CDR3 for alpha chain variable domain of TCR clone 267879 (TRAV17, TRAJ57)
CATGPSQGGSEKLVF

SEQ ID NO: 535758 - protein, 15 aa, Homo sapiens
  CDR3 for beta chain variable domain of TCR clone 267879 (TRBV28, TRBJ2-5)
CASSPPWSYQETQYF

SEQ ID NO: 535759 - protein, 17 aa, Homo sapiens
  CDR3 for alpha chain variable domain of TCR clone 267880 (TRAV26-1, TRAJ29)
CIVRVEGSGNTPLVLER

SEQ ID NO: 535760 - protein, 14 aa, Homo sapiens
  CDR3 for beta chain variable domain of TCR clone 267880 (TRBV18, TRBJ2-5)
CASSPGVSQETQYF

SEQ ID NO: 535761 - protein, 14 aa, Homo sapiens
  CDR3 for alpha chain variable domain of TCR clone 267881 (TRAV3, TRAJ33)
CAVRDMDSNYQVIW

SEQ ID NO: 535762 - protein, 19 aa, Homo sapiens
  CDR3 for beta chain variable domain of TCR clone 267881 (TRBV7-3, TRBJ1-2)
CASSFPQGNDGELWLHLRF

SEQ ID NO: 535763 - protein, 23 aa, Homo sapiens
  CDR3 for alpha chain variable domain of TCR clone 267882 (TRAV1-1, TRAJ29)
LLQELQMKDSASYFLGGNTPLVF

SEQ ID NO: 535764 - protein, 13 aa, Homo sapiens
  CDR3 for beta chain variable domain of TCR clone 267882 (TRBV25-1, TRBJ2-7)
CASSEHGDYEQYF

SEQ ID NO: 535765 - protein, 18 aa, Homo sapiens
  CDR3 for alpha chain variable domain of TCR clone 267883 (TRAV8-3, TRAJ13)
CAVGAIPLGVTRKLPLEL

SEQ ID NO: 535766 - protein, 15 aa, Homo sapiens
  CDR3 for beta chain variable domain of TCR clone 267883 (TRBV19, TRBJ1-5)
CASSIVWADNQPQHF

SEQ ID NO: 535767 - protein, 14 aa, Homo sapiens
  CDR3 for alpha chain variable domain of TCR clone 267884 (TRAV17, TRAJ35)
CATDRPGFGNVLHC

SEQ ID NO: 535768 - protein, 19 aa, Homo sapiens
  CDR3 for beta chain variable domain of TCR clone 267884 (TRBV11-3, TRBJ2-2)
WASSTRPGAKTTNTGELFF

SEQ ID NO: 535769 - protein, 15 aa, Homo sapiens
  CDR3 for alpha chain variable domain of TCR clone 267885 (TRAV2, TRAJ37)
CAVEDGSSNTGKLIF

SEQ ID NO: 535770 - protein, 13 aa, Homo sapiens
  CDR3 for beta chain variable domain of TCR clone 267885 (TRBV20-1, TRBJ1-6)
CSTFREGNSPLQF

SEQ ID NO: 535771 - protein, 16 aa, Homo sapiens
  CDR3 for alpha chain variable domain of TCR clone 267886 (TRAV8-6, TRAJ37)
CAASGLGSSNTGKLIF

SEQ ID NO: 535772 - protein, 15 aa, Homo sapiens
  CDR3 for beta chain variable domain of TCR clone 267886 (TRBV20-1, TRBJ1-5)
CSARSGPSMNQPQHL

SEQ ID NO: 535773 - protein, 15 aa, Homo sapiens
  CDR3 for alpha chain variable domain of TCR clone 267887 (TRAV3, TRAJ47)
CAVRDIGEYGNKLVF

SEQ ID NO: 535774 - protein, 15 aa, Homo sapiens
  CDR3 for beta chain variable domain of TCR clone 267887 (TRBV9, TRBJ2-1)
CASSLAGSAYNEQFF

SEQ ID NO: 535775 - protein, 17 aa, Homo sapiens
  CDR3 for alpha chain variable domain of TCR clone 267888 (TRAV3, TRAJ6)
CAVRDGSRAGGSYIPTF

SEQ ID NO: 535776 - protein, 14 aa, Homo sapiens
  CDR3 for beta chain variable domain of TCR clone 267888 (TRBV7-2, TRBJ2-7)
CASSPKTSFYEQFF

SEQ ID NO: 535777 - protein, 14 aa, Homo sapiens
  CDR3 for alpha chain variable domain of TCR clone 267889 (TRAV16, TRAJ29)
CSLTRNSGNTPLVF

SEQ ID NO: 535778 - protein, 12 aa, Homo sapiens
  CDR3 for beta chain variable domain of TCR clone 267889 (TRBV2, TRBJ2-1)
CAKREGYNEQSF

SEQ ID NO: 535779 - protein, 13 aa, Homo sapiens
  CDR3 for alpha chain variable domain of TCR clone 267890 (TRAV12-1, TRAJ26)
CVVRRNYGQNFVF

SEQ ID NO: 535780 - protein, 14 aa, Homo sapiens
  CDR3 for beta chain variable domain of TCR clone 267890 (TRBV6-3, TRBJ1-1)
CASRYTVESTEAFF

SEQ ID NO: 535781 - protein, 11 aa, Homo sapiens
  CDR3 for alpha chain variable domain of TCR clone 267891 (TRAV17, TRAJ49)
CATDAGNQFYF

SEQ ID NO: 535782 - protein, 16 aa, Homo sapiens
  CDR3 for beta chain variable domain of TCR clone 267891 (TRBV12-5, TRBJ2-5)
CASGPRTSGNQETQYF

SEQ ID NO: 535783 - protein, 18 aa, Homo sapiens
  CDR3 for alpha chain variable domain of TCR clone 267892 (TRAV21, TRAJ52)
CAVRPSPAGGTSYGKLTF

SEQ ID NO: 535784 - protein, 17 aa, Homo sapiens
  CDR3 for beta chain variable domain of TCR clone 267892 (TRBV4-1, TRBJ1-4)
CASSQERPRGVEEKLFF

SEQ ID NO: 535785 - protein, 12 aa, Homo sapiens
  CDR3 for alpha chain variable domain of TCR clone 267893 (TRAV13-1, TRAJ29)
CAARSRKHTSCL

SEQ ID NO: 535786 - protein, 14 aa, Homo sapiens
  CDR3 for beta chain variable domain of TCR clone 267893 (TRBV7-8, TRBJ2-3)
CASSFKSSTDTQYF

SEQ ID NO: 535787 - protein, 14 aa, Homo sapiens
  CDR3 for alpha chain variable domain of TCR clone 267894 (TRAV30, TRAJ33)
CGTVAPRSNYQLIC

SEQ ID NO: 535788 - protein, 14 aa, Homo sapiens
  CDR3 for beta chain variable domain of TCR clone 267894 (TRBV19, TRBJ2-1)
CASKDPSSYNEQFF

SEQ ID NO: 535789 - protein, 19 aa, Homo sapiens
  CDR3 for alpha chain variable domain of TCR clone 267895 (TRAV3, TRAJ37)
CAVRDIVGGYPSNTGKLIF

SEQ ID NO: 535790 - protein, 14 aa, Homo sapiens
  CDR3 for beta chain variable domain of TCR clone 267895 (TRBV7-8, TRBJ2-3)
CASSLEAGTDSQYF

SEQ ID NO: 535791 - protein, 13 aa, Homo sapiens
  CDR3 for alpha chain variable domain of TCR clone 267896 (TRAV12-2, TRAJ23)
CAVMGNQGGKLIF

SEQ ID NO: 535792 - protein, 13 aa, Homo sapiens
  CDR3 for beta chain variable domain of TCR clone 267896 (TRBV20-1, TRBJ2-1)
CIASTGTSNEQFF

SEQ ID NO: 535793 - protein, 14 aa, Homo sapiens
  CDR3 for alpha chain variable domain of TCR clone 267897 (TRAV20, TRAJ17)
CAVQARAAGNKLAF

SEQ ID NO: 535794 - protein, 13 aa, Homo sapiens
  CDR3 for beta chain variable domain of TCR clone 267897 (TRBV19, TRBJ1-2)
CASSPTLNYGYTF

SEQ ID NO: 535795 - protein, 13 aa, Homo sapiens
  CDR3 for alpha chain variable domain of TCR clone 267898 (TRAV8-6, TRAJ49)
CAVITNPGNQFYF

SEQ ID NO: 535796 - protein, 14 aa, Homo sapiens
  CDR3 for beta chain variable domain of TCR clone 267898 (TRBV16, TRBJ2-7)
CASSQWGRLYEQYF

SEQ ID NO: 535797 - protein, 11 aa, Homo sapiens
  CDR3 for alpha chain variable domain of TCR clone 267899 (TRAV2, TRAJ13)
CASGGYQKVTF

SEQ ID NO: 535798 - protein, 14 aa, Homo sapiens
  CDR3 for beta chain variable domain of TCR clone 267899 (TRBV28, TRBJ1-1)
CASSFPRKNTEAFF

SEQ ID NO: 535799 - protein, 13 aa, Homo sapiens
  CDR3 for alpha chain variable domain of TCR clone 267900 (TRAV1-2, TRAJ31)
CAVRGYNNARLRF

SEQ ID NO: 535800 - protein, 14 aa, Homo sapiens
  CDR3 for beta chain variable domain of TCR clone 267900 (TRBV12-4, TRBJ1-3)
CASTLTGAGNTIYF

SEQ ID NO: 535801 - protein, 14 aa, Homo sapiens
  CDR3 for alpha chain variable domain of TCR clone 267901 (TRAV12-3, TRAJ10)
SHLPLTGGGNKLTF

SEQ ID NO: 535802 - protein, 14 aa, Homo sapiens
  CDR3 for beta chain variable domain of TCR clone 267901 (TRBV7-6, TRBJ2-3)
CASNSGGDANTQYF

SEQ ID NO: 535803 - protein, 14 aa, Homo sapiens
  CDR3 for alpha chain variable domain of TCR clone 267902 (TRAV36/DV7, TRAJ57)
CAVGFPGGSEQLVF

SEQ ID NO: 535804 - protein, 12 aa, Homo sapiens
  CDR3 for beta chain variable domain of TCR clone 267902 (TRBV19, TRBJ2-7)
CASTSGTYEQYF

SEQ ID NO: 535805 - protein, 13 aa, Homo sapiens
  CDR3 for alpha chain variable domain of TCR clone 267903 (TRAV17, TRAJ9)
CATDYTGGFKTIF

SEQ ID NO: 535806 - protein, 14 aa, Homo sapiens
  CDR3 for beta chain variable domain of TCR clone 267903 (TRBV19, TRBJ2-5)
CGSSMTGQQETQYF

SEQ ID NO: 535807 - protein, 13 aa, Homo sapiens
  CDR3 for alpha chain variable domain of TCR clone 267904 (TRAV17, TRAJ30)
TSVSRRGEMTIIF

SEQ ID NO: 535808 - protein, 14 aa, Homo sapiens
  CDR3 for beta chain variable domain of TCR clone 267904 (TRBV7-7, TRBJ2-2)
CASSRDRSTGELFF

SEQ ID NO: 535809 - protein, 11 aa, Homo sapiens
  CDR3 for alpha chain variable domain of TCR clone 267905 (TRAV2, TRAJ13)
CASGGYQKVTS

SEQ ID NO: 535810 - protein, 16 aa, Homo sapiens
  CDR3 for beta chain variable domain of TCR clone 267905 (TRBV2, TRBJ2-1)
CASSVRGSLSYNEQFF

SEQ ID NO: 535811 - protein, 14 aa, Homo sapiens
  CDR3 for alpha chain variable domain of TCR clone 267906 (TRAV21, TRAJ15)
CAVSLNQAGTAMIF

SEQ ID NO: 535812 - protein, 11 aa, Homo sapiens
  CDR3 for beta chain variable domain of TCR clone 267906 (TRBV20-1, TRBJ2-7)
CSARTSYEQYF

SEQ ID NO: 535813 - protein, 14 aa, Homo sapiens
  CDR3 for alpha chain variable domain of TCR clone 267907 (TRAV38-1, TRAJ45)
CAYYSGGGADGLTF

SEQ ID NO: 535814 - protein, 15 aa, Homo sapiens
  CDR3 for beta chain variable domain of TCR clone 267907 (TRBV11-2, TRBJ2-1)
CASSKNRGLIYEQSF

SEQ ID NO: 535815 - protein, 13 aa, Homo sapiens
  CDR3 for alpha chain variable domain of TCR clone 267908 (TRAV13-1, TRAJ43)
CAASLSNNNDMRF

SEQ ID NO: 535816 - protein, 14 aa, Homo sapiens
  CDR3 for beta chain variable domain of TCR clone 267908 (TRBV7-2, TRBJ2-7)
CASSPKTSFYEQYF

SEQ ID NO: 535817 - protein, 16 aa, Homo sapiens
  CDR3 for alpha chain variable domain of TCR clone 267909 (TRAV1-2, TRAJ10)
CAGRGVPTGGGNKLTF

SEQ ID NO: 535818 - protein, 12 aa, Homo sapiens
  CDR3 for beta chain variable domain of TCR clone 267909 (TRBV11-2, TRBJ2-2)
CASSLGGGELFF

SEQ ID NO: 535819 - protein, 16 aa, Homo sapiens
  CDR3 for alpha chain variable domain of TCR clone 267910 (TRAV17, TRAJ36)
CATVSLNWGKQPLLWD

SEQ ID NO: 535820 - protein, 13 aa, Homo sapiens
  CDR3 for beta chain variable domain of TCR clone 267910 (TRBV4-1, TRBJ1-1)
CASSQVGTGEAFL

SEQ ID NO: 535821 - protein, 13 aa, Homo sapiens
  CDR3 for alpha chain variable domain of TCR clone 267911 (TRAV29/DV5, TRAJ31)
CAASRNNNARLMF

SEQ ID NO: 535822 - protein, 17 aa, Homo sapiens
  CDR3 for beta chain variable domain of TCR clone 267911 (TRBV7-3, TRBJ2-2)
CASSLSGTSGGTGELFF

SEQ ID NO: 535823 - protein, 14 aa, Homo sapiens
  CDR3 for alpha chain variable domain of TCR clone 267912 (TRAV26-1, TRAJ38)
CIADNAGNNRRLIW

SEQ ID NO: 535824 - protein, 15 aa, Homo sapiens
  CDR3 for beta chain variable domain of TCR clone 267912 (TRBV9, TRBJ2-1)
CASSLAGSSYNEQFF

SEQ ID NO: 535825 - protein, 16 aa, Homo sapiens
  CDR3 for alpha chain variable domain of TCR clone 267913 (TRAV8-2, TRAJ48)
CVVSDVSNFGNEKLTF

SEQ ID NO: 535826 - protein, 14 aa, Homo sapiens
  CDR3 for beta chain variable domain of TCR clone 267913 (TRBV11-2, TRBJ2-5)
CASSRTGGIETQYF

SEQ ID NO: 535827 - protein, 13 aa, Homo sapiens
  CDR3 for alpha chain variable domain of TCR clone 267914 (TRAV8-3, TRAJ43)
CAVGPDNNNDMRF

SEQ ID NO: 535828 - protein, 14 aa, Homo sapiens
  CDR3 for beta chain variable domain of TCR clone 267914 (TRBV7-2, TRBJ1-6)
CASSLSSSPSTLVM

SEQ ID NO: 535829 - protein, 15 aa, Homo sapiens
  CDR3 for alpha chain variable domain of TCR clone 267915 (TRAV26-1, TRAJ40)
CIVRAVPSGPYKYIF

SEQ ID NO: 535830 - protein, 14 aa, Homo sapiens
  CDR3 for beta chain variable domain of TCR clone 267915 (TRBV19, TRBJ2-1)
CASKDPGLANEQFF

SEQ ID NO: 535831 - protein, 12 aa, Homo sapiens
  CDR3 for alpha chain variable domain of TCR clone 267916 (TRAV12-2, TRAJ7)
CAVMRGNNILAF

SEQ ID NO: 535832 - protein, 12 aa, Homo sapiens
  CDR3 for beta chain variable domain of TCR clone 267916 (TRBV7-8, TRBJ2-7)
CASSLGDREQYF

SEQ ID NO: 535833 - protein, 13 aa, Homo sapiens
  CDR3 for alpha chain variable domain of TCR clone 267917 (TRAV23/DV6, TRAJ22)
CAPYSGSARQLTF

SEQ ID NO: 535834 - protein, 12 aa, Homo sapiens
  CDR3 for beta chain variable domain of TCR clone 267917 (TRBV12-4, TRBJ2-7)
CASSLGGYEQYF

SEQ ID NO: 535835 - protein, 17 aa, Homo sapiens
  CDR3 for alpha chain variable domain of TCR clone 267918 (TRAV38-2/DV8, TRAJ23)
CALPRKLIFGQGTELSV

SEQ ID NO: 535836 - protein, 15 aa, Homo sapiens
  CDR3 for beta chain variable domain of TCR clone 267918 (TRBV27, TRBJ2-1)
CASSNGGGSSNEQFF

SEQ ID NO: 535837 - protein, 15 aa, Homo sapiens
  CDR3 for alpha chain variable domain of TCR clone 267919 (TRAV13-2, TRAJ10)
CAENKIGGGGNKLTF

SEQ ID NO: 535838 - protein, 18 aa, Homo sapiens
  CDR3 for beta chain variable domain of TCR clone 267919 (TRBV11-2, TRBJ2-3)
CASSLGGASRGAPNTQYF

SEQ ID NO: 535839 - protein, 14 aa, Homo sapiens
  CDR3 for alpha chain variable domain of TCR clone 267920 (TRAV2, TRAJ9)
CAVEDRSGGFNTIF

SEQ ID NO: 535840 - protein, 17 aa, Homo sapiens
  CDR3 for beta chain variable domain of TCR clone 267920 (TRBV7-8, TRBJ2-6)
CASSAGTGGAGANVLTF

SEQ ID NO: 535841 - protein, 14 aa, Homo sapiens
  CDR3 for alpha chain variable domain of TCR clone 267921 (TRAV12-2, TRAJ6)
CASQGGGGSYIPTF

SEQ ID NO: 535842 - protein, 13 aa, Homo sapiens
  CDR3 for beta chain variable domain of TCR clone 267921 (TRBV2, TRBJ1-1)
CASSEGGNTEAFF

SEQ ID NO: 535843 - protein, 13 aa, Homo sapiens
  CDR3 for alpha chain variable domain of TCR clone 267922 (TRAV36/DV7, TRAJ33)
CAVDMDSNYQLIW

SEQ ID NO: 535844 - protein, 15 aa, Homo sapiens
  CDR3 for beta chain variable domain of TCR clone 267922 (TRBV15, TRBJ2-3)
CHQTIRRGAPDTQYF

SEQ ID NO: 535845 - protein, 14 aa, Homo sapiens
  CDR3 for alpha chain variable domain of TCR clone 267923 (TRAV21, TRAJ35)
CAVMPIGFGKLLHC

SEQ ID NO: 535846 - protein, 12 aa, Homo sapiens
  CDR3 for beta chain variable domain of TCR clone 267923 (TRBV7-9, TRBJ2-7)
CASSIKREEQYF

SEQ ID NO: 535847 - protein, 13 aa, Homo sapiens
  CDR3 for alpha chain variable domain of TCR clone 267924 (TRAV26-1, TRAJ29)
CIVRSSGNTPLVF

SEQ ID NO: 535848 - protein, 16 aa, Homo sapiens
  CDR3 for beta chain variable domain of TCR clone 267924 (TRBV11-2, TRBJ2-7)
CASSLAPTGVNYEQYF

SEQ ID NO: 535849 - protein, 13 aa, Homo sapiens
  CDR3 for alpha chain variable domain of TCR clone 267925 (TRAV17, TRAJ29)
CATGPSGNTPLVF

SEQ ID NO: 535850 - protein, 14 aa, Homo sapiens
  CDR3 for beta chain variable domain of TCR clone 267925 (TRBV2, TRBJ1-6)
CASEVSSYNSPLYF

SEQ ID NO: 535851 - protein, 12 aa, Homo sapiens
  CDR3 for alpha chain variable domain of TCR clone 267926 (TRAV21, TRAJ30)
CAVMNRDDKIIF

SEQ ID NO: 535852 - protein, 17 aa, Homo sapiens
  CDR3 for beta chain variable domain of TCR clone 267926 (TRBV5-1, TRBJ1-1)
CASRPRRTGGVNTEAFF

SEQ ID NO: 535853 - protein, 14 aa, Homo sapiens
  CDR3 for alpha chain variable domain of TCR clone 267927 (TRAV12-2, TRAJ53)
CAVKGGGSNYKLTF

SEQ ID NO: 535854 - protein, 15 aa, Homo sapiens
  CDR3 for beta chain variable domain of TCR clone 267927 (TRBV5-1, TRBJ2-1)
CASSPPRAPYNEQFF

SEQ ID NO: 535855 - protein, 13 aa, Homo sapiens
  CDR3 for alpha chain variable domain of TCR clone 267928 (TRAV13-1, TRAJ39)
CSKYSNAGNMLTF

SEQ ID NO: 535856 - protein, 18 aa, Homo sapiens
  CDR3 for beta chain variable domain of TCR clone 267928 (TRBV10-2, TRBJ2-2)
CISAPAVLRQADAGELFF

SEQ ID NO: 535857 - protein, 14 aa, Homo sapiens
  CDR3 for alpha chain variable domain of TCR clone 267929 (TRAV38-2/DV8, TRAJ30)
CAYRSADREDKIIF

SEQ ID NO: 535858 - protein, 16 aa, Homo sapiens
  CDR3 for beta chain variable domain of TCR clone 267929 (TRBV15, TRBJ1-3)
CATSSPIGFSGNTIYF

SEQ ID NO: 535859 - protein, 14 aa, Homo sapiens
  CDR3 for alpha chain variable domain of TCR clone 267930 (TRAV12-1, TRAJ17)
CVVNYKAAGNKLTF

SEQ ID NO: 535860 - protein, 15 aa, Homo sapiens
  CDR3 for beta chain variable domain of TCR clone 267930 (TRBV18, TRBJ2-7)
CASSPTFMDSYERYF

SEQ ID NO: 535861 - protein, 15 aa, Homo sapiens
  CDR3 for alpha chain variable domain of TCR clone 267931 (TRAV13-1, TRAJ42)
CAASIAGGRQGNLIF

SEQ ID NO: 535862 - protein, 15 aa, Homo sapiens
  CDR3 for beta chain variable domain of TCR clone 267931 (TRBV19, TRBJ2-1)
CASSIVRGEGSEQFF

SEQ ID NO: 535863 - protein, 15 aa, Homo sapiens
  CDR3 for alpha chain variable domain of TCR clone 267932 (TRAV12-3, TRAJ6)
CAMSATSGGSYIPPF

SEQ ID NO: 535864 - protein, 11 aa, Homo sapiens
  CDR3 for beta chain variable domain of TCR clone 267932 (TRBV6-4, TRBJ2-1)
CASSDSYAQFF

SEQ ID NO: 535865 - protein, 13 aa, Homo sapiens
  CDR3 for alpha chain variable domain of TCR clone 267933 (TRAV12-2, TRAJ9)
CAGGNTGGFKTIF

SEQ ID NO: 535866 - protein, 16 aa, Homo sapiens
  CDR3 for beta chain variable domain of TCR clone 267933 (TRBV4-3, TRBJ2-1)
RSSQGRGGGLYNEQFF

SEQ ID NO: 535867 - protein, 14 aa, Homo sapiens
  CDR3 for alpha chain variable domain of TCR clone 267934 (TRAV13-1, TRAJ10)
CAAKEPGGGNKLTF

SEQ ID NO: 535868 - protein, 14 aa, Homo sapiens
  CDR3 for beta chain variable domain of TCR clone 267934 (TRBV19, TRBJ2-1)
CASSLAGTYNEQFF

SEQ ID NO: 535869 - protein, 12 aa, Homo sapiens
  CDR3 for alpha chain variable domain of TCR clone 267935 (TRAV12-3, TRAJ17)
CAMTITGNKLTF

SEQ ID NO: 535870 - protein, 15 aa, Homo sapiens
  CDR3 for beta chain variable domain of TCR clone 267935 (TRBV11-3, TRBJ2-3)
CASLKDGREGDTQYF

SEQ ID NO: 535871 - protein, 17 aa, Homo sapiens
  CDR3 for alpha chain variable domain of TCR clone 267936 (TRAV12-1, TRAJ42)
CVVMRMNYGGSQGNLIF

SEQ ID NO: 535872 - protein, 14 aa, Homo sapiens
  CDR3 for beta chain variable domain of TCR clone 267936 (TRBV7-2, TRBJ1-1)
CASSFLTGTTEAFF

SEQ ID NO: 535873 - protein, 11 aa, Homo sapiens
  CDR3 for alpha chain variable domain of TCR clone 267937 (TRAV1-1, TRAJ23)
CAVRQVGKLIF

SEQ ID NO: 535874 - protein, 14 aa, Homo sapiens
  CDR3 for beta chain variable domain of TCR clone 267937 (TRBV19, TRBJ2-1)
CASPTCVLSGEQFF

SEQ ID NO: 535875 - protein, 11 aa, Homo sapiens
  CDR3 for alpha chain variable domain of TCR clone 267938 (TRAV1-2, TRAJ20)
CAVANDYKLSF

SEQ ID NO: 535876 - protein, 12 aa, Homo sapiens
  CDR3 for beta chain variable domain of TCR clone 267938 (TRBV12-4, TRBJ1-3)
CASSFSGNTIYF

SEQ ID NO: 535877 - protein, 14 aa, Homo sapiens
  CDR3 for alpha chain variable domain of TCR clone 267939 (TRAV2, TRAJ3)
CAVRPYSSASKIIF

SEQ ID NO: 535878 - protein, 14 aa, Homo sapiens
  CDR3 for beta chain variable domain of TCR clone 267939 (TRBV7-8, TRBJ1-2)
CASSPNSLSYGYTF

SEQ ID NO: 535879 - protein, 11 aa, Homo sapiens
  CDR3 for alpha chain variable domain of TCR clone 267940 (TRAV21, TRAJ11)
CAVNEYSTLNF

SEQ ID NO: 535880 - protein, 11 aa, Homo sapiens
  CDR3 for beta chain variable domain of TCR clone 267940 (TRBV19, TRBJ1-1)
CASSIGSEAFF

SEQ ID NO: 535881 - protein, 13 aa, Homo sapiens
  CDR3 for alpha chain variable domain of TCR clone 267941 (TRAV21, TRAJ6)
CAGGSGGSYIPTF

SEQ ID NO: 535882 - protein, 13 aa, Homo sapiens
  CDR3 for beta chain variable domain of TCR clone 267941 (TRBV10-3, TRBJ2-7)
CAISEKGGYEQYF

SEQ ID NO: 535883 - protein, 15 aa, Homo sapiens
  CDR3 for alpha chain variable domain of TCR clone 267942 (TRAV13-1, TRAJ17)
CAASVERAAGNKLTF

SEQ ID NO: 535884 - protein, 17 aa, Homo sapiens
  CDR3 for beta chain variable domain of TCR clone 267942 (TRBV11-2, TRBJ2-1)
CASSLYPPGVEYNEQFF

SEQ ID NO: 535885 - protein, 11 aa, Homo sapiens
  CDR3 for alpha chain variable domain of TCR clone 267943 (TRAV2, TRAJ13)
CDSGGYQKVTF

SEQ ID NO: 535886 - protein, 13 aa, Homo sapiens
  CDR3 for beta chain variable domain of TCR clone 267943 (TRBV24-1, TRBJ2-3)
CATSTGGTDTQYF

SEQ ID NO: 535887 - protein, 13 aa, Homo sapiens
  CDR3 for alpha chain variable domain of TCR clone 267944 (TRAV12-1, TRAJ37)
CVVNAGNTGKLIF

SEQ ID NO: 535888 - protein, 13 aa, Homo sapiens
  CDR3 for beta chain variable domain of TCR clone 267944 (TRBV12-4, TRBJ1-2)
CASSLRQGKGYTF

SEQ ID NO: 535889 - protein, 16 aa, Homo sapiens
  CDR3 for alpha chain variable domain of TCR clone 267945 (TRAV26-1, TRAJ46)
CIVRVGREKQRRQADF

SEQ ID NO: 535890 - protein, 16 aa, Homo sapiens
  CDR3 for beta chain variable domain of TCR clone 267945 (TRBV27, TRBJ2-2)
CASSFRGLVRTGELFF

SEQ ID NO: 535891 - protein, 12 aa, Homo sapiens
  CDR3 for alpha chain variable domain of TCR clone 267946 (TRAV36/DV7, TRAJ54)
CAVVRGAQKLVF

SEQ ID NO: 535892 - protein, 16 aa, Homo sapiens
  CDR3 for beta chain variable domain of TCR clone 267946 (TRBV7-3, TRBJ1-1)
CASSLKGGTLKLSLDK

SEQ ID NO: 535893 - protein, 14 aa, Homo sapiens
  CDR3 for alpha chain variable domain of TCR clone 267947 (TRAV8-2, TRAJ4)
CVVSPSGRYNKLIF

SEQ ID NO: 535894 - protein, 14 aa, Homo sapiens
  CDR3 for beta chain variable domain of TCR clone 267947 (TRBV19, TRBJ2-5)
CASSSSGIQETQYF

SEQ ID NO: 535895 - protein, 12 aa, Homo sapiens
  CDR3 for alpha chain variable domain of TCR clone 267948 (TRAV12-3, TRAJ17)
CAMTLTGNKLTF

SEQ ID NO: 535896 - protein, 15 aa, Homo sapiens
  CDR3 for beta chain variable domain of TCR clone 267948 (TRBV20-1, TRBJ2-7)
CSARDRISGMDERYF

SEQ ID NO: 535897 - protein, 14 aa, Homo sapiens
  CDR3 for alpha chain variable domain of TCR clone 267949 (TRAV1-2, TRAJ24)
CAVLTTDSWGKFQF

SEQ ID NO: 535898 - protein, 13 aa, Homo sapiens
  CDR3 for beta chain variable domain of TCR clone 267949 (TRBV6-5, TRBJ1-2)
CASSSYGTRGYTF

SEQ ID NO: 535899 - protein, 16 aa, Homo sapiens
  CDR3 for alpha chain variable domain of TCR clone 267950 (TRAV30, TRAJ24)
CGTEVVDADSWGKFQI

SEQ ID NO: 535900 - protein, 14 aa, Homo sapiens
  CDR3 for beta chain variable domain of TCR clone 267950 (TRBV12-5, TRBJ2-5)
CASGSRTHQETQYF

SEQ ID NO: 535901 - protein, 15 aa, Homo sapiens
  CDR3 for alpha chain variable domain of TCR clone 267951 (TRAV8-1, TRAJ6)
CAVNANPGGSYIPTY

SEQ ID NO: 535902 - protein, 12 aa, Homo sapiens
  CDR3 for beta chain variable domain of TCR clone 267951 (TRBV5-7, TRBJ2-7)
CASSVQGGEQYF

SEQ ID NO: 535903 - protein, 15 aa, Homo sapiens
  CDR3 for alpha chain variable domain of TCR clone 267952 (TRAV27, TRAJ38)
CAARRNAGNNGKRIG

SEQ ID NO: 535904 - protein, 13 aa, Homo sapiens
  CDR3 for beta chain variable domain of TCR clone 267952 (TRBV12-5, TRBJ2-3)
CASGDRQSDTQYF

SEQ ID NO: 535905 - protein, 12 aa, Homo sapiens
  CDR3 for alpha chain variable domain of TCR clone 267953 (TRAV1-2, TRAJ29)
CAVPSGNTPLVF

SEQ ID NO: 535906 - protein, 15 aa, Homo sapiens
  CDR3 for beta chain variable domain of TCR clone 267953 (TRBV7-3, TRBJ2-1)
CASSSRSSGRNEQFF

SEQ ID NO: 535907 - protein, 11 aa, Homo sapiens
  CDR3 for alpha chain variable domain of TCR clone 267954 (TRAV1-2, TRAJ20)
CAVANDYKLSF

SEQ ID NO: 535908 - protein, 14 aa, Homo sapiens
  CDR3 for beta chain variable domain of TCR clone 267954 (TRBV7-9, TRBJ1-1)
FASTPLQSYTEAFF

SEQ ID NO: 535909 - protein, 15 aa, Homo sapiens
  CDR3 for alpha chain variable domain of TCR clone 267955 (TRAV12-3, TRAJ42)
CAMSGHGGSQGNLIF

SEQ ID NO: 535910 - protein, 20 aa, Homo sapiens
  CDR3 for beta chain variable domain of TCR clone 267955 (TRBV28, TRBJ2-1)
CASTPIGRSPGLAGGNEQFF

SEQ ID NO: 535911 - protein, 12 aa, Homo sapiens
  CDR3 for alpha chain variable domain of TCR clone 267956 (TRAV2, TRAJ5)
CALDTGRRALTF

SEQ ID NO: 535912 - protein, 14 aa, Homo sapiens
  CDR3 for beta chain variable domain of TCR clone 267956 (TRBV7-9, TRBJ2-2)
RASSLVQDTGELFF

SEQ ID NO: 535913 - protein, 15 aa, Homo sapiens
  CDR3 for alpha chain variable domain of TCR clone 267957 (TRAV29/DV5, TRAJ29)
CAGSERSSGNTPLVF

SEQ ID NO: 535914 - protein, 17 aa, Homo sapiens
  CDR3 for beta chain variable domain of TCR clone 267957 (TRBV4-1, TRBJ1-4)
CASSQEGPRGVEEKLFF

SEQ ID NO: 535915 - protein, 16 aa, Homo sapiens
  CDR3 for alpha chain variable domain of TCR clone 267958 (TRAV3, TRAJ10)
FAVRDMRAGGGNKLTF

SEQ ID NO: 535916 - protein, 15 aa, Homo sapiens
  CDR3 for beta chain variable domain of TCR clone 267958 (TRBV11-2, TRBJ1-6)
CASTGFGTAVSPLHF

SEQ ID NO: 535917 - protein, 16 aa, Homo sapiens
  CDR3 for alpha chain variable domain of TCR clone 267959 (TRAV30, TRAJ24)
CGTEIVDAGSWGKFQF

SEQ ID NO: 535918 - protein, 14 aa, Homo sapiens
  CDR3 for beta chain variable domain of TCR clone 267959 (TRBV25-1, TRBJ1-1)
CASTHLGGNTEAFF

SEQ ID NO: 535919 - protein, 17 aa, Homo sapiens
  CDR3 for alpha chain variable domain of TCR clone 267960 (TRAV4, TRAJ13)
CLVGVQGSSGGYQKVTF

SEQ ID NO: 535920 - protein, 18 aa, Homo sapiens
  CDR3 for beta chain variable domain of TCR clone 267960 (TRBV15, TRBJ2-3)
CATRRDGARSWDTDTQYF

SEQ ID NO: 535921 - protein, 14 aa, Homo sapiens
  CDR3 for alpha chain variable domain of TCR clone 267961 (TRAV13-1, TRAJ35)
CAASKGGFGNVLHC

SEQ ID NO: 535922 - protein, 11 aa, Homo sapiens
  CDR3 for beta chain variable domain of TCR clone 267961 (TRBV7-2, TRBJ2-3)
CASSSSDTQYF

SEQ ID NO: 535923 - protein, 19 aa, Homo sapiens
  CDR3 for alpha chain variable domain of TCR clone 267962 (TRAV8-4, )
CAGGEDIQNPDPAVYQLRD

SEQ ID NO: 535924 - protein, 15 aa, Homo sapiens
  CDR3 for beta chain variable domain of TCR clone 267962 (TRBV2, TRBJ2-3)
CASSDFEKATDTQYF

SEQ ID NO: 535925 - protein, 11 aa, Homo sapiens
  CDR3 for alpha chain variable domain of TCR clone 267963 (TRAV2, TRAJ13)
CASGGYQKVTF

SEQ ID NO: 535926 - protein, 16 aa, Homo sapiens
  CDR3 for beta chain variable domain of TCR clone 267963 (TRBV19, TRBJ2-1)
CASGMGGGSSYNEQFF

SEQ ID NO: 535927 - protein, 14 aa, Homo sapiens
  CDR3 for alpha chain variable domain of TCR clone 267964 (TRAV13-1, TRAJ35)
CAASKEGFGNVLHC

SEQ ID NO: 535928 - protein, 16 aa, Homo sapiens
  CDR3 for beta chain variable domain of TCR clone 267964 (TRBV2, TRBJ1-4)
CASNLLQGATNEKLFF

SEQ ID NO: 535929 - protein, 12 aa, Homo sapiens
  CDR3 for alpha chain variable domain of TCR clone 267965 (TRAV2, TRAJ10)
CAATGGGNKLTF

SEQ ID NO: 535930 - protein, 14 aa, Homo sapiens
  CDR3 for beta chain variable domain of TCR clone 267965 (TRBV7-2, TRBJ2-2)
CASRGQGAAGELFF

SEQ ID NO: 535931 - protein, 13 aa, Homo sapiens
  CDR3 for alpha chain variable domain of TCR clone 267966 (TRAV13-1, TRAJ39)
CAASIWGGNMLTF

SEQ ID NO: 535932 - protein, 15 aa, Homo sapiens
  CDR3 for beta chain variable domain of TCR clone 267966 (TRBV7-9, TRBJ1-1)
CASSLLEQGGAEAFF

SEQ ID NO: 535933 - protein, 13 aa, Homo sapiens
  CDR3 for alpha chain variable domain of TCR clone 267967 (TRAV16, TRAJ58)
CALRWASGSRLTF

SEQ ID NO: 535934 - protein, 16 aa, Homo sapiens
  CDR3 for beta chain variable domain of TCR clone 267967 (TRBV18, TRBJ2-2)
CASSPPRTPNTGELFF

SEQ ID NO: 535935 - protein, 14 aa, Homo sapiens
  CDR3 for alpha chain variable domain of TCR clone 267968 (TRAV16, TRAJ31)
CALSGRNNNARLMF

SEQ ID NO: 535936 - protein, 14 aa, Homo sapiens
  CDR3 for beta chain variable domain of TCR clone 267968 (TRBV7-2, TRBJ1-2)
CASSQTGSTYGYTF

SEQ ID NO: 535937 - protein, 11 aa, Homo sapiens
  CDR3 for alpha chain variable domain of TCR clone 267969 (TRAV20, TRAJ31)
CAVQMRARLMF

SEQ ID NO: 535938 - protein, 16 aa, Homo sapiens
  CDR3 for beta chain variable domain of TCR clone 267969 (TRBV12-5, TRBJ2-5)
CASGPRTSGNQETQYF

SEQ ID NO: 535939 - protein, 14 aa, Homo sapiens
  CDR3 for alpha chain variable domain of TCR clone 267970 (TRAV1-2, TRAJ24)
CAVLTTDSWGNFQF

SEQ ID NO: 535940 - protein, 12 aa, Homo sapiens
  CDR3 for beta chain variable domain of TCR clone 267970 (TRBV12-4, TRBJ1-3)
CASSFSGNTIYF

SEQ ID NO: 535941 - protein, 13 aa, Homo sapiens
  CDR3 for alpha chain variable domain of TCR clone 267971 (TRAV1-2, TRAJ9)
CAALNTGGYKTIF

SEQ ID NO: 535942 - protein, 15 aa, Homo sapiens
  CDR3 for beta chain variable domain of TCR clone 267971 (TRBV19, TRBJ1-1)
CASASGQIQNTEAFF

SEQ ID NO: 535943 - protein, 18 aa, Homo sapiens
  CDR3 for alpha chain variable domain of TCR clone 267972 (TRAV21, TRAJ52)
CAVRPSPAGGTSYGKLTF

SEQ ID NO: 535944 - protein, 15 aa, Homo sapiens
  CDR3 for beta chain variable domain of TCR clone 267972 (TRBV20-1, TRBJ2-7)
CSARKGLAGSYEQYF

SEQ ID NO: 535945 - protein, 10 aa, Homo sapiens
  CDR3 for alpha chain variable domain of TCR clone 267973 (TRAV1-2, TRAJ20)
CACNDYKLSF

SEQ ID NO: 535946 - protein, 16 aa, Homo sapiens
  CDR3 for beta chain variable domain of TCR clone 267973 (TRBV20-1, TRBJ2-1)
CSARALKQGMNNEQFF

SEQ ID NO: 535947 - protein, 14 aa, Homo sapiens
  CDR3 for alpha chain variable domain of TCR clone 267974 (TRAV16, TRAJ37)
CALDFSGNTGKLIF

SEQ ID NO: 535948 - protein, 14 aa, Homo sapiens
  CDR3 for beta chain variable domain of TCR clone 267974 (TRBV7-6, TRBJ2-7)
CASSFRQGADEQYF

SEQ ID NO: 535949 - protein, 18 aa, Homo sapiens
  CDR3 for alpha chain variable domain of TCR clone 267975 (TRAV21, TRAJ52)
CAVRPSPTGGTSHGKLTF

SEQ ID NO: 535950 - protein, 17 aa, Homo sapiens
  CDR3 for beta chain variable domain of TCR clone 267975 (TRBV13, TRBJ2-3)
CASSLSRVAGGRNTQYF

SEQ ID NO: 535951 - protein, 17 aa, Homo sapiens
  CDR3 for alpha chain variable domain of TCR clone 267976 (TRAV3, TRAJ6)
CAVRDGPRAGGSYIPTF

SEQ ID NO: 535952 - protein, 13 aa, Homo sapiens
  CDR3 for beta chain variable domain of TCR clone 267976 (TRBV19, TRBJ1-2)
CASSVPGQDGYNF

SEQ ID NO: 535953 - protein, 14 aa, Homo sapiens
  CDR3 for alpha chain variable domain of TCR clone 267977 (TRAV23/DV6, TRAJ23)
CAAGPYNQGGKIIF

SEQ ID NO: 535954 - protein, 17 aa, Homo sapiens
  CDR3 for beta chain variable domain of TCR clone 267977 (TRBV4-2, TRBJ1-1)
CASSQVATGGMNTEAFF

SEQ ID NO: 535955 - protein, 11 aa, Homo sapiens
  CDR3 for alpha chain variable domain of TCR clone 267978 (TRAV12-3, TRAJ49)
CAMSSGNQFYF

SEQ ID NO: 535956 - protein, 17 aa, Homo sapiens
  CDR3 for beta chain variable domain of TCR clone 267978 (TRBV5-7, TRBJ2-7)
CASSLWRALAGSYEQYF

SEQ ID NO: 535957 - protein, 14 aa, Homo sapiens
  CDR3 for alpha chain variable domain of TCR clone 267979 (TRAV1-1, TRAJ27)
CAVIYNTTAGKSTF

SEQ ID NO: 535958 - protein, 13 aa, Homo sapiens
  CDR3 for beta chain variable domain of TCR clone 267979 (TRBV12-5, TRBJ1-2)
CASGVRTGNGYTF

SEQ ID NO: 535959 - protein, 10 aa, Homo sapiens
  CDR3 for alpha chain variable domain of TCR clone 267980 (TRAV1-2, TRAJ31)
CVSEDARLMF

SEQ ID NO: 535960 - protein, 14 aa, Homo sapiens
  CDR3 for beta chain variable domain of TCR clone 267980 (TRBV4-2, TRBJ2-1)
CASGLDRAYNEQFF

SEQ ID NO: 535961 - protein, 16 aa, Homo sapiens
  CDR3 for alpha chain variable domain of TCR clone 267981 (TRAV26-1, TRAJ45)
CIVEKDSGGGADGLTF

SEQ ID NO: 535962 - protein, 15 aa, Homo sapiens
  CDR3 for beta chain variable domain of TCR clone 267981 (TRBV15, TRBJ2-7)
CHQQRPIQQAYEQYF

SEQ ID NO: 535963 - protein, 17 aa, Homo sapiens
  CDR3 for alpha chain variable domain of TCR clone 267982 (TRAV3, TRAJ6)
CAVRDGPRAGGSYIPPL

SEQ ID NO: 535964 - protein, 14 aa, Homo sapiens
  CDR3 for beta chain variable domain of TCR clone 267982 (TRBV7-2, TRBJ2-7)
CASSPKTSFYEQYF

SEQ ID NO: 535965 - protein, 13 aa, Homo sapiens
  CDR3 for alpha chain variable domain of TCR clone 267983 (TRAV4, TRAJ42)
CLVGGGSKGNLIF

SEQ ID NO: 535966 - protein, 16 aa, Homo sapiens
  CDR3 for beta chain variable domain of TCR clone 267983 (TRBV5-1, TRBJ2-3)
CASSLQGRMGADTQYF

SEQ ID NO: 535967 - protein, 12 aa, Homo sapiens
  CDR3 for alpha chain variable domain of TCR clone 267984 (TRAV12-2, TRAJ52)
IGGGTSYGKLTF

SEQ ID NO: 535968 - protein, 11 aa, Homo sapiens
  CDR3 for beta chain variable domain of TCR clone 267984 (TRBV29-1, TRBJ2-5)
CSEDRTGTQYF

SEQ ID NO: 535969 - protein, 12 aa, Homo sapiens
  CDR3 for alpha chain variable domain of TCR clone 267985 (TRAV13-1, TRAJ42)
VNYGGSQGNLIF

SEQ ID NO: 535970 - protein, 15 aa, Homo sapiens
  CDR3 for beta chain variable domain of TCR clone 267985 (TRBV20-1, TRBJ2-1)
CSASSAGSSYNEQYF

SEQ ID NO: 535971 - protein, 16 aa, Homo sapiens
  CDR3 for alpha chain variable domain of TCR clone 267986 (TRAV26-1, TRAJ37)
CIVRGDGSGNTGKLIF

SEQ ID NO: 535972 - protein, 17 aa, Homo sapiens
  CDR3 for beta chain variable domain of TCR clone 267986 (TRBV4-1, TRBJ2-7)
CASSRDPLGVRGWEQYF

SEQ ID NO: 535973 - protein, 11 aa, Homo sapiens
  CDR3 for alpha chain variable domain of TCR clone 267987 (TRAV3, TRAJ21)
CSVGNFNKFYF

SEQ ID NO: 535974 - protein, 16 aa, Homo sapiens
  CDR3 for beta chain variable domain of TCR clone 267987 (TRBV19, TRBJ2-1)
CASSKAGPSSYNEQLF

SEQ ID NO: 535975 - protein, 11 aa, Homo sapiens
  CDR3 for alpha chain variable domain of TCR clone 267988 (TRAV12-3, TRAJ27)
CANGQCRQINL

SEQ ID NO: 535976 - protein, 14 aa, Homo sapiens
  CDR3 for beta chain variable domain of TCR clone 267988 (TRBV12-5, TRBJ2-5)
CASGSRTHQETQYF

SEQ ID NO: 535977 - protein, 15 aa, Homo sapiens
  CDR3 for alpha chain variable domain of TCR clone 267989 (TRAV12-3, TRAJ49)
CAMPVTPNTGNQFYF

SEQ ID NO: 535978 - protein, 14 aa, Homo sapiens
  CDR3 for beta chain variable domain of TCR clone 267989 (TRBV7-8, TRBJ2-3)
CASSLEAGTDTQYF

SEQ ID NO: 535979 - protein, 14 aa, Homo sapiens
  CDR3 for alpha chain variable domain of TCR clone 267990 (TRAV38-2/DV8, TRAJ49)
CAYRSPNTGNQFYF

SEQ ID NO: 535980 - protein, 14 aa, Homo sapiens
  CDR3 for beta chain variable domain of TCR clone 267990 (TRBV4-1, TRBJ2-2)
CASSQAVNTGELFF

SEQ ID NO: 535981 - protein, 10 aa, Homo sapiens
  CDR3 for alpha chain variable domain of TCR clone 267991 (TRAV23/DV6, TRAJ12)
CAAAVAALGP

SEQ ID NO: 535982 - protein, 13 aa, Homo sapiens
  CDR3 for beta chain variable domain of TCR clone 267991 (TRBV12-4, TRBJ1-2)
CASSLRQGKGYTF

SEQ ID NO: 535983 - protein, 10 aa, Homo sapiens
  CDR3 for alpha chain variable domain of TCR clone 267992 (TRAV12-3, TRAJ49)
CAMNDDQFYF

SEQ ID NO: 535984 - protein, 15 aa, Homo sapiens
  CDR3 for beta chain variable domain of TCR clone 267992 (TRBV13, TRBJ1-4)
CASSLRPSRNEKLFF

SEQ ID NO: 535985 - protein, 16 aa, Homo sapiens
  CDR3 for alpha chain variable domain of TCR clone 267993 (TRAV1-2, TRAJ10)
CAVRGVLTGGGNKLTF

SEQ ID NO: 535986 - protein, 12 aa, Homo sapiens
  CDR3 for beta chain variable domain of TCR clone 267993 (TRBV7-8, TRBJ2-7)
CACSLGDREQYF

SEQ ID NO: 535987 - protein, 13 aa, Homo sapiens
  CDR3 for alpha chain variable domain of TCR clone 267994 (TRAV2, TRAJ40)
CAVVTSGTYKYIF

SEQ ID NO: 535988 - protein, 14 aa, Homo sapiens
  CDR3 for beta chain variable domain of TCR clone 267994 (TRBV7-2, TRBJ1-1)
CASSFVTGTTEAFF

SEQ ID NO: 535989 - protein, 16 aa, Homo sapiens
  CDR3 for alpha chain variable domain of TCR clone 267995 (TRAV12-3, TRAJ53)
CAMSPGSGGSNYKLTF

SEQ ID NO: 535990 - protein, 11 aa, Homo sapiens
  CDR3 for beta chain variable domain of TCR clone 267995 (TRBV29-1, TRBJ2-1)
CSEDRTETQYF

SEQ ID NO: 535991 - protein, 16 aa, Homo sapiens
  CDR3 for alpha chain variable domain of TCR clone 267996 (TRAV30, TRAJ24)
CGTEIVDADSWGKFQF

SEQ ID NO: 535992 - protein, 14 aa, Homo sapiens
  CDR3 for beta chain variable domain of TCR clone 267996 (TRBV2, TRBJ1-2)
CASRRTGSPYGYTF

SEQ ID NO: 535993 - protein, 13 aa, Homo sapiens
  CDR3 for alpha chain variable domain of TCR clone 267997 (TRAV3, TRAJ27)
CAVRPLCAGKSTF

SEQ ID NO: 535994 - protein, 13 aa, Homo sapiens
  CDR3 for beta chain variable domain of TCR clone 267997 (TRBV7-9, TRBJ2-3)
CASSPGPTDTQYF

SEQ ID NO: 535995 - protein, 16 aa, Homo sapiens
  CDR3 for alpha chain variable domain of TCR clone 267998 (TRAV3, TRAJ10)
CAVRDMRAGGGNKLTF

SEQ ID NO: 535996 - protein, 16 aa, Homo sapiens
  CDR3 for beta chain variable domain of TCR clone 267998 (TRBV12-4, TRBJ1-5)
CTSSRPVGGSNQPQHF

SEQ ID NO: 535997 - protein, 15 aa, Homo sapiens
  CDR3 for alpha chain variable domain of TCR clone 267999 (TRAV17, TRAJ9)
CFLLLRITGGFKTIF

SEQ ID NO: 535998 - protein, 13 aa, Homo sapiens
  CDR3 for beta chain variable domain of TCR clone 267999 (TRBV27, TRBJ2-1)
CASSSGSYNEQFF

SEQ ID NO: 535999 - protein, 12 aa, Homo sapiens
  CDR3 for alpha chain variable domain of TCR clone 268000 (TRAV12-3, TRAJ17)
CAMTLTGNKLTF

SEQ ID NO: 536000 - protein, 17 aa, Homo sapiens
  CDR3 for beta chain variable domain of TCR clone 268000 (TRBV5-8, TRBJ2-1)
CASSAGTATGSYNEQFF

SEQ ID NO: 536001 - protein, 13 aa, Homo sapiens
  CDR3 for alpha chain variable domain of TCR clone 268001 (TRAV8-1, TRAJ13)
CAVSKGGYQKVAF

SEQ ID NO: 536002 - protein, 18 aa, Homo sapiens
  CDR3 for beta chain variable domain of TCR clone 268001 (TRBV11-2, TRBJ2-7)
CASSWRTVQTGQSYEQYF

SEQ ID NO: 536003 - protein, 13 aa, Homo sapiens
  CDR3 for alpha chain variable domain of TCR clone 268002 (TRAV21, TRAJ27)
CAARPGHAGKSTF

SEQ ID NO: 536004 - protein, 16 aa, Homo sapiens
  CDR3 for beta chain variable domain of TCR clone 268002 (TRBV20-1, TRBJ1-2)
CSASMGQGVANYGYTF

SEQ ID NO: 536005 - protein, 10 aa, Homo sapiens
  CDR3 for alpha chain variable domain of TCR clone 268003 (TRAV23/DV6, TRAJ57)
CAASSTLSQG

SEQ ID NO: 536006 - protein, 14 aa, Homo sapiens
  CDR3 for beta chain variable domain of TCR clone 268003 (TRBV7-8, TRBJ2-1)
CASSATGGQETQYF

SEQ ID NO: 536007 - protein, 14 aa, Homo sapiens
  CDR3 for alpha chain variable domain of TCR clone 268004 (TRAV29/DV5, TRAJ36)
CAARRNTGATNLFF

SEQ ID NO: 536008 - protein, 14 aa, Homo sapiens
  CDR3 for beta chain variable domain of TCR clone 268004 (TRBV12-5, TRBJ2-5)
CASGSRTHQETQYF

SEQ ID NO: 536009 - protein, 15 aa, Homo sapiens
  CDR3 for alpha chain variable domain of TCR clone 268005 (TRAV23/DV6, TRAJ18)
CAARYRGPTLGRLYF

SEQ ID NO: 536010 - protein, 13 aa, Homo sapiens
  CDR3 for beta chain variable domain of TCR clone 268005 (TRBV7-2, TRBJ2-7)
CASSSPSGSERYF

SEQ ID NO: 536011 - protein, 15 aa, Homo sapiens
  CDR3 for alpha chain variable domain of TCR clone 268006 (TRAV29/DV5, TRAJ42)
CAAKTDGGSQGNLIF

SEQ ID NO: 536012 - protein, 18 aa, Homo sapiens
  CDR3 for beta chain variable domain of TCR clone 268006 (TRBV20-1, TRBJ2-6)
CSAETTPTHGSGANVLTF

SEQ ID NO: 536013 - protein, 15 aa, Homo sapiens
  CDR3 for alpha chain variable domain of TCR clone 268007 (TRAV27, TRAJ50)
CAGRERGTSYDKVIF

SEQ ID NO: 536014 - protein, 13 aa, Homo sapiens
  CDR3 for beta chain variable domain of TCR clone 268007 (TRBV10-3, TRBJ1-2)
CAISERDSYGYTF

SEQ ID NO: 536015 - protein, 13 aa, Homo sapiens
  CDR3 for alpha chain variable domain of TCR clone 268008 (TRAV12-1, TRAJ47)
CVVNMEYGNKLVF

SEQ ID NO: 536016 - protein, 16 aa, Homo sapiens
  CDR3 for beta chain variable domain of TCR clone 268008 (TRBV12-5, TRBJ2-5)
CASGPRTSGNQETQYF

SEQ ID NO: 536017 - protein, 16 aa, Homo sapiens
  CDR3 for alpha chain variable domain of TCR clone 268009 (TRAV3, TRAJ6)
CAVRDGMGRRKLHTYI

SEQ ID NO: 536018 - protein, 12 aa, Homo sapiens
  CDR3 for beta chain variable domain of TCR clone 268009 (TRBV29-1, TRBJ2-3)
CSVTGGADTQYF

SEQ ID NO: 536019 - protein, 11 aa, Homo sapiens
  CDR3 for alpha chain variable domain of TCR clone 268010 (TRAV26-1, TRAJ37)
CIVRVGRKLIF

SEQ ID NO: 536020 - protein, 11 aa, Homo sapiens
  CDR3 for beta chain variable domain of TCR clone 268010 (TRBV12-4, TRBJ2-3)
CASSSVRGRYF

SEQ ID NO: 536021 - protein, 13 aa, Homo sapiens
  CDR3 for alpha chain variable domain of TCR clone 268011 (TRAV17, TRAJ11)
CATVPGGYSTLTF

SEQ ID NO: 536022 - protein, 15 aa, Homo sapiens
  CDR3 for beta chain variable domain of TCR clone 268011 (TRBV27, TRBJ2-1)
CASSNGGGSSNEQFF

SEQ ID NO: 536023 - protein, 13 aa, Homo sapiens
  CDR3 for alpha chain variable domain of TCR clone 268012 (TRAV27, TRAJ42)
CAGARGSQGNLIF

SEQ ID NO: 536024 - protein, 15 aa, Homo sapiens
  CDR3 for beta chain variable domain of TCR clone 268012 (TRBV10-3, TRBJ2-2)
CAIRTDREDTGELFF

SEQ ID NO: 536025 - protein, 13 aa, Homo sapiens
  CDR3 for alpha chain variable domain of TCR clone 268013 (TRAV1-2, TRAJ9)
CAALNTGGFKTIF

SEQ ID NO: 536026 - protein, 15 aa, Homo sapiens
  CDR3 for beta chain variable domain of TCR clone 268013 (TRBV2, TRBJ2-1)
CASSETGGNYNEQFF

SEQ ID NO: 536027 - protein, 14 aa, Homo sapiens
  CDR3 for alpha chain variable domain of TCR clone 268014 (TRAV26-1, TRAJ38)
CIAANAGNNRKLIW

SEQ ID NO: 536028 - protein, 13 aa, Homo sapiens
  CDR3 for beta chain variable domain of TCR clone 268014 (TRBV7-9, TRBJ2-5)
CASLPSGRETQYF

SEQ ID NO: 536029 - protein, 13 aa, Homo sapiens
  CDR3 for alpha chain variable domain of TCR clone 268015 (TRAV35, TRAJ42)
CAGFPGSQGNLIF

SEQ ID NO: 536030 - protein, 14 aa, Homo sapiens
  CDR3 for beta chain variable domain of TCR clone 268015 (TRBV28, TRBJ2-1)
CASSRPGLRDEQFF

SEQ ID NO: 536031 - protein, 15 aa, Homo sapiens
  CDR3 for alpha chain variable domain of TCR clone 268016 (TRAV8-3, TRAJ45)
CASSYSGGGADGLTF

SEQ ID NO: 536032 - protein, 15 aa, Homo sapiens
  CDR3 for beta chain variable domain of TCR clone 268016 (TRBV28, TRBJ2-3)
CASSPDRQGANTQYF

SEQ ID NO: 536033 - protein, 11 aa, Homo sapiens
  CDR3 for alpha chain variable domain of TCR clone 268017 (TRAV3, TRAJ17)
CAEAAGNKLTF

SEQ ID NO: 536034 - protein, 18 aa, Homo sapiens
  CDR3 for beta chain variable domain of TCR clone 268017 (TRBV7-9, TRBJ2-7)
CASSLTTSGSRTWYEQYF

SEQ ID NO: 536035 - protein, 13 aa, Homo sapiens
  CDR3 for alpha chain variable domain of TCR clone 268018 (TRAV12-1, TRAJ34)
CGEPLRNTDKLIF

SEQ ID NO: 536036 - protein, 17 aa, Homo sapiens
  CDR3 for beta chain variable domain of TCR clone 268018 (TRBV20-1, TRBJ2-1)
CSASSSGLAGSYNEQFF

SEQ ID NO: 536037 - protein, 17 aa, Homo sapiens
  CDR3 for alpha chain variable domain of TCR clone 268019 (TRAV27, TRAJ52)
CAGAGWAGGTSYGKLTF

SEQ ID NO: 536038 - protein, 16 aa, Homo sapiens
  CDR3 for beta chain variable domain of TCR clone 268019 (TRBV19, TRBJ2-1)
CASSKSGPSSYNEQFF

SEQ ID NO: 536039 - protein, 13 aa, Homo sapiens
  CDR3 for alpha chain variable domain of TCR clone 268020 (TRAV2, TRAJ15)
CAVASQVGTALIF

SEQ ID NO: 536040 - protein, 13 aa, Homo sapiens
  CDR3 for beta chain variable domain of TCR clone 268020 (TRBV7-9, TRBJ2-1)
CASSLDVGNEQFF

SEQ ID NO: 536041 - protein, 14 aa, Homo sapiens
  CDR3 for alpha chain variable domain of TCR clone 268021 (TRAV29/DV5, TRAJ57)
CAARPQGGSETLVF

SEQ ID NO: 536042 - protein, 15 aa, Homo sapiens
  CDR3 for beta chain variable domain of TCR clone 268021 (TRBV28, TRBJ2-3)
CASGFGTRLADTQYF

SEQ ID NO: 536043 - protein, 22 aa, Homo sapiens
  CDR3 for alpha chain variable domain of TCR clone 268022 (TRAV8-2, TRAJ45)
HLTKPSAHMSDAAEYSADGLTF

SEQ ID NO: 536044 - protein, 13 aa, Homo sapiens
  CDR3 for beta chain variable domain of TCR clone 268022 (TRBV7-3, TRBJ2-1)
GASSPVAYNEQFF

SEQ ID NO: 536045 - protein, 13 aa, Homo sapiens
  CDR3 for alpha chain variable domain of TCR clone 268023 (TRAV8-1, TRAJ23)
CAVTGGQGGKRIF

SEQ ID NO: 536046 - protein, 15 aa, Homo sapiens
  CDR3 for beta chain variable domain of TCR clone 268023 (TRBV20-1, TRBJ2-2)
CSAIPGHSNTGELFF

SEQ ID NO: 536047 - protein, 15 aa, Homo sapiens
  CDR3 for alpha chain variable domain of TCR clone 268024 (TRAV3, TRAJ22)
CAVRDRGGSARQLTF

SEQ ID NO: 536048 - protein, 14 aa, Homo sapiens
  CDR3 for beta chain variable domain of TCR clone 268024 (TRBV7-2, TRBJ2-5)
CASSLTQGQETQYF

SEQ ID NO: 536049 - protein, 13 aa, Homo sapiens
  CDR3 for alpha chain variable domain of TCR clone 268025 (TRAV26-2, TRAJ43)
CILRAVNNNDMRF

SEQ ID NO: 536050 - protein, 14 aa, Homo sapiens
  CDR3 for beta chain variable domain of TCR clone 268025 (TRBV7-9, TRBJ2-5)
CASSLDTAQETQYF

SEQ ID NO: 536051 - protein, 15 aa, Homo sapiens
  CDR3 for alpha chain variable domain of TCR clone 268026 (TRAV8-4, TRAJ29)
CAVSEDFRGNTPLVF

SEQ ID NO: 536052 - protein, 16 aa, Homo sapiens
  CDR3 for beta chain variable domain of TCR clone 268026 (TRBV7-3, TRBJ2-2)
CASSLKRGTLSGELFF

SEQ ID NO: 536053 - protein, 18 aa, Homo sapiens
  CDR3 for alpha chain variable domain of TCR clone 268027 (TRAV21, TRAJ52)
CAVRPSPAGGTSYGKLTF

SEQ ID NO: 536054 - protein, 17 aa, Homo sapiens
  CDR3 for beta chain variable domain of TCR clone 268027 (TRBV25-1, TRBJ2-1)
CASSAYGQGRGVYEQVF

SEQ ID NO: 536055 - protein, 14 aa, Homo sapiens
  CDR3 for alpha chain variable domain of TCR clone 268028 (TRAV29/DV5, TRAJ32)
CSAAYGGATNKLIF

SEQ ID NO: 536056 - protein, 11 aa, Homo sapiens
  CDR3 for beta chain variable domain of TCR clone 268028 (TRBV11-2, TRBJ2-2)
CASSLPGELFF

SEQ ID NO: 536057 - protein, 14 aa, Homo sapiens
  CDR3 for alpha chain variable domain of TCR clone 268029 (TRAV8-6, TRAJ53)
CAALVLGSNYKLTF

SEQ ID NO: 536058 - protein, 15 aa, Homo sapiens
  CDR3 for beta chain variable domain of TCR clone 268029 (TRBV20-1, TRBJ2-3)
SSAEPLAGHGDTQYF

SEQ ID NO: 536059 - protein, 13 aa, Homo sapiens
  CDR3 for alpha chain variable domain of TCR clone 268030 (TRAV12-1, TRAJ9)
RVVLHTGGFKTIF

SEQ ID NO: 536060 - protein, 13 aa, Homo sapiens
  CDR3 for beta chain variable domain of TCR clone 268030 (TRBV19, TRBJ1-2)
CASSVPGQDGYTF

SEQ ID NO: 536061 - protein, 12 aa, Homo sapiens
  CDR3 for alpha chain variable domain of TCR clone 268031 (TRAV36/DV7, TRAJ54)
CAVVRGAKKLVF

SEQ ID NO: 536062 - protein, 16 aa, Homo sapiens
  CDR3 for beta chain variable domain of TCR clone 268031 (TRBV11-3, TRBJ2-3)
CASSSGSGGGTDTQYF

SEQ ID NO: 536063 - protein, 18 aa, Homo sapiens
  CDR3 for alpha chain variable domain of TCR clone 268032 (TRAV23/DV6, )
CAATALIPDIQNPDPAVY

SEQ ID NO: 536064 - protein, 16 aa, Homo sapiens
  CDR3 for beta chain variable domain of TCR clone 268032 (TRBV10-3, TRBJ2-7)
CAISPSGQEQTYEQYF

SEQ ID NO: 536065 - protein, 16 aa, Homo sapiens
  CDR3 for alpha chain variable domain of TCR clone 268033 (TRAV30, TRAJ24)
CGTEIVDADIWGKFQF

SEQ ID NO: 536066 - protein, 12 aa, Homo sapiens
  CDR3 for beta chain variable domain of TCR clone 268033 (TRBV11-2, TRBJ2-1)
CASSPGNNEQFF

SEQ ID NO: 536067 - protein, 12 aa, Homo sapiens
  CDR3 for alpha chain variable domain of TCR clone 268034 (TRAV22, TRAJ36)
CAVGTGANNLFF

SEQ ID NO: 536068 - protein, 16 aa, Homo sapiens
  CDR3 for beta chain variable domain of TCR clone 268034 (TRBV7-3, TRBJ2-2)
CASSLKRGTLSGELFF

SEQ ID NO: 536069 - protein, 15 aa, Homo sapiens
  CDR3 for alpha chain variable domain of TCR clone 268035 (TRAV12-2, TRAJ53)
CAVNGGGGSNYKLTF

SEQ ID NO: 536070 - protein, 13 aa, Homo sapiens
  CDR3 for beta chain variable domain of TCR clone 268035 (TRBV7-9, TRBJ2-3)
CASSPGSTDTQYF

SEQ ID NO: 536071 - protein, 15 aa, Homo sapiens
  CDR3 for alpha chain variable domain of TCR clone 268036 (TRAV8-3, TRAJ45)
CASSYSGGGADGLTF

SEQ ID NO: 536072 - protein, 13 aa, Homo sapiens
  CDR3 for beta chain variable domain of TCR clone 268036 (TRBV10-3, TRBJ2-7)
CAFKPAVNYEQYF

SEQ ID NO: 536073 - protein, 14 aa, Homo sapiens
  CDR3 for alpha chain variable domain of TCR clone 268037 (TRAV17, TRAJ4)
CATGLSGGYNKLIF

SEQ ID NO: 536074 - protein, 15 aa, Homo sapiens
  CDR3 for beta chain variable domain of TCR clone 268037 (TRBV28, TRBJ2-5)
CASSSGRTIQETQYF

SEQ ID NO: 536075 - protein, 15 aa, Homo sapiens
  CDR3 for alpha chain variable domain of TCR clone 268038 (TRAV29/DV5, TRAJ57)
CAASLLRGGPEKLVF

SEQ ID NO: 536076 - protein, 15 aa, Homo sapiens
  CDR3 for beta chain variable domain of TCR clone 268038 (TRBV5-1, TRBJ1-3)
CASSLEGGSGNTIYF

SEQ ID NO: 536077 - protein, 11 aa, Homo sapiens
  CDR3 for alpha chain variable domain of TCR clone 268039 (TRAV1-2, TRAJ40)
CAVPGTYKYIF

SEQ ID NO: 536078 - protein, 16 aa, Homo sapiens
  CDR3 for beta chain variable domain of TCR clone 268039 (TRBV7-2, TRBJ1-2)
CASSSNQDRRGHGYTF

SEQ ID NO: 536079 - protein, 11 aa, Homo sapiens
  CDR3 for alpha chain variable domain of TCR clone 268040 (TRAV1-1, TRAJ23)
CAVRQGGKLIF

SEQ ID NO: 536080 - protein, 12 aa, Homo sapiens
  CDR3 for beta chain variable domain of TCR clone 268040 (TRBV12-4, TRBJ1-2)
CASRLQGSGYTF

SEQ ID NO: 536081 - protein, 14 aa, Homo sapiens
  CDR3 for alpha chain variable domain of TCR clone 268041 (TRAV13-2, TRAJ10)
CADTFTGGGNKLTF

SEQ ID NO: 536082 - protein, 16 aa, Homo sapiens
  CDR3 for beta chain variable domain of TCR clone 268041 (TRBV18, TRBJ2-7)
CASSPRSQGISYEQYF

SEQ ID NO: 536083 - protein, 14 aa, Homo sapiens
  CDR3 for alpha chain variable domain of TCR clone 268042 (TRAV12-1, TRAJ10)
CVVNLAGGGNKLTF

SEQ ID NO: 536084 - protein, 14 aa, Homo sapiens
  CDR3 for beta chain variable domain of TCR clone 268042 (TRBV12-4, TRBJ1-1)
CASSLGTGGTEDFF

SEQ ID NO: 536085 - protein, 14 aa, Homo sapiens
  CDR3 for alpha chain variable domain of TCR clone 268043 (TRAV12-3, TRAJ10)
SHLPLTGGGNKLTF

SEQ ID NO: 536086 - protein, 14 aa, Homo sapiens
  CDR3 for beta chain variable domain of TCR clone 268043 (TRBV19, TRBJ2-7)
CASTVQGRPYKQYF

SEQ ID NO: 536087 - protein, 12 aa, Homo sapiens
  CDR3 for alpha chain variable domain of TCR clone 268044 (TRAV10, TRAJ43)
CVVVRVGNDMRF

SEQ ID NO: 536088 - protein, 16 aa, Homo sapiens
  CDR3 for beta chain variable domain of TCR clone 268044 (TRBV19, TRBJ1-1)
CASRFGGPVTGTEAFF

SEQ ID NO: 536089 - protein, 10 aa, Homo sapiens
  CDR3 for alpha chain variable domain of TCR clone 268045 (TRAV12-1, TRAJ43)
CVVHNNDMRF

SEQ ID NO: 536090 - protein, 13 aa, Homo sapiens
  CDR3 for beta chain variable domain of TCR clone 268045 (TRBV12-5, TRBJ2-3)
CASQNRGTDTQYF

SEQ ID NO: 536091 - protein, 14 aa, Homo sapiens
  CDR3 for alpha chain variable domain of TCR clone 268046 (TRAV23/DV6, TRAJ27)
CAAIRDTNAGKSTF

SEQ ID NO: 536092 - protein, 13 aa, Homo sapiens
  CDR3 for beta chain variable domain of TCR clone 268046 (TRBV20-1, TRBJ1-5)
CSASGRGNQPQHF

SEQ ID NO: 536093 - protein, 15 aa, Homo sapiens
  CDR3 for alpha chain variable domain of TCR clone 268047 (TRAV21, TRAJ53)
CATLNRGGSNYKLTF

SEQ ID NO: 536094 - protein, 12 aa, Homo sapiens
  CDR3 for beta chain variable domain of TCR clone 268047 (TRBV11-2, TRBJ2-2)
CASSLGGGELFF

SEQ ID NO: 536095 - protein, 15 aa, Homo sapiens
  CDR3 for alpha chain variable domain of TCR clone 268048 (TRAV26-1, TRAJ44)
CIARVPFGPASKLTF

SEQ ID NO: 536096 - protein, 17 aa, Homo sapiens
  CDR3 for beta chain variable domain of TCR clone 268048 (TRBV24-1, TRBJ2-4)
CATSDAEARRVRNIQYF

SEQ ID NO: 536097 - protein, 13 aa, Homo sapiens
  CDR3 for alpha chain variable domain of TCR clone 268049 (TRAV1-2, TRAJ31)
CAVRGYNNARLMF

SEQ ID NO: 536098 - protein, 13 aa, Homo sapiens
  CDR3 for beta chain variable domain of TCR clone 268049 (TRBV7-3, TRBJ1-1)
CASSQDWGAEAFF

SEQ ID NO: 536099 - protein, 11 aa, Homo sapiens
  CDR3 for alpha chain variable domain of TCR clone 268050 (TRAV12-2, TRAJ33)
CAVTSNYQLIW

SEQ ID NO: 536100 - protein, 12 aa, Homo sapiens
  CDR3 for beta chain variable domain of TCR clone 268050 (TRBV6-3, TRBJ2-7)
CASSLTPYEQYF

SEQ ID NO: 536101 - protein, 15 aa, Homo sapiens
  CDR3 for alpha chain variable domain of TCR clone 268051 (TRAV16, TRAJ12)
CSKWPLRDSSYKLIF

SEQ ID NO: 536102 - protein, 11 aa, Homo sapiens
  CDR3 for beta chain variable domain of TCR clone 268051 (TRBV12-4, TRBJ2-3)
CASTATDTQYF

SEQ ID NO: 536103 - protein, 15 aa, Homo sapiens
  CDR3 for alpha chain variable domain of TCR clone 268052 (TRAV30, TRAJ13)
CGTQGVTGGYQKVTF

SEQ ID NO: 536104 - protein, 16 aa, Homo sapiens
  CDR3 for beta chain variable domain of TCR clone 268052 (TRBV24-1, TRBJ2-2)
CATSDPGTANTGELFF

SEQ ID NO: 536105 - protein, 15 aa, Homo sapiens
  CDR3 for alpha chain variable domain of TCR clone 268053 (TRAV26-1, TRAJ40)
CIGRYATSGTYKYIF

SEQ ID NO: 536106 - protein, 11 aa, Homo sapiens
  CDR3 for beta chain variable domain of TCR clone 268053 (TRBV7-9, TRBJ2-1)
CASSSQNEQLF

SEQ ID NO: 536107 - protein, 15 aa, Homo sapiens
  CDR3 for alpha chain variable domain of TCR clone 268054 (TRAV21, TRAJ45)
CAVSYSGGGADGLTF

SEQ ID NO: 536108 - protein, 12 aa, Homo sapiens
  CDR3 for beta chain variable domain of TCR clone 268054 (TRBV27, TRBJ2-7)
CASSGGFYEQYF

SEQ ID NO: 536109 - protein, 14 aa, Homo sapiens
  CDR3 for alpha chain variable domain of TCR clone 268055 (TRAV38-1, TRAJ54)
CAFLRIQGAQKLVF

SEQ ID NO: 536110 - protein, 11 aa, Homo sapiens
  CDR3 for beta chain variable domain of TCR clone 268055 (TRBV11-2, TRBJ2-2)
CASSLPGELFF

SEQ ID NO: 536111 - protein, 12 aa, Homo sapiens
  CDR3 for alpha chain variable domain of TCR clone 268056 (TRAV12-3, TRAJ41)
CAMSYSGYAINF

SEQ ID NO: 536112 - protein, 13 aa, Homo sapiens
  CDR3 for beta chain variable domain of TCR clone 268056 (TRBV7-3, TRBJ2-1)
CASSLDSYNEQFF

SEQ ID NO: 536113 - protein, 13 aa, Homo sapiens
  CDR3 for alpha chain variable domain of TCR clone 268057 (TRAV35, TRAJ36)
CAGPRIGANNLFS

SEQ ID NO: 536114 - protein, 15 aa, Homo sapiens
  CDR3 for beta chain variable domain of TCR clone 268057 (TRBV28, TRBJ2-5)
CASSPPWSYKETQYF

SEQ ID NO: 536115 - protein, 14 aa, Homo sapiens
  CDR3 for alpha chain variable domain of TCR clone 268058 (TRAV29/DV5, TRAJ36)
CAARRKTGANNLFF

SEQ ID NO: 536116 - protein, 12 aa, Homo sapiens
  CDR3 for beta chain variable domain of TCR clone 268058 (TRBV12-5, TRBJ2-5)
CASGQGVETQYL

SEQ ID NO: 536117 - protein, 11 aa, Homo sapiens
  CDR3 for alpha chain variable domain of TCR clone 268059 (TRAV2, TRAJ21)
CAVFNFNKFYF

SEQ ID NO: 536118 - protein, 13 aa, Homo sapiens
  CDR3 for beta chain variable domain of TCR clone 268059 (TRBV7-8, TRBJ2-7)
CASSLTGGREQYF

SEQ ID NO: 536119 - protein, 16 aa, Homo sapiens
  CDR3 for alpha chain variable domain of TCR clone 268060 (TRAV13-1, TRAJ18)
CAASRMRGSTLGRLYF

SEQ ID NO: 536120 - protein, 15 aa, Homo sapiens
  CDR3 for beta chain variable domain of TCR clone 268060 (TRBV29-1, TRBJ2-1)
CSVGRQALFYNEQFF

SEQ ID NO: 536121 - protein, 18 aa, Homo sapiens
  CDR3 for alpha chain variable domain of TCR clone 268061 (TRAV21, TRAJ52)
CAVRPSPAGGTSYGKLPF

SEQ ID NO: 536122 - protein, 14 aa, Homo sapiens
  CDR3 for beta chain variable domain of TCR clone 268061 (TRBV7-9, TRBJ2-1)
CASSPRDSLYEQFF

SEQ ID NO: 536123 - protein, 17 aa, Homo sapiens
  CDR3 for alpha chain variable domain of TCR clone 268062 (TRAV29/DV5, TRAJ45)
CAADGPFSGGGADGLTF

SEQ ID NO: 536124 - protein, 20 aa, Homo sapiens
  CDR3 for beta chain variable domain of TCR clone 268062 (TRBV4-3, TRBJ2-3)
CASSPRVEMRASGRPDTQYF

SEQ ID NO: 536125 - protein, 12 aa, Homo sapiens
  CDR3 for alpha chain variable domain of TCR clone 268063 (TRAV21, TRAJ9)
CAVRLGGFKTIF

SEQ ID NO: 536126 - protein, 13 aa, Homo sapiens
  CDR3 for beta chain variable domain of TCR clone 268063 (TRBV7-2, TRBJ2-2)
CASSLAVTGELFF

SEQ ID NO: 536127 - protein, 14 aa, Homo sapiens
  CDR3 for alpha chain variable domain of TCR clone 268064 (TRAV1-2, TRAJ8)
CAVREDTGFQKRVF

SEQ ID NO: 536128 - protein, 15 aa, Homo sapiens
  CDR3 for beta chain variable domain of TCR clone 268064 (TRBV20-1, TRBJ2-7)
CSARDRVSGMDEQYF

SEQ ID NO: 536129 - protein, 14 aa, Homo sapiens
  CDR3 for alpha chain variable domain of TCR clone 268065 (TRAV29/DV5, TRAJ36)
CAARRKTGANNLFF

SEQ ID NO: 536130 - protein, 12 aa, Homo sapiens
  CDR3 for beta chain variable domain of TCR clone 268065 (TRBV12-4, TRBJ2-7)
CASGLGGYEQYF

SEQ ID NO: 536131 - protein, 10 aa, Homo sapiens
  CDR3 for alpha chain variable domain of TCR clone 268066 (TRAV30, TRAJ24)
CGTEMWMLTA

SEQ ID NO: 536132 - protein, 14 aa, Homo sapiens
  CDR3 for beta chain variable domain of TCR clone 268066 (TRBV12-5, TRBJ2-5)
CASGSRTHQETQYF

SEQ ID NO: 536133 - protein, 17 aa, Homo sapiens
  CDR3 for alpha chain variable domain of TCR clone 268067 (TRAV3, TRAJ6)
CAVRDGPRAGGSYIPTF

SEQ ID NO: 536134 - protein, 16 aa, Homo sapiens
  CDR3 for beta chain variable domain of TCR clone 268067 (TRBV20-1, TRBJ2-2)
CSARAGLAGVTGELFF

SEQ ID NO: 536135 - protein, 15 aa, Homo sapiens
  CDR3 for alpha chain variable domain of TCR clone 268068 (TRAV21, TRAJ52)
CAVRGGGTSYGKLTF

SEQ ID NO: 536136 - protein, 15 aa, Homo sapiens
  CDR3 for beta chain variable domain of TCR clone 268068 (TRBV18, TRBJ1-5)
CASSPSERSNQPQHF

SEQ ID NO: 536137 - protein, 15 aa, Homo sapiens
  CDR3 for alpha chain variable domain of TCR clone 268069 (TRAV16, TRAJ57)
CALSGGQGGSEKLVF

SEQ ID NO: 536138 - protein, 14 aa, Homo sapiens
  CDR3 for beta chain variable domain of TCR clone 268069 (TRBV28, TRBJ2-2)
CACTRRSGDGELFF

SEQ ID NO: 536139 - protein, 15 aa, Homo sapiens
  CDR3 for alpha chain variable domain of TCR clone 268070 (TRAV17, TRAJ57)
CATGPSQGGSEKLVF

SEQ ID NO: 536140 - protein, 15 aa, Homo sapiens
  CDR3 for beta chain variable domain of TCR clone 268070 (TRBV12-4, TRBJ1-5)
CQRPPVGGSNQPQHF

SEQ ID NO: 536141 - protein, 12 aa, Homo sapiens
  CDR3 for alpha chain variable domain of TCR clone 268071 (TRAV13-2, TRAJ23)
FAERHRGGKLIF

SEQ ID NO: 536142 - protein, 16 aa, Homo sapiens
  CDR3 for beta chain variable domain of TCR clone 268071 (TRBV7-2, TRBJ2-6)
CAILSGVSSGANVLTF

SEQ ID NO: 536143 - protein, 13 aa, Homo sapiens
  CDR3 for alpha chain variable domain of TCR clone 268072 (TRAV13-1, TRAJ39)
CSKYNNACNMLTF

SEQ ID NO: 536144 - protein, 16 aa, Homo sapiens
  CDR3 for beta chain variable domain of TCR clone 268072 (TRBV20-1, TRBJ1-4)
CSAPGQGLLTNEKLFF

SEQ ID NO: 536145 - protein, 13 aa, Homo sapiens
  CDR3 for alpha chain variable domain of TCR clone 268073 (TRAV25, TRAJ10)
CSGRTGGGNKLTF

SEQ ID NO: 536146 - protein, 17 aa, Homo sapiens
  CDR3 for beta chain variable domain of TCR clone 268073 (TRBV5-5, TRBJ1-2)
CASSLGSLDGQSEGYTF

SEQ ID NO: 536147 - protein, 16 aa, Homo sapiens
  CDR3 for alpha chain variable domain of TCR clone 268074 (TRAV16, TRAJ37)
CSKLPDGSSNTGKLIF

SEQ ID NO: 536148 - protein, 13 aa, Homo sapiens
  CDR3 for beta chain variable domain of TCR clone 268074 (TRBV7-2, TRBJ2-2)
CASSLAVTGELFF

SEQ ID NO: 536149 - protein, 16 aa, Homo sapiens
  CDR3 for alpha chain variable domain of TCR clone 268075 (TRAV3, TRAJ37)
CAVRGKGSGNTGKLIF

SEQ ID NO: 536150 - protein, 13 aa, Homo sapiens
  CDR3 for beta chain variable domain of TCR clone 268075 (TRBV20-1, TRBJ2-5)
CSAREAFQETQYF

SEQ ID NO: 536151 - protein, 18 aa, Homo sapiens
  CDR3 for alpha chain variable domain of TCR clone 268076 (TRAV21, TRAJ52)
CAVRPSPAGATSYGKLTF

SEQ ID NO: 536152 - protein, 13 aa, Homo sapiens
  CDR3 for beta chain variable domain of TCR clone 268076 (TRBV7-3, TRBJ1-1)
CASSQDWGAEAFF

SEQ ID NO: 536153 - protein, 16 aa, Homo sapiens
  CDR3 for alpha chain variable domain of TCR clone 268077 (TRAV12-2, TRAJ43)
CAGDDMRSGAGTRLTV

SEQ ID NO: 536154 - protein, 16 aa, Homo sapiens
  CDR3 for beta chain variable domain of TCR clone 268077 (TRBV2, TRBJ2-4)
CASSEAPGGEQNSQYF

SEQ ID NO: 536155 - protein, 12 aa, Homo sapiens
  CDR3 for alpha chain variable domain of TCR clone 268078 (TRAV13-1, TRAJ21)
CAAKEGFNKFYF

SEQ ID NO: 536156 - protein, 16 aa, Homo sapiens
  CDR3 for beta chain variable domain of TCR clone 268078 (TRBV13, TRBJ2-5)
CASSRGAGIRQETQYF

SEQ ID NO: 536157 - protein, 14 aa, Homo sapiens
  CDR3 for alpha chain variable domain of TCR clone 268079 (TRAV12-2, TRAJ17)
CAVLFKAAGNKLTF

SEQ ID NO: 536158 - protein, 15 aa, Homo sapiens
  CDR3 for beta chain variable domain of TCR clone 268079 (TRBV12-4, TRBJ2-1)
CASSLLGRTYNEQFF

SEQ ID NO: 536159 - protein, 15 aa, Homo sapiens
  CDR3 for alpha chain variable domain of TCR clone 268080 (TRAV35, TRAJ20)
CAGQLVGSNDYKLSF

SEQ ID NO: 536160 - protein, 13 aa, Homo sapiens
  CDR3 for beta chain variable domain of TCR clone 268080 (TRBV19, TRBJ2-7)
CASSKPGTHEQYF

SEQ ID NO: 536161 - protein, 20 aa, Homo sapiens
  CDR3 for alpha chain variable domain of TCR clone 268081 (TRAV4, TRAJ22)
CCVLLPRGYLYSGSASQLTF

SEQ ID NO: 536162 - protein, 16 aa, Homo sapiens
  CDR3 for beta chain variable domain of TCR clone 268081 (TRBV7-9, TRBJ2-3)
CASSPWREVGTDTQYF

SEQ ID NO: 536163 - protein, 14 aa, Homo sapiens
  CDR3 for alpha chain variable domain of TCR clone 268082 (TRAV20, TRAJ22)
CAVGLGGSARQLTF

SEQ ID NO: 536164 - protein, 15 aa, Homo sapiens
  CDR3 for beta chain variable domain of TCR clone 268082 (TRBV7-2, TRBJ1-1)
CASSFAGDRDTEAFF

SEQ ID NO: 536165 - protein, 16 aa, Homo sapiens
  CDR3 for alpha chain variable domain of TCR clone 268083 (TRAV16, TRAJ52)
CALSAAGGTSYGQLTF

SEQ ID NO: 536166 - protein, 16 aa, Homo sapiens
  CDR3 for beta chain variable domain of TCR clone 268083 (TRBV12-4, TRBJ1-5)
CASSRPVGGSNQPQHF

SEQ ID NO: 536167 - protein, 15 aa, Homo sapiens
  CDR3 for alpha chain variable domain of TCR clone 268084 (TRAV8-4, TRAJ7)
CAVSGGNYGNNRLAF

SEQ ID NO: 536168 - protein, 15 aa, Homo sapiens
  CDR3 for beta chain variable domain of TCR clone 268084 (TRBV2, TRBJ2-3)
CASSGSGISTDTQYF

SEQ ID NO: 536169 - protein, 14 aa, Homo sapiens
  CDR3 for alpha chain variable domain of TCR clone 268085 (TRAV16, TRAJ39)
CALSKNNAGNMLTF

SEQ ID NO: 536170 - protein, 16 aa, Homo sapiens
  CDR3 for beta chain variable domain of TCR clone 268085 (TRBV5-1, TRBJ2-3)
CASSLGLAVYTDTQYF

SEQ ID NO: 536171 - protein, 11 aa, Homo sapiens
  CDR3 for alpha chain variable domain of TCR clone 268086 (TRAV3, TRAJ21)
CAVGNFNKFYF

SEQ ID NO: 536172 - protein, 15 aa, Homo sapiens
  CDR3 for beta chain variable domain of TCR clone 268086 (TRBV5-1, TRBJ2-1)
CASKGLAGVYNEQFF

SEQ ID NO: 536173 - protein, 13 aa, Homo sapiens
  CDR3 for alpha chain variable domain of TCR clone 268087 (TRAV29/DV5, TRAJ31)
CAASRNNNARLMF

SEQ ID NO: 536174 - protein, 12 aa, Homo sapiens
  CDR3 for beta chain variable domain of TCR clone 268087 (TRBV14, TRBJ2-5)
CASSHPKETQYF

SEQ ID NO: 536175 - protein, 14 aa, Homo sapiens
  CDR3 for alpha chain variable domain of TCR clone 268088 (TRAV12-2, TRAJ40)
CAVKIPSGTYKYIF

SEQ ID NO: 536176 - protein, 16 aa, Homo sapiens
  CDR3 for beta chain variable domain of TCR clone 268088 (TRBV11-2, TRBJ2-7)
CASSLLWGPTSSTSGR

SEQ ID NO: 536177 - protein, 15 aa, Homo sapiens
  CDR3 for alpha chain variable domain of TCR clone 268089 (TRAV1-2, TRAJ28)
CAVQYSGAGSDQLTF

SEQ ID NO: 536178 - protein, 15 aa, Homo sapiens
  CDR3 for beta chain variable domain of TCR clone 268089 (TRBV9, TRBJ1-6)
CASSVAGTGDSPPHF

SEQ ID NO: 536179 - protein, 16 aa, Homo sapiens
  CDR3 for alpha chain variable domain of TCR clone 268090 (TRAV12-3, TRAJ53)
CAMTPGSGGCNYKLTF

SEQ ID NO: 536180 - protein, 11 aa, Homo sapiens
  CDR3 for beta chain variable domain of TCR clone 268090 (TRBV29-1, TRBJ2-5)
CSEDRTGTQYF

SEQ ID NO: 536181 - protein, 10 aa, Homo sapiens
  CDR3 for alpha chain variable domain of TCR clone 268091 (TRAV12-2, TRAJ49)
CAVRRNQFYF

SEQ ID NO: 536182 - protein, 15 aa, Homo sapiens
  CDR3 for beta chain variable domain of TCR clone 268091 (TRBV20-1, TRBJ2-7)
CSARDRVSGMDEQYF

SEQ ID NO: 536183 - protein, 15 aa, Homo sapiens
  CDR3 for alpha chain variable domain of TCR clone 268092 (TRAV23/DV6, TRAJ37)
CTAGEGSSNTGKLIF

SEQ ID NO: 536184 - protein, 17 aa, Homo sapiens
  CDR3 for beta chain variable domain of TCR clone 268092 (TRBV20-1, TRBJ2-7)
CSATRAGGVAGVEEQYF

SEQ ID NO: 536185 - protein, 13 aa, Homo sapiens
  CDR3 for alpha chain variable domain of TCR clone 268093 (TRAV12-2, TRAJ42)
CAVKRGSQGNLIF

SEQ ID NO: 536186 - protein, 13 aa, Homo sapiens
  CDR3 for beta chain variable domain of TCR clone 268093 (TRBV19, TRBJ1-2)
CASSVPGQDGYTF

SEQ ID NO: 536187 - protein, 15 aa, Homo sapiens
  CDR3 for alpha chain variable domain of TCR clone 268094 (TRAV25, TRAJ10)
CAGPLLTGGGNKLTF

SEQ ID NO: 536188 - protein, 15 aa, Homo sapiens
  CDR3 for beta chain variable domain of TCR clone 268094 (TRBV12-5, TRBJ2-2)
RASGRLGGNTGELFF

SEQ ID NO: 536189 - protein, 16 aa, Homo sapiens
  CDR3 for alpha chain variable domain of TCR clone 268095 (TRAV21, TRAJ37)
CAVRPRGSSNTGKLIF

SEQ ID NO: 536190 - protein, 15 aa, Homo sapiens
  CDR3 for beta chain variable domain of TCR clone 268095 (TRBV25-1, TRBJ1-4)
CASSPGDSTNEKLFF

SEQ ID NO: 536191 - protein, 14 aa, Homo sapiens
  CDR3 for alpha chain variable domain of TCR clone 268096 (TRAV12-1, TRAJ12)
CVVTRMDSSYKLIF

SEQ ID NO: 536192 - protein, 17 aa, Homo sapiens
  CDR3 for beta chain variable domain of TCR clone 268096 (TRBV7-8, TRBJ1-2)
CASSLRPLQGHLYGYTF

SEQ ID NO: 536193 - protein, 10 aa, Homo sapiens
  CDR3 for alpha chain variable domain of TCR clone 268097 (TRAV16, TRAJ26)
CAPEELWSEF

SEQ ID NO: 536194 - protein, 17 aa, Homo sapiens
  CDR3 for beta chain variable domain of TCR clone 268097 (TRBV5-1, TRBJ2-2)
CASSLAGLSGGTGELFF

SEQ ID NO: 536195 - protein, 16 aa, Homo sapiens
  CDR3 for alpha chain variable domain of TCR clone 268098 (TRAV30, TRAJ24)
CGPEIVDGDSWGKFQF

SEQ ID NO: 536196 - protein, 13 aa, Homo sapiens
  CDR3 for beta chain variable domain of TCR clone 268098 (TRBV18, TRBJ1-1)
CASSPETKPEAFF

SEQ ID NO: 536197 - protein, 15 aa, Homo sapiens
  CDR3 for alpha chain variable domain of TCR clone 268099 (TRAV20, TRAJ4)
CDVQVLSGGYNKLIF

SEQ ID NO: 536198 - protein, 14 aa, Homo sapiens
  CDR3 for beta chain variable domain of TCR clone 268099 (TRBV7-6, TRBJ2-3)
CASNSGGDANTQYF

SEQ ID NO: 536199 - protein, 14 aa, Homo sapiens
  CDR3 for alpha chain variable domain of TCR clone 268100 (TRAV1-2, TRAJ16)
CAVNRFSDGQRLLF

SEQ ID NO: 536200 - protein, 16 aa, Homo sapiens
  CDR3 for beta chain variable domain of TCR clone 268100 (TRBV4-1, TRBJ2-3)
CASSQSTSGAEDTQYF

SEQ ID NO: 536201 - protein, 14 aa, Homo sapiens
  CDR3 for alpha chain variable domain of TCR clone 268101 (TRAV29/DV5, TRAJ36)
CAARRKTGANNLFF

SEQ ID NO: 536202 - protein, 15 aa, Homo sapiens
  CDR3 for beta chain variable domain of TCR clone 268101 (TRBV5-1, TRBJ2-3)
CASSVTSGSTDTQYF

SEQ ID NO: 536203 - protein, 14 aa, Homo sapiens
  CDR3 for alpha chain variable domain of TCR clone 268102 (TRAV16, TRAJ33)
CALSAMDSNYQLIW

SEQ ID NO: 536204 - protein, 17 aa, Homo sapiens
  CDR3 for beta chain variable domain of TCR clone 268102 (TRBV25-1, TRBJ2-7)
CAISDARVVFSSYEQYF

SEQ ID NO: 536205 - protein, 13 aa, Homo sapiens
  CDR3 for alpha chain variable domain of TCR clone 268103 (TRAV35, TRAJ42)
CAGFPGSQGNLIC

SEQ ID NO: 536206 - protein, 14 aa, Homo sapiens
  CDR3 for beta chain variable domain of TCR clone 268103 (TRBV19, TRBJ2-1)
CASPTFVLSGEQFF

SEQ ID NO: 536207 - protein, 14 aa, Homo sapiens
  CDR3 for alpha chain variable domain of TCR clone 268104 (TRAV8-4, TRAJ4)
CAVSPSGGYNKLIF

SEQ ID NO: 536208 - protein, 16 aa, Homo sapiens
  CDR3 for beta chain variable domain of TCR clone 268104 (TRBV7-3, TRBJ2-2)
CASSLKRGTLSGELFF

SEQ ID NO: 536209 - protein, 13 aa, Homo sapiens
  CDR3 for alpha chain variable domain of TCR clone 268105 (TRAV12-3, TRAJ7)
CAMSASGNNRLAF

SEQ ID NO: 536210 - protein, 17 aa, Homo sapiens
  CDR3 for beta chain variable domain of TCR clone 268105 (TRBV11-1, TRBJ2-7)
CASSLTGSFGLDYEQYF

SEQ ID NO: 536211 - protein, 14 aa, Homo sapiens
  CDR3 for alpha chain variable domain of TCR clone 268106 (TRAV12-1, TRAJ13)
CLVIDSGGYQKVTF

SEQ ID NO: 536212 - protein, 13 aa, Homo sapiens
  CDR3 for beta chain variable domain of TCR clone 268106 (TRBV20-1, TRBJ1-1)
CSAPPGGHTEAFF

SEQ ID NO: 536213 - protein, 13 aa, Homo sapiens
  CDR3 for alpha chain variable domain of TCR clone 268107 (TRAV13-1, TRAJ40)
CAASTSGTYKYIF

SEQ ID NO: 536214 - protein, 15 aa, Homo sapiens
  CDR3 for beta chain variable domain of TCR clone 268107 (TRBV20-1, TRBJ2-7)
CSARDRVSGMDEQYF

SEQ ID NO: 536215 - protein, 13 aa, Homo sapiens
  CDR3 for alpha chain variable domain of TCR clone 268108 (TRAV6, TRAJ33)
CALPMDSNYQLIW

SEQ ID NO: 536216 - protein, 13 aa, Homo sapiens
  CDR3 for beta chain variable domain of TCR clone 268108 (TRBV7-9, TRBJ2-3)
CASSPGSTDTQYF

SEQ ID NO: 536217 - protein, 13 aa, Homo sapiens
  CDR3 for alpha chain variable domain of TCR clone 268109 (TRAV12-3, TRAJ6)
CANPSGGSYLPTF

SEQ ID NO: 536218 - protein, 14 aa, Homo sapiens
  CDR3 for beta chain variable domain of TCR clone 268109 (TRBV19, TRBJ1-1)
CASSRDRDATEAFF

SEQ ID NO: 536219 - protein, 15 aa, Homo sapiens
  CDR3 for alpha chain variable domain of TCR clone 268110 (TRAV17, TRAJ40)
CASKYIFGTGPRLKV

SEQ ID NO: 536220 - protein, 17 aa, Homo sapiens
  CDR3 for beta chain variable domain of TCR clone 268110 (TRBV11-2, TRBJ2-4)
CASSFLALGGAGDIQYF

SEQ ID NO: 536221 - protein, 11 aa, Homo sapiens
  CDR3 for alpha chain variable domain of TCR clone 268111 (TRAV12-3, TRAJ27)
CAMANAGKSTF

SEQ ID NO: 536222 - protein, 17 aa, Homo sapiens
  CDR3 for beta chain variable domain of TCR clone 268111 (TRBV20-1, TRBJ2-2)
CSASGSGQGGLTGELFF

SEQ ID NO: 536223 - protein, 14 aa, Homo sapiens
  CDR3 for alpha chain variable domain of TCR clone 268112 (TRAV2, TRAJ9)
CAVEDRSGGFKTIF

SEQ ID NO: 536224 - protein, 13 aa, Homo sapiens
  CDR3 for beta chain variable domain of TCR clone 268112 (TRBV3-1, TRBJ1-1)
CASSPVVITEAFF

SEQ ID NO: 536225 - protein, 15 aa, Homo sapiens
  CDR3 for alpha chain variable domain of TCR clone 268113 (TRAV17, TRAJ37)
CATDHGSSNKGKLIF

SEQ ID NO: 536226 - protein, 14 aa, Homo sapiens
  CDR3 for beta chain variable domain of TCR clone 268113 (TRBV7-2, TRBJ2-3)
CASSRTSGADTQYF

SEQ ID NO: 536227 - protein, 15 aa, Homo sapiens
  CDR3 for alpha chain variable domain of TCR clone 268114 (TRAV3, TRAJ29)
CAVRDLYSGNTPLVF

SEQ ID NO: 536228 - protein, 12 aa, Homo sapiens
  CDR3 for beta chain variable domain of TCR clone 268114 (TRBV19, TRBJ2-1)
CASSRQGAEQFF

SEQ ID NO: 536229 - protein, 15 aa, Homo sapiens
  CDR3 for alpha chain variable domain of TCR clone 268115 (TRAV1-2, TRAJ15)
CAVDVMGSAGPALIF

SEQ ID NO: 536230 - protein, 13 aa, Homo sapiens
  CDR3 for beta chain variable domain of TCR clone 268115 (TRBV20-1, TRBJ1-1)
CSAFDRENTEAFF

SEQ ID NO: 536231 - protein, 14 aa, Homo sapiens
  CDR3 for alpha chain variable domain of TCR clone 268116 (TRAV29/DV5, TRAJ45)
CAVYSGGGADGLTF

SEQ ID NO: 536232 - protein, 15 aa, Homo sapiens
  CDR3 for beta chain variable domain of TCR clone 268116 (TRBV19, TRBJ2-3)
CASRETMGSRNTQYF

SEQ ID NO: 536233 - protein, 14 aa, Homo sapiens
  CDR3 for alpha chain variable domain of TCR clone 268117 (TRAV12-2, TRAJ24)
CAVTPADSLGKLQF

SEQ ID NO: 536234 - protein, 12 aa, Homo sapiens
  CDR3 for beta chain variable domain of TCR clone 268117 (TRBV3-1, TRBJ2-1)
CASSQGSSEQFF

SEQ ID NO: 536235 - protein, 15 aa, Homo sapiens
  CDR3 for alpha chain variable domain of TCR clone 268118 (TRAV34, TRAJ38)
CGSDFTPGNNRKLIW

SEQ ID NO: 536236 - protein, 16 aa, Homo sapiens
  CDR3 for beta chain variable domain of TCR clone 268118 (TRBV6-1, TRBJ2-3)
CASSEVIGQGTDTQYF

SEQ ID NO: 536237 - protein, 13 aa, Homo sapiens
  CDR3 for alpha chain variable domain of TCR clone 268119 (TRAV20, TRAJ37)
CAGCSSSTGKLIF

SEQ ID NO: 536238 - protein, 13 aa, Homo sapiens
  CDR3 for beta chain variable domain of TCR clone 268119 (TRBV5-5, TRBJ1-2)
CAISFWRGEDYTF

SEQ ID NO: 536239 - protein, 14 aa, Homo sapiens
  CDR3 for alpha chain variable domain of TCR clone 268120 (TRAV8-3, TRAJ6)
CAVGASGGSYIPTF

SEQ ID NO: 536240 - protein, 17 aa, Homo sapiens
  CDR3 for beta chain variable domain of TCR clone 268120 (TRBV18, TRBJ2-2)
CASSPSDPWQNTRELFF

SEQ ID NO: 536241 - protein, 12 aa, Homo sapiens
  CDR3 for alpha chain variable domain of TCR clone 268121 (TRAV13-1, TRAJ21)
CAAKEGFNKFYF

SEQ ID NO: 536242 - protein, 14 aa, Homo sapiens
  CDR3 for beta chain variable domain of TCR clone 268121 (TRBV7-2, TRBJ2-7)
CASSTKTSFYEQYF

SEQ ID NO: 536243 - protein, 12 aa, Homo sapiens
  CDR3 for alpha chain variable domain of TCR clone 268122 (TRAV8-3, TRAJ20)
CAVGANDYKLSF

SEQ ID NO: 536244 - protein, 17 aa, Homo sapiens
  CDR3 for beta chain variable domain of TCR clone 268122 (TRBV18, TRBJ2-3)
CASSAAGTSGSTDTQYF

SEQ ID NO: 536245 - protein, 16 aa, Homo sapiens
  CDR3 for alpha chain variable domain of TCR clone 268123 (TRAV26-2, TRAJ45)
CTTASPIGGGADGLTF

SEQ ID NO: 536246 - protein, 20 aa, Homo sapiens
  CDR3 for beta chain variable domain of TCR clone 268123 (TRBV28, TRBJ2-1)
CASTPIVRSPGLAGGNEQFF

SEQ ID NO: 536247 - protein, 14 aa, Homo sapiens
  CDR3 for alpha chain variable domain of TCR clone 268124 (TRAV1-2, TRAJ16)
CAVRSAPDGQKLLF

SEQ ID NO: 536248 - protein, 14 aa, Homo sapiens
  CDR3 for beta chain variable domain of TCR clone 268124 (TRBV7-8, TRBJ2-3)
CASSLEAGTDTQYF

SEQ ID NO: 536249 - protein, 11 aa, Homo sapiens
  CDR3 for alpha chain variable domain of TCR clone 268125 (TRAV21, TRAJ11)
CAVNGYSTLTF

SEQ ID NO: 536250 - protein, 16 aa, Homo sapiens
  CDR3 for beta chain variable domain of TCR clone 268125 (TRBV3-1, TRBJ2-7)
CASSQGATGVAYEQYF

SEQ ID NO: 536251 - protein, 16 aa, Homo sapiens
  CDR3 for alpha chain variable domain of TCR clone 268126 (TRAV16, TRAJ4)
CALSRKFSGGYNKLIF

SEQ ID NO: 536252 - protein, 16 aa, Homo sapiens
  CDR3 for beta chain variable domain of TCR clone 268126 (TRBV12-4, TRBJ1-5)
CASSRPVGGSNQPQHF

SEQ ID NO: 536253 - protein, 14 aa, Homo sapiens
  CDR3 for alpha chain variable domain of TCR clone 268127 (TRAV13-1, TRAJ36)
CAASINTGANKLFF

SEQ ID NO: 536254 - protein, 18 aa, Homo sapiens
  CDR3 for beta chain variable domain of TCR clone 268127 (TRBV20-1, TRBJ2-3)
CSARDPWGQGLSTDTQYF

SEQ ID NO: 536255 - protein, 15 aa, Homo sapiens
  CDR3 for alpha chain variable domain of TCR clone 268128 (TRAV22, TRAJ24)
CAVPLSTDSWWKLQF

SEQ ID NO: 536256 - protein, 16 aa, Homo sapiens
  CDR3 for beta chain variable domain of TCR clone 268128 (TRBV28, TRBJ2-7)
CASSFPDRRLTYEQYF

SEQ ID NO: 536257 - protein, 10 aa, Homo sapiens
  CDR3 for alpha chain variable domain of TCR clone 268129 (TRAV21, TRAJ31)
CAVDNARLMF

SEQ ID NO: 536258 - protein, 16 aa, Homo sapiens
  CDR3 for beta chain variable domain of TCR clone 268129 (TRBV28, TRBJ2-1)
CASSSPEYPRDNEQFF

SEQ ID NO: 536259 - protein, 12 aa, Homo sapiens
  CDR3 for alpha chain variable domain of TCR clone 268130 (TRAV17, TRAJ57)
CATDGGSEKLVF

SEQ ID NO: 536260 - protein, 15 aa, Homo sapiens
  CDR3 for beta chain variable domain of TCR clone 268130 (TRBV12-4, TRBJ1-1)
CASSLAVSRGAEAFF

SEQ ID NO: 536261 - protein, 16 aa, Homo sapiens
  CDR3 for alpha chain variable domain of TCR clone 268131 (TRAV8-3, TRAJ10)
CAVGPILTGGGNKLTF

SEQ ID NO: 536262 - protein, 14 aa, Homo sapiens
  CDR3 for beta chain variable domain of TCR clone 268131 (TRBV2, TRBJ2-7)
CASRPPGGHYEQYF

SEQ ID NO: 536263 - protein, 14 aa, Homo sapiens
  CDR3 for alpha chain variable domain of TCR clone 268132 (TRAV8-3, TRAJ10)
CAVGNAGGGNKLTF

SEQ ID NO: 536264 - protein, 15 aa, Homo sapiens
  CDR3 for beta chain variable domain of TCR clone 268132 (TRBV15, TRBJ1-5)
CATSREQGGNQPQHF

SEQ ID NO: 536265 - protein, 12 aa, Homo sapiens
  CDR3 for alpha chain variable domain of TCR clone 268133 (TRAV8-4, TRAJ43)
CAVSVNNNDMRF

SEQ ID NO: 536266 - protein, 14 aa, Homo sapiens
  CDR3 for beta chain variable domain of TCR clone 268133 (TRBV11-2, TRBJ1-2)
CTSSLGTANYGYTF

SEQ ID NO: 536267 - protein, 15 aa, Homo sapiens
  CDR3 for alpha chain variable domain of TCR clone 268134 (TRAV26-1, TRAJ17)
CIVSSFKAAGNKLTL

SEQ ID NO: 536268 - protein, 14 aa, Homo sapiens
  CDR3 for beta chain variable domain of TCR clone 268134 (TRBV6-1, TRBJ2-2)
CASTWQGNTGELFF

SEQ ID NO: 536269 - protein, 14 aa, Homo sapiens
  CDR3 for alpha chain variable domain of TCR clone 268135 (TRAV12-3, TRAJ42)
CAMNYGGSQGNPIF

SEQ ID NO: 536270 - protein, 13 aa, Homo sapiens
  CDR3 for beta chain variable domain of TCR clone 268135 (TRBV20-1, TRBJ1-6)
CSAPLGVGSPLHF

SEQ ID NO: 536271 - protein, 14 aa, Homo sapiens
  CDR3 for alpha chain variable domain of TCR clone 268136 (TRAV12-2, TRAJ53)
CAVKGGGSNNKLTF

SEQ ID NO: 536272 - protein, 14 aa, Homo sapiens
  CDR3 for beta chain variable domain of TCR clone 268136 (TRBV19, TRBJ2-1)
CASPTFVLSGEQFF

SEQ ID NO: 536273 - protein, 13 aa, Homo sapiens
  CDR3 for alpha chain variable domain of TCR clone 268137 (TRAV3, TRAJ21)
GAVREPDFNKFYF

SEQ ID NO: 536274 - protein, 14 aa, Homo sapiens
  CDR3 for beta chain variable domain of TCR clone 268137 (TRBV19, TRBJ2-1)
CASPTFVLGGEQFF

SEQ ID NO: 536275 - protein, 15 aa, Homo sapiens
  CDR3 for alpha chain variable domain of TCR clone 268138 (TRAV12-1, TRAJ4)
CVVNGVSGGYNKLLF

SEQ ID NO: 536276 - protein, 18 aa, Homo sapiens
  CDR3 for beta chain variable domain of TCR clone 268138 (TRBV6-5, TRBJ2-1)
CASSYSSRRAGVYNEQFF

SEQ ID NO: 536277 - protein, 14 aa, Homo sapiens
  CDR3 for alpha chain variable domain of TCR clone 268139 (TRAV13-1, TRAJ44)
CAAKATGTASKLTF

SEQ ID NO: 536278 - protein, 16 aa, Homo sapiens
  CDR3 for beta chain variable domain of TCR clone 268139 (TRBV7-3, TRBJ2-7)
CASSQDRGTSSYEQYF

SEQ ID NO: 536279 - protein, 17 aa, Homo sapiens
  CDR3 for alpha chain variable domain of TCR clone 268140 (TRAV3, TRAJ6)
CAVRDGPRAGGSYKPTF

SEQ ID NO: 536280 - protein, 20 aa, Homo sapiens
  CDR3 for beta chain variable domain of TCR clone 268140 (TRBV28, TRBJ2-1)
CASNPIGRSPGLAGGNEQFF

SEQ ID NO: 536281 - protein, 13 aa, Homo sapiens
  CDR3 for alpha chain variable domain of TCR clone 268141 (TRAV3, TRAJ27)
CAVRPLGAGKSTF

SEQ ID NO: 536282 - protein, 15 aa, Homo sapiens
  CDR3 for beta chain variable domain of TCR clone 268141 (TRBV7-9, TRBJ2-1)
CASSLGWGRANEQFF

SEQ ID NO: 536283 - protein, 14 aa, Homo sapiens
  CDR3 for alpha chain variable domain of TCR clone 268142 (TRAV1-2, TRAJ16)
CDVNRFSDGQKLLF

SEQ ID NO: 536284 - protein, 14 aa, Homo sapiens
  CDR3 for beta chain variable domain of TCR clone 268142 (TRBV7-6, TRBJ2-3)
CASSLGTVTDTQYF

SEQ ID NO: 536285 - protein, 15 aa, Homo sapiens
  CDR3 for alpha chain variable domain of TCR clone 268143 (TRAV13-1, TRAJ43)
CAASGGFGAGTRLTV

SEQ ID NO: 536286 - protein, 11 aa, Homo sapiens
  CDR3 for beta chain variable domain of TCR clone 268143 (TRBV11-2, TRBJ2-2)
CASSLPGELFF

SEQ ID NO: 536287 - protein, 18 aa, Homo sapiens
  CDR3 for alpha chain variable domain of TCR clone 268144 (TRAV13-1, TRAJ52)
CAAKNTNAGGTSYGKLTF

SEQ ID NO: 536288 - protein, 15 aa, Homo sapiens
  CDR3 for beta chain variable domain of TCR clone 268144 (TRBV6-1, TRBJ2-3)
CASSERGGTTDTQYF

SEQ ID NO: 536289 - protein, 17 aa, Homo sapiens
  CDR3 for alpha chain variable domain of TCR clone 268145 (TRAV12-2, TRAJ52)
CAVNTYAGGTSYGKLTF

SEQ ID NO: 536290 - protein, 16 aa, Homo sapiens
  CDR3 for beta chain variable domain of TCR clone 268145 (TRBV5-5, TRBJ2-2)
CASSGRREGATGELFF

SEQ ID NO: 536291 - protein, 16 aa, Homo sapiens
  CDR3 for alpha chain variable domain of TCR clone 268146 (TRAV3, TRAJ21)
CAVRDIDRGNFNKFYF

SEQ ID NO: 536292 - protein, 13 aa, Homo sapiens
  CDR3 for beta chain variable domain of TCR clone 268146 (TRBV27, TRBJ2-7)
CASSLTTGYEQYF

SEQ ID NO: 536293 - protein, 14 aa, Homo sapiens
  CDR3 for alpha chain variable domain of TCR clone 268147 (TRAV17, TRAJ39)
CATDPVRAGNMLTF

SEQ ID NO: 536294 - protein, 15 aa, Homo sapiens
  CDR3 for beta chain variable domain of TCR clone 268147 (TRBV13, TRBJ1-5)
CASIFGQGGVQPQHF

SEQ ID NO: 536295 - protein, 13 aa, Homo sapiens
  CDR3 for alpha chain variable domain of TCR clone 268148 (TRAV21, TRAJ57)
CAVIECGSEKLVF

SEQ ID NO: 536296 - protein, 14 aa, Homo sapiens
  CDR3 for beta chain variable domain of TCR clone 268148 (TRBV12-5, TRBJ2-5)
CASGSRTHQETQYF

SEQ ID NO: 536297 - protein, 12 aa, Homo sapiens
  CDR3 for alpha chain variable domain of TCR clone 268149 (TRAV17, TRAJ49)
CATASTGNQFYF

SEQ ID NO: 536298 - protein, 15 aa, Homo sapiens
  CDR3 for beta chain variable domain of TCR clone 268149 (TRBV15, TRBJ2-1)
CATARDLGSYNEQFF

SEQ ID NO: 536299 - protein, 11 aa, Homo sapiens
  CDR3 for alpha chain variable domain of TCR clone 268150 (TRAV2, TRAJ13)
CASGGYQKVTF

SEQ ID NO: 536300 - protein, 14 aa, Homo sapiens
  CDR3 for beta chain variable domain of TCR clone 268150 (TRBV7-2, TRBJ2-5)
CASSPAGNQETQYF

SEQ ID NO: 536301 - protein, 15 aa, Homo sapiens
  CDR3 for alpha chain variable domain of TCR clone 268151 (TRAV17, TRAJ13)
CATDGGSGGYQKVTF

SEQ ID NO: 536302 - protein, 17 aa, Homo sapiens
  CDR3 for beta chain variable domain of TCR clone 268151 (TRBV11-2, TRBJ2-1)
CASSLYPPGVEYNEQFF

SEQ ID NO: 536303 - protein, 10 aa, Homo sapiens
  CDR3 for alpha chain variable domain of TCR clone 268152 (TRAV1-2, TRAJ23)
CAGQGGKLIF

SEQ ID NO: 536304 - protein, 14 aa, Homo sapiens
  CDR3 for beta chain variable domain of TCR clone 268152 (TRBV6-1, TRBJ1-3)
CAIVQGGGGNTIYF

SEQ ID NO: 536305 - protein, 15 aa, Homo sapiens
  CDR3 for alpha chain variable domain of TCR clone 268153 (TRAV23/DV6, TRAJ30)
CAASSQESRDDTIIL

SEQ ID NO: 536306 - protein, 17 aa, Homo sapiens
  CDR3 for beta chain variable domain of TCR clone 268153 (TRBV4-3, TRBJ2-1)
CASSQFSSGRASGEQFF

SEQ ID NO: 536307 - protein, 15 aa, Homo sapiens
  CDR3 for alpha chain variable domain of TCR clone 268154 (TRAV38-1, TRAJ37)
CAFIFGSGNTGKLIF

SEQ ID NO: 536308 - protein, 17 aa, Homo sapiens
  CDR3 for beta chain variable domain of TCR clone 268154 (TRBV18, TRBJ2-1)
CASSKGLSGGADNEQFF

SEQ ID NO: 536309 - protein, 12 aa, Homo sapiens
  CDR3 for alpha chain variable domain of TCR clone 268155 (TRAV17, TRAJ57)
CATDGGSEKLVF

SEQ ID NO: 536310 - protein, 11 aa, Homo sapiens
  CDR3 for beta chain variable domain of TCR clone 268155 (TRBV12-4, TRBJ2-7)
CATPEKGEQYF

SEQ ID NO: 536311 - protein, 14 aa, Homo sapiens
  CDR3 for alpha chain variable domain of TCR clone 268156 (TRAV1-2, TRAJ16)
CAVNRFSDGQKLIF

SEQ ID NO: 536312 - protein, 11 aa, Homo sapiens
  CDR3 for beta chain variable domain of TCR clone 268156 (TRBV4-1, TRBJ2-2)
CASEHTGELFF

SEQ ID NO: 536313 - protein, 14 aa, Homo sapiens
  CDR3 for alpha chain variable domain of TCR clone 268157 (TRAV3, TRAJ36)
CAVRVGTGANNLFF

SEQ ID NO: 536314 - protein, 16 aa, Homo sapiens
  CDR3 for beta chain variable domain of TCR clone 268157 (TRBV20-1, TRBJ2-6)
CSAREGPGVGANVLTF

SEQ ID NO: 536315 - protein, 14 aa, Homo sapiens
  CDR3 for alpha chain variable domain of TCR clone 268158 (TRAV12-3, TRAJ30)
CAMSLPNRDDKIIF

SEQ ID NO: 536316 - protein, 12 aa, Homo sapiens
  CDR3 for beta chain variable domain of TCR clone 268158 (TRBV11-2, TRBJ2-2)
CASSLGGGELFF

SEQ ID NO: 536317 - protein, 15 aa, Homo sapiens
  CDR3 for alpha chain variable domain of TCR clone 268159 (TRAV41, TRAJ22)
CASDLSWGSARQLTF

SEQ ID NO: 536318 - protein, 11 aa, Homo sapiens
  CDR3 for beta chain variable domain of TCR clone 268159 (TRBV11-2, TRBJ2-2)
CASSLPGELFF

SEQ ID NO: 536319 - protein, 14 aa, Homo sapiens
  CDR3 for alpha chain variable domain of TCR clone 268160 (TRAV23/DV6, TRAJ58)
CAGMRETSGSRLTF

SEQ ID NO: 536320 - protein, 13 aa, Homo sapiens
  CDR3 for beta chain variable domain of TCR clone 268160 (TRBV28, TRBJ2-7)
CASRSRGVYEQYF

SEQ ID NO: 536321 - protein, 14 aa, Homo sapiens
  CDR3 for alpha chain variable domain of TCR clone 268161 (TRAV12-3, TRAJ10)
SHLPLTGGGNKLTF

SEQ ID NO: 536322 - protein, 12 aa, Homo sapiens
  CDR3 for beta chain variable domain of TCR clone 268161 (TRBV7-8, TRBJ2-7)
CASEGGPHEQYF

SEQ ID NO: 536323 - protein, 12 aa, Homo sapiens
  CDR3 for alpha chain variable domain of TCR clone 268162 (TRAV13-1, TRAJ11)
CAGPSGYSTLTF

SEQ ID NO: 536324 - protein, 13 aa, Homo sapiens
  CDR3 for beta chain variable domain of TCR clone 268162 (TRBV12-4, TRBJ2-1)
CASCLSPSNEQFF

SEQ ID NO: 536325 - protein, 16 aa, Homo sapiens
  CDR3 for alpha chain variable domain of TCR clone 268163 (TRAV12-2, TRAJ43)
CAGDAMRFGAGTRLTV

SEQ ID NO: 536326 - protein, 16 aa, Homo sapiens
  CDR3 for beta chain variable domain of TCR clone 268163 (TRBV2, TRBJ2-4)
CASSEAPGGEQNIQYF

SEQ ID NO: 536327 - protein, 13 aa, Homo sapiens
  CDR3 for alpha chain variable domain of TCR clone 268164 (TRAV3, TRAJ33)
CAVKDRSNYQLIW

SEQ ID NO: 536328 - protein, 16 aa, Homo sapiens
  CDR3 for beta chain variable domain of TCR clone 268164 (TRBV4-2, TRBJ2-7)
CASSQDRGTSSYEQYF

SEQ ID NO: 536329 - protein, 17 aa, Homo sapiens
  CDR3 for alpha chain variable domain of TCR clone 268165 (TRAV3, TRAJ42)
CAVRDRDYGGSQGNRIF

SEQ ID NO: 536330 - protein, 14 aa, Homo sapiens
  CDR3 for beta chain variable domain of TCR clone 268165 (TRBV18, TRBJ1-2)
CASSPPGQAYGYTF

SEQ ID NO: 536331 - protein, 11 aa, Homo sapiens
  CDR3 for alpha chain variable domain of TCR clone 268166 (TRAV26-2, TRAJ8)
CILTGSQKLVF

SEQ ID NO: 536332 - protein, 19 aa, Homo sapiens
  CDR3 for beta chain variable domain of TCR clone 268166 (TRBV20-1, TRBJ2-1)
CSARGETSGNSPQIDEQFF

SEQ ID NO: 536333 - protein, 12 aa, Homo sapiens
  CDR3 for alpha chain variable domain of TCR clone 268167 (TRAV10, TRAJ43)
CVVVRVGNDMRF

SEQ ID NO: 536334 - protein, 15 aa, Homo sapiens
  CDR3 for beta chain variable domain of TCR clone 268167 (TRBV2, TRBJ2-7)
CASSEGLARSYEQFF

SEQ ID NO: 536335 - protein, 15 aa, Homo sapiens
  CDR3 for alpha chain variable domain of TCR clone 268168 (TRAV8-3, TRAJ27)
CAVGPSKTNEGKSTF

SEQ ID NO: 536336 - protein, 15 aa, Homo sapiens
  CDR3 for beta chain variable domain of TCR clone 268168 (TRBV7-2, TRBJ2-1)
CASNSGLAGGNEQFF

SEQ ID NO: 536337 - protein, 15 aa, Homo sapiens
  CDR3 for alpha chain variable domain of TCR clone 268169 (TRAV23/DV6, TRAJ39)
CAARMGNNAGNMLTF

SEQ ID NO: 536338 - protein, 17 aa, Homo sapiens
  CDR3 for beta chain variable domain of TCR clone 268169 (TRBV28, TRBJ2-1)
CASSATWGTPSYNEQFF

SEQ ID NO: 536339 - protein, 13 aa, Homo sapiens
  CDR3 for alpha chain variable domain of TCR clone 268170 (TRAV13-1, TRAJ6)
CAASSGGSYIPTF

SEQ ID NO: 536340 - protein, 16 aa, Homo sapiens
  CDR3 for beta chain variable domain of TCR clone 268170 (TRBV20-1, TRBJ2-4)
CSAVAGGPGTFSTSAP

SEQ ID NO: 536341 - protein, 16 aa, Homo sapiens
  CDR3 for alpha chain variable domain of TCR clone 268171 (TRAV3, TRAJ28)
CAVLPRSGAGSYQLTF

SEQ ID NO: 536342 - protein, 13 aa, Homo sapiens
  CDR3 for beta chain variable domain of TCR clone 268171 (TRBV7-3, TRBJ2-7)
CASSQAGGYEQYF

SEQ ID NO: 536343 - protein, 12 aa, Homo sapiens
  CDR3 for alpha chain variable domain of TCR clone 268172 (TRAV25, TRAJ29)
CAGHSGNTPLVF

SEQ ID NO: 536344 - protein, 14 aa, Homo sapiens
  CDR3 for beta chain variable domain of TCR clone 268172 (TRBV6-1, TRBJ2-7)
CASTRTADYYEQYF

SEQ ID NO: 536345 - protein, 18 aa, Homo sapiens
  CDR3 for alpha chain variable domain of TCR clone 268173 (TRAV12-3, TRAJ52)
CAMSVGGAGGTSYGKLTF

SEQ ID NO: 536346 - protein, 16 aa, Homo sapiens
  CDR3 for beta chain variable domain of TCR clone 268173 (TRBV27, TRBJ2-5)
CASSYGPGGQKETQYF

SEQ ID NO: 536347 - protein, 13 aa, Homo sapiens
  CDR3 for alpha chain variable domain of TCR clone 268174 (TRAV12-3, TRAJ54)
CAMTLQRPQKLVF

SEQ ID NO: 536348 - protein, 14 aa, Homo sapiens
  CDR3 for beta chain variable domain of TCR clone 268174 (TRBV4-1, TRBJ2-2)
CASSQAVNTGELFF

SEQ ID NO: 536349 - protein, 12 aa, Homo sapiens
  CDR3 for alpha chain variable domain of TCR clone 268175 (TRAV13-1, TRAJ17)
CAARTAGNKLTF

SEQ ID NO: 536350 - protein, 15 aa, Homo sapiens
  CDR3 for beta chain variable domain of TCR clone 268175 (TRBV7-6, TRBJ1-1)
CASSPQGGANTEAFV

SEQ ID NO: 536351 - protein, 14 aa, Homo sapiens
  CDR3 for alpha chain variable domain of TCR clone 268176 (TRAV1-2, TRAJ26)
CCERPDNYGQNFVF

SEQ ID NO: 536352 - protein, 14 aa, Homo sapiens
  CDR3 for beta chain variable domain of TCR clone 268176 (TRBV27, TRBJ1-1)
CASSLLSGLSEAFF

SEQ ID NO: 536353 - protein, 15 aa, Homo sapiens
  CDR3 for alpha chain variable domain of TCR clone 268177 (TRAV8-3, TRAJ27)
CAVGPSKTNAGKSTF

SEQ ID NO: 536354 - protein, 13 aa, Homo sapiens
  CDR3 for beta chain variable domain of TCR clone 268177 (TRBV11-3, TRBJ1-1)
CASSRQPNTEAFF

SEQ ID NO: 536355 - protein, 15 aa, Homo sapiens
  CDR3 for alpha chain variable domain of TCR clone 268178 (TRAV1-2, TRAJ30)
CAVRPHGNRDDKIIF

SEQ ID NO: 536356 - protein, 15 aa, Homo sapiens
  CDR3 for beta chain variable domain of TCR clone 268178 (TRBV4-1, TRBJ2-5)
CASSQSRGDQETQYF

SEQ ID NO: 536357 - protein, 17 aa, Homo sapiens
  CDR3 for alpha chain variable domain of TCR clone 268179 (TRAV4, TRAJ10)
CLVGDITPTGGGNKLTF

SEQ ID NO: 536358 - protein, 14 aa, Homo sapiens
  CDR3 for beta chain variable domain of TCR clone 268179 (TRBV12-5, TRBJ2-5)
CASGSRTHQETQYF

SEQ ID NO: 536359 - protein, 14 aa, Homo sapiens
  CDR3 for alpha chain variable domain of TCR clone 268180 (TRAV35, TRAJ22)
CAGLRTGSARQLTF

SEQ ID NO: 536360 - protein, 14 aa, Homo sapiens
  CDR3 for beta chain variable domain of TCR clone 268180 (TRBV11-3, TRBJ2-3)
CASSSGQGPDTQYF

SEQ ID NO: 536361 - protein, 16 aa, Homo sapiens
  CDR3 for alpha chain variable domain of TCR clone 268181 (TRAV12-1, TRAJ53)
CVVTSVAGGSNYKLTF

SEQ ID NO: 536362 - protein, 16 aa, Homo sapiens
  CDR3 for beta chain variable domain of TCR clone 268181 (TRBV6-6, TRBJ2-3)
CASSYSHAGSTDTQYC

SEQ ID NO: 536363 - protein, 16 aa, Homo sapiens
  CDR3 for alpha chain variable domain of TCR clone 268182 (TRAV8-1, TRAJ42)
CAVTSRYGGSQGSLIF

SEQ ID NO: 536364 - protein, 12 aa, Homo sapiens
  CDR3 for beta chain variable domain of TCR clone 268182 (TRBV6-3, TRBJ2-7)
CASSLGRRGLYF

SEQ ID NO: 536365 - protein, 13 aa, Homo sapiens
  CDR3 for alpha chain variable domain of TCR clone 268183 (TRAV12-3, TRAJ56)
CALATGANSKLTF

SEQ ID NO: 536366 - protein, 14 aa, Homo sapiens
  CDR3 for beta chain variable domain of TCR clone 268183 (TRBV3-1, TRBJ1-1)
CASSQYRVGTEAFF

SEQ ID NO: 536367 - protein, 10 aa, Homo sapiens
  CDR3 for alpha chain variable domain of TCR clone 268184 (TRAV12-2, TRAJ10)
CAAWTGVETH

SEQ ID NO: 536368 - protein, 17 aa, Homo sapiens
  CDR3 for beta chain variable domain of TCR clone 268184 (TRBV13, TRBJ2-3)
CDSSLSRVAGGRNTQYF

SEQ ID NO: 536369 - protein, 14 aa, Homo sapiens
  CDR3 for alpha chain variable domain of TCR clone 268185 (TRAV24, TRAJ42)
RAQNYGGSQGNLIF

SEQ ID NO: 536370 - protein, 15 aa, Homo sapiens
  CDR3 for beta chain variable domain of TCR clone 268185 (TRBV19, TRBJ1-5)
CASSIPGGAGQPQHF

SEQ ID NO: 536371 - protein, 14 aa, Homo sapiens
  CDR3 for alpha chain variable domain of TCR clone 268186 (TRAV8-6, TRAJ29)
CAVSGWAGNTPLVF

SEQ ID NO: 536372 - protein, 16 aa, Homo sapiens
  CDR3 for beta chain variable domain of TCR clone 268186 (TRBV12-5, TRBJ2-5)
CASGPRTSGNQETQYF

SEQ ID NO: 536373 - protein, 13 aa, Homo sapiens
  CDR3 for alpha chain variable domain of TCR clone 268187 (TRAV22, TRAJ29)
CAVGGSGNTPLVF

SEQ ID NO: 536374 - protein, 14 aa, Homo sapiens
  CDR3 for beta chain variable domain of TCR clone 268187 (TRBV7-6, TRBJ1-6)
CASSQAGGGSPLHF

SEQ ID NO: 536375 - protein, 13 aa, Homo sapiens
  CDR3 for alpha chain variable domain of TCR clone 268188 (TRAV1-1, TRAJ9)
CAAKNTGGFETIF

SEQ ID NO: 536376 - protein, 13 aa, Homo sapiens
  CDR3 for beta chain variable domain of TCR clone 268188 (TRBV7-9, TRBJ1-2)
CASSLKQNYGYTF

SEQ ID NO: 536377 - protein, 11 aa, Homo sapiens
  CDR3 for alpha chain variable domain of TCR clone 268189 (TRAV23/DV6, TRAJ49)
CAVAPVTSSIL

SEQ ID NO: 536378 - protein, 13 aa, Homo sapiens
  CDR3 for beta chain variable domain of TCR clone 268189 (TRBV4-1, TRBJ1-1)
CASSRKMNTEAFF

SEQ ID NO: 536379 - protein, 15 aa, Homo sapiens
  CDR3 for alpha chain variable domain of TCR clone 268190 (TRAV17, TRAJ57)
CATGPSQGGSEKLVF

SEQ ID NO: 536380 - protein, 13 aa, Homo sapiens
  CDR3 for beta chain variable domain of TCR clone 268190 (TRBV11-2, TRBJ2-5)
CASSRGPSETQYF

SEQ ID NO: 536381 - protein, 14 aa, Homo sapiens
  CDR3 for alpha chain variable domain of TCR clone 268191 (TRAV26-2, TRAJ32)
CCVGYGGATNKLIF

SEQ ID NO: 536382 - protein, 12 aa, Homo sapiens
  CDR3 for beta chain variable domain of TCR clone 268191 (TRBV11-2, TRBJ2-5)
CASSLVGETQYF

SEQ ID NO: 536383 - protein, 12 aa, Homo sapiens
  CDR3 for alpha chain variable domain of TCR clone 268192 (TRAV13-1, TRAJ53)
AASGGSNYKLTF

SEQ ID NO: 536384 - protein, 16 aa, Homo sapiens
  CDR3 for beta chain variable domain of TCR clone 268192 (TRBV28, TRBJ2-6)
CASSNRMGSGANVLTF

SEQ ID NO: 536385 - protein, 17 aa, Homo sapiens
  CDR3 for alpha chain variable domain of TCR clone 268193 (TRAV38-2/DV8, TRAJ54)
CAYRRGWGSKGAQKLGF

SEQ ID NO: 536386 - protein, 14 aa, Homo sapiens
  CDR3 for beta chain variable domain of TCR clone 268193 (TRBV20-1, TRBJ2-3)
CSARDGVGKDTQYF

SEQ ID NO: 536387 - protein, 14 aa, Homo sapiens
  CDR3 for alpha chain variable domain of TCR clone 268194 (TRAV35, TRAJ22)
CAGLRPGSARQLTF

SEQ ID NO: 536388 - protein, 15 aa, Homo sapiens
  CDR3 for beta chain variable domain of TCR clone 268194 (TRBV12-4, TRBJ2-5)
CASSPPAGIQETQYF

SEQ ID NO: 536389 - protein, 15 aa, Homo sapiens
  CDR3 for alpha chain variable domain of TCR clone 268195 (TRAV12-3, TRAJ3)
CAMSEGYSSASKIIF

SEQ ID NO: 536390 - protein, 12 aa, Homo sapiens
  CDR3 for beta chain variable domain of TCR clone 268195 (TRBV18, TRBJ2-7)
CASSLDSYEQYF

SEQ ID NO: 536391 - protein, 14 aa, Homo sapiens
  CDR3 for alpha chain variable domain of TCR clone 268196 (TRAV26-1, TRAJ45)
CIIRVVGGADRLTF

SEQ ID NO: 536392 - protein, 16 aa, Homo sapiens
  CDR3 for beta chain variable domain of TCR clone 268196 (TRBV7-9, TRBJ1-1)
CASSLTQVRSNTEAFF

SEQ ID NO: 536393 - protein, 14 aa, Homo sapiens
  CDR3 for alpha chain variable domain of TCR clone 268197 (TRAV8-6, TRAJ30)
CAVRPVNRDDKIIF

SEQ ID NO: 536394 - protein, 16 aa, Homo sapiens
  CDR3 for beta chain variable domain of TCR clone 268197 (TRBV7-8, TRBJ2-6)
CQQRRDRGAGANVLTF

SEQ ID NO: 536395 - protein, 12 aa, Homo sapiens
  CDR3 for alpha chain variable domain of TCR clone 268198 (TRAV8-4, TRAJ43)
CAVSVNNNHMRF

SEQ ID NO: 536396 - protein, 14 aa, Homo sapiens
  CDR3 for beta chain variable domain of TCR clone 268198 (TRBV11-2, TRBJ1-2)
CASSLGTANYGYTF

SEQ ID NO: 536397 - protein, 15 aa, Homo sapiens
  CDR3 for alpha chain variable domain of TCR clone 268199 (TRAV12-1, TRAJ44)
CVVVVNTGTASKLTF

SEQ ID NO: 536398 - protein, 17 aa, Homo sapiens
  CDR3 for beta chain variable domain of TCR clone 268199 (TRBV7-8, TRBJ2-6)
CASRAGTGGAGANVLTF

SEQ ID NO: 536399 - protein, 16 aa, Homo sapiens
  CDR3 for alpha chain variable domain of TCR clone 268200 (TRAV12-2, TRAJ28)
CAVITDSGAGSYQLTF

SEQ ID NO: 536400 - protein, 12 aa, Homo sapiens
  CDR3 for beta chain variable domain of TCR clone 268200 (TRBV9, TRBJ2-2)
CASSLVTGGLFF

SEQ ID NO: 536401 - protein, 18 aa, Homo sapiens
  CDR3 for alpha chain variable domain of TCR clone 268201 (TRAV21, TRAJ52)
CAVRPSPAGGTSYGKLTL

SEQ ID NO: 536402 - protein, 17 aa, Homo sapiens
  CDR3 for beta chain variable domain of TCR clone 268201 (TRBV13, TRBJ2-3)
CASSLSKVAGGRNTQYF

SEQ ID NO: 536403 - protein, 15 aa, Homo sapiens
  CDR3 for alpha chain variable domain of TCR clone 268202 (TRAV8-3, TRAJ27)
CAVGPSKTNAGKSTF

SEQ ID NO: 536404 - protein, 15 aa, Homo sapiens
  CDR3 for beta chain variable domain of TCR clone 268202 (TRBV19, TRBJ1-2)
CASSVGQVLNYGYTF

SEQ ID NO: 536405 - protein, 12 aa, Homo sapiens
  CDR3 for alpha chain variable domain of TCR clone 268203 (TRAV21, TRAJ11)
CAATSGYSTLTF

SEQ ID NO: 536406 - protein, 15 aa, Homo sapiens
  CDR3 for beta chain variable domain of TCR clone 268203 (TRBV2, TRBJ2-3)
CASSDFEKATDTQYF

SEQ ID NO: 536407 - protein, 15 aa, Homo sapiens
  CDR3 for alpha chain variable domain of TCR clone 268204 (TRAV8-6, TRAJ10)
CAVSDQAGGGNKLTF

SEQ ID NO: 536408 - protein, 14 aa, Homo sapiens
  CDR3 for beta chain variable domain of TCR clone 268204 (TRBV4-1, TRBJ2-2)
CASSQAVSTGELFF

SEQ ID NO: 536409 - protein, 16 aa, Homo sapiens
  CDR3 for alpha chain variable domain of TCR clone 268205 (TRAV30, TRAJ24)
CGTEIVDADSWGKFQF

SEQ ID NO: 536410 - protein, 14 aa, Homo sapiens
  CDR3 for beta chain variable domain of TCR clone 268205 (TRBV20-1, TRBJ2-3)
CSALGLEGADTQYF

SEQ ID NO: 536411 - protein, 16 aa, Homo sapiens
  CDR3 for alpha chain variable domain of TCR clone 268206 (TRAV12-3, TRAJ58)
CAMTDTEETSGSRLTL

SEQ ID NO: 536412 - protein, 22 aa, Homo sapiens
  CDR3 for beta chain variable domain of TCR clone 268206 (TRBV23-1, TRBJ2-7)
CASSRRLDSGQGYVGGGYEQYF

SEQ ID NO: 536413 - protein, 14 aa, Homo sapiens
  CDR3 for alpha chain variable domain of TCR clone 268207 (TRAV29/DV5, TRAJ44)
CAAFLVVTASKLTF

SEQ ID NO: 536414 - protein, 14 aa, Homo sapiens
  CDR3 for beta chain variable domain of TCR clone 268207 (TRBV7-3, TRBJ2-1)
CASSLTGGANEQFF

SEQ ID NO: 536415 - protein, 12 aa, Homo sapiens
  CDR3 for alpha chain variable domain of TCR clone 268208 (TRAV13-1, TRAJ49)
CAASPMGNQFYF

SEQ ID NO: 536416 - protein, 13 aa, Homo sapiens
  CDR3 for beta chain variable domain of TCR clone 268208 (TRBV20-1, TRBJ2-2)
CSASAAGTGEMFF

SEQ ID NO: 536417 - protein, 11 aa, Homo sapiens
  CDR3 for alpha chain variable domain of TCR clone 268209 (TRAV12-2, TRAJ36)
CAVDGANNLFF

SEQ ID NO: 536418 - protein, 13 aa, Homo sapiens
  CDR3 for beta chain variable domain of TCR clone 268209 (TRBV28, TRBJ2-5)
CAGVSLGEETQYF

SEQ ID NO: 536419 - protein, 13 aa, Homo sapiens
  CDR3 for alpha chain variable domain of TCR clone 268210 (TRAV12-3, TRAJ13)
CTMSSGGYQKVTF

SEQ ID NO: 536420 - protein, 13 aa, Homo sapiens
  CDR3 for beta chain variable domain of TCR clone 268210 (TRBV20-1, TRBJ1-1)
CSAPPVGHTEAFF

SEQ ID NO: 536421 - protein, 13 aa, Homo sapiens
  CDR3 for alpha chain variable domain of TCR clone 268211 (TRAV22, TRAJ29)
FAVGGSGNTPLVF

SEQ ID NO: 536422 - protein, 18 aa, Homo sapiens
  CDR3 for beta chain variable domain of TCR clone 268211 (TRBV10-3, TRBJ2-3)
CAISESRVGPMRGDTQYF

SEQ ID NO: 536423 - protein, 15 aa, Homo sapiens
  CDR3 for alpha chain variable domain of TCR clone 268212 (TRAV23/DV6, TRAJ42)
CAARGYGGRQGNLIF

SEQ ID NO: 536424 - protein, 13 aa, Homo sapiens
  CDR3 for beta chain variable domain of TCR clone 268212 (TRBV7-2, TRBJ1-5)
CASSTQGSQPQHF

SEQ ID NO: 536425 - protein, 12 aa, Homo sapiens
  CDR3 for alpha chain variable domain of TCR clone 268213 (TRAV13-2, TRAJ23)
CAERHRGGKLIF

SEQ ID NO: 536426 - protein, 14 aa, Homo sapiens
  CDR3 for beta chain variable domain of TCR clone 268213 (TRBV11-2, TRBJ2-3)
CASSLGRGTDTQYF

SEQ ID NO: 536427 - protein, 16 aa, Homo sapiens
  CDR3 for alpha chain variable domain of TCR clone 268214 (TRAV8-3, TRAJ44)
CSVGPLNTGTASKLTF

SEQ ID NO: 536428 - protein, 18 aa, Homo sapiens
  CDR3 for beta chain variable domain of TCR clone 268214 (TRBV3-1, TRBJ2-1)
CASSQDLPGRPLFDEQFF

SEQ ID NO: 536429 - protein, 14 aa, Homo sapiens
  CDR3 for alpha chain variable domain of TCR clone 268215 (TRAV1-2, TRAJ16)
CAVNRFSDGQKLLF

SEQ ID NO: 536430 - protein, 16 aa, Homo sapiens
  CDR3 for beta chain variable domain of TCR clone 268215 (TRBV6-3, TRBJ2-3)
CASSPFGVKPTDTQYF

SEQ ID NO: 536431 - protein, 13 aa, Homo sapiens
  CDR3 for alpha chain variable domain of TCR clone 268216 (TRAV1-1, TRAJ9)
CAAKNTGGFKTIF

SEQ ID NO: 536432 - protein, 14 aa, Homo sapiens
  CDR3 for beta chain variable domain of TCR clone 268216 (TRBV20-1, TRBJ2-1)
CSDHIGGSANEQFF

SEQ ID NO: 536433 - protein, 16 aa, Homo sapiens
  CDR3 for alpha chain variable domain of TCR clone 268217 (TRAV14/DV4, TRAJ54)
CAMREGRIQGAKKLAF

SEQ ID NO: 536434 - protein, 15 aa, Homo sapiens
  CDR3 for beta chain variable domain of TCR clone 268217 (TRBV7-8, TRBJ2-1)
CASSLAGGLYNEQFF

SEQ ID NO: 536435 - protein, 14 aa, Homo sapiens
  CDR3 for alpha chain variable domain of TCR clone 268218 (TRAV3, TRAJ50)
CAVRDETSYDKVIF

SEQ ID NO: 536436 - protein, 16 aa, Homo sapiens
  CDR3 for beta chain variable domain of TCR clone 268218 (TRBV11-2, TRBJ1-4)
CASSPAVGTGGEKLFF

SEQ ID NO: 536437 - protein, 15 aa, Homo sapiens
  CDR3 for alpha chain variable domain of TCR clone 268219 (TRAV21, TRAJ53)
CATLNSGGSNYKLTF

SEQ ID NO: 536438 - protein, 14 aa, Homo sapiens
  CDR3 for beta chain variable domain of TCR clone 268219 (TRBV20-1, TRBJ2-1)
CSAEIGGSANEQFF

SEQ ID NO: 536439 - protein, 15 aa, Homo sapiens
  CDR3 for alpha chain variable domain of TCR clone 268220 (TRAV14/DV4, TRAJ22)
CNERGPPGSARQLTF

SEQ ID NO: 536440 - protein, 16 aa, Homo sapiens
  CDR3 for beta chain variable domain of TCR clone 268220 (TRBV19, TRBJ1-6)
CASSVAPVAGNSPLYF

SEQ ID NO: 536441 - protein, 17 aa, Homo sapiens
  CDR3 for alpha chain variable domain of TCR clone 268221 (TRAV16, TRAJ58)
CITVLSNGKTSGSRLTF

SEQ ID NO: 536442 - protein, 17 aa, Homo sapiens
  CDR3 for beta chain variable domain of TCR clone 268221 (TRBV18, TRBJ2-1)
CASSKGLSGGADNEQFF

SEQ ID NO: 536443 - protein, 17 aa, Homo sapiens
  CDR3 for alpha chain variable domain of TCR clone 268222 (TRAV36/DV7, TRAJ52)
CAVAQRAGGTSYGKRTF

SEQ ID NO: 536444 - protein, 14 aa, Homo sapiens
  CDR3 for beta chain variable domain of TCR clone 268222 (TRBV7-2, TRBJ2-7)
CASSPKTSFYEQYF

SEQ ID NO: 536445 - protein, 21 aa, Homo sapiens
  CDR3 for alpha chain variable domain of TCR clone 268223 (TRAV36/DV7, TRAJ39)
TATQTGDSAIYLPNAGNMLTF

SEQ ID NO: 536446 - protein, 15 aa, Homo sapiens
  CDR3 for beta chain variable domain of TCR clone 268223 (TRBV7-3, TRBJ2-2)
CASSETGQGTGELFF

SEQ ID NO: 536447 - protein, 13 aa, Homo sapiens
  CDR3 for alpha chain variable domain of TCR clone 268224 (TRAV27, TRAJ45)
CRSSGGGADGLTF

SEQ ID NO: 536448 - protein, 14 aa, Homo sapiens
  CDR3 for beta chain variable domain of TCR clone 268224 (TRBV7-9, TRBJ2-1)
CASSSMLGFGEQFF

SEQ ID NO: 536449 - protein, 18 aa, Homo sapiens
  CDR3 for alpha chain variable domain of TCR clone 268225 (TRAV21, TRAJ52)
CAVRPSPAGGTSDGKLTF

SEQ ID NO: 536450 - protein, 18 aa, Homo sapiens
  CDR3 for beta chain variable domain of TCR clone 268225 (TRBV20-1, TRBJ2-6)
CSAETTPTHGSGANVLTF

SEQ ID NO: 536451 - protein, 13 aa, Homo sapiens
  CDR3 for alpha chain variable domain of TCR clone 268226 (TRAV8-4, TRAJ39)
STPPSDAGNMLTF

SEQ ID NO: 536452 - protein, 13 aa, Homo sapiens
  CDR3 for beta chain variable domain of TCR clone 268226 (TRBV12-4, TRBJ2-7)
CAISPTETYEQYF

SEQ ID NO: 536453 - protein, 14 aa, Homo sapiens
  CDR3 for alpha chain variable domain of TCR clone 268227 (TRAV8-4, TRAJ9)
CAVRINTGGFKTIF

SEQ ID NO: 536454 - protein, 15 aa, Homo sapiens
  CDR3 for beta chain variable domain of TCR clone 268227 (TRBV7-2, TRBJ1-2)
CASSPRAGWNYGYTF

SEQ ID NO: 536455 - protein, 16 aa, Homo sapiens
  CDR3 for alpha chain variable domain of TCR clone 268228 (TRAV21, TRAJ37)
CACRTAGSSNTGKLIF

SEQ ID NO: 536456 - protein, 13 aa, Homo sapiens
  CDR3 for beta chain variable domain of TCR clone 268228 (TRBV7-9, TRBJ2-5)
CASLPSGRETQYF

SEQ ID NO: 536457 - protein, 13 aa, Homo sapiens
  CDR3 for alpha chain variable domain of TCR clone 268229 (TRAV2, TRAJ15)
CAVASQAGTALIF

SEQ ID NO: 536458 - protein, 16 aa, Homo sapiens
  CDR3 for beta chain variable domain of TCR clone 268229 (TRBV5-1, TRBJ1-1)
CASSSRGKSLNTEAFF

SEQ ID NO: 536459 - protein, 21 aa, Homo sapiens
  CDR3 for alpha chain variable domain of TCR clone 268230 (TRAV3, )
CVVRPTPDIQNPDPAVYQLRD

SEQ ID NO: 536460 - protein, 15 aa, Homo sapiens
  CDR3 for beta chain variable domain of TCR clone 268230 (TRBV11-3, TRBJ2-5)
CASSDTSGGIETQYF

SEQ ID NO: 536461 - protein, 13 aa, Homo sapiens
  CDR3 for alpha chain variable domain of TCR clone 268231 (TRAV12-1, TRAJ29)
CVVYRSGNTPLVF

SEQ ID NO: 536462 - protein, 11 aa, Homo sapiens
  CDR3 for beta chain variable domain of TCR clone 268231 (TRBV7-9, TRBJ2-3)
CASSYTDTQYF

SEQ ID NO: 536463 - protein, 13 aa, Homo sapiens
  CDR3 for alpha chain variable domain of TCR clone 268232 (TRAV13-2, TRAJ13)
CAERPGGYQKVTF

SEQ ID NO: 536464 - protein, 15 aa, Homo sapiens
  CDR3 for beta chain variable domain of TCR clone 268232 (TRBV7-2, TRBJ2-1)
CASSSGLAGGNEQFF

SEQ ID NO: 536465 - protein, 14 aa, Homo sapiens
  CDR3 for alpha chain variable domain of TCR clone 268233 (TRAV13-1, TRAJ45)
VSVPEGGGADGHTF

SEQ ID NO: 536466 - protein, 14 aa, Homo sapiens
  CDR3 for beta chain variable domain of TCR clone 268233 (TRBV27, TRBJ1-1)
CASSPQGKRAEAFF

SEQ ID NO: 536467 - protein, 13 aa, Homo sapiens
  CDR3 for alpha chain variable domain of TCR clone 268234 (TRAV30, TRAJ24)
CGTVTDSWGKLQF

SEQ ID NO: 536468 - protein, 16 aa, Homo sapiens
  CDR3 for beta chain variable domain of TCR clone 268234 (TRBV5-7, TRBJ2-7)
PAANEGGGRGSYEQYF

SEQ ID NO: 536469 - protein, 15 aa, Homo sapiens
  CDR3 for alpha chain variable domain of TCR clone 268235 (TRAV29/DV5, TRAJ24)
CAASGATDSWGKFPC

SEQ ID NO: 536470 - protein, 12 aa, Homo sapiens
  CDR3 for beta chain variable domain of TCR clone 268235 (TRBV11-2, TRBJ2-2)
CASSLPTGELFF

SEQ ID NO: 536471 - protein, 12 aa, Homo sapiens
  CDR3 for alpha chain variable domain of TCR clone 268236 (TRAV23/DV6, TRAJ49)
CAASSTGNKFYF

SEQ ID NO: 536472 - protein, 15 aa, Homo sapiens
  CDR3 for beta chain variable domain of TCR clone 268236 (TRBV10-3, TRBJ2-3)
CAIDTSGRRTDTQYF

SEQ ID NO: 536473 - protein, 12 aa, Homo sapiens
  CDR3 for alpha chain variable domain of TCR clone 268237 (TRAV13-1, TRAJ21)
CAAKEGFNKFYF

SEQ ID NO: 536474 - protein, 18 aa, Homo sapiens
  CDR3 for beta chain variable domain of TCR clone 268237 (TRBV20-1, TRBJ2-6)
CSAETTATHGSGANVLTF

SEQ ID NO: 536475 - protein, 12 aa, Homo sapiens
  CDR3 for alpha chain variable domain of TCR clone 268238 (TRAV12-3, TRAJ17)
CAMTLIGNKLTF

SEQ ID NO: 536476 - protein, 16 aa, Homo sapiens
  CDR3 for beta chain variable domain of TCR clone 268238 (TRBV11-2, TRBJ2-1)
CASSLEGYRSYNEQFF

SEQ ID NO: 536477 - protein, 16 aa, Homo sapiens
  CDR3 for alpha chain variable domain of TCR clone 268239 (TRAV1-2, TRAJ33)
CAVRAISMDSNYQLIR

SEQ ID NO: 536478 - protein, 14 aa, Homo sapiens
  CDR3 for beta chain variable domain of TCR clone 268239 (TRBV12-5, TRBJ2-5)
CASGSRTHQETQYF

SEQ ID NO: 536479 - protein, 15 aa, Homo sapiens
  CDR3 for alpha chain variable domain of TCR clone 268240 (TRAV12-3, TRAJ6)
CAMSATTGGSYIPTF

SEQ ID NO: 536480 - protein, 14 aa, Homo sapiens
  CDR3 for beta chain variable domain of TCR clone 268240 (TRBV7-9, TRBJ2-1)
CASSPRDPLYEQFF

SEQ ID NO: 536481 - protein, 14 aa, Homo sapiens
  CDR3 for alpha chain variable domain of TCR clone 268241 (TRAV12-2, TRAJ40)
CAVKLPSGTYQYIF

SEQ ID NO: 536482 - protein, 14 aa, Homo sapiens
  CDR3 for beta chain variable domain of TCR clone 268241 (TRBV20-1, TRBJ1-1)
CSAQTRIGGTEAFF

SEQ ID NO: 536483 - protein, 14 aa, Homo sapiens
  CDR3 for alpha chain variable domain of TCR clone 268242 (TRAV1-2, TRAJ8)
CAVREDTGFQKFVF

SEQ ID NO: 536484 - protein, 15 aa, Homo sapiens
  CDR3 for beta chain variable domain of TCR clone 268242 (TRBV20-1, TRBJ1-5)
CSAKPPGQGPQPQHF

SEQ ID NO: 536485 - protein, 14 aa, Homo sapiens
  CDR3 for alpha chain variable domain of TCR clone 268243 (TRAV26-1, TRAJ21)
CIVRPPYNFNKFYF

SEQ ID NO: 536486 - protein, 14 aa, Homo sapiens
  CDR3 for beta chain variable domain of TCR clone 268243 (TRBV7-9, TRBJ2-2)
CASSGLADTGELFF

SEQ ID NO: 536487 - protein, 16 aa, Homo sapiens
  CDR3 for alpha chain variable domain of TCR clone 268244 (TRAV3, TRAJ37)
CAVRPHGSGNTGKLIF

SEQ ID NO: 536488 - protein, 13 aa, Homo sapiens
  CDR3 for beta chain variable domain of TCR clone 268244 (TRBV7-9, TRBJ2-7)
CASSLQGSYEQYF

SEQ ID NO: 536489 - protein, 16 aa, Homo sapiens
  CDR3 for alpha chain variable domain of TCR clone 268245 (TRAV38-1, TRAJ39)
CAFMKHYLGAGNMLTF

SEQ ID NO: 536490 - protein, 18 aa, Homo sapiens
  CDR3 for beta chain variable domain of TCR clone 268245 (TRBV6-7, TRBJ2-1)
CASSSTAGEGGGVNEQFF

SEQ ID NO: 536491 - protein, 10 aa, Homo sapiens
  CDR3 for alpha chain variable domain of TCR clone 268246 (TRAV30, TRAJ48)
CGIGNEQLAF

SEQ ID NO: 536492 - protein, 14 aa, Homo sapiens
  CDR3 for beta chain variable domain of TCR clone 268246 (TRBV7-6, TRBJ2-3)
CASSVAGGTDTQYF

SEQ ID NO: 536493 - protein, 17 aa, Homo sapiens
  CDR3 for alpha chain variable domain of TCR clone 268247 (TRAV16, TRAJ26)
CALSGPEFCLWSRNLIV

SEQ ID NO: 536494 - protein, 12 aa, Homo sapiens
  CDR3 for beta chain variable domain of TCR clone 268247 (TRBV11-2, TRBJ2-1)
CASSPGNNEQFF

SEQ ID NO: 536495 - protein, 19 aa, Homo sapiens
  CDR3 for alpha chain variable domain of TCR clone 268248 (TRAV35, TRAJ30)
CAPGGMTRSSLEKGHDFIF

SEQ ID NO: 536496 - protein, 14 aa, Homo sapiens
  CDR3 for beta chain variable domain of TCR clone 268248 (TRBV19, TRBJ2-7)
CASSIFAGTYEQYF

SEQ ID NO: 536497 - protein, 13 aa, Homo sapiens
  CDR3 for alpha chain variable domain of TCR clone 268249 (TRAV24, TRAJ15)
CAFKDQAGTALIF

SEQ ID NO: 536498 - protein, 14 aa, Homo sapiens
  CDR3 for beta chain variable domain of TCR clone 268249 (TRBV2, TRBJ2-1)
CASSLSGSQAEQFF

SEQ ID NO: 536499 - protein, 15 aa, Homo sapiens
  CDR3 for alpha chain variable domain of TCR clone 268250 (TRAV27, TRAJ53)
CRAIDSGGSNYKLTF

SEQ ID NO: 536500 - protein, 14 aa, Homo sapiens
  CDR3 for beta chain variable domain of TCR clone 268250 (TRBV7-3, TRBJ2-1)
CASSLAGGTNEQFF

SEQ ID NO: 536501 - protein, 13 aa, Homo sapiens
  CDR3 for alpha chain variable domain of TCR clone 268251 (TRAV3, TRAJ43)
CAVRDTRGGAMRF

SEQ ID NO: 536502 - protein, 15 aa, Homo sapiens
  CDR3 for beta chain variable domain of TCR clone 268251 (TRBV6-5, TRBJ1-5)
CASSYSRRSNQPQHF

SEQ ID NO: 536503 - protein, 13 aa, Homo sapiens
  CDR3 for alpha chain variable domain of TCR clone 268252 (TRAV1-2, TRAJ9)
CAILNTGGFKTIF

SEQ ID NO: 536504 - protein, 15 aa, Homo sapiens
  CDR3 for beta chain variable domain of TCR clone 268252 (TRBV7-3, TRBJ2-1)
CASSPTGGGEVEQFF

SEQ ID NO: 536505 - protein, 13 aa, Homo sapiens
  CDR3 for alpha chain variable domain of TCR clone 268253 (TRAV21, TRAJ20)
CAVRRLGDYKLSF

SEQ ID NO: 536506 - protein, 13 aa, Homo sapiens
  CDR3 for beta chain variable domain of TCR clone 268253 (TRBV7-3, TRBJ1-1)
CASSPAGGLEAFF

SEQ ID NO: 536507 - protein, 11 aa, Homo sapiens
  CDR3 for alpha chain variable domain of TCR clone 268254 (TRAV8-3, TRAJ3)
CAATLKQCFQD

SEQ ID NO: 536508 - protein, 14 aa, Homo sapiens
  CDR3 for beta chain variable domain of TCR clone 268254 (TRBV13, TRBJ2-5)
CASSLERVGEAQYF

SEQ ID NO: 536509 - protein, 13 aa, Homo sapiens
  CDR3 for alpha chain variable domain of TCR clone 268255 (TRAV13-2, TRAJ13)
CAERPGGYQKVTF

SEQ ID NO: 536510 - protein, 18 aa, Homo sapiens
  CDR3 for beta chain variable domain of TCR clone 268255 (TRBV12-4, TRBJ2-2)
CASSLVAGTRGRTGELFF

SEQ ID NO: 536511 - protein, 12 aa, Homo sapiens
  CDR3 for alpha chain variable domain of TCR clone 268256 (TRAV23/DV6, TRAJ53)
CAASKLGSGGIN

SEQ ID NO: 536512 - protein, 18 aa, Homo sapiens
  CDR3 for beta chain variable domain of TCR clone 268256 (TRBV11-2, TRBJ2-3)
CASSLGGASRGAPNTQYF

SEQ ID NO: 536513 - protein, 13 aa, Homo sapiens
  CDR3 for alpha chain variable domain of TCR clone 268257 (TRAV21, TRAJ10)
CAVRPGGGNKLTF

SEQ ID NO: 536514 - protein, 13 aa, Homo sapiens
  CDR3 for beta chain variable domain of TCR clone 268257 (TRBV20-1, TRBJ1-1)
CSARGGGNTEAFF

SEQ ID NO: 536515 - protein, 12 aa, Homo sapiens
  CDR3 for alpha chain variable domain of TCR clone 268258 (TRAV12-2, TRAJ31)
CAVTTPDARLMF

SEQ ID NO: 536516 - protein, 12 aa, Homo sapiens
  CDR3 for beta chain variable domain of TCR clone 268258 (TRBV12-4, TRBJ2-7)
CASSLRGYEQYF

SEQ ID NO: 536517 - protein, 12 aa, Homo sapiens
  CDR3 for alpha chain variable domain of TCR clone 268259 (TRAV27, TRAJ11)
CAGASGYSTLTF

SEQ ID NO: 536518 - protein, 14 aa, Homo sapiens
  CDR3 for beta chain variable domain of TCR clone 268259 (TRBV7-3, TRBJ1-1)
CASSLKGGNTEAFF

SEQ ID NO: 536519 - protein, 14 aa, Homo sapiens
  CDR3 for alpha chain variable domain of TCR clone 268260 (TRAV38-1, TRAJ40)
CALRPTSGTYKHIF

SEQ ID NO: 536520 - protein, 14 aa, Homo sapiens
  CDR3 for beta chain variable domain of TCR clone 268260 (TRBV19, TRBJ2-1)
CASPTFVLSGEQFF

SEQ ID NO: 536521 - protein, 14 aa, Homo sapiens
  CDR3 for alpha chain variable domain of TCR clone 268261 (TRAV17, TRAJ15)
CATDRGQAGTALIF

SEQ ID NO: 536522 - protein, 14 aa, Homo sapiens
  CDR3 for beta chain variable domain of TCR clone 268261 (TRBV19, TRBJ2-2)
CASSGQGIAGELFF

SEQ ID NO: 536523 - protein, 11 aa, Homo sapiens
  CDR3 for alpha chain variable domain of TCR clone 268262 (TRAV13-1, TRAJ20)
CAASKKYKLSF

SEQ ID NO: 536524 - protein, 16 aa, Homo sapiens
  CDR3 for beta chain variable domain of TCR clone 268262 (TRBV20-1, TRBJ1-4)
CSAPGQGLLTNEKLFF

SEQ ID NO: 536525 - protein, 14 aa, Homo sapiens
  CDR3 for alpha chain variable domain of TCR clone 268263 (TRAV12-2, TRAJ13)
CAVKKTGGCQKGTF

SEQ ID NO: 536526 - protein, 15 aa, Homo sapiens
  CDR3 for beta chain variable domain of TCR clone 268263 (TRBV27, TRBJ2-1)
CASSNGGGSSNEQFF

SEQ ID NO: 536527 - protein, 18 aa, Homo sapiens
  CDR3 for alpha chain variable domain of TCR clone 268264 (TRAV8-3, TRAJ4)
WVRDPTSNDPGGYNKLFF

SEQ ID NO: 536528 - protein, 13 aa, Homo sapiens
  CDR3 for beta chain variable domain of TCR clone 268264 (TRBV20-1, TRBJ1-2)
CSATGIQGSGYTF

SEQ ID NO: 536529 - protein, 13 aa, Homo sapiens
  CDR3 for alpha chain variable domain of TCR clone 268265 (TRAV17, TRAJ9)
CATDYTGGFITIF

SEQ ID NO: 536530 - protein, 16 aa, Homo sapiens
  CDR3 for beta chain variable domain of TCR clone 268265 (TRBV7-7, TRBJ2-1)
CASSLASGTSYNEQFF

SEQ ID NO: 536531 - protein, 15 aa, Homo sapiens
  CDR3 for alpha chain variable domain of TCR clone 268266 (TRAV12-3, TRAJ42)
CAMSGDGGSQGNLIF

SEQ ID NO: 536532 - protein, 13 aa, Homo sapiens
  CDR3 for beta chain variable domain of TCR clone 268266 (TRBV19, TRBJ1-5)
CASSINSNEPQHF

SEQ ID NO: 536533 - protein, 17 aa, Homo sapiens
  CDR3 for alpha chain variable domain of TCR clone 268267 (TRAV26-1, TRAJ37)
CIVRVITVSSNTGKLIF

SEQ ID NO: 536534 - protein, 13 aa, Homo sapiens
  CDR3 for beta chain variable domain of TCR clone 268267 (TRBV20-1, TRBJ2-5)
CSAREGGKETQYF

SEQ ID NO: 536535 - protein, 15 aa, Homo sapiens
  CDR3 for alpha chain variable domain of TCR clone 268268 (TRAV4, TRAJ39)
CLVGPNNNAGNMLTC

SEQ ID NO: 536536 - protein, 14 aa, Homo sapiens
  CDR3 for beta chain variable domain of TCR clone 268268 (TRBV19, TRBJ2-7)
CASNFRETFTGMYF

SEQ ID NO: 536537 - protein, 14 aa, Homo sapiens
  CDR3 for alpha chain variable domain of TCR clone 268269 (TRAV12-1, TRAJ13)
CVLTDSGGYQKVAF

SEQ ID NO: 536538 - protein, 12 aa, Homo sapiens
  CDR3 for beta chain variable domain of TCR clone 268269 (TRBV29-1, TRBJ2-3)
CSVTGGADTQYF

SEQ ID NO: 536539 - protein, 14 aa, Homo sapiens
  CDR3 for alpha chain variable domain of TCR clone 268270 (TRAV8-3, TRAJ39)
CAVGANNAGNMLNF

SEQ ID NO: 536540 - protein, 12 aa, Homo sapiens
  CDR3 for beta chain variable domain of TCR clone 268270 (TRBV28, TRBJ1-3)
CASVSSGNTIYF

SEQ ID NO: 536541 - protein, 10 aa, Homo sapiens
  CDR3 for alpha chain variable domain of TCR clone 268271 (TRAV3, TRAJ6)
CAVRDGMGRR

SEQ ID NO: 536542 - protein, 15 aa, Homo sapiens
  CDR3 for beta chain variable domain of TCR clone 268271 (TRBV9, TRBJ2-1)
CASSLAGSSYNEQFF

SEQ ID NO: 536543 - protein, 14 aa, Homo sapiens
  CDR3 for alpha chain variable domain of TCR clone 268272 (TRAV26-1, TRAJ38)
CIADNAGNNRKLIW

SEQ ID NO: 536544 - protein, 22 aa, Homo sapiens
  CDR3 for beta chain variable domain of TCR clone 268272 (TRBV7-9, TRBJ2-3)
CASSPTVAGGPHRYAVCWPRHP

SEQ ID NO: 536545 - protein, 14 aa, Homo sapiens
  CDR3 for alpha chain variable domain of TCR clone 268273 (TRAV13-1, TRAJ44)
FAAKATGTASKLTF

SEQ ID NO: 536546 - protein, 13 aa, Homo sapiens
  CDR3 for beta chain variable domain of TCR clone 268273 (TRBV5-5, TRBJ1-2)
CASSFWRGEDYTF

SEQ ID NO: 536547 - protein, 14 aa, Homo sapiens
  CDR3 for alpha chain variable domain of TCR clone 268274 (TRAV13-1, TRAJ17)
CSKYRKGSGNKLTF

SEQ ID NO: 536548 - protein, 14 aa, Homo sapiens
  CDR3 for beta chain variable domain of TCR clone 268274 (TRBV4-1, TRBJ2-2)
CASSQAVNTGELFF

SEQ ID NO: 536549 - protein, 11 aa, Homo sapiens
  CDR3 for alpha chain variable domain of TCR clone 268275 (TRAV2, TRAJ13)
CDSGGYQKVTF

SEQ ID NO: 536550 - protein, 14 aa, Homo sapiens
  CDR3 for beta chain variable domain of TCR clone 268275 (TRBV6-3, TRBJ1-1)
CASSNLLPGAEAFF

SEQ ID NO: 536551 - protein, 12 aa, Homo sapiens
  CDR3 for alpha chain variable domain of TCR clone 268276 (TRAV3, TRAJ20)
CAVRDPDYKLSF

SEQ ID NO: 536552 - protein, 13 aa, Homo sapiens
  CDR3 for beta chain variable domain of TCR clone 268276 (TRBV9, TRBJ2-1)
CASGVGQGGEEFF

SEQ ID NO: 536553 - protein, 15 aa, Homo sapiens
  CDR3 for alpha chain variable domain of TCR clone 268277 (TRAV3, TRAJ3)
CAVRDMSSSASKVIF

SEQ ID NO: 536554 - protein, 14 aa, Homo sapiens
  CDR3 for beta chain variable domain of TCR clone 268277 (TRBV19, TRBJ2-1)
CASPTFVLSGEQFF

SEQ ID NO: 536555 - protein, 16 aa, Homo sapiens
  CDR3 for alpha chain variable domain of TCR clone 268278 (TRAV30, TRAJ24)
CGTEIVDADSWGKFQF

SEQ ID NO: 536556 - protein, 12 aa, Homo sapiens
  CDR3 for beta chain variable domain of TCR clone 268278 (TRBV12-4, TRBJ2-3)
CASSSTADTQYF

SEQ ID NO: 536557 - protein, 13 aa, Homo sapiens
  CDR3 for alpha chain variable domain of TCR clone 268279 (TRAV20, TRAJ49)
CAEQARTGNQFYF

SEQ ID NO: 536558 - protein, 14 aa, Homo sapiens
  CDR3 for beta chain variable domain of TCR clone 268279 (TRBV7-2, TRBJ2-7)
CASSPKTSFYEQYF

SEQ ID NO: 536559 - protein, 14 aa, Homo sapiens
  CDR3 for alpha chain variable domain of TCR clone 268280 (TRAV1-2, TRAJ16)
CAVNRFSDGQKLLF

SEQ ID NO: 536560 - protein, 15 aa, Homo sapiens
  CDR3 for beta chain variable domain of TCR clone 268280 (TRBV19, TRBJ1-5)
CASSIVWAGNQPQHF

SEQ ID NO: 536561 - protein, 13 aa, Homo sapiens
  CDR3 for alpha chain variable domain of TCR clone 268281 (TRAV25, TRAJ35)
CAGGGALGMCCIA

SEQ ID NO: 536562 - protein, 15 aa, Homo sapiens
  CDR3 for beta chain variable domain of TCR clone 268281 (TRBV27, TRBJ2-7)
CASSLFGTGLDEQYF

SEQ ID NO: 536563 - protein, 12 aa, Homo sapiens
  CDR3 for alpha chain variable domain of TCR clone 268282 (TRAV13-1, TRAJ20)
CAARQNDYKLSF

SEQ ID NO: 536564 - protein, 16 aa, Homo sapiens
  CDR3 for beta chain variable domain of TCR clone 268282 (TRBV27, TRBJ2-2)
CASSFRGLVRTGELFF

SEQ ID NO: 536565 - protein, 16 aa, Homo sapiens
  CDR3 for alpha chain variable domain of TCR clone 268283 (TRAV12-3, TRAJ50)
CAMRDPMKTSYEQVIF

SEQ ID NO: 536566 - protein, 13 aa, Homo sapiens
  CDR3 for beta chain variable domain of TCR clone 268283 (TRBV4-1, TRBJ2-3)
CASSLDFTDTQYF

SEQ ID NO: 536567 - protein, 14 aa, Homo sapiens
  CDR3 for alpha chain variable domain of TCR clone 268284 (TRAV12-1, TRAJ34)
CVVNLDYNTDKLIF

SEQ ID NO: 536568 - protein, 16 aa, Homo sapiens
  CDR3 for beta chain variable domain of TCR clone 268284 (TRBV5-1, TRBJ2-2)
CASSLWDTTNTGELFF

SEQ ID NO: 536569 - protein, 15 aa, Homo sapiens
  CDR3 for alpha chain variable domain of TCR clone 268285 (TRAV20, TRAJ54)
CAVQARIQGAQKLVF

SEQ ID NO: 536570 - protein, 13 aa, Homo sapiens
  CDR3 for beta chain variable domain of TCR clone 268285 (TRBV7-9, TRBJ1-2)
CASSLKQNYGYTF

SEQ ID NO: 536571 - protein, 14 aa, Homo sapiens
  CDR3 for alpha chain variable domain of TCR clone 268286 (TRAV17, TRAJ12)
CATDEKDSSYKLIF

SEQ ID NO: 536572 - protein, 14 aa, Homo sapiens
  CDR3 for beta chain variable domain of TCR clone 268286 (TRBV12-4, TRBJ2-5)
CASSQLAGVETQYF

SEQ ID NO: 536573 - protein, 13 aa, Homo sapiens
  CDR3 for alpha chain variable domain of TCR clone 268287 (TRAV13-1, TRAJ29)
CAASIGLNTPLVF

SEQ ID NO: 536574 - protein, 14 aa, Homo sapiens
  CDR3 for beta chain variable domain of TCR clone 268287 (TRBV2, TRBJ2-1)
CASRTGSSYNEQFF

SEQ ID NO: 536575 - protein, 12 aa, Homo sapiens
  CDR3 for alpha chain variable domain of TCR clone 268288 (TRAV12-2, TRAJ31)
CAVNTPDDRLMF

SEQ ID NO: 536576 - protein, 15 aa, Homo sapiens
  CDR3 for beta chain variable domain of TCR clone 268288 (TRBV4-2, TRBJ1-1)
CASSQDQGLNTEAFF

SEQ ID NO: 536577 - protein, 14 aa, Homo sapiens
  CDR3 for alpha chain variable domain of TCR clone 268289 (TRAV38-1, TRAJ29)
CAFITPSGNTPLVF

SEQ ID NO: 536578 - protein, 16 aa, Homo sapiens
  CDR3 for beta chain variable domain of TCR clone 268289 (TRBV11-2, TRBJ1-1)
CASSLRQGGEHSKAFF

SEQ ID NO: 536579 - protein, 15 aa, Homo sapiens
  CDR3 for alpha chain variable domain of TCR clone 268290 (TRAV8-3, TRAJ40)
CAVGPYTSGTYKYIF

SEQ ID NO: 536580 - protein, 16 aa, Homo sapiens
  CDR3 for beta chain variable domain of TCR clone 268290 (TRBV7-2, TRBJ2-7)
CARSLDPGGGSGEQYF

SEQ ID NO: 536581 - protein, 16 aa, Homo sapiens
  CDR3 for alpha chain variable domain of TCR clone 268291 (TRAV27, TRAJ45)
CPPRGRRGGGADGLTF

SEQ ID NO: 536582 - protein, 16 aa, Homo sapiens
  CDR3 for beta chain variable domain of TCR clone 268291 (TRBV7-2, TRBJ1-3)
CASSRLEVSSGNTIYF

SEQ ID NO: 536583 - protein, 13 aa, Homo sapiens
  CDR3 for alpha chain variable domain of TCR clone 268292 (TRAV1-1, TRAJ38)
CASTAGNNRKLIW

SEQ ID NO: 536584 - protein, 14 aa, Homo sapiens
  CDR3 for beta chain variable domain of TCR clone 268292 (TRBV15, TRBJ2-1)
CATSGVEDYNEQFF

SEQ ID NO: 536585 - protein, 13 aa, Homo sapiens
  CDR3 for alpha chain variable domain of TCR clone 268293 (TRAV8-3, TRAJ48)
CAVVPFGNEKLTF

SEQ ID NO: 536586 - protein, 14 aa, Homo sapiens
  CDR3 for beta chain variable domain of TCR clone 268293 (TRBV4-1, TRBJ2-2)
CASSQAVNTGELFF

SEQ ID NO: 536587 - protein, 14 aa, Homo sapiens
  CDR3 for alpha chain variable domain of TCR clone 268294 (TRAV12-1, TRAJ6)
CVVARIRGKLHTYI

SEQ ID NO: 536588 - protein, 15 aa, Homo sapiens
  CDR3 for beta chain variable domain of TCR clone 268294 (TRBV7-3, TRBJ2-1)
CASSLKASEYNERFF

SEQ ID NO: 536589 - protein, 14 aa, Homo sapiens
  CDR3 for alpha chain variable domain of TCR clone 268295 (TRAV12-1, TRAJ12)
CVVTSGDSSYKLIF

SEQ ID NO: 536590 - protein, 16 aa, Homo sapiens
  CDR3 for beta chain variable domain of TCR clone 268295 (TRBV2, TRBJ2-1)
CASSVGGSLSYNEQFF

SEQ ID NO: 536591 - protein, 12 aa, Homo sapiens
  CDR3 for alpha chain variable domain of TCR clone 268296 (TRAV16, TRAJ26)
CASKDGGHNFVF

SEQ ID NO: 536592 - protein, 13 aa, Homo sapiens
  CDR3 for beta chain variable domain of TCR clone 268296 (TRBV25-1, TRBJ1-1)
CASSDRGRAKAFF

SEQ ID NO: 536593 - protein, 10 aa, Homo sapiens
  CDR3 for alpha chain variable domain of TCR clone 268297 (TRAV27, TRAJ58)
SETSGSRLTF

SEQ ID NO: 536594 - protein, 14 aa, Homo sapiens
  CDR3 for beta chain variable domain of TCR clone 268297 (TRBV9, TRBJ2-7)
CASSVAGVPYEQYF

SEQ ID NO: 536595 - protein, 13 aa, Homo sapiens
  CDR3 for alpha chain variable domain of TCR clone 268298 (TRAV26-2, TRAJ57)
CILSRGGSEKLVF

SEQ ID NO: 536596 - protein, 11 aa, Homo sapiens
  CDR3 for beta chain variable domain of TCR clone 268298 (TRBV12-4, TRBJ2-3)
CASTATDTQYF

SEQ ID NO: 536597 - protein, 15 aa, Homo sapiens
  CDR3 for alpha chain variable domain of TCR clone 268299 (TRAV29/DV5, TRAJ40)
CAASAQGSGTYKYIF

SEQ ID NO: 536598 - protein, 15 aa, Homo sapiens
  CDR3 for beta chain variable domain of TCR clone 268299 (TRBV7-2, TRBJ2-3)
CASSVAGACIDTQYF

SEQ ID NO: 536599 - protein, 14 aa, Homo sapiens
  CDR3 for alpha chain variable domain of TCR clone 268300 (TRAV17, TRAJ57)
CATDPRGGSEKLVF

SEQ ID NO: 536600 - protein, 14 aa, Homo sapiens
  CDR3 for beta chain variable domain of TCR clone 268300 (TRBV7-2, TRBJ2-7)
CASSPKTSFYEQYF

SEQ ID NO: 536601 - protein, 17 aa, Homo sapiens
  CDR3 for alpha chain variable domain of TCR clone 268301 (TRAV3, TRAJ6)
CAVRDGPRAGGGYIPTF

SEQ ID NO: 536602 - protein, 13 aa, Homo sapiens
  CDR3 for beta chain variable domain of TCR clone 268301 (TRBV19, TRBJ2-7)
CASSIDRTYEQYF

SEQ ID NO: 536603 - protein, 11 aa, Homo sapiens
  CDR3 for alpha chain variable domain of TCR clone 268302 (TRAV21, TRAJ34)
CAHYNTDKPIF

SEQ ID NO: 536604 - protein, 14 aa, Homo sapiens
  CDR3 for beta chain variable domain of TCR clone 268302 (TRBV13, TRBJ1-1)
CASTVITVNTEAFF

SEQ ID NO: 536605 - protein, 14 aa, Homo sapiens
  CDR3 for alpha chain variable domain of TCR clone 268303 (TRAV8-3, TRAJ21)
CAVGLNPRSDKFYF

SEQ ID NO: 536606 - protein, 16 aa, Homo sapiens
  CDR3 for beta chain variable domain of TCR clone 268303 (TRBV7-9, TRBJ2-7)
CASSSPSANSVNEQYF

SEQ ID NO: 536607 - protein, 16 aa, Homo sapiens
  CDR3 for alpha chain variable domain of TCR clone 268304 (TRAV35, TRAJ28)
CAGQRYSGAGSCQLTF

SEQ ID NO: 536608 - protein, 13 aa, Homo sapiens
  CDR3 for beta chain variable domain of TCR clone 268304 (TRBV19, TRBJ1-2)
CASSQGQVYGYTF

SEQ ID NO: 536609 - protein, 20 aa, Homo sapiens
  CDR3 for alpha chain variable domain of TCR clone 268305 (TRAV1-2, TRAJ34)
LLKELQMKDSASPNTDKLIF

SEQ ID NO: 536610 - protein, 15 aa, Homo sapiens
  CDR3 for beta chain variable domain of TCR clone 268305 (TRBV6-3, TRBJ2-7)
CASSSPGTVFYEQYF

SEQ ID NO: 536611 - protein, 14 aa, Homo sapiens
  CDR3 for alpha chain variable domain of TCR clone 268306 (TRAV1-2, TRAJ16)
CAVNRFSDGEKLLF

SEQ ID NO: 536612 - protein, 17 aa, Homo sapiens
  CDR3 for beta chain variable domain of TCR clone 268306 (TRBV7-2, TRBJ2-7)
CASSFETSGSTSSTSGR

SEQ ID NO: 536613 - protein, 18 aa, Homo sapiens
  CDR3 for alpha chain variable domain of TCR clone 268307 (TRAV13-1, TRAJ52)
CAASKMSAGGTSYGKLTF

SEQ ID NO: 536614 - protein, 14 aa, Homo sapiens
  CDR3 for beta chain variable domain of TCR clone 268307 (TRBV7-2, TRBJ2-5)
CASSTGGELKTQYF

SEQ ID NO: 536615 - protein, 14 aa, Homo sapiens
  CDR3 for alpha chain variable domain of TCR clone 268308 (TRAV3, TRAJ37)
CAVKESGNTGKLIF

SEQ ID NO: 536616 - protein, 14 aa, Homo sapiens
  CDR3 for beta chain variable domain of TCR clone 268308 (TRBV2, TRBJ1-5)
CPSSENRGGQPQHF

SEQ ID NO: 536617 - protein, 13 aa, Homo sapiens
  CDR3 for alpha chain variable domain of TCR clone 268309 (TRAV25, TRAJ54)
CAGTIQGAQKLVF

SEQ ID NO: 536618 - protein, 15 aa, Homo sapiens
  CDR3 for beta chain variable domain of TCR clone 268309 (TRBV19, TRBJ1-5)
CASSILTVENQPQHF

SEQ ID NO: 536619 - protein, 17 aa, Homo sapiens
  CDR3 for alpha chain variable domain of TCR clone 268310 (TRAV3, TRAJ6)
CAVRDGPRAGGSDIPKF

SEQ ID NO: 536620 - protein, 15 aa, Homo sapiens
  CDR3 for beta chain variable domain of TCR clone 268310 (TRBV5-8, TRBJ2-2)
CASSLDRGATGELFF

SEQ ID NO: 536621 - protein, 10 aa, Homo sapiens
  CDR3 for alpha chain variable domain of TCR clone 268311 (TRAV2, TRAJ34)
CAVVNDTLIF

SEQ ID NO: 536622 - protein, 15 aa, Homo sapiens
  CDR3 for beta chain variable domain of TCR clone 268311 (TRBV3-1, TRBJ2-2)
CASSQDWTRAGELFF

SEQ ID NO: 536623 - protein, 12 aa, Homo sapiens
  CDR3 for alpha chain variable domain of TCR clone 268312 (TRAV27, TRAJ35)
CAGADFGNVRHC

SEQ ID NO: 536624 - protein, 15 aa, Homo sapiens
  CDR3 for beta chain variable domain of TCR clone 268312 (TRBV19, TRBJ2-1)
CASSISSGGYNEQFF

SEQ ID NO: 536625 - protein, 16 aa, Homo sapiens
  CDR3 for alpha chain variable domain of TCR clone 268313 (TRAV12-2, TRAJ10)
CAVNRVLTGGGKKPTF

SEQ ID NO: 536626 - protein, 14 aa, Homo sapiens
  CDR3 for beta chain variable domain of TCR clone 268313 (TRBV9, TRBJ2-1)
CASSVALAVNEQFF

SEQ ID NO: 536627 - protein, 16 aa, Homo sapiens
  CDR3 for alpha chain variable domain of TCR clone 268314 (TRAV4, TRAJ18)
CCVLLIGGSTLGRLYF

SEQ ID NO: 536628 - protein, 12 aa, Homo sapiens
  CDR3 for beta chain variable domain of TCR clone 268314 (TRBV6-3, TRBJ2-7)
CASSLTPYAQYF

SEQ ID NO: 536629 - protein, 15 aa, Homo sapiens
  CDR3 for alpha chain variable domain of TCR clone 268315 (TRAV12-1, TRAJ9)
CVVSFGDTGGFKTIF

SEQ ID NO: 536630 - protein, 16 aa, Homo sapiens
  CDR3 for beta chain variable domain of TCR clone 268315 (TRBV2, TRBJ2-1)
CASRSPAGGKYNEQFF

SEQ ID NO: 536631 - protein, 12 aa, Homo sapiens
  CDR3 for alpha chain variable domain of TCR clone 268316 (TRAV21, TRAJ3)
CCFYSSASKIIF

SEQ ID NO: 536632 - protein, 15 aa, Homo sapiens
  CDR3 for beta chain variable domain of TCR clone 268316 (TRBV20-1, TRBJ2-7)
CSARDRVAGMDEQYF

SEQ ID NO: 536633 - protein, 14 aa, Homo sapiens
  CDR3 for alpha chain variable domain of TCR clone 268317 (TRAV13-1, TRAJ45)
CAAIGGGGADGLTF

SEQ ID NO: 536634 - protein, 16 aa, Homo sapiens
  CDR3 for beta chain variable domain of TCR clone 268317 (TRBV7-2, TRBJ1-1)
CASSLGAGWPNTEAFF

SEQ ID NO: 536635 - protein, 14 aa, Homo sapiens
  CDR3 for alpha chain variable domain of TCR clone 268318 (TRAV1-2, TRAJ16)
CAVNRFSDGQKPLF

SEQ ID NO: 536636 - protein, 15 aa, Homo sapiens
  CDR3 for beta chain variable domain of TCR clone 268318 (TRBV6-3, TRBJ2-7)
CASSSPGTVFYEQYF

SEQ ID NO: 536637 - protein, 15 aa, Homo sapiens
  CDR3 for alpha chain variable domain of TCR clone 268319 (TRAV8-6, TRAJ11)
CAVNFMNSGYSTLTF

SEQ ID NO: 536638 - protein, 15 aa, Homo sapiens
  CDR3 for beta chain variable domain of TCR clone 268319 (TRBV9, TRBJ1-6)
CASSVAGTGDSPLHL

SEQ ID NO: 536639 - protein, 14 aa, Homo sapiens
  CDR3 for alpha chain variable domain of TCR clone 268320 (TRAV12-1, TRAJ8)
CEVNSNTGFQKLVF

SEQ ID NO: 536640 - protein, 17 aa, Homo sapiens
  CDR3 for beta chain variable domain of TCR clone 268320 (TRBV7-8, TRBJ2-6)
CASSAGTGGAGANVLTF

SEQ ID NO: 536641 - protein, 12 aa, Homo sapiens
  CDR3 for alpha chain variable domain of TCR clone 268321 (TRAV24, TRAJ40)
CAFMPGTYKYIF

SEQ ID NO: 536642 - protein, 14 aa, Homo sapiens
  CDR3 for beta chain variable domain of TCR clone 268321 (TRBV6-1, TRBJ2-2)
CASVEHIESGELFF

SEQ ID NO: 536643 - protein, 14 aa, Homo sapiens
  CDR3 for alpha chain variable domain of TCR clone 268322 (TRAV26-1, TRAJ44)
CIVKSTGTASKLTF

SEQ ID NO: 536644 - protein, 13 aa, Homo sapiens
  CDR3 for beta chain variable domain of TCR clone 268322 (TRBV28, TRBJ2-7)
CASSPSGTYEQYF

SEQ ID NO: 536645 - protein, 17 aa, Homo sapiens
  CDR3 for alpha chain variable domain of TCR clone 268323 (TRAV26-1, TRAJ37)
CIVRLITVSSNTGKLIF

SEQ ID NO: 536646 - protein, 14 aa, Homo sapiens
  CDR3 for beta chain variable domain of TCR clone 268323 (TRBV19, TRBJ2-1)
CASPTFVLSGEQFF

SEQ ID NO: 536647 - protein, 15 aa, Homo sapiens
  CDR3 for alpha chain variable domain of TCR clone 268324 (TRAV26-1, TRAJ44)
CIVRANTGTASKLTF

SEQ ID NO: 536648 - protein, 14 aa, Homo sapiens
  CDR3 for beta chain variable domain of TCR clone 268324 (TRBV7-9, TRBJ2-2)
CASSLGHRTGELFF

SEQ ID NO: 536649 - protein, 13 aa, Homo sapiens
  CDR3 for alpha chain variable domain of TCR clone 268325 (TRAV17, TRAJ5)
CALRGTGRRALTF

SEQ ID NO: 536650 - protein, 14 aa, Homo sapiens
  CDR3 for beta chain variable domain of TCR clone 268325 (TRBV4-1, TRBJ2-2)
CVSSQAVNTGELFF

SEQ ID NO: 536651 - protein, 13 aa, Homo sapiens
  CDR3 for alpha chain variable domain of TCR clone 268326 (TRAV12-2, TRAJ4)
CAVRSGGYNKLIF

SEQ ID NO: 536652 - protein, 15 aa, Homo sapiens
  CDR3 for beta chain variable domain of TCR clone 268326 (TRBV10-3, TRBJ2-1)
CAISDVQDRAYEQFC

SEQ ID NO: 536653 - protein, 17 aa, Homo sapiens
  CDR3 for alpha chain variable domain of TCR clone 268327 (TRAV1-1, TRAJ15)
CLLLLRCPNQSGTALIF

SEQ ID NO: 536654 - protein, 15 aa, Homo sapiens
  CDR3 for beta chain variable domain of TCR clone 268327 (TRBV7-3, TRBJ2-1)
CASSPTGGGEVEQFF

SEQ ID NO: 536655 - protein, 14 aa, Homo sapiens
  CDR3 for alpha chain variable domain of TCR clone 268328 (TRAV27, TRAJ22)
CAGVVPGSARQLTF

SEQ ID NO: 536656 - protein, 14 aa, Homo sapiens
  CDR3 for beta chain variable domain of TCR clone 268328 (TRBV2, TRBJ2-7)
CASSLTSGGYEQYF

SEQ ID NO: 536657 - protein, 16 aa, Homo sapiens
  CDR3 for alpha chain variable domain of TCR clone 268329 (TRAV17, TRAJ52)
CATVIIGGTSYGKLTF

SEQ ID NO: 536658 - protein, 14 aa, Homo sapiens
  CDR3 for beta chain variable domain of TCR clone 268329 (TRBV7-3, TRBJ2-2)
CASSSGGYTGELFF

SEQ ID NO: 536659 - protein, 16 aa, Homo sapiens
  CDR3 for alpha chain variable domain of TCR clone 268330 (TRAV3, TRAJ37)
CAVRGKGSGNTGKLIF

SEQ ID NO: 536660 - protein, 12 aa, Homo sapiens
  CDR3 for beta chain variable domain of TCR clone 268330 (TRBV11-2, TRBJ2-2)
CASSLGDGELFF

SEQ ID NO: 536661 - protein, 14 aa, Homo sapiens
  CDR3 for alpha chain variable domain of TCR clone 268331 (TRAV13-1, TRAJ44)
CAAKATGIASKLTF

SEQ ID NO: 536662 - protein, 14 aa, Homo sapiens
  CDR3 for beta chain variable domain of TCR clone 268331 (TRBV19, TRBJ2-2)
CASSTLHRSGELFF

SEQ ID NO: 536663 - protein, 15 aa, Homo sapiens
  CDR3 for alpha chain variable domain of TCR clone 268332 (TRAV27, TRAJ38)
CAARRNAGNNRKLSW

SEQ ID NO: 536664 - protein, 10 aa, Homo sapiens
  CDR3 for beta chain variable domain of TCR clone 268332 (TRBV12-4, TRBJ2-2)
CQQLRRGAVF

SEQ ID NO: 536665 - protein, 14 aa, Homo sapiens
  CDR3 for alpha chain variable domain of TCR clone 268333 (TRAV12-2, TRAJ13)
CAVRKTEGYQKVTF

SEQ ID NO: 536666 - protein, 15 aa, Homo sapiens
  CDR3 for beta chain variable domain of TCR clone 268333 (TRBV27, TRBJ2-1)
CASSNGGGSSNEQFF

SEQ ID NO: 536667 - protein, 12 aa, Homo sapiens
  CDR3 for alpha chain variable domain of TCR clone 268334 (TRAV21, TRAJ39)
CAADNAGNMLTF

SEQ ID NO: 536668 - protein, 14 aa, Homo sapiens
  CDR3 for beta chain variable domain of TCR clone 268334 (TRBV19, TRBJ2-5)
CASSMTGQQETQYF

SEQ ID NO: 536669 - protein, 17 aa, Homo sapiens
  CDR3 for alpha chain variable domain of TCR clone 268335 (TRAV3, TRAJ6)
CAVRDGPRAGGSDIPTF

SEQ ID NO: 536670 - protein, 14 aa, Homo sapiens
  CDR3 for beta chain variable domain of TCR clone 268335 (TRBV7-2, TRBJ2-7)
CASSPKTSCYEQYF

SEQ ID NO: 536671 - protein, 16 aa, Homo sapiens
  CDR3 for alpha chain variable domain of TCR clone 268336 (TRAV26-1, TRAJ36)
CIVRVPNQTGANNLLF

SEQ ID NO: 536672 - protein, 14 aa, Homo sapiens
  CDR3 for beta chain variable domain of TCR clone 268336 (TRBV7-2, TRBJ2-7)
CASSLYPGRYEQYF

SEQ ID NO: 536673 - protein, 12 aa, Homo sapiens
  CDR3 for alpha chain variable domain of TCR clone 268337 (TRAV12-3, TRAJ17)
CAMTLTGNKLAF

SEQ ID NO: 536674 - protein, 15 aa, Homo sapiens
  CDR3 for beta chain variable domain of TCR clone 268337 (TRBV20-1, TRBJ2-7)
CSARDRVAGMDEQYF

SEQ ID NO: 536675 - protein, 11 aa, Homo sapiens
  CDR3 for alpha chain variable domain of TCR clone 268338 (TRAV8-3, TRAJ15)
CAVGPGTAPIF

SEQ ID NO: 536676 - protein, 18 aa, Homo sapiens
  CDR3 for beta chain variable domain of TCR clone 268338 (TRBV18, TRBJ2-3)
CASSYTSGAAGGTDTQYF

SEQ ID NO: 536677 - protein, 14 aa, Homo sapiens
  CDR3 for alpha chain variable domain of TCR clone 268339 (TRAV12-2, TRAJ45)
CAVNKGGGADGLTF

SEQ ID NO: 536678 - protein, 14 aa, Homo sapiens
  CDR3 for beta chain variable domain of TCR clone 268339 (TRBV7-2, TRBJ2-7)
CASSPKTSFYEQYF

SEQ ID NO: 536679 - protein, 12 aa, Homo sapiens
  CDR3 for alpha chain variable domain of TCR clone 268340 (TRAV8-3, TRAJ20)
CAGGSNDYKLSF

SEQ ID NO: 536680 - protein, 16 aa, Homo sapiens
  CDR3 for beta chain variable domain of TCR clone 268340 (TRBV19, TRBJ2-2)
CASRSPGTGATGGLFF

SEQ ID NO: 536681 - protein, 12 aa, Homo sapiens
  CDR3 for alpha chain variable domain of TCR clone 268341 (TRAV13-1, TRAJ49)
CAASPMGNQFYF

SEQ ID NO: 536682 - protein, 11 aa, Homo sapiens
  CDR3 for beta chain variable domain of TCR clone 268341 (TRBV19, TRBJ1-2)
CASSISSGYTF

SEQ ID NO: 536683 - protein, 18 aa, Homo sapiens
  CDR3 for alpha chain variable domain of TCR clone 268342 (TRAV29/DV5, TRAJ52)
CAAGFRGAGGTRYGRLTF

SEQ ID NO: 536684 - protein, 16 aa, Homo sapiens
  CDR3 for beta chain variable domain of TCR clone 268342 (TRBV7-3, TRBJ2-2)
CASSLKRGTLSGELFF

SEQ ID NO: 536685 - protein, 13 aa, Homo sapiens
  CDR3 for alpha chain variable domain of TCR clone 268343 (TRAV12-1, TRAJ9)
CVVLNTGGFKTIF

SEQ ID NO: 536686 - protein, 13 aa, Homo sapiens
  CDR3 for beta chain variable domain of TCR clone 268343 (TRBV4-2, TRBJ1-1)
CASSQAGNTEAFF

SEQ ID NO: 536687 - protein, 18 aa, Homo sapiens
  CDR3 for alpha chain variable domain of TCR clone 268344 (TRAV35, TRAJ28)
CAGHNYPLSGAESYQLTF

SEQ ID NO: 536688 - protein, 12 aa, Homo sapiens
  CDR3 for beta chain variable domain of TCR clone 268344 (TRBV7-9, TRBJ1-1)
CASSLEGTEAFF

SEQ ID NO: 536689 - protein, 13 aa, Homo sapiens
  CDR3 for alpha chain variable domain of TCR clone 268345 (TRAV12-1, TRAJ26)
CVVRRNYGQNFVF

SEQ ID NO: 536690 - protein, 15 aa, Homo sapiens
  CDR3 for beta chain variable domain of TCR clone 268345 (TRBV11-2, TRBJ2-1)
CASSLAPRAHNEQFF

SEQ ID NO: 536691 - protein, 16 aa, Homo sapiens
  CDR3 for alpha chain variable domain of TCR clone 268346 (TRAV30, TRAJ24)
CGTEIVDADSRGKFQF

SEQ ID NO: 536692 - protein, 14 aa, Homo sapiens
  CDR3 for beta chain variable domain of TCR clone 268346 (TRBV12-5, TRBJ2-5)
CASGSRTHQETHYF

SEQ ID NO: 536693 - protein, 14 aa, Homo sapiens
  CDR3 for alpha chain variable domain of TCR clone 268347 (TRAV26-1, TRAJ38)
FIADNAGNNRKLIW

SEQ ID NO: 536694 - protein, 12 aa, Homo sapiens
  CDR3 for beta chain variable domain of TCR clone 268347 (TRBV29-1, TRBJ2-3)
CSVTGGADTQYF

SEQ ID NO: 536695 - protein, 18 aa, Homo sapiens
  CDR3 for alpha chain variable domain of TCR clone 268348 (TRAV26-1, TRAJ12)
CCVLLHRELMDSSYKLIF

SEQ ID NO: 536696 - protein, 11 aa, Homo sapiens
  CDR3 for beta chain variable domain of TCR clone 268348 (TRBV7-9, TRBJ2-3)
CASSPPDTQYF

SEQ ID NO: 536697 - protein, 15 aa, Homo sapiens
  CDR3 for alpha chain variable domain of TCR clone 268349 (TRAV26-1, TRAJ42)
FIVRVKGGSQGNIIF

SEQ ID NO: 536698 - protein, 14 aa, Homo sapiens
  CDR3 for beta chain variable domain of TCR clone 268349 (TRBV19, TRBJ2-2)
CATTGHANTGELFF

SEQ ID NO: 536699 - protein, 13 aa, Homo sapiens
  CDR3 for alpha chain variable domain of TCR clone 268350 (TRAV25, TRAJ30)
CAGRVDRDDKIIF

SEQ ID NO: 536700 - protein, 17 aa, Homo sapiens
  CDR3 for beta chain variable domain of TCR clone 268350 (TRBV7-9, TRBJ2-6)
CASSFGAGYFGANVLTV

SEQ ID NO: 536701 - protein, 13 aa, Homo sapiens
  CDR3 for alpha chain variable domain of TCR clone 268351 (TRAV8-3, TRAJ36)
CAVGATGANNLFF

SEQ ID NO: 536702 - protein, 12 aa, Homo sapiens
  CDR3 for beta chain variable domain of TCR clone 268351 (TRBV7-2, TRBJ2-2)
CASSLGGGELFF

SEQ ID NO: 536703 - protein, 13 aa, Homo sapiens
  CDR3 for alpha chain variable domain of TCR clone 268352 (TRAV26-1, TRAJ33)
CIVRVEGNYQLIW

SEQ ID NO: 536704 - protein, 16 aa, Homo sapiens
  CDR3 for beta chain variable domain of TCR clone 268352 (TRBV15, TRBJ2-7)
CATSRDRGRRRGEQDF

SEQ ID NO: 536705 - protein, 13 aa, Homo sapiens
  CDR3 for alpha chain variable domain of TCR clone 268353 (TRAV3, TRAJ36)
CAVSLGGANNLFF

SEQ ID NO: 536706 - protein, 17 aa, Homo sapiens
  CDR3 for beta chain variable domain of TCR clone 268353 (TRBV7-3, TRBJ2-3)
CASSLMKRMRGADTQYF

SEQ ID NO: 536707 - protein, 15 aa, Homo sapiens
  CDR3 for alpha chain variable domain of TCR clone 268354 (TRAV17, TRAJ57)
CATGPSQGGSEKLVF

SEQ ID NO: 536708 - protein, 15 aa, Homo sapiens
  CDR3 for beta chain variable domain of TCR clone 268354 (TRBV25-1, TRBJ1-4)
CASSPGDGTNEKLFF

SEQ ID NO: 536709 - protein, 13 aa, Homo sapiens
  CDR3 for alpha chain variable domain of TCR clone 268355 (TRAV12-2, TRAJ7)
CAGLIYGNNRLAF

SEQ ID NO: 536710 - protein, 14 aa, Homo sapiens
  CDR3 for beta chain variable domain of TCR clone 268355 (TRBV6-1, TRBJ2-1)
CATFTSGQNNEQIF

SEQ ID NO: 536711 - protein, 12 aa, Homo sapiens
  CDR3 for alpha chain variable domain of TCR clone 268356 (TRAV36/DV7, TRAJ26)
CAVDNYCQNFVF

SEQ ID NO: 536712 - protein, 16 aa, Homo sapiens
  CDR3 for beta chain variable domain of TCR clone 268356 (TRBV7-3, TRBJ2-2)
CASSLTGTGTTGELFF

SEQ ID NO: 536713 - protein, 16 aa, Homo sapiens
  CDR3 for alpha chain variable domain of TCR clone 268357 (TRAV3, TRAJ10)
CAVRNMRAGGGNKLTF

SEQ ID NO: 536714 - protein, 13 aa, Homo sapiens
  CDR3 for beta chain variable domain of TCR clone 268357 (TRBV4-2, TRBJ1-1)
CASSQAGNTEAFF

SEQ ID NO: 536715 - protein, 11 aa, Homo sapiens
  CDR3 for alpha chain variable domain of TCR clone 268358 (TRAV17, TRAJ49)
CATNTGNQFYF

SEQ ID NO: 536716 - protein, 12 aa, Homo sapiens
  CDR3 for beta chain variable domain of TCR clone 268358 (TRBV2, TRBJ2-7)
CASSGGSGIQYF

SEQ ID NO: 536717 - protein, 12 aa, Homo sapiens
  CDR3 for alpha chain variable domain of TCR clone 268359 (TRAV26-2, TRAJ21)
CILKGNFNKFYF

SEQ ID NO: 536718 - protein, 14 aa, Homo sapiens
  CDR3 for beta chain variable domain of TCR clone 268359 (TRBV7-3, TRBJ2-2)
CASSPDPSGRELFF

SEQ ID NO: 536719 - protein, 15 aa, Homo sapiens
  CDR3 for alpha chain variable domain of TCR clone 268360 (TRAV17, TRAJ4)
CATGTWSGGHNKLIF

SEQ ID NO: 536720 - protein, 13 aa, Homo sapiens
  CDR3 for beta chain variable domain of TCR clone 268360 (TRBV6-6, TRBJ2-7)
CASSPKHLAEQYF

SEQ ID NO: 536721 - protein, 13 aa, Homo sapiens
  CDR3 for alpha chain variable domain of TCR clone 268361 (TRAV8-1, TRAJ23)
CAWRDNQGGKLIF

SEQ ID NO: 536722 - protein, 15 aa, Homo sapiens
  CDR3 for beta chain variable domain of TCR clone 268361 (TRBV27, TRBJ2-1)
CASSNGGGSSNEQFF

SEQ ID NO: 536723 - protein, 14 aa, Homo sapiens
  CDR3 for alpha chain variable domain of TCR clone 268362 (TRAV1-2, TRAJ16)
CAVNRFSDGQKLLF

SEQ ID NO: 536724 - protein, 15 aa, Homo sapiens
  CDR3 for beta chain variable domain of TCR clone 268362 (TRBV7-9, TRBJ2-3)
CASSQDRGITDTQYF

SEQ ID NO: 536725 - protein, 13 aa, Homo sapiens
  CDR3 for alpha chain variable domain of TCR clone 268363 (TRAV13-2, TRAJ40)
GAEFTSGTYKYIF

SEQ ID NO: 536726 - protein, 14 aa, Homo sapiens
  CDR3 for beta chain variable domain of TCR clone 268363 (TRBV20-1, TRBJ2-4)
CSARDRGQGGIQYF

SEQ ID NO: 536727 - protein, 15 aa, Homo sapiens
  CDR3 for alpha chain variable domain of TCR clone 268364 (TRAV26-1, TRAJ29)
CIVRVEGSGNTPLVF

SEQ ID NO: 536728 - protein, 14 aa, Homo sapiens
  CDR3 for beta chain variable domain of TCR clone 268364 (TRBV2, TRBJ2-2)
CASSLFGGNGELFF

SEQ ID NO: 536729 - protein, 15 aa, Homo sapiens
  CDR3 for alpha chain variable domain of TCR clone 268365 (TRAV41, TRAJ45)
CAASYSGGGADGLIF

SEQ ID NO: 536730 - protein, 14 aa, Homo sapiens
  CDR3 for beta chain variable domain of TCR clone 268365 (TRBV12-5, TRBJ2-5)
CASGSRTHQETQYF

SEQ ID NO: 536731 - protein, 14 aa, Homo sapiens
  CDR3 for alpha chain variable domain of TCR clone 268366 (TRAV1-2, TRAJ8)
CAVREDTGSQKLVF

SEQ ID NO: 536732 - protein, 15 aa, Homo sapiens
  CDR3 for beta chain variable domain of TCR clone 268366 (TRBV5-7, TRBJ2-3)
CASSPGLSTTDTQYF

SEQ ID NO: 536733 - protein, 18 aa, Homo sapiens
  CDR3 for alpha chain variable domain of TCR clone 268367 (TRAV29/DV5, TRAJ52)
CAAGFRGAGGTSYGKLTF

SEQ ID NO: 536734 - protein, 16 aa, Homo sapiens
  CDR3 for beta chain variable domain of TCR clone 268367 (TRBV4-2, TRBJ2-3)
CASSQELARDTDTQYF

SEQ ID NO: 536735 - protein, 13 aa, Homo sapiens
  CDR3 for alpha chain variable domain of TCR clone 268368 (TRAV2, TRAJ40)
CAVVTSGTYKYIF

SEQ ID NO: 536736 - protein, 16 aa, Homo sapiens
  CDR3 for beta chain variable domain of TCR clone 268368 (TRBV19, TRBJ2-2)
CASRSPGTGATGELLF

SEQ ID NO: 536737 - protein, 16 aa, Homo sapiens
  CDR3 for alpha chain variable domain of TCR clone 268369 (TRAV30, TRAJ24)
CGTEIVDADSWGKFQF

SEQ ID NO: 536738 - protein, 13 aa, Homo sapiens
  CDR3 for beta chain variable domain of TCR clone 268369 (TRBV11-2, TRBJ2-5)
CASSTTGEETQYF

SEQ ID NO: 536739 - protein, 13 aa, Homo sapiens
  CDR3 for alpha chain variable domain of TCR clone 268370 (TRAV13-1, TRAJ5)
CAARVTGRTALTS

SEQ ID NO: 536740 - protein, 15 aa, Homo sapiens
  CDR3 for beta chain variable domain of TCR clone 268370 (TRBV7-9, TRBJ2-7)
CASSPGGGLTYEQYF

SEQ ID NO: 536741 - protein, 13 aa, Homo sapiens
  CDR3 for alpha chain variable domain of TCR clone 268371 (TRAV13-1, TRAJ53)
CAASKGSNYKLTF

SEQ ID NO: 536742 - protein, 14 aa, Homo sapiens
  CDR3 for beta chain variable domain of TCR clone 268371 (TRBV5-1, TRBJ2-5)
CASSLAGKQETLYF

SEQ ID NO: 536743 - protein, 13 aa, Homo sapiens
  CDR3 for alpha chain variable domain of TCR clone 268372 (TRAV8-2, TRAJ15)
CVVSGPGRNCSAL

SEQ ID NO: 536744 - protein, 16 aa, Homo sapiens
  CDR3 for beta chain variable domain of TCR clone 268372 (TRBV20-1, TRBJ1-4)
CSARPYGGELNEKLFF

SEQ ID NO: 536745 - protein, 10 aa, Homo sapiens
  CDR3 for alpha chain variable domain of TCR clone 268373 (TRAV12-3, TRAJ49)
RSMNDDQFYF

SEQ ID NO: 536746 - protein, 13 aa, Homo sapiens
  CDR3 for beta chain variable domain of TCR clone 268373 (TRBV12-4, TRBJ1-1)
CASSPGTGFEAFF

SEQ ID NO: 536747 - protein, 13 aa, Homo sapiens
  CDR3 for alpha chain variable domain of TCR clone 268374 (TRAV12-3, TRAJ13)
CAMSSGGYQKVTF

SEQ ID NO: 536748 - protein, 16 aa, Homo sapiens
  CDR3 for beta chain variable domain of TCR clone 268374 (TRBV4-1, TRBJ2-7)
CASSRGDILNSYELYF

SEQ ID NO: 536749 - protein, 13 aa, Homo sapiens
  CDR3 for alpha chain variable domain of TCR clone 268375 (TRAV3, TRAJ30)
CAVRDRGDDKIIF

SEQ ID NO: 536750 - protein, 13 aa, Homo sapiens
  CDR3 for beta chain variable domain of TCR clone 268375 (TRBV7-9, TRBJ1-2)
CASSLKQNYGYTF

SEQ ID NO: 536751 - protein, 14 aa, Homo sapiens
  CDR3 for alpha chain variable domain of TCR clone 268376 (TRAV12-2, TRAJ13)
CAVKKTGGYQKVTF

SEQ ID NO: 536752 - protein, 19 aa, Homo sapiens
  CDR3 for beta chain variable domain of TCR clone 268376 (TRBV7-2, TRBJ2-3)
WASSFLSRNWGGGTDTQYF

SEQ ID NO: 536753 - protein, 17 aa, Homo sapiens
  CDR3 for alpha chain variable domain of TCR clone 268377 (TRAV38-2/DV8, TRAJ23)
CALSRKLIFGQGTELSV

SEQ ID NO: 536754 - protein, 13 aa, Homo sapiens
  CDR3 for beta chain variable domain of TCR clone 268377 (TRBV7-9, TRBJ2-3)
CASSPGSTDTQYF

SEQ ID NO: 536755 - protein, 15 aa, Homo sapiens
  CDR3 for alpha chain variable domain of TCR clone 268378 (TRAV21, TRAJ24)
CAARSSTDSWGKLQF

SEQ ID NO: 536756 - protein, 18 aa, Homo sapiens
  CDR3 for beta chain variable domain of TCR clone 268378 (TRBV24-1, TRBJ2-2)
CATSDSGQGTADTGELFF

SEQ ID NO: 536757 - protein, 13 aa, Homo sapiens
  CDR3 for alpha chain variable domain of TCR clone 268379 (TRAV29/DV5, TRAJ47)
CAASAEYANKLVF

SEQ ID NO: 536758 - protein, 15 aa, Homo sapiens
  CDR3 for beta chain variable domain of TCR clone 268379 (TRBV7-9, TRBJ1-4)
CASSARTGGNEKLFF

SEQ ID NO: 536759 - protein, 14 aa, Homo sapiens
  CDR3 for alpha chain variable domain of TCR clone 268380 (TRAV13-2, TRAJ32)
CAENYGGAKNKLIF

SEQ ID NO: 536760 - protein, 14 aa, Homo sapiens
  CDR3 for beta chain variable domain of TCR clone 268380 (TRBV7-6, TRBJ2-3)
CASSLGTVTDTQYF

SEQ ID NO: 536761 - protein, 11 aa, Homo sapiens
  CDR3 for alpha chain variable domain of TCR clone 268381 (TRAV21, TRAJ11)
CAVNGYSTLTF

SEQ ID NO: 536762 - protein, 13 aa, Homo sapiens
  CDR3 for beta chain variable domain of TCR clone 268381 (TRBV11-2, TRBJ2-5)
CASSRGPSETQYF

SEQ ID NO: 536763 - protein, 13 aa, Homo sapiens
  CDR3 for alpha chain variable domain of TCR clone 268382 (TRAV8-6, TRAJ9)
CAVWDTGGFKTVF

SEQ ID NO: 536764 - protein, 13 aa, Homo sapiens
  CDR3 for beta chain variable domain of TCR clone 268382 (TRBV27, TRBJ1-1)
CASSLSIGAEAFF

SEQ ID NO: 536765 - protein, 16 aa, Homo sapiens
  CDR3 for alpha chain variable domain of TCR clone 268383 (TRAV38-1, TRAJ53)
CACPLNSGGSNYKLTF

SEQ ID NO: 536766 - protein, 16 aa, Homo sapiens
  CDR3 for beta chain variable domain of TCR clone 268383 (TRBV7-3, TRBJ2-2)
CASSLKRGTLSGELFF

SEQ ID NO: 536767 - protein, 13 aa, Homo sapiens
  CDR3 for alpha chain variable domain of TCR clone 268384 (TRAV27, TRAJ16)
CAGACSDGQKLPF

SEQ ID NO: 536768 - protein, 15 aa, Homo sapiens
  CDR3 for beta chain variable domain of TCR clone 268384 (TRBV11-3, TRBJ2-3)
CASLKDGREGDTQYF

SEQ ID NO: 536769 - protein, 13 aa, Homo sapiens
  CDR3 for alpha chain variable domain of TCR clone 268385 (TRAV3, TRAJ20)
CAVRSLTDYKLSF

SEQ ID NO: 536770 - protein, 13 aa, Homo sapiens
  CDR3 for beta chain variable domain of TCR clone 268385 (TRBV6-1, TRBJ2-1)
CAGMDPTNNEQFF

SEQ ID NO: 536771 - protein, 13 aa, Homo sapiens
  CDR3 for alpha chain variable domain of TCR clone 268386 (TRAV13-1, TRAJ39)
CAASIWAGNMLNF

SEQ ID NO: 536772 - protein, 15 aa, Homo sapiens
  CDR3 for beta chain variable domain of TCR clone 268386 (TRBV7-9, TRBJ1-1)
CASSLLEQGGTEAFF

SEQ ID NO: 536773 - protein, 18 aa, Homo sapiens
  CDR3 for alpha chain variable domain of TCR clone 268387 (TRAV21, TRAJ52)
CAVRPSPAGGTSYGKLTF

SEQ ID NO: 536774 - protein, 13 aa, Homo sapiens
  CDR3 for beta chain variable domain of TCR clone 268387 (TRBV12-4, TRBJ1-2)
CASSSGLTVISTF

SEQ ID NO: 536775 - protein, 14 aa, Homo sapiens
  CDR3 for alpha chain variable domain of TCR clone 268388 (TRAV16, TRAJ4)
CALHFSGGYNKLIF

SEQ ID NO: 536776 - protein, 15 aa, Homo sapiens
  CDR3 for beta chain variable domain of TCR clone 268388 (TRBV7-2, TRBJ2-7)
CPSSTRLAGVDEQYF

SEQ ID NO: 536777 - protein, 11 aa, Homo sapiens
  CDR3 for alpha chain variable domain of TCR clone 268389 (TRAV3, TRAJ21)
CAVGNFNKFYF

SEQ ID NO: 536778 - protein, 16 aa, Homo sapiens
  CDR3 for beta chain variable domain of TCR clone 268389 (TRBV19, TRBJ2-1)
CASSKAGPSSYNGHFF

SEQ ID NO: 536779 - protein, 14 aa, Homo sapiens
  CDR3 for alpha chain variable domain of TCR clone 268390 (TRAV14/DV4, TRAJ41)
CAREGPDSGYAHNF

SEQ ID NO: 536780 - protein, 15 aa, Homo sapiens
  CDR3 for beta chain variable domain of TCR clone 268390 (TRBV19, TRBJ2-1)
CASSIQATSYNEQFF

SEQ ID NO: 536781 - protein, 14 aa, Homo sapiens
  CDR3 for alpha chain variable domain of TCR clone 268391 (TRAV17, TRAJ12)
CAILPMDSSYKLIF

SEQ ID NO: 536782 - protein, 11 aa, Homo sapiens
  CDR3 for beta chain variable domain of TCR clone 268391 (TRBV19, TRBJ1-1)
CASSIGSEASF

SEQ ID NO: 536783 - protein, 14 aa, Homo sapiens
  CDR3 for alpha chain variable domain of TCR clone 268392 (TRAV13-1, TRAJ6)
CAASKSGGSYISTF

SEQ ID NO: 536784 - protein, 14 aa, Homo sapiens
  CDR3 for beta chain variable domain of TCR clone 268392 (TRBV2, TRBJ2-5)
CASKKATGLETQYF

SEQ ID NO: 536785 - protein, 13 aa, Homo sapiens
  CDR3 for alpha chain variable domain of TCR clone 268393 (TRAV23/DV6, TRAJ58)
CAARLIRCSRLTV

SEQ ID NO: 536786 - protein, 13 aa, Homo sapiens
  CDR3 for beta chain variable domain of TCR clone 268393 (TRBV2, TRBJ1-6)
CADSGSYNSPLHS

SEQ ID NO: 536787 - protein, 13 aa, Homo sapiens
  CDR3 for alpha chain variable domain of TCR clone 268394 (TRAV35, TRAJ21)
CAGQLSNFNKFYF

SEQ ID NO: 536788 - protein, 15 aa, Homo sapiens
  CDR3 for beta chain variable domain of TCR clone 268394 (TRBV6-3, TRBJ2-7)
CASSSPGTVFYEQYF

SEQ ID NO: 536789 - protein, 14 aa, Homo sapiens
  CDR3 for alpha chain variable domain of TCR clone 268395 (TRAV1-2, TRAJ16)
CPVNRFSDGQKLLF

SEQ ID NO: 536790 - protein, 13 aa, Homo sapiens
  CDR3 for beta chain variable domain of TCR clone 268395 (TRBV27, TRBJ1-1)
CASSLSIGAEAFF

SEQ ID NO: 536791 - protein, 15 aa, Homo sapiens
  CDR3 for alpha chain variable domain of TCR clone 268396 (TRAV12-3, TRAJ6)
CAMSATTGGSYIPTF

SEQ ID NO: 536792 - protein, 17 aa, Homo sapiens
  CDR3 for beta chain variable domain of TCR clone 268396 (TRBV5-1, TRBJ2-5)
CASSSRRLAGGVETQYF

SEQ ID NO: 536793 - protein, 12 aa, Homo sapiens
  CDR3 for alpha chain variable domain of TCR clone 268397 (TRAV12-3, TRAJ17)
RAMTLTGNKLTF

SEQ ID NO: 536794 - protein, 15 aa, Homo sapiens
  CDR3 for beta chain variable domain of TCR clone 268397 (TRBV20-1, TRBJ2-7)
CSARDRVSGMDEQYY

SEQ ID NO: 536795 - protein, 11 aa, Homo sapiens
  CDR3 for alpha chain variable domain of TCR clone 268398 (TRAV17, TRAJ49)
FATNTGNQFYF

SEQ ID NO: 536796 - protein, 12 aa, Homo sapiens
  CDR3 for beta chain variable domain of TCR clone 268398 (TRBV2, TRBJ2-7)
CASSGGSGIPYF

SEQ ID NO: 536797 - protein, 18 aa, Homo sapiens
  CDR3 for alpha chain variable domain of TCR clone 268399 (TRAV13-1, TRAJ52)
CAAKNPNAGGTSYGKLTF

SEQ ID NO: 536798 - protein, 16 aa, Homo sapiens
  CDR3 for beta chain variable domain of TCR clone 268399 (TRBV19, TRBJ2-7)
CASSLTGTSELGEQYF

SEQ ID NO: 536799 - protein, 15 aa, Homo sapiens
  CDR3 for alpha chain variable domain of TCR clone 268400 (TRAV35, TRAJ52)
CAGPRGGTSYGKLTF

SEQ ID NO: 536800 - protein, 14 aa, Homo sapiens
  CDR3 for beta chain variable domain of TCR clone 268400 (TRBV20-1, TRBJ2-7)
CSAWTALSYYEQYF

SEQ ID NO: 536801 - protein, 13 aa, Homo sapiens
  CDR3 for alpha chain variable domain of TCR clone 268401 (TRAV21, TRAJ27)
CAARPGNAGKSTF

SEQ ID NO: 536802 - protein, 15 aa, Homo sapiens
  CDR3 for beta chain variable domain of TCR clone 268401 (TRBV20-1, TRBJ2-7)
CSTGDRVSGMDEQYF

SEQ ID NO: 536803 - protein, 17 aa, Homo sapiens
  CDR3 for alpha chain variable domain of TCR clone 268402 (TRAV3, TRAJ38)
CAVRDCLNAGNNRKLIW

SEQ ID NO: 536804 - protein, 12 aa, Homo sapiens
  CDR3 for beta chain variable domain of TCR clone 268402 (TRBV6-1, TRBJ2-5)
CASSEGRETQYF

SEQ ID NO: 536805 - protein, 12 aa, Homo sapiens
  CDR3 for alpha chain variable domain of TCR clone 268403 (TRAV13-1, TRAJ5)
CAAKAGRRSLTF

SEQ ID NO: 536806 - protein, 14 aa, Homo sapiens
  CDR3 for beta chain variable domain of TCR clone 268403 (TRBV6-1, TRBJ2-5)
CASGGAGIQETQYF

SEQ ID NO: 536807 - protein, 16 aa, Homo sapiens
  CDR3 for alpha chain variable domain of TCR clone 268404 (TRAV8-4, TRAJ5)
CAVSPLTDTGRRAITF

SEQ ID NO: 536808 - protein, 15 aa, Homo sapiens
  CDR3 for beta chain variable domain of TCR clone 268404 (TRBV20-1, TRBJ1-1)
CSASRGVTGNTEAFF

SEQ ID NO: 536809 - protein, 13 aa, Homo sapiens
  CDR3 for alpha chain variable domain of TCR clone 268405 (TRAV1-2, TRAJ9)
CAALNTGGFKTIF

SEQ ID NO: 536810 - protein, 10 aa, Homo sapiens
  CDR3 for beta chain variable domain of TCR clone 268405 (TRBV13, TRBJ2-3)
ALSPTDTQYF

SEQ ID NO: 536811 - protein, 15 aa, Homo sapiens
  CDR3 for alpha chain variable domain of TCR clone 268406 (TRAV27, TRAJ50)
CAGIGRGTSYDKVIF

SEQ ID NO: 536812 - protein, 14 aa, Homo sapiens
  CDR3 for beta chain variable domain of TCR clone 268406 (TRBV7-2, TRBJ1-1)
CASSFYDLNTEAFF

SEQ ID NO: 536813 - protein, 15 aa, Homo sapiens
  CDR3 for alpha chain variable domain of TCR clone 268407 (TRAV12-2, TRAJ57)
CAVSRGQGGSEKLVF

SEQ ID NO: 536814 - protein, 16 aa, Homo sapiens
  CDR3 for beta chain variable domain of TCR clone 268407 (TRBV19, TRBJ2-2)
CASSFPGQGLAGELFF

SEQ ID NO: 536815 - protein, 13 aa, Homo sapiens
  CDR3 for alpha chain variable domain of TCR clone 268408 (TRAV8-3, TRAJ28)
CAVGAVGSYQLTF

SEQ ID NO: 536816 - protein, 13 aa, Homo sapiens
  CDR3 for beta chain variable domain of TCR clone 268408 (TRBV11-2, TRBJ2-7)
CASSGTRPYEQYF

SEQ ID NO: 536817 - protein, 13 aa, Homo sapiens
  CDR3 for alpha chain variable domain of TCR clone 268409 (TRAV8-1, TRAJ23)
CAWRDNQGGKLIF

SEQ ID NO: 536818 - protein, 14 aa, Homo sapiens
  CDR3 for beta chain variable domain of TCR clone 268409 (TRBV6-1, TRBJ1-3)
CASVQGGGGNTIYF

SEQ ID NO: 536819 - protein, 14 aa, Homo sapiens
  CDR3 for alpha chain variable domain of TCR clone 268410 (TRAV12-3, TRAJ9)
CAMSPNTGGFKTIF

SEQ ID NO: 536820 - protein, 12 aa, Homo sapiens
  CDR3 for beta chain variable domain of TCR clone 268410 (TRBV7-2, TRBJ1-6)
CASSLSSSPLHF

SEQ ID NO: 536821 - protein, 14 aa, Homo sapiens
  CDR3 for alpha chain variable domain of TCR clone 268411 (TRAV12-3, TRAJ22)
CAMSLFGSARQLTF

SEQ ID NO: 536822 - protein, 16 aa, Homo sapiens
  CDR3 for beta chain variable domain of TCR clone 268411 (TRBV11-2, TRBJ1-2)
CASSLDRGGNNYGYTF

SEQ ID NO: 536823 - protein, 15 aa, Homo sapiens
  CDR3 for alpha chain variable domain of TCR clone 268412 (TRAV12-3, TRAJ36)
CAVGFVRAGANNLFF

SEQ ID NO: 536824 - protein, 15 aa, Homo sapiens
  CDR3 for beta chain variable domain of TCR clone 268412 (TRBV27, TRBJ2-7)
CASSPPGQGTYEQYF

SEQ ID NO: 536825 - protein, 16 aa, Homo sapiens
  CDR3 for alpha chain variable domain of TCR clone 268413 (TRAV12-3, TRAJ53)
CAMSVGSGGSNYKLTF

SEQ ID NO: 536826 - protein, 13 aa, Homo sapiens
  CDR3 for beta chain variable domain of TCR clone 268413 (TRBV7-6, TRBJ1-2)
CASSLVEDYGYTF

SEQ ID NO: 536827 - protein, 18 aa, Homo sapiens
  CDR3 for alpha chain variable domain of TCR clone 268414 (TRAV3, TRAJ32)
CAVRDIRGNGGATNKLIF

SEQ ID NO: 536828 - protein, 15 aa, Homo sapiens
  CDR3 for beta chain variable domain of TCR clone 268414 (TRBV12-4, TRBJ2-2)
CASSLGVRHTGELFF

SEQ ID NO: 536829 - protein, 11 aa, Homo sapiens
  CDR3 for alpha chain variable domain of TCR clone 268415 (TRAV2, TRAJ13)
CASGAYQKVTF

SEQ ID NO: 536830 - protein, 16 aa, Homo sapiens
  CDR3 for beta chain variable domain of TCR clone 268415 (TRBV19, TRBJ2-1)
CASSMGGGSSYNEQFF

SEQ ID NO: 536831 - protein, 14 aa, Homo sapiens
  CDR3 for alpha chain variable domain of TCR clone 268416 (TRAV26-1, TRAJ45)
CIEVTGGGADGLTF

SEQ ID NO: 536832 - protein, 15 aa, Homo sapiens
  CDR3 for beta chain variable domain of TCR clone 268416 (TRBV7-3, TRBJ2-1)
CASSPQRGGYNEQFF

SEQ ID NO: 536833 - protein, 13 aa, Homo sapiens
  CDR3 for alpha chain variable domain of TCR clone 268417 (TRAV21, TRAJ27)
CAARPGNAGKSTF

SEQ ID NO: 536834 - protein, 16 aa, Homo sapiens
  CDR3 for beta chain variable domain of TCR clone 268417 (TRBV5-1, TRBJ2-3)
CASSVFPMSSTDTQYF

SEQ ID NO: 536835 - protein, 14 aa, Homo sapiens
  CDR3 for alpha chain variable domain of TCR clone 268418 (TRAV27, TRAJ22)
CAGVVPGSARQLTF

SEQ ID NO: 536836 - protein, 16 aa, Homo sapiens
  CDR3 for beta chain variable domain of TCR clone 268418 (TRBV28, TRBJ2-6)
CASSFRTYSGANVLTF

SEQ ID NO: 536837 - protein, 16 aa, Homo sapiens
  CDR3 for alpha chain variable domain of TCR clone 268419 (TRAV3, TRAJ3)
CAVRDRAKSSASKIIF

SEQ ID NO: 536838 - protein, 16 aa, Homo sapiens
  CDR3 for beta chain variable domain of TCR clone 268419 (TRBV20-1, TRBJ2-4)
CSATSVAELAKNIQYF

SEQ ID NO: 536839 - protein, 14 aa, Homo sapiens
  CDR3 for alpha chain variable domain of TCR clone 268420 (TRAV8-1, TRAJ23)
CAVGTYNQGGKLIY

SEQ ID NO: 536840 - protein, 16 aa, Homo sapiens
  CDR3 for beta chain variable domain of TCR clone 268420 (TRBV18, TRBJ1-5)
CASSPSTGNSNQPQHF

SEQ ID NO: 536841 - protein, 14 aa, Homo sapiens
  CDR3 for alpha chain variable domain of TCR clone 268421 (TRAV12-3, TRAJ13)
CAMRNSGSYQKVTF

SEQ ID NO: 536842 - protein, 14 aa, Homo sapiens
  CDR3 for beta chain variable domain of TCR clone 268421 (TRBV4-1, TRBJ1-6)
CASSPGSDSSPLHF

SEQ ID NO: 536843 - protein, 17 aa, Homo sapiens
  CDR3 for alpha chain variable domain of TCR clone 268422 (TRAV13-1, TRAJ31)
CAPRDRLMFGDGTQLVV

SEQ ID NO: 536844 - protein, 14 aa, Homo sapiens
  CDR3 for beta chain variable domain of TCR clone 268422 (TRBV5-4, TRBJ1-1)
CASSLDSRRDEAFF

SEQ ID NO: 536845 - protein, 13 aa, Homo sapiens
  CDR3 for alpha chain variable domain of TCR clone 268423 (TRAV13-1, TRAJ10)
CAALEGGGNKLTF

SEQ ID NO: 536846 - protein, 13 aa, Homo sapiens
  CDR3 for beta chain variable domain of TCR clone 268423 (TRBV7-2, TRBJ2-2)
CASSLAVTGELFF

SEQ ID NO: 536847 - protein, 14 aa, Homo sapiens
  CDR3 for alpha chain variable domain of TCR clone 268424 (TRAV12-3, TRAJ10)
SRLPLTGGGNKLTF

SEQ ID NO: 536848 - protein, 11 aa, Homo sapiens
  CDR3 for beta chain variable domain of TCR clone 268424 (TRBV19, TRBJ1-1)
CASSIGSEAFF

SEQ ID NO: 536849 - protein, 12 aa, Homo sapiens
  CDR3 for alpha chain variable domain of TCR clone 268425 (TRAV3, TRAJ20)
CAVRDPDYKLSF

SEQ ID NO: 536850 - protein, 14 aa, Homo sapiens
  CDR3 for beta chain variable domain of TCR clone 268425 (TRBV7-2, TRBJ2-7)
CASSPKTGFYEQYF

SEQ ID NO: 536851 - protein, 14 aa, Homo sapiens
  CDR3 for alpha chain variable domain of TCR clone 268426 (TRAV35, TRAJ33)
CAGSSQDSNYQLIW

SEQ ID NO: 536852 - protein, 15 aa, Homo sapiens
  CDR3 for beta chain variable domain of TCR clone 268426 (TRBV5-1, TRBJ1-4)
SAPAAWKDGNEKLFF

SEQ ID NO: 536853 - protein, 16 aa, Homo sapiens
  CDR3 for alpha chain variable domain of TCR clone 268427 (TRAV4, TRAJ9)
CLMGDPNRPGGFKTIF

SEQ ID NO: 536854 - protein, 16 aa, Homo sapiens
  CDR3 for beta chain variable domain of TCR clone 268427 (TRBV28, TRBJ1-4)
CASSPPYRGRGEKLFF

SEQ ID NO: 536855 - protein, 11 aa, Homo sapiens
  CDR3 for alpha chain variable domain of TCR clone 268428 (TRAV3, TRAJ21)
CAVGNFNKFYF

SEQ ID NO: 536856 - protein, 16 aa, Homo sapiens
  CDR3 for beta chain variable domain of TCR clone 268428 (TRBV19, TRBJ2-1)
CASSKAAPISYNEQFF

SEQ ID NO: 536857 - protein, 15 aa, Homo sapiens
  CDR3 for alpha chain variable domain of TCR clone 268429 (TRAV34, TRAJ38)
CGADFTPGNNRKLIW

SEQ ID NO: 536858 - protein, 16 aa, Homo sapiens
  CDR3 for beta chain variable domain of TCR clone 268429 (TRBV12-5, TRBJ2-5)
CASGPRTSGNQETHYF

SEQ ID NO: 536859 - protein, 15 aa, Homo sapiens
  CDR3 for alpha chain variable domain of TCR clone 268430 (TRAV2, TRAJ15)
CAVEDREQAGTALIV

SEQ ID NO: 536860 - protein, 13 aa, Homo sapiens
  CDR3 for beta chain variable domain of TCR clone 268430 (TRBV10-2, TRBJ2-7)
CASGTSGGYEQYF

SEQ ID NO: 536861 - protein, 14 aa, Homo sapiens
  CDR3 for alpha chain variable domain of TCR clone 268431 (TRAV12-2, TRAJ53)
CAVKGGGSNYRLTF

SEQ ID NO: 536862 - protein, 15 aa, Homo sapiens
  CDR3 for beta chain variable domain of TCR clone 268431 (TRBV11-2, TRBJ2-2)
CASSSDRVNAGELFF

SEQ ID NO: 536863 - protein, 12 aa, Homo sapiens
  CDR3 for alpha chain variable domain of TCR clone 268432 (TRAV21, TRAJ31)
CAVWGNNARLMF

SEQ ID NO: 536864 - protein, 16 aa, Homo sapiens
  CDR3 for beta chain variable domain of TCR clone 268432 (TRBV19, TRBJ2-3)
CASSPGAASRTDTQYF

SEQ ID NO: 536865 - protein, 16 aa, Homo sapiens
  CDR3 for alpha chain variable domain of TCR clone 268433 (TRAV35, TRAJ52)
CAGQGSGGTSYGKLTF

SEQ ID NO: 536866 - protein, 17 aa, Homo sapiens
  CDR3 for beta chain variable domain of TCR clone 268433 (TRBV13, TRBJ2-3)
CASSRSRVAGGRNTQYF

SEQ ID NO: 536867 - protein, 12 aa, Homo sapiens
  CDR3 for alpha chain variable domain of TCR clone 268434 (TRAV13-1, TRAJ27)
CAAHTNAGTSTF

SEQ ID NO: 536868 - protein, 15 aa, Homo sapiens
  CDR3 for beta chain variable domain of TCR clone 268434 (TRBV7-9, TRBJ1-6)
CASSSPGRGNSPLHF

SEQ ID NO: 536869 - protein, 13 aa, Homo sapiens
  CDR3 for alpha chain variable domain of TCR clone 268435 (TRAV19, TRAJ45)
CARTRRRCWRTHL

SEQ ID NO: 536870 - protein, 15 aa, Homo sapiens
  CDR3 for beta chain variable domain of TCR clone 268435 (TRBV20-1, TRBJ2-7)
CSARDRVSGMDEQYF

SEQ ID NO: 536871 - protein, 12 aa, Homo sapiens
  CDR3 for alpha chain variable domain of TCR clone 268436 (TRAV35, TRAJ49)
CAGWNTGNQFYF

SEQ ID NO: 536872 - protein, 14 aa, Homo sapiens
  CDR3 for beta chain variable domain of TCR clone 268436 (TRBV11-2, TRBJ2-1)
CASSRATSYNEQFF

SEQ ID NO: 536873 - protein, 16 aa, Homo sapiens
  CDR3 for alpha chain variable domain of TCR clone 268437 (TRAV30, TRAJ24)
CGTEIVDADSWGKFQF

SEQ ID NO: 536874 - protein, 13 aa, Homo sapiens
  CDR3 for beta chain variable domain of TCR clone 268437 (TRBV7-2, TRBJ2-2)
CAISLAVTGELFF

SEQ ID NO: 536875 - protein, 14 aa, Homo sapiens
  CDR3 for alpha chain variable domain of TCR clone 268438 (TRAV29/DV5, TRAJ49)
CAASAQNTGNQFYF

SEQ ID NO: 536876 - protein, 12 aa, Homo sapiens
  CDR3 for beta chain variable domain of TCR clone 268438 (TRBV7-8, TRBJ2-7)
CASSLGDREQYF

SEQ ID NO: 536877 - protein, 14 aa, Homo sapiens
  CDR3 for alpha chain variable domain of TCR clone 268439 (TRAV27, TRAJ58)
CAGDGETSGSRLTF

SEQ ID NO: 536878 - protein, 16 aa, Homo sapiens
  CDR3 for beta chain variable domain of TCR clone 268439 (TRBV7-2, TRBJ2-3)
CASSLVALYSTDTQYF

SEQ ID NO: 536879 - protein, 16 aa, Homo sapiens
  CDR3 for alpha chain variable domain of TCR clone 268440 (TRAV26-1, TRAJ23)
CIVRVQPYNQGGKLIF

SEQ ID NO: 536880 - protein, 15 aa, Homo sapiens
  CDR3 for beta chain variable domain of TCR clone 268440 (TRBV5-6, TRBJ2-7)
CASSPYFEGSYEQYF

SEQ ID NO: 536881 - protein, 12 aa, Homo sapiens
  CDR3 for alpha chain variable domain of TCR clone 268441 (TRAV1-1, TRAJ39)
CAVPVVGNMLTF

SEQ ID NO: 536882 - protein, 18 aa, Homo sapiens
  CDR3 for beta chain variable domain of TCR clone 268441 (TRBV7-9, TRBJ2-2)
CASSFRDLNAGNTGELFF

SEQ ID NO: 536883 - protein, 12 aa, Homo sapiens
  CDR3 for alpha chain variable domain of TCR clone 268442 (TRAV13-2, TRAJ23)
CAERHRGGKLIF

SEQ ID NO: 536884 - protein, 15 aa, Homo sapiens
  CDR3 for beta chain variable domain of TCR clone 268442 (TRBV19, TRBJ2-4)
CASSDGGGAKNMQYF

SEQ ID NO: 536885 - protein, 16 aa, Homo sapiens
  CDR3 for alpha chain variable domain of TCR clone 268443 (TRAV26-1, TRAJ45)
CIVEKYSGGGAGGLTF

SEQ ID NO: 536886 - protein, 16 aa, Homo sapiens
  CDR3 for beta chain variable domain of TCR clone 268443 (TRBV12-5, TRBJ2-5)
CASGPRTSGNQETQYF

SEQ ID NO: 536887 - protein, 17 aa, Homo sapiens
  CDR3 for alpha chain variable domain of TCR clone 268444 (TRAV26-1, TRAJ46)
IASSESERKSSGDKLTF

SEQ ID NO: 536888 - protein, 16 aa, Homo sapiens
  CDR3 for beta chain variable domain of TCR clone 268444 (TRBV27, TRBJ2-2)
CASSFRGLVRTGELFF

SEQ ID NO: 536889 - protein, 15 aa, Homo sapiens
  CDR3 for alpha chain variable domain of TCR clone 268445 (TRAV9-2, TRAJ31)
CALSDQVGNNARLMF

SEQ ID NO: 536890 - protein, 15 aa, Homo sapiens
  CDR3 for beta chain variable domain of TCR clone 268445 (TRBV12-4, TRBJ2-5)
CASSPPTGLQETQYF

SEQ ID NO: 536891 - protein, 13 aa, Homo sapiens
  CDR3 for alpha chain variable domain of TCR clone 268446 (TRAV2, TRAJ15)
CAVASQAGTALIF

SEQ ID NO: 536892 - protein, 13 aa, Homo sapiens
  CDR3 for beta chain variable domain of TCR clone 268446 (TRBV20-1, TRBJ2-7)
CSASRSSSYEQYF

SEQ ID NO: 536893 - protein, 11 aa, Homo sapiens
  CDR3 for alpha chain variable domain of TCR clone 268447 (TRAV17, TRAJ48)
CSELWNEKLTF

SEQ ID NO: 536894 - protein, 13 aa, Homo sapiens
  CDR3 for beta chain variable domain of TCR clone 268447 (TRBV6-5, TRBJ2-5)
CASSAPGGETQYF

SEQ ID NO: 536895 - protein, 16 aa, Homo sapiens
  CDR3 for alpha chain variable domain of TCR clone 268448 (TRAV8-3, TRAJ8)
CAVHRDGNTGFQKLVF

SEQ ID NO: 536896 - protein, 15 aa, Homo sapiens
  CDR3 for beta chain variable domain of TCR clone 268448 (TRBV19, TRBJ1-5)
CASSIVWADNQPQHF

SEQ ID NO: 536897 - protein, 12 aa, Homo sapiens
  CDR3 for alpha chain variable domain of TCR clone 268449 (TRAV13-2, TRAJ23)
CAERHRVGKLIF

SEQ ID NO: 536898 - protein, 12 aa, Homo sapiens
  CDR3 for beta chain variable domain of TCR clone 268449 (TRBV11-2, TRBJ2-2)
CASSLGGGELFF

SEQ ID NO: 536899 - protein, 15 aa, Homo sapiens
  CDR3 for alpha chain variable domain of TCR clone 268450 (TRAV26-1, TRAJ56)
CIVRVATGANSKLTF

SEQ ID NO: 536900 - protein, 15 aa, Homo sapiens
  CDR3 for beta chain variable domain of TCR clone 268450 (TRBV27, TRBJ2-7)
CASSPQREGQSEQYF

SEQ ID NO: 536901 - protein, 14 aa, Homo sapiens
  CDR3 for alpha chain variable domain of TCR clone 268451 (TRAV35, TRAJ33)
CAGSSQDRNYQLIW

SEQ ID NO: 536902 - protein, 14 aa, Homo sapiens
  CDR3 for beta chain variable domain of TCR clone 268451 (TRBV20-1, TRBJ2-1)
CSAQIGGSANEQFF

SEQ ID NO: 536903 - protein, 14 aa, Homo sapiens
  CDR3 for alpha chain variable domain of TCR clone 268452 (TRAV29/DV5, TRAJ20)
CAATIRSNDYKLSF

SEQ ID NO: 536904 - protein, 15 aa, Homo sapiens
  CDR3 for beta chain variable domain of TCR clone 268452 (TRBV20-1, TRBJ2-1)
RSASSAGSSYNEQFF

SEQ ID NO: 536905 - protein, 13 aa, Homo sapiens
  CDR3 for alpha chain variable domain of TCR clone 268453 (TRAV22, TRAJ50)
CAVMKTSYDKVIF

SEQ ID NO: 536906 - protein, 13 aa, Homo sapiens
  CDR3 for beta chain variable domain of TCR clone 268453 (TRBV3-1, TRBJ1-1)
CASSQGGGTEAFF

SEQ ID NO: 536907 - protein, 15 aa, Homo sapiens
  CDR3 for alpha chain variable domain of TCR clone 268454 (TRAV12-3, TRAJ11)
CAMTEENSGYSTLTF

SEQ ID NO: 536908 - protein, 16 aa, Homo sapiens
  CDR3 for beta chain variable domain of TCR clone 268454 (TRBV5-1, TRBJ2-7)
CASSLEGLAGLYEQYF

SEQ ID NO: 536909 - protein, 14 aa, Homo sapiens
  CDR3 for alpha chain variable domain of TCR clone 268455 (TRAV12-2, TRAJ40)
CAVKIPSGAYKYIF

SEQ ID NO: 536910 - protein, 14 aa, Homo sapiens
  CDR3 for beta chain variable domain of TCR clone 268455 (TRBV20-1, TRBJ1-1)
CSAQTPIGGTEAFF

SEQ ID NO: 536911 - protein, 16 aa, Homo sapiens
  CDR3 for alpha chain variable domain of TCR clone 268456 (TRAV41, TRAJ22)
CAVHTSHSGSARQLTF

SEQ ID NO: 536912 - protein, 11 aa, Homo sapiens
  CDR3 for beta chain variable domain of TCR clone 268456 (TRBV7-8, TRBJ2-7)
CASSLSLEQYF

SEQ ID NO: 536913 - protein, 11 aa, Homo sapiens
  CDR3 for alpha chain variable domain of TCR clone 268457 (TRAV29/DV5, TRAJ49)
CAAFTGHQFYF

SEQ ID NO: 536914 - protein, 18 aa, Homo sapiens
  CDR3 for beta chain variable domain of TCR clone 268457 (TRBV20-1, TRBJ2-6)
CSAETTPTHGSGANVLTF

SEQ ID NO: 536915 - protein, 14 aa, Homo sapiens
  CDR3 for alpha chain variable domain of TCR clone 268458 (TRAV3, TRAJ20)
CAVPPAPNDYKLSF

SEQ ID NO: 536916 - protein, 15 aa, Homo sapiens
  CDR3 for beta chain variable domain of TCR clone 268458 (TRBV27, TRBJ2-1)
CASSNGGGSSNEQFF

SEQ ID NO: 536917 - protein, 13 aa, Homo sapiens
  CDR3 for alpha chain variable domain of TCR clone 268459 (TRAV8-6, TRAJ21)
CAVSSSSLNKFYF

SEQ ID NO: 536918 - protein, 14 aa, Homo sapiens
  CDR3 for beta chain variable domain of TCR clone 268459 (TRBV7-9, TRBJ2-5)
CASSLDTAQETQYF

SEQ ID NO: 536919 - protein, 15 aa, Homo sapiens
  CDR3 for alpha chain variable domain of TCR clone 268460 (TRAV3, TRAJ36)
CAVRASQTGANNLFF

SEQ ID NO: 536920 - protein, 18 aa, Homo sapiens
  CDR3 for beta chain variable domain of TCR clone 268460 (TRBV20-1, TRBJ2-3)
CSASGLAGGPGTTDTQYF

SEQ ID NO: 536921 - protein, 17 aa, Homo sapiens
  CDR3 for alpha chain variable domain of TCR clone 268461 (TRAV26-1, TRAJ37)
CIVRVITVSSNTGKLIL

SEQ ID NO: 536922 - protein, 15 aa, Homo sapiens
  CDR3 for beta chain variable domain of TCR clone 268461 (TRBV10-3, TRBJ2-1)
CAITFGGGTDNEQFF

SEQ ID NO: 536923 - protein, 13 aa, Homo sapiens
  CDR3 for alpha chain variable domain of TCR clone 268462 (TRAV8-3, TRAJ44)
CAVVPGTASKLTF

SEQ ID NO: 536924 - protein, 16 aa, Homo sapiens
  CDR3 for beta chain variable domain of TCR clone 268462 (TRBV7-3, TRBJ2-3)
CASSLSGYRPEDTQYF

SEQ ID NO: 536925 - protein, 12 aa, Homo sapiens
  CDR3 for alpha chain variable domain of TCR clone 268463 (TRAV17, TRAJ31)
CATEQGNARLMF

SEQ ID NO: 536926 - protein, 17 aa, Homo sapiens
  CDR3 for beta chain variable domain of TCR clone 268463 (TRBV20-1, TRBJ2-1)
CSASSSGLAGSYNEEFF

SEQ ID NO: 536927 - protein, 16 aa, Homo sapiens
  CDR3 for alpha chain variable domain of TCR clone 268464 (TRAV26-1, TRAJ52)
CIVSNAGGTSYGKLTF

SEQ ID NO: 536928 - protein, 15 aa, Homo sapiens
  CDR3 for beta chain variable domain of TCR clone 268464 (TRBV12-4, TRBJ2-5)
CASSPPTGLQETQYF

SEQ ID NO: 536929 - protein, 13 aa, Homo sapiens
  CDR3 for alpha chain variable domain of TCR clone 268465 (TRAV35, TRAJ32)
CAGVGGATNKIIF

SEQ ID NO: 536930 - protein, 17 aa, Homo sapiens
  CDR3 for beta chain variable domain of TCR clone 268465 (TRBV4-3, TRBJ2-1)
CASSQFSSGRASGEQFF

SEQ ID NO: 536931 - protein, 14 aa, Homo sapiens
  CDR3 for alpha chain variable domain of TCR clone 268466 (TRAV12-3, TRAJ9)
CAMSPNTGGFKTTL

SEQ ID NO: 536932 - protein, 12 aa, Homo sapiens
  CDR3 for beta chain variable domain of TCR clone 268466 (TRBV19, TRBJ1-5)
CASSIAQQAQHF

SEQ ID NO: 536933 - protein, 15 aa, Homo sapiens
  CDR3 for alpha chain variable domain of TCR clone 268467 (TRAV3, TRAJ5)
FAVRDLDTGRRALTF

SEQ ID NO: 536934 - protein, 18 aa, Homo sapiens
  CDR3 for beta chain variable domain of TCR clone 268467 (TRBV28, TRBJ2-5)
CASSSYLTSGRGQETQYF

SEQ ID NO: 536935 - protein, 16 aa, Homo sapiens
  CDR3 for alpha chain variable domain of TCR clone 268468 (TRAV1-2, TRAJ10)
CAVRGVLTGGGNKLTF

SEQ ID NO: 536936 - protein, 13 aa, Homo sapiens
  CDR3 for beta chain variable domain of TCR clone 268468 (TRBV7-3, TRBJ1-1)
CASSQDWGAEAFV

SEQ ID NO: 536937 - protein, 15 aa, Homo sapiens
  CDR3 for alpha chain variable domain of TCR clone 268469 (TRAV26-2, TRAJ13)
CILRDLSGGYQKVTF

SEQ ID NO: 536938 - protein, 11 aa, Homo sapiens
  CDR3 for beta chain variable domain of TCR clone 268469 (TRBV11-2, TRBJ1-1)
CASSINTEAFF

SEQ ID NO: 536939 - protein, 19 aa, Homo sapiens
  CDR3 for alpha chain variable domain of TCR clone 268470 (TRAV1-2, TRAJ26)
CLLPLCCGRPDNYGQNFVF

SEQ ID NO: 536940 - protein, 15 aa, Homo sapiens
  CDR3 for beta chain variable domain of TCR clone 268470 (TRBV27, TRBJ2-5)
CASSNGGGSSNEQFF

SEQ ID NO: 536941 - protein, 16 aa, Homo sapiens
  CDR3 for alpha chain variable domain of TCR clone 268471 (TRAV3, TRAJ5)
CAVRNLMDTGRRALTF

SEQ ID NO: 536942 - protein, 16 aa, Homo sapiens
  CDR3 for beta chain variable domain of TCR clone 268471 (TRBV4-2, TRBJ2-7)
CASSKEGLAISYEQYF

SEQ ID NO: 536943 - protein, 14 aa, Homo sapiens
  CDR3 for alpha chain variable domain of TCR clone 268472 (TRAV1-1, TRAJ27)
CAVIYNTNAGKLTF

SEQ ID NO: 536944 - protein, 14 aa, Homo sapiens
  CDR3 for beta chain variable domain of TCR clone 268472 (TRBV7-2, TRBJ2-7)
CASSPKASFYEQYF

SEQ ID NO: 536945 - protein, 14 aa, Homo sapiens
  CDR3 for alpha chain variable domain of TCR clone 268473 (TRAV12-2, TRAJ13)
CAVKKTGGYQKVTL

SEQ ID NO: 536946 - protein, 15 aa, Homo sapiens
  CDR3 for beta chain variable domain of TCR clone 268473 (TRBV20-1, TRBJ2-1)
CSARGIGGTYNEQFF

SEQ ID NO: 536947 - protein, 11 aa, Homo sapiens
  CDR3 for alpha chain variable domain of TCR clone 268474 (TRAV21, TRAJ34)
CAHYNTDKLIF

SEQ ID NO: 536948 - protein, 13 aa, Homo sapiens
  CDR3 for beta chain variable domain of TCR clone 268474 (TRBV7-6, TRBJ1-2)
CASSLVADDGYFF

SEQ ID NO: 536949 - protein, 14 aa, Homo sapiens
  CDR3 for alpha chain variable domain of TCR clone 268475 (TRAV12-2, TRAJ33)
CAVTRARSNYQLIW

SEQ ID NO: 536950 - protein, 14 aa, Homo sapiens
  CDR3 for beta chain variable domain of TCR clone 268475 (TRBV13, TRBJ2-7)
CASSLKGASYEQYF

SEQ ID NO: 536951 - protein, 15 aa, Homo sapiens
  CDR3 for alpha chain variable domain of TCR clone 268476 (TRAV8-3, TRAJ45)
CALSYSGGGADGLTF

SEQ ID NO: 536952 - protein, 13 aa, Homo sapiens
  CDR3 for beta chain variable domain of TCR clone 268476 (TRBV10-3, TRBJ2-7)
CASKLAVNCEQYF

SEQ ID NO: 536953 - protein, 14 aa, Homo sapiens
  CDR3 for alpha chain variable domain of TCR clone 268477 (TRAV8-6, TRAJ53)
CAALVLGSNYKLTF

SEQ ID NO: 536954 - protein, 15 aa, Homo sapiens
  CDR3 for beta chain variable domain of TCR clone 268477 (TRBV20-1, TRBJ2-3)
CSAEPLAGHVDTQYF

SEQ ID NO: 536955 - protein, 12 aa, Homo sapiens
  CDR3 for alpha chain variable domain of TCR clone 268478 (TRAV17, TRAJ28)
WDSWAGSYQLTF

SEQ ID NO: 536956 - protein, 13 aa, Homo sapiens
  CDR3 for beta chain variable domain of TCR clone 268478 (TRBV11-3, TRBJ1-1)
CASSRQPNTEAFF

SEQ ID NO: 536957 - protein, 14 aa, Homo sapiens
  CDR3 for alpha chain variable domain of TCR clone 268479 (TRAV8-3, TRAJ12)
CAVGARDSSYKLIF

SEQ ID NO: 536958 - protein, 15 aa, Homo sapiens
  CDR3 for beta chain variable domain of TCR clone 268479 (TRBV18, TRBJ2-1)
CASSPPSASYNEQFF

SEQ ID NO: 536959 - protein, 15 aa, Homo sapiens
  CDR3 for alpha chain variable domain of TCR clone 268480 (TRAV17, TRAJ57)
CATGPSQGGSEKLVF

SEQ ID NO: 536960 - protein, 13 aa, Homo sapiens
  CDR3 for beta chain variable domain of TCR clone 268480 (TRBV7-9, TRBJ1-2)
CASSLKRNYGYTF

SEQ ID NO: 536961 - protein, 14 aa, Homo sapiens
  CDR3 for alpha chain variable domain of TCR clone 268481 (TRAV36/DV7, TRAJ13)
WGSGEDGGYQKVTF

SEQ ID NO: 536962 - protein, 15 aa, Homo sapiens
  CDR3 for beta chain variable domain of TCR clone 268481 (TRBV19, TRBJ2-1)
CASSTGTSSYNEQFF

SEQ ID NO: 536963 - protein, 14 aa, Homo sapiens
  CDR3 for alpha chain variable domain of TCR clone 268482 (TRAV4, TRAJ26)
CLVGPHNYGKNFVF

SEQ ID NO: 536964 - protein, 17 aa, Homo sapiens
  CDR3 for beta chain variable domain of TCR clone 268482 (TRBV20-1, TRBJ2-1)
CSASSSGLAGSYNEQFF

SEQ ID NO: 536965 - protein, 13 aa, Homo sapiens
  CDR3 for alpha chain variable domain of TCR clone 268483 (TRAV27, TRAJ29)
CAGAHSGNTPLVF

SEQ ID NO: 536966 - protein, 12 aa, Homo sapiens
  CDR3 for beta chain variable domain of TCR clone 268483 (TRBV7-9, TRBJ2-7)
CATRTDAYEQYF

SEQ ID NO: 536967 - protein, 13 aa, Homo sapiens
  CDR3 for alpha chain variable domain of TCR clone 268484 (TRAV21, TRAJ49)
CAGRQSTGNQVYF

SEQ ID NO: 536968 - protein, 13 aa, Homo sapiens
  CDR3 for beta chain variable domain of TCR clone 268484 (TRBV6-6, TRBJ1-5)
CASRAYQDQPQHF

SEQ ID NO: 536969 - protein, 14 aa, Homo sapiens
  CDR3 for alpha chain variable domain of TCR clone 268485 (TRAV38-1, TRAJ40)
CALRPTSGTYKYIF

SEQ ID NO: 536970 - protein, 14 aa, Homo sapiens
  CDR3 for beta chain variable domain of TCR clone 268485 (TRBV25-1, TRBJ1-1)
CASTYLGGNTEAFF

SEQ ID NO: 536971 - protein, 13 aa, Homo sapiens
  CDR3 for alpha chain variable domain of TCR clone 268486 (TRAV3, TRAJ20)
CAVRDTPRYKLSF

SEQ ID NO: 536972 - protein, 16 aa, Homo sapiens
  CDR3 for beta chain variable domain of TCR clone 268486 (TRBV20-1, TRBJ2-7)
CSARAPGLALSYVQYF

SEQ ID NO: 536973 - protein, 12 aa, Homo sapiens
  CDR3 for alpha chain variable domain of TCR clone 268487 (TRAV13-2, TRAJ23)
CAERHRGGKLIF

SEQ ID NO: 536974 - protein, 16 aa, Homo sapiens
  CDR3 for beta chain variable domain of TCR clone 268487 (TRBV5-1, TRBJ2-2)
CASSSKLAENTGELFF

SEQ ID NO: 536975 - protein, 15 aa, Homo sapiens
  CDR3 for alpha chain variable domain of TCR clone 268488 (TRAV27, TRAJ38)
CAARRNAGNNRKLIW

SEQ ID NO: 536976 - protein, 17 aa, Homo sapiens
  CDR3 for beta chain variable domain of TCR clone 268488 (TRBV7-2, TRBJ2-1)
CASSLGPPWGGLDEQFF

SEQ ID NO: 536977 - protein, 15 aa, Homo sapiens
  CDR3 for alpha chain variable domain of TCR clone 268489 (TRAV3, TRAJ4)
CAVRDGTGGYNKLIF

SEQ ID NO: 536978 - protein, 17 aa, Homo sapiens
  CDR3 for beta chain variable domain of TCR clone 268489 (TRBV20-1, TRBJ2-1)
CSARDPLAGVWDNEQFF

SEQ ID NO: 536979 - protein, 17 aa, Homo sapiens
  CDR3 for alpha chain variable domain of TCR clone 268490 (TRAV3, TRAJ6)
CAVRDGPRAGGSYIPTF

SEQ ID NO: 536980 - protein, 14 aa, Homo sapiens
  CDR3 for beta chain variable domain of TCR clone 268490 (TRBV15, TRBJ2-5)
CATSMGGSGETQYF

SEQ ID NO: 536981 - protein, 14 aa, Homo sapiens
  CDR3 for alpha chain variable domain of TCR clone 268491 (TRAV12-2, TRAJ17)
CAVLFKAAGNKLTF

SEQ ID NO: 536982 - protein, 13 aa, Homo sapiens
  CDR3 for beta chain variable domain of TCR clone 268491 (TRBV12-4, TRBJ1-1)
CASSPGTGFEAFF

SEQ ID NO: 536983 - protein, 12 aa, Homo sapiens
  CDR3 for alpha chain variable domain of TCR clone 268492 (TRAV16, TRAJ10)
CSRTGGGNKLTF

SEQ ID NO: 536984 - protein, 19 aa, Homo sapiens
  CDR3 for beta chain variable domain of TCR clone 268492 (TRBV25-1, TRBJ2-2)
CAILVYRVDRGRKTGELFC

SEQ ID NO: 536985 - protein, 15 aa, Homo sapiens
  CDR3 for alpha chain variable domain of TCR clone 268493 (TRAV8-3, TRAJ45)
CASSYSGGGADGLTF

SEQ ID NO: 536986 - protein, 14 aa, Homo sapiens
  CDR3 for beta chain variable domain of TCR clone 268493 (TRBV7-2, TRBJ2-7)
CAISPKTSFYEQYF

SEQ ID NO: 536987 - protein, 15 aa, Homo sapiens
  CDR3 for alpha chain variable domain of TCR clone 268494 (TRAV12-1, TRAJ10)
CVVNKLTGGGNKLTF

SEQ ID NO: 536988 - protein, 17 aa, Homo sapiens
  CDR3 for beta chain variable domain of TCR clone 268494 (TRBV28, TRBJ2-5)
CASSTPEGDALQETQYF

SEQ ID NO: 536989 - protein, 12 aa, Homo sapiens
  CDR3 for alpha chain variable domain of TCR clone 268495 (TRAV3, TRAJ43)
CAVRDPNNDMRF

SEQ ID NO: 536990 - protein, 13 aa, Homo sapiens
  CDR3 for beta chain variable domain of TCR clone 268495 (TRBV19, TRBJ1-2)
CASRVPGQDGYTF

SEQ ID NO: 536991 - protein, 11 aa, Homo sapiens
  CDR3 for alpha chain variable domain of TCR clone 268496 (TRAV21, TRAJ34)
CAVTNTAKLIF

SEQ ID NO: 536992 - protein, 14 aa, Homo sapiens
  CDR3 for beta chain variable domain of TCR clone 268496 (TRBV12-4, TRBJ2-1)
CASSLGQGASEQFF

SEQ ID NO: 536993 - protein, 14 aa, Homo sapiens
  CDR3 for alpha chain variable domain of TCR clone 268497 (TRAV12-1, TRAJ13)
CVVIDSGGYQKVTF

SEQ ID NO: 536994 - protein, 16 aa, Homo sapiens
  CDR3 for beta chain variable domain of TCR clone 268497 (TRBV11-1, TRBJ1-1)
CATNPRDRAFNTEAFF

SEQ ID NO: 536995 - protein, 13 aa, Homo sapiens
  CDR3 for alpha chain variable domain of TCR clone 268498 (TRAV21, TRAJ27)
CAVLNTNAGKSTF

SEQ ID NO: 536996 - protein, 14 aa, Homo sapiens
  CDR3 for beta chain variable domain of TCR clone 268498 (TRBV27, TRBJ1-1)
CASSLLSGLSEAFF

SEQ ID NO: 536997 - protein, 17 aa, Homo sapiens
  CDR3 for alpha chain variable domain of TCR clone 268499 (TRAV3, TRAJ6)
CAVRDGPRAGGSYIPTF

SEQ ID NO: 536998 - protein, 16 aa, Homo sapiens
  CDR3 for beta chain variable domain of TCR clone 268499 (TRBV7-6, TRBJ2-3)
CASSARTSRGTDTQYF

SEQ ID NO: 536999 - protein, 14 aa, Homo sapiens
  CDR3 for alpha chain variable domain of TCR clone 268500 (TRAV12-3, TRAJ9)
CAMSPNTGGFKTSF

SEQ ID NO: 537000 - protein, 15 aa, Homo sapiens
  CDR3 for beta chain variable domain of TCR clone 268500 (TRBV6-5, TRBJ2-1)
CASSYDAGAGNEQFF

SEQ ID NO: 537001 - protein, 15 aa, Homo sapiens
  CDR3 for alpha chain variable domain of TCR clone 268501 (TRAV2, TRAJ28)
CAVPYSGAGSYQLPF

SEQ ID NO: 537002 - protein, 10 aa, Homo sapiens
  CDR3 for beta chain variable domain of TCR clone 268501 (TRBV23-1, TRBJ2-1)
KWSSYNEQFF

SEQ ID NO: 537003 - protein, 13 aa, Homo sapiens
  CDR3 for alpha chain variable domain of TCR clone 268502 (TRAV6, TRAJ15)
CALEDEAGTALIF

SEQ ID NO: 537004 - protein, 11 aa, Homo sapiens
  CDR3 for beta chain variable domain of TCR clone 268502 (TRBV6-3, TRBJ2-3)
CATGQADTQYF

SEQ ID NO: 537005 - protein, 13 aa, Homo sapiens
  CDR3 for alpha chain variable domain of TCR clone 268503 (TRAV21, TRAJ26)
CAVVDNYGQNFVF

SEQ ID NO: 537006 - protein, 16 aa, Homo sapiens
  CDR3 for beta chain variable domain of TCR clone 268503 (TRBV29-1, TRBJ2-2)
CSVETRASGNTGELFF

SEQ ID NO: 537007 - protein, 14 aa, Homo sapiens
  CDR3 for alpha chain variable domain of TCR clone 268504 (TRAV14/DV4, TRAJ15)
CAMRRDQAGTALIF

SEQ ID NO: 537008 - protein, 16 aa, Homo sapiens
  CDR3 for beta chain variable domain of TCR clone 268504 (TRBV15, TRBJ2-3)
CAISRDLGIVTDTQYF

SEQ ID NO: 537009 - protein, 13 aa, Homo sapiens
  CDR3 for alpha chain variable domain of TCR clone 268505 (TRAV8-6, TRAJ49)
CAGITNTGNQFYF

SEQ ID NO: 537010 - protein, 13 aa, Homo sapiens
  CDR3 for beta chain variable domain of TCR clone 268505 (TRBV7-9, TRBJ1-2)
CASSLKQNYGYTF

SEQ ID NO: 537011 - protein, 14 aa, Homo sapiens
  CDR3 for alpha chain variable domain of TCR clone 268506 (TRAV17, TRAJ22)
CATSPSGSARQLTF

SEQ ID NO: 537012 - protein, 15 aa, Homo sapiens
  CDR3 for beta chain variable domain of TCR clone 268506 (TRBV4-1, TRBJ2-5)
CASSQWDLYLETQYF

SEQ ID NO: 537013 - protein, 17 aa, Homo sapiens
  CDR3 for alpha chain variable domain of TCR clone 268507 (TRAV9-2, TRAJ10)
CALTATILTGGGNKLTF

SEQ ID NO: 537014 - protein, 17 aa, Homo sapiens
  CDR3 for beta chain variable domain of TCR clone 268507 (TRBV6-3, TRBJ1-1)
CASSYSGRGRRNTEAFF

SEQ ID NO: 537015 - protein, 13 aa, Homo sapiens
  CDR3 for alpha chain variable domain of TCR clone 268508 (TRAV8-3, TRAJ28)
CAVGAVGSYELTF

SEQ ID NO: 537016 - protein, 15 aa, Homo sapiens
  CDR3 for beta chain variable domain of TCR clone 268508 (TRBV7-9, TRBJ1-5)
CASSQGHQPNQPQHF

SEQ ID NO: 537017 - protein, 17 aa, Homo sapiens
  CDR3 for alpha chain variable domain of TCR clone 268509 (TRAV26-1, TRAJ28)
CIVRALYSGAGSYQLTF

SEQ ID NO: 537018 - protein, 12 aa, Homo sapiens
  CDR3 for beta chain variable domain of TCR clone 268509 (TRBV5-5, TRBJ2-5)
CASSYFGETQYF

SEQ ID NO: 537019 - protein, 15 aa, Homo sapiens
  CDR3 for alpha chain variable domain of TCR clone 268510 (TRAV12-1, TRAJ36)
CVVNEHQTGANKLFC

SEQ ID NO: 537020 - protein, 12 aa, Homo sapiens
  CDR3 for beta chain variable domain of TCR clone 268510 (TRBV29-1, TRBJ2-3)
CSVTRGADTQYF

SEQ ID NO: 537021 - protein, 12 aa, Homo sapiens
  CDR3 for alpha chain variable domain of TCR clone 268511 (TRAV12-3, TRAJ34)
CAMGYNTDKLIF

SEQ ID NO: 537022 - protein, 14 aa, Homo sapiens
  CDR3 for beta chain variable domain of TCR clone 268511 (TRBV5-7, TRBJ1-5)
RASSRTGGGQPQHF

SEQ ID NO: 537023 - protein, 14 aa, Homo sapiens
  CDR3 for alpha chain variable domain of TCR clone 268512 (TRAV2, TRAJ20)
CAVEDVVNDYKPSF

SEQ ID NO: 537024 - protein, 16 aa, Homo sapiens
  CDR3 for beta chain variable domain of TCR clone 268512 (TRBV2, TRBJ2-1)
CASSVGGSLSYNEQFF

SEQ ID NO: 537025 - protein, 18 aa, Homo sapiens
  CDR3 for alpha chain variable domain of TCR clone 268513 (TRAV13-1, TRAJ52)
CAAENPNAGGTSYGKLTF

SEQ ID NO: 537026 - protein, 14 aa, Homo sapiens
  CDR3 for beta chain variable domain of TCR clone 268513 (TRBV2, TRBJ2-1)
CASSEALIYNEQFF

SEQ ID NO: 537027 - protein, 12 aa, Homo sapiens
  CDR3 for alpha chain variable domain of TCR clone 268514 (TRAV12-3, TRAJ17)
CAMTLTGNKLTF

SEQ ID NO: 537028 - protein, 18 aa, Homo sapiens
  CDR3 for beta chain variable domain of TCR clone 268514 (TRBV4-3, TRBJ1-6)
GASSQETPASSYNSPLHF

SEQ ID NO: 537029 - protein, 14 aa, Homo sapiens
  CDR3 for alpha chain variable domain of TCR clone 268515 (TRAV29/DV5, TRAJ45)
CAASFRGGADGLTF

SEQ ID NO: 537030 - protein, 14 aa, Homo sapiens
  CDR3 for beta chain variable domain of TCR clone 268515 (TRBV20-1, TRBJ2-5)
CSALVPGYQETQYF

SEQ ID NO: 537031 - protein, 13 aa, Homo sapiens
  CDR3 for alpha chain variable domain of TCR clone 268516 (TRAV8-3, TRAJ28)
CAVGAVGSYQLTF

SEQ ID NO: 537032 - protein, 12 aa, Homo sapiens
  CDR3 for beta chain variable domain of TCR clone 268516 (TRBV19, TRBJ2-1)
CASGTSLNGQFF

SEQ ID NO: 537033 - protein, 16 aa, Homo sapiens
  CDR3 for alpha chain variable domain of TCR clone 268517 (TRAV26-1, TRAJ53)
CIVRVAMGGSNYKLTF

SEQ ID NO: 537034 - protein, 15 aa, Homo sapiens
  CDR3 for beta chain variable domain of TCR clone 268517 (TRBV5-1, TRBJ2-5)
CASSFGGPPQETQYF

SEQ ID NO: 537035 - protein, 12 aa, Homo sapiens
  CDR3 for alpha chain variable domain of TCR clone 268518 (TRAV27, TRAJ35)
CAGADFENVLHC

SEQ ID NO: 537036 - protein, 16 aa, Homo sapiens
  CDR3 for beta chain variable domain of TCR clone 268518 (TRBV6-1, TRBJ2-1)
CASILRQGSSYNEQFF

SEQ ID NO: 537037 - protein, 15 aa, Homo sapiens
  CDR3 for alpha chain variable domain of TCR clone 268519 (TRAV21, TRAJ24)
CAARSSTGSWGKLQV

SEQ ID NO: 537038 - protein, 13 aa, Homo sapiens
  CDR3 for beta chain variable domain of TCR clone 268519 (TRBV10-3, TRBJ2-7)
CASKLAVNYEQYF

SEQ ID NO: 537039 - protein, 15 aa, Homo sapiens
  CDR3 for alpha chain variable domain of TCR clone 268520 (TRAV3, TRAJ4)
CAVRDGTGGYNKLIF

SEQ ID NO: 537040 - protein, 17 aa, Homo sapiens
  CDR3 for beta chain variable domain of TCR clone 268520 (TRBV5-5, TRBJ1-2)
CASSLGSLDGQSEGYTF

SEQ ID NO: 537041 - protein, 20 aa, Homo sapiens
  CDR3 for alpha chain variable domain of TCR clone 268521 (TRAV8-3, TRAJ44)
LSTSVLWVRLYTGTASKLTF

SEQ ID NO: 537042 - protein, 15 aa, Homo sapiens
  CDR3 for beta chain variable domain of TCR clone 268521 (TRBV6-5, TRBJ2-1)
CASSYDAGAGNEQFF

SEQ ID NO: 537043 - protein, 11 aa, Homo sapiens
  CDR3 for alpha chain variable domain of TCR clone 268522 (TRAV12-3, TRAJ43)
CAMSVSNDMRF

SEQ ID NO: 537044 - protein, 11 aa, Homo sapiens
  CDR3 for beta chain variable domain of TCR clone 268522 (TRBV29-1, TRBJ2-5)
CSEDRTGNQYF

SEQ ID NO: 537045 - protein, 10 aa, Homo sapiens
  CDR3 for alpha chain variable domain of TCR clone 268523 (TRAV12-2, TRAJ48)
CAVTSEKLTI

SEQ ID NO: 537046 - protein, 17 aa, Homo sapiens
  CDR3 for beta chain variable domain of TCR clone 268523 (TRBV11-1, TRBJ2-7)
CASSLTGSFGLDYEQYF

SEQ ID NO: 537047 - protein, 11 aa, Homo sapiens
  CDR3 for alpha chain variable domain of TCR clone 268524 (TRAV21, TRAJ34)
CAVTNTDKLIF

SEQ ID NO: 537048 - protein, 15 aa, Homo sapiens
  CDR3 for beta chain variable domain of TCR clone 268524 (TRBV19, TRBJ2-4)
CASRGPRRGENIQYF

SEQ ID NO: 537049 - protein, 13 aa, Homo sapiens
  CDR3 for alpha chain variable domain of TCR clone 268525 (TRAV3, TRAJ21)
CAVREPDFNKFYF

SEQ ID NO: 537050 - protein, 19 aa, Homo sapiens
  CDR3 for beta chain variable domain of TCR clone 268525 (TRBV6-1, TRBJ1-3)
CASVQGGGWKHHIFWRGKL

SEQ ID NO: 537051 - protein, 14 aa, Homo sapiens
  CDR3 for alpha chain variable domain of TCR clone 268526 (TRAV17, TRAJ6)
CATDASGGSCIPTF

SEQ ID NO: 537052 - protein, 19 aa, Homo sapiens
  CDR3 for beta chain variable domain of TCR clone 268526 (TRBV4-3, TRBJ2-7)
CASSQEFIGWQVTPYEQYF

SEQ ID NO: 537053 - protein, 12 aa, Homo sapiens
  CDR3 for alpha chain variable domain of TCR clone 268527 (TRAV21, TRAJ33)
CAKMDSNYQLIW

SEQ ID NO: 537054 - protein, 17 aa, Homo sapiens
  CDR3 for beta chain variable domain of TCR clone 268527 (TRBV7-3, TRBJ2-3)
CASSLMKRMRGADTQYF

SEQ ID NO: 537055 - protein, 14 aa, Homo sapiens
  CDR3 for alpha chain variable domain of TCR clone 268528 (TRAV8-3, TRAJ16)
CAVVPFSDGQKLLF

SEQ ID NO: 537056 - protein, 15 aa, Homo sapiens
  CDR3 for beta chain variable domain of TCR clone 268528 (TRBV5-1, TRBJ2-1)
CASSLASPYSNEQFF

SEQ ID NO: 537057 - protein, 14 aa, Homo sapiens
  CDR3 for alpha chain variable domain of TCR clone 268529 (TRAV12-2, TRAJ17)
CAALFKAAGNKQTF

SEQ ID NO: 537058 - protein, 16 aa, Homo sapiens
  CDR3 for beta chain variable domain of TCR clone 268529 (TRBV20-1, TRBJ2-2)
CSASASGIPGAGELFF

SEQ ID NO: 537059 - protein, 12 aa, Homo sapiens
  CDR3 for alpha chain variable domain of TCR clone 268530 (TRAV8-3, TRAJ34)
WASGYNTDKLIF

SEQ ID NO: 537060 - protein, 13 aa, Homo sapiens
  CDR3 for beta chain variable domain of TCR clone 268530 (TRBV6-4, TRBJ2-3)
CASSVSLADTQYF

SEQ ID NO: 537061 - protein, 13 aa, Homo sapiens
  CDR3 for alpha chain variable domain of TCR clone 268531 (TRAV12-3, TRAJ7)
CAMTPYGNNRLAF

SEQ ID NO: 537062 - protein, 15 aa, Homo sapiens
  CDR3 for beta chain variable domain of TCR clone 268531 (TRBV5-1, TRBJ1-1)
CASSSTTGTNTEAFF

SEQ ID NO: 537063 - protein, 13 aa, Homo sapiens
  CDR3 for alpha chain variable domain of TCR clone 268532 (TRAV27, TRAJ49)
CAPRPYTGNQFYF

SEQ ID NO: 537064 - protein, 16 aa, Homo sapiens
  CDR3 for beta chain variable domain of TCR clone 268532 (TRBV4-1, TRBJ1-2)
CAISQDAGQVLYGYTF

SEQ ID NO: 537065 - protein, 19 aa, Homo sapiens
  CDR3 for alpha chain variable domain of TCR clone 268533 (TRAV23/DV6, TRAJ49)
CAATPGQVGRAFQISRTLT

SEQ ID NO: 537066 - protein, 14 aa, Homo sapiens
  CDR3 for beta chain variable domain of TCR clone 268533 (TRBV7-3, TRBJ1-1)
CASSLKGGNTEAFF

SEQ ID NO: 537067 - protein, 14 aa, Homo sapiens
  CDR3 for alpha chain variable domain of TCR clone 268534 (TRAV13-1, TRAJ48)
CAASTDFGNEKLTF

SEQ ID NO: 537068 - protein, 14 aa, Homo sapiens
  CDR3 for beta chain variable domain of TCR clone 268534 (TRBV10-3, TRBJ2-5)
CAAKGGNNQETQYF

SEQ ID NO: 537069 - protein, 14 aa, Homo sapiens
  CDR3 for alpha chain variable domain of TCR clone 268535 (TRAV2, TRAJ9)
CAVEDRRGGFKTIF

SEQ ID NO: 537070 - protein, 15 aa, Homo sapiens
  CDR3 for beta chain variable domain of TCR clone 268535 (TRBV11-3, TRBJ2-3)
RASSAGTVVTNTQYF

SEQ ID NO: 537071 - protein, 15 aa, Homo sapiens
  CDR3 for alpha chain variable domain of TCR clone 268536 (TRAV25, TRAJ52)
CAGRPGGTSYGKLTF

SEQ ID NO: 537072 - protein, 13 aa, Homo sapiens
  CDR3 for beta chain variable domain of TCR clone 268536 (TRBV20-1, TRBJ1-1)
CSAPLGGGTEAFF

SEQ ID NO: 537073 - protein, 12 aa, Homo sapiens
  CDR3 for alpha chain variable domain of TCR clone 268537 (TRAV13-1, TRAJ53)
AASGGSNYKLTF

SEQ ID NO: 537074 - protein, 16 aa, Homo sapiens
  CDR3 for beta chain variable domain of TCR clone 268537 (TRBV3-1, TRBJ2-1)
CASSQVGGTSYNEQFF

SEQ ID NO: 537075 - protein, 12 aa, Homo sapiens
  CDR3 for alpha chain variable domain of TCR clone 268538 (TRAV21, TRAJ11)
CAASSGYSTLPF

SEQ ID NO: 537076 - protein, 14 aa, Homo sapiens
  CDR3 for beta chain variable domain of TCR clone 268538 (TRBV20-1, TRBJ2-7)
CSAPELAGVGEQYF

SEQ ID NO: 537077 - protein, 14 aa, Homo sapiens
  CDR3 for alpha chain variable domain of TCR clone 268539 (TRAV12-2, TRAJ11)
CAVRKNSGYSTLTI

SEQ ID NO: 537078 - protein, 14 aa, Homo sapiens
  CDR3 for beta chain variable domain of TCR clone 268539 (TRBV7-2, TRBJ2-5)
CASWQERFRETQYF

SEQ ID NO: 537079 - protein, 14 aa, Homo sapiens
  CDR3 for alpha chain variable domain of TCR clone 268540 (TRAV38-1, TRAJ45)
CAYYSGGGADGLTF

SEQ ID NO: 537080 - protein, 14 aa, Homo sapiens
  CDR3 for beta chain variable domain of TCR clone 268540 (TRBV20-1, TRBJ2-3)
CSARVRGSTDTQYF

SEQ ID NO: 537081 - protein, 16 aa, Homo sapiens
  CDR3 for alpha chain variable domain of TCR clone 268541 (TRAV3, TRAJ10)
CVVRDMNAGGGNKLTF

SEQ ID NO: 537082 - protein, 11 aa, Homo sapiens
  CDR3 for beta chain variable domain of TCR clone 268541 (TRBV7-2, TRBJ2-2)
CASSIRGELFF

SEQ ID NO: 537083 - protein, 14 aa, Homo sapiens
  CDR3 for alpha chain variable domain of TCR clone 268542 (TRAV1-2, TRAJ6)
CAVSLSGGSYIPPF

SEQ ID NO: 537084 - protein, 15 aa, Homo sapiens
  CDR3 for beta chain variable domain of TCR clone 268542 (TRBV28, TRBJ2-7)
CASRPGGRGFYEQYF

SEQ ID NO: 537085 - protein, 13 aa, Homo sapiens
  CDR3 for alpha chain variable domain of TCR clone 268543 (TRAV8-4, TRAJ48)
CAVSLFGHETLTF

SEQ ID NO: 537086 - protein, 15 aa, Homo sapiens
  CDR3 for beta chain variable domain of TCR clone 268543 (TRBV20-1, TRBJ2-7)
CSARKGLAESYEQYF

SEQ ID NO: 537087 - protein, 13 aa, Homo sapiens
  CDR3 for alpha chain variable domain of TCR clone 268544 (TRAV2, TRAJ29)
CAVEPSGNTPLVF

SEQ ID NO: 537088 - protein, 14 aa, Homo sapiens
  CDR3 for beta chain variable domain of TCR clone 268544 (TRBV6-1, TRBJ1-3)
CASVQGGGGNTIYF

SEQ ID NO: 537089 - protein, 15 aa, Homo sapiens
  CDR3 for alpha chain variable domain of TCR clone 268545 (TRAV20, TRAJ58)
CAVQDLETSGSRLTF

SEQ ID NO: 537090 - protein, 15 aa, Homo sapiens
  CDR3 for beta chain variable domain of TCR clone 268545 (TRBV5-5, TRBJ1-5)
CASSSTPGSNQPQHF

SEQ ID NO: 537091 - protein, 13 aa, Homo sapiens
  CDR3 for alpha chain variable domain of TCR clone 268546 (TRAV13-1, TRAJ39)
CSKYSNAGNMLTF

SEQ ID NO: 537092 - protein, 15 aa, Homo sapiens
  CDR3 for beta chain variable domain of TCR clone 268546 (TRBV6-1, TRBJ2-3)
CASSERGGITDTQYF

SEQ ID NO: 537093 - protein, 10 aa, Homo sapiens
  CDR3 for alpha chain variable domain of TCR clone 268547 (TRAV12-2, TRAJ52)
RSTIYGKLTF

SEQ ID NO: 537094 - protein, 11 aa, Homo sapiens
  CDR3 for beta chain variable domain of TCR clone 268547 (TRBV11-2, TRBJ2-2)
CASRLPGELFF

SEQ ID NO: 537095 - protein, 15 aa, Homo sapiens
  CDR3 for alpha chain variable domain of TCR clone 268548 (TRAV26-1, TRAJ48)
CIVRVGDFGNEKVTF

SEQ ID NO: 537096 - protein, 16 aa, Homo sapiens
  CDR3 for beta chain variable domain of TCR clone 268548 (TRBV4-1, TRBJ2-3)
CASSQRAGGLTDTQYF

SEQ ID NO: 537097 - protein, 14 aa, Homo sapiens
  CDR3 for alpha chain variable domain of TCR clone 268549 (TRAV12-3, TRAJ29)
CAMSPYSGNTPIVF

SEQ ID NO: 537098 - protein, 15 aa, Homo sapiens
  CDR3 for beta chain variable domain of TCR clone 268549 (TRBV27, TRBJ2-1)
CASSNGGGSSNEQFF

SEQ ID NO: 537099 - protein, 16 aa, Homo sapiens
  CDR3 for alpha chain variable domain of TCR clone 268550 (TRAV30, TRAJ24)
CGTEIVDADSWGKFQF

SEQ ID NO: 537100 - protein, 18 aa, Homo sapiens
  CDR3 for beta chain variable domain of TCR clone 268550 (TRBV12-5, TRBJ2-5)
CASGSWTHKRPSTSGQAR

SEQ ID NO: 537101 - protein, 15 aa, Homo sapiens
  CDR3 for alpha chain variable domain of TCR clone 268551 (TRAV21, TRAJ24)
CAAQSSTDSWGKLQF

SEQ ID NO: 537102 - protein, 14 aa, Homo sapiens
  CDR3 for beta chain variable domain of TCR clone 268551 (TRBV7-3, TRBJ2-1)
CASSLTGGANEQFF

SEQ ID NO: 537103 - protein, 12 aa, Homo sapiens
  CDR3 for alpha chain variable domain of TCR clone 268552 (TRAV9-2, TRAJ20)
CALSSNDYKLSF

SEQ ID NO: 537104 - protein, 14 aa, Homo sapiens
  CDR3 for beta chain variable domain of TCR clone 268552 (TRBV7-2, TRBJ2-7)
CASRSQGAAYEQYF

SEQ ID NO: 537105 - protein, 14 aa, Homo sapiens
  CDR3 for alpha chain variable domain of TCR clone 268553 (TRAV26-1, TRAJ5)
CIVRVRFNRRALTF

SEQ ID NO: 537106 - protein, 17 aa, Homo sapiens
  CDR3 for beta chain variable domain of TCR clone 268553 (TRBV29-1, TRBJ2-3)
CSVEVLAGETSTYTQYF

SEQ ID NO: 537107 - protein, 14 aa, Homo sapiens
  CDR3 for alpha chain variable domain of TCR clone 268554 (TRAV1-2, TRAJ16)
CAVNRFSDGQKLLF

SEQ ID NO: 537108 - protein, 21 aa, Homo sapiens
  CDR3 for beta chain variable domain of TCR clone 268554 (TRBV5-1, TRBJ1-6)
CASSPRGGADSTGGVRSPLHF

SEQ ID NO: 537109 - protein, 14 aa, Homo sapiens
  CDR3 for alpha chain variable domain of TCR clone 268555 (TRAV35, TRAJ33)
CAGSSQDSNYQLIW

SEQ ID NO: 537110 - protein, 13 aa, Homo sapiens
  CDR3 for beta chain variable domain of TCR clone 268555 (TRBV5-1, TRBJ1-4)
PAAWKDGNEKLFF

SEQ ID NO: 537111 - protein, 16 aa, Homo sapiens
  CDR3 for alpha chain variable domain of TCR clone 268556 (TRAV30, TRAJ24)
CGTEILDADSWGKFQF

SEQ ID NO: 537112 - protein, 13 aa, Homo sapiens
  CDR3 for beta chain variable domain of TCR clone 268556 (TRBV10-3, TRBJ2-7)
CASKLAVNYEQYF

SEQ ID NO: 537113 - protein, 14 aa, Homo sapiens
  CDR3 for alpha chain variable domain of TCR clone 268557 (TRAV9-2, TRAJ36)
CALPWITGANNPFF

SEQ ID NO: 537114 - protein, 14 aa, Homo sapiens
  CDR3 for beta chain variable domain of TCR clone 268557 (TRBV2, TRBJ1-2)
CASSELQVNYGYTF

SEQ ID NO: 537115 - protein, 13 aa, Homo sapiens
  CDR3 for alpha chain variable domain of TCR clone 268558 (TRAV8-3, TRAJ28)
CAVGAVGSYQLTF

SEQ ID NO: 537116 - protein, 15 aa, Homo sapiens
  CDR3 for beta chain variable domain of TCR clone 268558 (TRBV7-9, TRBJ1-5)
CASSEGHQPNQPQHF

SEQ ID NO: 537117 - protein, 16 aa, Homo sapiens
  CDR3 for alpha chain variable domain of TCR clone 268559 (TRAV27, TRAJ52)
CAGAGAGGTSYGKVTF

SEQ ID NO: 537118 - protein, 17 aa, Homo sapiens
  CDR3 for beta chain variable domain of TCR clone 268559 (TRBV24-1, TRBJ2-3)
CATSDLPSGEDTDTQYF

SEQ ID NO: 537119 - protein, 14 aa, Homo sapiens
  CDR3 for alpha chain variable domain of TCR clone 268560 (TRAV13-1, TRAJ44)
CAAKETGTASKLTF

SEQ ID NO: 537120 - protein, 13 aa, Homo sapiens
  CDR3 for beta chain variable domain of TCR clone 268560 (TRBV5-5, TRBJ1-2)
CASSFWRGEDYTF

SEQ ID NO: 537121 - protein, 12 aa, Homo sapiens
  CDR3 for alpha chain variable domain of TCR clone 268561 (TRAV13-1, TRAJ21)
CAAKEGFNKFYF

SEQ ID NO: 537122 - protein, 18 aa, Homo sapiens
  CDR3 for beta chain variable domain of TCR clone 268561 (TRBV20-1, TRBJ2-6)
CSTETTPTHGSGANVLTF

SEQ ID NO: 537123 - protein, 11 aa, Homo sapiens
  CDR3 for alpha chain variable domain of TCR clone 268562 (TRAV2, TRAJ13)
CATGGYQKVTF

SEQ ID NO: 537124 - protein, 15 aa, Homo sapiens
  CDR3 for beta chain variable domain of TCR clone 268562 (TRBV28, TRBJ1-3)
CASSMGWASGNTIYF

SEQ ID NO: 537125 - protein, 14 aa, Homo sapiens
  CDR3 for alpha chain variable domain of TCR clone 268563 (TRAV2, TRAJ41)
CAVGTSNSGYALNF

SEQ ID NO: 537126 - protein, 13 aa, Homo sapiens
  CDR3 for beta chain variable domain of TCR clone 268563 (TRBV4-1, TRBJ2-1)
CASSQEVQYEQFL

SEQ ID NO: 537127 - protein, 14 aa, Homo sapiens
  CDR3 for alpha chain variable domain of TCR clone 268564 (TRAV20, TRAJ42)
GAVQAGGSQGNLIF

SEQ ID NO: 537128 - protein, 14 aa, Homo sapiens
  CDR3 for beta chain variable domain of TCR clone 268564 (TRBV28, TRBJ1-2)
CASRIQGANYGYTF

SEQ ID NO: 537129 - protein, 14 aa, Homo sapiens
  CDR3 for alpha chain variable domain of TCR clone 268565 (TRAV12-3, TRAJ10)
SHLPLTAGGNKLTF

SEQ ID NO: 537130 - protein, 14 aa, Homo sapiens
  CDR3 for beta chain variable domain of TCR clone 268565 (TRBV4-2, TRBJ2-1)
CASGLDRAYNEQFF

SEQ ID NO: 537131 - protein, 11 aa, Homo sapiens
  CDR3 for alpha chain variable domain of TCR clone 268566 (TRAV17, TRAJ9)
CATTGGFKTIF

SEQ ID NO: 537132 - protein, 14 aa, Homo sapiens
  CDR3 for beta chain variable domain of TCR clone 268566 (TRBV5-4, TRBJ1-1)
CASSLDSRRDEAFF

SEQ ID NO: 537133 - protein, 16 aa, Homo sapiens
  CDR3 for alpha chain variable domain of TCR clone 268567 (TRAV8-3, TRAJ10)
CAVGPILTGGGNKLTF

SEQ ID NO: 537134 - protein, 16 aa, Homo sapiens
  CDR3 for beta chain variable domain of TCR clone 268567 (TRBV7-2, TRBJ2-5)
WASSSKWLSGQETQYF

SEQ ID NO: 537135 - protein, 17 aa, Homo sapiens
  CDR3 for alpha chain variable domain of TCR clone 268568 (TRAV3, TRAJ6)
CAVRDCTRAGGSYIPTF

SEQ ID NO: 537136 - protein, 15 aa, Homo sapiens
  CDR3 for beta chain variable domain of TCR clone 268568 (TRBV7-6, TRBJ2-3)
CASSPIIYSTDTQYF

SEQ ID NO: 537137 - protein, 12 aa, Homo sapiens
  CDR3 for alpha chain variable domain of TCR clone 268569 (TRAV27, TRAJ35)
CAGADFGNVLHF

SEQ ID NO: 537138 - protein, 13 aa, Homo sapiens
  CDR3 for beta chain variable domain of TCR clone 268569 (TRBV7-2, TRBJ2-2)
CASSLAVTGELFF

SEQ ID NO: 537139 - protein, 14 aa, Homo sapiens
  CDR3 for alpha chain variable domain of TCR clone 268570 (TRAV17, TRAJ57)
CATDPQGGSEKLVF

SEQ ID NO: 537140 - protein, 18 aa, Homo sapiens
  CDR3 for beta chain variable domain of TCR clone 268570 (TRBV20-1, TRBJ2-2)
CSARVQTARPSGTGELFF

SEQ ID NO: 537141 - protein, 11 aa, Homo sapiens
  CDR3 for alpha chain variable domain of TCR clone 268571 (TRAV19, TRAJ33)
CARDSNYQLIW

SEQ ID NO: 537142 - protein, 17 aa, Homo sapiens
  CDR3 for beta chain variable domain of TCR clone 268571 (TRBV7-3, TRBJ2-3)
CASSLMTRMRGADTQYF

SEQ ID NO: 537143 - protein, 13 aa, Homo sapiens
  CDR3 for alpha chain variable domain of TCR clone 268572 (TRAV8-6, TRAJ33)
CAVSEGSNYQLIW

SEQ ID NO: 537144 - protein, 14 aa, Homo sapiens
  CDR3 for beta chain variable domain of TCR clone 268572 (TRBV4-1, TRBJ2-2)
CASSQAVNIGELFL

SEQ ID NO: 537145 - protein, 13 aa, Homo sapiens
  CDR3 for alpha chain variable domain of TCR clone 268573 (TRAV8-3, TRAJ23)
CAVGAKAGGKLIF

SEQ ID NO: 537146 - protein, 14 aa, Homo sapiens
  CDR3 for beta chain variable domain of TCR clone 268573 (TRBV7-8, TRBJ2-7)
CASSDRDSVYEQYF

SEQ ID NO: 537147 - protein, 15 aa, Homo sapiens
  CDR3 for alpha chain variable domain of TCR clone 268574 (TRAV8-3, TRAJ41)
CAVGSNSNSWYALNF

SEQ ID NO: 537148 - protein, 17 aa, Homo sapiens
  CDR3 for beta chain variable domain of TCR clone 268574 (TRBV25-1, TRBJ2-1)
CASSAYGQGRGVYGQFF

SEQ ID NO: 537149 - protein, 13 aa, Homo sapiens
  CDR3 for alpha chain variable domain of TCR clone 268575 (TRAV8-3, TRAJ44)
CAVVPGPASKLTF

SEQ ID NO: 537150 - protein, 13 aa, Homo sapiens
  CDR3 for beta chain variable domain of TCR clone 268575 (TRBV10-3, TRBJ2-7)
CASKLAVNYEQYF

SEQ ID NO: 537151 - protein, 13 aa, Homo sapiens
  CDR3 for alpha chain variable domain of TCR clone 268576 (TRAV2, TRAJ15)
CAVASQAGTALIF

SEQ ID NO: 537152 - protein, 16 aa, Homo sapiens
  CDR3 for beta chain variable domain of TCR clone 268576 (TRBV18, TRBJ1-5)
CANSPYRVEGSQPQHF

SEQ ID NO: 537153 - protein, 14 aa, Homo sapiens
  CDR3 for alpha chain variable domain of TCR clone 268577 (TRAV23/DV6, TRAJ27)
CAASRDTNAGKSTF

SEQ ID NO: 537154 - protein, 13 aa, Homo sapiens
  CDR3 for beta chain variable domain of TCR clone 268577 (TRBV20-1, TRBJ1-5)
CSASGRGNEPQHF

SEQ ID NO: 537155 - protein, 12 aa, Homo sapiens
  CDR3 for alpha chain variable domain of TCR clone 268578 (TRAV12-1, TRAJ40)
CVVYSGTYKYIF

SEQ ID NO: 537156 - protein, 15 aa, Homo sapiens
  CDR3 for beta chain variable domain of TCR clone 268578 (TRBV24-1, TRBJ2-1)
CATSEPGQGYNEQFF

SEQ ID NO: 537157 - protein, 12 aa, Homo sapiens
  CDR3 for alpha chain variable domain of TCR clone 268579 (TRAV1-1, TRAJ9)
CAVDTGGFKTIF

SEQ ID NO: 537158 - protein, 14 aa, Homo sapiens
  CDR3 for beta chain variable domain of TCR clone 268579 (TRBV7-8, TRBJ2-5)
CASSATRGQETQYF

SEQ ID NO: 537159 - protein, 13 aa, Homo sapiens
  CDR3 for alpha chain variable domain of TCR clone 268580 (TRAV3, TRAJ21)
CAVREPDFNQFYF

SEQ ID NO: 537160 - protein, 13 aa, Homo sapiens
  CDR3 for beta chain variable domain of TCR clone 268580 (TRBV20-1, TRBJ1-1)
CSARGGGNTEAFF

SEQ ID NO: 537161 - protein, 14 aa, Homo sapiens
  CDR3 for alpha chain variable domain of TCR clone 268581 (TRAV13-1, TRAJ35)
CAASKGGFGNVLHW

SEQ ID NO: 537162 - protein, 13 aa, Homo sapiens
  CDR3 for beta chain variable domain of TCR clone 268581 (TRBV7-3, TRBJ1-1)
CASSKDWGAEAFL

SEQ ID NO: 537163 - protein, 14 aa, Homo sapiens
  CDR3 for alpha chain variable domain of TCR clone 268582 (TRAV1-2, TRAJ16)
CAVNRFSDGQRLLF

SEQ ID NO: 537164 - protein, 17 aa, Homo sapiens
  CDR3 for beta chain variable domain of TCR clone 268582 (TRBV15, TRBJ1-2)
CATSGREIDVVNYGYTF

SEQ ID NO: 537165 - protein, 14 aa, Homo sapiens
  CDR3 for alpha chain variable domain of TCR clone 268583 (TRAV12-1, TRAJ26)
CVVKGSNYGQNFVF

SEQ ID NO: 537166 - protein, 12 aa, Homo sapiens
  CDR3 for beta chain variable domain of TCR clone 268583 (TRBV11-2, TRBJ2-1)
CASSPGNNEQFF

SEQ ID NO: 537167 - protein, 15 aa, Homo sapiens
  CDR3 for alpha chain variable domain of TCR clone 268584 (TRAV12-2, TRAJ56)
CAVNPFTGANSKLTF

SEQ ID NO: 537168 - protein, 13 aa, Homo sapiens
  CDR3 for beta chain variable domain of TCR clone 268584 (TRBV20-1, TRBJ1-2)
CSASGRVYGGYTF

SEQ ID NO: 537169 - protein, 13 aa, Homo sapiens
  CDR3 for alpha chain variable domain of TCR clone 268585 (TRAV13-1, TRAJ20)
CSARVSNDYKLSF

SEQ ID NO: 537170 - protein, 16 aa, Homo sapiens
  CDR3 for beta chain variable domain of TCR clone 268585 (TRBV11-1, TRBJ1-1)
CATNPRDRAFNTEAFF

SEQ ID NO: 537171 - protein, 19 aa, Homo sapiens
  CDR3 for alpha chain variable domain of TCR clone 268586 (TRAV26-1, TRAJ52)
CIVRAHRNAGGTSYGKLTF

SEQ ID NO: 537172 - protein, 15 aa, Homo sapiens
  CDR3 for beta chain variable domain of TCR clone 268586 (TRBV3-1, TRBJ1-2)
CASSHPGTPGYGYTF

SEQ ID NO: 537173 - protein, 16 aa, Homo sapiens
  CDR3 for alpha chain variable domain of TCR clone 268587 (TRAV3, TRAJ21)
CAVRDIERGNFNKFYF

SEQ ID NO: 537174 - protein, 12 aa, Homo sapiens
  CDR3 for beta chain variable domain of TCR clone 268587 (TRBV29-1, TRBJ2-3)
CSVTGGADTQYF

SEQ ID NO: 537175 - protein, 12 aa, Homo sapiens
  CDR3 for alpha chain variable domain of TCR clone 268588 (TRAV8-3, TRAJ20)
CAVGEDDYKLSF

SEQ ID NO: 537176 - protein, 16 aa, Homo sapiens
  CDR3 for beta chain variable domain of TCR clone 268588 (TRBV19, TRBJ2-2)
CASRSPGTGATGELFF

SEQ ID NO: 537177 - protein, 23 aa, Homo sapiens
  CDR3 for alpha chain variable domain of TCR clone 268589 (TRAV12-2, TRAJ22)
CAVSFRVHPGPPIVSGSARQLTF

SEQ ID NO: 537178 - protein, 13 aa, Homo sapiens
  CDR3 for beta chain variable domain of TCR clone 268589 (TRBV12-4, TRBJ1-2)
CASSLESNDGYTF

SEQ ID NO: 537179 - protein, 13 aa, Homo sapiens
  CDR3 for alpha chain variable domain of TCR clone 268590 (TRAV39, TRAJ49)
YAVDRNTGKQFYF

SEQ ID NO: 537180 - protein, 14 aa, Homo sapiens
  CDR3 for beta chain variable domain of TCR clone 268590 (TRBV4-1, TRBJ1-1)
CASSRSGQSFEAFF

SEQ ID NO: 537181 - protein, 15 aa, Homo sapiens
  CDR3 for alpha chain variable domain of TCR clone 268591 (TRAV36/DV7, TRAJ53)
CAVEGSGGSNYKLTF

SEQ ID NO: 537182 - protein, 16 aa, Homo sapiens
  CDR3 for beta chain variable domain of TCR clone 268591 (TRBV27, TRBJ2-2)
CASSLSGFWVTGEMFF

SEQ ID NO: 537183 - protein, 12 aa, Homo sapiens
  CDR3 for alpha chain variable domain of TCR clone 268592 (TRAV13-2, TRAJ23)
CAERHSGGKLIF

SEQ ID NO: 537184 - protein, 16 aa, Homo sapiens
  CDR3 for beta chain variable domain of TCR clone 268592 (TRBV12-5, TRBJ2-5)
CASGPRTSGNQETQYF

SEQ ID NO: 537185 - protein, 15 aa, Homo sapiens
  CDR3 for alpha chain variable domain of TCR clone 268593 (TRAV29/DV5, TRAJ53)
CAASASGGSNYKLTF

SEQ ID NO: 537186 - protein, 16 aa, Homo sapiens
  CDR3 for beta chain variable domain of TCR clone 268593 (TRBV28, TRBJ1-4)
CASSPPYRGRSEKLFF

SEQ ID NO: 537187 - protein, 16 aa, Homo sapiens
  CDR3 for alpha chain variable domain of TCR clone 268594 (TRAV12-3, TRAJ53)
CAMSPGSGGSNYKLTF

SEQ ID NO: 537188 - protein, 15 aa, Homo sapiens
  CDR3 for beta chain variable domain of TCR clone 268594 (TRBV7-6, TRBJ2-3)
CASSYLAGEADTQYF

SEQ ID NO: 537189 - protein, 22 aa, Homo sapiens
  CDR3 for alpha chain variable domain of TCR clone 268595 (TRAV12-3, TRAJ44)
SPVIQPPTSVHPFRGTASKLTF

SEQ ID NO: 537190 - protein, 13 aa, Homo sapiens
  CDR3 for beta chain variable domain of TCR clone 268595 (TRBV20-1, TRBJ1-1)
CSARGGGNTEAFF

SEQ ID NO: 537191 - protein, 11 aa, Homo sapiens
  CDR3 for alpha chain variable domain of TCR clone 268596 (TRAV12-2, TRAJ26)
FPSQGGQNFVF

SEQ ID NO: 537192 - protein, 11 aa, Homo sapiens
  CDR3 for beta chain variable domain of TCR clone 268596 (TRBV12-4, TRBJ2-3)
CASTATDTQYF

SEQ ID NO: 537193 - protein, 14 aa, Homo sapiens
  CDR3 for alpha chain variable domain of TCR clone 268597 (TRAV17, TRAJ15)
CATTTNQAGTALIV

SEQ ID NO: 537194 - protein, 16 aa, Homo sapiens
  CDR3 for beta chain variable domain of TCR clone 268597 (TRBV4-1, TRBJ2-7)
CASSRGDILNSYEQYF

SEQ ID NO: 537195 - protein, 14 aa, Homo sapiens
  CDR3 for alpha chain variable domain of TCR clone 268598 (TRAV12-1, TRAJ22)
CVVKRAGSARQLTF

SEQ ID NO: 537196 - protein, 17 aa, Homo sapiens
  CDR3 for beta chain variable domain of TCR clone 268598 (TRBV7-8, TRBJ2-6)
CASSAGTGGAGANVLTF

SEQ ID NO: 537197 - protein, 13 aa, Homo sapiens
  CDR3 for alpha chain variable domain of TCR clone 268599 (TRAV12-2, TRAJ32)
CAAYGGATNKLIF

SEQ ID NO: 537198 - protein, 12 aa, Homo sapiens
  CDR3 for beta chain variable domain of TCR clone 268599 (TRBV7-9, TRBJ2-7)
CASSIKREEQYF

SEQ ID NO: 537199 - protein, 13 aa, Homo sapiens
  CDR3 for alpha chain variable domain of TCR clone 268600 (TRAV39, TRAJ17)
CAGRAAAGNKLTF

SEQ ID NO: 537200 - protein, 14 aa, Homo sapiens
  CDR3 for beta chain variable domain of TCR clone 268600 (TRBV25-1, TRBJ1-1)
CASTHLGGNTEAFF

SEQ ID NO: 537201 - protein, 16 aa, Homo sapiens
  CDR3 for alpha chain variable domain of TCR clone 268601 (TRAV26-2, TRAJ48)
CILRPPFNFGNEKLTF

SEQ ID NO: 537202 - protein, 15 aa, Homo sapiens
  CDR3 for beta chain variable domain of TCR clone 268601 (TRBV20-1, TRBJ2-3)
CSARGEGTYTDTQYF

SEQ ID NO: 537203 - protein, 14 aa, Homo sapiens
  CDR3 for alpha chain variable domain of TCR clone 268602 (TRAV1-2, TRAJ8)
CAVREDTGVQKLVF

SEQ ID NO: 537204 - protein, 16 aa, Homo sapiens
  CDR3 for beta chain variable domain of TCR clone 268602 (TRBV7-6, TRBJ2-6)
CASSLPGLSGANVLTF

SEQ ID NO: 537205 - protein, 17 aa, Homo sapiens
  CDR3 for alpha chain variable domain of TCR clone 268603 (TRAV3, TRAJ6)
CAVRDGPGAGGSDIPTF

SEQ ID NO: 537206 - protein, 14 aa, Homo sapiens
  CDR3 for beta chain variable domain of TCR clone 268603 (TRBV7-2, TRBJ2-7)
CASSPKTSFYEQYF

SEQ ID NO: 537207 - protein, 17 aa, Homo sapiens
  CDR3 for alpha chain variable domain of TCR clone 268604 (TRAV3, TRAJ6)
CAVRDGPRAGGSYIPTF

SEQ ID NO: 537208 - protein, 16 aa, Homo sapiens
  CDR3 for beta chain variable domain of TCR clone 268604 (TRBV7-3, TRBJ2-1)
CASSLEVYRSYNEQFF

SEQ ID NO: 537209 - protein, 12 aa, Homo sapiens
  CDR3 for alpha chain variable domain of TCR clone 268605 (TRAV12-1, TRAJ9)
CVVNPASFKTIF

SEQ ID NO: 537210 - protein, 15 aa, Homo sapiens
  CDR3 for beta chain variable domain of TCR clone 268605 (TRBV4-3, TRBJ2-2)
CASSQGTGATGELFF

SEQ ID NO: 537211 - protein, 16 aa, Homo sapiens
  CDR3 for alpha chain variable domain of TCR clone 268606 (TRAV26-1, TRAJ44)
CIVRGVNTGTASKLTF

SEQ ID NO: 537212 - protein, 15 aa, Homo sapiens
  CDR3 for beta chain variable domain of TCR clone 268606 (TRBV20-1, TRBJ2-7)
CSARDRVSGMDEQYF

SEQ ID NO: 537213 - protein, 16 aa, Homo sapiens
  CDR3 for alpha chain variable domain of TCR clone 268607 (TRAV23/DV6, TRAJ9)
CAASIGGNTGGFKPIF

SEQ ID NO: 537214 - protein, 17 aa, Homo sapiens
  CDR3 for beta chain variable domain of TCR clone 268607 (TRBV13, TRBJ2-3)
CASSLSRVAGGRNTQYF

SEQ ID NO: 537215 - protein, 14 aa, Homo sapiens
  CDR3 for alpha chain variable domain of TCR clone 268608 (TRAV9-2, TRAJ39)
CALYIYNAGNMLTF

SEQ ID NO: 537216 - protein, 14 aa, Homo sapiens
  CDR3 for beta chain variable domain of TCR clone 268608 (TRBV25-1, TRBJ2-2)
CASSELGLPGELFF

SEQ ID NO: 537217 - protein, 14 aa, Homo sapiens
  CDR3 for alpha chain variable domain of TCR clone 268609 (TRAV3, TRAJ6)
CAVRDPWGSYIPTF

SEQ ID NO: 537218 - protein, 20 aa, Homo sapiens
  CDR3 for beta chain variable domain of TCR clone 268609 (TRBV28, TRBJ2-1)
CASTPIGRSPGLAGGNEQFF

SEQ ID NO: 537219 - protein, 14 aa, Homo sapiens
  CDR3 for alpha chain variable domain of TCR clone 268610 (TRAV12-2, TRAJ13)
CAVAGSGGYQKVTF

SEQ ID NO: 537220 - protein, 16 aa, Homo sapiens
  CDR3 for beta chain variable domain of TCR clone 268610 (TRBV12-4, TRBJ1-5)
CASSRPVGGSNQPQHF

SEQ ID NO: 537221 - protein, 13 aa, Homo sapiens
  CDR3 for alpha chain variable domain of TCR clone 268611 (TRAV13-1, TRAJ39)
CSKYSNAGNMLTF

SEQ ID NO: 537222 - protein, 15 aa, Homo sapiens
  CDR3 for beta chain variable domain of TCR clone 268611 (TRBV11-2, TRBJ2-1)
CASSLGPDSYNEQFF

SEQ ID NO: 537223 - protein, 16 aa, Homo sapiens
  CDR3 for alpha chain variable domain of TCR clone 268612 (TRAV14/DV4, TRAJ53)
CAMREGGGGSNYKLTF

SEQ ID NO: 537224 - protein, 16 aa, Homo sapiens
  CDR3 for beta chain variable domain of TCR clone 268612 (TRBV13, TRBJ2-2)
CASSPRTGEHTGELFF

SEQ ID NO: 537225 - protein, 15 aa, Homo sapiens
  CDR3 for alpha chain variable domain of TCR clone 268613 (TRAV27, TRAJ38)
CAGRFNAGNNRKLIW

SEQ ID NO: 537226 - protein, 14 aa, Homo sapiens
  CDR3 for beta chain variable domain of TCR clone 268613 (TRBV18, TRBJ2-7)
CASSPRGGAYEQYF

SEQ ID NO: 537227 - protein, 18 aa, Homo sapiens
  CDR3 for alpha chain variable domain of TCR clone 268614 (TRAV12-3, TRAJ52)
CAMSRTNAGCTSYGKLTF

SEQ ID NO: 537228 - protein, 16 aa, Homo sapiens
  CDR3 for beta chain variable domain of TCR clone 268614 (TRBV7-3, TRBJ2-3)
ELSLMKRMRGADTQYF

SEQ ID NO: 537229 - protein, 14 aa, Homo sapiens
  CDR3 for alpha chain variable domain of TCR clone 268615 (TRAV12-3, TRAJ56)
CAMSVTGVNSKLTF

SEQ ID NO: 537230 - protein, 17 aa, Homo sapiens
  CDR3 for beta chain variable domain of TCR clone 268615 (TRBV20-1, TRBJ2-3)
CSASLLGRGGSADTQYF

SEQ ID NO: 537231 - protein, 14 aa, Homo sapiens
  CDR3 for alpha chain variable domain of TCR clone 268616 (TRAV27, TRAJ15)
CAGFDNQAGAALIF

SEQ ID NO: 537232 - protein, 16 aa, Homo sapiens
  CDR3 for beta chain variable domain of TCR clone 268616 (TRBV5-8, TRBJ2-2)
CASSLINPGGAGELFF

SEQ ID NO: 537233 - protein, 12 aa, Homo sapiens
  CDR3 for alpha chain variable domain of TCR clone 268617 (TRAV21, TRAJ15)
CCGQPGRNSLIF

SEQ ID NO: 537234 - protein, 14 aa, Homo sapiens
  CDR3 for beta chain variable domain of TCR clone 268617 (TRBV27, TRBJ2-2)
CASSLGAATGELFF

SEQ ID NO: 537235 - protein, 13 aa, Homo sapiens
  CDR3 for alpha chain variable domain of TCR clone 268618 (TRAV8-2, TRAJ49)
CVVTPNTGNQFYF

SEQ ID NO: 537236 - protein, 15 aa, Homo sapiens
  CDR3 for beta chain variable domain of TCR clone 268618 (TRBV11-2, TRBJ2-1)
CASSLTSVGYNEQFF

SEQ ID NO: 537237 - protein, 12 aa, Homo sapiens
  CDR3 for alpha chain variable domain of TCR clone 268619 (TRAV12-3, TRAJ17)
CVMTLTGNKLTF

SEQ ID NO: 537238 - protein, 14 aa, Homo sapiens
  CDR3 for beta chain variable domain of TCR clone 268619 (TRBV4-2, TRBJ2-1)
CASGLDRAYNEQFF

SEQ ID NO: 537239 - protein, 13 aa, Homo sapiens
  CDR3 for alpha chain variable domain of TCR clone 268620 (TRAV8-3, TRAJ28)
CAVSAVGSYQLTF

SEQ ID NO: 537240 - protein, 14 aa, Homo sapiens
  CDR3 for beta chain variable domain of TCR clone 268620 (TRBV6-1, TRBJ1-3)
CASVQGGGGNTIYF

SEQ ID NO: 537241 - protein, 17 aa, Homo sapiens
  CDR3 for alpha chain variable domain of TCR clone 268621 (TRAV3, TRAJ6)
CAVRDVPRAGGSYIPTF

SEQ ID NO: 537242 - protein, 16 aa, Homo sapiens
  CDR3 for beta chain variable domain of TCR clone 268621 (TRBV7-8, TRBJ2-3)
CASSTEGQRDTDTQYF

SEQ ID NO: 537243 - protein, 14 aa, Homo sapiens
  CDR3 for alpha chain variable domain of TCR clone 268622 (TRAV26-1, TRAJ34)
CIVSVAYNTDKPIF

SEQ ID NO: 537244 - protein, 15 aa, Homo sapiens
  CDR3 for beta chain variable domain of TCR clone 268622 (TRBV20-1, TRBJ2-7)
CSARVPAAYFYEQYF

SEQ ID NO: 537245 - protein, 12 aa, Homo sapiens
  CDR3 for alpha chain variable domain of TCR clone 268623 (TRAV13-1, TRAJ53)
AASGGSNYKLTF

SEQ ID NO: 537246 - protein, 15 aa, Homo sapiens
  CDR3 for beta chain variable domain of TCR clone 268623 (TRBV6-5, TRBJ2-1)
CASSYDAGAGNEQFF

SEQ ID NO: 537247 - protein, 13 aa, Homo sapiens
  CDR3 for alpha chain variable domain of TCR clone 268624 (TRAV2, TRAJ40)
CAVVTSRTYKYIF

SEQ ID NO: 537248 - protein, 15 aa, Homo sapiens
  CDR3 for beta chain variable domain of TCR clone 268624 (TRBV28, TRBJ2-1)
CASSGLAEVDNEQFF

SEQ ID NO: 537249 - protein, 21 aa, Homo sapiens
  CDR3 for alpha chain variable domain of TCR clone 268625 (TRAV30, TRAJ43)
GLPAQLLRNPLPFIELNDMRF

SEQ ID NO: 537250 - protein, 14 aa, Homo sapiens
  CDR3 for beta chain variable domain of TCR clone 268625 (TRBV19, TRBJ2-3)
CASSAPRGTDTQYF

SEQ ID NO: 537251 - protein, 12 aa, Homo sapiens
  CDR3 for alpha chain variable domain of TCR clone 268626 (TRAV12-3, TRAJ17)
CAMTLTGNKLTF

SEQ ID NO: 537252 - protein, 12 aa, Homo sapiens
  CDR3 for beta chain variable domain of TCR clone 268626 (TRBV11-2, TRBJ2-5)
CASSLGQETQYF

SEQ ID NO: 537253 - protein, 15 aa, Homo sapiens
  CDR3 for alpha chain variable domain of TCR clone 268627 (TRAV25, TRAJ52)
CAGTSGGTSYGKLTF

SEQ ID NO: 537254 - protein, 16 aa, Homo sapiens
  CDR3 for beta chain variable domain of TCR clone 268627 (TRBV12-5, TRBJ2-5)
CASGPRTSGNQETQYF

SEQ ID NO: 537255 - protein, 14 aa, Homo sapiens
  CDR3 for alpha chain variable domain of TCR clone 268628 (TRAV1-2, TRAJ8)
CAVREDTGFQKLLF

SEQ ID NO: 537256 - protein, 16 aa, Homo sapiens
  CDR3 for beta chain variable domain of TCR clone 268628 (TRBV5-7, TRBJ2-5)
CASTLAPAGGRETQYF

SEQ ID NO: 537257 - protein, 12 aa, Homo sapiens
  CDR3 for alpha chain variable domain of TCR clone 268629 (TRAV3, TRAJ20)
CAVRDHDYKLSF

SEQ ID NO: 537258 - protein, 13 aa, Homo sapiens
  CDR3 for beta chain variable domain of TCR clone 268629 (TRBV9, TRBJ2-7)
CASSVGQGGAQYF

SEQ ID NO: 537259 - protein, 16 aa, Homo sapiens
  CDR3 for alpha chain variable domain of TCR clone 268630 (TRAV27, TRAJ48)
TAAQPGDTGLYLPLAF

SEQ ID NO: 537260 - protein, 20 aa, Homo sapiens
  CDR3 for beta chain variable domain of TCR clone 268630 (TRBV28, TRBJ2-1)
CASTPIGRSPGLAGGNEQFF

SEQ ID NO: 537261 - protein, 15 aa, Homo sapiens
  CDR3 for alpha chain variable domain of TCR clone 268631 (TRAV17, TRAJ54)
CATTRSEQGAPKLVF

SEQ ID NO: 537262 - protein, 16 aa, Homo sapiens
  CDR3 for beta chain variable domain of TCR clone 268631 (TRBV12-4, TRBJ2-3)
CASSLRLAETTDTQYF

SEQ ID NO: 537263 - protein, 14 aa, Homo sapiens
  CDR3 for alpha chain variable domain of TCR clone 268632 (TRAV38-1, TRAJ40)
CALRPTSGTYKYIF

SEQ ID NO: 537264 - protein, 18 aa, Homo sapiens
  CDR3 for beta chain variable domain of TCR clone 268632 (TRBV25-1, TRBJ1-1)
LSVPLGKHPPGGNTEAFF

SEQ ID NO: 537265 - protein, 14 aa, Homo sapiens
  CDR3 for alpha chain variable domain of TCR clone 268633 (TRAV13-2, TRAJ4)
CAEKGPKGYNKLIF

SEQ ID NO: 537266 - protein, 13 aa, Homo sapiens
  CDR3 for beta chain variable domain of TCR clone 268633 (TRBV18, TRBJ2-5)
CAGSPPGKETQYF

SEQ ID NO: 537267 - protein, 16 aa, Homo sapiens
  CDR3 for alpha chain variable domain of TCR clone 268634 (TRAV12-3, TRAJ53)
CAMSPGSGGSNYKLTF

SEQ ID NO: 537268 - protein, 13 aa, Homo sapiens
  CDR3 for beta chain variable domain of TCR clone 268634 (TRBV7-2, TRBJ2-5)
CASSQTSVETQYC

SEQ ID NO: 537269 - protein, 10 aa, Homo sapiens
  CDR3 for alpha chain variable domain of TCR clone 268635 (TRAV21, TRAJ31)
CAVDNARLMF

SEQ ID NO: 537270 - protein, 14 aa, Homo sapiens
  CDR3 for beta chain variable domain of TCR clone 268635 (TRBV13, TRBJ2-3)
CASSLGGPQRPQYF

SEQ ID NO: 537271 - protein, 14 aa, Homo sapiens
  CDR3 for alpha chain variable domain of TCR clone 268636 (TRAV1-2, TRAJ16)
CAVNRFSDGQKLLF

SEQ ID NO: 537272 - protein, 16 aa, Homo sapiens
  CDR3 for beta chain variable domain of TCR clone 268636 (TRBV12-5, TRBJ2-5)
CASGPRTSGNQETHYF

SEQ ID NO: 537273 - protein, 14 aa, Homo sapiens
  CDR3 for alpha chain variable domain of TCR clone 268637 (TRAV1-2, TRAJ16)
CAVRGFSDGQKLLF

SEQ ID NO: 537274 - protein, 16 aa, Homo sapiens
  CDR3 for beta chain variable domain of TCR clone 268637 (TRBV12-5, TRBJ2-5)
CASGARTSGNQETQYF

SEQ ID NO: 537275 - protein, 16 aa, Homo sapiens
  CDR3 for alpha chain variable domain of TCR clone 268638 (TRAV8-3, TRAJ28)
CAVPPQRGAGSYQLTF

SEQ ID NO: 537276 - protein, 15 aa, Homo sapiens
  CDR3 for beta chain variable domain of TCR clone 268638 (TRBV9, TRBJ1-6)
CASSVAGTGDSPLHF

SEQ ID NO: 537277 - protein, 14 aa, Homo sapiens
  CDR3 for alpha chain variable domain of TCR clone 268639 (TRAV13-2, TRAJ43)
CAEIPTYNNNDMRF

SEQ ID NO: 537278 - protein, 15 aa, Homo sapiens
  CDR3 for beta chain variable domain of TCR clone 268639 (TRBV7-9, TRBJ2-2)
CASGPLDTCPGELSF

SEQ ID NO: 537279 - protein, 15 aa, Homo sapiens
  CDR3 for alpha chain variable domain of TCR clone 268640 (TRAV8-4, TRAJ6)
CAVSAPSGGSYMPTF

SEQ ID NO: 537280 - protein, 15 aa, Homo sapiens
  CDR3 for beta chain variable domain of TCR clone 268640 (TRBV7-3, TRBJ2-2)
CASKANGANTGELFF

SEQ ID NO: 537281 - protein, 14 aa, Homo sapiens
  CDR3 for alpha chain variable domain of TCR clone 268641 (TRAV1-2, TRAJ16)
CAVNRFSDVQKLLF

SEQ ID NO: 537282 - protein, 11 aa, Homo sapiens
  CDR3 for beta chain variable domain of TCR clone 268641 (TRBV12-4, TRBJ2-3)
CASTATDTQYF

SEQ ID NO: 537283 - protein, 14 aa, Homo sapiens
  CDR3 for alpha chain variable domain of TCR clone 268642 (TRAV13-1, TRAJ9)
SAASALTGGFKTIF

SEQ ID NO: 537284 - protein, 13 aa, Homo sapiens
  CDR3 for beta chain variable domain of TCR clone 268642 (TRBV20-1, TRBJ1-1)
CSAGTVGNTEAFF

SEQ ID NO: 537285 - protein, 15 aa, Homo sapiens
  CDR3 for alpha chain variable domain of TCR clone 268643 (TRAV12-1, TRAJ52)
CVGTAGGTSYGKLTF

SEQ ID NO: 537286 - protein, 14 aa, Homo sapiens
  CDR3 for beta chain variable domain of TCR clone 268643 (TRBV7-3, TRBJ2-2)
CASSPDPSGRELFF

SEQ ID NO: 537287 - protein, 13 aa, Homo sapiens
  CDR3 for alpha chain variable domain of TCR clone 268644 (TRAV21, TRAJ33)
CAVAGDSNYQLIW

SEQ ID NO: 537288 - protein, 13 aa, Homo sapiens
  CDR3 for beta chain variable domain of TCR clone 268644 (TRBV10-3, TRBJ2-7)
CASKLAVNYEPYF

SEQ ID NO: 537289 - protein, 16 aa, Homo sapiens
  CDR3 for alpha chain variable domain of TCR clone 268645 (TRAV3, TRAJ10)
CAVRDMRAGGGNKLPF

SEQ ID NO: 537290 - protein, 19 aa, Homo sapiens
  CDR3 for beta chain variable domain of TCR clone 268645 (TRBV6-3, TRBJ1-2)
CASSYSKGRTGPPNYGYTF

SEQ ID NO: 537291 - protein, 15 aa, Homo sapiens
  CDR3 for alpha chain variable domain of TCR clone 268646 (TRAV8-4, TRAJ47)
CAVSDLLGYGSKLVF

SEQ ID NO: 537292 - protein, 16 aa, Homo sapiens
  CDR3 for beta chain variable domain of TCR clone 268646 (TRBV19, TRBJ2-2)
CASSPSGGLNTGELFF

SEQ ID NO: 537293 - protein, 13 aa, Homo sapiens
  CDR3 for alpha chain variable domain of TCR clone 268647 (TRAV12-2, TRAJ47)
CAVFMEYGNKLVF

SEQ ID NO: 537294 - protein, 12 aa, Homo sapiens
  CDR3 for beta chain variable domain of TCR clone 268647 (TRBV2, TRBJ2-3)
CASSGRFDTQYF

SEQ ID NO: 537295 - protein, 17 aa, Homo sapiens
  CDR3 for alpha chain variable domain of TCR clone 268648 (TRAV13-1, TRAJ52)
CAASSGAGGTSYGKLTF

SEQ ID NO: 537296 - protein, 15 aa, Homo sapiens
  CDR3 for beta chain variable domain of TCR clone 268648 (TRBV4-1, TRBJ1-4)
CASSDTGGTNEKLFC

SEQ ID NO: 537297 - protein, 13 aa, Homo sapiens
  CDR3 for alpha chain variable domain of TCR clone 268649 (TRAV21, TRAJ11)
CAVPNSGYSTLTF

SEQ ID NO: 537298 - protein, 12 aa, Homo sapiens
  CDR3 for beta chain variable domain of TCR clone 268649 (TRBV11-2, TRBJ2-2)
CASSLGGGELFF

SEQ ID NO: 537299 - protein, 14 aa, Homo sapiens
  CDR3 for alpha chain variable domain of TCR clone 268650 (TRAV1-2, TRAJ8)
CAVREDTGFQKLVF

SEQ ID NO: 537300 - protein, 16 aa, Homo sapiens
  CDR3 for beta chain variable domain of TCR clone 268650 (TRBV2, TRBJ2-7)
CASKSPPGQGPYEQYF

SEQ ID NO: 537301 - protein, 14 aa, Homo sapiens
  CDR3 for alpha chain variable domain of TCR clone 268651 (TRAV36/DV7, TRAJ44)
CCGANTGTASKLTF

SEQ ID NO: 537302 - protein, 16 aa, Homo sapiens
  CDR3 for beta chain variable domain of TCR clone 268651 (TRBV7-9, TRBJ1-2)
CASSLGFSSGEDGYTS

SEQ ID NO: 537303 - protein, 15 aa, Homo sapiens
  CDR3 for alpha chain variable domain of TCR clone 268652 (TRAV13-1, TRAJ45)
CAAPYSGGGADGLTF

SEQ ID NO: 537304 - protein, 13 aa, Homo sapiens
  CDR3 for beta chain variable domain of TCR clone 268652 (TRBV7-9, TRBJ1-2)
CASSLKQNYGYTF

SEQ ID NO: 537305 - protein, 13 aa, Homo sapiens
  CDR3 for alpha chain variable domain of TCR clone 268653 (TRAV35, TRAJ42)
CAGFPGSQGNLIF

SEQ ID NO: 537306 - protein, 15 aa, Homo sapiens
  CDR3 for beta chain variable domain of TCR clone 268653 (TRBV7-8, TRBJ2-1)
CASSLAGGLYNEQFF

SEQ ID NO: 537307 - protein, 13 aa, Homo sapiens
  CDR3 for alpha chain variable domain of TCR clone 268654 (TRAV21, TRAJ27)
CAARPGNAGKLTL

SEQ ID NO: 537308 - protein, 14 aa, Homo sapiens
  CDR3 for beta chain variable domain of TCR clone 268654 (TRBV7-6, TRBJ2-3)
CASSLGTVTDTQYF

SEQ ID NO: 537309 - protein, 13 aa, Homo sapiens
  CDR3 for alpha chain variable domain of TCR clone 268655 (TRAV30, TRAJ39)
CGTEKNAGNMLTF

SEQ ID NO: 537310 - protein, 12 aa, Homo sapiens
  CDR3 for beta chain variable domain of TCR clone 268655 (TRBV12-4, TRBJ2-5)
CASSFAQETQYF

SEQ ID NO: 537311 - protein, 16 aa, Homo sapiens
  CDR3 for alpha chain variable domain of TCR clone 268656 (TRAV35, TRAJ28)
CAGVAYSGAGSYQLTF

SEQ ID NO: 537312 - protein, 17 aa, Homo sapiens
  CDR3 for beta chain variable domain of TCR clone 268656 (TRBV4-1, TRBJ1-4)
CASSQEGPRGVEEKLFF

SEQ ID NO: 537313 - protein, 14 aa, Homo sapiens
  CDR3 for alpha chain variable domain of TCR clone 268657 (TRAV13-1, TRAJ40)
CAARMTSGTYKYIF

SEQ ID NO: 537314 - protein, 15 aa, Homo sapiens
  CDR3 for beta chain variable domain of TCR clone 268657 (TRBV28, TRBJ2-1)
CASSIIAGGRSEQFF

SEQ ID NO: 537315 - protein, 10 aa, Homo sapiens
  CDR3 for alpha chain variable domain of TCR clone 268658 (TRAV1-2, TRAJ31)
CVSEDARLMF

SEQ ID NO: 537316 - protein, 14 aa, Homo sapiens
  CDR3 for beta chain variable domain of TCR clone 268658 (TRBV3-1, TRBJ2-5)
CASSQGPDQETQYF

SEQ ID NO: 537317 - protein, 16 aa, Homo sapiens
  CDR3 for alpha chain variable domain of TCR clone 268659 (TRAV30, TRAJ24)
CGTEIVDADSWGKFQF

SEQ ID NO: 537318 - protein, 16 aa, Homo sapiens
  CDR3 for beta chain variable domain of TCR clone 268659 (TRBV4-2, TRBJ1-1)
CASRPLDGGGDTEAFF

SEQ ID NO: 537319 - protein, 16 aa, Homo sapiens
  CDR3 for alpha chain variable domain of TCR clone 268660 (TRAV16, TRAJ4)
CALSRMLSGGYNKLIF

SEQ ID NO: 537320 - protein, 14 aa, Homo sapiens
  CDR3 for beta chain variable domain of TCR clone 268660 (TRBV25-1, TRBJ1-1)
CASTHLGGNTEAFF

SEQ ID NO: 537321 - protein, 14 aa, Homo sapiens
  CDR3 for alpha chain variable domain of TCR clone 268661 (TRAV1-2, TRAJ6)
CAVSLSGGSYIPTF

SEQ ID NO: 537322 - protein, 15 aa, Homo sapiens
  CDR3 for beta chain variable domain of TCR clone 268661 (TRBV28, TRBJ2-7)
CASSTGGRGFYEQYF

SEQ ID NO: 537323 - protein, 13 aa, Homo sapiens
  CDR3 for alpha chain variable domain of TCR clone 268662 (TRAV3, TRAJ41)
CAVSSNSGYALNF

SEQ ID NO: 537324 - protein, 11 aa, Homo sapiens
  CDR3 for beta chain variable domain of TCR clone 268662 (TRBV7-8, TRBJ2-7)
CASSLSLEQYF

SEQ ID NO: 537325 - protein, 14 aa, Homo sapiens
  CDR3 for alpha chain variable domain of TCR clone 268663 (TRAV29/DV5, TRAJ36)
CAARRKTWANNLFF

SEQ ID NO: 537326 - protein, 15 aa, Homo sapiens
  CDR3 for beta chain variable domain of TCR clone 268663 (TRBV7-2, TRBJ1-1)
CASSFAGDRDTEAFF

SEQ ID NO: 537327 - protein, 13 aa, Homo sapiens
  CDR3 for alpha chain variable domain of TCR clone 268664 (TRAV38-2/DV8, TRAJ57)
CAYTQGGSEKLVF

SEQ ID NO: 537328 - protein, 18 aa, Homo sapiens
  CDR3 for beta chain variable domain of TCR clone 268664 (TRBV5-5, TRBJ1-5)
CASSLRQVKGSSNQAQHF

SEQ ID NO: 537329 - protein, 13 aa, Homo sapiens
  CDR3 for alpha chain variable domain of TCR clone 268665 (TRAV36/DV7, TRAJ38)
CVANAGNNHKLIW

SEQ ID NO: 537330 - protein, 14 aa, Homo sapiens
  CDR3 for beta chain variable domain of TCR clone 268665 (TRBV7-2, TRBJ2-7)
CASSLRWEVNEQYF

SEQ ID NO: 537331 - protein, 14 aa, Homo sapiens
  CDR3 for alpha chain variable domain of TCR clone 268666 (TRAV2, TRAJ11)
CAVVLNSGYSTLTF

SEQ ID NO: 537332 - protein, 15 aa, Homo sapiens
  CDR3 for beta chain variable domain of TCR clone 268666 (TRBV4-1, TRBJ1-3)
CASSQDLRVGNTIYF

SEQ ID NO: 537333 - protein, 16 aa, Homo sapiens
  CDR3 for alpha chain variable domain of TCR clone 268667 (TRAV12-2, TRAJ45)
CAVNLYSGGGADGLTF

SEQ ID NO: 537334 - protein, 17 aa, Homo sapiens
  CDR3 for beta chain variable domain of TCR clone 268667 (TRBV6-3, TRBJ2-2)
CASSYRGRDFYTGELFF

SEQ ID NO: 537335 - protein, 14 aa, Homo sapiens
  CDR3 for alpha chain variable domain of TCR clone 268668 (TRAV38-1, TRAJ29)
CAFITPSGNTPLVF

SEQ ID NO: 537336 - protein, 14 aa, Homo sapiens
  CDR3 for beta chain variable domain of TCR clone 268668 (TRBV18, TRBJ2-7)
SASSPRGGAYEQYF

SEQ ID NO: 537337 - protein, 14 aa, Homo sapiens
  CDR3 for alpha chain variable domain of TCR clone 268669 (TRAV12-1, TRAJ17)
CVVYERAAGNKLTF

SEQ ID NO: 537338 - protein, 13 aa, Homo sapiens
  CDR3 for beta chain variable domain of TCR clone 268669 (TRBV19, TRBJ2-1)
CATSRGVYNEQFF

SEQ ID NO: 537339 - protein, 17 aa, Homo sapiens
  CDR3 for alpha chain variable domain of TCR clone 268670 (TRAV14/DV4, TRAJ52)
CAMRGNAGGTSYGKLTF

SEQ ID NO: 537340 - protein, 15 aa, Homo sapiens
  CDR3 for beta chain variable domain of TCR clone 268670 (TRBV27, TRBJ2-5)
CASSLYPRGGETQYF

SEQ ID NO: 537341 - protein, 14 aa, Homo sapiens
  CDR3 for alpha chain variable domain of TCR clone 268671 (TRAV20, TRAJ18)
CAVGRGSTMGRLYF

SEQ ID NO: 537342 - protein, 14 aa, Homo sapiens
  CDR3 for beta chain variable domain of TCR clone 268671 (TRBV28, TRBJ2-4)
CASTQVTGVNIQYF

SEQ ID NO: 537343 - protein, 14 aa, Homo sapiens
  CDR3 for alpha chain variable domain of TCR clone 268672 (TRAV29/DV5, TRAJ45)
CAPYSGGGADGLTF

SEQ ID NO: 537344 - protein, 13 aa, Homo sapiens
  CDR3 for beta chain variable domain of TCR clone 268672 (TRBV29-1, TRBJ2-3)
CSATRGGRNTQYF

SEQ ID NO: 537345 - protein, 13 aa, Homo sapiens
  CDR3 for alpha chain variable domain of TCR clone 268673 (TRAV16, TRAJ27)
CALRRTNAGKSTF

SEQ ID NO: 537346 - protein, 15 aa, Homo sapiens
  CDR3 for beta chain variable domain of TCR clone 268673 (TRBV18, TRBJ2-1)
CASSPPSASCNEQFF

SEQ ID NO: 537347 - protein, 12 aa, Homo sapiens
  CDR3 for alpha chain variable domain of TCR clone 268674 (TRAV14/DV4, TRAJ9)
CAMNPGGFKTIF

SEQ ID NO: 537348 - protein, 16 aa, Homo sapiens
  CDR3 for beta chain variable domain of TCR clone 268674 (TRBV28, TRBJ2-5)
CTSSFSPAGGWETQYF

SEQ ID NO: 537349 - protein, 17 aa, Homo sapiens
  CDR3 for alpha chain variable domain of TCR clone 268675 (TRAV8-3, TRAJ42)
CAVGNPGERRSQGNLIF

SEQ ID NO: 537350 - protein, 14 aa, Homo sapiens
  CDR3 for beta chain variable domain of TCR clone 268675 (TRBV13, TRBJ2-5)
CASSLERVGETQYF

SEQ ID NO: 537351 - protein, 16 aa, Homo sapiens
  CDR3 for alpha chain variable domain of TCR clone 268676 (TRAV26-1, TRAJ37)
CIVRGDCSGNTGKLIF

SEQ ID NO: 537352 - protein, 17 aa, Homo sapiens
  CDR3 for beta chain variable domain of TCR clone 268676 (TRBV4-1, TRBJ2-7)
CASSRDPLGVRGGEQYF

SEQ ID NO: 537353 - protein, 12 aa, Homo sapiens
  CDR3 for alpha chain variable domain of TCR clone 268677 (TRAV27, TRAJ13)
CAGVRGHQKVTF

SEQ ID NO: 537354 - protein, 16 aa, Homo sapiens
  CDR3 for beta chain variable domain of TCR clone 268677 (TRBV28, TRBJ2-1)
CASSSSYSGSLNEQFF

SEQ ID NO: 537355 - protein, 14 aa, Homo sapiens
  CDR3 for alpha chain variable domain of TCR clone 268678 (TRAV12-2, TRAJ13)
CAVNPSGGYQTVTF

SEQ ID NO: 537356 - protein, 14 aa, Homo sapiens
  CDR3 for beta chain variable domain of TCR clone 268678 (TRBV12-4, TRBJ1-1)
CASSLGTGGTEAFF

SEQ ID NO: 537357 - protein, 23 aa, Homo sapiens
  CDR3 for alpha chain variable domain of TCR clone 268679 (TRAV8-3, )
CAVVTTRIPDIQNPDPAVYQLSD

SEQ ID NO: 537358 - protein, 14 aa, Homo sapiens
  CDR3 for beta chain variable domain of TCR clone 268679 (TRBV11-2, TRBJ2-7)
CASSPSTASYEQYF

SEQ ID NO: 537359 - protein, 12 aa, Homo sapiens
  CDR3 for alpha chain variable domain of TCR clone 268680 (TRAV13-1, TRAJ48)
CAANFGNEKLTF

SEQ ID NO: 537360 - protein, 17 aa, Homo sapiens
  CDR3 for beta chain variable domain of TCR clone 268680 (TRBV7-8, TRBJ2-6)
CASSAGTGGAGANVLTF

SEQ ID NO: 537361 - protein, 14 aa, Homo sapiens
  CDR3 for alpha chain variable domain of TCR clone 268681 (TRAV8-3, TRAJ4)
CAVGAAGGYNKLIF

SEQ ID NO: 537362 - protein, 12 aa, Homo sapiens
  CDR3 for beta chain variable domain of TCR clone 268681 (TRBV5-1, TRBJ1-2)
CASSQDTYGYTF

SEQ ID NO: 537363 - protein, 15 aa, Homo sapiens
  CDR3 for alpha chain variable domain of TCR clone 268682 (TRAV3, TRAJ5)
CAVRDLDTGRRALTF

SEQ ID NO: 537364 - protein, 15 aa, Homo sapiens
  CDR3 for beta chain variable domain of TCR clone 268682 (TRBV28, TRBJ2-5)
CASSTPWSYQETQYF

SEQ ID NO: 537365 - protein, 12 aa, Homo sapiens
  CDR3 for alpha chain variable domain of TCR clone 268683 (TRAV13-2, TRAJ48)
SEMDFGNEKLTF

SEQ ID NO: 537366 - protein, 15 aa, Homo sapiens
  CDR3 for beta chain variable domain of TCR clone 268683 (TRBV7-9, TRBJ1-6)
CASSSPGRGNSPLHF

SEQ ID NO: 537367 - protein, 15 aa, Homo sapiens
  CDR3 for alpha chain variable domain of TCR clone 268684 (TRAV3, TRAJ4)
CAMRDGTGGYNKLIF

SEQ ID NO: 537368 - protein, 13 aa, Homo sapiens
  CDR3 for beta chain variable domain of TCR clone 268684 (TRBV12-5, TRBJ1-2)
CASGVRTGNGYTF

SEQ ID NO: 537369 - protein, 20 aa, Homo sapiens
  CDR3 for alpha chain variable domain of TCR clone 268685 (TRAV26-1, TRAJ42)
CCVLLHRQTYYGGCQGNLIF

SEQ ID NO: 537370 - protein, 16 aa, Homo sapiens
  CDR3 for beta chain variable domain of TCR clone 268685 (TRBV7-3, TRBJ2-2)
CASSLKRGTLSGELFF

SEQ ID NO: 537371 - protein, 16 aa, Homo sapiens
  CDR3 for alpha chain variable domain of TCR clone 268686 (TRAV8-6, TRAJ28)
CAVTSKPGAGSYQPTF

SEQ ID NO: 537372 - protein, 16 aa, Homo sapiens
  CDR3 for beta chain variable domain of TCR clone 268686 (TRBV12-4, TRBJ2-5)
CASSWRPSGDLETQYF

SEQ ID NO: 537373 - protein, 14 aa, Homo sapiens
  CDR3 for alpha chain variable domain of TCR clone 268687 (TRAV1-2, TRAJ16)
CAVNRFSDGQKLLF

SEQ ID NO: 537374 - protein, 17 aa, Homo sapiens
  CDR3 for beta chain variable domain of TCR clone 268687 (TRBV19, TRBJ2-1)
CASSPRTSGGPYNEQFF

SEQ ID NO: 537375 - protein, 16 aa, Homo sapiens
  CDR3 for alpha chain variable domain of TCR clone 268688 (TRAV30, TRAJ24)
CGTEIVDADSWGKFQF

SEQ ID NO: 537376 - protein, 13 aa, Homo sapiens
  CDR3 for beta chain variable domain of TCR clone 268688 (TRBV11-2, TRBJ2-5)
CARRSTGEETQYF

SEQ ID NO: 537377 - protein, 17 aa, Homo sapiens
  CDR3 for alpha chain variable domain of TCR clone 268689 (TRAV13-1, TRAJ31)
CAPRDRLMFGDGTQLVV

SEQ ID NO: 537378 - protein, 13 aa, Homo sapiens
  CDR3 for beta chain variable domain of TCR clone 268689 (TRBV13, TRBJ2-1)
CASILGGRGEQFF

SEQ ID NO: 537379 - protein, 11 aa, Homo sapiens
  CDR3 for alpha chain variable domain of TCR clone 268690 (TRAV29/DV5, TRAJ49)
CAAVPGNQFYF

SEQ ID NO: 537380 - protein, 12 aa, Homo sapiens
  CDR3 for beta chain variable domain of TCR clone 268690 (TRBV11-2, TRBJ2-2)
CASSLGGGELFF

SEQ ID NO: 537381 - protein, 14 aa, Homo sapiens
  CDR3 for alpha chain variable domain of TCR clone 268691 (TRAV35, TRAJ38)
CAGSNAGNNRKLIW

SEQ ID NO: 537382 - protein, 11 aa, Homo sapiens
  CDR3 for beta chain variable domain of TCR clone 268691 (TRBV29-1, TRBJ2-5)
CSEDRTGTQYF

SEQ ID NO: 537383 - protein, 11 aa, Homo sapiens
  CDR3 for alpha chain variable domain of TCR clone 268692 (TRAV2, TRAJ31)
CAAVPPARLMF

SEQ ID NO: 537384 - protein, 12 aa, Homo sapiens
  CDR3 for beta chain variable domain of TCR clone 268692 (TRBV4-1, TRBJ2-3)
RSSQPPTDTQYF

SEQ ID NO: 537385 - protein, 13 aa, Homo sapiens
  CDR3 for alpha chain variable domain of TCR clone 268693 (TRAV21, TRAJ27)
CAARPVNAGKSNF

SEQ ID NO: 537386 - protein, 16 aa, Homo sapiens
  CDR3 for beta chain variable domain of TCR clone 268693 (TRBV20-1, TRBJ1-2)
CSASMGQGVANYGYTF

SEQ ID NO: 537387 - protein, 16 aa, Homo sapiens
  CDR3 for alpha chain variable domain of TCR clone 268694 (TRAV30, TRAJ24)
CGTEIVDADSWGKFQI

SEQ ID NO: 537388 - protein, 15 aa, Homo sapiens
  CDR3 for beta chain variable domain of TCR clone 268694 (TRBV27, TRBJ2-1)
CASSNGGGSSNEQFF

SEQ ID NO: 537389 - protein, 14 aa, Homo sapiens
  CDR3 for alpha chain variable domain of TCR clone 268695 (TRAV12-3, TRAJ10)
SYLPLTGGGNKLTF

SEQ ID NO: 537390 - protein, 15 aa, Homo sapiens
  CDR3 for beta chain variable domain of TCR clone 268695 (TRBV12-4, TRBJ1-1)
CASSLGGLSDTEAFF

SEQ ID NO: 537391 - protein, 12 aa, Homo sapiens
  CDR3 for alpha chain variable domain of TCR clone 268696 (TRAV16, TRAJ12)
FAHGDSSYKLIF

SEQ ID NO: 537392 - protein, 12 aa, Homo sapiens
  CDR3 for beta chain variable domain of TCR clone 268696 (TRBV28, TRBJ2-1)
CASSRLFGEQFF

SEQ ID NO: 537393 - protein, 15 aa, Homo sapiens
  CDR3 for alpha chain variable domain of TCR clone 268697 (TRAV21, TRAJ9)
CAVEAVALEASKLSF

SEQ ID NO: 537394 - protein, 13 aa, Homo sapiens
  CDR3 for beta chain variable domain of TCR clone 268697 (TRBV12-4, TRBJ1-2)
CASSSGLTVISTF

SEQ ID NO: 537395 - protein, 14 aa, Homo sapiens
  CDR3 for alpha chain variable domain of TCR clone 268698 (TRAV13-2, TRAJ4)
CAEKGPKGYNKLIF

SEQ ID NO: 537396 - protein, 13 aa, Homo sapiens
  CDR3 for beta chain variable domain of TCR clone 268698 (TRBV18, TRBJ2-5)
CASSPPGKETQFF

SEQ ID NO: 537397 - protein, 14 aa, Homo sapiens
  CDR3 for alpha chain variable domain of TCR clone 268699 (TRAV4, TRAJ26)
CLVGPHNYGQNFVF

SEQ ID NO: 537398 - protein, 16 aa, Homo sapiens
  CDR3 for beta chain variable domain of TCR clone 268699 (TRBV12-5, TRBJ2-5)
CASGPRTSGNQETQYF

SEQ ID NO: 537399 - protein, 12 aa, Homo sapiens
  CDR3 for alpha chain variable domain of TCR clone 268700 (TRAV38-2/DV8, TRAJ27)
CAYRNSAGKSTF

SEQ ID NO: 537400 - protein, 15 aa, Homo sapiens
  CDR3 for beta chain variable domain of TCR clone 268700 (TRBV7-8, TRBJ2-2)
CASSLEAGDTGELFF

SEQ ID NO: 537401 - protein, 12 aa, Homo sapiens
  CDR3 for alpha chain variable domain of TCR clone 268701 (TRAV35, TRAJ39)
LAPNNAGNMLTF

SEQ ID NO: 537402 - protein, 15 aa, Homo sapiens
  CDR3 for beta chain variable domain of TCR clone 268701 (TRBV13, TRBJ2-1)
CASSLLSGLNNEQFF

SEQ ID NO: 537403 - protein, 12 aa, Homo sapiens
  CDR3 for alpha chain variable domain of TCR clone 268702 (TRAV12-2, TRAJ20)
CAVRPSDYKLSF

SEQ ID NO: 537404 - protein, 15 aa, Homo sapiens
  CDR3 for beta chain variable domain of TCR clone 268702 (TRBV5-1, TRBJ2-1)
CASSLVANSYNEQFF

SEQ ID NO: 537405 - protein, 16 aa, Homo sapiens
  CDR3 for alpha chain variable domain of TCR clone 268703 (TRAV21, TRAJ37)
CAVRTAGASDTGKLIF

SEQ ID NO: 537406 - protein, 13 aa, Homo sapiens
  CDR3 for beta chain variable domain of TCR clone 268703 (TRBV7-9, TRBJ2-5)
CASLPSGRETQYF

SEQ ID NO: 537407 - protein, 15 aa, Homo sapiens
  CDR3 for alpha chain variable domain of TCR clone 268704 (TRAV23/DV6, TRAJ42)
CAARGYGGSQGNLIF

SEQ ID NO: 537408 - protein, 13 aa, Homo sapiens
  CDR3 for beta chain variable domain of TCR clone 268704 (TRBV7-2, TRBJ1-5)
CASSTQGSQSQHF

SEQ ID NO: 537409 - protein, 11 aa, Homo sapiens
  CDR3 for alpha chain variable domain of TCR clone 268705 (TRAV12-1, TRAJ34)
CVVNKGRELIF

SEQ ID NO: 537410 - protein, 12 aa, Homo sapiens
  CDR3 for beta chain variable domain of TCR clone 268705 (TRBV2, TRBJ2-1)
WAYGPPGNEQFF

SEQ ID NO: 537411 - protein, 10 aa, Homo sapiens
  CDR3 for alpha chain variable domain of TCR clone 268706 (TRAV20, TRAJ22)
CAAPARQLTF

SEQ ID NO: 537412 - protein, 11 aa, Homo sapiens
  CDR3 for beta chain variable domain of TCR clone 268706 (TRBV29-1, TRBJ2-5)
CSEDRTETQYF

SEQ ID NO: 537413 - protein, 13 aa, Homo sapiens
  CDR3 for alpha chain variable domain of TCR clone 268707 (TRAV26-2, TRAJ43)
CILRAVNNNDMRF

SEQ ID NO: 537414 - protein, 16 aa, Homo sapiens
  CDR3 for beta chain variable domain of TCR clone 268707 (TRBV4-2, TRBJ1-1)
CASSPSPGRAAPEAFF

SEQ ID NO: 537415 - protein, 17 aa, Homo sapiens
  CDR3 for alpha chain variable domain of TCR clone 268708 (TRAV3, TRAJ6)
CAVRDVPRAGGSYIPTF

SEQ ID NO: 537416 - protein, 16 aa, Homo sapiens
  CDR3 for beta chain variable domain of TCR clone 268708 (TRBV7-8, TRBJ2-3)
CASSTEGQRETDTQYF

SEQ ID NO: 537417 - protein, 13 aa, Homo sapiens
  CDR3 for alpha chain variable domain of TCR clone 268709 (TRAV8-3, TRAJ21)
CAVGACNFNKFYF

SEQ ID NO: 537418 - protein, 16 aa, Homo sapiens
  CDR3 for beta chain variable domain of TCR clone 268709 (TRBV19, TRBJ2-1)
CASSMGGGSSYNEQFF

SEQ ID NO: 537419 - protein, 14 aa, Homo sapiens
  CDR3 for alpha chain variable domain of TCR clone 268710 (TRAV26-2, TRAJ27)
CILRDISDAGKSTF

SEQ ID NO: 537420 - protein, 15 aa, Homo sapiens
  CDR3 for beta chain variable domain of TCR clone 268710 (TRBV10-3, TRBJ2-7)
CATRGQGLRSYEQYF

SEQ ID NO: 537421 - protein, 14 aa, Homo sapiens
  CDR3 for alpha chain variable domain of TCR clone 268711 (TRAV12-2, TRAJ3)
CAVNGYSSASKIIF

SEQ ID NO: 537422 - protein, 12 aa, Homo sapiens
  CDR3 for beta chain variable domain of TCR clone 268711 (TRBV4-1, TRBJ2-1)
CASSQPGQGQFF

SEQ ID NO: 537423 - protein, 11 aa, Homo sapiens
  CDR3 for alpha chain variable domain of TCR clone 268712 (TRAV3, TRAJ21)
CAVGNFNKFCF

SEQ ID NO: 537424 - protein, 13 aa, Homo sapiens
  CDR3 for beta chain variable domain of TCR clone 268712 (TRBV20-1, TRBJ2-2)
CSASAAGTGELFF

SEQ ID NO: 537425 - protein, 13 aa, Homo sapiens
  CDR3 for alpha chain variable domain of TCR clone 268713 (TRAV1-1, TRAJ30)
CAVRSDRDDKIIF

SEQ ID NO: 537426 - protein, 15 aa, Homo sapiens
  CDR3 for beta chain variable domain of TCR clone 268713 (TRBV5-1, TRBJ1-3)
CASSLEGGSGNTIYF

SEQ ID NO: 537427 - protein, 14 aa, Homo sapiens
  CDR3 for alpha chain variable domain of TCR clone 268714 (TRAV26-2, TRAJ27)
CILRDISDAGKSTF

SEQ ID NO: 537428 - protein, 15 aa, Homo sapiens
  CDR3 for beta chain variable domain of TCR clone 268714 (TRBV7-2, TRBJ2-5)
CASSLRGASGETQYF

SEQ ID NO: 537429 - protein, 14 aa, Homo sapiens
  CDR3 for alpha chain variable domain of TCR clone 268715 (TRAV26-1, TRAJ39)
CIVRANNAGNMLTF

SEQ ID NO: 537430 - protein, 15 aa, Homo sapiens
  CDR3 for beta chain variable domain of TCR clone 268715 (TRBV7-2, TRBJ2-3)
CASSLAGAFIDTQYF

SEQ ID NO: 537431 - protein, 13 aa, Homo sapiens
  CDR3 for alpha chain variable domain of TCR clone 268716 (TRAV27, TRAJ41)
CAGEGNSGYALNF

SEQ ID NO: 537432 - protein, 18 aa, Homo sapiens
  CDR3 for beta chain variable domain of TCR clone 268716 (TRBV11-2, TRBJ2-3)
CASSLWGASRGAPNTQYF

SEQ ID NO: 537433 - protein, 18 aa, Homo sapiens
  CDR3 for alpha chain variable domain of TCR clone 268717 (TRAV21, TRAJ52)
CAVRPSPAGGTSYGKLTF

SEQ ID NO: 537434 - protein, 13 aa, Homo sapiens
  CDR3 for beta chain variable domain of TCR clone 268717 (TRBV11-2, TRBJ1-5)
CASSLDLHQPQHF

SEQ ID NO: 537435 - protein, 15 aa, Homo sapiens
  CDR3 for alpha chain variable domain of TCR clone 268718 (TRAV12-3, TRAJ6)
CAMSATTGGSYIPTF

SEQ ID NO: 537436 - protein, 15 aa, Homo sapiens
  CDR3 for beta chain variable domain of TCR clone 268718 (TRBV6-5, TRBJ1-1)
CASSYSAAMETEAFF

SEQ ID NO: 537437 - protein, 13 aa, Homo sapiens
  CDR3 for alpha chain variable domain of TCR clone 268719 (TRAV3, TRAJ29)
CAVRDIIDSPLVF

SEQ ID NO: 537438 - protein, 14 aa, Homo sapiens
  CDR3 for beta chain variable domain of TCR clone 268719 (TRBV27, TRBJ2-1)
CASSATGGYNEQFF

SEQ ID NO: 537439 - protein, 16 aa, Homo sapiens
  CDR3 for alpha chain variable domain of TCR clone 268720 (TRAV38-1, TRAJ8)
CISVLSMNTGFQKLVF

SEQ ID NO: 537440 - protein, 14 aa, Homo sapiens
  CDR3 for beta chain variable domain of TCR clone 268720 (TRBV4-1, TRBJ2-3)
CASSQEGSTDTQYF

SEQ ID NO: 537441 - protein, 12 aa, Homo sapiens
  CDR3 for alpha chain variable domain of TCR clone 268721 (TRAV21, TRAJ23)
CAVGPQGGKLIF

SEQ ID NO: 537442 - protein, 16 aa, Homo sapiens
  CDR3 for beta chain variable domain of TCR clone 268721 (TRBV12-5, TRBJ2-5)
CASGPRTSGNQETQYF

SEQ ID NO: 537443 - protein, 14 aa, Homo sapiens
  CDR3 for alpha chain variable domain of TCR clone 268722 (TRAV1-2, TRAJ16)
CAVNRFSDGQKLLF

SEQ ID NO: 537444 - protein, 14 aa, Homo sapiens
  CDR3 for beta chain variable domain of TCR clone 268722 (TRBV25-1, TRBJ1-2)
CASSEATGPYGYTF

SEQ ID NO: 537445 - protein, 17 aa, Homo sapiens
  CDR3 for alpha chain variable domain of TCR clone 268723 (TRAV4, TRAJ13)
CLVGVQGSSGGYLKVTF

SEQ ID NO: 537446 - protein, 18 aa, Homo sapiens
  CDR3 for beta chain variable domain of TCR clone 268723 (TRBV15, TRBJ2-3)
CATSRDGARSWDTDTQYF

SEQ ID NO: 537447 - protein, 15 aa, Homo sapiens
  CDR3 for alpha chain variable domain of TCR clone 268724 (TRAV12-1, TRAJ10)
CVVNKLTGGGNKLTF

SEQ ID NO: 537448 - protein, 17 aa, Homo sapiens
  CDR3 for beta chain variable domain of TCR clone 268724 (TRBV5-1, TRBJ1-6)
CASSPSLQGSDNSTHDF

SEQ ID NO: 537449 - protein, 16 aa, Homo sapiens
  CDR3 for alpha chain variable domain of TCR clone 268725 (TRAV2, TRAJ6)
CAVEPDPSGGSYIPTF

SEQ ID NO: 537450 - protein, 12 aa, Homo sapiens
  CDR3 for beta chain variable domain of TCR clone 268725 (TRBV12-4, TRBJ2-7)
CASSLGGYEQYF

SEQ ID NO: 537451 - protein, 10 aa, Homo sapiens
  CDR3 for alpha chain variable domain of TCR clone 268726 (TRAV36/DV7, TRAJ56)
FAGPAVELTF

SEQ ID NO: 537452 - protein, 13 aa, Homo sapiens
  CDR3 for beta chain variable domain of TCR clone 268726 (TRBV7-9, TRBJ2-7)
CASSFWSSYEQYF

SEQ ID NO: 537453 - protein, 15 aa, Homo sapiens
  CDR3 for alpha chain variable domain of TCR clone 268727 (TRAV13-1, TRAJ8)
CAASISNTGFQKLVF

SEQ ID NO: 537454 - protein, 13 aa, Homo sapiens
  CDR3 for beta chain variable domain of TCR clone 268727 (TRBV5-4, TRBJ1-1)
CASSFQVNTEAFF

SEQ ID NO: 537455 - protein, 17 aa, Homo sapiens
  CDR3 for alpha chain variable domain of TCR clone 268728 (TRAV3, TRAJ6)
CAVRDGPRAGGSYIPTL

SEQ ID NO: 537456 - protein, 15 aa, Homo sapiens
  CDR3 for beta chain variable domain of TCR clone 268728 (TRBV6-3, TRBJ2-7)
CASSSPGTVFYEQYF

SEQ ID NO: 537457 - protein, 14 aa, Homo sapiens
  CDR3 for alpha chain variable domain of TCR clone 268729 (TRAV4, TRAJ26)
FLVGPHNYGQNFVF

SEQ ID NO: 537458 - protein, 17 aa, Homo sapiens
  CDR3 for beta chain variable domain of TCR clone 268729 (TRBV20-1, TRBJ2-1)
CSASSSGLAGSYNEQFF

SEQ ID NO: 537459 - protein, 18 aa, Homo sapiens
  CDR3 for alpha chain variable domain of TCR clone 268730 (TRAV12-1, TRAJ52)
CVVKLINAGGTSYGKLTF

SEQ ID NO: 537460 - protein, 16 aa, Homo sapiens
  CDR3 for beta chain variable domain of TCR clone 268730 (TRBV7-6, TRBJ2-7)
CAGSGGTGALSYEQYF

SEQ ID NO: 537461 - protein, 12 aa, Homo sapiens
  CDR3 for alpha chain variable domain of TCR clone 268731 (TRAV13-2, TRAJ8)
CAPWLGFQKLVF

SEQ ID NO: 537462 - protein, 19 aa, Homo sapiens
  CDR3 for beta chain variable domain of TCR clone 268731 (TRBV12-4, TRBJ2-5)
CASSLSGHSKRPSTSGQAR

SEQ ID NO: 537463 - protein, 11 aa, Homo sapiens
  CDR3 for alpha chain variable domain of TCR clone 268732 (TRAV1-1, TRAJ45)
YSGGGADGLTF

SEQ ID NO: 537464 - protein, 15 aa, Homo sapiens
  CDR3 for beta chain variable domain of TCR clone 268732 (TRBV19, TRBJ2-1)
CASIIGLAGWDEQFF

SEQ ID NO: 537465 - protein, 12 aa, Homo sapiens
  CDR3 for alpha chain variable domain of TCR clone 268733 (TRAV17, TRAJ12)
FAGGDSSYKLIF

SEQ ID NO: 537466 - protein, 12 aa, Homo sapiens
  CDR3 for beta chain variable domain of TCR clone 268733 (TRBV29-1, TRBJ1-1)
CSESDGNTEAFS

SEQ ID NO: 537467 - protein, 14 aa, Homo sapiens
  CDR3 for alpha chain variable domain of TCR clone 268734 (TRAV1-2, TRAJ8)
CAVRGDTGFQKLVF

SEQ ID NO: 537468 - protein, 18 aa, Homo sapiens
  CDR3 for beta chain variable domain of TCR clone 268734 (TRBV4-1, TRBJ2-7)
CASSQDVQGLPTSSTSGR

SEQ ID NO: 537469 - protein, 18 aa, Homo sapiens
  CDR3 for alpha chain variable domain of TCR clone 268735 (TRAV13-1, TRAJ52)
CAAKNPNAGGTSYGKLTF

SEQ ID NO: 537470 - protein, 14 aa, Homo sapiens
  CDR3 for beta chain variable domain of TCR clone 268735 (TRBV19, TRBJ2-1)
CASSDNQGANEQFF

SEQ ID NO: 537471 - protein, 11 aa, Homo sapiens
  CDR3 for alpha chain variable domain of TCR clone 268736 (TRAV4, TRAJ31)
CHVGDNARLMF

SEQ ID NO: 537472 - protein, 14 aa, Homo sapiens
  CDR3 for beta chain variable domain of TCR clone 268736 (TRBV4-1, TRBJ2-2)
CASSQAVNTGELFF

SEQ ID NO: 537473 - protein, 12 aa, Homo sapiens
  CDR3 for alpha chain variable domain of TCR clone 268737 (TRAV1-1, TRAJ23)
CAVTNQGGKLIF

SEQ ID NO: 537474 - protein, 15 aa, Homo sapiens
  CDR3 for beta chain variable domain of TCR clone 268737 (TRBV9, TRBJ1-6)
CASSVAGTGDSPLHF

SEQ ID NO: 537475 - protein, 14 aa, Homo sapiens
  CDR3 for alpha chain variable domain of TCR clone 268738 (TRAV16, TRAJ17)
CALSGRAAGNKLTF

SEQ ID NO: 537476 - protein, 13 aa, Homo sapiens
  CDR3 for beta chain variable domain of TCR clone 268738 (TRBV20-1, TRBJ2-7)
CSASPLSSYEQYF

SEQ ID NO: 537477 - protein, 16 aa, Homo sapiens
  CDR3 for alpha chain variable domain of TCR clone 268739 (TRAV8-3, TRAJ8)
CAVPRDGNTGFQELVF

SEQ ID NO: 537478 - protein, 17 aa, Homo sapiens
  CDR3 for beta chain variable domain of TCR clone 268739 (TRBV11-2, TRBJ2-1)
CASSLYPPGVEYNEQFF

SEQ ID NO: 537479 - protein, 14 aa, Homo sapiens
  CDR3 for alpha chain variable domain of TCR clone 268740 (TRAV1-2, TRAJ8)
CAVREDTGLQKLVF

SEQ ID NO: 537480 - protein, 14 aa, Homo sapiens
  CDR3 for beta chain variable domain of TCR clone 268740 (TRBV25-1, TRBJ1-1)
CASTHLGGNTEAFF

SEQ ID NO: 537481 - protein, 16 aa, Homo sapiens
  CDR3 for alpha chain variable domain of TCR clone 268741 (TRAV30, TRAJ24)
CGTEIVDAGSWGKFQC

SEQ ID NO: 537482 - protein, 14 aa, Homo sapiens
  CDR3 for beta chain variable domain of TCR clone 268741 (TRBV12-5, TRBJ2-5)
CASGSRTHQETQYL

SEQ ID NO: 537483 - protein, 16 aa, Homo sapiens
  CDR3 for alpha chain variable domain of TCR clone 268742 (TRAV8-3, TRAJ44)
CAVGASNTGTSSKLTF

SEQ ID NO: 537484 - protein, 14 aa, Homo sapiens
  CDR3 for beta chain variable domain of TCR clone 268742 (TRBV7-6, TRBJ2-3)
CASSLGTVTDTQYF

SEQ ID NO: 537485 - protein, 13 aa, Homo sapiens
  CDR3 for alpha chain variable domain of TCR clone 268743 (TRAV8-6, TRAJ13)
GAVSRRGYQKVTF

SEQ ID NO: 537486 - protein, 14 aa, Homo sapiens
  CDR3 for beta chain variable domain of TCR clone 268743 (TRBV7-2, TRBJ2-7)
CASSPKTSFYEQYF

SEQ ID NO: 537487 - protein, 14 aa, Homo sapiens
  CDR3 for alpha chain variable domain of TCR clone 268744 (TRAV35, TRAJ42)
CAGRYGGSQGNLIF

SEQ ID NO: 537488 - protein, 12 aa, Homo sapiens
  CDR3 for beta chain variable domain of TCR clone 268744 (TRBV28, TRBJ2-3)
CASSLYRDTQYF

SEQ ID NO: 537489 - protein, 16 aa, Homo sapiens
  CDR3 for alpha chain variable domain of TCR clone 268745 (TRAV1-1, TRAJ45)
CAVRAYSGGGSDVLTF

SEQ ID NO: 537490 - protein, 13 aa, Homo sapiens
  CDR3 for beta chain variable domain of TCR clone 268745 (TRBV20-1, TRBJ1-2)
CSARGTADYGYTF

SEQ ID NO: 537491 - protein, 13 aa, Homo sapiens
  CDR3 for alpha chain variable domain of TCR clone 268746 (TRAV12-1, TRAJ31)
CVVNRNNNARLMF

SEQ ID NO: 537492 - protein, 15 aa, Homo sapiens
  CDR3 for beta chain variable domain of TCR clone 268746 (TRBV4-1, TRBJ1-2)
CASSQGQGAAYGYTF

SEQ ID NO: 537493 - protein, 13 aa, Homo sapiens
  CDR3 for alpha chain variable domain of TCR clone 268747 (TRAV8-3, TRAJ36)
CAVGATGANNLFF

SEQ ID NO: 537494 - protein, 16 aa, Homo sapiens
  CDR3 for beta chain variable domain of TCR clone 268747 (TRBV24-1, TRBJ2-3)
CATSDLGTGATDTQYF

SEQ ID NO: 537495 - protein, 13 aa, Homo sapiens
  CDR3 for alpha chain variable domain of TCR clone 268748 (TRAV26-2, TRAJ43)
CILRAVNNNVMRF

SEQ ID NO: 537496 - protein, 15 aa, Homo sapiens
  CDR3 for beta chain variable domain of TCR clone 268748 (TRBV7-2, TRBJ2-1)
CASTHGTGIYNEQFF

SEQ ID NO: 537497 - protein, 14 aa, Homo sapiens
  CDR3 for alpha chain variable domain of TCR clone 268749 (TRAV12-3, TRAJ9)
CAMSPNTGGFKTIF

SEQ ID NO: 537498 - protein, 15 aa, Homo sapiens
  CDR3 for beta chain variable domain of TCR clone 268749 (TRBV7-2, TRBJ1-2)
CASSLVSGGDYGYTF

SEQ ID NO: 537499 - protein, 12 aa, Homo sapiens
  CDR3 for alpha chain variable domain of TCR clone 268750 (TRAV25, TRAJ20)
CAGRSNDYKLSF

SEQ ID NO: 537500 - protein, 15 aa, Homo sapiens
  CDR3 for beta chain variable domain of TCR clone 268750 (TRBV6-3, TRBJ2-7)
CASSSPGTVFYEQYF

SEQ ID NO: 537501 - protein, 15 aa, Homo sapiens
  CDR3 for alpha chain variable domain of TCR clone 268751 (TRAV13-1, TRAJ6)
CAAFHPSGGSYIPTF

SEQ ID NO: 537502 - protein, 14 aa, Homo sapiens
  CDR3 for beta chain variable domain of TCR clone 268751 (TRBV7-9, TRBJ2-2)
CASGLAINTGELFF

SEQ ID NO: 537503 - protein, 11 aa, Homo sapiens
  CDR3 for alpha chain variable domain of TCR clone 268752 (TRAV17, TRAJ43)
CATPRSNDMRF

SEQ ID NO: 537504 - protein, 14 aa, Homo sapiens
  CDR3 for beta chain variable domain of TCR clone 268752 (TRBV19, TRBJ2-7)
CASNFRDTFTGMYF

SEQ ID NO: 537505 - protein, 14 aa, Homo sapiens
  CDR3 for alpha chain variable domain of TCR clone 268753 (TRAV12-2, TRAJ13)
CAVKKTGGYKKVTF

SEQ ID NO: 537506 - protein, 16 aa, Homo sapiens
  CDR3 for beta chain variable domain of TCR clone 268753 (TRBV20-1, TRBJ1-4)
CSASGQGLVANEELFF

SEQ ID NO: 537507 - protein, 11 aa, Homo sapiens
  CDR3 for alpha chain variable domain of TCR clone 268754 (TRAV13-1, TRAJ39)
CASHAGNMLTF

SEQ ID NO: 537508 - protein, 16 aa, Homo sapiens
  CDR3 for beta chain variable domain of TCR clone 268754 (TRBV12-4, TRBJ2-5)
CASSFFVRGRQETQYF

SEQ ID NO: 537509 - protein, 14 aa, Homo sapiens
  CDR3 for alpha chain variable domain of TCR clone 268755 (TRAV12-1, TRAJ17)
CVVNYKAAGNKLTF

SEQ ID NO: 537510 - protein, 12 aa, Homo sapiens
  CDR3 for beta chain variable domain of TCR clone 268755 (TRBV24-1, TRBJ1-1)
CATLYPETEAFF

SEQ ID NO: 537511 - protein, 14 aa, Homo sapiens
  CDR3 for alpha chain variable domain of TCR clone 268756 (TRAV2, TRAJ9)
CAVEDRSGGFKTIF

SEQ ID NO: 537512 - protein, 14 aa, Homo sapiens
  CDR3 for beta chain variable domain of TCR clone 268756 (TRBV7-9, TRBJ2-1)
CASSSMVGFGEQFF

SEQ ID NO: 537513 - protein, 14 aa, Homo sapiens
  CDR3 for alpha chain variable domain of TCR clone 268757 (TRAV4, TRAJ17)
CLVGDMAAGKKLTF

SEQ ID NO: 537514 - protein, 13 aa, Homo sapiens
  CDR3 for beta chain variable domain of TCR clone 268757 (TRBV18, TRBJ2-7)
CASQSGGGYEQYF

SEQ ID NO: 537515 - protein, 11 aa, Homo sapiens
  CDR3 for alpha chain variable domain of TCR clone 268758 (TRAV1-1, TRAJ23)
CAVRQGGKLIF

SEQ ID NO: 537516 - protein, 17 aa, Homo sapiens
  CDR3 for beta chain variable domain of TCR clone 268758 (TRBV11-2, TRBJ2-1)
CASSLYPPGVGYNEQFF

SEQ ID NO: 537517 - protein, 16 aa, Homo sapiens
  CDR3 for alpha chain variable domain of TCR clone 268759 (TRAV3, TRAJ37)
CAVSVRGSVNTGKLIF

SEQ ID NO: 537518 - protein, 13 aa, Homo sapiens
  CDR3 for beta chain variable domain of TCR clone 268759 (TRBV7-9, TRBJ1-2)
CASSLKQNYGYTF

SEQ ID NO: 537519 - protein, 13 aa, Homo sapiens
  CDR3 for alpha chain variable domain of TCR clone 268760 (TRAV21, TRAJ37)
CAVSSGNTGKLIF

SEQ ID NO: 537520 - protein, 12 aa, Homo sapiens
  CDR3 for beta chain variable domain of TCR clone 268760 (TRBV12-4, TRBJ2-3)
CASSTLPDTQYF

SEQ ID NO: 537521 - protein, 12 aa, Homo sapiens
  CDR3 for alpha chain variable domain of TCR clone 268761 (TRAV8-3, TRAJ20)
CAVGGGDYKLSF

SEQ ID NO: 537522 - protein, 17 aa, Homo sapiens
  CDR3 for beta chain variable domain of TCR clone 268761 (TRBV7-8, TRBJ2-6)
CASSAGTGGAGANVLTF

SEQ ID NO: 537523 - protein, 16 aa, Homo sapiens
  CDR3 for alpha chain variable domain of TCR clone 268762 (TRAV13-2, TRAJ45)
CVENRGSGGGADGLTF

SEQ ID NO: 537524 - protein, 14 aa, Homo sapiens
  CDR3 for beta chain variable domain of TCR clone 268762 (TRBV19, TRBJ2-2)
CASKRAPNTGELFF

SEQ ID NO: 537525 - protein, 13 aa, Homo sapiens
  CDR3 for alpha chain variable domain of TCR clone 268763 (TRAV2, TRAJ23)
RAVMGNQGGKLIF

SEQ ID NO: 537526 - protein, 14 aa, Homo sapiens
  CDR3 for beta chain variable domain of TCR clone 268763 (TRBV11-2, TRBJ2-1)
CASSRATSYNEQFF

SEQ ID NO: 537527 - protein, 18 aa, Homo sapiens
  CDR3 for alpha chain variable domain of TCR clone 268764 (TRAV21, TRAJ52)
CAVRPSPAGGTSDGKLTF

SEQ ID NO: 537528 - protein, 15 aa, Homo sapiens
  CDR3 for beta chain variable domain of TCR clone 268764 (TRBV20-1, TRBJ2-7)
CSARKGLAESYEQYF

SEQ ID NO: 537529 - protein, 11 aa, Homo sapiens
  CDR3 for alpha chain variable domain of TCR clone 268765 (TRAV1-2, TRAJ40)
CAVPGTYKYIF

SEQ ID NO: 537530 - protein, 16 aa, Homo sapiens
  CDR3 for beta chain variable domain of TCR clone 268765 (TRBV20-1, TRBJ2-1)
CSAPGLAGSYSDEQFF

SEQ ID NO: 537531 - protein, 16 aa, Homo sapiens
  CDR3 for alpha chain variable domain of TCR clone 268766 (TRAV3, TRAJ10)
CAVRDMRAGGGNKLTF

SEQ ID NO: 537532 - protein, 13 aa, Homo sapiens
  CDR3 for beta chain variable domain of TCR clone 268766 (TRBV3-1, TRBJ2-7)
CASSLRDGYEQYF

SEQ ID NO: 537533 - protein, 12 aa, Homo sapiens
  CDR3 for alpha chain variable domain of TCR clone 268767 (TRAV8-3, TRAJ20)
CSVGANDYELSF

SEQ ID NO: 537534 - protein, 16 aa, Homo sapiens
  CDR3 for beta chain variable domain of TCR clone 268767 (TRBV19, TRBJ2-2)
CASRSPGTGATGELFF

SEQ ID NO: 537535 - protein, 14 aa, Homo sapiens
  CDR3 for alpha chain variable domain of TCR clone 268768 (TRAV8-4, TRAJ13)
RAVTLSGGYQKVTF

SEQ ID NO: 537536 - protein, 16 aa, Homo sapiens
  CDR3 for beta chain variable domain of TCR clone 268768 (TRBV19, TRBJ2-2)
CASRSPGTGATGELFF

SEQ ID NO: 537537 - protein, 14 aa, Homo sapiens
  CDR3 for alpha chain variable domain of TCR clone 268769 (TRAV2, TRAJ9)
CAVEDRSGGFKTIF

SEQ ID NO: 537538 - protein, 12 aa, Homo sapiens
  CDR3 for beta chain variable domain of TCR clone 268769 (TRBV12-4, TRBJ2-4)
CASSSSGNMQYF

SEQ ID NO: 537539 - protein, 17 aa, Homo sapiens
  CDR3 for alpha chain variable domain of TCR clone 268770 (TRAV13-1, TRAJ52)
CAAGRNAGGTSYGKLTF

SEQ ID NO: 537540 - protein, 15 aa, Homo sapiens
  CDR3 for beta chain variable domain of TCR clone 268770 (TRBV6-3, TRBJ2-7)
CASSSTGTVFYEQYF

SEQ ID NO: 537541 - protein, 13 aa, Homo sapiens
  CDR3 for alpha chain variable domain of TCR clone 268771 (TRAV2, TRAJ40)
CTVVTSGTNKYIF

SEQ ID NO: 537542 - protein, 14 aa, Homo sapiens
  CDR3 for beta chain variable domain of TCR clone 268771 (TRBV19, TRBJ2-1)
CASPTFVLSGEQFF

SEQ ID NO: 537543 - protein, 14 aa, Homo sapiens
  CDR3 for alpha chain variable domain of TCR clone 268772 (TRAV12-1, TRAJ23)
CVVMIYNQGGKLIF

SEQ ID NO: 537544 - protein, 14 aa, Homo sapiens
  CDR3 for beta chain variable domain of TCR clone 268772 (TRBV7-6, TRBJ2-3)
CASSLGTVTDTQYF

SEQ ID NO: 537545 - protein, 15 aa, Homo sapiens
  CDR3 for alpha chain variable domain of TCR clone 268773 (TRAV8-3, TRAJ40)
CAAPSLGSGTYKYIF

SEQ ID NO: 537546 - protein, 11 aa, Homo sapiens
  CDR3 for beta chain variable domain of TCR clone 268773 (TRBV11-2, TRBJ2-2)
CASSLPGELFF

SEQ ID NO: 537547 - protein, 11 aa, Homo sapiens
  CDR3 for alpha chain variable domain of TCR clone 268774 (TRAV21, TRAJ11)
CAVNGYSTLTL

SEQ ID NO: 537548 - protein, 11 aa, Homo sapiens
  CDR3 for beta chain variable domain of TCR clone 268774 (TRBV19, TRBJ1-1)
SASSIGSEAFF

SEQ ID NO: 537549 - protein, 16 aa, Homo sapiens
  CDR3 for alpha chain variable domain of TCR clone 268775 (TRAV26-1, TRAJ48)
CIVRVGANFGNEKLTF

SEQ ID NO: 537550 - protein, 16 aa, Homo sapiens
  CDR3 for beta chain variable domain of TCR clone 268775 (TRBV12-5, TRBJ2-5)
CASGPRTSGNQETQYF

SEQ ID NO: 537551 - protein, 12 aa, Homo sapiens
  CDR3 for alpha chain variable domain of TCR clone 268776 (TRAV13-2, TRAJ23)
CAERHRGGKLIF

SEQ ID NO: 537552 - protein, 17 aa, Homo sapiens
  CDR3 for beta chain variable domain of TCR clone 268776 (TRBV7-9, TRBJ1-6)
CASSSPGRGNSPLHLGT

SEQ ID NO: 537553 - protein, 14 aa, Homo sapiens
  CDR3 for alpha chain variable domain of TCR clone 268777 (TRAV2, TRAJ15)
CCGGSGQAGTALIF

SEQ ID NO: 537554 - protein, 13 aa, Homo sapiens
  CDR3 for beta chain variable domain of TCR clone 268777 (TRBV10-2, TRBJ2-7)
CASGASGGYEQYF

SEQ ID NO: 537555 - protein, 10 aa, Homo sapiens
  CDR3 for alpha chain variable domain of TCR clone 268778 (TRAV23/DV6, TRAJ43)
CAAAVAALEQ

SEQ ID NO: 537556 - protein, 16 aa, Homo sapiens
  CDR3 for beta chain variable domain of TCR clone 268778 (TRBV18, TRBJ1-2)
CASPPPERVTIYGYTF

SEQ ID NO: 537557 - protein, 12 aa, Homo sapiens
  CDR3 for alpha chain variable domain of TCR clone 268779 (TRAV13-2, TRAJ8)
CAPWLGFQKLVF

SEQ ID NO: 537558 - protein, 13 aa, Homo sapiens
  CDR3 for beta chain variable domain of TCR clone 268779 (TRBV4-1, TRBJ1-1)
CASSRKMNTEAFF

SEQ ID NO: 537559 - protein, 12 aa, Homo sapiens
  CDR3 for alpha chain variable domain of TCR clone 268780 (TRAV13-1, TRAJ11)
CAADSGYSTLTF

SEQ ID NO: 537560 - protein, 13 aa, Homo sapiens
  CDR3 for beta chain variable domain of TCR clone 268780 (TRBV19, TRBJ2-1)
CASTNSDVGEQFF

SEQ ID NO: 537561 - protein, 14 aa, Homo sapiens
  CDR3 for alpha chain variable domain of TCR clone 268781 (TRAV12-3, TRAJ10)
SHLPLTGGGNKLTF

SEQ ID NO: 537562 - protein, 17 aa, Homo sapiens
  CDR3 for beta chain variable domain of TCR clone 268781 (TRBV20-1, TRBJ2-3)
CSARDPLTGLITDTQYF

SEQ ID NO: 537563 - protein, 12 aa, Homo sapiens
  CDR3 for alpha chain variable domain of TCR clone 268782 (TRAV13-1, TRAJ21)
CAAKEGFNRIYF

SEQ ID NO: 537564 - protein, 15 aa, Homo sapiens
  CDR3 for beta chain variable domain of TCR clone 268782 (TRBV25-1, TRBJ1-4)
CASSPGDSTNEKLFF

SEQ ID NO: 537565 - protein, 12 aa, Homo sapiens
  CDR3 for alpha chain variable domain of TCR clone 268783 (TRAV26-2, TRAJ47)
CILVEYGNKLFF

SEQ ID NO: 537566 - protein, 16 aa, Homo sapiens
  CDR3 for beta chain variable domain of TCR clone 268783 (TRBV18, TRBJ1-4)
CASSPLVGDRAEKLFF

SEQ ID NO: 537567 - protein, 12 aa, Homo sapiens
  CDR3 for alpha chain variable domain of TCR clone 268784 (TRAV21, TRAJ58)
CAAETSGSRLTF

SEQ ID NO: 537568 - protein, 15 aa, Homo sapiens
  CDR3 for beta chain variable domain of TCR clone 268784 (TRBV20-1, TRBJ2-7)
CSARDPVKGEGEQSF

SEQ ID NO: 537569 - protein, 14 aa, Homo sapiens
  CDR3 for alpha chain variable domain of TCR clone 268785 (TRAV12-3, TRAJ12)
CAMSRMDSSYKLIF

SEQ ID NO: 537570 - protein, 14 aa, Homo sapiens
  CDR3 for beta chain variable domain of TCR clone 268785 (TRBV20-1, TRBJ1-4)
CSARSGQSNEKLFV

SEQ ID NO: 537571 - protein, 17 aa, Homo sapiens
  CDR3 for alpha chain variable domain of TCR clone 268786 (TRAV3, TRAJ12)
CAVRDGGRMDSSYKLIF

SEQ ID NO: 537572 - protein, 14 aa, Homo sapiens
  CDR3 for beta chain variable domain of TCR clone 268786 (TRBV7-9, TRBJ1-2)
CASSRQCANYGYTF

SEQ ID NO: 537573 - protein, 12 aa, Homo sapiens
  CDR3 for alpha chain variable domain of TCR clone 268787 (TRAV12-3, TRAJ17)
CAITLTGNKLTF

SEQ ID NO: 537574 - protein, 17 aa, Homo sapiens
  CDR3 for beta chain variable domain of TCR clone 268787 (TRBV7-8, TRBJ2-6)
CASSAGTGGAGANVLTF

SEQ ID NO: 537575 - protein, 15 aa, Homo sapiens
  CDR3 for alpha chain variable domain of TCR clone 268788 (TRAV4, TRAJ36)
CLVGDRQTGATNLFF

SEQ ID NO: 537576 - protein, 15 aa, Homo sapiens
  CDR3 for beta chain variable domain of TCR clone 268788 (TRBV7-6, TRBJ2-1)
CASSSLAGEGNEQFF

SEQ ID NO: 537577 - protein, 15 aa, Homo sapiens
  CDR3 for alpha chain variable domain of TCR clone 268789 (TRAV17, TRAJ37)
CATDGGSSNTAKLIF

SEQ ID NO: 537578 - protein, 15 aa, Homo sapiens
  CDR3 for beta chain variable domain of TCR clone 268789 (TRBV28, TRBJ2-5)
CASSSGRTIQETQYF

SEQ ID NO: 537579 - protein, 12 aa, Homo sapiens
  CDR3 for alpha chain variable domain of TCR clone 268790 (TRAV21, TRAJ33)
CAEMDSNYQLIW

SEQ ID NO: 537580 - protein, 18 aa, Homo sapiens
  CDR3 for beta chain variable domain of TCR clone 268790 (TRBV7-9, TRBJ2-7)
CASSLTTSGSRTWYEQYF

SEQ ID NO: 537581 - protein, 19 aa, Homo sapiens
  CDR3 for alpha chain variable domain of TCR clone 268791 (TRAV2, TRAJ20)
ILQVREADAAVYRDCKLSF

SEQ ID NO: 537582 - protein, 15 aa, Homo sapiens
  CDR3 for beta chain variable domain of TCR clone 268791 (TRBV5-1, TRBJ2-3)
CASSVTSGSTDTQYF

SEQ ID NO: 537583 - protein, 14 aa, Homo sapiens
  CDR3 for alpha chain variable domain of TCR clone 268792 (TRAV26-1, TRAJ39)
CIVKGSRAGNMLTF

SEQ ID NO: 537584 - protein, 15 aa, Homo sapiens
  CDR3 for beta chain variable domain of TCR clone 268792 (TRBV7-2, TRBJ2-1)
CASSLGLAGGREQFF

SEQ ID NO: 537585 - protein, 13 aa, Homo sapiens
  CDR3 for alpha chain variable domain of TCR clone 268793 (TRAV38-1, TRAJ52)
CAFRGASYGKLTF

SEQ ID NO: 537586 - protein, 15 aa, Homo sapiens
  CDR3 for beta chain variable domain of TCR clone 268793 (TRBV7-8, TRBJ2-5)
CASSDAAGSQETQYF

SEQ ID NO: 537587 - protein, 16 aa, Homo sapiens
  CDR3 for alpha chain variable domain of TCR clone 268794 (TRAV30, TRAJ24)
CGTAIVDADSWGKFQF

SEQ ID NO: 537588 - protein, 15 aa, Homo sapiens
  CDR3 for beta chain variable domain of TCR clone 268794 (TRBV12-4, TRBJ2-5)
CASSPPTGLQETQYF

SEQ ID NO: 537589 - protein, 14 aa, Homo sapiens
  CDR3 for alpha chain variable domain of TCR clone 268795 (TRAV1-2, TRAJ16)
CAVNRFSDGQKLPF

SEQ ID NO: 537590 - protein, 14 aa, Homo sapiens
  CDR3 for beta chain variable domain of TCR clone 268795 (TRBV7-9, TRBJ1-4)
CAITEGEANEKLFF

SEQ ID NO: 537591 - protein, 14 aa, Homo sapiens
  CDR3 for alpha chain variable domain of TCR clone 268796 (TRAV12-1, TRAJ38)
CGELKAGNNRKLIW

SEQ ID NO: 537592 - protein, 13 aa, Homo sapiens
  CDR3 for beta chain variable domain of TCR clone 268796 (TRBV4-2, TRBJ1-1)
CASSQAGNTEAVF

SEQ ID NO: 537593 - protein, 15 aa, Homo sapiens
  CDR3 for alpha chain variable domain of TCR clone 268797 (TRAV27, TRAJ38)
CAARRNAGDNRKLIW

SEQ ID NO: 537594 - protein, 15 aa, Homo sapiens
  CDR3 for beta chain variable domain of TCR clone 268797 (TRBV2, TRBJ2-1)
CASSELAGSYNEQFF

SEQ ID NO: 537595 - protein, 16 aa, Homo sapiens
  CDR3 for alpha chain variable domain of TCR clone 268798 (TRAV30, TRAJ24)
CGTEIVDADSWGKFQF

SEQ ID NO: 537596 - protein, 13 aa, Homo sapiens
  CDR3 for beta chain variable domain of TCR clone 268798 (TRBV11-2, TRBJ1-3)
CASSLEPVNTIYF

SEQ ID NO: 537597 - protein, 14 aa, Homo sapiens
  CDR3 for alpha chain variable domain of TCR clone 268799 (TRAV23/DV6, TRAJ27)
CAASRDTNAGKSTF

SEQ ID NO: 537598 - protein, 13 aa, Homo sapiens
  CDR3 for beta chain variable domain of TCR clone 268799 (TRBV20-1, TRBJ1-5)
CRASGRGNQPQHF

SEQ ID NO: 537599 - protein, 14 aa, Homo sapiens
  CDR3 for alpha chain variable domain of TCR clone 268800 (TRAV27, TRAJ44)
CAASFTGTASKLTF

SEQ ID NO: 537600 - protein, 13 aa, Homo sapiens
  CDR3 for beta chain variable domain of TCR clone 268800 (TRBV27, TRBJ2-3)
CATSRGGLNTQYF

SEQ ID NO: 537601 - protein, 16 aa, Homo sapiens
  CDR3 for alpha chain variable domain of TCR clone 268801 (TRAV22, TRAJ45)
CAVERGKRGGADGLTF

SEQ ID NO: 537602 - protein, 17 aa, Homo sapiens
  CDR3 for beta chain variable domain of TCR clone 268801 (TRBV7-3, TRBJ2-3)
CASSLRKRMRGADTQYF

SEQ ID NO: 537603 - protein, 15 aa, Homo sapiens
  CDR3 for alpha chain variable domain of TCR clone 268802 (TRAV12-2, TRAJ53)
CAVNGGGGSNYKLTF

SEQ ID NO: 537604 - protein, 17 aa, Homo sapiens
  CDR3 for beta chain variable domain of TCR clone 268802 (TRBV3-1, TRBJ2-7)
CANSQDLTGLSSYEQYF

SEQ ID NO: 537605 - protein, 15 aa, Homo sapiens
  CDR3 for alpha chain variable domain of TCR clone 268803 (TRAV12-1, TRAJ44)
FVVDTPQGTASRLTF

SEQ ID NO: 537606 - protein, 13 aa, Homo sapiens
  CDR3 for beta chain variable domain of TCR clone 268803 (TRBV27, TRBJ2-1)
CASSSGSYNEQFF

SEQ ID NO: 537607 - protein, 18 aa, Homo sapiens
  CDR3 for alpha chain variable domain of TCR clone 268804 (TRAV13-1, TRAJ52)
CAASKRSAGGTRYGKLTF

SEQ ID NO: 537608 - protein, 13 aa, Homo sapiens
  CDR3 for beta chain variable domain of TCR clone 268804 (TRBV12-4, TRBJ1-2)
CASSLRQGKGYAF

SEQ ID NO: 537609 - protein, 15 aa, Homo sapiens
  CDR3 for alpha chain variable domain of TCR clone 268805 (TRAV3, TRAJ23)
CALRDRGNQGGKLIF

SEQ ID NO: 537610 - protein, 15 aa, Homo sapiens
  CDR3 for beta chain variable domain of TCR clone 268805 (TRBV7-3, TRBJ2-1)
CQQLAPSGSYNEQFF

SEQ ID NO: 537611 - protein, 12 aa, Homo sapiens
  CDR3 for alpha chain variable domain of TCR clone 268806 (TRAV3, TRAJ43)
CAVRDPNNDMRF

SEQ ID NO: 537612 - protein, 15 aa, Homo sapiens
  CDR3 for beta chain variable domain of TCR clone 268806 (TRBV5-5, TRBJ1-5)
CASSLKGGGEQPQHF

SEQ ID NO: 537613 - protein, 13 aa, Homo sapiens
  CDR3 for alpha chain variable domain of TCR clone 268807 (TRAV26-2, TRAJ54)
CIPRVGGAQTLVF

SEQ ID NO: 537614 - protein, 16 aa, Homo sapiens
  CDR3 for beta chain variable domain of TCR clone 268807 (TRBV4-1, TRBJ1-1)
CASSSMSERPNTEAFF

SEQ ID NO: 537615 - protein, 17 aa, Homo sapiens
  CDR3 for alpha chain variable domain of TCR clone 268808 (TRAV9-2, TRAJ45)
CALSGYYSGGGADGLTF

SEQ ID NO: 537616 - protein, 15 aa, Homo sapiens
  CDR3 for beta chain variable domain of TCR clone 268808 (TRBV7-2, TRBJ1-2)
CASSPRAGWNYGYTF

SEQ ID NO: 537617 - protein, 16 aa, Homo sapiens
  CDR3 for alpha chain variable domain of TCR clone 268809 (TRAV3, TRAJ10)
CAVRDMNAGGGNKLTF

SEQ ID NO: 537618 - protein, 15 aa, Homo sapiens
  CDR3 for beta chain variable domain of TCR clone 268809 (TRBV12-4, TRBJ2-2)
CASSFKSANTGELFF

SEQ ID NO: 537619 - protein, 15 aa, Homo sapiens
  CDR3 for alpha chain variable domain of TCR clone 268810 (TRAV21, TRAJ57)
CAVIITHGGSEKLIF

SEQ ID NO: 537620 - protein, 14 aa, Homo sapiens
  CDR3 for beta chain variable domain of TCR clone 268810 (TRBV5-1, TRBJ2-2)
CASSLIWIPGELFF

SEQ ID NO: 537621 - protein, 14 aa, Homo sapiens
  CDR3 for alpha chain variable domain of TCR clone 268811 (TRAV26-1, TRAJ38)
CIADNAGDNRKLLW

SEQ ID NO: 537622 - protein, 13 aa, Homo sapiens
  CDR3 for beta chain variable domain of TCR clone 268811 (TRBV20-1, TRBJ1-1)
CSARGGGNTEAFF

SEQ ID NO: 537623 - protein, 14 aa, Homo sapiens
  CDR3 for alpha chain variable domain of TCR clone 268812 (TRAV20, TRAJ42)
CAVQAGGSQENLIF

SEQ ID NO: 537624 - protein, 14 aa, Homo sapiens
  CDR3 for beta chain variable domain of TCR clone 268812 (TRBV28, TRBJ1-2)
CASRIQGANYGYTF

SEQ ID NO: 537625 - protein, 12 aa, Homo sapiens
  CDR3 for alpha chain variable domain of TCR clone 268813 (TRAV4, TRAJ26)
CLVGDYGQNFVF

SEQ ID NO: 537626 - protein, 13 aa, Homo sapiens
  CDR3 for beta chain variable domain of TCR clone 268813 (TRBV13, TRBJ2-5)
CASSLGGEETQYF

SEQ ID NO: 537627 - protein, 13 aa, Homo sapiens
  CDR3 for alpha chain variable domain of TCR clone 268814 (TRAV12-3, TRAJ33)
CAMSVNSNYQLIW

SEQ ID NO: 537628 - protein, 14 aa, Homo sapiens
  CDR3 for beta chain variable domain of TCR clone 268814 (TRBV11-2, TRBJ1-2)
CASSRDYSAYGYTF

SEQ ID NO: 537629 - protein, 14 aa, Homo sapiens
  CDR3 for alpha chain variable domain of TCR clone 268815 (TRAV26-1, TRAJ38)
CIADNAGHNRKLIW

SEQ ID NO: 537630 - protein, 14 aa, Homo sapiens
  CDR3 for beta chain variable domain of TCR clone 268815 (TRBV20-1, TRBJ1-1)
CSAQTRIGGTEAFF

SEQ ID NO: 537631 - protein, 14 aa, Homo sapiens
  CDR3 for alpha chain variable domain of TCR clone 268816 (TRAV17, TRAJ54)
CATDANQGAQKLVF

SEQ ID NO: 537632 - protein, 19 aa, Homo sapiens
  CDR3 for beta chain variable domain of TCR clone 268816 (TRBV25-1, TRBJ2-2)
CAILVYRVDRGRKTGELFF

SEQ ID NO: 537633 - protein, 17 aa, Homo sapiens
  CDR3 for alpha chain variable domain of TCR clone 268817 (TRAV3, TRAJ6)
CAVRDGPSAGGSYIPTF

SEQ ID NO: 537634 - protein, 14 aa, Homo sapiens
  CDR3 for beta chain variable domain of TCR clone 268817 (TRBV7-2, TRBJ2-7)
CASSPKTRFYEQYF

SEQ ID NO: 537635 - protein, 12 aa, Homo sapiens
  CDR3 for alpha chain variable domain of TCR clone 268818 (TRAV13-1, TRAJ21)
CAAKEGFNKFYF

SEQ ID NO: 537636 - protein, 13 aa, Homo sapiens
  CDR3 for beta chain variable domain of TCR clone 268818 (TRBV18, TRBJ2-7)
CQLIERGAYEQYF

SEQ ID NO: 537637 - protein, 13 aa, Homo sapiens
  CDR3 for alpha chain variable domain of TCR clone 268819 (TRAV8-4, TRAJ10)
CAAFTGGGNKLTF

SEQ ID NO: 537638 - protein, 15 aa, Homo sapiens
  CDR3 for beta chain variable domain of TCR clone 268819 (TRBV11-3, TRBJ2-3)
CASLKDGREGDTQYF

SEQ ID NO: 537639 - protein, 14 aa, Homo sapiens
  CDR3 for alpha chain variable domain of TCR clone 268820 (TRAV13-1, TRAJ44)
CAAKATGTASKLTF

SEQ ID NO: 537640 - protein, 16 aa, Homo sapiens
  CDR3 for beta chain variable domain of TCR clone 268820 (TRBV15, TRBJ1-2)
CATSRGPSTGGGGYTF

SEQ ID NO: 537641 - protein, 14 aa, Homo sapiens
  CDR3 for alpha chain variable domain of TCR clone 268821 (TRAV30, TRAJ26)
CGTEIVSYGQNFFF

SEQ ID NO: 537642 - protein, 13 aa, Homo sapiens
  CDR3 for beta chain variable domain of TCR clone 268821 (TRBV7-3, TRBJ1-1)
CASSQDWGAEAFF

SEQ ID NO: 537643 - protein, 17 aa, Homo sapiens
  CDR3 for alpha chain variable domain of TCR clone 268822 (TRAV23/DV6, TRAJ57)
CAANSTLSQGGSEKLVF

SEQ ID NO: 537644 - protein, 14 aa, Homo sapiens
  CDR3 for beta chain variable domain of TCR clone 268822 (TRBV25-1, TRBJ1-1)
CASTHLGGNTEAFF

SEQ ID NO: 537645 - protein, 17 aa, Homo sapiens
  CDR3 for alpha chain variable domain of TCR clone 268823 (TRAV3, TRAJ6)
CAVRDGPGAGGSYRPTF

SEQ ID NO: 537646 - protein, 15 aa, Homo sapiens
  CDR3 for beta chain variable domain of TCR clone 268823 (TRBV11-3, TRBJ2-7)
CASSPGPASSYEQYF

SEQ ID NO: 537647 - protein, 11 aa, Homo sapiens
  CDR3 for alpha chain variable domain of TCR clone 268824 (TRAV1-1, TRAJ23)
CAVRQGGKLLF

SEQ ID NO: 537648 - protein, 20 aa, Homo sapiens
  CDR3 for beta chain variable domain of TCR clone 268824 (TRBV7-8, TRBJ2-2)
CASSHLFPGPTIHINGELFF

SEQ ID NO: 537649 - protein, 12 aa, Homo sapiens
  CDR3 for alpha chain variable domain of TCR clone 268825 (TRAV21, TRAJ33)
CAKMDSNYQLIW

SEQ ID NO: 537650 - protein, 13 aa, Homo sapiens
  CDR3 for beta chain variable domain of TCR clone 268825 (TRBV13, TRBJ2-2)
CASSGGNTGELFF

SEQ ID NO: 537651 - protein, 15 aa, Homo sapiens
  CDR3 for alpha chain variable domain of TCR clone 268826 (TRAV21, TRAJ24)
RAARSSTDSWGTLQF

SEQ ID NO: 537652 - protein, 13 aa, Homo sapiens
  CDR3 for beta chain variable domain of TCR clone 268826 (TRBV11-2, TRBJ2-5)
CASSSTGEETQYF

SEQ ID NO: 537653 - protein, 14 aa, Homo sapiens
  CDR3 for alpha chain variable domain of TCR clone 268827 (TRAV29/DV5, TRAJ44)
CAAFLVGTANKLTF

SEQ ID NO: 537654 - protein, 15 aa, Homo sapiens
  CDR3 for beta chain variable domain of TCR clone 268827 (TRBV7-3, TRBJ2-2)
CASSETGQGTGELFF

SEQ ID NO: 537655 - protein, 16 aa, Homo sapiens
  CDR3 for alpha chain variable domain of TCR clone 268828 (TRAV26-1, )
CIDIQNPDPAVYQLRD

SEQ ID NO: 537656 - protein, 17 aa, Homo sapiens
  CDR3 for beta chain variable domain of TCR clone 268828 (TRBV7-3, TRBJ2-3)
RASSLMKRMRGADTQYF

SEQ ID NO: 537657 - protein, 13 aa, Homo sapiens
  CDR3 for alpha chain variable domain of TCR clone 268829 (TRAV8-3, TRAJ28)
CAVGAVGRYQLTL

SEQ ID NO: 537658 - protein, 14 aa, Homo sapiens
  CDR3 for beta chain variable domain of TCR clone 268829 (TRBV7-2, TRBJ2-7)
CASRSQGAAYEQYF

SEQ ID NO: 537659 - protein, 15 aa, Homo sapiens
  CDR3 for alpha chain variable domain of TCR clone 268830 (TRAV3, TRAJ3)
CAVRVRDSSASKIIF

SEQ ID NO: 537660 - protein, 15 aa, Homo sapiens
  CDR3 for beta chain variable domain of TCR clone 268830 (TRBV19, TRBJ2-1)
CASSSPGVPLDEQFF

SEQ ID NO: 537661 - protein, 13 aa, Homo sapiens
  CDR3 for alpha chain variable domain of TCR clone 268831 (TRAV3, TRAJ8)
CAVSNTGFQKLVF

SEQ ID NO: 537662 - protein, 15 aa, Homo sapiens
  CDR3 for beta chain variable domain of TCR clone 268831 (TRBV28, TRBJ2-5)
CASSSGRTMQETQYF

SEQ ID NO: 537663 - protein, 14 aa, Homo sapiens
  CDR3 for alpha chain variable domain of TCR clone 268832 (TRAV1-2, TRAJ27)
CAVREPQTPMQANQ

SEQ ID NO: 537664 - protein, 13 aa, Homo sapiens
  CDR3 for beta chain variable domain of TCR clone 268832 (TRBV6-1, TRBJ1-2)
CASSAREGYGYTF

SEQ ID NO: 537665 - protein, 15 aa, Homo sapiens
  CDR3 for alpha chain variable domain of TCR clone 268833 (TRAV26-1, TRAJ30)
IASSGRFNRDDKIIF

SEQ ID NO: 537666 - protein, 14 aa, Homo sapiens
  CDR3 for beta chain variable domain of TCR clone 268833 (TRBV7-2, TRBJ2-7)
CASSPKTSFYEQYF

SEQ ID NO: 537667 - protein, 14 aa, Homo sapiens
  CDR3 for alpha chain variable domain of TCR clone 268834 (TRAV12-3, TRAJ54)
CAMRIIQGAQKLVI

SEQ ID NO: 537668 - protein, 16 aa, Homo sapiens
  CDR3 for beta chain variable domain of TCR clone 268834 (TRBV28, TRBJ2-1)
CAIRAPASGRIGEQFF

SEQ ID NO: 537669 - protein, 14 aa, Homo sapiens
  CDR3 for alpha chain variable domain of TCR clone 268835 (TRAV12-3, TRAJ10)
SHLPLTGGGNKLTF

SEQ ID NO: 537670 - protein, 12 aa, Homo sapiens
  CDR3 for beta chain variable domain of TCR clone 268835 (TRBV24-1, TRBJ1-1)
CATLYPDTEAFF

SEQ ID NO: 537671 - protein, 13 aa, Homo sapiens
  CDR3 for alpha chain variable domain of TCR clone 268836 (TRAV35, TRAJ33)
CAGQLYGVYQLIW

SEQ ID NO: 537672 - protein, 14 aa, Homo sapiens
  CDR3 for beta chain variable domain of TCR clone 268836 (TRBV7-2, TRBJ1-1)
CASSLGGASTEAFF

SEQ ID NO: 537673 - protein, 11 aa, Homo sapiens
  CDR3 for alpha chain variable domain of TCR clone 268837 (TRAV3, TRAJ21)
CAVGNFNKFYF

SEQ ID NO: 537674 - protein, 13 aa, Homo sapiens
  CDR3 for beta chain variable domain of TCR clone 268837 (TRBV2, TRBJ1-5)
CATAGPGNQPQHF

SEQ ID NO: 537675 - protein, 11 aa, Homo sapiens
  CDR3 for alpha chain variable domain of TCR clone 268838 (TRAV2, TRAJ13)
CASGGYQKVTF

SEQ ID NO: 537676 - protein, 15 aa, Homo sapiens
  CDR3 for beta chain variable domain of TCR clone 268838 (TRBV6-1, TRBJ2-2)
CASSRLRGDTGELLF

SEQ ID NO: 537677 - protein, 12 aa, Homo sapiens
  CDR3 for alpha chain variable domain of TCR clone 268839 (TRAV17, TRAJ54)
CSTPQGAQKLVF

SEQ ID NO: 537678 - protein, 13 aa, Homo sapiens
  CDR3 for beta chain variable domain of TCR clone 268839 (TRBV10-3, TRBJ2-7)
CASKLAVNYEQYF

SEQ ID NO: 537679 - protein, 15 aa, Homo sapiens
  CDR3 for alpha chain variable domain of TCR clone 268840 (TRAV1-2, TRAJ16)
CAVRARFSDGQKLLF

SEQ ID NO: 537680 - protein, 14 aa, Homo sapiens
  CDR3 for beta chain variable domain of TCR clone 268840 (TRBV11-2, TRBJ2-3)
CASSRLARTDTQYF

SEQ ID NO: 537681 - protein, 14 aa, Homo sapiens
  CDR3 for alpha chain variable domain of TCR clone 268841 (TRAV13-1, TRAJ28)
CAASKGAGSYQLTF

SEQ ID NO: 537682 - protein, 15 aa, Homo sapiens
  CDR3 for beta chain variable domain of TCR clone 268841 (TRBV11-2, TRBJ2-2)
CASSSDRVNAGELFF

SEQ ID NO: 537683 - protein, 14 aa, Homo sapiens
  CDR3 for alpha chain variable domain of TCR clone 268842 (TRAV38-1, TRAJ45)
CAAHSGGGADGLTF

SEQ ID NO: 537684 - protein, 13 aa, Homo sapiens
  CDR3 for beta chain variable domain of TCR clone 268842 (TRBV10-3, TRBJ1-2)
CAISERDSYGYTF

SEQ ID NO: 537685 - protein, 13 aa, Homo sapiens
  CDR3 for alpha chain variable domain of TCR clone 268843 (TRAV21, TRAJ27)
CAARPGNAGQSTF

SEQ ID NO: 537686 - protein, 14 aa, Homo sapiens
  CDR3 for beta chain variable domain of TCR clone 268843 (TRBV11-2, TRBJ2-7)
GASSLGAGAYEQYF

SEQ ID NO: 537687 - protein, 13 aa, Homo sapiens
  CDR3 for alpha chain variable domain of TCR clone 268844 (TRAV8-2, TRAJ49)
CVVSPSTGNQFYF

SEQ ID NO: 537688 - protein, 14 aa, Homo sapiens
  CDR3 for beta chain variable domain of TCR clone 268844 (TRBV11-2, TRBJ2-7)
CASSRSWGAGEQYF

SEQ ID NO: 537689 - protein, 18 aa, Homo sapiens
  CDR3 for alpha chain variable domain of TCR clone 268845 (TRAV12-3, TRAJ52)
CAMSVGGAGGTSYGKLTF

SEQ ID NO: 537690 - protein, 15 aa, Homo sapiens
  CDR3 for beta chain variable domain of TCR clone 268845 (TRBV6-5, TRBJ1-2)
CASSYSQAFNYGYTF

SEQ ID NO: 537691 - protein, 14 aa, Homo sapiens
  CDR3 for alpha chain variable domain of TCR clone 268846 (TRAV23/DV6, TRAJ13)
CAASETGGYPKVTF

SEQ ID NO: 537692 - protein, 16 aa, Homo sapiens
  CDR3 for beta chain variable domain of TCR clone 268846 (TRBV5-1, TRBJ1-3)
CASSPWAPSSGNTIYF

SEQ ID NO: 537693 - protein, 11 aa, Homo sapiens
  CDR3 for alpha chain variable domain of TCR clone 268847 (TRAV1-1, TRAJ23)
CAVRQGGKLIF

SEQ ID NO: 537694 - protein, 13 aa, Homo sapiens
  CDR3 for beta chain variable domain of TCR clone 268847 (TRBV11-2, TRBJ2-5)
CASSRGPFETQYF

SEQ ID NO: 537695 - protein, 15 aa, Homo sapiens
  CDR3 for alpha chain variable domain of TCR clone 268848 (TRAV12-3, TRAJ5)
CAMSGLGTGRRALTF

SEQ ID NO: 537696 - protein, 16 aa, Homo sapiens
  CDR3 for beta chain variable domain of TCR clone 268848 (TRBV7-9, TRBJ1-2)
CASSLGFSSGEDGYTF

SEQ ID NO: 537697 - protein, 18 aa, Homo sapiens
  CDR3 for alpha chain variable domain of TCR clone 268849 (TRAV26-1, TRAJ23)
CIVRVGLEVWNQGGKLIF

SEQ ID NO: 537698 - protein, 12 aa, Homo sapiens
  CDR3 for beta chain variable domain of TCR clone 268849 (TRBV27, TRBJ2-2)
CASKRFTGELFF

SEQ ID NO: 537699 - protein, 13 aa, Homo sapiens
  CDR3 for alpha chain variable domain of TCR clone 268850 (TRAV29/DV5, TRAJ54)
CAAHLQGAQKLVF

SEQ ID NO: 537700 - protein, 16 aa, Homo sapiens
  CDR3 for beta chain variable domain of TCR clone 268850 (TRBV7-2, TRBJ2-7)
CASSLPLAGGPLEQYF

SEQ ID NO: 537701 - protein, 14 aa, Homo sapiens
  CDR3 for alpha chain variable domain of TCR clone 268851 (TRAV13-1, TRAJ35)
CAASKGGFGNVLHC

SEQ ID NO: 537702 - protein, 12 aa, Homo sapiens
  CDR3 for beta chain variable domain of TCR clone 268851 (TRBV5-1, TRBJ1-2)
CASSQDTYGYTF

SEQ ID NO: 537703 - protein, 15 aa, Homo sapiens
  CDR3 for alpha chain variable domain of TCR clone 268852 (TRAV30, TRAJ32)
CGTAILGGATNKPIF

SEQ ID NO: 537704 - protein, 17 aa, Homo sapiens
  CDR3 for beta chain variable domain of TCR clone 268852 (TRBV5-4, TRBJ2-1)
CASSSAGGRGPYNEQFF

SEQ ID NO: 537705 - protein, 13 aa, Homo sapiens
  CDR3 for alpha chain variable domain of TCR clone 268853 (TRAV13-2, TRAJ48)
CAEMDFGNEKLTF

SEQ ID NO: 537706 - protein, 11 aa, Homo sapiens
  CDR3 for beta chain variable domain of TCR clone 268853 (TRBV19, TRBJ1-1)
CASSIGSEAFF

SEQ ID NO: 537707 - protein, 12 aa, Homo sapiens
  CDR3 for alpha chain variable domain of TCR clone 268854 (TRAV12-3, TRAJ40)
CAVSPGTYKYIF

SEQ ID NO: 537708 - protein, 15 aa, Homo sapiens
  CDR3 for beta chain variable domain of TCR clone 268854 (TRBV7-9, TRBJ2-7)
CASSPGGGLTYEQYF

SEQ ID NO: 537709 - protein, 16 aa, Homo sapiens
  CDR3 for alpha chain variable domain of TCR clone 268855 (TRAV3, TRAJ37)
CAVRGKGSGNPGKLIF

SEQ ID NO: 537710 - protein, 15 aa, Homo sapiens
  CDR3 for beta chain variable domain of TCR clone 268855 (TRBV7-9, TRBJ1-6)
CASSSPGRGNSPLHF

SEQ ID NO: 537711 - protein, 14 aa, Homo sapiens
  CDR3 for alpha chain variable domain of TCR clone 268856 (TRAV23/DV6, TRAJ37)
CAASTSSNTGKLIF

SEQ ID NO: 537712 - protein, 13 aa, Homo sapiens
  CDR3 for beta chain variable domain of TCR clone 268856 (TRBV7-7, TRBJ1-1)
CASSLGSNTEAFF

SEQ ID NO: 537713 - protein, 14 aa, Homo sapiens
  CDR3 for alpha chain variable domain of TCR clone 268857 (TRAV13-1, TRAJ13)
CAASRVGGYQKVTF

SEQ ID NO: 537714 - protein, 15 aa, Homo sapiens
  CDR3 for beta chain variable domain of TCR clone 268857 (TRBV11-2, TRBJ2-2)
CASRGLAANTGELFF

SEQ ID NO: 537715 - protein, 14 aa, Homo sapiens
  CDR3 for alpha chain variable domain of TCR clone 268858 (TRAV13-2, TRAJ22)
CEDGTLGSARQLTF

SEQ ID NO: 537716 - protein, 16 aa, Homo sapiens
  CDR3 for beta chain variable domain of TCR clone 268858 (TRBV19, TRBJ2-1)
CASSSKGTRSYNEQFF

SEQ ID NO: 537717 - protein, 14 aa, Homo sapiens
  CDR3 for alpha chain variable domain of TCR clone 268859 (TRAV2, TRAJ9)
CAVEDRSGGVKTIF

SEQ ID NO: 537718 - protein, 14 aa, Homo sapiens
  CDR3 for beta chain variable domain of TCR clone 268859 (TRBV7-2, TRBJ2-7)
CASRSQGAAYEQYF

SEQ ID NO: 537719 - protein, 16 aa, Homo sapiens
  CDR3 for alpha chain variable domain of TCR clone 268860 (TRAV17, TRAJ53)
CATDALSGGSNYKLTF

SEQ ID NO: 537720 - protein, 12 aa, Homo sapiens
  CDR3 for beta chain variable domain of TCR clone 268860 (TRBV5-1, TRBJ2-7)
CVSSFRGYEQYF

SEQ ID NO: 537721 - protein, 14 aa, Homo sapiens
  CDR3 for alpha chain variable domain of TCR clone 268861 (TRAV2, TRAJ9)
CAVEDRSGGFKTIF

SEQ ID NO: 537722 - protein, 12 aa, Homo sapiens
  CDR3 for beta chain variable domain of TCR clone 268861 (TRBV20-1, TRBJ2-5)
CSATRNQETQYF

SEQ ID NO: 537723 - protein, 18 aa, Homo sapiens
  CDR3 for alpha chain variable domain of TCR clone 268862 (TRAV4, TRAJ10)
CLVGDIPLLTGGGNKLTF

SEQ ID NO: 537724 - protein, 20 aa, Homo sapiens
  CDR3 for beta chain variable domain of TCR clone 268862 (TRBV19, TRBJ2-1)
CASSISRTVTSTRLNNEQFF

SEQ ID NO: 537725 - protein, 12 aa, Homo sapiens
  CDR3 for alpha chain variable domain of TCR clone 268863 (TRAV12-2, TRAJ21)
CAVRYNFNKFYF

SEQ ID NO: 537726 - protein, 14 aa, Homo sapiens
  CDR3 for beta chain variable domain of TCR clone 268863 (TRBV28, TRBJ2-1)
CASSYYTAYNGQFF

SEQ ID NO: 537727 - protein, 18 aa, Homo sapiens
  CDR3 for alpha chain variable domain of TCR clone 268864 (TRAV8-3, TRAJ34)
LITSVLWASGYNTDKLIF

SEQ ID NO: 537728 - protein, 13 aa, Homo sapiens
  CDR3 for beta chain variable domain of TCR clone 268864 (TRBV6-4, TRBJ2-3)
CASSVSWADTQYF

SEQ ID NO: 537729 - protein, 12 aa, Homo sapiens
  CDR3 for alpha chain variable domain of TCR clone 268865 (TRAV12-3, TRAJ17)
CAMTLTGNKLTL

SEQ ID NO: 537730 - protein, 15 aa, Homo sapiens
  CDR3 for beta chain variable domain of TCR clone 268865 (TRBV20-1, TRBJ2-7)
CSARDRVSGMDEQYL

SEQ ID NO: 537731 - protein, 12 aa, Homo sapiens
  CDR3 for alpha chain variable domain of TCR clone 268866 (TRAV13-1, TRAJ21)
CAAKEGFNRFYF

SEQ ID NO: 537732 - protein, 14 aa, Homo sapiens
  CDR3 for beta chain variable domain of TCR clone 268866 (TRBV19, TRBJ2-7)
CASTVQGRPYEQYF

SEQ ID NO: 537733 - protein, 12 aa, Homo sapiens
  CDR3 for alpha chain variable domain of TCR clone 268867 (TRAV13-2, TRAJ58)
CAERRLDSRLTF

SEQ ID NO: 537734 - protein, 15 aa, Homo sapiens
  CDR3 for beta chain variable domain of TCR clone 268867 (TRBV5-1, TRBJ2-5)
CVSSSGREMVETQYF

SEQ ID NO: 537735 - protein, 16 aa, Homo sapiens
  CDR3 for alpha chain variable domain of TCR clone 268868 (TRAV30, TRAJ24)
CGTEIVDADGWGKFQF

SEQ ID NO: 537736 - protein, 14 aa, Homo sapiens
  CDR3 for beta chain variable domain of TCR clone 268868 (TRBV19, TRBJ2-7)
CASNFRDTFTGMYF

SEQ ID NO: 537737 - protein, 14 aa, Homo sapiens
  CDR3 for alpha chain variable domain of TCR clone 268869 (TRAV38-1, TRAJ45)
CASHSGGGAVGLTF

SEQ ID NO: 537738 - protein, 15 aa, Homo sapiens
  CDR3 for beta chain variable domain of TCR clone 268869 (TRBV10-2, TRBJ2-6)
CASSEQGTGANVLTF

SEQ ID NO: 537739 - protein, 13 aa, Homo sapiens
  CDR3 for alpha chain variable domain of TCR clone 268870 (TRAV8-3, TRAJ36)
WAVGATGANNLFF

SEQ ID NO: 537740 - protein, 16 aa, Homo sapiens
  CDR3 for beta chain variable domain of TCR clone 268870 (TRBV20-1, TRBJ1-4)
CSAPGQGLLTNEKLFF

SEQ ID NO: 537741 - protein, 17 aa, Homo sapiens
  CDR3 for alpha chain variable domain of TCR clone 268871 (TRAV3, TRAJ12)
CAVRDAGRMDSSYKLIF

SEQ ID NO: 537742 - protein, 15 aa, Homo sapiens
  CDR3 for beta chain variable domain of TCR clone 268871 (TRBV5-1, TRBJ2-3)
CASSVTSGSTDTQYF

SEQ ID NO: 537743 - protein, 11 aa, Homo sapiens
  CDR3 for alpha chain variable domain of TCR clone 268872 (TRAV12-1, TRAJ26)
CVVAYGQNFVF

SEQ ID NO: 537744 - protein, 14 aa, Homo sapiens
  CDR3 for beta chain variable domain of TCR clone 268872 (TRBV6-1, TRBJ1-3)
CASVQGGGGNTIYV

SEQ ID NO: 537745 - protein, 15 aa, Homo sapiens
  CDR3 for alpha chain variable domain of TCR clone 268873 (TRAV12-1, TRAJ44)
CVVDTPKGTASRLTF

SEQ ID NO: 537746 - protein, 13 aa, Homo sapiens
  CDR3 for beta chain variable domain of TCR clone 268873 (TRBV27, TRBJ2-1)
CASSSGSYNEQFF

SEQ ID NO: 537747 - protein, 11 aa, Homo sapiens
  CDR3 for alpha chain variable domain of TCR clone 268874 (TRAV35, TRAJ34)
CWARNTDKLIF

SEQ ID NO: 537748 - protein, 14 aa, Homo sapiens
  CDR3 for beta chain variable domain of TCR clone 268874 (TRBV5-1, TRBJ2-7)
CASSRGESVYEQYF

SEQ ID NO: 537749 - protein, 13 aa, Homo sapiens
  CDR3 for alpha chain variable domain of TCR clone 268875 (TRAV1-1, TRAJ9)
CAAKNTGGFKPIF

SEQ ID NO: 537750 - protein, 14 aa, Homo sapiens
  CDR3 for beta chain variable domain of TCR clone 268875 (TRBV20-1, TRBJ2-1)
CSAQIGGSDNEQFF

SEQ ID NO: 537751 - protein, 11 aa, Homo sapiens
  CDR3 for alpha chain variable domain of TCR clone 268876 (TRAV17, TRAJ9)
CEFTGGFKTIF

SEQ ID NO: 537752 - protein, 18 aa, Homo sapiens
  CDR3 for beta chain variable domain of TCR clone 268876 (TRBV12-4, TRBJ2-2)
CASSLVAGTRGRTGELFF

SEQ ID NO: 537753 - protein, 11 aa, Homo sapiens
  CDR3 for alpha chain variable domain of TCR clone 268877 (TRAV23/DV6, TRAJ48)
CAPRWGEKLTF

SEQ ID NO: 537754 - protein, 13 aa, Homo sapiens
  CDR3 for beta chain variable domain of TCR clone 268877 (TRBV12-4, TRBJ2-5)
CANSPGTEETQYF

SEQ ID NO: 537755 - protein, 16 aa, Homo sapiens
  CDR3 for alpha chain variable domain of TCR clone 268878 (TRAV30, TRAJ24)
CGTEIVDADSWGKVQF

SEQ ID NO: 537756 - protein, 17 aa, Homo sapiens
  CDR3 for beta chain variable domain of TCR clone 268878 (TRBV20-1, TRBJ2-1)
CSASSSGLAGSYNEQFF

SEQ ID NO: 537757 - protein, 15 aa, Homo sapiens
  CDR3 for alpha chain variable domain of TCR clone 268879 (TRAV3, TRAJ4)
CAVRDGTGGYNNLIF

SEQ ID NO: 537758 - protein, 13 aa, Homo sapiens
  CDR3 for beta chain variable domain of TCR clone 268879 (TRBV12-5, TRBJ1-2)
CASGVRTGNGYTF

SEQ ID NO: 537759 - protein, 14 aa, Homo sapiens
  CDR3 for alpha chain variable domain of TCR clone 268880 (TRAV12-3, TRAJ53)
CGATSGGSNYKLTF

SEQ ID NO: 537760 - protein, 13 aa, Homo sapiens
  CDR3 for beta chain variable domain of TCR clone 268880 (TRBV19, TRBJ1-5)
CARSTQDGQPQHF

SEQ ID NO: 537761 - protein, 16 aa, Homo sapiens
  CDR3 for alpha chain variable domain of TCR clone 268881 (TRAV26-2, TRAJ48)
CILRPPFNFGNEKLTF

SEQ ID NO: 537762 - protein, 14 aa, Homo sapiens
  CDR3 for beta chain variable domain of TCR clone 268881 (TRBV7-2, TRBJ2-7)
CASSPKTSFYEQYF

SEQ ID NO: 537763 - protein, 11 aa, Homo sapiens
  CDR3 for alpha chain variable domain of TCR clone 268882 (TRAV25, TRAJ5)
CRGGGRRALTF

SEQ ID NO: 537764 - protein, 14 aa, Homo sapiens
  CDR3 for beta chain variable domain of TCR clone 268882 (TRBV4-2, TRBJ2-1)
CASGLDRAYNEQFF

SEQ ID NO: 537765 - protein, 14 aa, Homo sapiens
  CDR3 for alpha chain variable domain of TCR clone 268883 (TRAV1-2, TRAJ16)
CAVNRFSDGQKLLF

SEQ ID NO: 537766 - protein, 12 aa, Homo sapiens
  CDR3 for beta chain variable domain of TCR clone 268883 (TRBV7-8, TRBJ2-7)
CASNLGDREQYF

SEQ ID NO: 537767 - protein, 16 aa, Homo sapiens
  CDR3 for alpha chain variable domain of TCR clone 268884 (TRAV20, TRAJ22)
CAVQASSSGSARQLTF

SEQ ID NO: 537768 - protein, 15 aa, Homo sapiens
  CDR3 for beta chain variable domain of TCR clone 268884 (TRBV28, TRBJ2-5)
CASSSGRTIQETQYF

SEQ ID NO: 537769 - protein, 15 aa, Homo sapiens
  CDR3 for alpha chain variable domain of TCR clone 268885 (TRAV25, TRAJ52)
CAGRPGGTSYGKLTF

SEQ ID NO: 537770 - protein, 15 aa, Homo sapiens
  CDR3 for beta chain variable domain of TCR clone 268885 (TRBV5-1, TRBJ2-7)
CASSLNGGPAREQYF

SEQ ID NO: 537771 - protein, 15 aa, Homo sapiens
  CDR3 for alpha chain variable domain of TCR clone 268886 (TRAV21, TRAJ53)
CATLNSGGSNYKLTF

SEQ ID NO: 537772 - protein, 14 aa, Homo sapiens
  CDR3 for beta chain variable domain of TCR clone 268886 (TRBV5-4, TRBJ2-5)
CASSFSGGQETQYL

SEQ ID NO: 537773 - protein, 14 aa, Homo sapiens
  CDR3 for alpha chain variable domain of TCR clone 268887 (TRAV8-6, TRAJ8)
CAVNENTGFQKLVF

SEQ ID NO: 537774 - protein, 13 aa, Homo sapiens
  CDR3 for beta chain variable domain of TCR clone 268887 (TRBV2, TRBJ1-5)
CASSQGGSQPQHF

SEQ ID NO: 537775 - protein, 17 aa, Homo sapiens
  CDR3 for alpha chain variable domain of TCR clone 268888 (TRAV3, TRAJ6)
CAVRDGPRAGGSYIPTF

SEQ ID NO: 537776 - protein, 12 aa, Homo sapiens
  CDR3 for beta chain variable domain of TCR clone 268888 (TRBV11-2, TRBJ2-2)
CASSLGGGELFC

SEQ ID NO: 537777 - protein, 14 aa, Homo sapiens
  CDR3 for alpha chain variable domain of TCR clone 268889 (TRAV21, TRAJ21)
CAVKGFGNFNKFYF

SEQ ID NO: 537778 - protein, 17 aa, Homo sapiens
  CDR3 for beta chain variable domain of TCR clone 268889 (TRBV7-9, TRBJ2-3)
CASSPTVAGDLTDTQYF

SEQ ID NO: 537779 - protein, 13 aa, Homo sapiens
  CDR3 for alpha chain variable domain of TCR clone 268890 (TRAV30, TRAJ24)
CGTVTDSWGKLQL

SEQ ID NO: 537780 - protein, 15 aa, Homo sapiens
  CDR3 for beta chain variable domain of TCR clone 268890 (TRBV25-1, TRBJ1-4)
CASSPGDSTNEELFF

SEQ ID NO: 537781 - protein, 14 aa, Homo sapiens
  CDR3 for alpha chain variable domain of TCR clone 268891 (TRAV8-3, TRAJ6)
CAVSSSGGSYIPTF

SEQ ID NO: 537782 - protein, 13 aa, Homo sapiens
  CDR3 for beta chain variable domain of TCR clone 268891 (TRBV12-4, TRBJ1-5)
CASSPDRAQPQHF

SEQ ID NO: 537783 - protein, 12 aa, Homo sapiens
  CDR3 for alpha chain variable domain of TCR clone 268892 (TRAV12-1, TRAJ31)
RVVNRNNARLMF

SEQ ID NO: 537784 - protein, 20 aa, Homo sapiens
  CDR3 for beta chain variable domain of TCR clone 268892 (TRBV7-8, TRBJ2-2)
CASSHLFPGPTIHITGELFF

SEQ ID NO: 537785 - protein, 13 aa, Homo sapiens
  CDR3 for alpha chain variable domain of TCR clone 268893 (TRAV30, TRAJ39)
CGTEKNAGNMLTF

SEQ ID NO: 537786 - protein, 12 aa, Homo sapiens
  CDR3 for beta chain variable domain of TCR clone 268893 (TRBV12-4, TRBJ2-5)
YASSSAQETQYF

SEQ ID NO: 537787 - protein, 16 aa, Homo sapiens
  CDR3 for alpha chain variable domain of TCR clone 268894 (TRAV8-2, TRAJ50)
CVVSDHMKISYDKVIF

SEQ ID NO: 537788 - protein, 15 aa, Homo sapiens
  CDR3 for beta chain variable domain of TCR clone 268894 (TRBV7-2, TRBJ2-5)
CASSVASGSGETQYF

SEQ ID NO: 537789 - protein, 12 aa, Homo sapiens
  CDR3 for alpha chain variable domain of TCR clone 268895 (TRAV12-2, TRAJ21)
CALRYNFNKFYF

SEQ ID NO: 537790 - protein, 14 aa, Homo sapiens
  CDR3 for beta chain variable domain of TCR clone 268895 (TRBV28, TRBJ2-1)
CAGSYYTAYNEQFF

SEQ ID NO: 537791 - protein, 14 aa, Homo sapiens
  CDR3 for alpha chain variable domain of TCR clone 268896 (TRAV26-1, TRAJ38)
CIADNAGNNRKLIW

SEQ ID NO: 537792 - protein, 15 aa, Homo sapiens
  CDR3 for beta chain variable domain of TCR clone 268896 (TRBV9, TRBJ1-6)
CPSSVAGTGDSPLHF

SEQ ID NO: 537793 - protein, 13 aa, Homo sapiens
  CDR3 for alpha chain variable domain of TCR clone 268897 (TRAV8-4, TRAJ54)
CAVRIQGAQKLVF

SEQ ID NO: 537794 - protein, 13 aa, Homo sapiens
  CDR3 for beta chain variable domain of TCR clone 268897 (TRBV7-3, TRBJ1-1)
CASSQDWGAEAFF

SEQ ID NO: 537795 - protein, 11 aa, Homo sapiens
  CDR3 for alpha chain variable domain of TCR clone 268898 (TRAV2, TRAJ23)
CAVETRGKLIF

SEQ ID NO: 537796 - protein, 16 aa, Homo sapiens
  CDR3 for beta chain variable domain of TCR clone 268898 (TRBV18, TRBJ2-5)
CASSPPSSGGAKTQYF

SEQ ID NO: 537797 - protein, 14 aa, Homo sapiens
  CDR3 for alpha chain variable domain of TCR clone 268899 (TRAV12-2, TRAJ6)
CASKWGGGSYIPTF

SEQ ID NO: 537798 - protein, 14 aa, Homo sapiens
  CDR3 for beta chain variable domain of TCR clone 268899 (TRBV15, TRBJ2-5)
CATSIGGRGETQYF

SEQ ID NO: 537799 - protein, 15 aa, Homo sapiens
  CDR3 for alpha chain variable domain of TCR clone 268900 (TRAV17, TRAJ56)
CATDANTGANSKLTF

SEQ ID NO: 537800 - protein, 12 aa, Homo sapiens
  CDR3 for beta chain variable domain of TCR clone 268900 (TRBV5-1, TRBJ1-1)
CASSLTGAEAFF

SEQ ID NO: 537801 - protein, 14 aa, Homo sapiens
  CDR3 for alpha chain variable domain of TCR clone 268901 (TRAV12-2, TRAJ24)
CAVTPADSWGKLQF

SEQ ID NO: 537802 - protein, 13 aa, Homo sapiens
  CDR3 for beta chain variable domain of TCR clone 268901 (TRBV4-2, TRBJ1-1)
CASSQAGNTEAFF

SEQ ID NO: 537803 - protein, 10 aa, Homo sapiens
  CDR3 for alpha chain variable domain of TCR clone 268902 (TRAV2, TRAJ15)
RGQAGTALIF

SEQ ID NO: 537804 - protein, 15 aa, Homo sapiens
  CDR3 for beta chain variable domain of TCR clone 268902 (TRBV3-1, TRBJ2-5)
CASSANLGGPETQYF

SEQ ID NO: 537805 - protein, 15 aa, Homo sapiens
  CDR3 for alpha chain variable domain of TCR clone 268903 (TRAV17, TRAJ56)
CATEPFTGANSKLTF

SEQ ID NO: 537806 - protein, 15 aa, Homo sapiens
  CDR3 for beta chain variable domain of TCR clone 268903 (TRBV28, TRBJ1-5)
CASSRTGGYVQHQNF

SEQ ID NO: 537807 - protein, 15 aa, Homo sapiens
  CDR3 for alpha chain variable domain of TCR clone 268904 (TRAV38-2/DV8, TRAJ47)
CAYRRGKGYGNKLVF

SEQ ID NO: 537808 - protein, 15 aa, Homo sapiens
  CDR3 for beta chain variable domain of TCR clone 268904 (TRBV6-6, TRBJ2-7)
CASSYSYGGSYEQYF

SEQ ID NO: 537809 - protein, 13 aa, Homo sapiens
  CDR3 for alpha chain variable domain of TCR clone 268905 (TRAV16, TRAJ34)
CALPGYNTDKLIF

SEQ ID NO: 537810 - protein, 13 aa, Homo sapiens
  CDR3 for beta chain variable domain of TCR clone 268905 (TRBV6-1, TRBJ2-1)
CASREDGGHEQFF

SEQ ID NO: 537811 - protein, 12 aa, Homo sapiens
  CDR3 for alpha chain variable domain of TCR clone 268906 (TRAV12-3, TRAJ17)
CAMTLTGNKLTF

SEQ ID NO: 537812 - protein, 14 aa, Homo sapiens
  CDR3 for beta chain variable domain of TCR clone 268906 (TRBV20-1, TRBJ1-1)
CSAQTRSGGTEAFF

SEQ ID NO: 537813 - protein, 13 aa, Homo sapiens
  CDR3 for alpha chain variable domain of TCR clone 268907 (TRAV12-1, TRAJ40)
CVVPTSGTYKYIF

SEQ ID NO: 537814 - protein, 18 aa, Homo sapiens
  CDR3 for beta chain variable domain of TCR clone 268907 (TRBV7-6, TRBJ2-1)
CASSPRASGMSSYNEQFF

SEQ ID NO: 537815 - protein, 14 aa, Homo sapiens
  CDR3 for alpha chain variable domain of TCR clone 268908 (TRAV38-2/DV8, TRAJ54)
AAMYQIQGAQKLVF

SEQ ID NO: 537816 - protein, 17 aa, Homo sapiens
  CDR3 for beta chain variable domain of TCR clone 268908 (TRBV6-1, TRBJ2-3)
CASSEALRLMSTDTQYF

SEQ ID NO: 537817 - protein, 17 aa, Homo sapiens
  CDR3 for alpha chain variable domain of TCR clone 268909 (TRAV17, TRAJ7)
CATLGRLAFGKGNQVGV

SEQ ID NO: 537818 - protein, 16 aa, Homo sapiens
  CDR3 for beta chain variable domain of TCR clone 268909 (TRBV12-5, TRBJ2-5)
CASGPRTSGNQETQYY

SEQ ID NO: 537819 - protein, 17 aa, Homo sapiens
  CDR3 for alpha chain variable domain of TCR clone 268910 (TRAV3, TRAJ42)
CAVRDRDYGGSQGNLIF

SEQ ID NO: 537820 - protein, 16 aa, Homo sapiens
  CDR3 for beta chain variable domain of TCR clone 268910 (TRBV7-2, TRBJ2-5)
CASSYKTGISLETQYF

SEQ ID NO: 537821 - protein, 12 aa, Homo sapiens
  CDR3 for alpha chain variable domain of TCR clone 268911 (TRAV17, TRAJ47)
CAPTVRGNKLVF

SEQ ID NO: 537822 - protein, 14 aa, Homo sapiens
  CDR3 for beta chain variable domain of TCR clone 268911 (TRBV28, TRBJ2-7)
CASRAAGLGYEQYF

SEQ ID NO: 537823 - protein, 15 aa, Homo sapiens
  CDR3 for alpha chain variable domain of TCR clone 268912 (TRAV8-3, TRAJ45)
CASSYSGGGADGLTF

SEQ ID NO: 537824 - protein, 13 aa, Homo sapiens
  CDR3 for beta chain variable domain of TCR clone 268912 (TRBV7-2, TRBJ1-6)
CASSLVGSSPLHF

SEQ ID NO: 537825 - protein, 12 aa, Homo sapiens
  CDR3 for alpha chain variable domain of TCR clone 268913 (TRAV12-3, TRAJ17)
CAMTLTGNKLAF

SEQ ID NO: 537826 - protein, 15 aa, Homo sapiens
  CDR3 for beta chain variable domain of TCR clone 268913 (TRBV20-1, TRBJ2-7)
CSARDRVSGMDEQYF

SEQ ID NO: 537827 - protein, 11 aa, Homo sapiens
  CDR3 for alpha chain variable domain of TCR clone 268914 (TRAV12-1, TRAJ24)
CVVEGWGKFQF

SEQ ID NO: 537828 - protein, 15 aa, Homo sapiens
  CDR3 for beta chain variable domain of TCR clone 268914 (TRBV7-9, TRBJ1-6)
CASSSPGRGNSPLHF

SEQ ID NO: 537829 - protein, 16 aa, Homo sapiens
  CDR3 for alpha chain variable domain of TCR clone 268915 (TRAV30, TRAJ24)
CGTEIVDADSWGKFQF

SEQ ID NO: 537830 - protein, 14 aa, Homo sapiens
  CDR3 for beta chain variable domain of TCR clone 268915 (TRBV10-3, TRBJ2-5)
CATSRDRDRETQYF

SEQ ID NO: 537831 - protein, 14 aa, Homo sapiens
  CDR3 for alpha chain variable domain of TCR clone 268916 (TRAV3, TRAJ34)
CAVRAPGNTDKLIF

SEQ ID NO: 537832 - protein, 16 aa, Homo sapiens
  CDR3 for beta chain variable domain of TCR clone 268916 (TRBV19, TRBJ2-2)
CASRSPGTGATGELFF

SEQ ID NO: 537833 - protein, 12 aa, Homo sapiens
  CDR3 for alpha chain variable domain of TCR clone 268917 (TRAV23/DV6, TRAJ27)
CAASKSAGKSTF

SEQ ID NO: 537834 - protein, 14 aa, Homo sapiens
  CDR3 for beta chain variable domain of TCR clone 268917 (TRBV19, TRBJ2-1)
CASPTFVLSGEQFF

SEQ ID NO: 537835 - protein, 12 aa, Homo sapiens
  CDR3 for alpha chain variable domain of TCR clone 268918 (TRAV17, TRAJ57)
CAADGGSEKLVF

SEQ ID NO: 537836 - protein, 13 aa, Homo sapiens
  CDR3 for beta chain variable domain of TCR clone 268918 (TRBV7-9, TRBJ2-7)
CASSFAGAYEQYF

SEQ ID NO: 537837 - protein, 15 aa, Homo sapiens
  CDR3 for alpha chain variable domain of TCR clone 268919 (TRAV40, TRAJ39)
CLLPPRGNAGNMLTF

SEQ ID NO: 537838 - protein, 12 aa, Homo sapiens
  CDR3 for beta chain variable domain of TCR clone 268919 (TRBV12-4, TRBJ1-3)
CASSFSGNTIYF

SEQ ID NO: 537839 - protein, 13 aa, Homo sapiens
  CDR3 for alpha chain variable domain of TCR clone 268920 (TRAV14/DV4, TRAJ26)
CAMREAYGQNFVF

SEQ ID NO: 537840 - protein, 14 aa, Homo sapiens
  CDR3 for beta chain variable domain of TCR clone 268920 (TRBV4-2, TRBJ2-1)
CASGLDRAYNEQFF

SEQ ID NO: 537841 - protein, 19 aa, Homo sapiens
  CDR3 for alpha chain variable domain of TCR clone 268921 (TRAV8-4, TRAJ16)
CAVSPVGRWPEAALRKVDH

SEQ ID NO: 537842 - protein, 15 aa, Homo sapiens
  CDR3 for beta chain variable domain of TCR clone 268921 (TRBV11-3, TRBJ2-7)
CASSPGPASSYEQYF

SEQ ID NO: 537843 - protein, 12 aa, Homo sapiens
  CDR3 for alpha chain variable domain of TCR clone 268922 (TRAV8-3, TRAJ20)
CAVGANDYKLSF

SEQ ID NO: 537844 - protein, 13 aa, Homo sapiens
  CDR3 for beta chain variable domain of TCR clone 268922 (TRBV19, TRBJ1-3)
CASRLSLGNTIYF

SEQ ID NO: 537845 - protein, 15 aa, Homo sapiens
  CDR3 for alpha chain variable domain of TCR clone 268923 (TRAV17, TRAJ56)
CATDANTGANSKLTF

SEQ ID NO: 537846 - protein, 15 aa, Homo sapiens
  CDR3 for beta chain variable domain of TCR clone 268923 (TRBV11-3, TRBJ2-3)
CASLKDGREGDTQYF

SEQ ID NO: 537847 - protein, 16 aa, Homo sapiens
  CDR3 for alpha chain variable domain of TCR clone 268924 (TRAV35, TRAJ28)
CAGQKYSGAGSYQLTF

SEQ ID NO: 537848 - protein, 12 aa, Homo sapiens
  CDR3 for beta chain variable domain of TCR clone 268924 (TRBV2, TRBJ1-2)
CASSGQTYGYTF

SEQ ID NO: 537849 - protein, 17 aa, Homo sapiens
  CDR3 for alpha chain variable domain of TCR clone 268925 (TRAV8-4, TRAJ45)
CAVSECGSGGGADGLTF

SEQ ID NO: 537850 - protein, 13 aa, Homo sapiens
  CDR3 for beta chain variable domain of TCR clone 268925 (TRBV7-3, TRBJ2-2)
CASSSGGYTGELF

SEQ ID NO: 537851 - protein, 11 aa, Homo sapiens
  CDR3 for alpha chain variable domain of TCR clone 268926 (TRAV13-2, TRAJ36)
CAETGANNLFF

SEQ ID NO: 537852 - protein, 13 aa, Homo sapiens
  CDR3 for beta chain variable domain of TCR clone 268926 (TRBV7-9, TRBJ2-4)
CAPEGLAGNIQYF

SEQ ID NO: 537853 - protein, 12 aa, Homo sapiens
  CDR3 for alpha chain variable domain of TCR clone 268927 (TRAV23/DV6, TRAJ30)
CAASKGDDKVIF

SEQ ID NO: 537854 - protein, 17 aa, Homo sapiens
  CDR3 for beta chain variable domain of TCR clone 268927 (TRBV13, TRBJ2-3)
CASSLSRVAGGRNTQYF

SEQ ID NO: 537855 - protein, 14 aa, Homo sapiens
  CDR3 for alpha chain variable domain of TCR clone 268928 (TRAV3, TRAJ21)
CALGRGSTNFTLDL

SEQ ID NO: 537856 - protein, 14 aa, Homo sapiens
  CDR3 for beta chain variable domain of TCR clone 268928 (TRBV7-6, TRBJ2-4)
CASSLAMGGNIQYF

SEQ ID NO: 537857 - protein, 16 aa, Homo sapiens
  CDR3 for alpha chain variable domain of TCR clone 268929 (TRAV3, TRAJ10)
CAVRDMRAGGGNKLTF

SEQ ID NO: 537858 - protein, 16 aa, Homo sapiens
  CDR3 for beta chain variable domain of TCR clone 268929 (TRBV6-1, TRBJ1-3)
CASVQGGVETPYILER

SEQ ID NO: 537859 - protein, 13 aa, Homo sapiens
  CDR3 for alpha chain variable domain of TCR clone 268930 (TRAV29/DV5, TRAJ47)
CAASAEYGNKLVF

SEQ ID NO: 537860 - protein, 15 aa, Homo sapiens
  CDR3 for beta chain variable domain of TCR clone 268930 (TRBV7-3, TRBJ2-1)
CASSPTGGGEVEQFV

SEQ ID NO: 537861 - protein, 15 aa, Homo sapiens
  CDR3 for alpha chain variable domain of TCR clone 268931 (TRAV12-1, TRAJ44)
CVVFVNNGTASKLNF

SEQ ID NO: 537862 - protein, 16 aa, Homo sapiens
  CDR3 for beta chain variable domain of TCR clone 268931 (TRBV20-1, TRBJ2-5)
CSPGGTSGGYMETQYF

SEQ ID NO: 537863 - protein, 15 aa, Homo sapiens
  CDR3 for alpha chain variable domain of TCR clone 268932 (TRAV26-1, TRAJ37)
CIVKTGSSNAGKLIF

SEQ ID NO: 537864 - protein, 12 aa, Homo sapiens
  CDR3 for beta chain variable domain of TCR clone 268932 (TRBV7-8, TRBJ2-7)
CASSLGDREQYF

SEQ ID NO: 537865 - protein, 12 aa, Homo sapiens
  CDR3 for alpha chain variable domain of TCR clone 268933 (TRAV21, TRAJ31)
CAVWGNSARLRF

SEQ ID NO: 537866 - protein, 16 aa, Homo sapiens
  CDR3 for beta chain variable domain of TCR clone 268933 (TRBV27, TRBJ2-5)
CASSYGPGGQKETQYF

SEQ ID NO: 537867 - protein, 18 aa, Homo sapiens
  CDR3 for alpha chain variable domain of TCR clone 268934 (TRAV21, TRAJ52)
CAVRPSPAGGTSYGKLTF

SEQ ID NO: 537868 - protein, 16 aa, Homo sapiens
  CDR3 for beta chain variable domain of TCR clone 268934 (TRBV28, TRBJ2-1)
CASRRSGRVVGNEQFF

SEQ ID NO: 537869 - protein, 16 aa, Homo sapiens
  CDR3 for alpha chain variable domain of TCR clone 268935 (TRAV21, TRAJ37)
CAVRPRGSSNTGKLIV

SEQ ID NO: 537870 - protein, 16 aa, Homo sapiens
  CDR3 for beta chain variable domain of TCR clone 268935 (TRBV2, TRBJ2-1)
CASSVGGSLSYNEQFF

SEQ ID NO: 537871 - protein, 14 aa, Homo sapiens
  CDR3 for alpha chain variable domain of TCR clone 268936 (TRAV17, TRAJ16)
CATADFADGQKLLF

SEQ ID NO: 537872 - protein, 12 aa, Homo sapiens
  CDR3 for beta chain variable domain of TCR clone 268936 (TRBV24-1, TRBJ1-1)
CATLYPDTEAFF

SEQ ID NO: 537873 - protein, 15 aa, Homo sapiens
  CDR3 for alpha chain variable domain of TCR clone 268937 (TRAV21, TRAJ40)
CAVRPQTSGTYKYIL

SEQ ID NO: 537874 - protein, 14 aa, Homo sapiens
  CDR3 for beta chain variable domain of TCR clone 268937 (TRBV7-2, TRBJ2-7)
CASSPKTSFYEQYF

SEQ ID NO: 537875 - protein, 14 aa, Homo sapiens
  CDR3 for alpha chain variable domain of TCR clone 268938 (TRAV17, TRAJ17)
CATDARAAGNKLTF

SEQ ID NO: 537876 - protein, 16 aa, Homo sapiens
  CDR3 for beta chain variable domain of TCR clone 268938 (TRBV7-9, TRBJ2-3)
CASSFSVAGGTDTQYF

SEQ ID NO: 537877 - protein, 11 aa, Homo sapiens
  CDR3 for alpha chain variable domain of TCR clone 268939 (TRAV2, TRAJ33)
CAVDSNYQLIW

SEQ ID NO: 537878 - protein, 15 aa, Homo sapiens
  CDR3 for beta chain variable domain of TCR clone 268939 (TRBV27, TRBJ1-6)
CASSFDRGLGSPLHF

SEQ ID NO: 537879 - protein, 13 aa, Homo sapiens
  CDR3 for alpha chain variable domain of TCR clone 268940 (TRAV12-3, TRAJ7)
CAMTPYGNNRLAF

SEQ ID NO: 537880 - protein, 16 aa, Homo sapiens
  CDR3 for beta chain variable domain of TCR clone 268940 (TRBV20-1, IGHJ2)
CSARTYGGELNEKLFF

SEQ ID NO: 537881 - protein, 15 aa, Homo sapiens
  CDR3 for alpha chain variable domain of TCR clone 268941 (TRAV21, TRAJ40)
CAVRPQTSGTYKYIF

SEQ ID NO: 537882 - protein, 15 aa, Homo sapiens
  CDR3 for beta chain variable domain of TCR clone 268941 (TRBV5-1, TRBJ2-1)
CASGPPRAPYNEQFF

SEQ ID NO: 537883 - protein, 13 aa, Homo sapiens
  CDR3 for alpha chain variable domain of TCR clone 268942 (TRAV20, TRAJ11)
CAVQARGYSTLTF

SEQ ID NO: 537884 - protein, 13 aa, Homo sapiens
  CDR3 for beta chain variable domain of TCR clone 268942 (TRBV15, TRBJ1-6)
CATSGGLNSPLHF

SEQ ID NO: 537885 - protein, 16 aa, Homo sapiens
  CDR3 for alpha chain variable domain of TCR clone 268943 (TRAV12-3, TRAJ53)
CAMSPWSGGSNYKLTF

SEQ ID NO: 537886 - protein, 14 aa, Homo sapiens
  CDR3 for beta chain variable domain of TCR clone 268943 (TRBV4-2, TRBJ2-1)
CASGLDRAYNEQFF

SEQ ID NO: 537887 - protein, 15 aa, Homo sapiens
  CDR3 for alpha chain variable domain of TCR clone 268944 (TRAV21, TRAJ32)
CAVNSYGGATNKLIF

SEQ ID NO: 537888 - protein, 13 aa, Homo sapiens
  CDR3 for beta chain variable domain of TCR clone 268944 (TRBV12-4, TRBJ1-1)
CASSPGTGFEAFF

SEQ ID NO: 537889 - protein, 18 aa, Homo sapiens
  CDR3 for alpha chain variable domain of TCR clone 268945 (TRAV16, TRAJ10)
CAPAREGKQTHLWDRHSA

SEQ ID NO: 537890 - protein, 19 aa, Homo sapiens
  CDR3 for beta chain variable domain of TCR clone 268945 (TRBV25-1, TRBJ2-2)
CAILVYRVDRGRKTGELFF

SEQ ID NO: 537891 - protein, 14 aa, Homo sapiens
  CDR3 for alpha chain variable domain of TCR clone 268946 (TRAV12-3, TRAJ29)
CAMSPYSGNTPIVF

SEQ ID NO: 537892 - protein, 12 aa, Homo sapiens
  CDR3 for beta chain variable domain of TCR clone 268946 (TRBV9, TRBJ2-1)
CASSVGGTDIFF

SEQ ID NO: 537893 - protein, 16 aa, Homo sapiens
  CDR3 for alpha chain variable domain of TCR clone 268947 (TRAV30, TRAJ24)
CGTEIVDADSWGKFEF

SEQ ID NO: 537894 - protein, 15 aa, Homo sapiens
  CDR3 for beta chain variable domain of TCR clone 268947 (TRBV7-9, TRBJ1-4)
CASSARTGGNEHLFF

SEQ ID NO: 537895 - protein, 13 aa, Homo sapiens
  CDR3 for alpha chain variable domain of TCR clone 268948 (TRAV17, TRAJ22)
CAHHSGSARQLTF

SEQ ID NO: 537896 - protein, 14 aa, Homo sapiens
  CDR3 for beta chain variable domain of TCR clone 268948 (TRBV7-8, TRBJ2-3)
CASSLEAGTDTQYF

SEQ ID NO: 537897 - protein, 14 aa, Homo sapiens
  CDR3 for alpha chain variable domain of TCR clone 268949 (TRAV17, TRAJ35)
CATDRPGFRNVLHW

SEQ ID NO: 537898 - protein, 15 aa, Homo sapiens
  CDR3 for beta chain variable domain of TCR clone 268949 (TRBV28, TRBJ2-5)
CASSSGRVIQETQYF

SEQ ID NO: 537899 - protein, 13 aa, Homo sapiens
  CDR3 for alpha chain variable domain of TCR clone 268950 (TRAV27, TRAJ3)
ASLRGSSASKIIF

SEQ ID NO: 537900 - protein, 15 aa, Homo sapiens
  CDR3 for beta chain variable domain of TCR clone 268950 (TRBV7-9, TRBJ1-6)
CASSSPGRGNSPLHF

SEQ ID NO: 537901 - protein, 13 aa, Homo sapiens
  CDR3 for alpha chain variable domain of TCR clone 268951 (TRAV2, TRAJ10)
CAVETGGGDKLTF

SEQ ID NO: 537902 - protein, 14 aa, Homo sapiens
  CDR3 for beta chain variable domain of TCR clone 268951 (TRBV20-1, TRBJ2-3)
CSAGGRRGTDTQYF

SEQ ID NO: 537903 - protein, 21 aa, Homo sapiens
  CDR3 for alpha chain variable domain of TCR clone 268952 (TRAV8-3, TRAJ38)
CAVGASNAGNNHIQNPDPAVF

SEQ ID NO: 537904 - protein, 13 aa, Homo sapiens
  CDR3 for beta chain variable domain of TCR clone 268952 (TRBV7-3, TRBJ1-1)
CASSQDWGAEAFF

SEQ ID NO: 537905 - protein, 13 aa, Homo sapiens
  CDR3 for alpha chain variable domain of TCR clone 268953 (TRAV36/DV7, TRAJ37)
CAVFSSNTGKLIF

SEQ ID NO: 537906 - protein, 18 aa, Homo sapiens
  CDR3 for beta chain variable domain of TCR clone 268953 (TRBV20-1, TRBJ2-6)
CSAETTPTHGSGANVLTF

SEQ ID NO: 537907 - protein, 14 aa, Homo sapiens
  CDR3 for alpha chain variable domain of TCR clone 268954 (TRAV23/DV6, TRAJ39)
CAASIGNAGNMLTF

SEQ ID NO: 537908 - protein, 12 aa, Homo sapiens
  CDR3 for beta chain variable domain of TCR clone 268954 (TRBV20-1, TRBJ2-5)
GSVGTGSETQYF

SEQ ID NO: 537909 - protein, 13 aa, Homo sapiens
  CDR3 for alpha chain variable domain of TCR clone 268955 (TRAV23/DV6, TRAJ22)
CASRAGSGRQLTF

SEQ ID NO: 537910 - protein, 14 aa, Homo sapiens
  CDR3 for beta chain variable domain of TCR clone 268955 (TRBV7-2, TRBJ2-7)
CASSPKTSFYEQYF

SEQ ID NO: 537911 - protein, 14 aa, Homo sapiens
  CDR3 for alpha chain variable domain of TCR clone 268956 (TRAV1-2, TRAJ8)
CSAREDTGFQKLVF

SEQ ID NO: 537912 - protein, 15 aa, Homo sapiens
  CDR3 for beta chain variable domain of TCR clone 268956 (TRBV6-3, TRBJ2-7)
CASSSPGTVFYEQYF

SEQ ID NO: 537913 - protein, 13 aa, Homo sapiens
  CDR3 for alpha chain variable domain of TCR clone 268957 (TRAV8-4, TRAJ43)
CAVTPINNNDMRF

SEQ ID NO: 537914 - protein, 13 aa, Homo sapiens
  CDR3 for beta chain variable domain of TCR clone 268957 (TRBV2, TRBJ1-2)
CASTLGTGDGYTF

SEQ ID NO: 537915 - protein, 14 aa, Homo sapiens
  CDR3 for alpha chain variable domain of TCR clone 268958 (TRAV1-2, TRAJ8)
CAVREDTGFQKLVF

SEQ ID NO: 537916 - protein, 17 aa, Homo sapiens
  CDR3 for beta chain variable domain of TCR clone 268958 (TRBV28, TRBJ2-5)
CASSRQGGLARAETQYF

SEQ ID NO: 537917 - protein, 17 aa, Homo sapiens
  CDR3 for alpha chain variable domain of TCR clone 268959 (TRAV3, TRAJ42)
CAVSDRDYGGSQGNLIF

SEQ ID NO: 537918 - protein, 14 aa, Homo sapiens
  CDR3 for beta chain variable domain of TCR clone 268959 (TRBV7-2, TRBJ2-5)
CASSPRGSSETQYF

SEQ ID NO: 537919 - protein, 12 aa, Homo sapiens
  CDR3 for alpha chain variable domain of TCR clone 268960 (TRAV16, TRAJ10)
CSRTGGGNKLTF

SEQ ID NO: 537920 - protein, 19 aa, Homo sapiens
  CDR3 for beta chain variable domain of TCR clone 268960 (TRBV25-1, TRBJ2-2)
CAILVYRVDRGRKTEELFF

SEQ ID NO: 537921 - protein, 13 aa, Homo sapiens
  CDR3 for alpha chain variable domain of TCR clone 268961 (TRAV1-2, TRAJ24)
CAVRADSWGKFQF

SEQ ID NO: 537922 - protein, 13 aa, Homo sapiens
  CDR3 for beta chain variable domain of TCR clone 268961 (TRBV20-1, TRBJ2-1)
CSATGLAGDEQVF

SEQ ID NO: 537923 - protein, 13 aa, Homo sapiens
  CDR3 for alpha chain variable domain of TCR clone 268962 (TRAV2, TRAJ15)
CAVASQAGTALIF

SEQ ID NO: 537924 - protein, 16 aa, Homo sapiens
  CDR3 for beta chain variable domain of TCR clone 268962 (TRBV9, TRBJ1-2)
CASSVEDKVSPYGYTF

SEQ ID NO: 537925 - protein, 15 aa, Homo sapiens
  CDR3 for alpha chain variable domain of TCR clone 268963 (TRAV1-1, TRAJ5)
CAVRHMDTGRRSLTF

SEQ ID NO: 537926 - protein, 17 aa, Homo sapiens
  CDR3 for beta chain variable domain of TCR clone 268963 (TRBV28, TRBJ2-7)
CASSPGLAGGDSYEQYF

SEQ ID NO: 537927 - protein, 15 aa, Homo sapiens
  CDR3 for alpha chain variable domain of TCR clone 268964 (TRAV20, TRAJ58)
CAVLDLETSGSRLTF

SEQ ID NO: 537928 - protein, 12 aa, Homo sapiens
  CDR3 for beta chain variable domain of TCR clone 268964 (TRBV9, TRBJ2-2)
CASSARTRELFF

SEQ ID NO: 537929 - protein, 14 aa, Homo sapiens
  CDR3 for alpha chain variable domain of TCR clone 268965 (TRAV20, TRAJ56)
CAVQFGGANSKLTF

SEQ ID NO: 537930 - protein, 14 aa, Homo sapiens
  CDR3 for beta chain variable domain of TCR clone 268965 (TRBV25-1, TRBJ1-1)
CASTHLGGNTEAFF

SEQ ID NO: 537931 - protein, 14 aa, Homo sapiens
  CDR3 for alpha chain variable domain of TCR clone 268966 (TRAV12-1, TRAJ30)
CVPTGTNRDDKIIC

SEQ ID NO: 537932 - protein, 11 aa, Homo sapiens
  CDR3 for beta chain variable domain of TCR clone 268966 (TRBV4-1, TRBJ2-2)
CASEHTGELFF

SEQ ID NO: 537933 - protein, 14 aa, Homo sapiens
  CDR3 for alpha chain variable domain of TCR clone 268967 (TRAV38-1, TRAJ40)
CALRPTSGTYKYIF

SEQ ID NO: 537934 - protein, 13 aa, Homo sapiens
  CDR3 for beta chain variable domain of TCR clone 268967 (TRBV11-2, TRBJ2-5)
CVSSSTGEETQYF

SEQ ID NO: 537935 - protein, 16 aa, Homo sapiens
  CDR3 for alpha chain variable domain of TCR clone 268968 (TRAV20, TRAJ53)
CAVQGNSVGSNYKLTF

SEQ ID NO: 537936 - protein, 14 aa, Homo sapiens
  CDR3 for beta chain variable domain of TCR clone 268968 (TRBV6-5, TRBJ2-7)
CASSPHRGLREQYF

SEQ ID NO: 537937 - protein, 15 aa, Homo sapiens
  CDR3 for alpha chain variable domain of TCR clone 268969 (TRAV12-1, TRAJ36)
CVVNEHQTGANNLFC

SEQ ID NO: 537938 - protein, 12 aa, Homo sapiens
  CDR3 for beta chain variable domain of TCR clone 268969 (TRBV29-1, TRBJ2-3)
CSVTGGADTQYF

SEQ ID NO: 537939 - protein, 16 aa, Homo sapiens
  CDR3 for alpha chain variable domain of TCR clone 268970 (TRAV23/DV6, TRAJ9)
CAASIGGNTGGFKTIF

SEQ ID NO: 537940 - protein, 18 aa, Homo sapiens
  CDR3 for beta chain variable domain of TCR clone 268970 (TRBV7-9, TRBJ2-7)
CASSLTTSGSRTWYEQYL

SEQ ID NO: 537941 - protein, 16 aa, Homo sapiens
  CDR3 for alpha chain variable domain of TCR clone 268971 (TRAV13-1, TRAJ48)
CAASIFGNFGNEKLTF

SEQ ID NO: 537942 - protein, 15 aa, Homo sapiens
  CDR3 for beta chain variable domain of TCR clone 268971 (TRBV7-9, TRBJ1-6)
CASSSPGRGNSPLHF

SEQ ID NO: 537943 - protein, 12 aa, Homo sapiens
  CDR3 for alpha chain variable domain of TCR clone 268972 (TRAV17, TRAJ4)
CATDGGYNKLIF

SEQ ID NO: 537944 - protein, 15 aa, Homo sapiens
  CDR3 for beta chain variable domain of TCR clone 268972 (TRBV5-4, TRBJ2-3)
CASSLDQRATDTQYF

SEQ ID NO: 537945 - protein, 13 aa, Homo sapiens
  CDR3 for alpha chain variable domain of TCR clone 268973 (TRAV8-1, TRAJ30)
CAVIINRDDKIIF

SEQ ID NO: 537946 - protein, 14 aa, Homo sapiens
  CDR3 for beta chain variable domain of TCR clone 268973 (TRBV7-2, TRBJ1-6)
CASSLQGANSPLHF

SEQ ID NO: 537947 - protein, 15 aa, Homo sapiens
  CDR3 for alpha chain variable domain of TCR clone 268974 (TRAV26-1, TRAJ3)
CIVRSGYSSAFKIIF

SEQ ID NO: 537948 - protein, 14 aa, Homo sapiens
  CDR3 for beta chain variable domain of TCR clone 268974 (TRBV13, TRBJ2-5)
CASYRRLAEETQYF

SEQ ID NO: 537949 - protein, 13 aa, Homo sapiens
  CDR3 for alpha chain variable domain of TCR clone 268975 (TRAV26-1, TRAJ33)
CIVRVGSNYQLIW

SEQ ID NO: 537950 - protein, 15 aa, Homo sapiens
  CDR3 for beta chain variable domain of TCR clone 268975 (TRBV7-2, TRBJ1-5)
CASSFSAGINQTQHF

SEQ ID NO: 537951 - protein, 10 aa, Homo sapiens
  CDR3 for alpha chain variable domain of TCR clone 268976 (TRAV12-3, TRAJ18)
CAMSAEAQPW

SEQ ID NO: 537952 - protein, 14 aa, Homo sapiens
  CDR3 for beta chain variable domain of TCR clone 268976 (TRBV19, TRBJ2-7)
CASSTTRSSYEQYF

SEQ ID NO: 537953 - protein, 15 aa, Homo sapiens
  CDR3 for alpha chain variable domain of TCR clone 268977 (TRAV3, TRAJ22)
CAVRDRGGSARQLTF

SEQ ID NO: 537954 - protein, 20 aa, Homo sapiens
  CDR3 for beta chain variable domain of TCR clone 268977 (TRBV11-2, TRBJ1-6)
CASSLVVATGGSVHPSTLGT

SEQ ID NO: 537955 - protein, 13 aa, Homo sapiens
  CDR3 for alpha chain variable domain of TCR clone 268978 (TRAV9-2, TRAJ53)
CALSGGSNYKLTF

SEQ ID NO: 537956 - protein, 17 aa, Homo sapiens
  CDR3 for beta chain variable domain of TCR clone 268978 (TRBV11-2, TRBJ2-1)
CASSLYPPGVEYNDQFF

SEQ ID NO: 537957 - protein, 10 aa, Homo sapiens
  CDR3 for alpha chain variable domain of TCR clone 268979 (TRAV1-2, TRAJ18)
CAVRGEAQPW

SEQ ID NO: 537958 - protein, 13 aa, Homo sapiens
  CDR3 for beta chain variable domain of TCR clone 268979 (TRBV20-1, TRBJ1-1)
CSARVGGNTEAFY

SEQ ID NO: 537959 - protein, 14 aa, Homo sapiens
  CDR3 for alpha chain variable domain of TCR clone 268980 (TRAV26-1, TRAJ38)
CIADNAGNNRKLIW

SEQ ID NO: 537960 - protein, 16 aa, Homo sapiens
  CDR3 for beta chain variable domain of TCR clone 268980 (TRBV5-1, TRBJ2-7)
CASSWGTGGRAWEQYF

SEQ ID NO: 537961 - protein, 11 aa, Homo sapiens
  CDR3 for alpha chain variable domain of TCR clone 268981 (TRAV23/DV6, TRAJ21)
CAANNFNKFYF

SEQ ID NO: 537962 - protein, 18 aa, Homo sapiens
  CDR3 for beta chain variable domain of TCR clone 268981 (TRBV7-2, TRBJ2-3)
CASSLKREGSGITDTQYF

SEQ ID NO: 537963 - protein, 16 aa, Homo sapiens
  CDR3 for alpha chain variable domain of TCR clone 268982 (TRAV3, TRAJ6)
CAVRRTPSGGSYIPTF

SEQ ID NO: 537964 - protein, 14 aa, Homo sapiens
  CDR3 for beta chain variable domain of TCR clone 268982 (TRBV3-1, TRBJ1-5)
CASSTGDSNQHQHF

SEQ ID NO: 537965 - protein, 14 aa, Homo sapiens
  CDR3 for alpha chain variable domain of TCR clone 268983 (TRAV27, TRAJ22)
CAGLPSGSARQLTF

SEQ ID NO: 537966 - protein, 14 aa, Homo sapiens
  CDR3 for beta chain variable domain of TCR clone 268983 (TRBV18, TRBJ2-5)
CASSPGVSQETQYF

SEQ ID NO: 537967 - protein, 15 aa, Homo sapiens
  CDR3 for alpha chain variable domain of TCR clone 268984 (TRAV8-4, TRAJ3)
CAVSLGYSSASKIIF

SEQ ID NO: 537968 - protein, 13 aa, Homo sapiens
  CDR3 for beta chain variable domain of TCR clone 268984 (TRBV12-4, TRBJ1-1)
CASITGLNTEAFF

SEQ ID NO: 537969 - protein, 13 aa, Homo sapiens
  CDR3 for alpha chain variable domain of TCR clone 268985 (TRAV8-4, TRAJ49)
CAVRTLTGNQLYF

SEQ ID NO: 537970 - protein, 16 aa, Homo sapiens
  CDR3 for beta chain variable domain of TCR clone 268985 (TRBV5-7, TRBJ2-5)
CASTLAPAGGRETQYF

SEQ ID NO: 537971 - protein, 12 aa, Homo sapiens
  CDR3 for alpha chain variable domain of TCR clone 268986 (TRAV2, TRAJ31)
CAVEDNNARLMF

SEQ ID NO: 537972 - protein, 16 aa, Homo sapiens
  CDR3 for beta chain variable domain of TCR clone 268986 (TRBV10-3, TRBJ2-1)
CAISGVGDGGGVEQFF

SEQ ID NO: 537973 - protein, 14 aa, Homo sapiens
  CDR3 for alpha chain variable domain of TCR clone 268987 (TRAV2, TRAJ9)
CAVEDRGGGFKTIF

SEQ ID NO: 537974 - protein, 15 aa, Homo sapiens
  CDR3 for beta chain variable domain of TCR clone 268987 (TRBV5-7, TRBJ1-5)
CASSYGKLWDQPQHF

SEQ ID NO: 537975 - protein, 12 aa, Homo sapiens
  CDR3 for alpha chain variable domain of TCR clone 268988 (TRAV12-2, TRAJ10)
WGVTGGGNKLTF

SEQ ID NO: 537976 - protein, 17 aa, Homo sapiens
  CDR3 for beta chain variable domain of TCR clone 268988 (TRBV13, TRBJ2-3)
CASSLARVAGGRNTQYF

SEQ ID NO: 537977 - protein, 15 aa, Homo sapiens
  CDR3 for alpha chain variable domain of TCR clone 268989 (TRAV2, TRAJ9)
CAVAALNTGGFKTIF

SEQ ID NO: 537978 - protein, 16 aa, Homo sapiens
  CDR3 for beta chain variable domain of TCR clone 268989 (TRBV12-4, TRBJ1-5)
CASSRPVGGSNQPQHF

SEQ ID NO: 537979 - protein, 14 aa, Homo sapiens
  CDR3 for alpha chain variable domain of TCR clone 268990 (TRAV8-6, TRAJ12)
CAGKAADSSYKLIV

SEQ ID NO: 537980 - protein, 15 aa, Homo sapiens
  CDR3 for beta chain variable domain of TCR clone 268990 (TRBV5-1, TRBJ2-5)
CASSLGLAEQETQYF

SEQ ID NO: 537981 - protein, 16 aa, Homo sapiens
  CDR3 for alpha chain variable domain of TCR clone 268991 (TRAV3, TRAJ37)
CDVRAHGSGNTGKLIF

SEQ ID NO: 537982 - protein, 15 aa, Homo sapiens
  CDR3 for beta chain variable domain of TCR clone 268991 (TRBV19, TRBJ2-2)
CASSPRTGWTGELFF

SEQ ID NO: 537983 - protein, 16 aa, Homo sapiens
  CDR3 for alpha chain variable domain of TCR clone 268992 (TRAV4, TRAJ5)
CLVGPDHGHGQESTYF

SEQ ID NO: 537984 - protein, 13 aa, Homo sapiens
  CDR3 for beta chain variable domain of TCR clone 268992 (TRBV29-1, TRBJ2-1)
CSVEGGRVNEQFF

SEQ ID NO: 537985 - protein, 13 aa, Homo sapiens
  CDR3 for alpha chain variable domain of TCR clone 268993 (TRAV17, TRAJ34)
CAMDLYNTDKLIF

SEQ ID NO: 537986 - protein, 12 aa, Homo sapiens
  CDR3 for beta chain variable domain of TCR clone 268993 (TRBV11-2, TRBJ2-2)
CASSLGGGELFF

SEQ ID NO: 537987 - protein, 14 aa, Homo sapiens
  CDR3 for alpha chain variable domain of TCR clone 268994 (TRAV8-3, TRAJ27)
CAGGRNTNAGKSTF

SEQ ID NO: 537988 - protein, 15 aa, Homo sapiens
  CDR3 for beta chain variable domain of TCR clone 268994 (TRBV11-3, TRBJ2-5)
CASSLRARVQETQYF

SEQ ID NO: 537989 - protein, 16 aa, Homo sapiens
  CDR3 for alpha chain variable domain of TCR clone 268995 (TRAV30, TRAJ24)
CGTEIVDADSWGKFQF

SEQ ID NO: 537990 - protein, 14 aa, Homo sapiens
  CDR3 for beta chain variable domain of TCR clone 268995 (TRBV12-5, TRBJ2-5)
CASGSRTHHETPYF

SEQ ID NO: 537991 - protein, 17 aa, Homo sapiens
  CDR3 for alpha chain variable domain of TCR clone 268996 (TRAV26-2, TRAJ42)
CILRDVGYGGSQGNLIF

SEQ ID NO: 537992 - protein, 13 aa, Homo sapiens
  CDR3 for beta chain variable domain of TCR clone 268996 (TRBV28, TRBJ2-2)
CASIRESTGELFF

SEQ ID NO: 537993 - protein, 16 aa, Homo sapiens
  CDR3 for alpha chain variable domain of TCR clone 268997 (TRAV13-1, TRAJ48)
CSKYRESNFGNEKLTF

SEQ ID NO: 537994 - protein, 17 aa, Homo sapiens
  CDR3 for beta chain variable domain of TCR clone 268997 (TRBV28, TRBJ2-1)
CASSSARQALTYNEQCF

SEQ ID NO: 537995 - protein, 14 aa, Homo sapiens
  CDR3 for alpha chain variable domain of TCR clone 268998 (TRAV23/DV6, TRAJ22)
CAASVSGSARQLTF

SEQ ID NO: 537996 - protein, 16 aa, Homo sapiens
  CDR3 for beta chain variable domain of TCR clone 268998 (TRBV19, TRBJ2-2)
CACSFPGQGLVGELFF

SEQ ID NO: 537997 - protein, 12 aa, Homo sapiens
  CDR3 for alpha chain variable domain of TCR clone 268999 (TRAV1-2, TRAJ24)
CAVGGRWGKFQF

SEQ ID NO: 537998 - protein, 15 aa, Homo sapiens
  CDR3 for beta chain variable domain of TCR clone 268999 (TRBV6-1, TRBJ2-7)
CASSEGVGNPYEQYF

SEQ ID NO: 537999 - protein, 12 aa, Homo sapiens
  CDR3 for alpha chain variable domain of TCR clone 269000 (TRAV10, TRAJ43)
CVLVRVGNDMRF

SEQ ID NO: 538000 - protein, 15 aa, Homo sapiens
  CDR3 for beta chain variable domain of TCR clone 269000 (TRBV2, TRBJ2-7)
CASSEGLARSYEQYF

SEQ ID NO: 538001 - protein, 13 aa, Homo sapiens
  CDR3 for alpha chain variable domain of TCR clone 269001 (TRAV21, TRAJ57)
CAVTQGGSEKLVF

SEQ ID NO: 538002 - protein, 16 aa, Homo sapiens
  CDR3 for beta chain variable domain of TCR clone 269001 (TRBV6-5, TRBJ2-7)
CASSYFRVGISDEQYF

SEQ ID NO: 538003 - protein, 14 aa, Homo sapiens
  CDR3 for alpha chain variable domain of TCR clone 269002 (TRAV1-2, TRAJ8)
CAVREDTGFQKLVF

SEQ ID NO: 538004 - protein, 15 aa, Homo sapiens
  CDR3 for beta chain variable domain of TCR clone 269002 (TRBV4-1, TRBJ2-7)
CASSHNTGRLYEQYF

SEQ ID NO: 538005 - protein, 14 aa, Homo sapiens
  CDR3 for alpha chain variable domain of TCR clone 269003 (TRAV26-1, TRAJ44)
CIVRPTGTASKLTF

SEQ ID NO: 538006 - protein, 16 aa, Homo sapiens
  CDR3 for beta chain variable domain of TCR clone 269003 (TRBV11-2, TRBJ2-1)
CASARGSYSHHNEQFC

SEQ ID NO: 538007 - protein, 10 aa, Homo sapiens
  CDR3 for alpha chain variable domain of TCR clone 269004 (TRAV30, TRAJ20)
CGTDDYKLSF

SEQ ID NO: 538008 - protein, 20 aa, Homo sapiens
  CDR3 for beta chain variable domain of TCR clone 269004 (TRBV28, TRBJ2-1)
CASTPIGRSPGLAGGNEQFF

SEQ ID NO: 538009 - protein, 15 aa, Homo sapiens
  CDR3 for alpha chain variable domain of TCR clone 269005 (TRAV21, TRAJ45)
CAVSYSGGGADGLTF

SEQ ID NO: 538010 - protein, 13 aa, Homo sapiens
  CDR3 for beta chain variable domain of TCR clone 269005 (TRBV20-1, TRBJ2-5)
CSAATELQETQYC

SEQ ID NO: 538011 - protein, 10 aa, Homo sapiens
  CDR3 for alpha chain variable domain of TCR clone 269006 (TRAV8-3, TRAJ4)
AAGGYNKLIF

SEQ ID NO: 538012 - protein, 15 aa, Homo sapiens
  CDR3 for beta chain variable domain of TCR clone 269006 (TRBV6-5, TRBJ2-1)
CASSYDAGAGNEQFF

SEQ ID NO: 538013 - protein, 18 aa, Homo sapiens
  CDR3 for alpha chain variable domain of TCR clone 269007 (TRAV38-2/DV8, TRAJ42)
CAYRSADLTGGNQGNLIF

SEQ ID NO: 538014 - protein, 12 aa, Homo sapiens
  CDR3 for beta chain variable domain of TCR clone 269007 (TRBV11-2, TRBJ2-2)
CASSLGGGELFF

SEQ ID NO: 538015 - protein, 12 aa, Homo sapiens
  CDR3 for alpha chain variable domain of TCR clone 269008 (TRAV30, TRAJ43)
CGTEERGNDMRF

SEQ ID NO: 538016 - protein, 13 aa, Homo sapiens
  CDR3 for beta chain variable domain of TCR clone 269008 (TRBV4-1, TRBJ2-1)
CASSQAGGDEQFF

SEQ ID NO: 538017 - protein, 15 aa, Homo sapiens
  CDR3 for alpha chain variable domain of TCR clone 269009 (TRAV8-3, TRAJ40)
CAAPSLGSGTYKYIF

SEQ ID NO: 538018 - protein, 16 aa, Homo sapiens
  CDR3 for beta chain variable domain of TCR clone 269009 (TRBV7-3, TRBJ2-3)
CAGSLSGYRPEDTQYF

SEQ ID NO: 538019 - protein, 15 aa, Homo sapiens
  CDR3 for alpha chain variable domain of TCR clone 269010 (TRAV26-1, TRAJ12)
IASSELKDSSYKLIF

SEQ ID NO: 538020 - protein, 11 aa, Homo sapiens
  CDR3 for beta chain variable domain of TCR clone 269010 (TRBV7-9, TRBJ2-3)
CASSPPDTQYF

SEQ ID NO: 538021 - protein, 12 aa, Homo sapiens
  CDR3 for alpha chain variable domain of TCR clone 269011 (TRAV17, TRAJ57)
CATDGGSEKLVF

SEQ ID NO: 538022 - protein, 15 aa, Homo sapiens
  CDR3 for beta chain variable domain of TCR clone 269011 (TRBV11-2, TRBJ1-3)
CASSAHSSSGNTIYF

SEQ ID NO: 538023 - protein, 14 aa, Homo sapiens
  CDR3 for alpha chain variable domain of TCR clone 269012 (TRAV12-1, TRAJ9)
CVVTGYPGGFKTIF

SEQ ID NO: 538024 - protein, 13 aa, Homo sapiens
  CDR3 for beta chain variable domain of TCR clone 269012 (TRBV20-1, TRBJ1-1)
CSARAGGNTEAFF

SEQ ID NO: 538025 - protein, 13 aa, Homo sapiens
  CDR3 for alpha chain variable domain of TCR clone 269013 (TRAV26-1, TRAJ24)
CIVGVDSWGKLQF

SEQ ID NO: 538026 - protein, 14 aa, Homo sapiens
  CDR3 for beta chain variable domain of TCR clone 269013 (TRBV12-4, TRBJ1-1)
CASSLGTGGTEAFF

SEQ ID NO: 538027 - protein, 12 aa, Homo sapiens
  CDR3 for alpha chain variable domain of TCR clone 269014 (TRAV27, TRAJ49)
CAGARLGNQFYF

SEQ ID NO: 538028 - protein, 16 aa, Homo sapiens
  CDR3 for beta chain variable domain of TCR clone 269014 (TRBV28, TRBJ2-2)
CASSLEGGSNTGELFF

SEQ ID NO: 538029 - protein, 15 aa, Homo sapiens
  CDR3 for alpha chain variable domain of TCR clone 269015 (TRAV12-1, TRAJ44)
CVVFVNTGTASKLTF

SEQ ID NO: 538030 - protein, 13 aa, Homo sapiens
  CDR3 for beta chain variable domain of TCR clone 269015 (TRBV7-9, TRBJ1-1)
CASSLAGVTEAFF

SEQ ID NO: 538031 - protein, 15 aa, Homo sapiens
  CDR3 for alpha chain variable domain of TCR clone 269016 (TRAV26-1, TRAJ48)
FIARWSWFGNEKLTF

SEQ ID NO: 538032 - protein, 12 aa, Homo sapiens
  CDR3 for beta chain variable domain of TCR clone 269016 (TRBV19, TRBJ2-5)
CASSISEETQYF

SEQ ID NO: 538033 - protein, 11 aa, Homo sapiens
  CDR3 for alpha chain variable domain of TCR clone 269017 (TRAV3, TRAJ21)
CAVGNCNKFYF

SEQ ID NO: 538034 - protein, 14 aa, Homo sapiens
  CDR3 for beta chain variable domain of TCR clone 269017 (TRBV29-1, TRBJ2-2)
CSGRGSGNTGELFF

SEQ ID NO: 538035 - protein, 18 aa, Homo sapiens
  CDR3 for alpha chain variable domain of TCR clone 269018 (TRAV2, TRAJ32)
CCLLLCLHYGGATNKLIF

SEQ ID NO: 538036 - protein, 16 aa, Homo sapiens
  CDR3 for beta chain variable domain of TCR clone 269018 (TRBV7-9, TRBJ2-7)
CASGYPDREGGYEQYF

SEQ ID NO: 538037 - protein, 15 aa, Homo sapiens
  CDR3 for alpha chain variable domain of TCR clone 269019 (TRAV35, TRAJ33)
CAGQPPRYSNYQLIW

SEQ ID NO: 538038 - protein, 15 aa, Homo sapiens
  CDR3 for beta chain variable domain of TCR clone 269019 (TRBV7-9, TRBJ1-5)
CASSQGHQPNQPQHF

SEQ ID NO: 538039 - protein, 14 aa, Homo sapiens
  CDR3 for alpha chain variable domain of TCR clone 269020 (TRAV16, TRAJ15)
CALSFNQAGTSLIF

SEQ ID NO: 538040 - protein, 13 aa, Homo sapiens
  CDR3 for beta chain variable domain of TCR clone 269020 (TRBV9, TRBJ2-1)
CASSPSGGSEQFF

SEQ ID NO: 538041 - protein, 14 aa, Homo sapiens
  CDR3 for alpha chain variable domain of TCR clone 269021 (TRAV8-3, TRAJ30)
CAVGDMNRDDKIIL

SEQ ID NO: 538042 - protein, 17 aa, Homo sapiens
  CDR3 for beta chain variable domain of TCR clone 269021 (TRBV19, TRBJ2-2)
CASSRNPGGFGTGELFF

SEQ ID NO: 538043 - protein, 14 aa, Homo sapiens
  CDR3 for alpha chain variable domain of TCR clone 269022 (TRAV26-1, TRAJ48)
CIVRVSFGNEKLTF

SEQ ID NO: 538044 - protein, 13 aa, Homo sapiens
  CDR3 for beta chain variable domain of TCR clone 269022 (TRBV11-3, TRBJ2-3)
CASSHDTKDTQYF

SEQ ID NO: 538045 - protein, 11 aa, Homo sapiens
  CDR3 for alpha chain variable domain of TCR clone 269023 (TRAV1-1, TRAJ20)
CAVFNDYKLSF

SEQ ID NO: 538046 - protein, 14 aa, Homo sapiens
  CDR3 for beta chain variable domain of TCR clone 269023 (TRBV20-1, TRBJ2-7)
CSAPELAGVGEQYF

SEQ ID NO: 538047 - protein, 11 aa, Homo sapiens
  CDR3 for alpha chain variable domain of TCR clone 269024 (TRAV35, TRAJ33)
NFSDSNYQLIW

SEQ ID NO: 538048 - protein, 13 aa, Homo sapiens
  CDR3 for beta chain variable domain of TCR clone 269024 (TRBV7-9, TRBJ1-2)
CASSLKQNYGYTF

SEQ ID NO: 538049 - protein, 14 aa, Homo sapiens
  CDR3 for alpha chain variable domain of TCR clone 269025 (TRAV23/DV6, TRAJ53)
CAARRGGSNYKLTF

SEQ ID NO: 538050 - protein, 14 aa, Homo sapiens
  CDR3 for beta chain variable domain of TCR clone 269025 (TRBV27, TRBJ1-1)
CASSPQGKRAEAFF

SEQ ID NO: 538051 - protein, 14 aa, Homo sapiens
  CDR3 for alpha chain variable domain of TCR clone 269026 (TRAV1-2, TRAJ16)
CAVNRFSDAQKLLF

SEQ ID NO: 538052 - protein, 16 aa, Homo sapiens
  CDR3 for beta chain variable domain of TCR clone 269026 (TRBV20-1, TRBJ2-2)
CSASASGIPGAGELFF

SEQ ID NO: 538053 - protein, 16 aa, Homo sapiens
  CDR3 for alpha chain variable domain of TCR clone 269027 (TRAV1-2, TRAJ10)
CAMRGVLTGGGNKLTF

SEQ ID NO: 538054 - protein, 14 aa, Homo sapiens
  CDR3 for beta chain variable domain of TCR clone 269027 (TRBV19, TRBJ2-1)
CASPTFVLSGEQFF

SEQ ID NO: 538055 - protein, 16 aa, Homo sapiens
  CDR3 for alpha chain variable domain of TCR clone 269028 (TRAV16, TRAJ52)
CALSAAGGTSYGKLTF

SEQ ID NO: 538056 - protein, 13 aa, Homo sapiens
  CDR3 for beta chain variable domain of TCR clone 269028 (TRBV2, TRBJ2-7)
CASSVGGSGEQYF

SEQ ID NO: 538057 - protein, 12 aa, Homo sapiens
  CDR3 for alpha chain variable domain of TCR clone 269029 (TRAV8-3, TRAJ20)
CAVGANDYKLSF

SEQ ID NO: 538058 - protein, 17 aa, Homo sapiens
  CDR3 for beta chain variable domain of TCR clone 269029 (TRBV13, TRBJ2-3)
CASSLSRVAGGEEYAVF

SEQ ID NO: 538059 - protein, 11 aa, Homo sapiens
  CDR3 for alpha chain variable domain of TCR clone 269030 (TRAV3, TRAJ17)
PSGVAGNKLTF

SEQ ID NO: 538060 - protein, 16 aa, Homo sapiens
  CDR3 for beta chain variable domain of TCR clone 269030 (TRBV7-6, TRBJ2-1)
CASSAPGPSSYNEQFF

SEQ ID NO: 538061 - protein, 15 aa, Homo sapiens
  CDR3 for alpha chain variable domain of TCR clone 269031 (TRAV8-6, TRAJ6)
CAVSFTSGGSYIPTL

SEQ ID NO: 538062 - protein, 13 aa, Homo sapiens
  CDR3 for beta chain variable domain of TCR clone 269031 (TRBV29-1, TRBJ2-1)
CSVEGGRVNEQFF

SEQ ID NO: 538063 - protein, 14 aa, Homo sapiens
  CDR3 for alpha chain variable domain of TCR clone 269032 (TRAV1-2, TRAJ16)
CAVNRFSDGQKLLF

SEQ ID NO: 538064 - protein, 13 aa, Homo sapiens
  CDR3 for beta chain variable domain of TCR clone 269032 (TRBV10-3, TRBJ1-2)
CAISEQDSYGYTF

SEQ ID NO: 538065 - protein, 11 aa, Homo sapiens
  CDR3 for alpha chain variable domain of TCR clone 269033 (TRAV13-2, TRAJ20)
CADSNDYKLSF

SEQ ID NO: 538066 - protein, 13 aa, Homo sapiens
  CDR3 for beta chain variable domain of TCR clone 269033 (TRBV10-2, TRBJ2-7)
CASGASGGYEQYF

SEQ ID NO: 538067 - protein, 15 aa, Homo sapiens
  CDR3 for alpha chain variable domain of TCR clone 269034 (TRAV8-3, TRAJ45)
CASSYSGGGADGLTF

SEQ ID NO: 538068 - protein, 17 aa, Homo sapiens
  CDR3 for beta chain variable domain of TCR clone 269034 (TRBV27, TRBJ2-5)
CASRLRPGQGVQETQYF

SEQ ID NO: 538069 - protein, 15 aa, Homo sapiens
  CDR3 for alpha chain variable domain of TCR clone 269035 (TRAV8-1, TRAJ6)
CSVNTPPGGSYIPTF

SEQ ID NO: 538070 - protein, 14 aa, Homo sapiens
  CDR3 for beta chain variable domain of TCR clone 269035 (TRBV12-4, TRBJ2-1)
CASSLGQGASEQFF

SEQ ID NO: 538071 - protein, 16 aa, Homo sapiens
  CDR3 for alpha chain variable domain of TCR clone 269036 (TRAV30, TRAJ24)
CGTEIVDADSWGKFQF

SEQ ID NO: 538072 - protein, 16 aa, Homo sapiens
  CDR3 for beta chain variable domain of TCR clone 269036 (TRBV2, TRBJ1-3)
CASSGGAGRSGNTIYL

SEQ ID NO: 538073 - protein, 14 aa, Homo sapiens
  CDR3 for alpha chain variable domain of TCR clone 269037 (TRAV29/DV5, TRAJ36)
CAARRKTGAINLFF

SEQ ID NO: 538074 - protein, 14 aa, Homo sapiens
  CDR3 for beta chain variable domain of TCR clone 269037 (TRBV12-5, TRBJ2-5)
CASGSRTHQETQYF

SEQ ID NO: 538075 - protein, 13 aa, Homo sapiens
  CDR3 for alpha chain variable domain of TCR clone 269038 (TRAV26-1, TRAJ34)
CIVRPWITDKLIF

SEQ ID NO: 538076 - protein, 14 aa, Homo sapiens
  CDR3 for beta chain variable domain of TCR clone 269038 (TRBV7-2, TRBJ2-7)
CASRSQGGAYEQYF

SEQ ID NO: 538077 - protein, 10 aa, Homo sapiens
  CDR3 for alpha chain variable domain of TCR clone 269039 (TRAV21, TRAJ31)
CAVDNARLMF

SEQ ID NO: 538078 - protein, 16 aa, Homo sapiens
  CDR3 for beta chain variable domain of TCR clone 269039 (TRBV15, TRBJ1-2)
CATSRGPKTGGGGYTF

SEQ ID NO: 538079 - protein, 14 aa, Homo sapiens
  CDR3 for alpha chain variable domain of TCR clone 269040 (TRAV1-1, TRAJ27)
CALIYNTNAGKSTF

SEQ ID NO: 538080 - protein, 14 aa, Homo sapiens
  CDR3 for beta chain variable domain of TCR clone 269040 (TRBV25-1, TRBJ1-1)
CASTHLGGNTEAFF

SEQ ID NO: 538081 - protein, 14 aa, Homo sapiens
  CDR3 for alpha chain variable domain of TCR clone 269041 (TRAV14/DV4, TRAJ15)
CAMRRDRAGTALIF

SEQ ID NO: 538082 - protein, 16 aa, Homo sapiens
  CDR3 for beta chain variable domain of TCR clone 269041 (TRBV15, TRBJ2-3)
CATSRDLGIVTDTQYF

SEQ ID NO: 538083 - protein, 15 aa, Homo sapiens
  CDR3 for alpha chain variable domain of TCR clone 269042 (TRAV4, TRAJ10)
CLVGDEEGGGNKLTF

SEQ ID NO: 538084 - protein, 15 aa, Homo sapiens
  CDR3 for beta chain variable domain of TCR clone 269042 (TRBV7-2, TRBJ2-7)
CASSLTGQGTYGQYF

SEQ ID NO: 538085 - protein, 16 aa, Homo sapiens
  CDR3 for alpha chain variable domain of TCR clone 269043 (TRAV2, TRAJ4)
CAVEGRFSGGSNKLLF

SEQ ID NO: 538086 - protein, 13 aa, Homo sapiens
  CDR3 for beta chain variable domain of TCR clone 269043 (TRBV7-7, TRBJ2-5)
CASSRSGQETQYF

SEQ ID NO: 538087 - protein, 12 aa, Homo sapiens
  CDR3 for alpha chain variable domain of TCR clone 269044 (TRAV1-1, TRAJ8)
CAGGTGFQKLVF

SEQ ID NO: 538088 - protein, 15 aa, Homo sapiens
  CDR3 for beta chain variable domain of TCR clone 269044 (TRBV7-9, TRBJ1-4)
CASSRTGGFNEKQFF

SEQ ID NO: 538089 - protein, 13 aa, Homo sapiens
  CDR3 for alpha chain variable domain of TCR clone 269045 (TRAV8-3, TRAJ47)
CAVGARRGNKLVF

SEQ ID NO: 538090 - protein, 17 aa, Homo sapiens
  CDR3 for beta chain variable domain of TCR clone 269045 (TRBV15, TRBJ1-4)
CATSRYGTGDPNEKLFF

SEQ ID NO: 538091 - protein, 17 aa, Homo sapiens
  CDR3 for alpha chain variable domain of TCR clone 269046 (TRAV35, TRAJ47)
GLLDCRTHPEYGNKLVF

SEQ ID NO: 538092 - protein, 11 aa, Homo sapiens
  CDR3 for beta chain variable domain of TCR clone 269046 (TRBV29-1, TRBJ1-1)
CSVEVGTRTFF

SEQ ID NO: 538093 - protein, 17 aa, Homo sapiens
  CDR3 for alpha chain variable domain of TCR clone 269047 (TRAV3, TRAJ28)
CAVRPLYSGAGSYQLTF

SEQ ID NO: 538094 - protein, 13 aa, Homo sapiens
  CDR3 for beta chain variable domain of TCR clone 269047 (TRBV7-9, TRBJ2-3)
CASSPGSTDTQYF

SEQ ID NO: 538095 - protein, 14 aa, Homo sapiens
  CDR3 for alpha chain variable domain of TCR clone 269048 (TRAV1-2, TRAJ8)
CAVRDDTGFQKLVF

SEQ ID NO: 538096 - protein, 11 aa, Homo sapiens
  CDR3 for beta chain variable domain of TCR clone 269048 (TRBV11-3, TRBJ2-7)
CASGRTYEQYF

SEQ ID NO: 538097 - protein, 14 aa, Homo sapiens
  CDR3 for alpha chain variable domain of TCR clone 269049 (TRAV16, TRAJ54)
CALSGVQGAQKLVF

SEQ ID NO: 538098 - protein, 15 aa, Homo sapiens
  CDR3 for beta chain variable domain of TCR clone 269049 (TRBV18, TRBJ2-2)
CASSNSGLHTGELFF

SEQ ID NO: 538099 - protein, 18 aa, Homo sapiens
  CDR3 for alpha chain variable domain of TCR clone 269050 (TRAV29/DV5, TRAJ52)
CAAGFRGAGGTSYGKLTF

SEQ ID NO: 538100 - protein, 12 aa, Homo sapiens
  CDR3 for beta chain variable domain of TCR clone 269050 (TRBV7-8, TRBJ1-1)
CASGTATTEAFF

SEQ ID NO: 538101 - protein, 14 aa, Homo sapiens
  CDR3 for alpha chain variable domain of TCR clone 269051 (TRAV13-1, TRAJ40)
CAASMTSGTYKYIF

SEQ ID NO: 538102 - protein, 15 aa, Homo sapiens
  CDR3 for beta chain variable domain of TCR clone 269051 (TRBV7-3, TRBJ2-1)
CASSPTGEGEVEQFF

SEQ ID NO: 538103 - protein, 13 aa, Homo sapiens
  CDR3 for alpha chain variable domain of TCR clone 269052 (TRAV21, TRAJ27)
CAARPGNAGKSTF

SEQ ID NO: 538104 - protein, 15 aa, Homo sapiens
  CDR3 for beta chain variable domain of TCR clone 269052 (TRBV9, TRBJ2-1)
CASSLAGSSYNEQFF

SEQ ID NO: 538105 - protein, 14 aa, Homo sapiens
  CDR3 for alpha chain variable domain of TCR clone 269053 (TRAV12-2, TRAJ13)
CAVKKTGGYQKVTF

SEQ ID NO: 538106 - protein, 17 aa, Homo sapiens
  CDR3 for beta chain variable domain of TCR clone 269053 (TRBV18, TRBJ1-5)
CASSPTMGQGTNQPQHF

SEQ ID NO: 538107 - protein, 12 aa, Homo sapiens
  CDR3 for alpha chain variable domain of TCR clone 269054 (TRAV3, TRAJ27)
CAVRDKAGKSTF

SEQ ID NO: 538108 - protein, 14 aa, Homo sapiens
  CDR3 for beta chain variable domain of TCR clone 269054 (TRBV5-1, TRBJ1-2)
CASIVDSTNYGYTF

SEQ ID NO: 538109 - protein, 14 aa, Homo sapiens
  CDR3 for alpha chain variable domain of TCR clone 269055 (TRAV8-6, TRAJ4)
CAVTVSGGYNKLIF

SEQ ID NO: 538110 - protein, 14 aa, Homo sapiens
  CDR3 for beta chain variable domain of TCR clone 269055 (TRBV7-2, TRBJ1-1)
CASSFLTGTTEAFF

SEQ ID NO: 538111 - protein, 11 aa, Homo sapiens
  CDR3 for alpha chain variable domain of TCR clone 269056 (TRAV3, TRAJ13)
CAVTSYQKVTF

SEQ ID NO: 538112 - protein, 15 aa, Homo sapiens
  CDR3 for beta chain variable domain of TCR clone 269056 (TRBV7-9, TRBJ2-7)
CASSSSVLAVYEQYF

SEQ ID NO: 538113 - protein, 15 aa, Homo sapiens
  CDR3 for alpha chain variable domain of TCR clone 269057 (TRAV8-4, TRAJ13)
CAVSDWSGGYQKVTF

SEQ ID NO: 538114 - protein, 17 aa, Homo sapiens
  CDR3 for beta chain variable domain of TCR clone 269057 (TRBV11-2, TRBJ2-1)
CASSLYPPGVEYNEQFF

SEQ ID NO: 538115 - protein, 12 aa, Homo sapiens
  CDR3 for alpha chain variable domain of TCR clone 269058 (TRAV17, TRAJ36)
CATLTGANNLFF

SEQ ID NO: 538116 - protein, 15 aa, Homo sapiens
  CDR3 for beta chain variable domain of TCR clone 269058 (TRBV19, TRBJ1-2)
CASSTKTDTNYGYTL

SEQ ID NO: 538117 - protein, 12 aa, Homo sapiens
  CDR3 for alpha chain variable domain of TCR clone 269059 (TRAV4, TRAJ5)
RTMDTGRRALTV

SEQ ID NO: 538118 - protein, 15 aa, Homo sapiens
  CDR3 for beta chain variable domain of TCR clone 269059 (TRBV27, TRBJ2-5)
CASSLIPSGGETQYF

SEQ ID NO: 538119 - protein, 11 aa, Homo sapiens
  CDR3 for alpha chain variable domain of TCR clone 269060 (TRAV12-3, TRAJ27)
CAMANAGKSTF

SEQ ID NO: 538120 - protein, 13 aa, Homo sapiens
  CDR3 for beta chain variable domain of TCR clone 269060 (TRBV20-1, TRBJ1-1)
SAVLEWANTEAFF

SEQ ID NO: 538121 - protein, 15 aa, Homo sapiens
  CDR3 for alpha chain variable domain of TCR clone 269061 (TRAV27, TRAJ38)
CAARRNAGNNSKLIW

SEQ ID NO: 538122 - protein, 13 aa, Homo sapiens
  CDR3 for beta chain variable domain of TCR clone 269061 (TRBV28, TRBJ2-5)
CAGVSRGEETQYF

SEQ ID NO: 538123 - protein, 14 aa, Homo sapiens
  CDR3 for alpha chain variable domain of TCR clone 269062 (TRAV26-1, TRAJ38)
CIADNACNNRKLIW

SEQ ID NO: 538124 - protein, 15 aa, Homo sapiens
  CDR3 for beta chain variable domain of TCR clone 269062 (TRBV18, TRBJ2-1)
CASSPPSASYNEQFF

SEQ ID NO: 538125 - protein, 16 aa, Homo sapiens
  CDR3 for alpha chain variable domain of TCR clone 269063 (TRAV2, TRAJ10)
CCGGSTVTGGGNKLTF

SEQ ID NO: 538126 - protein, 16 aa, Homo sapiens
  CDR3 for beta chain variable domain of TCR clone 269063 (TRBV18, TRBJ1-5)
CASSPSTGNSDQPQHF

SEQ ID NO: 538127 - protein, 14 aa, Homo sapiens
  CDR3 for alpha chain variable domain of TCR clone 269064 (TRAV35, TRAJ38)
CAGSNAGNNRKLIW

SEQ ID NO: 538128 - protein, 14 aa, Homo sapiens
  CDR3 for beta chain variable domain of TCR clone 269064 (TRBV13, TRBJ2-5)
CASSLGPRGETQYF

SEQ ID NO: 538129 - protein, 14 aa, Homo sapiens
  CDR3 for alpha chain variable domain of TCR clone 269065 (TRAV1-2, TRAJ16)
RAVNRFSDGQKLLF

SEQ ID NO: 538130 - protein, 14 aa, Homo sapiens
  CDR3 for beta chain variable domain of TCR clone 269065 (TRBV20-1, TRBJ1-5)
CSAPGTGVGQPQHF

SEQ ID NO: 538131 - protein, 14 aa, Homo sapiens
  CDR3 for alpha chain variable domain of TCR clone 269066 (TRAV8-3, TRAJ4)
CAVGAAGGYNKLIF

SEQ ID NO: 538132 - protein, 14 aa, Homo sapiens
  CDR3 for beta chain variable domain of TCR clone 269066 (TRBV11-2, TRBJ2-5)
CASSRTGGIETQYF

SEQ ID NO: 538133 - protein, 13 aa, Homo sapiens
  CDR3 for alpha chain variable domain of TCR clone 269067 (TRAV6, TRAJ33)
CALPMDSNYQLIW

SEQ ID NO: 538134 - protein, 14 aa, Homo sapiens
  CDR3 for beta chain variable domain of TCR clone 269067 (TRBV7-2, TRBJ2-1)
CASSKGGARNEQFF

SEQ ID NO: 538135 - protein, 15 aa, Homo sapiens
  CDR3 for alpha chain variable domain of TCR clone 269068 (TRAV35, TRAJ23)
CAGQRGYNQGGKLIF

SEQ ID NO: 538136 - protein, 15 aa, Homo sapiens
  CDR3 for beta chain variable domain of TCR clone 269068 (TRBV7-6, TRBJ2-5)
CASSKPTGPQETQYF

SEQ ID NO: 538137 - protein, 11 aa, Homo sapiens
  CDR3 for alpha chain variable domain of TCR clone 269069 (TRAV13-1, TRAJ39)
CASHAGTMLTF

SEQ ID NO: 538138 - protein, 14 aa, Homo sapiens
  CDR3 for beta chain variable domain of TCR clone 269069 (TRBV11-2, TRBJ1-5)
CASSLDRGRQPQHF

SEQ ID NO: 538139 - protein, 13 aa, Homo sapiens
  CDR3 for alpha chain variable domain of TCR clone 269070 (TRAV17, TRAJ9)
GATFLTGGFKTIF

SEQ ID NO: 538140 - protein, 16 aa, Homo sapiens
  CDR3 for beta chain variable domain of TCR clone 269070 (TRBV5-7, TRBJ1-4)
CASSPSGGLKTEKLFF

SEQ ID NO: 538141 - protein, 19 aa, Homo sapiens
  CDR3 for alpha chain variable domain of TCR clone 269071 (TRAV21, TRAJ48)
SLVTQPPTSVLSRDEKLTF

SEQ ID NO: 538142 - protein, 15 aa, Homo sapiens
  CDR3 for beta chain variable domain of TCR clone 269071 (TRBV6-6, TRBJ2-5)
CASSPGGGLEETQYF

SEQ ID NO: 538143 - protein, 15 aa, Homo sapiens
  CDR3 for alpha chain variable domain of TCR clone 269072 (TRAV19, TRAJ53)
CALSSSGGSNYKLTF

SEQ ID NO: 538144 - protein, 13 aa, Homo sapiens
  CDR3 for beta chain variable domain of TCR clone 269072 (TRBV7-6, TRBJ2-7)
CARSLDHTHEQYF

SEQ ID NO: 538145 - protein, 17 aa, Homo sapiens
  CDR3 for alpha chain variable domain of TCR clone 269073 (TRAV3, TRAJ6)
CAVRDGPRAGGSNIPTF

SEQ ID NO: 538146 - protein, 15 aa, Homo sapiens
  CDR3 for beta chain variable domain of TCR clone 269073 (TRBV4-1, TRBJ1-4)
CASSDTGGTNEKLFF

SEQ ID NO: 538147 - protein, 15 aa, Homo sapiens
  CDR3 for alpha chain variable domain of TCR clone 269074 (TRAV3, TRAJ45)
CAVRTPWGGADGLTF

SEQ ID NO: 538148 - protein, 15 aa, Homo sapiens
  CDR3 for beta chain variable domain of TCR clone 269074 (TRBV12-5, TRBJ2-2)
CASGRLGGNTGELFF

SEQ ID NO: 538149 - protein, 13 aa, Homo sapiens
  CDR3 for alpha chain variable domain of TCR clone 269075 (TRAV12-2, TRAJ34)
CAVRGYNTDKHIF

SEQ ID NO: 538150 - protein, 15 aa, Homo sapiens
  CDR3 for beta chain variable domain of TCR clone 269075 (TRBV28, TRBJ2-1)
CASRTGAGVIARQFF

SEQ ID NO: 538151 - protein, 15 aa, Homo sapiens
  CDR3 for alpha chain variable domain of TCR clone 269076 (TRAV16, TRAJ45)
CAPPYSGGGADGLTF

SEQ ID NO: 538152 - protein, 16 aa, Homo sapiens
  CDR3 for beta chain variable domain of TCR clone 269076 (TRBV12-4, TRBJ2-5)
CASSFFVRGRQETQYF

SEQ ID NO: 538153 - protein, 12 aa, Homo sapiens
  CDR3 for alpha chain variable domain of TCR clone 269077 (TRAV3, TRAJ20)
CAVRDGDYKLSF

SEQ ID NO: 538154 - protein, 13 aa, Homo sapiens
  CDR3 for beta chain variable domain of TCR clone 269077 (TRBV15, TRBJ2-7)
CATSTTGHYEQYF

SEQ ID NO: 538155 - protein, 13 aa, Homo sapiens
  CDR3 for alpha chain variable domain of TCR clone 269078 (TRAV27, TRAJ6)
CAGGTGGSYIPTS

SEQ ID NO: 538156 - protein, 14 aa, Homo sapiens
  CDR3 for beta chain variable domain of TCR clone 269078 (TRBV6-3, TRBJ1-1)
CACSYQRRDTEAFF

SEQ ID NO: 538157 - protein, 14 aa, Homo sapiens
  CDR3 for alpha chain variable domain of TCR clone 269079 (TRAV12-3, TRAJ50)
CAMSPKTSYDKVIF

SEQ ID NO: 538158 - protein, 14 aa, Homo sapiens
  CDR3 for beta chain variable domain of TCR clone 269079 (TRBV19, TRBJ1-1)
CASSMGRNALEAFF

SEQ ID NO: 538159 - protein, 12 aa, Homo sapiens
  CDR3 for alpha chain variable domain of TCR clone 269080 (TRAV9-2, TRAJ49)
CALSNTGNQLYF

SEQ ID NO: 538160 - protein, 15 aa, Homo sapiens
  CDR3 for beta chain variable domain of TCR clone 269080 (TRBV7-2, TRBJ2-1)
CASSLVGSSYNEQFF

SEQ ID NO: 538161 - protein, 13 aa, Homo sapiens
  CDR3 for alpha chain variable domain of TCR clone 269081 (TRAV29/DV5, TRAJ47)
CAASAEYGNKLVF

SEQ ID NO: 538162 - protein, 13 aa, Homo sapiens
  CDR3 for beta chain variable domain of TCR clone 269081 (TRBV7-3, TRBJ1-1)
CASSQDWGAEAFF

SEQ ID NO: 538163 - protein, 14 aa, Homo sapiens
  CDR3 for alpha chain variable domain of TCR clone 269082 (TRAV14/DV4, TRAJ54)
WAMREAPGAQKLVF

SEQ ID NO: 538164 - protein, 15 aa, Homo sapiens
  CDR3 for beta chain variable domain of TCR clone 269082 (TRBV5-1, TRBJ2-7)
CASSLNGGPAREQYF

SEQ ID NO: 538165 - protein, 14 aa, Homo sapiens
  CDR3 for alpha chain variable domain of TCR clone 269083 (TRAV26-1, TRAJ38)
CIADNAGNNRKLSW

SEQ ID NO: 538166 - protein, 13 aa, Homo sapiens
  CDR3 for beta chain variable domain of TCR clone 269083 (TRBV2, TRBJ1-5)
CATAGPGNQPQHF

SEQ ID NO: 538167 - protein, 14 aa, Homo sapiens
  CDR3 for alpha chain variable domain of TCR clone 269084 (TRAV26-2, TRAJ37)
CILSRSSNTGKLIF

SEQ ID NO: 538168 - protein, 15 aa, Homo sapiens
  CDR3 for beta chain variable domain of TCR clone 269084 (TRBV13, TRBJ2-7)
CASSLDKGSGMEQYF

SEQ ID NO: 538169 - protein, 15 aa, Homo sapiens
  CDR3 for alpha chain variable domain of TCR clone 269085 (TRAV26-1, TRAJ37)
CIVENGSGNTGKLIF

SEQ ID NO: 538170 - protein, 17 aa, Homo sapiens
  CDR3 for beta chain variable domain of TCR clone 269085 (TRBV20-1, TRBJ2-1)
CSARDPLAGVWDNEQFF

SEQ ID NO: 538171 - protein, 14 aa, Homo sapiens
  CDR3 for alpha chain variable domain of TCR clone 269086 (TRAV1-2, TRAJ16)
CAVNRFSGGQKLLF

SEQ ID NO: 538172 - protein, 16 aa, Homo sapiens
  CDR3 for beta chain variable domain of TCR clone 269086 (TRBV9, TRBJ2-1)
CASSVGGGGTYNEQFF

SEQ ID NO: 538173 - protein, 11 aa, Homo sapiens
  CDR3 for alpha chain variable domain of TCR clone 269087 (TRAV12-3, TRAJ16)
LTGGDGQKLLL

SEQ ID NO: 538174 - protein, 13 aa, Homo sapiens
  CDR3 for beta chain variable domain of TCR clone 269087 (TRBV12-4, TRBJ1-4)
CASAMGHNEKLFV

SEQ ID NO: 538175 - protein, 14 aa, Homo sapiens
  CDR3 for alpha chain variable domain of TCR clone 269088 (TRAV22, TRAJ6)
FAGVGPGGSYIPTF

SEQ ID NO: 538176 - protein, 14 aa, Homo sapiens
  CDR3 for beta chain variable domain of TCR clone 269088 (TRBV25-1, TRBJ1-1)
CASTHLVGNTEAFF

SEQ ID NO: 538177 - protein, 12 aa, Homo sapiens
  CDR3 for alpha chain variable domain of TCR clone 269089 (TRAV13-1, TRAJ53)
AASGGSNYKLTF

SEQ ID NO: 538178 - protein, 15 aa, Homo sapiens
  CDR3 for beta chain variable domain of TCR clone 269089 (TRBV6-3, TRBJ2-7)
CASSSPRTVFYEQYF

SEQ ID NO: 538179 - protein, 18 aa, Homo sapiens
  CDR3 for alpha chain variable domain of TCR clone 269090 (TRAV14/DV4, TRAJ52)
CAMREANAGGTSYGKLTF

SEQ ID NO: 538180 - protein, 19 aa, Homo sapiens
  CDR3 for beta chain variable domain of TCR clone 269090 (TRBV25-1, TRBJ2-2)
CAILVYRVDRGRKTGELFF

SEQ ID NO: 538181 - protein, 15 aa, Homo sapiens
  CDR3 for alpha chain variable domain of TCR clone 269091 (TRAV1-2, TRAJ32)
CAVRGYGGATNKLIV

SEQ ID NO: 538182 - protein, 15 aa, Homo sapiens
  CDR3 for beta chain variable domain of TCR clone 269091 (TRBV25-1, TRBJ2-5)
CASSDTGTHQETQYF

SEQ ID NO: 538183 - protein, 11 aa, Homo sapiens
  CDR3 for alpha chain variable domain of TCR clone 269092 (TRAV21, TRAJ11)
CAVNGYSTLTF

SEQ ID NO: 538184 - protein, 16 aa, Homo sapiens
  CDR3 for beta chain variable domain of TCR clone 269092 (TRBV24-1, TRBJ2-3)
CATSDRRQDLTDTQYF

SEQ ID NO: 538185 - protein, 14 aa, Homo sapiens
  CDR3 for alpha chain variable domain of TCR clone 269093 (TRAV12-3, TRAJ10)
SHLPLTGGGNKLTF

SEQ ID NO: 538186 - protein, 16 aa, Homo sapiens
  CDR3 for beta chain variable domain of TCR clone 269093 (TRBV19, TRBJ2-7)
CASSISAGGALYEQYF

SEQ ID NO: 538187 - protein, 15 aa, Homo sapiens
  CDR3 for alpha chain variable domain of TCR clone 269094 (TRAV13-2, TRAJ42)
CAENNYGGSQGNLIF

SEQ ID NO: 538188 - protein, 14 aa, Homo sapiens
  CDR3 for beta chain variable domain of TCR clone 269094 (TRBV25-1, TRBJ1-6)
CASSLSADISPLHF

SEQ ID NO: 538189 - protein, 11 aa, Homo sapiens
  CDR3 for alpha chain variable domain of TCR clone 269095 (TRAV16, TRAJ31)
CALFNNARLMF

SEQ ID NO: 538190 - protein, 13 aa, Homo sapiens
  CDR3 for beta chain variable domain of TCR clone 269095 (TRBV13, TRBJ2-2)
CASSGGNTGELFF

SEQ ID NO: 538191 - protein, 14 aa, Homo sapiens
  CDR3 for alpha chain variable domain of TCR clone 269096 (TRAV27, TRAJ42)
CAGGDGGSQGNLIF

SEQ ID NO: 538192 - protein, 15 aa, Homo sapiens
  CDR3 for beta chain variable domain of TCR clone 269096 (TRBV7-2, TRBJ2-1)
CASSSGLAGGNEQFF

SEQ ID NO: 538193 - protein, 14 aa, Homo sapiens
  CDR3 for alpha chain variable domain of TCR clone 269097 (TRAV12-2, TRAJ32)
CCGDYGGATNKLIF

SEQ ID NO: 538194 - protein, 13 aa, Homo sapiens
  CDR3 for beta chain variable domain of TCR clone 269097 (TRBV2, TRBJ1-6)
CASGRGGISPLHF

SEQ ID NO: 538195 - protein, 13 aa, Homo sapiens
  CDR3 for alpha chain variable domain of TCR clone 269098 (TRAV13-2, TRAJ40)
CAGFTSGTYKYIF

SEQ ID NO: 538196 - protein, 12 aa, Homo sapiens
  CDR3 for beta chain variable domain of TCR clone 269098 (TRBV11-2, TRBJ2-2)
CASSLGGGELFF

SEQ ID NO: 538197 - protein, 15 aa, Homo sapiens
  CDR3 for alpha chain variable domain of TCR clone 269099 (TRAV26-1, TRAJ22)
CIVRVSFWFCKATGL

SEQ ID NO: 538198 - protein, 14 aa, Homo sapiens
  CDR3 for beta chain variable domain of TCR clone 269099 (TRBV7-6, TRBJ2-7)
CASSLFQDSYEQYF

SEQ ID NO: 538199 - protein, 15 aa, Homo sapiens
  CDR3 for alpha chain variable domain of TCR clone 269100 (TRAV1-2, TRAJ16)
CAVRARFSDSQKLLF

SEQ ID NO: 538200 - protein, 19 aa, Homo sapiens
  CDR3 for beta chain variable domain of TCR clone 269100 (TRBV11-3, TRBJ2-3)
CASGFGTSGGPRGGGTQYF

SEQ ID NO: 538201 - protein, 14 aa, Homo sapiens
  CDR3 for alpha chain variable domain of TCR clone 269101 (TRAV29/DV5, TRAJ49)
CAASAQNTGNQFYF

SEQ ID NO: 538202 - protein, 16 aa, Homo sapiens
  CDR3 for beta chain variable domain of TCR clone 269101 (TRBV12-4, TRBJ1-5)
CASRQPVEGSNQTQHF

SEQ ID NO: 538203 - protein, 13 aa, Homo sapiens
  CDR3 for alpha chain variable domain of TCR clone 269102 (TRAV1-2, TRAJ9)
CAALNTGGFKTIF

SEQ ID NO: 538204 - protein, 13 aa, Homo sapiens
  CDR3 for beta chain variable domain of TCR clone 269102 (TRBV19, TRBJ1-2)
CASSVSGQDGYIF

SEQ ID NO: 538205 - protein, 22 aa, Homo sapiens
  CDR3 for alpha chain variable domain of TCR clone 269103 (TRAV12-3, TRAJ22)
SPVIQPPTSAMSLFGSARQLTF

SEQ ID NO: 538206 - protein, 15 aa, Homo sapiens
  CDR3 for beta chain variable domain of TCR clone 269103 (TRBV5-1, TRBJ2-3)
CASSVTSGSTDTQYF

SEQ ID NO: 538207 - protein, 14 aa, Homo sapiens
  CDR3 for alpha chain variable domain of TCR clone 269104 (TRAV2, TRAJ29)
CAGPFQYGNTPLIF

SEQ ID NO: 538208 - protein, 11 aa, Homo sapiens
  CDR3 for beta chain variable domain of TCR clone 269104 (TRBV29-1, TRBJ2-5)
CSEDRTGTQYF

SEQ ID NO: 538209 - protein, 14 aa, Homo sapiens
  CDR3 for alpha chain variable domain of TCR clone 269105 (TRAV2, TRAJ37)
CAVDFTSNTGKLIF

SEQ ID NO: 538210 - protein, 14 aa, Homo sapiens
  CDR3 for beta chain variable domain of TCR clone 269105 (TRBV20-1, TRBJ1-5)
CSARGRGSNQPQHF

SEQ ID NO: 538211 - protein, 15 aa, Homo sapiens
  CDR3 for alpha chain variable domain of TCR clone 269106 (TRAV17, TRAJ13)
CATDAGSGGYQKVTF

SEQ ID NO: 538212 - protein, 17 aa, Homo sapiens
  CDR3 for beta chain variable domain of TCR clone 269106 (TRBV11-2, TRBJ2-1)
CASSLYPPGVEYNEQFC

SEQ ID NO: 538213 - protein, 11 aa, Homo sapiens
  CDR3 for alpha chain variable domain of TCR clone 269107 (TRAV12-1, TRAJ40)
CVVPGTYKYIF

SEQ ID NO: 538214 - protein, 17 aa, Homo sapiens
  CDR3 for beta chain variable domain of TCR clone 269107 (TRBV7-8, TRBJ2-6)
CASSAGTGGAGANVLTF

SEQ ID NO: 538215 - protein, 17 aa, Homo sapiens
  CDR3 for alpha chain variable domain of TCR clone 269108 (TRAV3, TRAJ28)
CAVREAYSGAGSYQLTF

SEQ ID NO: 538216 - protein, 16 aa, Homo sapiens
  CDR3 for beta chain variable domain of TCR clone 269108 (TRBV18, TRBJ2-7)
CASSPGRAGGAYEQYF

SEQ ID NO: 538217 - protein, 12 aa, Homo sapiens
  CDR3 for alpha chain variable domain of TCR clone 269109 (TRAV13-1, TRAJ48)
CAANFGNEKLTY

SEQ ID NO: 538218 - protein, 13 aa, Homo sapiens
  CDR3 for beta chain variable domain of TCR clone 269109 (TRBV7-3, TRBJ1-1)
CASSQDWGAEAFF

SEQ ID NO: 538219 - protein, 14 aa, Homo sapiens
  CDR3 for alpha chain variable domain of TCR clone 269110 (TRAV3, TRAJ22)
CCERRGGSARQLTF

SEQ ID NO: 538220 - protein, 15 aa, Homo sapiens
  CDR3 for beta chain variable domain of TCR clone 269110 (TRBV19, TRBJ2-3)
CASSMSTTSTDTQYF

SEQ ID NO: 538221 - protein, 15 aa, Homo sapiens
  CDR3 for alpha chain variable domain of TCR clone 269111 (TRAV12-2, TRAJ53)
CAVNGGGGRKYKLTF

SEQ ID NO: 538222 - protein, 14 aa, Homo sapiens
  CDR3 for beta chain variable domain of TCR clone 269111 (TRBV6-1, TRBJ1-3)
CASVQGGGGNTIYF

SEQ ID NO: 538223 - protein, 16 aa, Homo sapiens
  CDR3 for alpha chain variable domain of TCR clone 269112 (TRAV12-1, TRAJ28)
CVVIAYSGAGSYQLTF

SEQ ID NO: 538224 - protein, 14 aa, Homo sapiens
  CDR3 for beta chain variable domain of TCR clone 269112 (TRBV5-4, TRBJ1-1)
CASSLDRRRDEAFF

SEQ ID NO: 538225 - protein, 14 aa, Homo sapiens
  CDR3 for alpha chain variable domain of TCR clone 269113 (TRAV8-2, TRAJ37)
CVVSISGNTGKLIF

SEQ ID NO: 538226 - protein, 11 aa, Homo sapiens
  CDR3 for beta chain variable domain of TCR clone 269113 (TRBV6-3, TRBJ2-3)
CATGQADTQYF

SEQ ID NO: 538227 - protein, 16 aa, Homo sapiens
  CDR3 for alpha chain variable domain of TCR clone 269114 (TRAV12-2, TRAJ32)
CAVNLGQGGVTNKLIF

SEQ ID NO: 538228 - protein, 15 aa, Homo sapiens
  CDR3 for beta chain variable domain of TCR clone 269114 (TRBV20-1, TRBJ2-7)
CSARGPLAGGREQYF

SEQ ID NO: 538229 - protein, 14 aa, Homo sapiens
  CDR3 for alpha chain variable domain of TCR clone 269115 (TRAV38-1, TRAJ45)
CASHSGGGADGLTF

SEQ ID NO: 538230 - protein, 15 aa, Homo sapiens
  CDR3 for beta chain variable domain of TCR clone 269115 (TRBV20-1, TRBJ2-7)
CGARDRVSGMDEQYF

SEQ ID NO: 538231 - protein, 15 aa, Homo sapiens
  CDR3 for alpha chain variable domain of TCR clone 269116 (TRAV23/DV6, TRAJ37)
CAAGEGSGNTGKLIF

SEQ ID NO: 538232 - protein, 16 aa, Homo sapiens
  CDR3 for beta chain variable domain of TCR clone 269116 (TRBV2, TRBJ2-1)
CASSVGGSLSYNEQFF

SEQ ID NO: 538233 - protein, 15 aa, Homo sapiens
  CDR3 for alpha chain variable domain of TCR clone 269117 (TRAV17, TRAJ57)
CATGPSQGGSEKLVF

SEQ ID NO: 538234 - protein, 20 aa, Homo sapiens
  CDR3 for beta chain variable domain of TCR clone 269117 (TRBV4-2, TRBJ2-7)
CASSQASGGNLRAVLRAGHQ

SEQ ID NO: 538235 - protein, 19 aa, Homo sapiens
  CDR3 for alpha chain variable domain of TCR clone 269118 (TRAV26-1, TRAJ52)
CIVREHRNAGGTSYGKLTF

SEQ ID NO: 538236 - protein, 15 aa, Homo sapiens
  CDR3 for beta chain variable domain of TCR clone 269118 (TRBV29-1, TRBJ2-1)
CSGRDRKSPYNEQFF

SEQ ID NO: 538237 - protein, 15 aa, Homo sapiens
  CDR3 for alpha chain variable domain of TCR clone 269119 (TRAV26-1, TRAJ29)
CIVRVQGSGNTPLVF

SEQ ID NO: 538238 - protein, 13 aa, Homo sapiens
  CDR3 for beta chain variable domain of TCR clone 269119 (TRBV7-9, TRBJ1-2)
CASSLKQNYGYTF

SEQ ID NO: 538239 - protein, 15 aa, Homo sapiens
  CDR3 for alpha chain variable domain of TCR clone 269120 (TRAV29/DV5, TRAJ24)
CAASGATASWGQFQF

SEQ ID NO: 538240 - protein, 12 aa, Homo sapiens
  CDR3 for beta chain variable domain of TCR clone 269120 (TRBV11-2, TRBJ2-2)
CASSLPTGELFF

SEQ ID NO: 538241 - protein, 13 aa, Homo sapiens
  CDR3 for alpha chain variable domain of TCR clone 269121 (TRAV13-1, TRAJ6)
CAASSGGSYIPTF

SEQ ID NO: 538242 - protein, 15 aa, Homo sapiens
  CDR3 for beta chain variable domain of TCR clone 269121 (TRBV12-4, TRBJ2-5)
CASSPPTGLEETQYF

SEQ ID NO: 538243 - protein, 12 aa, Homo sapiens
  CDR3 for alpha chain variable domain of TCR clone 269122 (TRAV12-3, TRAJ17)
CAMTLTGNKLTF

SEQ ID NO: 538244 - protein, 11 aa, Homo sapiens
  CDR3 for beta chain variable domain of TCR clone 269122 (TRBV29-1, TRBJ2-5)
CSEDRTGTQYF

SEQ ID NO: 538245 - protein, 15 aa, Homo sapiens
  CDR3 for alpha chain variable domain of TCR clone 269123 (TRAV8-3, TRAJ11)
CAVGLLNSGYSTLTF

SEQ ID NO: 538246 - protein, 15 aa, Homo sapiens
  CDR3 for beta chain variable domain of TCR clone 269123 (TRBV10-3, TRBJ2-1)
CAIRNGTSGHNEQFF

SEQ ID NO: 538247 - protein, 15 aa, Homo sapiens
  CDR3 for alpha chain variable domain of TCR clone 269124 (TRAV35, TRAJ24)
CAGQSAQGSWGKLRF

SEQ ID NO: 538248 - protein, 17 aa, Homo sapiens
  CDR3 for beta chain variable domain of TCR clone 269124 (TRBV11-2, TRBJ2-4)
CASSFLALGGAGDIQYF

SEQ ID NO: 538249 - protein, 13 aa, Homo sapiens
  CDR3 for alpha chain variable domain of TCR clone 269125 (TRAV21, TRAJ8)
CAAPNTGFQKLVF

SEQ ID NO: 538250 - protein, 16 aa, Homo sapiens
  CDR3 for beta chain variable domain of TCR clone 269125 (TRBV7-9, TRBJ1-2)
CASSLGFSSGEDGYTF

SEQ ID NO: 538251 - protein, 12 aa, Homo sapiens
  CDR3 for alpha chain variable domain of TCR clone 269126 (TRAV13-1, TRAJ3)
CAPRGDASKIIF

SEQ ID NO: 538252 - protein, 14 aa, Homo sapiens
  CDR3 for beta chain variable domain of TCR clone 269126 (TRBV7-3, TRBJ1-1)
CASSLKGGNTEAFF

SEQ ID NO: 538253 - protein, 14 aa, Homo sapiens
  CDR3 for alpha chain variable domain of TCR clone 269127 (TRAV30, TRAJ33)
CGTVAPRSNYQLIW

SEQ ID NO: 538254 - protein, 17 aa, Homo sapiens
  CDR3 for beta chain variable domain of TCR clone 269127 (TRBV11-2, TRBJ2-1)
CASSLYPPGVEYNEQFF

SEQ ID NO: 538255 - protein, 14 aa, Homo sapiens
  CDR3 for alpha chain variable domain of TCR clone 269128 (TRAV12-3, TRAJ10)
SHLPLTGGGNKLTF

SEQ ID NO: 538256 - protein, 17 aa, Homo sapiens
  CDR3 for beta chain variable domain of TCR clone 269128 (TRBV6-5, TRBJ2-6)
CASSSATSGPGANVLTF

SEQ ID NO: 538257 - protein, 14 aa, Homo sapiens
  CDR3 for alpha chain variable domain of TCR clone 269129 (TRAV13-1, TRAJ10)
CSAKEPGGGNKLTF

SEQ ID NO: 538258 - protein, 15 aa, Homo sapiens
  CDR3 for beta chain variable domain of TCR clone 269129 (TRBV27, TRBJ2-1)
CASSNGGGSSNEQFF

SEQ ID NO: 538259 - protein, 12 aa, Homo sapiens
  CDR3 for alpha chain variable domain of TCR clone 269130 (TRAV23/DV6, TRAJ27)
CAASKSAGKSTF

SEQ ID NO: 538260 - protein, 15 aa, Homo sapiens
  CDR3 for beta chain variable domain of TCR clone 269130 (TRBV29-1, TRBJ2-1)
CSVRTSLSSYNEQLF

SEQ ID NO: 538261 - protein, 14 aa, Homo sapiens
  CDR3 for alpha chain variable domain of TCR clone 269131 (TRAV9-2, TRAJ39)
CALYIYNAGNMLTF

SEQ ID NO: 538262 - protein, 16 aa, Homo sapiens
  CDR3 for beta chain variable domain of TCR clone 269131 (TRBV7-3, TRBJ2-2)
CASSLKRGTLSVELFF

SEQ ID NO: 538263 - protein, 14 aa, Homo sapiens
  CDR3 for alpha chain variable domain of TCR clone 269132 (TRAV12-2, TRAJ17)
CAVLFKAAGNKLTF

SEQ ID NO: 538264 - protein, 14 aa, Homo sapiens
  CDR3 for beta chain variable domain of TCR clone 269132 (TRBV19, TRBJ2-1)
CASPTVVLSGEQFF

SEQ ID NO: 538265 - protein, 16 aa, Homo sapiens
  CDR3 for alpha chain variable domain of TCR clone 269133 (TRAV12-3, TRAJ45)
CAMTSYSGGGADGLTF

SEQ ID NO: 538266 - protein, 15 aa, Homo sapiens
  CDR3 for beta chain variable domain of TCR clone 269133 (TRBV4-1, TRBJ1-4)
CASSDTGGTNEKLFF

SEQ ID NO: 538267 - protein, 10 aa, Homo sapiens
  CDR3 for alpha chain variable domain of TCR clone 269134 (TRAV13-1, TRAJ27)
CAPMARQINL

SEQ ID NO: 538268 - protein, 13 aa, Homo sapiens
  CDR3 for beta chain variable domain of TCR clone 269134 (TRBV7-3, TRBJ1-1)
CASSQDWGAEAFF

SEQ ID NO: 538269 - protein, 15 aa, Homo sapiens
  CDR3 for alpha chain variable domain of TCR clone 269135 (TRAV8-2, TRAJ24)
CVVSDRTDSWGKLQF

SEQ ID NO: 538270 - protein, 15 aa, Homo sapiens
  CDR3 for beta chain variable domain of TCR clone 269135 (TRBV29-1, TRBJ2-7)
CSVEFFDRVSYEQYF

SEQ ID NO: 538271 - protein, 10 aa, Homo sapiens
  CDR3 for alpha chain variable domain of TCR clone 269136 (TRAV12-2, TRAJ52)
RSTSYGKLTF

SEQ ID NO: 538272 - protein, 19 aa, Homo sapiens
  CDR3 for beta chain variable domain of TCR clone 269136 (TRBV25-1, TRBJ2-2)
CAILVYRVDRGRKTGELFF

SEQ ID NO: 538273 - protein, 13 aa, Homo sapiens
  CDR3 for alpha chain variable domain of TCR clone 269137 (TRAV8-1, TRAJ23)
CAVTGVQGGKLTF

SEQ ID NO: 538274 - protein, 14 aa, Homo sapiens
  CDR3 for beta chain variable domain of TCR clone 269137 (TRBV20-1, TRBJ1-1)
CSAQTRIGGTEAFF

SEQ ID NO: 538275 - protein, 14 aa, Homo sapiens
  CDR3 for alpha chain variable domain of TCR clone 269138 (TRAV12-3, TRAJ10)
SHLPLTGGGNKLTF

SEQ ID NO: 538276 - protein, 14 aa, Homo sapiens
  CDR3 for beta chain variable domain of TCR clone 269138 (TRBV7-2, TRBJ2-2)
YASSLNSNTGELFF

SEQ ID NO: 538277 - protein, 15 aa, Homo sapiens
  CDR3 for alpha chain variable domain of TCR clone 269139 (TRAV12-1, TRAJ36)
CVVNDHQTGANNLFF

SEQ ID NO: 538278 - protein, 14 aa, Homo sapiens
  CDR3 for beta chain variable domain of TCR clone 269139 (TRBV10-3, TRBJ2-5)
CAIRTSGGQETQYF

SEQ ID NO: 538279 - protein, 14 aa, Homo sapiens
  CDR3 for alpha chain variable domain of TCR clone 269140 (TRAV12-2, TRAJ33)
CAVKRARSNYQLIW

SEQ ID NO: 538280 - protein, 12 aa, Homo sapiens
  CDR3 for beta chain variable domain of TCR clone 269140 (TRBV24-1, TRBJ2-3)
CATGDSTDTQYF

SEQ ID NO: 538281 - protein, 17 aa, Homo sapiens
  CDR3 for alpha chain variable domain of TCR clone 269141 (TRAV8-3, TRAJ8)
CAVGPNEHRLSETCIWK

SEQ ID NO: 538282 - protein, 13 aa, Homo sapiens
  CDR3 for beta chain variable domain of TCR clone 269141 (TRBV10-2, TRBJ2-3)
CASSESGDHTQYF

SEQ ID NO: 538283 - protein, 11 aa, Homo sapiens
  CDR3 for alpha chain variable domain of TCR clone 269142 (TRAV21, TRAJ34)
CAHYNTDKLIF

SEQ ID NO: 538284 - protein, 13 aa, Homo sapiens
  CDR3 for beta chain variable domain of TCR clone 269142 (TRBV7-6, TRBJ1-2)
CASSLAADYGYTV

SEQ ID NO: 538285 - protein, 14 aa, Homo sapiens
  CDR3 for alpha chain variable domain of TCR clone 269143 (TRAV1-2, TRAJ16)
CAVNRFSDGQKLPF

SEQ ID NO: 538286 - protein, 13 aa, Homo sapiens
  CDR3 for beta chain variable domain of TCR clone 269143 (TRBV20-1, TRBJ2-2)
CSALSGGAGELFF

SEQ ID NO: 538287 - protein, 14 aa, Homo sapiens
  CDR3 for alpha chain variable domain of TCR clone 269144 (TRAV21, TRAJ45)
CAVSSGGDADGLTF

SEQ ID NO: 538288 - protein, 15 aa, Homo sapiens
  CDR3 for beta chain variable domain of TCR clone 269144 (TRBV6-1, TRBJ2-4)
CASSEAVWTINIQYF

SEQ ID NO: 538289 - protein, 15 aa, Homo sapiens
  CDR3 for alpha chain variable domain of TCR clone 269145 (TRAV8-3, TRAJ20)
CAVEAKGSNDYKLSF

SEQ ID NO: 538290 - protein, 16 aa, Homo sapiens
  CDR3 for beta chain variable domain of TCR clone 269145 (TRBV4-1, TRBJ2-3)
CASSQSTSGAEDTQYF

SEQ ID NO: 538291 - protein, 14 aa, Homo sapiens
  CDR3 for alpha chain variable domain of TCR clone 269146 (TRAV8-2, TRAJ45)
CVVSAGGGADGLNF

SEQ ID NO: 538292 - protein, 12 aa, Homo sapiens
  CDR3 for beta chain variable domain of TCR clone 269146 (TRBV12-4, TRBJ2-1)
CASSLVRVEQFF

SEQ ID NO: 538293 - protein, 16 aa, Homo sapiens
  CDR3 for alpha chain variable domain of TCR clone 269147 (TRAV38-2/DV8, TRAJ57)
CAYRSVGQGGSEKLVF

SEQ ID NO: 538294 - protein, 13 aa, Homo sapiens
  CDR3 for beta chain variable domain of TCR clone 269147 (TRBV10-3, TRBJ2-7)
CASKLAVNYEQYF

SEQ ID NO: 538295 - protein, 13 aa, Homo sapiens
  CDR3 for alpha chain variable domain of TCR clone 269148 (TRAV27, TRAJ6)
CSGGTRGSYIPTF

SEQ ID NO: 538296 - protein, 14 aa, Homo sapiens
  CDR3 for beta chain variable domain of TCR clone 269148 (TRBV6-3, TRBJ1-1)
CASSYQRRDTEAFF

SEQ ID NO: 538297 - protein, 12 aa, Homo sapiens
  CDR3 for alpha chain variable domain of TCR clone 269149 (TRAV2, TRAJ31)
CAVEDNNARLMF

SEQ ID NO: 538298 - protein, 13 aa, Homo sapiens
  CDR3 for beta chain variable domain of TCR clone 269149 (TRBV7-2, TRBJ2-4)
CASSREHANIQYF

SEQ ID NO: 538299 - protein, 13 aa, Homo sapiens
  CDR3 for alpha chain variable domain of TCR clone 269150 (TRAV13-1, TRAJ5)
CAARVTGRRALTS

SEQ ID NO: 538300 - protein, 15 aa, Homo sapiens
  CDR3 for beta chain variable domain of TCR clone 269150 (TRBV7-9, TRBJ2-7)
CASSPGGALTYEQYF

SEQ ID NO: 538301 - protein, 14 aa, Homo sapiens
  CDR3 for alpha chain variable domain of TCR clone 269151 (TRAV12-3, TRAJ10)
SHLPLTGGGNKLTF

SEQ ID NO: 538302 - protein, 14 aa, Homo sapiens
  CDR3 for beta chain variable domain of TCR clone 269151 (TRBV7-2, TRBJ2-2)
CASSVNSNTGELFF

SEQ ID NO: 538303 - protein, 16 aa, Homo sapiens
  CDR3 for alpha chain variable domain of TCR clone 269152 (TRAV4, TRAJ5)
CLVGPDHGHGQESTYF

SEQ ID NO: 538304 - protein, 17 aa, Homo sapiens
  CDR3 for beta chain variable domain of TCR clone 269152 (TRBV11-3, TRBJ2-1)
CASSLYPPGVEYNEQFF

SEQ ID NO: 538305 - protein, 13 aa, Homo sapiens
  CDR3 for alpha chain variable domain of TCR clone 269153 (TRAV13-1, TRAJ39)
CAASIWAGNMLTF

SEQ ID NO: 538306 - protein, 15 aa, Homo sapiens
  CDR3 for beta chain variable domain of TCR clone 269153 (TRBV7-9, TRBJ2-7)
CASSLALAEAYEQYF

SEQ ID NO: 538307 - protein, 16 aa, Homo sapiens
  CDR3 for alpha chain variable domain of TCR clone 269154 (TRAV3, TRAJ10)
CAVGDMRAGGGNKLTF

SEQ ID NO: 538308 - protein, 15 aa, Homo sapiens
  CDR3 for beta chain variable domain of TCR clone 269154 (TRBV9, TRBJ1-6)
CASSVAGTGDSPLHF

SEQ ID NO: 538309 - protein, 13 aa, Homo sapiens
  CDR3 for alpha chain variable domain of TCR clone 269155 (TRAV27, TRAJ45)
CRSSGGGADGLTF

SEQ ID NO: 538310 - protein, 17 aa, Homo sapiens
  CDR3 for beta chain variable domain of TCR clone 269155 (TRBV11-2, TRBJ2-1)
CDSSLSPPGVEYNEQFF

SEQ ID NO: 538311 - protein, 17 aa, Homo sapiens
  CDR3 for alpha chain variable domain of TCR clone 269156 (TRAV13-1, TRAJ31)
CAPRDRLMFGDGTQLVV

SEQ ID NO: 538312 - protein, 16 aa, Homo sapiens
  CDR3 for beta chain variable domain of TCR clone 269156 (TRBV9, TRBJ2-1)
CASSVGGGGNYNEQFF

SEQ ID NO: 538313 - protein, 12 aa, Homo sapiens
  CDR3 for alpha chain variable domain of TCR clone 269157 (TRAV2, TRAJ31)
CAVEEANARLMF

SEQ ID NO: 538314 - protein, 18 aa, Homo sapiens
  CDR3 for beta chain variable domain of TCR clone 269157 (TRBV7-9, TRBJ2-3)
CASSLDLAGLATPDTQYF

SEQ ID NO: 538315 - protein, 11 aa, Homo sapiens
  CDR3 for alpha chain variable domain of TCR clone 269158 (TRAV2, TRAJ23)
CAVETRGKLIF

SEQ ID NO: 538316 - protein, 14 aa, Homo sapiens
  CDR3 for beta chain variable domain of TCR clone 269158 (TRBV19, TRBJ2-7)
CASSETGATYEQYF

SEQ ID NO: 538317 - protein, 12 aa, Homo sapiens
  CDR3 for alpha chain variable domain of TCR clone 269159 (TRAV17, TRAJ22)
CATSGSARQLTF

SEQ ID NO: 538318 - protein, 13 aa, Homo sapiens
  CDR3 for beta chain variable domain of TCR clone 269159 (TRBV7-9, TRBJ1-2)
CASSLKQNYGYTF

SEQ ID NO: 538319 - protein, 14 aa, Homo sapiens
  CDR3 for alpha chain variable domain of TCR clone 269160 (TRAV8-4, TRAJ17)
CAVSDQAAGNKLTF

SEQ ID NO: 538320 - protein, 15 aa, Homo sapiens
  CDR3 for beta chain variable domain of TCR clone 269160 (TRBV7-2, TRBJ1-2)
CASSLAPDRGLCYTF

SEQ ID NO: 538321 - protein, 14 aa, Homo sapiens
  CDR3 for alpha chain variable domain of TCR clone 269161 (TRAV13-1, TRAJ44)
CAAKATGIASKLTF

SEQ ID NO: 538322 - protein, 17 aa, Homo sapiens
  CDR3 for beta chain variable domain of TCR clone 269161 (TRBV7-3, TRBJ2-3)
RASSLMKRMRGADTQYF

SEQ ID NO: 538323 - protein, 14 aa, Homo sapiens
  CDR3 for alpha chain variable domain of TCR clone 269162 (TRAV2, TRAJ9)
CAVDPNTGGFKTIF

SEQ ID NO: 538324 - protein, 17 aa, Homo sapiens
  CDR3 for beta chain variable domain of TCR clone 269162 (TRBV10-3, TRBJ1-4)
CAISESYGRWKNEKLFF

SEQ ID NO: 538325 - protein, 16 aa, Homo sapiens
  CDR3 for alpha chain variable domain of TCR clone 269163 (TRAV38-2/DV8, TRAJ57)
CAYRSAGQGGSEKLVF

SEQ ID NO: 538326 - protein, 14 aa, Homo sapiens
  CDR3 for beta chain variable domain of TCR clone 269163 (TRBV4-2, TRBJ2-3)
CASRETRAPGMQYF

SEQ ID NO: 538327 - protein, 14 aa, Homo sapiens
  CDR3 for alpha chain variable domain of TCR clone 269164 (TRAV26-1, TRAJ26)
CIVRATFLGQKFVF

SEQ ID NO: 538328 - protein, 16 aa, Homo sapiens
  CDR3 for beta chain variable domain of TCR clone 269164 (TRBV12-4, TRBJ2-7)
CASRSTGTGPSYEQYF

SEQ ID NO: 538329 - protein, 17 aa, Homo sapiens
  CDR3 for alpha chain variable domain of TCR clone 269165 (TRAV4, TRAJ42)
CCVLLPRGWGSQGNLIF

SEQ ID NO: 538330 - protein, 16 aa, Homo sapiens
  CDR3 for beta chain variable domain of TCR clone 269165 (TRBV5-1, TRBJ2-3)
CASSLQGRVGADTQYF

SEQ ID NO: 538331 - protein, 13 aa, Homo sapiens
  CDR3 for alpha chain variable domain of TCR clone 269166 (TRAV12-3, TRAJ29)
CAMTLSGNTPLVF

SEQ ID NO: 538332 - protein, 15 aa, Homo sapiens
  CDR3 for beta chain variable domain of TCR clone 269166 (TRBV5-1, TRBJ2-6)
CASSLDPSGANGLTF

SEQ ID NO: 538333 - protein, 13 aa, Homo sapiens
  CDR3 for alpha chain variable domain of TCR clone 269167 (TRAV8-6, TRAJ9)
CAVWDTGGFTTIF

SEQ ID NO: 538334 - protein, 14 aa, Homo sapiens
  CDR3 for beta chain variable domain of TCR clone 269167 (TRBV2, TRBJ2-1)
CASSEALIYNEQFF

SEQ ID NO: 538335 - protein, 15 aa, Homo sapiens
  CDR3 for alpha chain variable domain of TCR clone 269168 (TRAV26-1, TRAJ23)
CIVRVAGYQGGKLIC

SEQ ID NO: 538336 - protein, 18 aa, Homo sapiens
  CDR3 for beta chain variable domain of TCR clone 269168 (TRBV28, TRBJ2-1)
CASSSTSGRANSYNEQFF

SEQ ID NO: 538337 - protein, 16 aa, Homo sapiens
  CDR3 for alpha chain variable domain of TCR clone 269169 (TRAV9-2, TRAJ45)
CALSDQEGGGADGLTF

SEQ ID NO: 538338 - protein, 18 aa, Homo sapiens
  CDR3 for beta chain variable domain of TCR clone 269169 (TRBV20-1, TRBJ2-3)
CSASGLAGGPGTTDTQYF

SEQ ID NO: 538339 - protein, 14 aa, Homo sapiens
  CDR3 for alpha chain variable domain of TCR clone 269170 (TRAV9-2, TRAJ39)
CALYIYNAGNMLTF

SEQ ID NO: 538340 - protein, 14 aa, Homo sapiens
  CDR3 for beta chain variable domain of TCR clone 269170 (TRBV6-5, TRBJ2-7)
CASSSGVPPYEQYF

SEQ ID NO: 538341 - protein, 14 aa, Homo sapiens
  CDR3 for alpha chain variable domain of TCR clone 269171 (TRAV23/DV6, TRAJ6)
CAASRSGGSYLPTF

SEQ ID NO: 538342 - protein, 17 aa, Homo sapiens
  CDR3 for beta chain variable domain of TCR clone 269171 (TRBV20-1, TRBJ2-1)
CSASASGLAGSYNEQFF

SEQ ID NO: 538343 - protein, 13 aa, Homo sapiens
  CDR3 for alpha chain variable domain of TCR clone 269172 (TRAV13-2, TRAJ48)
CAEMYFGTEKLTF

SEQ ID NO: 538344 - protein, 15 aa, Homo sapiens
  CDR3 for beta chain variable domain of TCR clone 269172 (TRBV7-9, TRBJ1-6)
CASSSPGRGNSPLHF

SEQ ID NO: 538345 - protein, 14 aa, Homo sapiens
  CDR3 for alpha chain variable domain of TCR clone 269173 (TRAV3, TRAJ7)
CAVREEEREQQTRY

SEQ ID NO: 538346 - protein, 12 aa, Homo sapiens
  CDR3 for beta chain variable domain of TCR clone 269173 (TRBV7-8, TRBJ2-7)
CASSLGDREQYF

SEQ ID NO: 538347 - protein, 15 aa, Homo sapiens
  CDR3 for alpha chain variable domain of TCR clone 269174 (TRAV12-2, TRAJ23)
CAVNTLYNQGGKLIF

SEQ ID NO: 538348 - protein, 18 aa, Homo sapiens
  CDR3 for beta chain variable domain of TCR clone 269174 (TRBV4-1, TRBJ1-5)
CASSQDPRGQGLNQPQHF

SEQ ID NO: 538349 - protein, 12 aa, Homo sapiens
  CDR3 for alpha chain variable domain of TCR clone 269175 (TRAV12-2, TRAJ43)
RAVNVNNNDMRF

SEQ ID NO: 538350 - protein, 14 aa, Homo sapiens
  CDR3 for beta chain variable domain of TCR clone 269175 (TRBV12-5, TRBJ2-5)
CASGSRTHQETQYF

SEQ ID NO: 538351 - protein, 17 aa, Homo sapiens
  CDR3 for alpha chain variable domain of TCR clone 269176 (TRAV36/DV7, TRAJ52)
CAVAQRAGGTSYGKLTF

SEQ ID NO: 538352 - protein, 13 aa, Homo sapiens
  CDR3 for beta chain variable domain of TCR clone 269176 (TRBV15, TRBJ1-6)
CATSGGLNSPLLF

SEQ ID NO: 538353 - protein, 14 aa, Homo sapiens
  CDR3 for alpha chain variable domain of TCR clone 269177 (TRAV1-2, TRAJ8)
CAVREDTGFQKLVF

SEQ ID NO: 538354 - protein, 15 aa, Homo sapiens
  CDR3 for beta chain variable domain of TCR clone 269177 (TRBV5-4, TRBJ2-1)
CASSSGTSGINEQFF

SEQ ID NO: 538355 - protein, 16 aa, Homo sapiens
  CDR3 for alpha chain variable domain of TCR clone 269178 (TRAV23/DV6, TRAJ34)
CAASGALSYNTDKLIF

SEQ ID NO: 538356 - protein, 15 aa, Homo sapiens
  CDR3 for beta chain variable domain of TCR clone 269178 (TRBV9, TRBJ1-2)
CASSVVGQANYGYTF

SEQ ID NO: 538357 - protein, 13 aa, Homo sapiens
  CDR3 for alpha chain variable domain of TCR clone 269179 (TRAV36/DV7, TRAJ49)
CAVEANTGNQVYF

SEQ ID NO: 538358 - protein, 14 aa, Homo sapiens
  CDR3 for beta chain variable domain of TCR clone 269179 (TRBV20-1, TRBJ2-5)
CSDSSGRAAETQYF

SEQ ID NO: 538359 - protein, 17 aa, Homo sapiens
  CDR3 for alpha chain variable domain of TCR clone 269180 (TRAV3, TRAJ42)
CAVRDRDYGGSQGNLIL

SEQ ID NO: 538360 - protein, 15 aa, Homo sapiens
  CDR3 for beta chain variable domain of TCR clone 269180 (TRBV6-6, TRBJ2-7)
CASSYSYGGAYEQYF

SEQ ID NO: 538361 - protein, 13 aa, Homo sapiens
  CDR3 for alpha chain variable domain of TCR clone 269181 (TRAV27, TRAJ41)
CAGEGNSGYALNF

SEQ ID NO: 538362 - protein, 16 aa, Homo sapiens
  CDR3 for beta chain variable domain of TCR clone 269181 (TRBV29-1, TRBJ2-7)
CSVEVVGTSGSYEQSF

SEQ ID NO: 538363 - protein, 12 aa, Homo sapiens
  CDR3 for alpha chain variable domain of TCR clone 269182 (TRAV17, TRAJ20)
CATDSNDYKLSF

SEQ ID NO: 538364 - protein, 16 aa, Homo sapiens
  CDR3 for beta chain variable domain of TCR clone 269182 (TRBV7-2, TRBJ1-2)
CASSSNQDRRGHGYTC

SEQ ID NO: 538365 - protein, 12 aa, Homo sapiens
  CDR3 for alpha chain variable domain of TCR clone 269183 (TRAV12-3, TRAJ17)
CAMTLTGNKLTF

SEQ ID NO: 538366 - protein, 16 aa, Homo sapiens
  CDR3 for beta chain variable domain of TCR clone 269183 (TRBV7-3, TRBJ2-1)
SASSLEGYRSYNEQFF

SEQ ID NO: 538367 - protein, 13 aa, Homo sapiens
  CDR3 for alpha chain variable domain of TCR clone 269184 (TRAV2, TRAJ40)
CAVVTSGTSKYIF

SEQ ID NO: 538368 - protein, 16 aa, Homo sapiens
  CDR3 for beta chain variable domain of TCR clone 269184 (TRBV19, TRBJ2-2)
CASRSPGTGATGELFF

SEQ ID NO: 538369 - protein, 11 aa, Homo sapiens
  CDR3 for alpha chain variable domain of TCR clone 269185 (TRAV1-2, TRAJ40)
CAVPGTYKYIF

SEQ ID NO: 538370 - protein, 15 aa, Homo sapiens
  CDR3 for beta chain variable domain of TCR clone 269185 (TRBV6-5, TRBJ2-7)
CASSRTSGFSYEQYF

SEQ ID NO: 538371 - protein, 13 aa, Homo sapiens
  CDR3 for alpha chain variable domain of TCR clone 269186 (TRAV13-2, TRAJ13)
CAERPGGYQKVTF

SEQ ID NO: 538372 - protein, 14 aa, Homo sapiens
  CDR3 for beta chain variable domain of TCR clone 269186 (TRBV20-1, TRBJ2-3)
CSAPELAGVGEQYF

SEQ ID NO: 538373 - protein, 15 aa, Homo sapiens
  CDR3 for alpha chain variable domain of TCR clone 269187 (TRAV35, TRAJ33)
CAGQPPRYSNYQLIL

SEQ ID NO: 538374 - protein, 16 aa, Homo sapiens
  CDR3 for beta chain variable domain of TCR clone 269187 (TRBV7-9, TRBJ2-3)
CASSPWREVGTDTQYF

SEQ ID NO: 538375 - protein, 12 aa, Homo sapiens
  CDR3 for alpha chain variable domain of TCR clone 269188 (TRAV8-1, TRAJ31)
CAVNNNNARLMF

SEQ ID NO: 538376 - protein, 15 aa, Homo sapiens
  CDR3 for beta chain variable domain of TCR clone 269188 (TRBV20-1, TRBJ2-2)
CSARGGQGNTGELFF

SEQ ID NO: 538377 - protein, 15 aa, Homo sapiens
  CDR3 for alpha chain variable domain of TCR clone 269189 (TRAV23/DV6, TRAJ18)
CAARYRGSTLGRRYF

SEQ ID NO: 538378 - protein, 13 aa, Homo sapiens
  CDR3 for beta chain variable domain of TCR clone 269189 (TRBV7-2, TRBJ2-7)
CASSSPSGSGQYF

SEQ ID NO: 538379 - protein, 13 aa, Homo sapiens
  CDR3 for alpha chain variable domain of TCR clone 269190 (TRAV13-2, TRAJ13)
CADLSGGYQKVTF

SEQ ID NO: 538380 - protein, 17 aa, Homo sapiens
  CDR3 for beta chain variable domain of TCR clone 269190 (TRBV19, TRBJ1-1)
CASSIGGAGTLKLSLDK

SEQ ID NO: 538381 - protein, 13 aa, Homo sapiens
  CDR3 for alpha chain variable domain of TCR clone 269191 (TRAV2, TRAJ16)
CAVERSDGQKLLL

SEQ ID NO: 538382 - protein, 15 aa, Homo sapiens
  CDR3 for beta chain variable domain of TCR clone 269191 (TRBV20-1, TRBJ2-5)
CSAIKGQGSQETQYF

SEQ ID NO: 538383 - protein, 12 aa, Homo sapiens
  CDR3 for alpha chain variable domain of TCR clone 269192 (TRAV17, TRAJ12)
CATLRSSYKLIF

SEQ ID NO: 538384 - protein, 15 aa, Homo sapiens
  CDR3 for beta chain variable domain of TCR clone 269192 (TRBV9, TRBJ1-6)
CASSVAGAGDSPLHF

SEQ ID NO: 538385 - protein, 18 aa, Homo sapiens
  CDR3 for alpha chain variable domain of TCR clone 269193 (TRAV21, TRAJ52)
CAVRPSPAGGTSYGKLTF

SEQ ID NO: 538386 - protein, 19 aa, Homo sapiens
  CDR3 for beta chain variable domain of TCR clone 269193 (TRBV7-2, TRBJ2-3)
RASSFLSRNWGGGTDTQYF

SEQ ID NO: 538387 - protein, 15 aa, Homo sapiens
  CDR3 for alpha chain variable domain of TCR clone 269194 (TRAV8-3, TRAJ45)
CASSYSGGGADGLTF

SEQ ID NO: 538388 - protein, 13 aa, Homo sapiens
  CDR3 for beta chain variable domain of TCR clone 269194 (TRBV7-8, TRBJ2-7)
CASSFAGLYEQYF

SEQ ID NO: 538389 - protein, 16 aa, Homo sapiens
  CDR3 for alpha chain variable domain of TCR clone 269195 (TRAV17, TRAJ17)
CATALPEEAAGNKLTF

SEQ ID NO: 538390 - protein, 12 aa, Homo sapiens
  CDR3 for beta chain variable domain of TCR clone 269195 (TRBV4-2, TRBJ2-5)
CASGGAQETQYF

SEQ ID NO: 538391 - protein, 17 aa, Homo sapiens
  CDR3 for alpha chain variable domain of TCR clone 269196 (TRAV13-1, TRAJ28)
CAASPPYSGAGSYQLTF

SEQ ID NO: 538392 - protein, 14 aa, Homo sapiens
  CDR3 for beta chain variable domain of TCR clone 269196 (TRBV5-1, TRBJ2-5)
CASSLAGKQETQYF

SEQ ID NO: 538393 - protein, 11 aa, Homo sapiens
  CDR3 for alpha chain variable domain of TCR clone 269197 (TRAV2, TRAJ33)
CAVESNYQLIW

SEQ ID NO: 538394 - protein, 16 aa, Homo sapiens
  CDR3 for beta chain variable domain of TCR clone 269197 (TRBV19, TRBJ2-7)
CASSPAGSGSLNEQYF

SEQ ID NO: 538395 - protein, 14 aa, Homo sapiens
  CDR3 for alpha chain variable domain of TCR clone 269198 (TRAV12-2, TRAJ24)
CAVTPADSWGKWQF

SEQ ID NO: 538396 - protein, 12 aa, Homo sapiens
  CDR3 for beta chain variable domain of TCR clone 269198 (TRBV19, TRBJ2-1)
CASSQISNEQFF

SEQ ID NO: 538397 - protein, 16 aa, Homo sapiens
  CDR3 for alpha chain variable domain of TCR clone 269199 (TRAV3, TRAJ37)
CAVRVRGSGNTGKLTL

SEQ ID NO: 538398 - protein, 11 aa, Homo sapiens
  CDR3 for beta chain variable domain of TCR clone 269199 (TRBV11-2, TRBJ2-2)
CASSLPGELFF

SEQ ID NO: 538399 - protein, 15 aa, Homo sapiens
  CDR3 for alpha chain variable domain of TCR clone 269200 (TRAV8-6, TRAJ23)
CAVRLIYNQGGKLIF

SEQ ID NO: 538400 - protein, 18 aa, Homo sapiens
  CDR3 for beta chain variable domain of TCR clone 269200 (TRBV4-1, TRBJ1-5)
CASSQDPRGQGLNQPQHF

SEQ ID NO: 538401 - protein, 16 aa, Homo sapiens
  CDR3 for alpha chain variable domain of TCR clone 269201 (TRAV38-2/DV8, TRAJ57)
CAYRRRAQGGSEKLVF

SEQ ID NO: 538402 - protein, 16 aa, Homo sapiens
  CDR3 for beta chain variable domain of TCR clone 269201 (TRBV27, TRBJ2-2)
CASSFRGLVRTGELFF

SEQ ID NO: 538403 - protein, 10 aa, Homo sapiens
  CDR3 for alpha chain variable domain of TCR clone 269202 (TRAV26-1, TRAJ40)
CIAGTYKYIV

SEQ ID NO: 538404 - protein, 15 aa, Homo sapiens
  CDR3 for beta chain variable domain of TCR clone 269202 (TRBV15, TRBJ2-7)
CATSRGVTPTYEQYF

SEQ ID NO: 538405 - protein, 14 aa, Homo sapiens
  CDR3 for alpha chain variable domain of TCR clone 269203 (TRAV12-3, TRAJ10)
SHLPLTGGGNKLTF

SEQ ID NO: 538406 - protein, 14 aa, Homo sapiens
  CDR3 for beta chain variable domain of TCR clone 269203 (TRBV4-1, TRBJ1-6)
CASSPGSDSSPLHF

SEQ ID NO: 538407 - protein, 22 aa, Homo sapiens
  CDR3 for alpha chain variable domain of TCR clone 269204 (TRAV1-1, TRAJ30)
CAVRDQTEMTRSSLEKGHDFIF

SEQ ID NO: 538408 - protein, 14 aa, Homo sapiens
  CDR3 for beta chain variable domain of TCR clone 269204 (TRBV11-3, TRBJ2-1)
CASSATTSGSIQFF

SEQ ID NO: 538409 - protein, 14 aa, Homo sapiens
  CDR3 for alpha chain variable domain of TCR clone 269205 (TRAV17, TRAJ37)
RATDGSSNTGKLIF

SEQ ID NO: 538410 - protein, 13 aa, Homo sapiens
  CDR3 for beta chain variable domain of TCR clone 269205 (TRBV11-2, TRBJ2-1)
CASSLDLVNEKFF

SEQ ID NO: 538411 - protein, 15 aa, Homo sapiens
  CDR3 for alpha chain variable domain of TCR clone 269206 (TRAV17, TRAJ35)
CATAFVIGFGNVLHC

SEQ ID NO: 538412 - protein, 16 aa, Homo sapiens
  CDR3 for beta chain variable domain of TCR clone 269206 (TRBV11-2, TRBJ2-7)
CASSPLAGGPRYKQYF

SEQ ID NO: 538413 - protein, 15 aa, Homo sapiens
  CDR3 for alpha chain variable domain of TCR clone 269207 (TRAV29/DV5, TRAJ42)
CAAKTDGGSQGNLLF

SEQ ID NO: 538414 - protein, 17 aa, Homo sapiens
  CDR3 for beta chain variable domain of TCR clone 269207 (TRBV18, TRBJ2-3)
CASSPFGDGGFTDTQYF

SEQ ID NO: 538415 - protein, 13 aa, Homo sapiens
  CDR3 for alpha chain variable domain of TCR clone 269208 (TRAV13-1, TRAJ11)
CSAVLVGYSTLTF

SEQ ID NO: 538416 - protein, 17 aa, Homo sapiens
  CDR3 for beta chain variable domain of TCR clone 269208 (TRBV25-1, TRBJ2-7)
CASSDARVVFSSYEQYF

SEQ ID NO: 538417 - protein, 14 aa, Homo sapiens
  CDR3 for alpha chain variable domain of TCR clone 269209 (TRAV8-1, TRAJ39)
CAVNASNAGNMLTF

SEQ ID NO: 538418 - protein, 13 aa, Homo sapiens
  CDR3 for beta chain variable domain of TCR clone 269209 (TRBV12-4, TRBJ2-5)
CASIPGTEETQYF

SEQ ID NO: 538419 - protein, 14 aa, Homo sapiens
  CDR3 for alpha chain variable domain of TCR clone 269210 (TRAV17, TRAJ15)
CATTTNHAGTALIF

SEQ ID NO: 538420 - protein, 16 aa, Homo sapiens
  CDR3 for beta chain variable domain of TCR clone 269210 (TRBV4-1, TRBJ2-7)
CASSRGDILNSYEQYF

SEQ ID NO: 538421 - protein, 13 aa, Homo sapiens
  CDR3 for alpha chain variable domain of TCR clone 269211 (TRAV12-3, TRAJ15)
CAMSDQAGTALLF

SEQ ID NO: 538422 - protein, 13 aa, Homo sapiens
  CDR3 for beta chain variable domain of TCR clone 269211 (TRBV20-1, TRBJ2-1)
CSAQDGGPNEQFF

SEQ ID NO: 538423 - protein, 13 aa, Homo sapiens
  CDR3 for alpha chain variable domain of TCR clone 269212 (TRAV21, TRAJ27)
CAARPGNAGKSTL

SEQ ID NO: 538424 - protein, 13 aa, Homo sapiens
  CDR3 for beta chain variable domain of TCR clone 269212 (TRBV7-3, TRBJ2-7)
CASSQAGGYEQYF

SEQ ID NO: 538425 - protein, 14 aa, Homo sapiens
  CDR3 for alpha chain variable domain of TCR clone 269213 (TRAV1-2, TRAJ16)
CAVNQFSDGQKLLF

SEQ ID NO: 538426 - protein, 14 aa, Homo sapiens
  CDR3 for beta chain variable domain of TCR clone 269213 (TRBV7-3, TRBJ1-1)
CASSLKGGNTEAFF

SEQ ID NO: 538427 - protein, 13 aa, Homo sapiens
  CDR3 for alpha chain variable domain of TCR clone 269214 (TRAV30, TRAJ6)
CGFIEGGSYIPTF

SEQ ID NO: 538428 - protein, 13 aa, Homo sapiens
  CDR3 for beta chain variable domain of TCR clone 269214 (TRBV5-4, TRBJ2-5)
CASSPVSQEAQYF

SEQ ID NO: 538429 - protein, 17 aa, Homo sapiens
  CDR3 for alpha chain variable domain of TCR clone 269215 (TRAV2, TRAJ22)
ILQLREADAAEQRQLTF

SEQ ID NO: 538430 - protein, 16 aa, Homo sapiens
  CDR3 for beta chain variable domain of TCR clone 269215 (TRBV2, TRBJ2-5)
CASSETQGVGEETQYF

SEQ ID NO: 538431 - protein, 15 aa, Homo sapiens
  CDR3 for alpha chain variable domain of TCR clone 269216 (TRAV20, TRAJ28)
CAVQYSWAGSYQLTF

SEQ ID NO: 538432 - protein, 12 aa, Homo sapiens
  CDR3 for beta chain variable domain of TCR clone 269216 (TRBV12-4, TRBJ1-3)
CASRASGNTIYC

SEQ ID NO: 538433 - protein, 13 aa, Homo sapiens
  CDR3 for alpha chain variable domain of TCR clone 269217 (TRAV20, TRAJ26)
CAVPTSYDQNFVF

SEQ ID NO: 538434 - protein, 16 aa, Homo sapiens
  CDR3 for beta chain variable domain of TCR clone 269217 (TRBV28, TRBJ2-7)
CASSSPQGRDVYEQYF

SEQ ID NO: 538435 - protein, 11 aa, Homo sapiens
  CDR3 for alpha chain variable domain of TCR clone 269218 (TRAV12-2, TRAJ33)
CAVGSNYQLIW

SEQ ID NO: 538436 - protein, 17 aa, Homo sapiens
  CDR3 for beta chain variable domain of TCR clone 269218 (TRBV4-1, TRBJ1-3)
CASSPQRGIRFGNTIYF

SEQ ID NO: 538437 - protein, 15 aa, Homo sapiens
  CDR3 for alpha chain variable domain of TCR clone 269219 (TRAV12-1, TRAJ44)
CVADLPTGTASKLTF

SEQ ID NO: 538438 - protein, 11 aa, Homo sapiens
  CDR3 for beta chain variable domain of TCR clone 269219 (TRBV29-1, TRBJ1-1)
CSVEVNVITFF

SEQ ID NO: 538439 - protein, 15 aa, Homo sapiens
  CDR3 for alpha chain variable domain of TCR clone 269220 (TRAV12-2, TRAJ53)
CAVNGGGGSNYRLTF

SEQ ID NO: 538440 - protein, 13 aa, Homo sapiens
  CDR3 for beta chain variable domain of TCR clone 269220 (TRBV20-1, TRBJ2-5)
CSARYTGEETQYF

SEQ ID NO: 538441 - protein, 17 aa, Homo sapiens
  CDR3 for alpha chain variable domain of TCR clone 269221 (TRAV3, TRAJ13)
CAVRDMRRTGGYQKVNF

SEQ ID NO: 538442 - protein, 14 aa, Homo sapiens
  CDR3 for beta chain variable domain of TCR clone 269221 (TRBV5-1, TRBJ2-7)
CASSLTGSGYEQYF

SEQ ID NO: 538443 - protein, 12 aa, Homo sapiens
  CDR3 for alpha chain variable domain of TCR clone 269222 (TRAV12-2, TRAJ31)
CAVNTPDARLMF

SEQ ID NO: 538444 - protein, 12 aa, Homo sapiens
  CDR3 for beta chain variable domain of TCR clone 269222 (TRBV13, TRBJ2-7)
CASSLQAYEQYF

SEQ ID NO: 538445 - protein, 13 aa, Homo sapiens
  CDR3 for alpha chain variable domain of TCR clone 269223 (TRAV8-4, TRAJ30)
CAVSVNRDDKIIF

SEQ ID NO: 538446 - protein, 13 aa, Homo sapiens
  CDR3 for beta chain variable domain of TCR clone 269223 (TRBV3-1, TRBJ2-2)
CASLARGSGELFY

SEQ ID NO: 538447 - protein, 15 aa, Homo sapiens
  CDR3 for alpha chain variable domain of TCR clone 269224 (TRAV2, TRAJ28)
CAVPYSGAGSYQLTF

SEQ ID NO: 538448 - protein, 17 aa, Homo sapiens
  CDR3 for beta chain variable domain of TCR clone 269224 (TRBV20-1, TRBJ2-4)
CSARDWASGGGENMQYF

SEQ ID NO: 538449 - protein, 10 aa, Homo sapiens
  CDR3 for alpha chain variable domain of TCR clone 269225 (TRAV23/DV6, TRAJ31)
CARGGARLMF

SEQ ID NO: 538450 - protein, 14 aa, Homo sapiens
  CDR3 for beta chain variable domain of TCR clone 269225 (TRBV7-8, TRBJ1-2)
CASSPDSLSYGYTV

SEQ ID NO: 538451 - protein, 12 aa, Homo sapiens
  CDR3 for alpha chain variable domain of TCR clone 269226 (TRAV13-2, TRAJ23)
CAERHRGGKLIF

SEQ ID NO: 538452 - protein, 16 aa, Homo sapiens
  CDR3 for beta chain variable domain of TCR clone 269226 (TRBV4-3, TRBJ2-2)
CASSRLQGSGTGELFF

SEQ ID NO: 538453 - protein, 13 aa, Homo sapiens
  CDR3 for alpha chain variable domain of TCR clone 269227 (TRAV4, TRAJ20)
CLVGSSNDYKPSF

SEQ ID NO: 538454 - protein, 13 aa, Homo sapiens
  CDR3 for beta chain variable domain of TCR clone 269227 (TRBV19, TRBJ2-2)
CASSIWSTGELFF

SEQ ID NO: 538455 - protein, 11 aa, Homo sapiens
  CDR3 for alpha chain variable domain of TCR clone 269228 (TRAV12-2, TRAJ33)
CAVTSNYQLIW

SEQ ID NO: 538456 - protein, 14 aa, Homo sapiens
  CDR3 for beta chain variable domain of TCR clone 269228 (TRBV12-4, TRBJ2-2)
CASNKGANTGELFF

SEQ ID NO: 538457 - protein, 14 aa, Homo sapiens
  CDR3 for alpha chain variable domain of TCR clone 269229 (TRAV2, TRAJ9)
CAVEDRSGGFKTIF

SEQ ID NO: 538458 - protein, 19 aa, Homo sapiens
  CDR3 for beta chain variable domain of TCR clone 269229 (TRBV25-1, TRBJ2-2)
CAILVYREDRGRKTGELFF

SEQ ID NO: 538459 - protein, 13 aa, Homo sapiens
  CDR3 for alpha chain variable domain of TCR clone 269230 (TRAV35, TRAJ21)
CAGQLSNLNKFYF

SEQ ID NO: 538460 - protein, 16 aa, Homo sapiens
  CDR3 for beta chain variable domain of TCR clone 269230 (TRBV12-5, TRBJ2-5)
CASGPRTSGNQETQYF

SEQ ID NO: 538461 - protein, 13 aa, Homo sapiens
  CDR3 for alpha chain variable domain of TCR clone 269231 (TRAV8-3, TRAJ28)
FAVGAVWSYQLTF

SEQ ID NO: 538462 - protein, 14 aa, Homo sapiens
  CDR3 for beta chain variable domain of TCR clone 269231 (TRBV7-2, TRBJ2-7)
CASRSQGAAYEQYF

SEQ ID NO: 538463 - protein, 15 aa, Homo sapiens
  CDR3 for alpha chain variable domain of TCR clone 269232 (TRAV12-2, TRAJ53)
CAVNGGGGSNYKLTF

SEQ ID NO: 538464 - protein, 15 aa, Homo sapiens
  CDR3 for beta chain variable domain of TCR clone 269232 (TRBV13, TRBJ1-2)
CASSLGRQPGYGYTF

SEQ ID NO: 538465 - protein, 12 aa, Homo sapiens
  CDR3 for alpha chain variable domain of TCR clone 269233 (TRAV2, TRAJ26)
CAGSPGRLWSEF

SEQ ID NO: 538466 - protein, 16 aa, Homo sapiens
  CDR3 for beta chain variable domain of TCR clone 269233 (TRBV13, TRBJ2-2)
CASSPRTGERTGELFF

SEQ ID NO: 538467 - protein, 15 aa, Homo sapiens
  CDR3 for alpha chain variable domain of TCR clone 269234 (TRAV12-3, TRAJ42)
CAMITSVGSQGNLIF

SEQ ID NO: 538468 - protein, 13 aa, Homo sapiens
  CDR3 for beta chain variable domain of TCR clone 269234 (TRBV7-2, TRBJ1-1)
CASSSQGVTEAFF

SEQ ID NO: 538469 - protein, 14 aa, Homo sapiens
  CDR3 for alpha chain variable domain of TCR clone 269235 (TRAV20, TRAJ42)
CAVQAGGSQGNLIF

SEQ ID NO: 538470 - protein, 18 aa, Homo sapiens
  CDR3 for beta chain variable domain of TCR clone 269235 (TRBV6-6, TRBJ1-5)
CASNRGWDPTGSNQPQHF

SEQ ID NO: 538471 - protein, 16 aa, Homo sapiens
  CDR3 for alpha chain variable domain of TCR clone 269236 (TRAV30, TRAJ24)
CGTETVDADSWGKFQF

SEQ ID NO: 538472 - protein, 16 aa, Homo sapiens
  CDR3 for beta chain variable domain of TCR clone 269236 (TRBV29-1, TRBJ2-7)
CSVEDAEDGTAYEQYF

SEQ ID NO: 538473 - protein, 13 aa, Homo sapiens
  CDR3 for alpha chain variable domain of TCR clone 269237 (TRAV12-1, TRAJ6)
CVVFPGVSYIPTF

SEQ ID NO: 538474 - protein, 14 aa, Homo sapiens
  CDR3 for beta chain variable domain of TCR clone 269237 (TRBV20-1, TRBJ1-3)
CSASPTGAGNTIYF

SEQ ID NO: 538475 - protein, 15 aa, Homo sapiens
  CDR3 for alpha chain variable domain of TCR clone 269238 (TRAV12-2, TRAJ43)
CAFDMRFGAGTRLTV

SEQ ID NO: 538476 - protein, 15 aa, Homo sapiens
  CDR3 for beta chain variable domain of TCR clone 269238 (TRBV20-1, TRBJ2-7)
CSARDRGSGMDEQYV

SEQ ID NO: 538477 - protein, 18 aa, Homo sapiens
  CDR3 for alpha chain variable domain of TCR clone 269239 (TRAV13-1, TRAJ52)
CAAKNPNAGGTSYGKLTF

SEQ ID NO: 538478 - protein, 18 aa, Homo sapiens
  CDR3 for beta chain variable domain of TCR clone 269239 (TRBV20-1, TRBJ2-6)
CSAETTPTHGSGANVLTF

SEQ ID NO: 538479 - protein, 16 aa, Homo sapiens
  CDR3 for alpha chain variable domain of TCR clone 269240 (TRAV3, TRAJ13)
CAVRDFESGGYQKVTF

SEQ ID NO: 538480 - protein, 16 aa, Homo sapiens
  CDR3 for beta chain variable domain of TCR clone 269240 (TRBV27, TRBJ2-5)
CASSYGPGGQKEAQYF

SEQ ID NO: 538481 - protein, 11 aa, Homo sapiens
  CDR3 for alpha chain variable domain of TCR clone 269241 (TRAV3, TRAJ21)
CAVGNFNKFYF

SEQ ID NO: 538482 - protein, 16 aa, Homo sapiens
  CDR3 for beta chain variable domain of TCR clone 269241 (TRBV19, TRBJ2-1)
CASGKAGPSSDNEQFF

SEQ ID NO: 538483 - protein, 15 aa, Homo sapiens
  CDR3 for alpha chain variable domain of TCR clone 269242 (TRAV4, TRAJ39)
CLVGPNNNAGNMLPF

SEQ ID NO: 538484 - protein, 14 aa, Homo sapiens
  CDR3 for beta chain variable domain of TCR clone 269242 (TRBV11-2, TRBJ2-5)
CASSRTGGIEPQYC

SEQ ID NO: 538485 - protein, 12 aa, Homo sapiens
  CDR3 for alpha chain variable domain of TCR clone 269243 (TRAV16, TRAJ10)
CSRTGGGNKLTF

SEQ ID NO: 538486 - protein, 15 aa, Homo sapiens
  CDR3 for beta chain variable domain of TCR clone 269243 (TRBV6-3, TRBJ2-7)
CASSSPGRVFYEQYF

SEQ ID NO: 538487 - protein, 15 aa, Homo sapiens
  CDR3 for alpha chain variable domain of TCR clone 269244 (TRAV8-3, TRAJ34)
DAAEYFCAIPGKLTF

SEQ ID NO: 538488 - protein, 15 aa, Homo sapiens
  CDR3 for beta chain variable domain of TCR clone 269244 (TRBV5-7, TRBJ2-1)
CASSRRLAGDNEQFF

SEQ ID NO: 538489 - protein, 14 aa, Homo sapiens
  CDR3 for alpha chain variable domain of TCR clone 269245 (TRAV23/DV6, TRAJ27)
CAASRDTNAGKSTF

SEQ ID NO: 538490 - protein, 15 aa, Homo sapiens
  CDR3 for beta chain variable domain of TCR clone 269245 (TRBV20-1, TRBJ2-7)
CSAESGTSGAYEQYF

SEQ ID NO: 538491 - protein, 15 aa, Homo sapiens
  CDR3 for alpha chain variable domain of TCR clone 269246 (TRAV8-6, TRAJ10)
CAVSDQAGGGNKITF

SEQ ID NO: 538492 - protein, 15 aa, Homo sapiens
  CDR3 for beta chain variable domain of TCR clone 269246 (TRBV3-1, TRBJ2-5)
CASSANLGGPETQYF

SEQ ID NO: 538493 - protein, 14 aa, Homo sapiens
  CDR3 for alpha chain variable domain of TCR clone 269247 (TRAV12-2, TRAJ17)
CAVLFKAAGNKLTF

SEQ ID NO: 538494 - protein, 16 aa, Homo sapiens
  CDR3 for beta chain variable domain of TCR clone 269247 (TRBV7-6, TRBJ2-1)
CASSAPGPSSYNEQFF

SEQ ID NO: 538495 - protein, 12 aa, Homo sapiens
  CDR3 for alpha chain variable domain of TCR clone 269248 (TRAV13-1, TRAJ43)
CAAGRFNNDMRF

SEQ ID NO: 538496 - protein, 14 aa, Homo sapiens
  CDR3 for beta chain variable domain of TCR clone 269248 (TRBV18, TRBJ2-5)
CASSPVVSQETQYF

SEQ ID NO: 538497 - protein, 14 aa, Homo sapiens
  CDR3 for alpha chain variable domain of TCR clone 269249 (TRAV2, TRAJ9)
CAVEDRSGGFKTIF

SEQ ID NO: 538498 - protein, 13 aa, Homo sapiens
  CDR3 for beta chain variable domain of TCR clone 269249 (TRBV29-1, TRBJ1-3)
CSVEGGSGNTMYF

SEQ ID NO: 538499 - protein, 13 aa, Homo sapiens
  CDR3 for alpha chain variable domain of TCR clone 269250 (TRAV22, TRAJ29)
CAVGGSGNTPLVF

SEQ ID NO: 538500 - protein, 13 aa, Homo sapiens
  CDR3 for beta chain variable domain of TCR clone 269250 (TRBV4-2, TRBJ1-1)
CASSKAGNTEAFF

SEQ ID NO: 538501 - protein, 12 aa, Homo sapiens
  CDR3 for alpha chain variable domain of TCR clone 269251 (TRAV8-3, TRAJ5)
CAVGGGLRALTF

SEQ ID NO: 538502 - protein, 15 aa, Homo sapiens
  CDR3 for beta chain variable domain of TCR clone 269251 (TRBV20-1, TRBJ2-1)
CSARGIGGTYNEQFF

SEQ ID NO: 538503 - protein, 11 aa, Homo sapiens
  CDR3 for alpha chain variable domain of TCR clone 269252 (TRAV13-1, TRAJ40)
CAVSGTYKYIF

SEQ ID NO: 538504 - protein, 13 aa, Homo sapiens
  CDR3 for beta chain variable domain of TCR clone 269252 (TRBV19, TRBJ1-5)
CASSRGGNQPQHF

SEQ ID NO: 538505 - protein, 11 aa, Homo sapiens
  CDR3 for alpha chain variable domain of TCR clone 269253 (TRAV26-1, TRAJ27)
CIDTNAGKSTF

SEQ ID NO: 538506 - protein, 18 aa, Homo sapiens
  CDR3 for beta chain variable domain of TCR clone 269253 (TRBV7-9, TRBJ2-6)
CASSFPGAGISGANGLTF

SEQ ID NO: 538507 - protein, 12 aa, Homo sapiens
  CDR3 for alpha chain variable domain of TCR clone 269254 (TRAV12-3, TRAJ39)
CAMTQAGNMLTF

SEQ ID NO: 538508 - protein, 15 aa, Homo sapiens
  CDR3 for beta chain variable domain of TCR clone 269254 (TRBV4-1, TRBJ1-4)
CASSDTGGTNEKLFF

SEQ ID NO: 538509 - protein, 13 aa, Homo sapiens
  CDR3 for alpha chain variable domain of TCR clone 269255 (TRAV17, TRAJ40)
CAGALGGTYKYIF

SEQ ID NO: 538510 - protein, 16 aa, Homo sapiens
  CDR3 for beta chain variable domain of TCR clone 269255 (TRBV7-2, TRBJ1-4)
CASSLAPGRRDDKLFF

SEQ ID NO: 538511 - protein, 15 aa, Homo sapiens
  CDR3 for alpha chain variable domain of TCR clone 269256 (TRAV3, TRAJ3)
CAVRDGHSSASKIIF

SEQ ID NO: 538512 - protein, 14 aa, Homo sapiens
  CDR3 for beta chain variable domain of TCR clone 269256 (TRBV28, TRBJ1-4)
CASSFGTFDDKLLF

SEQ ID NO: 538513 - protein, 13 aa, Homo sapiens
  CDR3 for alpha chain variable domain of TCR clone 269257 (TRAV21, TRAJ27)
CAERPGNAGKSTF

SEQ ID NO: 538514 - protein, 14 aa, Homo sapiens
  CDR3 for beta chain variable domain of TCR clone 269257 (TRBV11-2, TRBJ2-7)
CASSLGAGAYEQYF

SEQ ID NO: 538515 - protein, 13 aa, Homo sapiens
  CDR3 for alpha chain variable domain of TCR clone 269258 (TRAV26-2, TRAJ43)
CILRAVNNKDIRF

SEQ ID NO: 538516 - protein, 15 aa, Homo sapiens
  CDR3 for beta chain variable domain of TCR clone 269258 (TRBV7-2, TRBJ2-1)
CASTHGTGIYNEQFF

SEQ ID NO: 538517 - protein, 14 aa, Homo sapiens
  CDR3 for alpha chain variable domain of TCR clone 269259 (TRAV4, TRAJ41)
CLVGEGDSGYALNF

SEQ ID NO: 538518 - protein, 15 aa, Homo sapiens
  CDR3 for beta chain variable domain of TCR clone 269259 (TRBV27, TRBJ2-7)
CASSLVGGGAHEQYF

SEQ ID NO: 538519 - protein, 11 aa, Homo sapiens
  CDR3 for alpha chain variable domain of TCR clone 269260 (TRAV21, TRAJ41)
CAVRSGMHSTS

SEQ ID NO: 538520 - protein, 13 aa, Homo sapiens
  CDR3 for beta chain variable domain of TCR clone 269260 (TRBV7-9, TRBJ1-2)
CASSLKQNYGYTF

SEQ ID NO: 538521 - protein, 12 aa, Homo sapiens
  CDR3 for alpha chain variable domain of TCR clone 269261 (TRAV13-2, TRAJ23)
CAERHRGGKLIF

SEQ ID NO: 538522 - protein, 15 aa, Homo sapiens
  CDR3 for beta chain variable domain of TCR clone 269261 (TRBV19, TRBJ2-4)
CASRGPRRGENTQYF

SEQ ID NO: 538523 - protein, 13 aa, Homo sapiens
  CDR3 for alpha chain variable domain of TCR clone 269262 (TRAV12-3, TRAJ7)
CAMTPYGNNRLAF

SEQ ID NO: 538524 - protein, 14 aa, Homo sapiens
  CDR3 for beta chain variable domain of TCR clone 269262 (TRBV13, TRBJ2-7)
CASSLKGASYEQYF

SEQ ID NO: 538525 - protein, 14 aa, Homo sapiens
  CDR3 for alpha chain variable domain of TCR clone 269263 (TRAV17, TRAJ57)
CATDPQGGSEKRVF

SEQ ID NO: 538526 - protein, 16 aa, Homo sapiens
  CDR3 for beta chain variable domain of TCR clone 269263 (TRBV20-1, TRBJ1-4)
CSAPGQGLLTNEKLFF

SEQ ID NO: 538527 - protein, 13 aa, Homo sapiens
  CDR3 for alpha chain variable domain of TCR clone 269264 (TRAV27, TRAJ16)
CAGACSDGQKLLF

SEQ ID NO: 538528 - protein, 14 aa, Homo sapiens
  CDR3 for beta chain variable domain of TCR clone 269264 (TRBV7-6, TRBJ2-3)
CASSLGTVTDTQYF

SEQ ID NO: 538529 - protein, 14 aa, Homo sapiens
  CDR3 for alpha chain variable domain of TCR clone 269265 (TRAV17, TRAJ57)
CATDPQGGSAKLVF

SEQ ID NO: 538530 - protein, 16 aa, Homo sapiens
  CDR3 for beta chain variable domain of TCR clone 269265 (TRBV4-1, TRBJ2-5)
CASSQAIAASSATQYF

SEQ ID NO: 538531 - protein, 15 aa, Homo sapiens
  CDR3 for alpha chain variable domain of TCR clone 269266 (TRAV2, TRAJ22)
CAVPSRGGSARQLTF

SEQ ID NO: 538532 - protein, 11 aa, Homo sapiens
  CDR3 for beta chain variable domain of TCR clone 269266 (TRBV27, TRBJ2-3)
RASSLGDTQYF

SEQ ID NO: 538533 - protein, 12 aa, Homo sapiens
  CDR3 for alpha chain variable domain of TCR clone 269267 (TRAV4, TRAJ26)
CLVGDYGQNFVF

SEQ ID NO: 538534 - protein, 14 aa, Homo sapiens
  CDR3 for beta chain variable domain of TCR clone 269267 (TRBV27, TRBJ1-2)
CASSLRRTNYGYTF

SEQ ID NO: 538535 - protein, 15 aa, Homo sapiens
  CDR3 for alpha chain variable domain of TCR clone 269268 (TRAV12-1, TRAJ49)
CVVNVLSNTGNQFYF

SEQ ID NO: 538536 - protein, 13 aa, Homo sapiens
  CDR3 for beta chain variable domain of TCR clone 269268 (TRBV14, TRBJ1-1)
CASSQEAGTEAFF

SEQ ID NO: 538537 - protein, 18 aa, Homo sapiens
  CDR3 for alpha chain variable domain of TCR clone 269269 (TRAV26-2, TRAJ45)
CILRLWGYSGGVADGLTF

SEQ ID NO: 538538 - protein, 17 aa, Homo sapiens
  CDR3 for beta chain variable domain of TCR clone 269269 (TRBV28, TRBJ2-3)
CASSPTPAGGRVDTQYF

SEQ ID NO: 538539 - protein, 18 aa, Homo sapiens
  CDR3 for alpha chain variable domain of TCR clone 269270 (TRAV21, TRAJ52)
CAVRPSPAGGTRYGELTF

SEQ ID NO: 538540 - protein, 17 aa, Homo sapiens
  CDR3 for beta chain variable domain of TCR clone 269270 (TRBV13, TRBJ2-3)
CASSLSRVAGGRNTQYF

SEQ ID NO: 538541 - protein, 13 aa, Homo sapiens
  CDR3 for alpha chain variable domain of TCR clone 269271 (TRAV20, TRAJ54)
CAVQAGGAQKLVC

SEQ ID NO: 538542 - protein, 14 aa, Homo sapiens
  CDR3 for beta chain variable domain of TCR clone 269271 (TRBV20-1, TRBJ2-7)
CSAKTGTGGYEQYF

SEQ ID NO: 538543 - protein, 11 aa, Homo sapiens
  CDR3 for alpha chain variable domain of TCR clone 269272 (TRAV23/DV6, TRAJ49)
CAVAPVTSSIV

SEQ ID NO: 538544 - protein, 14 aa, Homo sapiens
  CDR3 for beta chain variable domain of TCR clone 269272 (TRBV19, TRBJ2-1)
CASPTFVLSGEQFF

SEQ ID NO: 538545 - protein, 12 aa, Homo sapiens
  CDR3 for alpha chain variable domain of TCR clone 269273 (TRAV12-1, TRAJ31)
CVNMNNNARLMF

SEQ ID NO: 538546 - protein, 15 aa, Homo sapiens
  CDR3 for beta chain variable domain of TCR clone 269273 (TRBV4-1, TRBJ1-2)
CASSQGQGAAYGYTF

SEQ ID NO: 538547 - protein, 11 aa, Homo sapiens
  CDR3 for alpha chain variable domain of TCR clone 269274 (TRAV2, TRAJ13)
CASVGYQKVTF

SEQ ID NO: 538548 - protein, 14 aa, Homo sapiens
  CDR3 for beta chain variable domain of TCR clone 269274 (TRBV4-2, TRBJ1-2)
CASSPGGSNYGYTF

SEQ ID NO: 538549 - protein, 14 aa, Homo sapiens
  CDR3 for alpha chain variable domain of TCR clone 269275 (TRAV1-2, TRAJ16)
CAVNRFSDGQMLLF

SEQ ID NO: 538550 - protein, 15 aa, Homo sapiens
  CDR3 for beta chain variable domain of TCR clone 269275 (TRBV9, TRBJ1-6)
CASSVAGTGDSPLHF

SEQ ID NO: 538551 - protein, 14 aa, Homo sapiens
  CDR3 for alpha chain variable domain of TCR clone 269276 (TRAV26-1, TRAJ40)
CIVRLLSGTYKYIF

SEQ ID NO: 538552 - protein, 15 aa, Homo sapiens
  CDR3 for beta chain variable domain of TCR clone 269276 (TRBV28, TRBJ1-3)
CASSMGWASGNTIYF

SEQ ID NO: 538553 - protein, 16 aa, Homo sapiens
  CDR3 for alpha chain variable domain of TCR clone 269277 (TRAV3, TRAJ37)
CAVRGKGSGNTGKLIF

SEQ ID NO: 538554 - protein, 14 aa, Homo sapiens
  CDR3 for beta chain variable domain of TCR clone 269277 (TRBV9, TRBJ2-7)
CASSVGVGSYEQYF

SEQ ID NO: 538555 - protein, 13 aa, Homo sapiens
  CDR3 for alpha chain variable domain of TCR clone 269278 (TRAV12-1, TRAJ53)
CVVNAESNYKLTF

SEQ ID NO: 538556 - protein, 16 aa, Homo sapiens
  CDR3 for beta chain variable domain of TCR clone 269278 (TRBV13, TRBJ2-2)
CASSPRTGEHTGELFF

SEQ ID NO: 538557 - protein, 15 aa, Homo sapiens
  CDR3 for alpha chain variable domain of TCR clone 269279 (TRAV38-1, TRAJ37)
CAFIHGSGNTGKLIF

SEQ ID NO: 538558 - protein, 15 aa, Homo sapiens
  CDR3 for beta chain variable domain of TCR clone 269279 (TRBV25-1, TRBJ1-6)
CASSGDRGLNSPPHF

SEQ ID NO: 538559 - protein, 15 aa, Homo sapiens
  CDR3 for alpha chain variable domain of TCR clone 269280 (TRAV38-1, TRAJ37)
CAFIHGSGNTGKLIL

SEQ ID NO: 538560 - protein, 12 aa, Homo sapiens
  CDR3 for beta chain variable domain of TCR clone 269280 (TRBV7-9, TRBJ2-7)
CASSFGSYKQYF

SEQ ID NO: 538561 - protein, 14 aa, Homo sapiens
  CDR3 for alpha chain variable domain of TCR clone 269281 (TRAV12-2, TRAJ44)
CAVNPAGTASKLTF

SEQ ID NO: 538562 - protein, 18 aa, Homo sapiens
  CDR3 for beta chain variable domain of TCR clone 269281 (TRBV25-1, TRBJ1-2)
CASSGLQNGQGLIFGYTF

SEQ ID NO: 538563 - protein, 15 aa, Homo sapiens
  CDR3 for alpha chain variable domain of TCR clone 269282 (TRAV12-3, TRAJ6)
CAMSATTGGSYIPSF

SEQ ID NO: 538564 - protein, 16 aa, Homo sapiens
  CDR3 for beta chain variable domain of TCR clone 269282 (TRBV20-1, TRBJ1-2)
CSASMGQGVANYGYTF

SEQ ID NO: 538565 - protein, 13 aa, Homo sapiens
  CDR3 for alpha chain variable domain of TCR clone 269283 (TRAV13-2, TRAJ48)
CAEMDFGNEKLTF

SEQ ID NO: 538566 - protein, 14 aa, Homo sapiens
  CDR3 for beta chain variable domain of TCR clone 269283 (TRBV11-2, TRBJ2-3)
CASSRLARTDTQYF

SEQ ID NO: 538567 - protein, 16 aa, Homo sapiens
  CDR3 for alpha chain variable domain of TCR clone 269284 (TRAV3, TRAJ6)
CCERRPRAGGSYIPTF

SEQ ID NO: 538568 - protein, 20 aa, Homo sapiens
  CDR3 for beta chain variable domain of TCR clone 269284 (TRBV28, TRBJ2-1)
CASTPIGRSPGLAGGNEQFF

SEQ ID NO: 538569 - protein, 19 aa, Homo sapiens
  CDR3 for alpha chain variable domain of TCR clone 269285 (TRAV13-1, TRAJ52)
CAASSFPNAGGTSYGKLTF

SEQ ID NO: 538570 - protein, 15 aa, Homo sapiens
  CDR3 for beta chain variable domain of TCR clone 269285 (TRBV9, TRBJ1-6)
CASSTGGGVDSPLHF

SEQ ID NO: 538571 - protein, 12 aa, Homo sapiens
  CDR3 for alpha chain variable domain of TCR clone 269286 (TRAV3, TRAJ43)
CAVRDPNNEMRF

SEQ ID NO: 538572 - protein, 14 aa, Homo sapiens
  CDR3 for beta chain variable domain of TCR clone 269286 (TRBV19, TRBJ1-1)
CASSIEVSGGSAFF

SEQ ID NO: 538573 - protein, 15 aa, Homo sapiens
  CDR3 for alpha chain variable domain of TCR clone 269287 (TRAV38-1, TRAJ37)
CAFIFGSGNTGKLIF

SEQ ID NO: 538574 - protein, 14 aa, Homo sapiens
  CDR3 for beta chain variable domain of TCR clone 269287 (TRBV20-1, TRBJ2-7)
CSAWTALSSYEQYF

SEQ ID NO: 538575 - protein, 10 aa, Homo sapiens
  CDR3 for alpha chain variable domain of TCR clone 269288 (TRAV8-3, TRAJ43)
CAVALADMRF

SEQ ID NO: 538576 - protein, 15 aa, Homo sapiens
  CDR3 for beta chain variable domain of TCR clone 269288 (TRBV4-1, TRBJ2-7)
CASSQNTGRLYEQYF

SEQ ID NO: 538577 - protein, 14 aa, Homo sapiens
  CDR3 for alpha chain variable domain of TCR clone 269289 (TRAV30, TRAJ26)
CGTEIVSYGQNFVF

SEQ ID NO: 538578 - protein, 13 aa, Homo sapiens
  CDR3 for beta chain variable domain of TCR clone 269289 (TRBV19, TRBJ1-3)
CASRLSLGNTVYF

SEQ ID NO: 538579 - protein, 12 aa, Homo sapiens
  CDR3 for alpha chain variable domain of TCR clone 269290 (TRAV4, TRAJ26)
CLVGDYVQNFVF

SEQ ID NO: 538580 - protein, 16 aa, Homo sapiens
  CDR3 for beta chain variable domain of TCR clone 269290 (TRBV7-2, TRBJ1-2)
CASSSNRDRRGHGYTF

SEQ ID NO: 538581 - protein, 16 aa, Homo sapiens
  CDR3 for alpha chain variable domain of TCR clone 269291 (TRAV3, TRAJ10)
CAVRDMRAGGGNKLTF

SEQ ID NO: 538582 - protein, 19 aa, Homo sapiens
  CDR3 for beta chain variable domain of TCR clone 269291 (TRBV6-3, TRBJ1-2)
CASSYSKGRTGPRNYGYTF

SEQ ID NO: 538583 - protein, 11 aa, Homo sapiens
  CDR3 for alpha chain variable domain of TCR clone 269292 (TRAV3, TRAJ21)
CALGHFNKFYF

SEQ ID NO: 538584 - protein, 16 aa, Homo sapiens
  CDR3 for beta chain variable domain of TCR clone 269292 (TRBV19, TRBJ2-1)
CASSKAGPSSYNEQFF

SEQ ID NO: 538585 - protein, 14 aa, Homo sapiens
  CDR3 for alpha chain variable domain of TCR clone 269293 (TRAV26-1, TRAJ21)
CIVRVVYNFNKFYF

SEQ ID NO: 538586 - protein, 17 aa, Homo sapiens
  CDR3 for beta chain variable domain of TCR clone 269293 (TRBV11-2, TRBJ2-1)
RASSLYPPGVEYNEQFF

SEQ ID NO: 538587 - protein, 14 aa, Homo sapiens
  CDR3 for alpha chain variable domain of TCR clone 269294 (TRAV16, TRAJ37)
CALDISGKTGKLIF

SEQ ID NO: 538588 - protein, 11 aa, Homo sapiens
  CDR3 for beta chain variable domain of TCR clone 269294 (TRBV6-1, TRBJ2-1)
CASISSNEQFL

SEQ ID NO: 538589 - protein, 15 aa, Homo sapiens
  CDR3 for alpha chain variable domain of TCR clone 269295 (TRAV1-2, TRAJ3)
CAVSGGYSSASKIIF

SEQ ID NO: 538590 - protein, 13 aa, Homo sapiens
  CDR3 for beta chain variable domain of TCR clone 269295 (TRBV7-9, TRBJ1-2)
CASSLKQNYGYTF

SEQ ID NO: 538591 - protein, 14 aa, Homo sapiens
  CDR3 for alpha chain variable domain of TCR clone 269296 (TRAV12-2, TRAJ17)
CAVLFNAAGNKLTF

SEQ ID NO: 538592 - protein, 14 aa, Homo sapiens
  CDR3 for beta chain variable domain of TCR clone 269296 (TRBV7-7, TRBJ2-2)
CATRQDSDTGELFF

SEQ ID NO: 538593 - protein, 22 aa, Homo sapiens
  CDR3 for alpha chain variable domain of TCR clone 269297 (TRAV1-2, TRAJ10)
LLKELQMKDSASYLRGGNKLTF

SEQ ID NO: 538594 - protein, 14 aa, Homo sapiens
  CDR3 for beta chain variable domain of TCR clone 269297 (TRBV6-1, TRBJ1-3)
CASVQGGGGNTIYF

SEQ ID NO: 538595 - protein, 14 aa, Homo sapiens
  CDR3 for alpha chain variable domain of TCR clone 269298 (TRAV21, TRAJ35)
CAVMPIGFGNVLHC

SEQ ID NO: 538596 - protein, 13 aa, Homo sapiens
  CDR3 for beta chain variable domain of TCR clone 269298 (TRBV20-1, TRBJ2-1)
CSARPGRYNEQFF

SEQ ID NO: 538597 - protein, 12 aa, Homo sapiens
  CDR3 for alpha chain variable domain of TCR clone 269299 (TRAV13-1, TRAJ21)
CAAKEGFNKFYF

SEQ ID NO: 538598 - protein, 14 aa, Homo sapiens
  CDR3 for beta chain variable domain of TCR clone 269299 (TRBV5-1, TRBJ2-7)
CASSWGESLYEQYF

SEQ ID NO: 538599 - protein, 14 aa, Homo sapiens
  CDR3 for alpha chain variable domain of TCR clone 269300 (TRAV1-2, TRAJ16)
CAVNRFSDGQKLPF

SEQ ID NO: 538600 - protein, 15 aa, Homo sapiens
  CDR3 for beta chain variable domain of TCR clone 269300 (TRBV7-9, TRBJ1-4)
CASSATGGNNEKLFF

SEQ ID NO: 538601 - protein, 12 aa, Homo sapiens
  CDR3 for alpha chain variable domain of TCR clone 269301 (TRAV13-2, TRAJ23)
CAARQRGGKLIF

SEQ ID NO: 538602 - protein, 16 aa, Homo sapiens
  CDR3 for beta chain variable domain of TCR clone 269301 (TRBV20-1, TRBJ1-4)
CSAPGQGLLTNEKLFF

SEQ ID NO: 538603 - protein, 14 aa, Homo sapiens
  CDR3 for alpha chain variable domain of TCR clone 269302 (TRAV1-2, TRAJ16)
CAVNRFSDGQKLLF

SEQ ID NO: 538604 - protein, 12 aa, Homo sapiens
  CDR3 for beta chain variable domain of TCR clone 269302 (TRBV20-1, TRBJ2-7)
CSAGLKMGEQYF

SEQ ID NO: 538605 - protein, 15 aa, Homo sapiens
  CDR3 for alpha chain variable domain of TCR clone 269303 (TRAV27, TRAJ38)
CAARRNAGNNRKLIW

SEQ ID NO: 538606 - protein, 14 aa, Homo sapiens
  CDR3 for beta chain variable domain of TCR clone 269303 (TRBV7-2, TRBJ2-7)
CASSPRVGAYEQYF

SEQ ID NO: 538607 - protein, 11 aa, Homo sapiens
  CDR3 for alpha chain variable domain of TCR clone 269304 (TRAV21, TRAJ34)
CAHYNTDKLIF

SEQ ID NO: 538608 - protein, 15 aa, Homo sapiens
  CDR3 for beta chain variable domain of TCR clone 269304 (TRBV11-2, TRBJ1-2)
CASSLEGFQRNGYTF

SEQ ID NO: 538609 - protein, 14 aa, Homo sapiens
  CDR3 for alpha chain variable domain of TCR clone 269305 (TRAV26-1, TRAJ57)
CIRAGQGGSEKLVF

SEQ ID NO: 538610 - protein, 13 aa, Homo sapiens
  CDR3 for beta chain variable domain of TCR clone 269305 (TRBV19, TRBJ2-7)
CASSLTTSYEQDF

SEQ ID NO: 538611 - protein, 14 aa, Homo sapiens
  CDR3 for alpha chain variable domain of TCR clone 269306 (TRAV23/DV6, TRAJ27)
CAASRDTNAGKSTF

SEQ ID NO: 538612 - protein, 14 aa, Homo sapiens
  CDR3 for beta chain variable domain of TCR clone 269306 (TRBV18, TRBJ2-7)
CASSPRGGAYEQYF

SEQ ID NO: 538613 - protein, 14 aa, Homo sapiens
  CDR3 for alpha chain variable domain of TCR clone 269307 (TRAV12-3, TRAJ12)
CAMSALDSSYKLIF

SEQ ID NO: 538614 - protein, 16 aa, Homo sapiens
  CDR3 for beta chain variable domain of TCR clone 269307 (TRBV7-9, TRBJ2-3)
CASSLQGNPGTDTQYC

SEQ ID NO: 538615 - protein, 12 aa, Homo sapiens
  CDR3 for alpha chain variable domain of TCR clone 269308 (TRAV12-1, TRAJ31)
CVSRNNNARLMF

SEQ ID NO: 538616 - protein, 15 aa, Homo sapiens
  CDR3 for beta chain variable domain of TCR clone 269308 (TRBV7-2, TRBJ1-5)
CASSLDRGQDQPQHF

SEQ ID NO: 538617 - protein, 15 aa, Homo sapiens
  CDR3 for alpha chain variable domain of TCR clone 269309 (TRAV12-2, TRAJ6)
CAVNSLSGGSYIPTF

SEQ ID NO: 538618 - protein, 16 aa, Homo sapiens
  CDR3 for beta chain variable domain of TCR clone 269309 (TRBV27, TRBJ2-5)
CASSYGPGGQKETQYF

SEQ ID NO: 538619 - protein, 12 aa, Homo sapiens
  CDR3 for alpha chain variable domain of TCR clone 269310 (TRAV26-2, TRAJ21)
CILNGNFNKFYF

SEQ ID NO: 538620 - protein, 14 aa, Homo sapiens
  CDR3 for beta chain variable domain of TCR clone 269310 (TRBV7-9, TRBJ1-1)
CASTPLQSYTEAFF

SEQ ID NO: 538621 - protein, 13 aa, Homo sapiens
  CDR3 for alpha chain variable domain of TCR clone 269311 (TRAV20, TRAJ37)
CAGCSSNTGKLIF

SEQ ID NO: 538622 - protein, 12 aa, Homo sapiens
  CDR3 for beta chain variable domain of TCR clone 269311 (TRBV7-9, TRBJ2-7)
CASSLEGYEQYF

SEQ ID NO: 538623 - protein, 14 aa, Homo sapiens
  CDR3 for alpha chain variable domain of TCR clone 269312 (TRAV21, TRAJ45)
CAVSSGGGSDGLTF

SEQ ID NO: 538624 - protein, 15 aa, Homo sapiens
  CDR3 for beta chain variable domain of TCR clone 269312 (TRBV6-1, TRBJ2-4)
CASSEAVWTINIQYF

SEQ ID NO: 538625 - protein, 14 aa, Homo sapiens
  CDR3 for alpha chain variable domain of TCR clone 269313 (TRAV1-2, TRAJ40)
CAVREDTGFQKLVF

SEQ ID NO: 538626 - protein, 18 aa, Homo sapiens
  CDR3 for beta chain variable domain of TCR clone 269313 (TRBV11-2, TRBJ2-3)
CASSLGGASRGAPNTQYF

SEQ ID NO: 538627 - protein, 16 aa, Homo sapiens
  CDR3 for alpha chain variable domain of TCR clone 269314 (TRAV3, TRAJ10)
CAVTDMRAGGGNKLTF

SEQ ID NO: 538628 - protein, 15 aa, Homo sapiens
  CDR3 for beta chain variable domain of TCR clone 269314 (TRBV6-3, TRBJ2-7)
CASSSPGTVFYEQYF

SEQ ID NO: 538629 - protein, 13 aa, Homo sapiens
  CDR3 for alpha chain variable domain of TCR clone 269315 (TRAV2, TRAJ15)
CAVASQAGTALIF

SEQ ID NO: 538630 - protein, 20 aa, Homo sapiens
  CDR3 for beta chain variable domain of TCR clone 269315 (TRBV5-1, TRBJ1-1)
GPLSLRQQLRGNSLNTEAFF

SEQ ID NO: 538631 - protein, 15 aa, Homo sapiens
  CDR3 for alpha chain variable domain of TCR clone 269316 (TRAV12-2, TRAJ8)
FAVREENTGFQKLVF

SEQ ID NO: 538632 - protein, 16 aa, Homo sapiens
  CDR3 for beta chain variable domain of TCR clone 269316 (TRBV7-3, TRBJ2-2)
CASSLKRGTLSGELFF

SEQ ID NO: 538633 - protein, 12 aa, Homo sapiens
  CDR3 for alpha chain variable domain of TCR clone 269317 (TRAV30, TRAJ43)
CGTEERGNDMRF

SEQ ID NO: 538634 - protein, 13 aa, Homo sapiens
  CDR3 for beta chain variable domain of TCR clone 269317 (TRBV2, TRBJ2-7)
CASSVGGSGEQYF

SEQ ID NO: 538635 - protein, 13 aa, Homo sapiens
  CDR3 for alpha chain variable domain of TCR clone 269318 (TRAV2, TRAJ40)
CAVVTSGTYDYIF

SEQ ID NO: 538636 - protein, 14 aa, Homo sapiens
  CDR3 for beta chain variable domain of TCR clone 269318 (TRBV19, TRBJ2-1)
CASPTFVLSGEQFF

SEQ ID NO: 538637 - protein, 21 aa, Homo sapiens
  CDR3 for alpha chain variable domain of TCR clone 269319 (TRAV1-1, TRAJ6)
CLLLLRCERLERKGGSYIPTF

SEQ ID NO: 538638 - protein, 15 aa, Homo sapiens
  CDR3 for beta chain variable domain of TCR clone 269319 (TRBV7-2, TRBJ2-3)
CASSLVVRGPDTQYF

SEQ ID NO: 538639 - protein, 13 aa, Homo sapiens
  CDR3 for alpha chain variable domain of TCR clone 269320 (TRAV8-6, TRAJ49)
CAVITNTGNQFYF

SEQ ID NO: 538640 - protein, 14 aa, Homo sapiens
  CDR3 for beta chain variable domain of TCR clone 269320 (TRBV9, TRBJ2-7)
CASSVGVGSYEQYF

SEQ ID NO: 538641 - protein, 14 aa, Homo sapiens
  CDR3 for alpha chain variable domain of TCR clone 269321 (TRAV8-1, TRAJ5)
CAVRTDTGRRALTF

SEQ ID NO: 538642 - protein, 16 aa, Homo sapiens
  CDR3 for beta chain variable domain of TCR clone 269321 (TRBV12-5, TRBJ2-5)
CASGPRTSGNQETQYF

SEQ ID NO: 538643 - protein, 23 aa, Homo sapiens
  CDR3 for alpha chain variable domain of TCR clone 269322 (TRAV8-3, TRAJ38)
CAVGASNAGNNHIQNPDPAVYQL

SEQ ID NO: 538644 - protein, 14 aa, Homo sapiens
  CDR3 for beta chain variable domain of TCR clone 269322 (TRBV4-2, TRBJ2-1)
CASGLDRAYNEQFF

SEQ ID NO: 538645 - protein, 12 aa, Homo sapiens
  CDR3 for alpha chain variable domain of TCR clone 269323 (TRAV13-2, TRAJ23)
CAERPRGGKLIF

SEQ ID NO: 538646 - protein, 14 aa, Homo sapiens
  CDR3 for beta chain variable domain of TCR clone 269323 (TRBV4-1, TRBJ2-2)
CASSQAVNTGELFF

SEQ ID NO: 538647 - protein, 15 aa, Homo sapiens
  CDR3 for alpha chain variable domain of TCR clone 269324 (TRAV9-2, TRAJ10)
CALSDLGGGGNKLTF

SEQ ID NO: 538648 - protein, 18 aa, Homo sapiens
  CDR3 for beta chain variable domain of TCR clone 269324 (TRBV11-2, TRBJ2-3)
CASSLGGASRGAPNTQYF

SEQ ID NO: 538649 - protein, 23 aa, Homo sapiens
  CDR3 for alpha chain variable domain of TCR clone 269325 (TRAV26-1, TRAJ38)
CIADNAGNNHIQNPDPAVYLLRD

SEQ ID NO: 538650 - protein, 13 aa, Homo sapiens
  CDR3 for beta chain variable domain of TCR clone 269325 (TRBV20-1, TRBJ1-1)
CSARGGGNTEAFF

SEQ ID NO: 538651 - protein, 17 aa, Homo sapiens
  CDR3 for alpha chain variable domain of TCR clone 269326 (TRAV3, TRAJ12)
CAVRDGGRMDSSYKLIF

SEQ ID NO: 538652 - protein, 13 aa, Homo sapiens
  CDR3 for beta chain variable domain of TCR clone 269326 (TRBV20-1, TRBJ1-1)
CSAPLGWGTEAFF

SEQ ID NO: 538653 - protein, 13 aa, Homo sapiens
  CDR3 for alpha chain variable domain of TCR clone 269327 (TRAV26-1, TRAJ40)
CIVRVKGTYKYIF

SEQ ID NO: 538654 - protein, 15 aa, Homo sapiens
  CDR3 for beta chain variable domain of TCR clone 269327 (TRBV12-4, TRBJ1-2)
CASSLAHRDGEAYTF

SEQ ID NO: 538655 - protein, 12 aa, Homo sapiens
  CDR3 for alpha chain variable domain of TCR clone 269328 (TRAV13-1, TRAJ21)
CAAKEGFNKFYF

SEQ ID NO: 538656 - protein, 14 aa, Homo sapiens
  CDR3 for beta chain variable domain of TCR clone 269328 (TRBV5-1, TRBJ2-5)
CASSLAGKQETQYF

SEQ ID NO: 538657 - protein, 13 aa, Homo sapiens
  CDR3 for alpha chain variable domain of TCR clone 269329 (TRAV12-2, TRAJ52)
CAVGGTSYGKLTF

SEQ ID NO: 538658 - protein, 13 aa, Homo sapiens
  CDR3 for beta chain variable domain of TCR clone 269329 (TRBV12-5, TRBJ2-3)
CASGDRQSDTQYF

SEQ ID NO: 538659 - protein, 13 aa, Homo sapiens
  CDR3 for alpha chain variable domain of TCR clone 269330 (TRAV27, TRAJ58)
CAGAETSGSRLTL

SEQ ID NO: 538660 - protein, 13 aa, Homo sapiens
  CDR3 for beta chain variable domain of TCR clone 269330 (TRBV7-2, TRBJ2-1)
CASNRDRWNEQFF

SEQ ID NO: 538661 - protein, 16 aa, Homo sapiens
  CDR3 for alpha chain variable domain of TCR clone 269331 (TRAV26-1, TRAJ32)
CIVRTNYGCATNELIF

SEQ ID NO: 538662 - protein, 16 aa, Homo sapiens
  CDR3 for beta chain variable domain of TCR clone 269331 (TRBV6-1, TRBJ1-3)
CASVQGGVETPYILER

SEQ ID NO: 538663 - protein, 10 aa, Homo sapiens
  CDR3 for alpha chain variable domain of TCR clone 269332 (TRAV12-2, TRAJ41)
CAVTGYALNF

SEQ ID NO: 538664 - protein, 15 aa, Homo sapiens
  CDR3 for beta chain variable domain of TCR clone 269332 (TRBV4-2, TRBJ2-1)
CASSQDVGLAGEQFS

SEQ ID NO: 538665 - protein, 14 aa, Homo sapiens
  CDR3 for alpha chain variable domain of TCR clone 269333 (TRAV17, TRAJ45)
CATASGGGADGLTL

SEQ ID NO: 538666 - protein, 15 aa, Homo sapiens
  CDR3 for beta chain variable domain of TCR clone 269333 (TRBV11-2, TRBJ2-1)
CDSSRNRGLMYEQFF

SEQ ID NO: 538667 - protein, 18 aa, Homo sapiens
  CDR3 for alpha chain variable domain of TCR clone 269334 (TRAV21, TRAJ52)
CAVRTSPAGGTSYGKLTF

SEQ ID NO: 538668 - protein, 13 aa, Homo sapiens
  CDR3 for beta chain variable domain of TCR clone 269334 (TRBV7-3, TRBJ1-1)
CASSQDWGAEAFF

SEQ ID NO: 538669 - protein, 21 aa, Homo sapiens
  CDR3 for alpha chain variable domain of TCR clone 269335 (TRAV26-1, TRAJ17)
CCVILHRQSSGSKAAGNKLTF

SEQ ID NO: 538670 - protein, 14 aa, Homo sapiens
  CDR3 for beta chain variable domain of TCR clone 269335 (TRBV28, TRBJ1-2)
CASRIQGANYGYTF

SEQ ID NO: 538671 - protein, 16 aa, Homo sapiens
  CDR3 for alpha chain variable domain of TCR clone 269336 (TRAV21, TRAJ17)
CAVRPGEEAAGNKLTF

SEQ ID NO: 538672 - protein, 12 aa, Homo sapiens
  CDR3 for beta chain variable domain of TCR clone 269336 (TRBV7-3, TRBJ2-1)
CASSFINNEQFF

SEQ ID NO: 538673 - protein, 12 aa, Homo sapiens
  CDR3 for alpha chain variable domain of TCR clone 269337 (TRAV17, TRAJ4)
CATDGGYNKLIF

SEQ ID NO: 538674 - protein, 18 aa, Homo sapiens
  CDR3 for beta chain variable domain of TCR clone 269337 (TRBV3-1, TRBJ1-2)
CASSQDVIGWNGDYGYTF

SEQ ID NO: 538675 - protein, 12 aa, Homo sapiens
  CDR3 for alpha chain variable domain of TCR clone 269338 (TRAV29/DV5, TRAJ49)
CAATDTGNQFYF

SEQ ID NO: 538676 - protein, 13 aa, Homo sapiens
  CDR3 for beta chain variable domain of TCR clone 269338 (TRBV6-3, TRBJ2-7)
CASSFSGGYEQYF

SEQ ID NO: 538677 - protein, 13 aa, Homo sapiens
  CDR3 for alpha chain variable domain of TCR clone 269339 (TRAV13-1, TRAJ39)
CSKYSNAGNMLTF

SEQ ID NO: 538678 - protein, 16 aa, Homo sapiens
  CDR3 for beta chain variable domain of TCR clone 269339 (TRBV20-1, TRBJ1-4)
CSAPRQGLLTNEKLFF

SEQ ID NO: 538679 - protein, 13 aa, Homo sapiens
  CDR3 for alpha chain variable domain of TCR clone 269340 (TRAV13-1, TRAJ11)
CAAVLEGYSTLTF

SEQ ID NO: 538680 - protein, 17 aa, Homo sapiens
  CDR3 for beta chain variable domain of TCR clone 269340 (TRBV25-1, TRBJ2-7)
CASSDARVVFSSYEQYF

SEQ ID NO: 538681 - protein, 13 aa, Homo sapiens
  CDR3 for alpha chain variable domain of TCR clone 269341 (TRAV2, TRAJ40)
CAVVTSGTYKYIF

SEQ ID NO: 538682 - protein, 16 aa, Homo sapiens
  CDR3 for beta chain variable domain of TCR clone 269341 (TRBV5-1, TRBJ2-7)
CASSLEGLAGLYEQYF

SEQ ID NO: 538683 - protein, 13 aa, Homo sapiens
  CDR3 for alpha chain variable domain of TCR clone 269342 (TRAV12-2, TRAJ39)
CAVNNNAGNMLTF

SEQ ID NO: 538684 - protein, 13 aa, Homo sapiens
  CDR3 for beta chain variable domain of TCR clone 269342 (TRBV7-3, TRBJ2-1)
CQRPGGGGNEQFF

SEQ ID NO: 538685 - protein, 18 aa, Homo sapiens
  CDR3 for alpha chain variable domain of TCR clone 269343 (TRAV8-6, TRAJ52)
CAVSRADAGGTSYGKLTF

SEQ ID NO: 538686 - protein, 15 aa, Homo sapiens
  CDR3 for beta chain variable domain of TCR clone 269343 (TRBV28, TRBJ2-1)
CASRVGLDEYNEQFF

SEQ ID NO: 538687 - protein, 18 aa, Homo sapiens
  CDR3 for alpha chain variable domain of TCR clone 269344 (TRAV8-4, TRAJ52)
CAVASFNAGGTSYGKLTF

SEQ ID NO: 538688 - protein, 14 aa, Homo sapiens
  CDR3 for beta chain variable domain of TCR clone 269344 (TRBV18, TRBJ1-5)
CASSRQQSNQPQHF

SEQ ID NO: 538689 - protein, 19 aa, Homo sapiens
  CDR3 for alpha chain variable domain of TCR clone 269345 (TRAV26-1, TRAJ22)
CCVLLHRWVFYGSARQLTF

SEQ ID NO: 538690 - protein, 19 aa, Homo sapiens
  CDR3 for beta chain variable domain of TCR clone 269345 (TRBV19, TRBJ2-5)
CASSIGQVTDFFLGETQYF

SEQ ID NO: 538691 - protein, 12 aa, Homo sapiens
  CDR3 for alpha chain variable domain of TCR clone 269346 (TRAV22, TRAJ48)
CAVRFGNEKLTF

SEQ ID NO: 538692 - protein, 12 aa, Homo sapiens
  CDR3 for beta chain variable domain of TCR clone 269346 (TRBV11-2, TRBJ2-1)
CASSPGNNEQFF

SEQ ID NO: 538693 - protein, 15 aa, Homo sapiens
  CDR3 for alpha chain variable domain of TCR clone 269347 (TRAV8-3, TRAJ44)
CAVGAGAGTASKLTF

SEQ ID NO: 538694 - protein, 12 aa, Homo sapiens
  CDR3 for beta chain variable domain of TCR clone 269347 (TRBV7-8, TRBJ2-4)
CASSLGGNIQYC

SEQ ID NO: 538695 - protein, 15 aa, Homo sapiens
  CDR3 for alpha chain variable domain of TCR clone 269348 (TRAV8-4, TRAJ12)
CAVSDRVDSSYKLIF

SEQ ID NO: 538696 - protein, 15 aa, Homo sapiens
  CDR3 for beta chain variable domain of TCR clone 269348 (TRBV11-1, TRBJ2-1)
CASSLAGQTYNEQFF

SEQ ID NO: 538697 - protein, 14 aa, Homo sapiens
  CDR3 for alpha chain variable domain of TCR clone 269349 (TRAV13-2, TRAJ17)
CAENSRAAGNKLTF

SEQ ID NO: 538698 - protein, 15 aa, Homo sapiens
  CDR3 for beta chain variable domain of TCR clone 269349 (TRBV20-1, TRBJ1-6)
CSARAASSYNSPLHF

SEQ ID NO: 538699 - protein, 12 aa, Homo sapiens
  CDR3 for alpha chain variable domain of TCR clone 269350 (TRAV1-1, TRAJ39)
CAVPVVGNMLTS

SEQ ID NO: 538700 - protein, 13 aa, Homo sapiens
  CDR3 for beta chain variable domain of TCR clone 269350 (TRBV7-9, TRBJ2-1)
CASSSSNFNEQFF

SEQ ID NO: 538701 - protein, 13 aa, Homo sapiens
  CDR3 for alpha chain variable domain of TCR clone 269351 (TRAV12-2, TRAJ4)
CAGFSGGYNKLIL

SEQ ID NO: 538702 - protein, 14 aa, Homo sapiens
  CDR3 for beta chain variable domain of TCR clone 269351 (TRBV24-1, TRBJ1-1)
CATSIPRGDTEAFF

SEQ ID NO: 538703 - protein, 13 aa, Homo sapiens
  CDR3 for alpha chain variable domain of TCR clone 269352 (TRAV12-3, TRAJ47)
CAMKKEYGNKLVF

SEQ ID NO: 538704 - protein, 17 aa, Homo sapiens
  CDR3 for beta chain variable domain of TCR clone 269352 (TRBV11-2, TRBJ2-1)
CASSLYPPGVEYNEQFV

SEQ ID NO: 538705 - protein, 16 aa, Homo sapiens
  CDR3 for alpha chain variable domain of TCR clone 269353 (TRAV13-1, TRAJ48)
CSASIFGNFGNEKLTF

SEQ ID NO: 538706 - protein, 14 aa, Homo sapiens
  CDR3 for beta chain variable domain of TCR clone 269353 (TRBV24-1, TRBJ1-1)
CATSIPRGDTEAFF

SEQ ID NO: 538707 - protein, 12 aa, Homo sapiens
  CDR3 for alpha chain variable domain of TCR clone 269354 (TRAV4, TRAJ26)
CLVGDYGQNFVF

SEQ ID NO: 538708 - protein, 15 aa, Homo sapiens
  CDR3 for beta chain variable domain of TCR clone 269354 (TRBV6-1, TRBJ2-1)
CASSELRGQYNEQFF

SEQ ID NO: 538709 - protein, 14 aa, Homo sapiens
  CDR3 for alpha chain variable domain of TCR clone 269355 (TRAV13-1, TRAJ35)
CAASKGGFVNVLHF

SEQ ID NO: 538710 - protein, 13 aa, Homo sapiens
  CDR3 for beta chain variable domain of TCR clone 269355 (TRBV7-3, TRBJ1-1)
CASSQDWGAEAFF

SEQ ID NO: 538711 - protein, 14 aa, Homo sapiens
  CDR3 for alpha chain variable domain of TCR clone 269356 (TRAV17, TRAJ6)
CATPAMGGSYIPTF

SEQ ID NO: 538712 - protein, 15 aa, Homo sapiens
  CDR3 for beta chain variable domain of TCR clone 269356 (TRBV7-3, TRBJ2-1)
CASSPTGGGEVEQFF

SEQ ID NO: 538713 - protein, 14 aa, Homo sapiens
  CDR3 for alpha chain variable domain of TCR clone 269357 (TRAV1-2, TRAJ16)
CAVNRFSDGQKLLF

SEQ ID NO: 538714 - protein, 19 aa, Homo sapiens
  CDR3 for beta chain variable domain of TCR clone 269357 (TRBV7-8, TRBJ2-2)
CQSHLFPGPTIHITGELFF

SEQ ID NO: 538715 - protein, 10 aa, Homo sapiens
  CDR3 for alpha chain variable domain of TCR clone 269358 (TRAV23/DV6, TRAJ57)
CAASSTLSQG

SEQ ID NO: 538716 - protein, 16 aa, Homo sapiens
  CDR3 for beta chain variable domain of TCR clone 269358 (TRBV6-6, TRBJ1-5)
CASSYSTLVGNQPQHF

SEQ ID NO: 538717 - protein, 15 aa, Homo sapiens
  CDR3 for alpha chain variable domain of TCR clone 269359 (TRAV26-2, TRAJ28)
CILVESGAGSYQLTF

SEQ ID NO: 538718 - protein, 16 aa, Homo sapiens
  CDR3 for beta chain variable domain of TCR clone 269359 (TRBV4-2, TRBJ1-2)
CASSQEIGGASYGYNF

SEQ ID NO: 538719 - protein, 14 aa, Homo sapiens
  CDR3 for alpha chain variable domain of TCR clone 269360 (TRAV26-1, TRAJ21)
CIFRPPYNFNKFYF

SEQ ID NO: 538720 - protein, 14 aa, Homo sapiens
  CDR3 for beta chain variable domain of TCR clone 269360 (TRBV11-3, TRBJ2-1)
CASSATTSGSIQFF

SEQ ID NO: 538721 - protein, 15 aa, Homo sapiens
  CDR3 for alpha chain variable domain of TCR clone 269361 (TRAV12-1, TRAJ9)
CVVSLGDTGGFKTSF

SEQ ID NO: 538722 - protein, 13 aa, Homo sapiens
  CDR3 for beta chain variable domain of TCR clone 269361 (TRBV2, TRBJ1-4)
CASSERAGEKLFF

SEQ ID NO: 538723 - protein, 16 aa, Homo sapiens
  CDR3 for alpha chain variable domain of TCR clone 269362 (TRAV1-2, TRAJ10)
CAVRGVLTGGGNKLTF

SEQ ID NO: 538724 - protein, 16 aa, Homo sapiens
  CDR3 for beta chain variable domain of TCR clone 269362 (TRBV9, TRBJ2-1)
CASSGGGGGNYNEQFF

SEQ ID NO: 538725 - protein, 21 aa, Homo sapiens
  CDR3 for alpha chain variable domain of TCR clone 269363 (TRAV12-1, TRAJ37)
CVVNGGLWQHRQTNLWARDNF

SEQ ID NO: 538726 - protein, 12 aa, Homo sapiens
  CDR3 for beta chain variable domain of TCR clone 269363 (TRBV20-1, TRBJ1-2)
CSAPGFNYGHTF

SEQ ID NO: 538727 - protein, 11 aa, Homo sapiens
  CDR3 for alpha chain variable domain of TCR clone 269364 (TRAV21, TRAJ4)
HVSVGYNKLIF

SEQ ID NO: 538728 - protein, 13 aa, Homo sapiens
  CDR3 for beta chain variable domain of TCR clone 269364 (TRBV7-3, TRBJ2-5)
CASSVTAGETQYF

SEQ ID NO: 538729 - protein, 14 aa, Homo sapiens
  CDR3 for alpha chain variable domain of TCR clone 269365 (TRAV12-2, TRAJ13)
CAVKKTGGYQKVTF

SEQ ID NO: 538730 - protein, 14 aa, Homo sapiens
  CDR3 for beta chain variable domain of TCR clone 269365 (TRBV7-2, TRBJ2-7)
CASSTKTRFYEQYF

SEQ ID NO: 538731 - protein, 12 aa, Homo sapiens
  CDR3 for alpha chain variable domain of TCR clone 269366 (TRAV13-2, TRAJ49)
CAETDTGNQCYF

SEQ ID NO: 538732 - protein, 14 aa, Homo sapiens
  CDR3 for beta chain variable domain of TCR clone 269366 (TRBV4-1, TRBJ2-2)
CASSQAVNTGELFF

SEQ ID NO: 538733 - protein, 13 aa, Homo sapiens
  CDR3 for alpha chain variable domain of TCR clone 269367 (TRAV8-6, TRAJ49)
CAVITNTGNQVYF

SEQ ID NO: 538734 - protein, 14 aa, Homo sapiens
  CDR3 for beta chain variable domain of TCR clone 269367 (TRBV25-1, TRBJ1-1)
CASTHLGGNTEAFF

SEQ ID NO: 538735 - protein, 14 aa, Homo sapiens
  CDR3 for alpha chain variable domain of TCR clone 269368 (TRAV13-1, TRAJ44)
CAAKATGTSSKLTF

SEQ ID NO: 538736 - protein, 13 aa, Homo sapiens
  CDR3 for beta chain variable domain of TCR clone 269368 (TRBV5-5, TRBJ1-2)
CASSFWRGEDYTF

SEQ ID NO: 538737 - protein, 16 aa, Homo sapiens
  CDR3 for alpha chain variable domain of TCR clone 269369 (TRAV3, TRAJ21)
CAVRDRSASTNFILDL

SEQ ID NO: 538738 - protein, 16 aa, Homo sapiens
  CDR3 for beta chain variable domain of TCR clone 269369 (TRBV7-2, TRBJ2-5)
CASSLESAGGRETQYF

SEQ ID NO: 538739 - protein, 13 aa, Homo sapiens
  CDR3 for alpha chain variable domain of TCR clone 269370 (TRAV27, TRAJ41)
CAGEGNSGYALNF

SEQ ID NO: 538740 - protein, 13 aa, Homo sapiens
  CDR3 for beta chain variable domain of TCR clone 269370 (TRBV13, TRBJ2-5)
CASSLGGEETQYF

SEQ ID NO: 538741 - protein, 13 aa, Homo sapiens
  CDR3 for alpha chain variable domain of TCR clone 269371 (TRAV2, TRAJ15)
CAVASKAGTALIF

SEQ ID NO: 538742 - protein, 16 aa, Homo sapiens
  CDR3 for beta chain variable domain of TCR clone 269371 (TRBV4-2, TRBJ2-3)
CASSQELAGDTDTQYF

SEQ ID NO: 538743 - protein, 12 aa, Homo sapiens
  CDR3 for alpha chain variable domain of TCR clone 269372 (TRAV12-1, TRAJ34)
CMVAGATDKLIF

SEQ ID NO: 538744 - protein, 12 aa, Homo sapiens
  CDR3 for beta chain variable domain of TCR clone 269372 (TRBV7-9, TRBJ1-1)
CASSLVRGEAFF

SEQ ID NO: 538745 - protein, 11 aa, Homo sapiens
  CDR3 for alpha chain variable domain of TCR clone 269373 (TRAV2, TRAJ23)
CAVETRGKLIF

SEQ ID NO: 538746 - protein, 15 aa, Homo sapiens
  CDR3 for beta chain variable domain of TCR clone 269373 (TRBV6-5, TRBJ2-1)
CASSYDAGAGNEQFF

SEQ ID NO: 538747 - protein, 14 aa, Homo sapiens
  CDR3 for alpha chain variable domain of TCR clone 269374 (TRAV35, TRAJ22)
SAWLRPGSARQLTF

SEQ ID NO: 538748 - protein, 15 aa, Homo sapiens
  CDR3 for beta chain variable domain of TCR clone 269374 (TRBV12-4, TRBJ2-5)
CASSPPTGLQETQYF

SEQ ID NO: 538749 - protein, 14 aa, Homo sapiens
  CDR3 for alpha chain variable domain of TCR clone 269375 (TRAV12-1, TRAJ17)
CVVNYKAAGNRLTF

SEQ ID NO: 538750 - protein, 13 aa, Homo sapiens
  CDR3 for beta chain variable domain of TCR clone 269375 (TRBV12-4, TRBJ2-7)
CASSLERVREQYF

SEQ ID NO: 538751 - protein, 13 aa, Homo sapiens
  CDR3 for alpha chain variable domain of TCR clone 269376 (TRAV35, TRAJ40)
CAGQLSGTYKYIF

SEQ ID NO: 538752 - protein, 14 aa, Homo sapiens
  CDR3 for beta chain variable domain of TCR clone 269376 (TRBV3-1, TRBJ2-5)
CASSIQLAGETQYF

SEQ ID NO: 538753 - protein, 15 aa, Homo sapiens
  CDR3 for alpha chain variable domain of TCR clone 269377 (TRAV4, TRAJ17)
CLEGDIGAAGNKLTF

SEQ ID NO: 538754 - protein, 14 aa, Homo sapiens
  CDR3 for beta chain variable domain of TCR clone 269377 (TRBV6-3, TRBJ2-7)
CASSYSVRVYEQYF

SEQ ID NO: 538755 - protein, 16 aa, Homo sapiens
  CDR3 for alpha chain variable domain of TCR clone 269378 (TRAV27, TRAJ13)
CAVAKSDSGGYQTGTF

SEQ ID NO: 538756 - protein, 15 aa, Homo sapiens
  CDR3 for beta chain variable domain of TCR clone 269378 (TRBV29-1, TRBJ2-1)
CSVGRHALFYNEQFF

SEQ ID NO: 538757 - protein, 16 aa, Homo sapiens
  CDR3 for alpha chain variable domain of TCR clone 269379 (TRAV3, TRAJ37)
CAVRGKGSGITGKLIF

SEQ ID NO: 538758 - protein, 15 aa, Homo sapiens
  CDR3 for beta chain variable domain of TCR clone 269379 (TRBV20-1, TRBJ2-1)
CSARGGTRYYNEQFF

SEQ ID NO: 538759 - protein, 15 aa, Homo sapiens
  CDR3 for alpha chain variable domain of TCR clone 269380 (TRAV26-2, TRAJ28)
CILVESGAVSYQLTF

SEQ ID NO: 538760 - protein, 16 aa, Homo sapiens
  CDR3 for beta chain variable domain of TCR clone 269380 (TRBV4-2, TRBJ1-2)
CASSQEIGGASYGYTF

SEQ ID NO: 538761 - protein, 14 aa, Homo sapiens
  CDR3 for alpha chain variable domain of TCR clone 269381 (TRAV27, TRAJ22)
CAGLPSGSARQLTF

SEQ ID NO: 538762 - protein, 13 aa, Homo sapiens
  CDR3 for beta chain variable domain of TCR clone 269381 (TRBV7-2, TRBJ2-7)
CASSSPSGGEQYF

SEQ ID NO: 538763 - protein, 13 aa, Homo sapiens
  CDR3 for alpha chain variable domain of TCR clone 269382 (TRAV21, TRAJ27)
CAARPGNAGKSTF

SEQ ID NO: 538764 - protein, 14 aa, Homo sapiens
  CDR3 for beta chain variable domain of TCR clone 269382 (TRBV7-9, TRBJ2-5)
CASSLDTAQETQYL

SEQ ID NO: 538765 - protein, 14 aa, Homo sapiens
  CDR3 for alpha chain variable domain of TCR clone 269383 (TRAV12-2, TRAJ53)
CAVKGGGSTYKLTF

SEQ ID NO: 538766 - protein, 14 aa, Homo sapiens
  CDR3 for beta chain variable domain of TCR clone 269383 (TRBV7-7, TRBJ2-2)
CATRQDSDTGELFF

SEQ ID NO: 538767 - protein, 15 aa, Homo sapiens
  CDR3 for alpha chain variable domain of TCR clone 269384 (TRAV3, TRAJ32)
CAVSSYGGATNKLIF

SEQ ID NO: 538768 - protein, 16 aa, Homo sapiens
  CDR3 for beta chain variable domain of TCR clone 269384 (TRBV4-3, TRBJ2-2)
CASSRLQGSGTGELFF

SEQ ID NO: 538769 - protein, 15 aa, Homo sapiens
  CDR3 for alpha chain variable domain of TCR clone 269385 (TRAV21, TRAJ53)
CATLNSGGSNYKLTF

SEQ ID NO: 538770 - protein, 14 aa, Homo sapiens
  CDR3 for beta chain variable domain of TCR clone 269385 (TRBV11-2, TRBJ2-3)
CASSLGRGTDTQYF

SEQ ID NO: 538771 - protein, 12 aa, Homo sapiens
  CDR3 for alpha chain variable domain of TCR clone 269386 (TRAV12-1, TRAJ40)
CVVYSGTYKYIY

SEQ ID NO: 538772 - protein, 18 aa, Homo sapiens
  CDR3 for beta chain variable domain of TCR clone 269386 (TRBV11-2, TRBJ2-3)
CASSLGGASRGAPNTQYF

SEQ ID NO: 538773 - protein, 18 aa, Homo sapiens
  CDR3 for alpha chain variable domain of TCR clone 269387 (TRAV21, TRAJ52)
CAVGPSPAGGTSYGKLTF

SEQ ID NO: 538774 - protein, 17 aa, Homo sapiens
  CDR3 for beta chain variable domain of TCR clone 269387 (TRBV13, TRBJ2-3)
CASSLTRVAGGRNTQYF

SEQ ID NO: 538775 - protein, 16 aa, Homo sapiens
  CDR3 for alpha chain variable domain of TCR clone 269388 (TRAV12-2, TRAJ28)
CAVITDSGAGSYRLTF

SEQ ID NO: 538776 - protein, 12 aa, Homo sapiens
  CDR3 for beta chain variable domain of TCR clone 269388 (TRBV9, TRBJ2-2)
CASSLVTGELFF

SEQ ID NO: 538777 - protein, 14 aa, Homo sapiens
  CDR3 for alpha chain variable domain of TCR clone 269389 (TRAV8-3, TRAJ44)
CAVGAGGTASKLTF

SEQ ID NO: 538778 - protein, 18 aa, Homo sapiens
  CDR3 for beta chain variable domain of TCR clone 269389 (TRBV5-1, TRBJ2-7)
CASSSTGGASGYSYEQYF

SEQ ID NO: 538779 - protein, 16 aa, Homo sapiens
  CDR3 for alpha chain variable domain of TCR clone 269390 (TRAV30, TRAJ24)
CGTEIVDADSWGKFQF

SEQ ID NO: 538780 - protein, 19 aa, Homo sapiens
  CDR3 for beta chain variable domain of TCR clone 269390 (TRBV2, TRBJ2-7)
CASSDDETSGRANDYEQYF

SEQ ID NO: 538781 - protein, 14 aa, Homo sapiens
  CDR3 for alpha chain variable domain of TCR clone 269391 (TRAV35, TRAJ22)
CAGHLSGSARQLTF

SEQ ID NO: 538782 - protein, 15 aa, Homo sapiens
  CDR3 for beta chain variable domain of TCR clone 269391 (TRBV7-3, TRBJ1-6)
CASSLGRGAGSTLHF

SEQ ID NO: 538783 - protein, 14 aa, Homo sapiens
  CDR3 for alpha chain variable domain of TCR clone 269392 (TRAV35, TRAJ33)
CAGWSQDSNYQLIW

SEQ ID NO: 538784 - protein, 15 aa, Homo sapiens
  CDR3 for beta chain variable domain of TCR clone 269392 (TRBV12-4, TRBJ2-5)
CASSPPTGLQETQYF

SEQ ID NO: 538785 - protein, 17 aa, Homo sapiens
  CDR3 for alpha chain variable domain of TCR clone 269393 (TRAV3, TRAJ6)
CAVRDGPRAGGSYIPTF

SEQ ID NO: 538786 - protein, 20 aa, Homo sapiens
  CDR3 for beta chain variable domain of TCR clone 269393 (TRBV7-8, TRBJ2-2)
CAISHLFPGPTIHITGELFF

SEQ ID NO: 538787 - protein, 16 aa, Homo sapiens
  CDR3 for alpha chain variable domain of TCR clone 269394 (TRAV12-3, TRAJ53)
CAMSPGSGGSNYKLTF

SEQ ID NO: 538788 - protein, 13 aa, Homo sapiens
  CDR3 for beta chain variable domain of TCR clone 269394 (TRBV10-3, TRBJ2-7)
CDSKLAVSYEQYF

SEQ ID NO: 538789 - protein, 13 aa, Homo sapiens
  CDR3 for alpha chain variable domain of TCR clone 269395 (TRAV13-1, TRAJ43)
CAASKNNNNDMRF

SEQ ID NO: 538790 - protein, 12 aa, Homo sapiens
  CDR3 for beta chain variable domain of TCR clone 269395 (TRBV11-2, TRBJ2-2)
CASSLGGGELFF

SEQ ID NO: 538791 - protein, 18 aa, Homo sapiens
  CDR3 for alpha chain variable domain of TCR clone 269396 (TRAV21, TRAJ52)
CAVRPSPAGGTSYGKLTF

SEQ ID NO: 538792 - protein, 17 aa, Homo sapiens
  CDR3 for beta chain variable domain of TCR clone 269396 (TRBV27, TRBJ2-7)
CASSISPTGLHPTEQYF

SEQ ID NO: 538793 - protein, 13 aa, Homo sapiens
  CDR3 for alpha chain variable domain of TCR clone 269397 (TRAV13-2, TRAJ22)
CRDPSGSASQLTL

SEQ ID NO: 538794 - protein, 15 aa, Homo sapiens
  CDR3 for beta chain variable domain of TCR clone 269397 (TRBV11-3, TRBJ2-1)
CASSLAGQTYNEQFF

SEQ ID NO: 538795 - protein, 14 aa, Homo sapiens
  CDR3 for alpha chain variable domain of TCR clone 269398 (TRAV3, TRAJ28)
CAVRRGAGSYQLTL

SEQ ID NO: 538796 - protein, 16 aa, Homo sapiens
  CDR3 for beta chain variable domain of TCR clone 269398 (TRBV4-1, TRBJ2-7)
CASSQEWTSGPLEQYF

SEQ ID NO: 538797 - protein, 11 aa, Homo sapiens
  CDR3 for alpha chain variable domain of TCR clone 269399 (TRAV12-2, TRAJ36)
CAVKDNLFFGT

SEQ ID NO: 538798 - protein, 15 aa, Homo sapiens
  CDR3 for beta chain variable domain of TCR clone 269399 (TRBV28, TRBJ2-2)
CASTVAGASTGELFF

SEQ ID NO: 538799 - protein, 17 aa, Homo sapiens
  CDR3 for alpha chain variable domain of TCR clone 269400 (TRAV3, TRAJ6)
CAVRYGPRAGGSYIPTF

SEQ ID NO: 538800 - protein, 13 aa, Homo sapiens
  CDR3 for beta chain variable domain of TCR clone 269400 (TRBV12-4, TRBJ2-7)
CASSPTETYEQYF

SEQ ID NO: 538801 - protein, 13 aa, Homo sapiens
  CDR3 for alpha chain variable domain of TCR clone 269401 (TRAV8-6, TRAJ49)
FAVITNTGNQFYF

SEQ ID NO: 538802 - protein, 14 aa, Homo sapiens
  CDR3 for beta chain variable domain of TCR clone 269401 (TRBV5-1, TRBJ2-7)
CASSRGKSLYEQYF

SEQ ID NO: 538803 - protein, 15 aa, Homo sapiens
  CDR3 for alpha chain variable domain of TCR clone 269402 (TRAV12-1, TRAJ44)
CVVFVNTGTASKLTF

SEQ ID NO: 538804 - protein, 13 aa, Homo sapiens
  CDR3 for beta chain variable domain of TCR clone 269402 (TRBV15, TRBJ1-6)
CATSGGLNSPLHF

SEQ ID NO: 538805 - protein, 14 aa, Homo sapiens
  CDR3 for alpha chain variable domain of TCR clone 269403 (TRAV20, TRAJ29)
CAVQSWVGNTPLVF

SEQ ID NO: 538806 - protein, 15 aa, Homo sapiens
  CDR3 for beta chain variable domain of TCR clone 269403 (TRBV29-1, TRBJ2-7)
CSVEFFDRGSYEQYF

SEQ ID NO: 538807 - protein, 12 aa, Homo sapiens
  CDR3 for alpha chain variable domain of TCR clone 269404 (TRAV16, TRAJ10)
CSRTGGGNKLTF

SEQ ID NO: 538808 - protein, 14 aa, Homo sapiens
  CDR3 for beta chain variable domain of TCR clone 269404 (TRBV7-3, TRBJ2-2)
CASSSGGYTGELFF

SEQ ID NO: 538809 - protein, 15 aa, Homo sapiens
  CDR3 for alpha chain variable domain of TCR clone 269405 (TRAV3, TRAJ13)
CAVRVYSGGYQKVTF

SEQ ID NO: 538810 - protein, 13 aa, Homo sapiens
  CDR3 for beta chain variable domain of TCR clone 269405 (TRBV12-5, TRBJ2-3)
CASGDRQSDTQYF

SEQ ID NO: 538811 - protein, 11 aa, Homo sapiens
  CDR3 for alpha chain variable domain of TCR clone 269406 (TRAV17, TRAJ39)
CATGGGNMLTF

SEQ ID NO: 538812 - protein, 16 aa, Homo sapiens
  CDR3 for beta chain variable domain of TCR clone 269406 (TRBV5-1, TRBJ2-1)
CASSFGVSGSYNEQFF

SEQ ID NO: 538813 - protein, 11 aa, Homo sapiens
  CDR3 for alpha chain variable domain of TCR clone 269407 (TRAV3, TRAJ21)
CAVGNFNKFYF

SEQ ID NO: 538814 - protein, 16 aa, Homo sapiens
  CDR3 for beta chain variable domain of TCR clone 269407 (TRBV7-2, TRBJ2-5)
CASSSKWLSGQETQYF

SEQ ID NO: 538815 - protein, 15 aa, Homo sapiens
  CDR3 for alpha chain variable domain of TCR clone 269408 (TRAV3, TRAJ17)
CAVRDTGAAGNKLTF

SEQ ID NO: 538816 - protein, 15 aa, Homo sapiens
  CDR3 for beta chain variable domain of TCR clone 269408 (TRBV11-2, TRBJ1-6)
CASSLDPWAVSPLHF

SEQ ID NO: 538817 - protein, 16 aa, Homo sapiens
  CDR3 for alpha chain variable domain of TCR clone 269409 (TRAV12-1, TRAJ53)
CVVTSVAGGSNYKLTF

SEQ ID NO: 538818 - protein, 16 aa, Homo sapiens
  CDR3 for beta chain variable domain of TCR clone 269409 (TRBV6-6, TRBJ2-3)
CASSYPHAGSTDTQYF

SEQ ID NO: 538819 - protein, 20 aa, Homo sapiens
  CDR3 for alpha chain variable domain of TCR clone 269410 (TRAV21, TRAJ30)
CAVRRRMRRSSLEKGHDFIF

SEQ ID NO: 538820 - protein, 15 aa, Homo sapiens
  CDR3 for beta chain variable domain of TCR clone 269410 (TRBV6-6, TRBJ2-7)
CASSYSYGGSYEQYF

SEQ ID NO: 538821 - protein, 14 aa, Homo sapiens
  CDR3 for alpha chain variable domain of TCR clone 269411 (TRAV17, TRAJ57)
CATDPQGGSEKLVF

SEQ ID NO: 538822 - protein, 18 aa, Homo sapiens
  CDR3 for beta chain variable domain of TCR clone 269411 (TRBV6-6, TRBJ1-3)
CASSYSKWDSISGNTIYF

SEQ ID NO: 538823 - protein, 20 aa, Homo sapiens
  CDR3 for alpha chain variable domain of TCR clone 269412 (TRAV8-3, TRAJ44)
LSTSVLWVRLYTGTASKITF

SEQ ID NO: 538824 - protein, 15 aa, Homo sapiens
  CDR3 for beta chain variable domain of TCR clone 269412 (TRBV6-5, TRBJ1-2)
CASSYSQAFNYGYTF

SEQ ID NO: 538825 - protein, 16 aa, Homo sapiens
  CDR3 for alpha chain variable domain of TCR clone 269413 (TRAV1-2, TRAJ16)
CAVNRFSDARSCSLQG

SEQ ID NO: 538826 - protein, 14 aa, Homo sapiens
  CDR3 for beta chain variable domain of TCR clone 269413 (TRBV12-5, TRBJ2-5)
CASGSRTHQETQYF

SEQ ID NO: 538827 - protein, 15 aa, Homo sapiens
  CDR3 for alpha chain variable domain of TCR clone 269414 (TRAV8-4, TRAJ37)
CAVSRGSGNTGKLTF

SEQ ID NO: 538828 - protein, 14 aa, Homo sapiens
  CDR3 for beta chain variable domain of TCR clone 269414 (TRBV7-2, TRBJ2-7)
CASRSQGAAYEQYF

SEQ ID NO: 538829 - protein, 20 aa, Homo sapiens
  CDR3 for alpha chain variable domain of TCR clone 269415 (TRAV8-3, TRAJ45)
LSTSVLWGSYSVGGADGLTF

SEQ ID NO: 538830 - protein, 11 aa, Homo sapiens
  CDR3 for beta chain variable domain of TCR clone 269415 (TRBV20-1, TRBJ2-5)
CSADRAETQYF

SEQ ID NO: 538831 - protein, 16 aa, Homo sapiens
  CDR3 for alpha chain variable domain of TCR clone 269416 (TRAV3, TRAJ18)
CAVRDGRGSNLGRLYF

SEQ ID NO: 538832 - protein, 13 aa, Homo sapiens
  CDR3 for beta chain variable domain of TCR clone 269416 (TRBV18, TRBJ1-1)
CASSPETKPEAFF

SEQ ID NO: 538833 - protein, 10 aa, Homo sapiens
  CDR3 for alpha chain variable domain of TCR clone 269417 (TRAV12-1, TRAJ49)
CVVNPNQFYF

SEQ ID NO: 538834 - protein, 13 aa, Homo sapiens
  CDR3 for beta chain variable domain of TCR clone 269417 (TRBV7-9, TRBJ2-2)
CASSLDPTGELFF

SEQ ID NO: 538835 - protein, 19 aa, Homo sapiens
  CDR3 for alpha chain variable domain of TCR clone 269418 (TRAV1-1, TRAJ20)
CLLLLRCERIGSNDYKLSF

SEQ ID NO: 538836 - protein, 14 aa, Homo sapiens
  CDR3 for beta chain variable domain of TCR clone 269418 (TRBV6-1, TRBJ1-3)
CASVQGGGGNTIYF

SEQ ID NO: 538837 - protein, 13 aa, Homo sapiens
  CDR3 for alpha chain variable domain of TCR clone 269419 (TRAV2, TRAJ40)
CTVVTSGTYKYIF

SEQ ID NO: 538838 - protein, 14 aa, Homo sapiens
  CDR3 for beta chain variable domain of TCR clone 269419 (TRBV19, TRBJ2-1)
CASPTLVLSGEQFF

SEQ ID NO: 538839 - protein, 10 aa, Homo sapiens
  CDR3 for alpha chain variable domain of TCR clone 269420 (TRAV13-1, TRAJ7)
LIGGNNRLAF

SEQ ID NO: 538840 - protein, 17 aa, Homo sapiens
  CDR3 for beta chain variable domain of TCR clone 269420 (TRBV11-2, TRBJ2-1)
CASSLYPPGVEYNEQFF

SEQ ID NO: 538841 - protein, 13 aa, Homo sapiens
  CDR3 for alpha chain variable domain of TCR clone 269421 (TRAV36/DV7, TRAJ54)
CAVYIQGAKKLVF

SEQ ID NO: 538842 - protein, 14 aa, Homo sapiens
  CDR3 for beta chain variable domain of TCR clone 269421 (TRBV19, TRBJ2-7)
CASNFRDTFTGMYF

SEQ ID NO: 538843 - protein, 16 aa, Homo sapiens
  CDR3 for alpha chain variable domain of TCR clone 269422 (TRAV8-3, TRAJ22)
CAVDILGPGSARQLTF

SEQ ID NO: 538844 - protein, 14 aa, Homo sapiens
  CDR3 for beta chain variable domain of TCR clone 269422 (TRBV11-2, TRBJ2-7)
CASSLELEGYEQYF

SEQ ID NO: 538845 - protein, 15 aa, Homo sapiens
  CDR3 for alpha chain variable domain of TCR clone 269423 (TRAV21, TRAJ24)
CAARSSTDSWGKLQF

SEQ ID NO: 538846 - protein, 13 aa, Homo sapiens
  CDR3 for beta chain variable domain of TCR clone 269423 (TRBV3-1, TRBJ2-1)
CASSRTGSGEQFF

SEQ ID NO: 538847 - protein, 11 aa, Homo sapiens
  CDR3 for alpha chain variable domain of TCR clone 269424 (TRAV8-3, TRAJ4)
CAVGARPDFKR

SEQ ID NO: 538848 - protein, 13 aa, Homo sapiens
  CDR3 for beta chain variable domain of TCR clone 269424 (TRBV20-1, TRBJ1-2)
CSATGIQGSGYTI

SEQ ID NO: 538849 - protein, 13 aa, Homo sapiens
  CDR3 for alpha chain variable domain of TCR clone 269425 (TRAV29/DV5, TRAJ31)
CAASRNNNARLMC

SEQ ID NO: 538850 - protein, 13 aa, Homo sapiens
  CDR3 for beta chain variable domain of TCR clone 269425 (TRBV7-2, TRBJ2-4)
CASSREHANIQYF

SEQ ID NO: 538851 - protein, 15 aa, Homo sapiens
  CDR3 for alpha chain variable domain of TCR clone 269426 (TRAV12-3, TRAJ6)
CAMSATSGGSYIPTF

SEQ ID NO: 538852 - protein, 14 aa, Homo sapiens
  CDR3 for beta chain variable domain of TCR clone 269426 (TRBV12-4, TRBJ2-3)
CASTIAGWGDTQYF

SEQ ID NO: 538853 - protein, 10 aa, Homo sapiens
  CDR3 for alpha chain variable domain of TCR clone 269427 (TRAV12-2, TRAJ41)
CAVTGYALNF

SEQ ID NO: 538854 - protein, 15 aa, Homo sapiens
  CDR3 for beta chain variable domain of TCR clone 269427 (TRBV4-2, TRBJ2-1)
CASSQDVGLADEQFF

SEQ ID NO: 538855 - protein, 14 aa, Homo sapiens
  CDR3 for alpha chain variable domain of TCR clone 269428 (TRAV8-6, TRAJ54)
CAVTEGRGAQKLVF

SEQ ID NO: 538856 - protein, 14 aa, Homo sapiens
  CDR3 for beta chain variable domain of TCR clone 269428 (TRBV27, TRBJ2-7)
CASSIGQGAQKQYV

SEQ ID NO: 538857 - protein, 11 aa, Homo sapiens
  CDR3 for alpha chain variable domain of TCR clone 269429 (TRAV17, TRAJ9)
CATTGGFKTIF

SEQ ID NO: 538858 - protein, 13 aa, Homo sapiens
  CDR3 for beta chain variable domain of TCR clone 269429 (TRBV19, TRBJ1-5)
CASSIGGNQPQHF

SEQ ID NO: 538859 - protein, 15 aa, Homo sapiens
  CDR3 for alpha chain variable domain of TCR clone 269430 (TRAV29/DV5, TRAJ24)
YAASGATDSWGKFQF

SEQ ID NO: 538860 - protein, 12 aa, Homo sapiens
  CDR3 for beta chain variable domain of TCR clone 269430 (TRBV11-2, TRBJ2-2)
CASSLPTGELFF

SEQ ID NO: 538861 - protein, 11 aa, Homo sapiens
  CDR3 for alpha chain variable domain of TCR clone 269431 (TRAV2, TRAJ33)
CAVESNYQLIW

SEQ ID NO: 538862 - protein, 14 aa, Homo sapiens
  CDR3 for beta chain variable domain of TCR clone 269431 (TRBV18, TRBJ2-2)
CASSPPSLPGELFF

SEQ ID NO: 538863 - protein, 19 aa, Homo sapiens
  CDR3 for alpha chain variable domain of TCR clone 269432 (TRAV3, TRAJ6)
CAVRDRNPSRSGGSYIPPF

SEQ ID NO: 538864 - protein, 15 aa, Homo sapiens
  CDR3 for beta chain variable domain of TCR clone 269432 (TRBV18, TRBJ2-7)
CASSRTFMDSYEQYF

SEQ ID NO: 538865 - protein, 14 aa, Homo sapiens
  CDR3 for alpha chain variable domain of TCR clone 269433 (TRAV26-1, TRAJ53)
CIADRGGSNYKLTF

SEQ ID NO: 538866 - protein, 14 aa, Homo sapiens
  CDR3 for beta chain variable domain of TCR clone 269433 (TRBV5-4, TRBJ1-1)
CASSLDSRRDEAFF

SEQ ID NO: 538867 - protein, 13 aa, Homo sapiens
  CDR3 for alpha chain variable domain of TCR clone 269434 (TRAV13-2, TRAJ15)
CAERPQAGTALIF

SEQ ID NO: 538868 - protein, 15 aa, Homo sapiens
  CDR3 for beta chain variable domain of TCR clone 269434 (TRBV11-2, TRBJ2-7)
CASRFPGTGGYEHYF

SEQ ID NO: 538869 - protein, 12 aa, Homo sapiens
  CDR3 for alpha chain variable domain of TCR clone 269435 (TRAV21, TRAJ33)
CAKMDSNYQLIC

SEQ ID NO: 538870 - protein, 12 aa, Homo sapiens
  CDR3 for beta chain variable domain of TCR clone 269435 (TRBV7-9, TRBJ2-7)
CATRTDAYEQYF

SEQ ID NO: 538871 - protein, 14 aa, Homo sapiens
  CDR3 for alpha chain variable domain of TCR clone 269436 (TRAV9-2, TRAJ36)
CALPWRTGANNLFF

SEQ ID NO: 538872 - protein, 14 aa, Homo sapiens
  CDR3 for beta chain variable domain of TCR clone 269436 (TRBV2, TRBJ1-2)
CASSELQVNYGYIF

SEQ ID NO: 538873 - protein, 14 aa, Homo sapiens
  CDR3 for alpha chain variable domain of TCR clone 269437 (TRAV12-2, TRAJ36)
CAVTPPTGANNLFF

SEQ ID NO: 538874 - protein, 13 aa, Homo sapiens
  CDR3 for beta chain variable domain of TCR clone 269437 (TRBV20-1, TRBJ2-2)
CSASAAGTGELFF

SEQ ID NO: 538875 - protein, 14 aa, Homo sapiens
  CDR3 for alpha chain variable domain of TCR clone 269438 (TRAV21, TRAJ28)
CSVGSGAGSYQLTF

SEQ ID NO: 538876 - protein, 14 aa, Homo sapiens
  CDR3 for beta chain variable domain of TCR clone 269438 (TRBV18, TRBJ1-4)
CASSPGPNGEKLFF

SEQ ID NO: 538877 - protein, 12 aa, Homo sapiens
  CDR3 for alpha chain variable domain of TCR clone 269439 (TRAV13-2, TRAJ39)
CAEKYAGNMLTF

SEQ ID NO: 538878 - protein, 12 aa, Homo sapiens
  CDR3 for beta chain variable domain of TCR clone 269439 (TRBV11-2, TRBJ2-2)
CASSLGGGELFF

SEQ ID NO: 538879 - protein, 13 aa, Homo sapiens
  CDR3 for alpha chain variable domain of TCR clone 269440 (TRAV8-3, TRAJ43)
CAVGPDNNNDIRF

SEQ ID NO: 538880 - protein, 12 aa, Homo sapiens
  CDR3 for beta chain variable domain of TCR clone 269440 (TRBV7-2, TRBJ1-6)
CASSLASSPLHF

SEQ ID NO: 538881 - protein, 14 aa, Homo sapiens
  CDR3 for alpha chain variable domain of TCR clone 269441 (TRAV38-1, TRAJ40)
CALRPTSGTYKYIF

SEQ ID NO: 538882 - protein, 16 aa, Homo sapiens
  CDR3 for beta chain variable domain of TCR clone 269441 (TRBV6-1, TRBJ1-2)
CASSGAWQGRSHGYAF

SEQ ID NO: 538883 - protein, 17 aa, Homo sapiens
  CDR3 for alpha chain variable domain of TCR clone 269442 (TRAV3, TRAJ6)
CAVRDGPRAGGGYIPTF

SEQ ID NO: 538884 - protein, 16 aa, Homo sapiens
  CDR3 for beta chain variable domain of TCR clone 269442 (TRBV27, TRBJ2-2)
CASSFRGLVRTGELFF

SEQ ID NO: 538885 - protein, 16 aa, Homo sapiens
  CDR3 for alpha chain variable domain of TCR clone 269443 (TRAV8-3, TRAJ18)
CAVALDRGSTLGRPYF

SEQ ID NO: 538886 - protein, 11 aa, Homo sapiens
  CDR3 for beta chain variable domain of TCR clone 269443 (TRBV29-1, TRBJ1-1)
CSVEILTEAFF

SEQ ID NO: 538887 - protein, 12 aa, Homo sapiens
  CDR3 for alpha chain variable domain of TCR clone 269444 (TRAV12-3, TRAJ17)
CAMTLTGNKLTF

SEQ ID NO: 538888 - protein, 18 aa, Homo sapiens
  CDR3 for beta chain variable domain of TCR clone 269444 (TRBV28, TRBJ2-1)
CASSSTSGRANSYNEQFF

SEQ ID NO: 538889 - protein, 14 aa, Homo sapiens
  CDR3 for alpha chain variable domain of TCR clone 269445 (TRAV12-2, TRAJ13)
CAVKKTGGYQKITF

SEQ ID NO: 538890 - protein, 14 aa, Homo sapiens
  CDR3 for beta chain variable domain of TCR clone 269445 (TRBV19, TRBJ2-7)
CASSMGQGAIEQYF

SEQ ID NO: 538891 - protein, 16 aa, Homo sapiens
  CDR3 for alpha chain variable domain of TCR clone 269446 (TRAV30, TRAJ24)
CGTEIVDADSWGKFQF

SEQ ID NO: 538892 - protein, 13 aa, Homo sapiens
  CDR3 for beta chain variable domain of TCR clone 269446 (TRBV7-3, TRBJ1-1)
CASSQDWGVEAFF

SEQ ID NO: 538893 - protein, 14 aa, Homo sapiens
  CDR3 for alpha chain variable domain of TCR clone 269447 (TRAV3, TRAJ9)
CAVRLNTEASKLSL

SEQ ID NO: 538894 - protein, 15 aa, Homo sapiens
  CDR3 for beta chain variable domain of TCR clone 269447 (TRBV7-2, TRBJ2-1)
CASSLASGRVNEQFF

SEQ ID NO: 538895 - protein, 23 aa, Homo sapiens
  CDR3 for alpha chain variable domain of TCR clone 269448 (TRAV12-2, TRAJ43)
SLLIRDSQPSDSATYLCAFDMRF

SEQ ID NO: 538896 - protein, 18 aa, Homo sapiens
  CDR3 for beta chain variable domain of TCR clone 269448 (TRBV20-1, TRBJ2-3)
GSASGLAGGPGTTDTQYF

SEQ ID NO: 538897 - protein, 14 aa, Homo sapiens
  CDR3 for alpha chain variable domain of TCR clone 269449 (TRAV1-2, TRAJ15)
CAVRDRQAGTALIF

SEQ ID NO: 538898 - protein, 17 aa, Homo sapiens
  CDR3 for beta chain variable domain of TCR clone 269449 (TRBV5-5, TRBJ1-2)
CASSLGSLDGQSEGDTF

SEQ ID NO: 538899 - protein, 14 aa, Homo sapiens
  CDR3 for alpha chain variable domain of TCR clone 269450 (TRAV12-2, TRAJ17)
CAVLFKAAGNKLTF

SEQ ID NO: 538900 - protein, 15 aa, Homo sapiens
  CDR3 for beta chain variable domain of TCR clone 269450 (TRBV7-2, TRBJ2-7)
CASSLSSGRTYEQYF

SEQ ID NO: 538901 - protein, 16 aa, Homo sapiens
  CDR3 for alpha chain variable domain of TCR clone 269451 (TRAV30, TRAJ24)
CGTEIVDADSWGKFQF

SEQ ID NO: 538902 - protein, 13 aa, Homo sapiens
  CDR3 for beta chain variable domain of TCR clone 269451 (TRBV20-1, TRBJ1-1)
CSAPPVGHTEAFF

SEQ ID NO: 538903 - protein, 15 aa, Homo sapiens
  CDR3 for alpha chain variable domain of TCR clone 269452 (TRAV1-2, TRAJ28)
CAIQYSGAGCYQLTF

SEQ ID NO: 538904 - protein, 13 aa, Homo sapiens
  CDR3 for beta chain variable domain of TCR clone 269452 (TRBV20-1, TRBJ2-7)
CSATHTSGYEQYF

SEQ ID NO: 538905 - protein, 14 aa, Homo sapiens
  CDR3 for alpha chain variable domain of TCR clone 269453 (TRAV4, TRAJ6)
RLVGEAGGSYIPTF

SEQ ID NO: 538906 - protein, 16 aa, Homo sapiens
  CDR3 for beta chain variable domain of TCR clone 269453 (TRBV7-6, TRBJ2-1)
CASSLNEGPSYNEQFF

SEQ ID NO: 538907 - protein, 16 aa, Homo sapiens
  CDR3 for alpha chain variable domain of TCR clone 269454 (TRAV1-2, TRAJ10)
CAVRGVLTGGGNKLTF

SEQ ID NO: 538908 - protein, 17 aa, Homo sapiens
  CDR3 for beta chain variable domain of TCR clone 269454 (TRBV7-3, TRBJ2-5)
CASSLGSGRSGSETQYF

SEQ ID NO: 538909 - protein, 12 aa, Homo sapiens
  CDR3 for alpha chain variable domain of TCR clone 269455 (TRAV38-1, TRAJ47)
CAFETYGNKLVF

SEQ ID NO: 538910 - protein, 15 aa, Homo sapiens
  CDR3 for beta chain variable domain of TCR clone 269455 (TRBV20-1, TRBJ2-7)
CSARKGLAEPYEQYF

SEQ ID NO: 538911 - protein, 17 aa, Homo sapiens
  CDR3 for alpha chain variable domain of TCR clone 269456 (TRAV12-3, TRAJ26)
CAMSGGRWDNYGQNFVL

SEQ ID NO: 538912 - protein, 12 aa, Homo sapiens
  CDR3 for beta chain variable domain of TCR clone 269456 (TRBV19, TRBJ1-1)
CASSTTGIEAFF

SEQ ID NO: 538913 - protein, 18 aa, Homo sapiens
  CDR3 for alpha chain variable domain of TCR clone 269457 (TRAV1-2, TRAJ18)
FAVRDMGDRGSTLGRLYF

SEQ ID NO: 538914 - protein, 16 aa, Homo sapiens
  CDR3 for beta chain variable domain of TCR clone 269457 (TRBV29-1, TRBJ1-2)
CSVEANRNIANYGYTF

SEQ ID NO: 538915 - protein, 13 aa, Homo sapiens
  CDR3 for alpha chain variable domain of TCR clone 269458 (TRAV35, TRAJ32)
CAGVGGATNKLIF

SEQ ID NO: 538916 - protein, 17 aa, Homo sapiens
  CDR3 for beta chain variable domain of TCR clone 269458 (TRBV4-3, TRBJ2-1)
GASSQFSSGRASGEQFF

SEQ ID NO: 538917 - protein, 16 aa, Homo sapiens
  CDR3 for alpha chain variable domain of TCR clone 269459 (TRAV8-3, TRAJ45)
CAVGDGSGGGADGLTS

SEQ ID NO: 538918 - protein, 15 aa, Homo sapiens
  CDR3 for beta chain variable domain of TCR clone 269459 (TRBV5-1, TRBJ2-2)
CASSSQGGNTGELFF

SEQ ID NO: 538919 - protein, 15 aa, Homo sapiens
  CDR3 for alpha chain variable domain of TCR clone 269460 (TRAV3, TRAJ20)
CAVRYIKLSDYKLSF

SEQ ID NO: 538920 - protein, 18 aa, Homo sapiens
  CDR3 for beta chain variable domain of TCR clone 269460 (TRBV20-1, TRBJ2-5)
CSQTGDSGRLGGKETQYF

SEQ ID NO: 538921 - protein, 15 aa, Homo sapiens
  CDR3 for alpha chain variable domain of TCR clone 269461 (TRAV3, TRAJ5)
CAVRDLDTGRRALTF

SEQ ID NO: 538922 - protein, 15 aa, Homo sapiens
  CDR3 for beta chain variable domain of TCR clone 269461 (TRBV6-1, TRBJ2-3)
CASSERGGITDTQYF

SEQ ID NO: 538923 - protein, 11 aa, Homo sapiens
  CDR3 for alpha chain variable domain of TCR clone 269462 (TRAV2, TRAJ33)
CAVDSNYQLIW

SEQ ID NO: 538924 - protein, 18 aa, Homo sapiens
  CDR3 for beta chain variable domain of TCR clone 269462 (TRBV11-2, TRBJ2-3)
CASSSGLAEATSTDTQYF

SEQ ID NO: 538925 - protein, 12 aa, Homo sapiens
  CDR3 for alpha chain variable domain of TCR clone 269463 (TRAV25, TRAJ17)
CAGEAAGNKLTF

SEQ ID NO: 538926 - protein, 15 aa, Homo sapiens
  CDR3 for beta chain variable domain of TCR clone 269463 (TRBV28, TRBJ1-3)
CASSMGWASGNTIYF

SEQ ID NO: 538927 - protein, 18 aa, Homo sapiens
  CDR3 for alpha chain variable domain of TCR clone 269464 (TRAV13-1, TRAJ52)
CAAKNPNAGGTSYGKLTF

SEQ ID NO: 538928 - protein, 12 aa, Homo sapiens
  CDR3 for beta chain variable domain of TCR clone 269464 (TRBV4-3, TRBJ2-1)
CAISLSGYEQFF

SEQ ID NO: 538929 - protein, 17 aa, Homo sapiens
  CDR3 for alpha chain variable domain of TCR clone 269465 (TRAV3, TRAJ42)
CAVRDRDYGGSQGNLIF

SEQ ID NO: 538930 - protein, 15 aa, Homo sapiens
  CDR3 for beta chain variable domain of TCR clone 269465 (TRBV4-2, TRBJ1-2)
CASSQRTGGRDGYAF

SEQ ID NO: 538931 - protein, 12 aa, Homo sapiens
  CDR3 for alpha chain variable domain of TCR clone 269466 (TRAV13-1, TRAJ23)
CAASKKGGKLIF

SEQ ID NO: 538932 - protein, 13 aa, Homo sapiens
  CDR3 for beta chain variable domain of TCR clone 269466 (TRBV10-3, TRBJ2-7)
CASKLAVNYEQYF

SEQ ID NO: 538933 - protein, 13 aa, Homo sapiens
  CDR3 for alpha chain variable domain of TCR clone 269467 (TRAV2, TRAJ40)
CAVVSSGTYKYIF

SEQ ID NO: 538934 - protein, 14 aa, Homo sapiens
  CDR3 for beta chain variable domain of TCR clone 269467 (TRBV19, TRBJ2-1)
CASPTVVLSGEQFF

SEQ ID NO: 538935 - protein, 18 aa, Homo sapiens
  CDR3 for alpha chain variable domain of TCR clone 269468 (TRAV38-2/DV8, TRAJ45)
CISVLILLLGGGADVLTF

SEQ ID NO: 538936 - protein, 14 aa, Homo sapiens
  CDR3 for beta chain variable domain of TCR clone 269468 (TRBV7-9, TRBJ2-2)
CASSLGHRTGELFF

SEQ ID NO: 538937 - protein, 15 aa, Homo sapiens
  CDR3 for alpha chain variable domain of TCR clone 269469 (TRAV35, TRAJ40)
CAGQLGQAGTYKYIF

SEQ ID NO: 538938 - protein, 15 aa, Homo sapiens
  CDR3 for beta chain variable domain of TCR clone 269469 (TRBV7-3, TRBJ1-2)
CASSLDREPNYGYTF

SEQ ID NO: 538939 - protein, 14 aa, Homo sapiens
  CDR3 for alpha chain variable domain of TCR clone 269470 (TRAV12-1, TRAJ12)
CVVTRMDNSYKLIF

SEQ ID NO: 538940 - protein, 13 aa, Homo sapiens
  CDR3 for beta chain variable domain of TCR clone 269470 (TRBV20-1, TRBJ1-1)
CSARGGGNTETFI

SEQ ID NO: 538941 - protein, 14 aa, Homo sapiens
  CDR3 for alpha chain variable domain of TCR clone 269471 (TRAV23/DV6, TRAJ57)
CAASNQGGSEKLVF

SEQ ID NO: 538942 - protein, 18 aa, Homo sapiens
  CDR3 for beta chain variable domain of TCR clone 269471 (TRBV4-3, TRBJ2-3)
CASSQSPPAGSSTDTQYF

SEQ ID NO: 538943 - protein, 15 aa, Homo sapiens
  CDR3 for alpha chain variable domain of TCR clone 269472 (TRAV14/DV4, TRAJ8)
CAMREGKTGFQKLAF

SEQ ID NO: 538944 - protein, 15 aa, Homo sapiens
  CDR3 for beta chain variable domain of TCR clone 269472 (TRBV28, TRBJ2-1)
CASSRSSGGVDEQFF

SEQ ID NO: 538945 - protein, 14 aa, Homo sapiens
  CDR3 for alpha chain variable domain of TCR clone 269473 (TRAV1-2, TRAJ16)
CAVNRFSDGQKLLF

SEQ ID NO: 538946 - protein, 17 aa, Homo sapiens
  CDR3 for beta chain variable domain of TCR clone 269473 (TRBV12-4, TRBJ1-1)
CASSLSGFRTMNTEAFF

SEQ ID NO: 538947 - protein, 14 aa, Homo sapiens
  CDR3 for alpha chain variable domain of TCR clone 269474 (TRAV1-2, TRAJ16)
CAANRFSEGQKLLF

SEQ ID NO: 538948 - protein, 13 aa, Homo sapiens
  CDR3 for beta chain variable domain of TCR clone 269474 (TRBV7-9, TRBJ1-2)
CASSLKQNYGYTF

SEQ ID NO: 538949 - protein, 16 aa, Homo sapiens
  CDR3 for alpha chain variable domain of TCR clone 269475 (TRAV20, TRAJ53)
CAVQGNSGGSNYKLTF

SEQ ID NO: 538950 - protein, 14 aa, Homo sapiens
  CDR3 for beta chain variable domain of TCR clone 269475 (TRBV20-1, TRBJ2-1)
CSAQIGGSANEQFF

SEQ ID NO: 538951 - protein, 12 aa, Homo sapiens
  CDR3 for alpha chain variable domain of TCR clone 269476 (TRAV30, TRAJ39)
CGRGNAGNMLTF

SEQ ID NO: 538952 - protein, 15 aa, Homo sapiens
  CDR3 for beta chain variable domain of TCR clone 269476 (TRBV5-1, TRBJ1-1)
CASSWTGRGNTEAFF

SEQ ID NO: 538953 - protein, 14 aa, Homo sapiens
  CDR3 for alpha chain variable domain of TCR clone 269477 (TRAV38-1, TRAJ29)
CAFITPSGNTPLVF

SEQ ID NO: 538954 - protein, 15 aa, Homo sapiens
  CDR3 for beta chain variable domain of TCR clone 269477 (TRBV5-1, TRBJ2-1)
CASSPPSAPYNEQVF

SEQ ID NO: 538955 - protein, 15 aa, Homo sapiens
  CDR3 for alpha chain variable domain of TCR clone 269478 (TRAV13-1, TRAJ45)
CAASGTGGGADGVTF

SEQ ID NO: 538956 - protein, 14 aa, Homo sapiens
  CDR3 for beta chain variable domain of TCR clone 269478 (TRBV12-4, TRBJ1-2)
CASSFVGTAYGYTF

SEQ ID NO: 538957 - protein, 16 aa, Homo sapiens
  CDR3 for alpha chain variable domain of TCR clone 269479 (TRAV17, TRAJ53)
CATDALSVGSNYKLTF

SEQ ID NO: 538958 - protein, 12 aa, Homo sapiens
  CDR3 for beta chain variable domain of TCR clone 269479 (TRBV5-1, TRBJ2-7)
CASSFRGYEQYF

SEQ ID NO: 538959 - protein, 16 aa, Homo sapiens
  CDR3 for alpha chain variable domain of TCR clone 269480 (TRAV4, TRAJ9)
CLVGAPNRPGGFKTIF

SEQ ID NO: 538960 - protein, 16 aa, Homo sapiens
  CDR3 for beta chain variable domain of TCR clone 269480 (TRBV28, TRBJ1-4)
CASSPPYRGRSEKLFF

SEQ ID NO: 538961 - protein, 11 aa, Homo sapiens
  CDR3 for alpha chain variable domain of TCR clone 269481 (TRAV17, TRAJ43)
CATPRSNDMRF

SEQ ID NO: 538962 - protein, 13 aa, Homo sapiens
  CDR3 for beta chain variable domain of TCR clone 269481 (TRBV15, TRBJ1-6)
CATSGGLNSPLHF

SEQ ID NO: 538963 - protein, 11 aa, Homo sapiens
  CDR3 for alpha chain variable domain of TCR clone 269482 (TRAV35, TRAJ30)
CAPGGDDKIIF

SEQ ID NO: 538964 - protein, 13 aa, Homo sapiens
  CDR3 for beta chain variable domain of TCR clone 269482 (TRBV27, TRBJ2-1)
CASRTLGVGEQFF

SEQ ID NO: 538965 - protein, 12 aa, Homo sapiens
  CDR3 for alpha chain variable domain of TCR clone 269483 (TRAV16, TRAJ10)
CSRTGGGNKLTF

SEQ ID NO: 538966 - protein, 14 aa, Homo sapiens
  CDR3 for beta chain variable domain of TCR clone 269483 (TRBV5-1, TRBJ1-1)
CASSSTGEDTEAFF

SEQ ID NO: 538967 - protein, 14 aa, Homo sapiens
  CDR3 for alpha chain variable domain of TCR clone 269484 (TRAV30, TRAJ26)
CGTAIVSYGQNFVF

SEQ ID NO: 538968 - protein, 14 aa, Homo sapiens
  CDR3 for beta chain variable domain of TCR clone 269484 (TRBV7-3, TRBJ1-1)
CASSLKGGNTEAFF

SEQ ID NO: 538969 - protein, 16 aa, Homo sapiens
  CDR3 for alpha chain variable domain of TCR clone 269485 (TRAV39, TRAJ32)
CAVDMEYGGATNKLIF

SEQ ID NO: 538970 - protein, 13 aa, Homo sapiens
  CDR3 for beta chain variable domain of TCR clone 269485 (TRBV10-3, TRBJ2-7)
CASKLAVNYEQYF

SEQ ID NO: 538971 - protein, 14 aa, Homo sapiens
  CDR3 for alpha chain variable domain of TCR clone 269486 (TRAV12-3, TRAJ10)
SHLPLSGGGNKLTF

SEQ ID NO: 538972 - protein, 13 aa, Homo sapiens
  CDR3 for beta chain variable domain of TCR clone 269486 (TRBV4-1, TRBJ2-2)
CASSQENTGELFF

SEQ ID NO: 538973 - protein, 15 aa, Homo sapiens
  CDR3 for alpha chain variable domain of TCR clone 269487 (TRAV3, TRAJ20)
CAVRDIKLSDYKLSF

SEQ ID NO: 538974 - protein, 15 aa, Homo sapiens
  CDR3 for beta chain variable domain of TCR clone 269487 (TRBV7-3, TRBJ2-2)
CASSETGQGTGELFF

SEQ ID NO: 538975 - protein, 12 aa, Homo sapiens
  CDR3 for alpha chain variable domain of TCR clone 269488 (TRAV17, TRAJ49)
CVTVTTGNQFYF

SEQ ID NO: 538976 - protein, 18 aa, Homo sapiens
  CDR3 for beta chain variable domain of TCR clone 269488 (TRBV11-2, TRBJ2-6)
CASSLNPFLGTGANVLTF

SEQ ID NO: 538977 - protein, 14 aa, Homo sapiens
  CDR3 for alpha chain variable domain of TCR clone 269489 (TRAV23/DV6, TRAJ4)
CAANLSGGYYKLIF

SEQ ID NO: 538978 - protein, 11 aa, Homo sapiens
  CDR3 for beta chain variable domain of TCR clone 269489 (TRBV7-9, TRBJ2-3)
CASSPTDTQYF

SEQ ID NO: 538979 - protein, 17 aa, Homo sapiens
  CDR3 for alpha chain variable domain of TCR clone 269490 (TRAV8-6, TRAJ58)
CAVSSWVGETSGSRLTF

SEQ ID NO: 538980 - protein, 11 aa, Homo sapiens
  CDR3 for beta chain variable domain of TCR clone 269490 (TRBV7-3, TRBJ2-5)
CASSLSETQYF

SEQ ID NO: 538981 - protein, 13 aa, Homo sapiens
  CDR3 for alpha chain variable domain of TCR clone 269491 (TRAV12-1, TRAJ33)
CGDAPDSNYQLIW

SEQ ID NO: 538982 - protein, 15 aa, Homo sapiens
  CDR3 for beta chain variable domain of TCR clone 269491 (TRBV7-3, TRBJ2-1)
CASSLGQGPFGEQFF

SEQ ID NO: 538983 - protein, 15 aa, Homo sapiens
  CDR3 for alpha chain variable domain of TCR clone 269492 (TRAV13-1, TRAJ9)
CAASTLNTGGFKTIF

SEQ ID NO: 538984 - protein, 16 aa, Homo sapiens
  CDR3 for beta chain variable domain of TCR clone 269492 (TRBV12-5, TRBJ2-5)
CASGPRTSGNQETQYF

SEQ ID NO: 538985 - protein, 17 aa, Homo sapiens
  CDR3 for alpha chain variable domain of TCR clone 269493 (TRAV1-2, TRAJ8)
CAVRDPDENTGFQQLVF

SEQ ID NO: 538986 - protein, 16 aa, Homo sapiens
  CDR3 for beta chain variable domain of TCR clone 269493 (TRBV7-9, TRBJ2-2)
CASSGFGGANTGELFF

SEQ ID NO: 538987 - protein, 15 aa, Homo sapiens
  CDR3 for alpha chain variable domain of TCR clone 269494 (TRAV2, TRAJ15)
CAVEDRGQAGTALIF

SEQ ID NO: 538988 - protein, 12 aa, Homo sapiens
  CDR3 for beta chain variable domain of TCR clone 269494 (TRBV19, TRBJ1-5)
CASSIAQQPQHF

SEQ ID NO: 538989 - protein, 11 aa, Homo sapiens
  CDR3 for alpha chain variable domain of TCR clone 269495 (TRAV2, TRAJ13)
CASGGYQKVTF

SEQ ID NO: 538990 - protein, 15 aa, Homo sapiens
  CDR3 for beta chain variable domain of TCR clone 269495 (TRBV20-1, TRBJ2-6)
CSARDRGPGANVLTF

SEQ ID NO: 538991 - protein, 16 aa, Homo sapiens
  CDR3 for alpha chain variable domain of TCR clone 269496 (TRAV12-3, TRAJ53)
CAMSPGSGGSNYKLTF

SEQ ID NO: 538992 - protein, 18 aa, Homo sapiens
  CDR3 for beta chain variable domain of TCR clone 269496 (TRBV28, TRBJ2-6)
CASSLAGRAVSGANVLTF

SEQ ID NO: 538993 - protein, 16 aa, Homo sapiens
  CDR3 for alpha chain variable domain of TCR clone 269497 (TRAV30, TRAJ24)
CDTEIVDADSWGKFQV

SEQ ID NO: 538994 - protein, 15 aa, Homo sapiens
  CDR3 for beta chain variable domain of TCR clone 269497 (TRBV20-1, TRBJ2-7)
CSARDRVSGMDEQYF

SEQ ID NO: 538995 - protein, 15 aa, Homo sapiens
  CDR3 for alpha chain variable domain of TCR clone 269498 (TRAV8-3, TRAJ32)
CAVDLYGGATNKLIF

SEQ ID NO: 538996 - protein, 18 aa, Homo sapiens
  CDR3 for beta chain variable domain of TCR clone 269498 (TRBV13, TRBJ2-6)
CASSPMTSGGSGANVLTF

SEQ ID NO: 538997 - protein, 14 aa, Homo sapiens
  CDR3 for alpha chain variable domain of TCR clone 269499 (TRAV12-2, TRAJ17)
CAVLFTAAGNKLTF

SEQ ID NO: 538998 - protein, 15 aa, Homo sapiens
  CDR3 for beta chain variable domain of TCR clone 269499 (TRBV20-1, TRBJ2-7)
CSARDRVSGMDEQYF

SEQ ID NO: 538999 - protein, 13 aa, Homo sapiens
  CDR3 for alpha chain variable domain of TCR clone 269500 (TRAV12-2, TRAJ18)
CAVRGSTLGRLYL

SEQ ID NO: 539000 - protein, 20 aa, Homo sapiens
  CDR3 for beta chain variable domain of TCR clone 269500 (TRBV7-8, TRBJ2-2)
CASSHLFPGPTIHITGELFF

SEQ ID NO: 539001 - protein, 12 aa, Homo sapiens
  CDR3 for alpha chain variable domain of TCR clone 269501 (TRAV2, TRAJ5)
CASDTGRRALTF

SEQ ID NO: 539002 - protein, 11 aa, Homo sapiens
  CDR3 for beta chain variable domain of TCR clone 269501 (TRBV12-4, TRBJ2-3)
CASTATDTQYF

SEQ ID NO: 539003 - protein, 14 aa, Homo sapiens
  CDR3 for alpha chain variable domain of TCR clone 269502 (TRAV35, TRAJ13)
CAGSPSGVYQKVTF

SEQ ID NO: 539004 - protein, 17 aa, Homo sapiens
  CDR3 for beta chain variable domain of TCR clone 269502 (TRBV18, TRBJ1-5)
CQLTTCTVRQNNQPQHF

SEQ ID NO: 539005 - protein, 14 aa, Homo sapiens
  CDR3 for alpha chain variable domain of TCR clone 269503 (TRAV13-1, TRAJ35)
CSASKGGFGNVLHC

SEQ ID NO: 539006 - protein, 15 aa, Homo sapiens
  CDR3 for beta chain variable domain of TCR clone 269503 (TRBV7-3, TRBJ2-1)
CASSLGQGPFGEQFF

SEQ ID NO: 539007 - protein, 18 aa, Homo sapiens
  CDR3 for alpha chain variable domain of TCR clone 269504 (TRAV16, TRAJ26)
CSLTRCSEFCLWSRNQIF

SEQ ID NO: 539008 - protein, 13 aa, Homo sapiens
  CDR3 for beta chain variable domain of TCR clone 269504 (TRBV4-2, TRBJ1-1)
CASSQAGNTEAFF

SEQ ID NO: 539009 - protein, 16 aa, Homo sapiens
  CDR3 for alpha chain variable domain of TCR clone 269505 (TRAV20, TRAJ22)
CAVQASSSGSARQLTF

SEQ ID NO: 539010 - protein, 13 aa, Homo sapiens
  CDR3 for beta chain variable domain of TCR clone 269505 (TRBV7-3, TRBJ1-1)
CASSQDWGAEAFF

SEQ ID NO: 539011 - protein, 14 aa, Homo sapiens
  CDR3 for alpha chain variable domain of TCR clone 269506 (TRAV13-1, TRAJ39)
CAASEGNAGNMLTF

SEQ ID NO: 539012 - protein, 15 aa, Homo sapiens
  CDR3 for beta chain variable domain of TCR clone 269506 (TRBV6-1, TRBJ1-1)
CASRTPGQLNTEAFF

SEQ ID NO: 539013 - protein, 11 aa, Homo sapiens
  CDR3 for alpha chain variable domain of TCR clone 269507 (TRAV1-1, TRAJ23)
CAVRQGGKLIF

SEQ ID NO: 539014 - protein, 13 aa, Homo sapiens
  CDR3 for beta chain variable domain of TCR clone 269507 (TRBV7-3, TRBJ1-1)
GASSQDWGAEAFF

SEQ ID NO: 539015 - protein, 14 aa, Homo sapiens
  CDR3 for alpha chain variable domain of TCR clone 269508 (TRAV26-1, TRAJ21)
CIVRSPYNFNKFYF

SEQ ID NO: 539016 - protein, 14 aa, Homo sapiens
  CDR3 for beta chain variable domain of TCR clone 269508 (TRBV11-3, TRBJ2-1)
CASSATTSGSIQFF

SEQ ID NO: 539017 - protein, 14 aa, Homo sapiens
  CDR3 for alpha chain variable domain of TCR clone 269509 (TRAV26-1, TRAJ45)
CIEVTGGGADGLTF

SEQ ID NO: 539018 - protein, 19 aa, Homo sapiens
  CDR3 for beta chain variable domain of TCR clone 269509 (TRBV19, TRBJ2-2)
CASTRPGLAGGRVTGELCF

SEQ ID NO: 539019 - protein, 10 aa, Homo sapiens
  CDR3 for alpha chain variable domain of TCR clone 269510 (TRAV38-2/DV8, TRAJ21)
CAYRSNKFYF

SEQ ID NO: 539020 - protein, 12 aa, Homo sapiens
  CDR3 for beta chain variable domain of TCR clone 269510 (TRBV11-3, TRBJ2-3)
FASSLWEDTQYF

SEQ ID NO: 539021 - protein, 14 aa, Homo sapiens
  CDR3 for alpha chain variable domain of TCR clone 269511 (TRAV13-1, TRAJ20)
CAARPGSNDYKLSF

SEQ ID NO: 539022 - protein, 14 aa, Homo sapiens
  CDR3 for beta chain variable domain of TCR clone 269511 (TRBV28, TRBJ1-2)
CASSQAEGPFGYTF

SEQ ID NO: 539023 - protein, 14 aa, Homo sapiens
  CDR3 for alpha chain variable domain of TCR clone 269512 (TRAV13-1, TRAJ35)
CAASKGGFGNVLRC

SEQ ID NO: 539024 - protein, 13 aa, Homo sapiens
  CDR3 for beta chain variable domain of TCR clone 269512 (TRBV7-3, TRBJ1-1)
CASSQDWGAEAFL

SEQ ID NO: 539025 - protein, 13 aa, Homo sapiens
  CDR3 for alpha chain variable domain of TCR clone 269513 (TRAV17, TRAJ26)
CATVDNYGQNFVF

SEQ ID NO: 539026 - protein, 14 aa, Homo sapiens
  CDR3 for beta chain variable domain of TCR clone 269513 (TRBV10-2, TRBJ1-5)
CASSSTGRNQPQHF

SEQ ID NO: 539027 - protein, 13 aa, Homo sapiens
  CDR3 for alpha chain variable domain of TCR clone 269514 (TRAV17, TRAJ26)
CATVDNYGQNFFF

SEQ ID NO: 539028 - protein, 14 aa, Homo sapiens
  CDR3 for beta chain variable domain of TCR clone 269514 (TRBV25-1, TRBJ1-1)
CASTHLGGNTEAFF

SEQ ID NO: 539029 - protein, 13 aa, Homo sapiens
  CDR3 for alpha chain variable domain of TCR clone 269515 (TRAV8-3, TRAJ28)
CAVGAVGSYQLTF

SEQ ID NO: 539030 - protein, 14 aa, Homo sapiens
  CDR3 for beta chain variable domain of TCR clone 269515 (TRBV19, TRBJ2-7)
CASTVQGRPYERYF

SEQ ID NO: 539031 - protein, 18 aa, Homo sapiens
  CDR3 for alpha chain variable domain of TCR clone 269516 (TRAV29/DV5, TRAJ53)
CSVLLCSKRRGSNYKLTL

SEQ ID NO: 539032 - protein, 17 aa, Homo sapiens
  CDR3 for beta chain variable domain of TCR clone 269516 (TRBV7-8, TRBJ2-6)
CASSAGTGGAGANVLTF

SEQ ID NO: 539033 - protein, 13 aa, Homo sapiens
  CDR3 for alpha chain variable domain of TCR clone 269517 (TRAV26-2, TRAJ37)
CIRGSSNTGKLIF

SEQ ID NO: 539034 - protein, 12 aa, Homo sapiens
  CDR3 for beta chain variable domain of TCR clone 269517 (TRBV11-2, TRBJ2-1)
CASSPGNNEQFF

SEQ ID NO: 539035 - protein, 18 aa, Homo sapiens
  CDR3 for alpha chain variable domain of TCR clone 269518 (TRAV21, TRAJ52)
CAVRPSPAGGTSYGKLTF

SEQ ID NO: 539036 - protein, 14 aa, Homo sapiens
  CDR3 for beta chain variable domain of TCR clone 269518 (TRBV28, TRBJ1-1)
CTSSPRTRWAEAFF

SEQ ID NO: 539037 - protein, 16 aa, Homo sapiens
  CDR3 for alpha chain variable domain of TCR clone 269519 (TRAV3, TRAJ37)
CAVRVKGSGNTGKLIF

SEQ ID NO: 539038 - protein, 13 aa, Homo sapiens
  CDR3 for beta chain variable domain of TCR clone 269519 (TRBV10-3, TRBJ1-2)
CAISERDSYGYTF

SEQ ID NO: 539039 - protein, 17 aa, Homo sapiens
  CDR3 for alpha chain variable domain of TCR clone 269520 (TRAV3, TRAJ6)
CAVRDGPRAGGSHIPTF

SEQ ID NO: 539040 - protein, 13 aa, Homo sapiens
  CDR3 for beta chain variable domain of TCR clone 269520 (TRBV29-1, TRBJ1-1)
CSVGDSRNTEAFF

SEQ ID NO: 539041 - protein, 15 aa, Homo sapiens
  CDR3 for alpha chain variable domain of TCR clone 269521 (TRAV4, TRAJ12)
CLVGDLMGSSYKLIF

SEQ ID NO: 539042 - protein, 14 aa, Homo sapiens
  CDR3 for beta chain variable domain of TCR clone 269521 (TRBV7-2, TRBJ1-1)
CASSHRQGRTEAFF

SEQ ID NO: 539043 - protein, 15 aa, Homo sapiens
  CDR3 for alpha chain variable domain of TCR clone 269522 (TRAV8-3, TRAJ27)
CAVGPSKTNAGKSTY

SEQ ID NO: 539044 - protein, 12 aa, Homo sapiens
  CDR3 for beta chain variable domain of TCR clone 269522 (TRBV11-2, TRBJ2-2)
CASSLGGGELFF

SEQ ID NO: 539045 - protein, 13 aa, Homo sapiens
  CDR3 for alpha chain variable domain of TCR clone 269523 (TRAV27, TRAJ3)
ASLRGSRASKIIF

SEQ ID NO: 539046 - protein, 15 aa, Homo sapiens
  CDR3 for beta chain variable domain of TCR clone 269523 (TRBV28, TRBJ1-3)
CASSVGWASGNTIYF

SEQ ID NO: 539047 - protein, 14 aa, Homo sapiens
  CDR3 for alpha chain variable domain of TCR clone 269524 (TRAV12-1, TRAJ12)
CVVTRMDSSYKLIF

SEQ ID NO: 539048 - protein, 13 aa, Homo sapiens
  CDR3 for beta chain variable domain of TCR clone 269524 (TRBV20-1, TRBJ1-1)
CSARGGGNIEAFF

SEQ ID NO: 539049 - protein, 18 aa, Homo sapiens
  CDR3 for alpha chain variable domain of TCR clone 269525 (TRAV4, TRAJ8)
CTTASFGTMNTGFQKLVF

SEQ ID NO: 539050 - protein, 14 aa, Homo sapiens
  CDR3 for beta chain variable domain of TCR clone 269525 (TRBV7-2, TRBJ2-2)
CASRGQGAAGELFF

SEQ ID NO: 539051 - protein, 14 aa, Homo sapiens
  CDR3 for alpha chain variable domain of TCR clone 269526 (TRAV12-3, TRAJ9)
CAMSPNTGGFKTIF

SEQ ID NO: 539052 - protein, 13 aa, Homo sapiens
  CDR3 for beta chain variable domain of TCR clone 269526 (TRBV6-5, TRBJ2-1)
CASRGRVGNEQFF

SEQ ID NO: 539053 - protein, 13 aa, Homo sapiens
  CDR3 for alpha chain variable domain of TCR clone 269527 (TRAV13-1, TRAJ11)
CAAVLAGYSTLTF

SEQ ID NO: 539054 - protein, 13 aa, Homo sapiens
  CDR3 for beta chain variable domain of TCR clone 269527 (TRBV7-2, TRBJ2-2)
CASSLAVTGELFF

SEQ ID NO: 539055 - protein, 15 aa, Homo sapiens
  CDR3 for alpha chain variable domain of TCR clone 269528 (TRAV2, TRAJ45)
CAVDGTGGGADGPTF

SEQ ID NO: 539056 - protein, 16 aa, Homo sapiens
  CDR3 for beta chain variable domain of TCR clone 269528 (TRBV6-5, TRBJ2-1)
CASSYSLSGGYNEQFF

SEQ ID NO: 539057 - protein, 19 aa, Homo sapiens
  CDR3 for alpha chain variable domain of TCR clone 269529 (TRAV8-3, TRAJ4)
LSTSVLWVFYSGGYNKLIF

SEQ ID NO: 539058 - protein, 14 aa, Homo sapiens
  CDR3 for beta chain variable domain of TCR clone 269529 (TRBV7-9, TRBJ2-3)
CASSLEDGTDTQYF

SEQ ID NO: 539059 - protein, 17 aa, Homo sapiens
  CDR3 for alpha chain variable domain of TCR clone 269530 (TRAV3, TRAJ6)
CAVRDGPRAGGSYIPTF

SEQ ID NO: 539060 - protein, 15 aa, Homo sapiens
  CDR3 for beta chain variable domain of TCR clone 269530 (TRBV5-8, TRBJ2-2)
CASSLDRGATRELFF

SEQ ID NO: 539061 - protein, 11 aa, Homo sapiens
  CDR3 for alpha chain variable domain of TCR clone 269531 (TRAV13-2, TRAJ23)
CAESPRGKLIF

SEQ ID NO: 539062 - protein, 14 aa, Homo sapiens
  CDR3 for beta chain variable domain of TCR clone 269531 (TRBV12-4, TRBJ1-1)
CASTWTGHDTEAFF

SEQ ID NO: 539063 - protein, 13 aa, Homo sapiens
  CDR3 for alpha chain variable domain of TCR clone 269532 (TRAV23/DV6, TRAJ27)
CAASKPMQATQPL

SEQ ID NO: 539064 - protein, 14 aa, Homo sapiens
  CDR3 for beta chain variable domain of TCR clone 269532 (TRBV5-4, TRBJ1-1)
CASSLDSRRDEAFF

SEQ ID NO: 539065 - protein, 13 aa, Homo sapiens
  CDR3 for alpha chain variable domain of TCR clone 269533 (TRAV3, TRAJ8)
CAVRFTGFQKLVF

SEQ ID NO: 539066 - protein, 16 aa, Homo sapiens
  CDR3 for beta chain variable domain of TCR clone 269533 (TRBV12-4, TRBJ1-5)
CASSRPVGGSNQPQHF

SEQ ID NO: 539067 - protein, 15 aa, Homo sapiens
  CDR3 for alpha chain variable domain of TCR clone 269534 (TRAV2, TRAJ22)
CAVPSRGGSSRRLTF

SEQ ID NO: 539068 - protein, 11 aa, Homo sapiens
  CDR3 for beta chain variable domain of TCR clone 269534 (TRBV27, TRBJ2-3)
CASSLGDTQYF

SEQ ID NO: 539069 - protein, 15 aa, Homo sapiens
  CDR3 for alpha chain variable domain of TCR clone 269535 (TRAV12-2, TRAJ8)
CAVREENTGFQKLVL

SEQ ID NO: 539070 - protein, 15 aa, Homo sapiens
  CDR3 for beta chain variable domain of TCR clone 269535 (TRBV28, TRBJ2-4)
CAAGSGTLLMGMQYF

SEQ ID NO: 539071 - protein, 14 aa, Homo sapiens
  CDR3 for alpha chain variable domain of TCR clone 269536 (TRAV13-1, TRAJ40)
CAASRASGTSKYIF

SEQ ID NO: 539072 - protein, 13 aa, Homo sapiens
  CDR3 for beta chain variable domain of TCR clone 269536 (TRBV29-1, TRBJ2-7)
CSVGRTGGYEQYF

SEQ ID NO: 539073 - protein, 15 aa, Homo sapiens
  CDR3 for alpha chain variable domain of TCR clone 269537 (TRAV8-4, TRAJ53)
CAVSDGVGSNYKLTF

SEQ ID NO: 539074 - protein, 15 aa, Homo sapiens
  CDR3 for beta chain variable domain of TCR clone 269537 (TRBV19, TRBJ2-5)
CASHGLAGAQETQYF

SEQ ID NO: 539075 - protein, 13 aa, Homo sapiens
  CDR3 for alpha chain variable domain of TCR clone 269538 (TRAV29/DV5, TRAJ37)
CSEGSGNTGNLIF

SEQ ID NO: 539076 - protein, 14 aa, Homo sapiens
  CDR3 for beta chain variable domain of TCR clone 269538 (TRBV5-1, TRBJ1-1)
CASSLAVGSGEAFF

SEQ ID NO: 539077 - protein, 13 aa, Homo sapiens
  CDR3 for alpha chain variable domain of TCR clone 269539 (TRAV12-2, TRAJ47)
CAVTMEYGNKLVF

SEQ ID NO: 539078 - protein, 13 aa, Homo sapiens
  CDR3 for beta chain variable domain of TCR clone 269539 (TRBV9, TRBJ2-1)
CASSPSGGNEQFF

SEQ ID NO: 539079 - protein, 23 aa, Homo sapiens
  CDR3 for alpha chain variable domain of TCR clone 269540 (TRAV8-3, )
CAVGASNAGNKHIQNPDPAVYQL

SEQ ID NO: 539080 - protein, 15 aa, Homo sapiens
  CDR3 for beta chain variable domain of TCR clone 269540 (TRBV11-3, TRBJ1-3)
CASSLFGPSGNTIYF

SEQ ID NO: 539081 - protein, 14 aa, Homo sapiens
  CDR3 for alpha chain variable domain of TCR clone 269541 (TRAV13-1, TRAJ39)
CAASYNNAGNMSTF

SEQ ID NO: 539082 - protein, 13 aa, Homo sapiens
  CDR3 for beta chain variable domain of TCR clone 269541 (TRBV24-1, TRBJ1-4)
CATNNGRSEKLFF

SEQ ID NO: 539083 - protein, 16 aa, Homo sapiens
  CDR3 for alpha chain variable domain of TCR clone 269542 (TRAV21, TRAJ17)
CAVRPGEEAAGNKQTC

SEQ ID NO: 539084 - protein, 16 aa, Homo sapiens
  CDR3 for beta chain variable domain of TCR clone 269542 (TRBV2, TRBJ2-7)
CASSEPWTGPSYEQYF

SEQ ID NO: 539085 - protein, 11 aa, Homo sapiens
  CDR3 for alpha chain variable domain of TCR clone 269543 (TRAV1-1, TRAJ23)
CAVRQGGKLIF

SEQ ID NO: 539086 - protein, 17 aa, Homo sapiens
  CDR3 for beta chain variable domain of TCR clone 269543 (TRBV18, TRBJ2-1)
CASSPRVAGGSYNEQFF

SEQ ID NO: 539087 - protein, 15 aa, Homo sapiens
  CDR3 for alpha chain variable domain of TCR clone 269544 (TRAV1-2, TRAJ36)
CAASADQTGANNLFF

SEQ ID NO: 539088 - protein, 15 aa, Homo sapiens
  CDR3 for beta chain variable domain of TCR clone 269544 (TRBV5-1, TRBJ2-7)
CASSFSTDSVYEQHF

SEQ ID NO: 539089 - protein, 14 aa, Homo sapiens
  CDR3 for alpha chain variable domain of TCR clone 269545 (TRAV4, TRAJ6)
CLGPASGGSYIPTF

SEQ ID NO: 539090 - protein, 12 aa, Homo sapiens
  CDR3 for beta chain variable domain of TCR clone 269545 (TRBV6-5, TRBJ2-3)
CASSPSTDTKYF

SEQ ID NO: 539091 - protein, 17 aa, Homo sapiens
  CDR3 for alpha chain variable domain of TCR clone 269546 (TRAV4, TRAJ13)
CLVGVQGSSGGYHKGTF

SEQ ID NO: 539092 - protein, 18 aa, Homo sapiens
  CDR3 for beta chain variable domain of TCR clone 269546 (TRBV15, TRBJ2-3)
CATSRDGARSWDTDTQYF

SEQ ID NO: 539093 - protein, 16 aa, Homo sapiens
  CDR3 for alpha chain variable domain of TCR clone 269547 (TRAV3, TRAJ37)
CAVRGKGSVNTGKLIF

SEQ ID NO: 539094 - protein, 15 aa, Homo sapiens
  CDR3 for beta chain variable domain of TCR clone 269547 (TRBV7-9, TRBJ2-2)
CASGPLDTFPGELFF

SEQ ID NO: 539095 - protein, 13 aa, Homo sapiens
  CDR3 for alpha chain variable domain of TCR clone 269548 (TRAV3, TRAJ20)
CAVRDGGDYKLSL

SEQ ID NO: 539096 - protein, 15 aa, Homo sapiens
  CDR3 for beta chain variable domain of TCR clone 269548 (TRBV10-1, TRBJ2-1)
CASSQLAGGPTEQFF

SEQ ID NO: 539097 - protein, 16 aa, Homo sapiens
  CDR3 for alpha chain variable domain of TCR clone 269549 (TRAV3, TRAJ21)
CAVRDIERGNFNKFYF

SEQ ID NO: 539098 - protein, 13 aa, Homo sapiens
  CDR3 for beta chain variable domain of TCR clone 269549 (TRBV27, TRBJ2-7)
GASSLTTGYEQYF

SEQ ID NO: 539099 - protein, 14 aa, Homo sapiens
  CDR3 for alpha chain variable domain of TCR clone 269550 (TRAV1-2, TRAJ16)
CAVNRFSDGQKLLF

SEQ ID NO: 539100 - protein, 15 aa, Homo sapiens
  CDR3 for beta chain variable domain of TCR clone 269550 (TRBV9, TRBJ1-6)
CASSSAGTGDSPLHF

SEQ ID NO: 539101 - protein, 15 aa, Homo sapiens
  CDR3 for alpha chain variable domain of TCR clone 269551 (TRAV12-3, TRAJ6)
CAMSPAAGGSYIPTF

SEQ ID NO: 539102 - protein, 15 aa, Homo sapiens
  CDR3 for beta chain variable domain of TCR clone 269551 (TRBV2, TRBJ1-2)
CASSESRTVNYGYTF

SEQ ID NO: 539103 - protein, 20 aa, Homo sapiens
  CDR3 for alpha chain variable domain of TCR clone 269552 (TRAV12-1, TRAJ42)
SSVIQPPTSVKGGSQGNLIF

SEQ ID NO: 539104 - protein, 18 aa, Homo sapiens
  CDR3 for beta chain variable domain of TCR clone 269552 (TRBV11-2, TRBJ2-3)
CASSLVGASRGAPNTQYL

SEQ ID NO: 539105 - protein, 12 aa, Homo sapiens
  CDR3 for alpha chain variable domain of TCR clone 269553 (TRAV1-1, TRAJ8)
CAGGTGFQKLVF

SEQ ID NO: 539106 - protein, 16 aa, Homo sapiens
  CDR3 for beta chain variable domain of TCR clone 269553 (TRBV12-5, TRBJ2-5)
CASGPRNSGNQETQYF

SEQ ID NO: 539107 - protein, 13 aa, Homo sapiens
  CDR3 for alpha chain variable domain of TCR clone 269554 (TRAV23/DV6, TRAJ12)
CAPRVDSSYKMIF

SEQ ID NO: 539108 - protein, 12 aa, Homo sapiens
  CDR3 for beta chain variable domain of TCR clone 269554 (TRBV7-6, TRBJ2-5)
CASSLSQETQYF

SEQ ID NO: 539109 - protein, 14 aa, Homo sapiens
  CDR3 for alpha chain variable domain of TCR clone 269555 (TRAV35, TRAJ50)
CAGHRKTSYDKVIF

SEQ ID NO: 539110 - protein, 13 aa, Homo sapiens
  CDR3 for beta chain variable domain of TCR clone 269555 (TRBV7-7, TRBJ2-3)
CASSLSRADTQYV

SEQ ID NO: 539111 - protein, 13 aa, Homo sapiens
  CDR3 for alpha chain variable domain of TCR clone 269556 (TRAV13-1, TRAJ8)
CSASIRGFQKLVF

SEQ ID NO: 539112 - protein, 14 aa, Homo sapiens
  CDR3 for beta chain variable domain of TCR clone 269556 (TRBV7-2, TRBJ2-1)
CASSLVQGRNEQFF

SEQ ID NO: 539113 - protein, 13 aa, Homo sapiens
  CDR3 for alpha chain variable domain of TCR clone 269557 (TRAV13-2, TRAJ53)
CAENMGSNYKLTF

SEQ ID NO: 539114 - protein, 14 aa, Homo sapiens
  CDR3 for beta chain variable domain of TCR clone 269557 (TRBV2, TRBJ2-7)
CASSLTSGGYEQYF

SEQ ID NO: 539115 - protein, 16 aa, Homo sapiens
  CDR3 for alpha chain variable domain of TCR clone 269558 (TRAV30, TRAJ42)
CGTSKNYGGSQGNLIF

SEQ ID NO: 539116 - protein, 14 aa, Homo sapiens
  CDR3 for beta chain variable domain of TCR clone 269558 (TRBV19, TRBJ1-5)
CASNSYGTHQPRHF

SEQ ID NO: 539117 - protein, 14 aa, Homo sapiens
  CDR3 for alpha chain variable domain of TCR clone 269559 (TRAV12-2, TRAJ13)
CAVKKTGVYQKVTF

SEQ ID NO: 539118 - protein, 13 aa, Homo sapiens
  CDR3 for beta chain variable domain of TCR clone 269559 (TRBV10-3, TRBJ2-7)
CASKLAVNYEQYF

SEQ ID NO: 539119 - protein, 14 aa, Homo sapiens
  CDR3 for alpha chain variable domain of TCR clone 269560 (TRAV13-1, TRAJ35)
CAASKGGLGNVLHC

SEQ ID NO: 539120 - protein, 12 aa, Homo sapiens
  CDR3 for beta chain variable domain of TCR clone 269560 (TRBV7-3, TRBJ1-1)
CQSQDWGAGAFF

SEQ ID NO: 539121 - protein, 17 aa, Homo sapiens
  CDR3 for alpha chain variable domain of TCR clone 269561 (TRAV3, TRAJ42)
CAVRDRDYGGSQGNLIF

SEQ ID NO: 539122 - protein, 14 aa, Homo sapiens
  CDR3 for beta chain variable domain of TCR clone 269561 (TRBV7-2, TRBJ2-5)
CASSLVVGQETQYF

SEQ ID NO: 539123 - protein, 18 aa, Homo sapiens
  CDR3 for alpha chain variable domain of TCR clone 269562 (TRAV21, TRAJ52)
CAVRPSPAGGTSYGKLTY

SEQ ID NO: 539124 - protein, 12 aa, Homo sapiens
  CDR3 for beta chain variable domain of TCR clone 269562 (TRBV11-2, TRBJ2-2)
CASSLGGGELFF

SEQ ID NO: 539125 - protein, 14 aa, Homo sapiens
  CDR3 for alpha chain variable domain of TCR clone 269563 (TRAV4, TRAJ34)
CLVGDLYNTDKLIF

SEQ ID NO: 539126 - protein, 16 aa, Homo sapiens
  CDR3 for beta chain variable domain of TCR clone 269563 (TRBV2, TRBJ2-3)
CASSTSVEGVTDTQYF

SEQ ID NO: 539127 - protein, 15 aa, Homo sapiens
  CDR3 for alpha chain variable domain of TCR clone 269564 (TRAV26-1, TRAJ38)
CIVRAEGGTNRKLIW

SEQ ID NO: 539128 - protein, 14 aa, Homo sapiens
  CDR3 for beta chain variable domain of TCR clone 269564 (TRBV7-6, TRBJ2-5)
CASSSPSGSETQYF

SEQ ID NO: 539129 - protein, 16 aa, Homo sapiens
  CDR3 for alpha chain variable domain of TCR clone 269565 (TRAV26-1, TRAJ32)
CIVRTNYGGATNKLIF

SEQ ID NO: 539130 - protein, 17 aa, Homo sapiens
  CDR3 for beta chain variable domain of TCR clone 269565 (TRBV20-1, TRBJ2-1)
CSAPPRLAGTRYNEQFF

SEQ ID NO: 539131 - protein, 12 aa, Homo sapiens
  CDR3 for alpha chain variable domain of TCR clone 269566 (TRAV27, TRAJ9)
CAGESGGFKTIF

SEQ ID NO: 539132 - protein, 18 aa, Homo sapiens
  CDR3 for beta chain variable domain of TCR clone 269566 (TRBV10-2, TRBJ2-2)
CISGPAGHRQADAGELFF

SEQ ID NO: 539133 - protein, 14 aa, Homo sapiens
  CDR3 for alpha chain variable domain of TCR clone 269567 (TRAV12-3, TRAJ58)
CAMSTETSGSRLTF

SEQ ID NO: 539134 - protein, 13 aa, Homo sapiens
  CDR3 for beta chain variable domain of TCR clone 269567 (TRBV27, TRBJ2-3)
CASSWGGTDTQYF

SEQ ID NO: 539135 - protein, 19 aa, Homo sapiens
  CDR3 for alpha chain variable domain of TCR clone 269568 (TRAV29/DV5, TRAJ49)
CSVLLCSKLTVDTGNQFYF

SEQ ID NO: 539136 - protein, 17 aa, Homo sapiens
  CDR3 for beta chain variable domain of TCR clone 269568 (TRBV13, TRBJ2-3)
CASSLPRVAGGRNTQYF

SEQ ID NO: 539137 - protein, 16 aa, Homo sapiens
  CDR3 for alpha chain variable domain of TCR clone 269569 (TRAV30, TRAJ24)
CGTEIVDSDSWGKFQF

SEQ ID NO: 539138 - protein, 14 aa, Homo sapiens
  CDR3 for beta chain variable domain of TCR clone 269569 (TRBV25-1, TRBJ1-1)
CASTHLGGNTEAFF

SEQ ID NO: 539139 - protein, 16 aa, Homo sapiens
  CDR3 for alpha chain variable domain of TCR clone 269570 (TRAV3, TRAJ10)
CAVRDMRAGGGTKLTF

SEQ ID NO: 539140 - protein, 16 aa, Homo sapiens
  CDR3 for beta chain variable domain of TCR clone 269570 (TRBV12-5, TRBJ2-5)
CASGPRTSGNQETQYF

SEQ ID NO: 539141 - protein, 11 aa, Homo sapiens
  CDR3 for alpha chain variable domain of TCR clone 269571 (TRAV13-2, TRAJ20)
CADSNDYKLSF

SEQ ID NO: 539142 - protein, 14 aa, Homo sapiens
  CDR3 for beta chain variable domain of TCR clone 269571 (TRBV11-2, TRBJ1-5)
CASSLDRGRQHQHF

SEQ ID NO: 539143 - protein, 13 aa, Homo sapiens
  CDR3 for alpha chain variable domain of TCR clone 269572 (TRAV3, TRAJ27)
CAVSPLGAGKYTF

SEQ ID NO: 539144 - protein, 13 aa, Homo sapiens
  CDR3 for beta chain variable domain of TCR clone 269572 (TRBV7-9, TRBJ2-3)
CASSPGSTDTQYF

SEQ ID NO: 539145 - protein, 14 aa, Homo sapiens
  CDR3 for alpha chain variable domain of TCR clone 269573 (TRAV12-1, TRAJ12)
CVLTRMDSSYKLIF

SEQ ID NO: 539146 - protein, 13 aa, Homo sapiens
  CDR3 for beta chain variable domain of TCR clone 269573 (TRBV20-1, TRBJ1-1)
CSARGGGNTETFF

SEQ ID NO: 539147 - protein, 13 aa, Homo sapiens
  CDR3 for alpha chain variable domain of TCR clone 269574 (TRAV13-2, TRAJ13)
CAERPGGYQKVTF

SEQ ID NO: 539148 - protein, 15 aa, Homo sapiens
  CDR3 for beta chain variable domain of TCR clone 269574 (TRBV10-3, TRBJ2-3)
CAISLTSGGTDTQYF

SEQ ID NO: 539149 - protein, 15 aa, Homo sapiens
  CDR3 for alpha chain variable domain of TCR clone 269575 (TRAV26-1, TRAJ29)
CIVRVTNSGNTPLVF

SEQ ID NO: 539150 - protein, 16 aa, Homo sapiens
  CDR3 for beta chain variable domain of TCR clone 269575 (TRBV5-4, TRBJ2-3)
CASQQPGAGGADTQYF

SEQ ID NO: 539151 - protein, 13 aa, Homo sapiens
  CDR3 for alpha chain variable domain of TCR clone 269576 (TRAV8-6, TRAJ13)
CAVSRRGYQKVTF

SEQ ID NO: 539152 - protein, 15 aa, Homo sapiens
  CDR3 for beta chain variable domain of TCR clone 269576 (TRBV12-4, TRBJ1-6)
CASSQSTGKTSPLHF

SEQ ID NO: 539153 - protein, 11 aa, Homo sapiens
  CDR3 for alpha chain variable domain of TCR clone 269577 (TRAV2, TRAJ13)
CASGGYQKVTF

SEQ ID NO: 539154 - protein, 16 aa, Homo sapiens
  CDR3 for beta chain variable domain of TCR clone 269577 (TRBV2, TRBJ2-3)
CASSPRDSTYTDTQYF

SEQ ID NO: 539155 - protein, 11 aa, Homo sapiens
  CDR3 for alpha chain variable domain of TCR clone 269578 (TRAV17, TRAJ9)
CGFTGGFKTIF

SEQ ID NO: 539156 - protein, 12 aa, Homo sapiens
  CDR3 for beta chain variable domain of TCR clone 269578 (TRBV29-1, TRBJ2-3)
CSVTGGVDTQYF

SEQ ID NO: 539157 - protein, 16 aa, Homo sapiens
  CDR3 for alpha chain variable domain of TCR clone 269579 (TRAV30, TRAJ24)
CGTEIVDADSWGNSCL

SEQ ID NO: 539158 - protein, 14 aa, Homo sapiens
  CDR3 for beta chain variable domain of TCR clone 269579 (TRBV25-1, TRBJ1-1)
CASTHLGGNTEAFF

SEQ ID NO: 539159 - protein, 16 aa, Homo sapiens
  CDR3 for alpha chain variable domain of TCR clone 269580 (TRAV1-2, TRAJ4)
CAVRDSLSGGYNKLIF

SEQ ID NO: 539160 - protein, 13 aa, Homo sapiens
  CDR3 for beta chain variable domain of TCR clone 269580 (TRBV12-5, TRBJ2-3)
CASGDRQSDTQYF

SEQ ID NO: 539161 - protein, 11 aa, Homo sapiens
  CDR3 for alpha chain variable domain of TCR clone 269581 (TRAV1-1, TRAJ23)
CAVRQGRKLIF

SEQ ID NO: 539162 - protein, 20 aa, Homo sapiens
  CDR3 for beta chain variable domain of TCR clone 269581 (TRBV7-8, TRBJ2-2)
CASSHLFPGPTIHITGELLF

SEQ ID NO: 539163 - protein, 16 aa, Homo sapiens
  CDR3 for alpha chain variable domain of TCR clone 269582 (TRAV21, TRAJ37)
CAVRTAGSSDTGRLIF

SEQ ID NO: 539164 - protein, 13 aa, Homo sapiens
  CDR3 for beta chain variable domain of TCR clone 269582 (TRBV7-9, TRBJ2-5)
CASLPSGRETQYF

SEQ ID NO: 539165 - protein, 14 aa, Homo sapiens
  CDR3 for alpha chain variable domain of TCR clone 269583 (TRAV13-2, TRAJ4)
CAEKGPKGSNKLIF

SEQ ID NO: 539166 - protein, 13 aa, Homo sapiens
  CDR3 for beta chain variable domain of TCR clone 269583 (TRBV18, TRBJ2-5)
CASSPPGKETQYF

SEQ ID NO: 539167 - protein, 13 aa, Homo sapiens
  CDR3 for alpha chain variable domain of TCR clone 269584 (TRAV12-3, TRAJ35)
CAMAIGFGNVLHC

SEQ ID NO: 539168 - protein, 16 aa, Homo sapiens
  CDR3 for beta chain variable domain of TCR clone 269584 (TRBV20-1, TRBJ1-2)
CSASMGQGVANYGYTF

SEQ ID NO: 539169 - protein, 15 aa, Homo sapiens
  CDR3 for alpha chain variable domain of TCR clone 269585 (TRAV27, TRAJ38)
CAARSNAGNNRKLIW

SEQ ID NO: 539170 - protein, 13 aa, Homo sapiens
  CDR3 for beta chain variable domain of TCR clone 269585 (TRBV7-3, TRBJ2-1)
CASSLDSYNEQFF

SEQ ID NO: 539171 - protein, 11 aa, Homo sapiens
  CDR3 for alpha chain variable domain of TCR clone 269586 (TRAV12-3, TRAJ6)
CAMSGSYIPTF

SEQ ID NO: 539172 - protein, 19 aa, Homo sapiens
  CDR3 for beta chain variable domain of TCR clone 269586 (TRBV11-3, TRBJ2-2)
CASSTRPGAKTTNTGELFF

SEQ ID NO: 539173 - protein, 14 aa, Homo sapiens
  CDR3 for alpha chain variable domain of TCR clone 269587 (TRAV26-1, TRAJ21)
CIVRVVFNFNKFYF

SEQ ID NO: 539174 - protein, 13 aa, Homo sapiens
  CDR3 for beta chain variable domain of TCR clone 269587 (TRBV12-4, TRBJ1-2)
CASSLRQGKGYTF

SEQ ID NO: 539175 - protein, 12 aa, Homo sapiens
  CDR3 for alpha chain variable domain of TCR clone 269588 (TRAV38-1, TRAJ47)
CAFETYGNKLVF

SEQ ID NO: 539176 - protein, 15 aa, Homo sapiens
  CDR3 for beta chain variable domain of TCR clone 269588 (TRBV5-7, TRBJ2-7)
CASSGGRAVPYEQYF

SEQ ID NO: 539177 - protein, 12 aa, Homo sapiens
  CDR3 for alpha chain variable domain of TCR clone 269589 (TRAV26-2, TRAJ23)
CILRGQGGQLIF

SEQ ID NO: 539178 - protein, 17 aa, Homo sapiens
  CDR3 for beta chain variable domain of TCR clone 269589 (TRBV20-1, TRBJ1-5)
CSARVGGERQGNQPQHF

SEQ ID NO: 539179 - protein, 12 aa, Homo sapiens
  CDR3 for alpha chain variable domain of TCR clone 269590 (TRAV13-2, TRAJ54)
CGAHEGAQKLVL

SEQ ID NO: 539180 - protein, 16 aa, Homo sapiens
  CDR3 for beta chain variable domain of TCR clone 269590 (TRBV12-5, TRBJ2-5)
CASGPRTSGNQETQYF

SEQ ID NO: 539181 - protein, 11 aa, Homo sapiens
  CDR3 for alpha chain variable domain of TCR clone 269591 (TRAV22, TRAJ30)
CAGNRDDKIIF

SEQ ID NO: 539182 - protein, 14 aa, Homo sapiens
  CDR3 for beta chain variable domain of TCR clone 269591 (TRBV5-4, TRBJ1-1)
CASSLDSRRDEAFF

SEQ ID NO: 539183 - protein, 11 aa, Homo sapiens
  CDR3 for alpha chain variable domain of TCR clone 269592 (TRAV1-2, TRAJ20)
CAVSNDYKLSF

SEQ ID NO: 539184 - protein, 16 aa, Homo sapiens
  CDR3 for beta chain variable domain of TCR clone 269592 (TRBV29-1, TRBJ2-6)
RSVEDITYSGANVLTF

SEQ ID NO: 539185 - protein, 18 aa, Homo sapiens
  CDR3 for alpha chain variable domain of TCR clone 269593 (TRAV21, TRAJ52)
CAVRPSTAGGTSYGKLTF

SEQ ID NO: 539186 - protein, 15 aa, Homo sapiens
  CDR3 for beta chain variable domain of TCR clone 269593 (TRBV19, TRBJ1-1)
CASTSGQIQNTEAFF

SEQ ID NO: 539187 - protein, 13 aa, Homo sapiens
  CDR3 for alpha chain variable domain of TCR clone 269594 (TRAV36/DV7, TRAJ38)
CVANAGKNRKLNW

SEQ ID NO: 539188 - protein, 14 aa, Homo sapiens
  CDR3 for beta chain variable domain of TCR clone 269594 (TRBV19, TRBJ2-1)
CASPTFVLSGEQFF

SEQ ID NO: 539189 - protein, 12 aa, Homo sapiens
  CDR3 for alpha chain variable domain of TCR clone 269595 (TRAV8-3, TRAJ26)
CAGDNYGQNFVF

SEQ ID NO: 539190 - protein, 15 aa, Homo sapiens
  CDR3 for beta chain variable domain of TCR clone 269595 (TRBV5-1, TRBJ2-3)
CASSVTSGSKDTQYF

SEQ ID NO: 539191 - protein, 16 aa, Homo sapiens
  CDR3 for alpha chain variable domain of TCR clone 269596 (TRAV20, TRAJ22)
CAVQASSSGSARQLTF

SEQ ID NO: 539192 - protein, 13 aa, Homo sapiens
  CDR3 for beta chain variable domain of TCR clone 269596 (TRBV7-8, TRBJ2-5)
CASSQTSVETQYF

SEQ ID NO: 539193 - protein, 14 aa, Homo sapiens
  CDR3 for alpha chain variable domain of TCR clone 269597 (TRAV12-3, TRAJ10)
SHLPLTGGGIKLTF

SEQ ID NO: 539194 - protein, 15 aa, Homo sapiens
  CDR3 for beta chain variable domain of TCR clone 269597 (TRBV9, TRBJ1-6)
CASSVAGTGDSPLHF

SEQ ID NO: 539195 - protein, 15 aa, Homo sapiens
  CDR3 for alpha chain variable domain of TCR clone 269598 (TRAV27, TRAJ38)
CAARRNAGNNRKLIW

SEQ ID NO: 539196 - protein, 13 aa, Homo sapiens
  CDR3 for beta chain variable domain of TCR clone 269598 (TRBV12-5, TRBJ2-3)
RARGDRQSDTQYF

SEQ ID NO: 539197 - protein, 15 aa, Homo sapiens
  CDR3 for alpha chain variable domain of TCR clone 269599 (TRAV4, TRAJ39)
CLVGPNNNAGNMLTF

SEQ ID NO: 539198 - protein, 14 aa, Homo sapiens
  CDR3 for beta chain variable domain of TCR clone 269599 (TRBV11-2, TRBJ2-5)
CASSRTGGIDTQYF

SEQ ID NO: 539199 - protein, 14 aa, Homo sapiens
  CDR3 for alpha chain variable domain of TCR clone 269600 (TRAV3, TRAJ15)
CAVTLNQAGTALIF

SEQ ID NO: 539200 - protein, 12 aa, Homo sapiens
  CDR3 for beta chain variable domain of TCR clone 269600 (TRBV7-9, TRBJ1-5)
CASSPQGQPQHF

SEQ ID NO: 539201 - protein, 17 aa, Homo sapiens
  CDR3 for alpha chain variable domain of TCR clone 269601 (TRAV3, TRAJ6)
CAVRDGSRAGGSYIPTF

SEQ ID NO: 539202 - protein, 18 aa, Homo sapiens
  CDR3 for beta chain variable domain of TCR clone 269601 (TRBV7-9, TRBJ2-7)
CASSLTTSGSRTWYEQYS

SEQ ID NO: 539203 - protein, 15 aa, Homo sapiens
  CDR3 for alpha chain variable domain of TCR clone 269602 (TRAV12-1, TRAJ44)
CVVFVNTGTASKLTF

SEQ ID NO: 539204 - protein, 16 aa, Homo sapiens
  CDR3 for beta chain variable domain of TCR clone 269602 (TRBV20-1, TRBJ2-5)
CSPGGTSGGYMESQYF

SEQ ID NO: 539205 - protein, 12 aa, Homo sapiens
  CDR3 for alpha chain variable domain of TCR clone 269603 (TRAV17, TRAJ12)
CATLRSSYKLIF

SEQ ID NO: 539206 - protein, 15 aa, Homo sapiens
  CDR3 for beta chain variable domain of TCR clone 269603 (TRBV7-3, TRBJ2-1)
CASSPTGGGEVEQFF

SEQ ID NO: 539207 - protein, 13 aa, Homo sapiens
  CDR3 for alpha chain variable domain of TCR clone 269604 (TRAV16, TRAJ26)
CITVLCLGQNFVF

SEQ ID NO: 539208 - protein, 15 aa, Homo sapiens
  CDR3 for beta chain variable domain of TCR clone 269604 (TRBV10-2, TRBJ2-6)
CASSEQGTGANVLTF

SEQ ID NO: 539209 - protein, 11 aa, Homo sapiens
  CDR3 for alpha chain variable domain of TCR clone 269605 (TRAV1-2, TRAJ40)
CAVPGTEKYIF

SEQ ID NO: 539210 - protein, 16 aa, Homo sapiens
  CDR3 for beta chain variable domain of TCR clone 269605 (TRBV29-1, TRBJ2-7)
CSVEVVGTSGSYEQYF

SEQ ID NO: 539211 - protein, 14 aa, Homo sapiens
  CDR3 for alpha chain variable domain of TCR clone 269606 (TRAV1-2, TRAJ16)
CAVNRFSDGQKLLF

SEQ ID NO: 539212 - protein, 14 aa, Homo sapiens
  CDR3 for beta chain variable domain of TCR clone 269606 (TRBV7-9, TRBJ2-2)
CASSLGHRTGELFL

SEQ ID NO: 539213 - protein, 12 aa, Homo sapiens
  CDR3 for alpha chain variable domain of TCR clone 269607 (TRAV38-2/DV8, TRAJ47)
CVLMENGNKLVF

SEQ ID NO: 539214 - protein, 14 aa, Homo sapiens
  CDR3 for beta chain variable domain of TCR clone 269607 (TRBV20-1, TRBJ1-5)
CSATDRGSNQPQHF

SEQ ID NO: 539215 - protein, 13 aa, Homo sapiens
  CDR3 for alpha chain variable domain of TCR clone 269608 (TRAV27, TRAJ3)
ASLRGSSASKIIF

SEQ ID NO: 539216 - protein, 15 aa, Homo sapiens
  CDR3 for beta chain variable domain of TCR clone 269608 (TRBV19, TRBJ1-2)
CASSVGQVLNYGYTF

SEQ ID NO: 539217 - protein, 13 aa, Homo sapiens
  CDR3 for alpha chain variable domain of TCR clone 269609 (TRAV17, TRAJ26)
CATVDNYGQNFVF

SEQ ID NO: 539218 - protein, 16 aa, Homo sapiens
  CDR3 for beta chain variable domain of TCR clone 269609 (TRBV2, TRBJ2-1)
CASIVGGSLSYNEQFF

SEQ ID NO: 539219 - protein, 16 aa, Homo sapiens
  CDR3 for alpha chain variable domain of TCR clone 269610 (TRAV27, TRAJ13)
CAGAKSDSGGYQKVTF

SEQ ID NO: 539220 - protein, 15 aa, Homo sapiens
  CDR3 for beta chain variable domain of TCR clone 269610 (TRBV29-1, TRBJ2-1)
SSVGRHALFYNEQFF

SEQ ID NO: 539221 - protein, 14 aa, Homo sapiens
  CDR3 for alpha chain variable domain of TCR clone 269611 (TRAV17, TRAJ6)
CATDASGGSYIPTF

SEQ ID NO: 539222 - protein, 19 aa, Homo sapiens
  CDR3 for beta chain variable domain of TCR clone 269611 (TRBV4-3, TRBJ2-7)
CASSQEFIGWQVAPYEQYF

SEQ ID NO: 539223 - protein, 12 aa, Homo sapiens
  CDR3 for alpha chain variable domain of TCR clone 269612 (TRAV8-3, TRAJ26)
CAGDNYGQNFVF

SEQ ID NO: 539224 - protein, 14 aa, Homo sapiens
  CDR3 for beta chain variable domain of TCR clone 269612 (TRBV7-2, TRBJ2-5)
CASSTGGELKTQYF

SEQ ID NO: 539225 - protein, 22 aa, Homo sapiens
  CDR3 for alpha chain variable domain of TCR clone 269613 (TRAV2, TRAJ10)
ILQVREADAAVYYTGGGNKLTF

SEQ ID NO: 539226 - protein, 17 aa, Homo sapiens
  CDR3 for beta chain variable domain of TCR clone 269613 (TRBV5-1, TRBJ2-5)
CASSPVALGQNQETQYF

SEQ ID NO: 539227 - protein, 12 aa, Homo sapiens
  CDR3 for alpha chain variable domain of TCR clone 269614 (TRAV3, TRAJ31)
CAAQRANARLMF

SEQ ID NO: 539228 - protein, 16 aa, Homo sapiens
  CDR3 for beta chain variable domain of TCR clone 269614 (TRBV4-2, TRBJ1-1)
CASSTSPGRAAPEAFF

SEQ ID NO: 539229 - protein, 14 aa, Homo sapiens
  CDR3 for alpha chain variable domain of TCR clone 269615 (TRAV1-2, TRAJ8)
CAVREDAGFQKLVF

SEQ ID NO: 539230 - protein, 12 aa, Homo sapiens
  CDR3 for beta chain variable domain of TCR clone 269615 (TRBV14, TRBJ2-5)
CASSQLKETQYF

SEQ ID NO: 539231 - protein, 14 aa, Homo sapiens
  CDR3 for alpha chain variable domain of TCR clone 269616 (TRAV26-1, TRAJ34)
CIGRVAYNTDKLIF

SEQ ID NO: 539232 - protein, 15 aa, Homo sapiens
  CDR3 for beta chain variable domain of TCR clone 269616 (TRBV20-1, TRBJ2-7)
CSARVPAAYFYEQYF

SEQ ID NO: 539233 - protein, 13 aa, Homo sapiens
  CDR3 for alpha chain variable domain of TCR clone 269617 (TRAV8-3, TRAJ28)
CAVGAVGSYQLAF

SEQ ID NO: 539234 - protein, 15 aa, Homo sapiens
  CDR3 for beta chain variable domain of TCR clone 269617 (TRBV7-9, TRBJ1-5)
CASSQGHQPKQPQHF

SEQ ID NO: 539235 - protein, 14 aa, Homo sapiens
  CDR3 for alpha chain variable domain of TCR clone 269618 (TRAV12-2, TRAJ17)
CAVLYKAAGNKLTF

SEQ ID NO: 539236 - protein, 14 aa, Homo sapiens
  CDR3 for beta chain variable domain of TCR clone 269618 (TRBV4-1, TRBJ2-2)
CASSQAVNTGELFF

SEQ ID NO: 539237 - protein, 16 aa, Homo sapiens
  CDR3 for alpha chain variable domain of TCR clone 269619 (TRAV27, TRAJ52)
WAGAPAGGTSHGKLTF

SEQ ID NO: 539238 - protein, 12 aa, Homo sapiens
  CDR3 for beta chain variable domain of TCR clone 269619 (TRBV27, TRBJ2-1)
YASRGFYNEQFF

SEQ ID NO: 539239 - protein, 23 aa, Homo sapiens
  CDR3 for alpha chain variable domain of TCR clone 269620 (TRAV26-1, TRAJ38)
CIADNAGNNHIQNPDPAVYQLRD

SEQ ID NO: 539240 - protein, 17 aa, Homo sapiens
  CDR3 for beta chain variable domain of TCR clone 269620 (TRBV12-4, TRBJ2-7)
CASSPIPRGVSSYEQYF

SEQ ID NO: 539241 - protein, 15 aa, Homo sapiens
  CDR3 for alpha chain variable domain of TCR clone 269621 (TRAV3, TRAJ17)
CAVRDTGAAGNKLNF

SEQ ID NO: 539242 - protein, 15 aa, Homo sapiens
  CDR3 for beta chain variable domain of TCR clone 269621 (TRBV10-2, TRBJ2-5)
CASRGSGGPQETQYF

SEQ ID NO: 539243 - protein, 14 aa, Homo sapiens
  CDR3 for alpha chain variable domain of TCR clone 269622 (TRAV13-1, TRAJ44)
CAAKATGPASKLTF

SEQ ID NO: 539244 - protein, 14 aa, Homo sapiens
  CDR3 for beta chain variable domain of TCR clone 269622 (TRBV19, TRBJ2-2)
CASSTLHRSGEMFF

SEQ ID NO: 539245 - protein, 12 aa, Homo sapiens
  CDR3 for alpha chain variable domain of TCR clone 269623 (TRAV8-3, TRAJ41)
CAVALSGYALNF

SEQ ID NO: 539246 - protein, 18 aa, Homo sapiens
  CDR3 for beta chain variable domain of TCR clone 269623 (TRBV20-1, TRBJ2-6)
CSAETTPTHGSGPNVLTF

SEQ ID NO: 539247 - protein, 14 aa, Homo sapiens
  CDR3 for alpha chain variable domain of TCR clone 269624 (TRAV23/DV6, TRAJ57)
CAAALKGGSEKLVF

SEQ ID NO: 539248 - protein, 12 aa, Homo sapiens
  CDR3 for beta chain variable domain of TCR clone 269624 (TRBV5-1, TRBJ1-2)
CASSQDTYGYTF

SEQ ID NO: 539249 - protein, 14 aa, Homo sapiens
  CDR3 for alpha chain variable domain of TCR clone 269625 (TRAV29/DV5, TRAJ20)
CAASAPIEDYKLSF

SEQ ID NO: 539250 - protein, 14 aa, Homo sapiens
  CDR3 for beta chain variable domain of TCR clone 269625 (TRBV7-6, TRBJ2-3)
CASSLGTVTDTQYF

SEQ ID NO: 539251 - protein, 16 aa, Homo sapiens
  CDR3 for alpha chain variable domain of TCR clone 269626 (TRAV23/DV6, TRAJ9)
CAASIGGNTGGFKTIF

SEQ ID NO: 539252 - protein, 17 aa, Homo sapiens
  CDR3 for beta chain variable domain of TCR clone 269626 (TRBV13, TRBJ2-3)
CASSLARVAGGRNTQYF

SEQ ID NO: 539253 - protein, 16 aa, Homo sapiens
  CDR3 for alpha chain variable domain of TCR clone 269627 (TRAV1-2, TRAJ10)
CAVRGVLTGGGNKLTF

SEQ ID NO: 539254 - protein, 13 aa, Homo sapiens
  CDR3 for beta chain variable domain of TCR clone 269627 (TRBV4-2, TRBJ2-3)
CASSQGNTDTQYF

SEQ ID NO: 539255 - protein, 13 aa, Homo sapiens
  CDR3 for alpha chain variable domain of TCR clone 269628 (TRAV25, TRAJ24)
CAGGTDSWGKFKF

SEQ ID NO: 539256 - protein, 13 aa, Homo sapiens
  CDR3 for beta chain variable domain of TCR clone 269628 (TRBV7-6, TRBJ1-2)
CASSLVADYGYTF

SEQ ID NO: 539257 - protein, 15 aa, Homo sapiens
  CDR3 for alpha chain variable domain of TCR clone 269629 (TRAV23/DV6, TRAJ15)
CAALPAGRNCSDLCE

SEQ ID NO: 539258 - protein, 14 aa, Homo sapiens
  CDR3 for beta chain variable domain of TCR clone 269629 (TRBV7-9, TRBJ1-2)
FASSRQGANYGYTF

SEQ ID NO: 539259 - protein, 12 aa, Homo sapiens
  CDR3 for alpha chain variable domain of TCR clone 269630 (TRAV21, TRAJ24)
CAVMDSWGKLQF

SEQ ID NO: 539260 - protein, 16 aa, Homo sapiens
  CDR3 for beta chain variable domain of TCR clone 269630 (TRBV13, TRBJ2-2)
CASSEVFGANAGELFF

SEQ ID NO: 539261 - protein, 13 aa, Homo sapiens
  CDR3 for alpha chain variable domain of TCR clone 269631 (TRAV12-1, TRAJ6)
CVVFPGGSYIPTF

SEQ ID NO: 539262 - protein, 14 aa, Homo sapiens
  CDR3 for beta chain variable domain of TCR clone 269631 (TRBV20-1, TRBJ1-3)
CSPSPTGAGNTIYF

SEQ ID NO: 539263 - protein, 12 aa, Homo sapiens
  CDR3 for alpha chain variable domain of TCR clone 269632 (TRAV12-3, TRAJ48)
CASNFGNEKLTF

SEQ ID NO: 539264 - protein, 12 aa, Homo sapiens
  CDR3 for beta chain variable domain of TCR clone 269632 (TRBV12-4, TRBJ2-7)
CASRNDRDEQDF

SEQ ID NO: 539265 - protein, 18 aa, Homo sapiens
  CDR3 for alpha chain variable domain of TCR clone 269633 (TRAV26-1, TRAJ52)
CIVRVEGAGGTSYGKLTF

SEQ ID NO: 539266 - protein, 12 aa, Homo sapiens
  CDR3 for beta chain variable domain of TCR clone 269633 (TRBV7-8, TRBJ2-7)
CASSLGDREQYF

SEQ ID NO: 539267 - protein, 14 aa, Homo sapiens
  CDR3 for alpha chain variable domain of TCR clone 269634 (TRAV12-2, TRAJ40)
CAVKIPSGTYKYIF

SEQ ID NO: 539268 - protein, 14 aa, Homo sapiens
  CDR3 for beta chain variable domain of TCR clone 269634 (TRBV20-1, TRBJ1-1)
CSTRTRIGGTEAFF

SEQ ID NO: 539269 - protein, 14 aa, Homo sapiens
  CDR3 for alpha chain variable domain of TCR clone 269635 (TRAV9-2, TRAJ35)
CALRSIGFGNVLHC

SEQ ID NO: 539270 - protein, 13 aa, Homo sapiens
  CDR3 for beta chain variable domain of TCR clone 269635 (TRBV11-2, TRBJ2-5)
CASSSTGEETQYF

SEQ ID NO: 539271 - protein, 14 aa, Homo sapiens
  CDR3 for alpha chain variable domain of TCR clone 269636 (TRAV16, TRAJ33)
CALSAMDSNYQLIW

SEQ ID NO: 539272 - protein, 13 aa, Homo sapiens
  CDR3 for beta chain variable domain of TCR clone 269636 (TRBV7-3, TRBJ1-2)
CASSLKRGYGYTF

SEQ ID NO: 539273 - protein, 14 aa, Homo sapiens
  CDR3 for alpha chain variable domain of TCR clone 269637 (TRAV1-2, TRAJ16)
CAVNRFSDGQKLPF

SEQ ID NO: 539274 - protein, 15 aa, Homo sapiens
  CDR3 for beta chain variable domain of TCR clone 269637 (TRBV29-1, TRBJ2-7)
CSVEFFDRGSYEQYF

SEQ ID NO: 539275 - protein, 18 aa, Homo sapiens
  CDR3 for alpha chain variable domain of TCR clone 269638 (TRAV21, TRAJ52)
CAVRPSPAGGTNYGKLTF

SEQ ID NO: 539276 - protein, 14 aa, Homo sapiens
  CDR3 for beta chain variable domain of TCR clone 269638 (TRBV4-1, TRBJ2-2)
CASSQAVNTGELFF

SEQ ID NO: 539277 - protein, 12 aa, Homo sapiens
  CDR3 for alpha chain variable domain of TCR clone 269639 (TRAV12-3, TRAJ17)
CAMTLTGNKLTF

SEQ ID NO: 539278 - protein, 16 aa, Homo sapiens
  CDR3 for beta chain variable domain of TCR clone 269639 (TRBV13, TRBJ2-2)
CSSSPRTGEHTGELFF

SEQ ID NO: 539279 - protein, 14 aa, Homo sapiens
  CDR3 for alpha chain variable domain of TCR clone 269640 (TRAV38-1, TRAJ45)
CAYYSGGGADGLTF

SEQ ID NO: 539280 - protein, 12 aa, Homo sapiens
  CDR3 for beta chain variable domain of TCR clone 269640 (TRBV19, TRBJ2-1)
CASSRQGAEQFF

SEQ ID NO: 539281 - protein, 13 aa, Homo sapiens
  CDR3 for alpha chain variable domain of TCR clone 269641 (TRAV13-1, TRAJ21)
CAASIYNFNKFYF

SEQ ID NO: 539282 - protein, 12 aa, Homo sapiens
  CDR3 for beta chain variable domain of TCR clone 269641 (TRBV7-9, TRBJ2-7)
CASSLEGYEQYF

SEQ ID NO: 539283 - protein, 12 aa, Homo sapiens
  CDR3 for alpha chain variable domain of TCR clone 269642 (TRAV1-2, TRAJ33)
CAALDSNYQLIW

SEQ ID NO: 539284 - protein, 14 aa, Homo sapiens
  CDR3 for beta chain variable domain of TCR clone 269642 (TRBV5-1, TRBJ2-3)
CASSPTGRIDTQYF

SEQ ID NO: 539285 - protein, 14 aa, Homo sapiens
  CDR3 for alpha chain variable domain of TCR clone 269643 (TRAV9-2, TRAJ13)
CALRYSGGYQKVTF

SEQ ID NO: 539286 - protein, 13 aa, Homo sapiens
  CDR3 for beta chain variable domain of TCR clone 269643 (TRBV7-9, TRBJ2-5)
CASLPSGRETQYF

SEQ ID NO: 539287 - protein, 13 aa, Homo sapiens
  CDR3 for alpha chain variable domain of TCR clone 269644 (TRAV21, TRAJ27)
CAARPGNAGKSTF

SEQ ID NO: 539288 - protein, 14 aa, Homo sapiens
  CDR3 for beta chain variable domain of TCR clone 269644 (TRBV7-6, TRBJ2-3)
CASSSGTVTDTQYY

SEQ ID NO: 539289 - protein, 14 aa, Homo sapiens
  CDR3 for alpha chain variable domain of TCR clone 269645 (TRAV8-3, TRAJ39)
CAVGADNAGNMLTF

SEQ ID NO: 539290 - protein, 16 aa, Homo sapiens
  CDR3 for beta chain variable domain of TCR clone 269645 (TRBV12-5, TRBJ2-5)
CASGPRTSGNQETQYF

SEQ ID NO: 539291 - protein, 11 aa, Homo sapiens
  CDR3 for alpha chain variable domain of TCR clone 269646 (TRAV21, TRAJ34)
CAVTNTDKLIF

SEQ ID NO: 539292 - protein, 13 aa, Homo sapiens
  CDR3 for beta chain variable domain of TCR clone 269646 (TRBV29-1, TRBJ1-3)
CSVEGGGGNTLYF

SEQ ID NO: 539293 - protein, 15 aa, Homo sapiens
  CDR3 for alpha chain variable domain of TCR clone 269647 (TRAV12-1, TRAJ44)
CVVDTPQGTASKLTF

SEQ ID NO: 539294 - protein, 17 aa, Homo sapiens
  CDR3 for beta chain variable domain of TCR clone 269647 (TRBV13, TRBJ2-3)
CASSLSRVAGGRNTQYF

SEQ ID NO: 539295 - protein, 14 aa, Homo sapiens
  CDR3 for alpha chain variable domain of TCR clone 269648 (TRAV12-2, TRAJ17)
CAVLFKAAGNKLTF

SEQ ID NO: 539296 - protein, 17 aa, Homo sapiens
  CDR3 for beta chain variable domain of TCR clone 269648 (TRBV3-1, TRBJ2-7)
CASSQDLTGLSSYEQYF

SEQ ID NO: 539297 - protein, 22 aa, Homo sapiens
  CDR3 for alpha chain variable domain of TCR clone 269649 (TRAV27, TRAJ41)
CAVRTQIPDIQNPDPAVYQLRD

SEQ ID NO: 539298 - protein, 14 aa, Homo sapiens
  CDR3 for beta chain variable domain of TCR clone 269649 (TRBV7-8, TRBJ2-3)
CASSLEAGTDTQYF

SEQ ID NO: 539299 - protein, 15 aa, Homo sapiens
  CDR3 for alpha chain variable domain of TCR clone 269650 (TRAV13-1, TRAJ44)
CAASRGGGTASKLTF

SEQ ID NO: 539300 - protein, 13 aa, Homo sapiens
  CDR3 for beta chain variable domain of TCR clone 269650 (TRBV4-2, TRBJ1-1)
CASSQAGNTEAFF

SEQ ID NO: 539301 - protein, 13 aa, Homo sapiens
  CDR3 for alpha chain variable domain of TCR clone 269651 (TRAV25, TRAJ33)
CAGHGVSNYQLIW

SEQ ID NO: 539302 - protein, 13 aa, Homo sapiens
  CDR3 for beta chain variable domain of TCR clone 269651 (TRBV2, TRBJ1-4)
CASSERAGEKLFF

SEQ ID NO: 539303 - protein, 15 aa, Homo sapiens
  CDR3 for alpha chain variable domain of TCR clone 269652 (TRAV3, TRAJ5)
CAVRDLDTGRSALTF

SEQ ID NO: 539304 - protein, 16 aa, Homo sapiens
  CDR3 for beta chain variable domain of TCR clone 269652 (TRBV20-1, TRBJ1-2)
CSASMGQGVANYGYTF

SEQ ID NO: 539305 - protein, 15 aa, Homo sapiens
  CDR3 for alpha chain variable domain of TCR clone 269653 (TRAV26-1, TRAJ42)
FIVRVKGGSQGNLIF

SEQ ID NO: 539306 - protein, 14 aa, Homo sapiens
  CDR3 for beta chain variable domain of TCR clone 269653 (TRBV19, TRBJ2-2)
CATTGHVNTGELFF

SEQ ID NO: 539307 - protein, 15 aa, Homo sapiens
  CDR3 for alpha chain variable domain of TCR clone 269654 (TRAV3, TRAJ22)
CALRDRGGPARQLTF

SEQ ID NO: 539308 - protein, 15 aa, Homo sapiens
  CDR3 for beta chain variable domain of TCR clone 269654 (TRBV19, TRBJ2-5)
CASSIVRASQETQYF

SEQ ID NO: 539309 - protein, 21 aa, Homo sapiens
  CDR3 for alpha chain variable domain of TCR clone 269655 (TRAV8-3, )
CAVVTTRIPDIQYPDPAVYQL

SEQ ID NO: 539310 - protein, 14 aa, Homo sapiens
  CDR3 for beta chain variable domain of TCR clone 269655 (TRBV11-2, TRBJ2-7)
CASSPSTTSYEQYF

SEQ ID NO: 539311 - protein, 12 aa, Homo sapiens
  CDR3 for alpha chain variable domain of TCR clone 269656 (TRAV27, TRAJ30)
CAETIGDDKIIF

SEQ ID NO: 539312 - protein, 16 aa, Homo sapiens
  CDR3 for beta chain variable domain of TCR clone 269656 (TRBV6-5, TRBJ2-3)
CASRFHRGGGSYTQYF

SEQ ID NO: 539313 - protein, 14 aa, Homo sapiens
  CDR3 for alpha chain variable domain of TCR clone 269657 (TRAV29/DV5, TRAJ36)
CAARRKTGANNLLF

SEQ ID NO: 539314 - protein, 16 aa, Homo sapiens
  CDR3 for beta chain variable domain of TCR clone 269657 (TRBV12-5, TRBJ2-5)
CASGPRTSGNQETQYF

SEQ ID NO: 539315 - protein, 19 aa, Homo sapiens
  CDR3 for alpha chain variable domain of TCR clone 269658 (TRAV29/DV5, TRAJ49)
CSVLLCSKLTVDTGNQFYF

SEQ ID NO: 539316 - protein, 17 aa, Homo sapiens
  CDR3 for beta chain variable domain of TCR clone 269658 (TRBV13, TRBJ2-3)
FASSLSRVAGGRNTQYF

SEQ ID NO: 539317 - protein, 15 aa, Homo sapiens
  CDR3 for alpha chain variable domain of TCR clone 269659 (TRAV38-1, TRAJ37)
SAFIHGSGNTGKLIF

SEQ ID NO: 539318 - protein, 12 aa, Homo sapiens
  CDR3 for beta chain variable domain of TCR clone 269659 (TRBV7-9, TRBJ2-7)
CASSFGSYEQYF

SEQ ID NO: 539319 - protein, 16 aa, Homo sapiens
  CDR3 for alpha chain variable domain of TCR clone 269660 (TRAV12-3, TRAJ53)
CAMSPGSGGSNYKLTF

SEQ ID NO: 539320 - protein, 16 aa, Homo sapiens
  CDR3 for beta chain variable domain of TCR clone 269660 (TRBV20-1, TRBJ2-4)
CSARAILAGQGDIQYF

SEQ ID NO: 539321 - protein, 12 aa, Homo sapiens
  CDR3 for alpha chain variable domain of TCR clone 269661 (TRAV8-6, TRAJ43)
CAVSNNNNDIRF

SEQ ID NO: 539322 - protein, 15 aa, Homo sapiens
  CDR3 for beta chain variable domain of TCR clone 269661 (TRBV7-3, TRBJ2-6)
CASSLGGSGANDLTF

SEQ ID NO: 539323 - protein, 14 aa, Homo sapiens
  CDR3 for alpha chain variable domain of TCR clone 269662 (TRAV3, TRAJ9)
CAERLNTGGFKTIF

SEQ ID NO: 539324 - protein, 15 aa, Homo sapiens
  CDR3 for beta chain variable domain of TCR clone 269662 (TRBV7-2, TRBJ2-1)
CASSLASGRVNEQFF

SEQ ID NO: 539325 - protein, 15 aa, Homo sapiens
  CDR3 for alpha chain variable domain of TCR clone 269663 (TRAV21, TRAJ53)
WATLNSGGSNYKLKF

SEQ ID NO: 539326 - protein, 16 aa, Homo sapiens
  CDR3 for beta chain variable domain of TCR clone 269663 (TRBV9, TRBJ2-1)
CASSVGGGGNYNEQFF

SEQ ID NO: 539327 - protein, 15 aa, Homo sapiens
  CDR3 for alpha chain variable domain of TCR clone 269664 (TRAV12-1, TRAJ8)
CVVNVENTGFQKLVF

SEQ ID NO: 539328 - protein, 16 aa, Homo sapiens
  CDR3 for beta chain variable domain of TCR clone 269664 (TRBV7-2, TRBJ2-7)
CAGSLEAGGPWYEQYF

SEQ ID NO: 539329 - protein, 13 aa, Homo sapiens
  CDR3 for alpha chain variable domain of TCR clone 269665 (TRAV3, TRAJ9)
CCEGNTGGFKTIF

SEQ ID NO: 539330 - protein, 15 aa, Homo sapiens
  CDR3 for beta chain variable domain of TCR clone 269665 (TRBV7-9, TRBJ1-5)
CASSQGHQPNQPQHF

SEQ ID NO: 539331 - protein, 13 aa, Homo sapiens
  CDR3 for alpha chain variable domain of TCR clone 269666 (TRAV2, TRAJ15)
CAVASQAGTALIF

SEQ ID NO: 539332 - protein, 16 aa, Homo sapiens
  CDR3 for beta chain variable domain of TCR clone 269666 (TRBV7-8, TRBJ2-4)
CASSAERTLAKNNQYF

SEQ ID NO: 539333 - protein, 16 aa, Homo sapiens
  CDR3 for alpha chain variable domain of TCR clone 269667 (TRAV3, TRAJ21)
CAVRDIERGNFNKFYF

SEQ ID NO: 539334 - protein, 13 aa, Homo sapiens
  CDR3 for beta chain variable domain of TCR clone 269667 (TRBV27, TRBJ2-7)
CASSVTTGYEQFF

SEQ ID NO: 539335 - protein, 13 aa, Homo sapiens
  CDR3 for alpha chain variable domain of TCR clone 269668 (TRAV12-3, TRAJ5)
CAMIYTDRRALTF

SEQ ID NO: 539336 - protein, 12 aa, Homo sapiens
  CDR3 for beta chain variable domain of TCR clone 269668 (TRBV18, TRBJ1-4)
CASSPSREKLLF

SEQ ID NO: 539337 - protein, 12 aa, Homo sapiens
  CDR3 for alpha chain variable domain of TCR clone 269669 (TRAV16, TRAJ10)
CSRTGGGNKLTF

SEQ ID NO: 539338 - protein, 13 aa, Homo sapiens
  CDR3 for beta chain variable domain of TCR clone 269669 (TRBV4-1, TRBJ2-1)
CASSQAGGDEQFF

SEQ ID NO: 539339 - protein, 13 aa, Homo sapiens
  CDR3 for alpha chain variable domain of TCR clone 269670 (TRAV26-1, TRAJ48)
CIVRVVGDEKLTF

SEQ ID NO: 539340 - protein, 16 aa, Homo sapiens
  CDR3 for beta chain variable domain of TCR clone 269670 (TRBV12-5, TRBJ2-5)
CASGTRTSGNQETQYF

SEQ ID NO: 539341 - protein, 12 aa, Homo sapiens
  CDR3 for alpha chain variable domain of TCR clone 269671 (TRAV17, TRAJ30)
CVPERRDDKIIS

SEQ ID NO: 539342 - protein, 14 aa, Homo sapiens
  CDR3 for beta chain variable domain of TCR clone 269671 (TRBV7-7, TRBJ2-2)
CASSRDRSTGELFF

SEQ ID NO: 539343 - protein, 10 aa, Homo sapiens
  CDR3 for alpha chain variable domain of TCR clone 269672 (TRAV35, TRAJ43)
CAGRNNDMRF

SEQ ID NO: 539344 - protein, 15 aa, Homo sapiens
  CDR3 for beta chain variable domain of TCR clone 269672 (TRBV12-4, TRBJ2-3)
CASSLGATSTDTQYF

SEQ ID NO: 539345 - protein, 12 aa, Homo sapiens
  CDR3 for alpha chain variable domain of TCR clone 269673 (TRAV13-2, TRAJ23)
CAERHRGGKLIF

SEQ ID NO: 539346 - protein, 15 aa, Homo sapiens
  CDR3 for beta chain variable domain of TCR clone 269673 (TRBV7-9, TRBJ1-6)
CASSSPGSGNSPLHC

SEQ ID NO: 539347 - protein, 12 aa, Homo sapiens
  CDR3 for alpha chain variable domain of TCR clone 269674 (TRAV23/DV6, TRAJ58)
CAARLLRGETSV

SEQ ID NO: 539348 - protein, 15 aa, Homo sapiens
  CDR3 for beta chain variable domain of TCR clone 269674 (TRBV19, TRBJ1-2)
CASSVGQVLNYGYTF

SEQ ID NO: 539349 - protein, 13 aa, Homo sapiens
  CDR3 for alpha chain variable domain of TCR clone 269675 (TRAV12-2, TRAJ29)
CAVNIYGNTPLVF

SEQ ID NO: 539350 - protein, 12 aa, Homo sapiens
  CDR3 for beta chain variable domain of TCR clone 269675 (TRBV12-4, TRBJ1-1)
CASSFGRAEAFF

SEQ ID NO: 539351 - protein, 13 aa, Homo sapiens
  CDR3 for alpha chain variable domain of TCR clone 269676 (TRAV21, TRAJ45)
CAVMGGGADGLTF

SEQ ID NO: 539352 - protein, 14 aa, Homo sapiens
  CDR3 for beta chain variable domain of TCR clone 269676 (TRBV4-3, TRBJ1-4)
CASSPFQRNEKLFF

SEQ ID NO: 539353 - protein, 15 aa, Homo sapiens
  CDR3 for alpha chain variable domain of TCR clone 269677 (TRAV12-2, TRAJ53)
FAVNTGGGSNYKLTF

SEQ ID NO: 539354 - protein, 15 aa, Homo sapiens
  CDR3 for beta chain variable domain of TCR clone 269677 (TRBV5-1, TRBJ2-5)
CASSLGLGEIKTQYF

SEQ ID NO: 539355 - protein, 15 aa, Homo sapiens
  CDR3 for alpha chain variable domain of TCR clone 269678 (TRAV26-1, TRAJ42)
FIVRVKGGSQGNLIF

SEQ ID NO: 539356 - protein, 14 aa, Homo sapiens
  CDR3 for beta chain variable domain of TCR clone 269678 (TRBV19, TRBJ2-2)
CATTGHASTGELFF

SEQ ID NO: 539357 - protein, 18 aa, Homo sapiens
  CDR3 for alpha chain variable domain of TCR clone 269679 (TRAV21, TRAJ52)
CAVRPSPAGGTSYGRLTF

SEQ ID NO: 539358 - protein, 15 aa, Homo sapiens
  CDR3 for beta chain variable domain of TCR clone 269679 (TRBV20-1, TRBJ1-5)
CSAFKNGQRYQPQHF

SEQ ID NO: 539359 - protein, 15 aa, Homo sapiens
  CDR3 for alpha chain variable domain of TCR clone 269680 (TRAV26-1, TRAJ56)
CIVRVDNGANSKLTF

SEQ ID NO: 539360 - protein, 15 aa, Homo sapiens
  CDR3 for beta chain variable domain of TCR clone 269680 (TRBV20-1, TRBJ2-7)
CSARDPTEVGHEQYV

SEQ ID NO: 539361 - protein, 10 aa, Homo sapiens
  CDR3 for alpha chain variable domain of TCR clone 269681 (TRAV12-2, TRAJ48)
CAVTSEKLTF

SEQ ID NO: 539362 - protein, 17 aa, Homo sapiens
  CDR3 for beta chain variable domain of TCR clone 269681 (TRBV11-1, TRBJ2-7)
CASSLTGSCGLDYEQYF

SEQ ID NO: 539363 - protein, 13 aa, Homo sapiens
  CDR3 for alpha chain variable domain of TCR clone 269682 (TRAV4, TRAJ28)
CLFIWGWELPTHF

SEQ ID NO: 539364 - protein, 14 aa, Homo sapiens
  CDR3 for beta chain variable domain of TCR clone 269682 (TRBV7-9, TRBJ2-5)
CASSLDTAQETQSF

SEQ ID NO: 539365 - protein, 17 aa, Homo sapiens
  CDR3 for alpha chain variable domain of TCR clone 269683 (TRAV3, TRAJ6)
CAVSDGPRAGGSYIPTF

SEQ ID NO: 539366 - protein, 14 aa, Homo sapiens
  CDR3 for beta chain variable domain of TCR clone 269683 (TRBV7-2, TRBJ2-7)
CASSPKTSFYEHYF

SEQ ID NO: 539367 - protein, 12 aa, Homo sapiens
  CDR3 for alpha chain variable domain of TCR clone 269684 (TRAV12-1, TRAJ40)
CVAPSGTYKYIF

SEQ ID NO: 539368 - protein, 15 aa, Homo sapiens
  CDR3 for beta chain variable domain of TCR clone 269684 (TRBV12-4, TRBJ2-1)
CASSPLSGRNNEQLF

SEQ ID NO: 539369 - protein, 13 aa, Homo sapiens
  CDR3 for alpha chain variable domain of TCR clone 269685 (TRAV2, TRAJ40)
CALVTSGTYKYIF

SEQ ID NO: 539370 - protein, 14 aa, Homo sapiens
  CDR3 for beta chain variable domain of TCR clone 269685 (TRBV4-2, TRBJ2-1)
CASGLDRAYNEQFF

SEQ ID NO: 539371 - protein, 15 aa, Homo sapiens
  CDR3 for alpha chain variable domain of TCR clone 269686 (TRAV26-2, TRAJ13)
CILRDLSGGYQKVTF

SEQ ID NO: 539372 - protein, 15 aa, Homo sapiens
  CDR3 for beta chain variable domain of TCR clone 269686 (TRBV6-5, TRBJ1-1)
CASTLRLGSGTEAFF

SEQ ID NO: 539373 - protein, 14 aa, Homo sapiens
  CDR3 for alpha chain variable domain of TCR clone 269687 (TRAV1-2, TRAJ16)
CAVNRFSDGQKLLF

SEQ ID NO: 539374 - protein, 15 aa, Homo sapiens
  CDR3 for beta chain variable domain of TCR clone 269687 (TRBV7-2, TRBJ2-5)
CASSFLRGGEETQYF

SEQ ID NO: 539375 - protein, 15 aa, Homo sapiens
  CDR3 for alpha chain variable domain of TCR clone 269688 (TRAV26-1, TRAJ29)
CIVRVEGSGNTPLVF

SEQ ID NO: 539376 - protein, 15 aa, Homo sapiens
  CDR3 for beta chain variable domain of TCR clone 269688 (TRBV20-1, TRBJ1-5)
CSAKPPGQGPQPQHF

SEQ ID NO: 539377 - protein, 14 aa, Homo sapiens
  CDR3 for alpha chain variable domain of TCR clone 269689 (TRAV17, TRAJ57)
CATDPQGGSEQLVF

SEQ ID NO: 539378 - protein, 20 aa, Homo sapiens
  CDR3 for beta chain variable domain of TCR clone 269689 (TRBV28, TRBJ2-1)
CASTPIGRSPGLAGGNEQFF

SEQ ID NO: 539379 - protein, 14 aa, Homo sapiens
  CDR3 for alpha chain variable domain of TCR clone 269690 (TRAV13-1, TRAJ45)
VSVPEGGGADGLTV

SEQ ID NO: 539380 - protein, 14 aa, Homo sapiens
  CDR3 for beta chain variable domain of TCR clone 269690 (TRBV27, TRBJ1-1)
CASSPQGKRAEAFF

SEQ ID NO: 539381 - protein, 14 aa, Homo sapiens
  CDR3 for alpha chain variable domain of TCR clone 269691 (TRAV9-2, TRAJ39)
CALYIYNAGNMLTF

SEQ ID NO: 539382 - protein, 15 aa, Homo sapiens
  CDR3 for beta chain variable domain of TCR clone 269691 (TRBV3-1, TRBJ2-7)
CASSQEWTGSYEQYF

SEQ ID NO: 539383 - protein, 14 aa, Homo sapiens
  CDR3 for alpha chain variable domain of TCR clone 269692 (TRAV13-1, TRAJ39)
CAASEGNAGNMLTF

SEQ ID NO: 539384 - protein, 15 aa, Homo sapiens
  CDR3 for beta chain variable domain of TCR clone 269692 (TRBV27, TRBJ2-1)
CASSNGGGSSNEQFF

SEQ ID NO: 539385 - protein, 13 aa, Homo sapiens
  CDR3 for alpha chain variable domain of TCR clone 269693 (TRAV3, TRAJ36)
CAVKRTGANNLFF

SEQ ID NO: 539386 - protein, 15 aa, Homo sapiens
  CDR3 for beta chain variable domain of TCR clone 269693 (TRBV4-1, TRBJ1-2)
CASSLNTGQGYGYTF

SEQ ID NO: 539387 - protein, 12 aa, Homo sapiens
  CDR3 for alpha chain variable domain of TCR clone 269694 (TRAV13-2, TRAJ39)
FAENNAGNMLTF

SEQ ID NO: 539388 - protein, 12 aa, Homo sapiens
  CDR3 for beta chain variable domain of TCR clone 269694 (TRBV11-2, TRBJ2-2)
CASSLGGGELFF

SEQ ID NO: 539389 - protein, 14 aa, Homo sapiens
  CDR3 for alpha chain variable domain of TCR clone 269695 (TRAV12-2, TRAJ15)
CAPHTGQAGTALIF

SEQ ID NO: 539390 - protein, 17 aa, Homo sapiens
  CDR3 for beta chain variable domain of TCR clone 269695 (TRBV7-8, TRBJ2-7)
CASSVTSGRPPSYEQYF

SEQ ID NO: 539391 - protein, 11 aa, Homo sapiens
  CDR3 for alpha chain variable domain of TCR clone 269696 (TRAV2, TRAJ13)
CASGGYQKVTF

SEQ ID NO: 539392 - protein, 16 aa, Homo sapiens
  CDR3 for beta chain variable domain of TCR clone 269696 (TRBV19, TRBJ2-1)
CSSSMGGGSSYNEQFF

SEQ ID NO: 539393 - protein, 15 aa, Homo sapiens
  CDR3 for alpha chain variable domain of TCR clone 269697 (TRAV13-2, TRAJ45)
CAENNSGGGSDGLTF

SEQ ID NO: 539394 - protein, 13 aa, Homo sapiens
  CDR3 for beta chain variable domain of TCR clone 269697 (TRBV25-1, TRBJ2-6)
CASRGPGANVLTF

SEQ ID NO: 539395 - protein, 15 aa, Homo sapiens
  CDR3 for alpha chain variable domain of TCR clone 269698 (TRAV12-1, TRAJ44)
CVVDEYTGTASKLTF

SEQ ID NO: 539396 - protein, 14 aa, Homo sapiens
  CDR3 for beta chain variable domain of TCR clone 269698 (TRBV5-1, TRBJ1-2)
CARSLEPVNYGYTF

SEQ ID NO: 539397 - protein, 13 aa, Homo sapiens
  CDR3 for alpha chain variable domain of TCR clone 269699 (TRAV17, TRAJ5)
CAPMDTGRRALTF

SEQ ID NO: 539398 - protein, 15 aa, Homo sapiens
  CDR3 for beta chain variable domain of TCR clone 269699 (TRBV6-6, TRBJ2-5)
CASSPGGGFEETQYF

SEQ ID NO: 539399 - protein, 14 aa, Homo sapiens
  CDR3 for alpha chain variable domain of TCR clone 269700 (TRAV1-2, TRAJ8)
CAVREDTGFQKLVF

SEQ ID NO: 539400 - protein, 15 aa, Homo sapiens
  CDR3 for beta chain variable domain of TCR clone 269700 (TRBV28, TRBJ2-4)
CAAGSGTRLMGSQYF

SEQ ID NO: 539401 - protein, 15 aa, Homo sapiens
  CDR3 for alpha chain variable domain of TCR clone 269701 (TRAV12-1, TRAJ5)
CVVNMMETGRRAITF

SEQ ID NO: 539402 - protein, 12 aa, Homo sapiens
  CDR3 for beta chain variable domain of TCR clone 269701 (TRBV11-2, TRBJ2-2)
CASSLGGGELFF

SEQ ID NO: 539403 - protein, 14 aa, Homo sapiens
  CDR3 for alpha chain variable domain of TCR clone 269702 (TRAV3, TRAJ20)
CAVTPAPNDYKLSF

SEQ ID NO: 539404 - protein, 13 aa, Homo sapiens
  CDR3 for beta chain variable domain of TCR clone 269702 (TRBV15, TRBJ1-2)
CATSRVDARSPVF

SEQ ID NO: 539405 - protein, 10 aa, Homo sapiens
  CDR3 for alpha chain variable domain of TCR clone 269703 (TRAV13-2, TRAJ49)
CEGTGNQFYF

SEQ ID NO: 539406 - protein, 14 aa, Homo sapiens
  CDR3 for beta chain variable domain of TCR clone 269703 (TRBV5-5, TRBJ1-5)
CASSGQGVDQPQHF

SEQ ID NO: 539407 - protein, 15 aa, Homo sapiens
  CDR3 for alpha chain variable domain of TCR clone 269704 (TRAV25, TRAJ52)
CAGRPGGTSYGKLPF

SEQ ID NO: 539408 - protein, 17 aa, Homo sapiens
  CDR3 for beta chain variable domain of TCR clone 269704 (TRBV7-8, TRBJ2-6)
CASSAGTGGAGANDLTF

SEQ ID NO: 539409 - protein, 17 aa, Homo sapiens
  CDR3 for alpha chain variable domain of TCR clone 269705 (TRAV26-2, TRAJ42)
CILRDVGYGGSQGNLSF

SEQ ID NO: 539410 - protein, 12 aa, Homo sapiens
  CDR3 for beta chain variable domain of TCR clone 269705 (TRBV19, TRBJ2-1)
CASSRQGAEQFF

SEQ ID NO: 539411 - protein, 15 aa, Homo sapiens
  CDR3 for alpha chain variable domain of TCR clone 269706 (TRAV20, TRAJ4)
CAVEGSSGGYNKLIF

SEQ ID NO: 539412 - protein, 14 aa, Homo sapiens
  CDR3 for beta chain variable domain of TCR clone 269706 (TRBV7-8, TRBJ2-7)
CASTLGGAPGEQYF

SEQ ID NO: 539413 - protein, 12 aa, Homo sapiens
  CDR3 for alpha chain variable domain of TCR clone 269707 (TRAV1-2, TRAJ24)
CAVGGSWGKFQF

SEQ ID NO: 539414 - protein, 14 aa, Homo sapiens
  CDR3 for beta chain variable domain of TCR clone 269707 (TRBV7-8, TRBJ2-3)
CASSLEAGTDTQYF

SEQ ID NO: 539415 - protein, 21 aa, Homo sapiens
  CDR3 for alpha chain variable domain of TCR clone 269708 (TRAV12-1, TRAJ32)
SSVIQPPTSMNYGGATNKLIF

SEQ ID NO: 539416 - protein, 15 aa, Homo sapiens
  CDR3 for beta chain variable domain of TCR clone 269708 (TRBV7-9, TRBJ2-2)
CASGPLDTVLGELFF

SEQ ID NO: 539417 - protein, 13 aa, Homo sapiens
  CDR3 for alpha chain variable domain of TCR clone 269709 (TRAV30, TRAJ24)
CGTVTDSWGKLQF

SEQ ID NO: 539418 - protein, 14 aa, Homo sapiens
  CDR3 for beta chain variable domain of TCR clone 269709 (TRBV7-2, TRBJ2-7)
CASRSQGAAYEQYF

SEQ ID NO: 539419 - protein, 12 aa, Homo sapiens
  CDR3 for alpha chain variable domain of TCR clone 269710 (TRAV12-2, TRAJ4)
GWPEGCYNKLIF

SEQ ID NO: 539420 - protein, 16 aa, Homo sapiens
  CDR3 for beta chain variable domain of TCR clone 269710 (TRBV6-1, TRBJ2-5)
CAGSETLDRGAETQYF

SEQ ID NO: 539421 - protein, 14 aa, Homo sapiens
  CDR3 for alpha chain variable domain of TCR clone 269711 (TRAV8-3, TRAJ4)
CAVGAAGGYNKLIF

SEQ ID NO: 539422 - protein, 18 aa, Homo sapiens
  CDR3 for beta chain variable domain of TCR clone 269711 (TRBV6-5, TRBJ1-1)
CASSYSAHGGTGGTEAFF

SEQ ID NO: 539423 - protein, 12 aa, Homo sapiens
  CDR3 for alpha chain variable domain of TCR clone 269712 (TRAV20, TRAJ39)
CAVGNAGNMLTF

SEQ ID NO: 539424 - protein, 17 aa, Homo sapiens
  CDR3 for beta chain variable domain of TCR clone 269712 (TRBV4-1, TRBJ2-3)
CASSQGYFSGGTDTQYF

SEQ ID NO: 539425 - protein, 12 aa, Homo sapiens
  CDR3 for alpha chain variable domain of TCR clone 269713 (TRAV16, TRAJ10)
CSRTGGGNKLTF

SEQ ID NO: 539426 - protein, 16 aa, Homo sapiens
  CDR3 for beta chain variable domain of TCR clone 269713 (TRBV7-8, TRBJ2-4)
CASSAERTLAKNIQYV

SEQ ID NO: 539427 - protein, 15 aa, Homo sapiens
  CDR3 for alpha chain variable domain of TCR clone 269714 (TRAV8-3, TRAJ17)
CAVGWRGAAVNKLTF

SEQ ID NO: 539428 - protein, 11 aa, Homo sapiens
  CDR3 for beta chain variable domain of TCR clone 269714 (TRBV7-8, TRBJ2-7)
CASSLSLEQYF

SEQ ID NO: 539429 - protein, 12 aa, Homo sapiens
  CDR3 for alpha chain variable domain of TCR clone 269715 (TRAV26-2, TRAJ21)
CILKGNFNNFYF

SEQ ID NO: 539430 - protein, 14 aa, Homo sapiens
  CDR3 for beta chain variable domain of TCR clone 269715 (TRBV12-4, TRBJ1-1)
CASSLGTGGTEAFF

SEQ ID NO: 539431 - protein, 13 aa, Homo sapiens
  CDR3 for alpha chain variable domain of TCR clone 269716 (TRAV29/DV5, TRAJ29)
CAASAAGNTPLVF

SEQ ID NO: 539432 - protein, 15 aa, Homo sapiens
  CDR3 for beta chain variable domain of TCR clone 269716 (TRBV7-9, TRBJ2-7)
CASSLALAEAYEQYF

SEQ ID NO: 539433 - protein, 15 aa, Homo sapiens
  CDR3 for alpha chain variable domain of TCR clone 269717 (TRAV17, TRAJ57)
CATGPSQGGYAKLVF

SEQ ID NO: 539434 - protein, 16 aa, Homo sapiens
  CDR3 for beta chain variable domain of TCR clone 269717 (TRBV12-4, TRBJ1-5)
CASSRPVGGSNQPQHF

SEQ ID NO: 539435 - protein, 12 aa, Homo sapiens
  CDR3 for alpha chain variable domain of TCR clone 269718 (TRAV12-3, TRAJ17)
CVMTLTGNKLTF

SEQ ID NO: 539436 - protein, 15 aa, Homo sapiens
  CDR3 for beta chain variable domain of TCR clone 269718 (TRBV20-1, TRBJ2-7)
CSARDRDSGMDEQYF

SEQ ID NO: 539437 - protein, 14 aa, Homo sapiens
  CDR3 for alpha chain variable domain of TCR clone 269719 (TRAV8-1, TRAJ5)
CAVRTDTGRRALTF

SEQ ID NO: 539438 - protein, 14 aa, Homo sapiens
  CDR3 for beta chain variable domain of TCR clone 269719 (TRBV7-9, TRBJ2-7)
CASSLSAATYEQYF

SEQ ID NO: 539439 - protein, 12 aa, Homo sapiens
  CDR3 for alpha chain variable domain of TCR clone 269720 (TRAV27, TRAJ9)
CAGESGGFKTIF

SEQ ID NO: 539440 - protein, 14 aa, Homo sapiens
  CDR3 for beta chain variable domain of TCR clone 269720 (TRBV6-1, TRBJ2-1)
CASAKDGFYYEQFF

SEQ ID NO: 539441 - protein, 14 aa, Homo sapiens
  CDR3 for alpha chain variable domain of TCR clone 269721 (TRAV12-2, TRAJ13)
SAVKKTGGYQKVAF

SEQ ID NO: 539442 - protein, 15 aa, Homo sapiens
  CDR3 for beta chain variable domain of TCR clone 269721 (TRBV27, TRBJ2-1)
CASRNGGGSSNEQFF

SEQ ID NO: 539443 - protein, 12 aa, Homo sapiens
  CDR3 for alpha chain variable domain of TCR clone 269722 (TRAV27, TRAJ33)
CAGDGSNYQLIW

SEQ ID NO: 539444 - protein, 13 aa, Homo sapiens
  CDR3 for beta chain variable domain of TCR clone 269722 (TRBV7-9, TRBJ1-2)
CASSLKQNYGYTF

SEQ ID NO: 539445 - protein, 15 aa, Homo sapiens
  CDR3 for alpha chain variable domain of TCR clone 269723 (TRAV23/DV6, TRAJ4)
CAASPLRGGYNKLIF

SEQ ID NO: 539446 - protein, 15 aa, Homo sapiens
  CDR3 for beta chain variable domain of TCR clone 269723 (TRBV7-9, TRBJ1-6)
CASSSPGRGNSPPHF

SEQ ID NO: 539447 - protein, 14 aa, Homo sapiens
  CDR3 for alpha chain variable domain of TCR clone 269724 (TRAV2, TRAJ45)
CAVEDLFQEEVLTD

SEQ ID NO: 539448 - protein, 15 aa, Homo sapiens
  CDR3 for beta chain variable domain of TCR clone 269724 (TRBV19, TRBJ2-2)
CQPISRDRATGELFF

SEQ ID NO: 539449 - protein, 16 aa, Homo sapiens
  CDR3 for alpha chain variable domain of TCR clone 269725 (TRAV3, TRAJ37)
CAVRPHGSGNTGKIIF

SEQ ID NO: 539450 - protein, 17 aa, Homo sapiens
  CDR3 for beta chain variable domain of TCR clone 269725 (TRBV7-2, TRBJ2-7)
CASSFETSGSTSSTSGR

SEQ ID NO: 539451 - protein, 14 aa, Homo sapiens
  CDR3 for alpha chain variable domain of TCR clone 269726 (TRAV1-2, TRAJ8)
CAAREDTGFQKLVF

SEQ ID NO: 539452 - protein, 16 aa, Homo sapiens
  CDR3 for beta chain variable domain of TCR clone 269726 (TRBV7-3, TRBJ2-2)
CASRLKRGTLSGELFF

SEQ ID NO: 539453 - protein, 13 aa, Homo sapiens
  CDR3 for alpha chain variable domain of TCR clone 269727 (TRAV8-3, TRAJ21)
CAVGAYNFNKFYF

SEQ ID NO: 539454 - protein, 16 aa, Homo sapiens
  CDR3 for beta chain variable domain of TCR clone 269727 (TRBV19, TRBJ2-1)
CASSMGGRSSYNEQFF

SEQ ID NO: 539455 - protein, 14 aa, Homo sapiens
  CDR3 for alpha chain variable domain of TCR clone 269728 (TRAV20, TRAJ22)
CAVQVSGSARQLTF

SEQ ID NO: 539456 - protein, 12 aa, Homo sapiens
  CDR3 for beta chain variable domain of TCR clone 269728 (TRBV5-5, TRBJ2-5)
CASSYFGETQYF

SEQ ID NO: 539457 - protein, 12 aa, Homo sapiens
  CDR3 for alpha chain variable domain of TCR clone 269729 (TRAV25, TRAJ30)
CAGKNRDHKIIF

SEQ ID NO: 539458 - protein, 11 aa, Homo sapiens
  CDR3 for beta chain variable domain of TCR clone 269729 (TRBV12-4, TRBJ2-7)
CATPEKGEQYF

SEQ ID NO: 539459 - protein, 14 aa, Homo sapiens
  CDR3 for alpha chain variable domain of TCR clone 269730 (TRAV13-1, TRAJ35)
CAASKGGFGNVLHC

SEQ ID NO: 539460 - protein, 20 aa, Homo sapiens
  CDR3 for beta chain variable domain of TCR clone 269730 (TRBV7-3, TRBJ1-1)
GGTQPCISVPAARIGAEAFF

SEQ ID NO: 539461 - protein, 15 aa, Homo sapiens
  CDR3 for alpha chain variable domain of TCR clone 269731 (TRAV4, TRAJ39)
CLVGPNNNAGNMLTF

SEQ ID NO: 539462 - protein, 14 aa, Homo sapiens
  CDR3 for beta chain variable domain of TCR clone 269731 (TRBV18, TRBJ2-3)
CASSGLADTDTQYF

SEQ ID NO: 539463 - protein, 11 aa, Homo sapiens
  CDR3 for alpha chain variable domain of TCR clone 269732 (TRAV13-2, TRAJ15)
CSHQAGTALIF

SEQ ID NO: 539464 - protein, 15 aa, Homo sapiens
  CDR3 for beta chain variable domain of TCR clone 269732 (TRBV20-1, TRBJ1-5)
CSATSDSGLGQPQHF

SEQ ID NO: 539465 - protein, 15 aa, Homo sapiens
  CDR3 for alpha chain variable domain of TCR clone 269733 (TRAV21, TRAJ37)
CAVRPTLSNTGTLIF

SEQ ID NO: 539466 - protein, 16 aa, Homo sapiens
  CDR3 for beta chain variable domain of TCR clone 269733 (TRBV24-1, TRBJ2-3)
CATSGRRQDLTDTQYF

SEQ ID NO: 539467 - protein, 14 aa, Homo sapiens
  CDR3 for alpha chain variable domain of TCR clone 269734 (TRAV12-3, TRAJ10)
SHLPLPGGGNKLTF

SEQ ID NO: 539468 - protein, 14 aa, Homo sapiens
  CDR3 for beta chain variable domain of TCR clone 269734 (TRBV6-1, TRBJ1-6)
CASSGTAYNSPLHF

SEQ ID NO: 539469 - protein, 15 aa, Homo sapiens
  CDR3 for alpha chain variable domain of TCR clone 269735 (TRAV30, TRAJ49)
CGTEGWAEHRQPVLF

SEQ ID NO: 539470 - protein, 13 aa, Homo sapiens
  CDR3 for beta chain variable domain of TCR clone 269735 (TRBV12-4, TRBJ2-7)
CASSPTETYEQYF

SEQ ID NO: 539471 - protein, 16 aa, Homo sapiens
  CDR3 for alpha chain variable domain of TCR clone 269736 (TRAV3, TRAJ37)
CAVRGKGSGSTGKLIF

SEQ ID NO: 539472 - protein, 15 aa, Homo sapiens
  CDR3 for beta chain variable domain of TCR clone 269736 (TRBV7-9, TRBJ1-6)
CASSSPGRGNSPLHF

SEQ ID NO: 539473 - protein, 14 aa, Homo sapiens
  CDR3 for alpha chain variable domain of TCR clone 269737 (TRAV9-2, TRAJ39)
CALYSYNAGNMLTF

SEQ ID NO: 539474 - protein, 14 aa, Homo sapiens
  CDR3 for beta chain variable domain of TCR clone 269737 (TRBV4-1, TRBJ2-2)
CASSQAVNTGELFF

SEQ ID NO: 539475 - protein, 14 aa, Homo sapiens
  CDR3 for alpha chain variable domain of TCR clone 269738 (TRAV26-1, TRAJ21)
CIVRVVYNFSKFYF

SEQ ID NO: 539476 - protein, 11 aa, Homo sapiens
  CDR3 for beta chain variable domain of TCR clone 269738 (TRBV5-6, TRBJ2-5)
CASSLERTQYF

SEQ ID NO: 539477 - protein, 16 aa, Homo sapiens
  CDR3 for alpha chain variable domain of TCR clone 269739 (TRAV12-1, TRAJ28)
CVVIAYSGAGSYQLTF

SEQ ID NO: 539478 - protein, 13 aa, Homo sapiens
  CDR3 for beta chain variable domain of TCR clone 269739 (TRBV7-3, TRBJ1-1)
CSSSQDWGAEAFF

SEQ ID NO: 539479 - protein, 10 aa, Homo sapiens
  CDR3 for alpha chain variable domain of TCR clone 269740 (TRAV36/DV7, TRAJ31)
CAVGEARLMF

SEQ ID NO: 539480 - protein, 13 aa, Homo sapiens
  CDR3 for beta chain variable domain of TCR clone 269740 (TRBV12-4, TRBJ1-2)
CASSLRQGKGYTF

SEQ ID NO: 539481 - protein, 17 aa, Homo sapiens
  CDR3 for alpha chain variable domain of TCR clone 269741 (TRAV23/DV6, TRAJ58)
CAARLLRGETSGSRLTF

SEQ ID NO: 539482 - protein, 14 aa, Homo sapiens
  CDR3 for beta chain variable domain of TCR clone 269741 (TRBV2, TRBJ2-7)
CASSITSGGYEQYF

SEQ ID NO: 539483 - protein, 16 aa, Homo sapiens
  CDR3 for alpha chain variable domain of TCR clone 269742 (TRAV2, TRAJ10)
CCGGSTVTGGGNKLTF

SEQ ID NO: 539484 - protein, 17 aa, Homo sapiens
  CDR3 for beta chain variable domain of TCR clone 269742 (TRBV7-3, TRBJ2-3)
CASSLMKRMRGADTQYF

SEQ ID NO: 539485 - protein, 18 aa, Homo sapiens
  CDR3 for alpha chain variable domain of TCR clone 269743 (TRAV26-2, TRAJ33)
CCVLLHPEEPESNYKLIW

SEQ ID NO: 539486 - protein, 18 aa, Homo sapiens
  CDR3 for beta chain variable domain of TCR clone 269743 (TRBV10-3, TRBJ2-2)
CTSVPSTRQGANTGELFF

SEQ ID NO: 539487 - protein, 13 aa, Homo sapiens
  CDR3 for alpha chain variable domain of TCR clone 269744 (TRAV27, TRAJ45)
CRSSVGGADGLTF

SEQ ID NO: 539488 - protein, 13 aa, Homo sapiens
  CDR3 for beta chain variable domain of TCR clone 269744 (TRBV7-7, TRBJ2-5)
CASSRSGQETQYF

SEQ ID NO: 539489 - protein, 13 aa, Homo sapiens
  CDR3 for alpha chain variable domain of TCR clone 269745 (TRAV12-3, TRAJ16)
CAVQLSDGQKLLF

SEQ ID NO: 539490 - protein, 14 aa, Homo sapiens
  CDR3 for beta chain variable domain of TCR clone 269745 (TRBV7-9, TRBJ2-1)
CASSPRDSLYEQFF

SEQ ID NO: 539491 - protein, 14 aa, Homo sapiens
  CDR3 for alpha chain variable domain of TCR clone 269746 (TRAV8-2, TRAJ11)
CVVSEKSGYSTLTF

SEQ ID NO: 539492 - protein, 16 aa, Homo sapiens
  CDR3 for beta chain variable domain of TCR clone 269746 (TRBV28, TRBJ2-1)
CASSSPKCPRDNEQFF

SEQ ID NO: 539493 - protein, 12 aa, Homo sapiens
  CDR3 for alpha chain variable domain of TCR clone 269747 (TRAV16, TRAJ12)
CALEDSSYKLIF

SEQ ID NO: 539494 - protein, 14 aa, Homo sapiens
  CDR3 for beta chain variable domain of TCR clone 269747 (TRBV12-4, TRBJ1-5)
CASSPTGPRRGTYF

SEQ ID NO: 539495 - protein, 13 aa, Homo sapiens
  CDR3 for alpha chain variable domain of TCR clone 269748 (TRAV12-2, TRAJ24)
CAVSTDSWGKLQF

SEQ ID NO: 539496 - protein, 14 aa, Homo sapiens
  CDR3 for beta chain variable domain of TCR clone 269748 (TRBV25-1, TRBJ1-1)
CASTPLGGNTEAFF

SEQ ID NO: 539497 - protein, 11 aa, Homo sapiens
  CDR3 for alpha chain variable domain of TCR clone 269749 (TRAV12-1, TRAJ39)
CVVSAVNMLTF

SEQ ID NO: 539498 - protein, 14 aa, Homo sapiens
  CDR3 for beta chain variable domain of TCR clone 269749 (TRBV7-2, TRBJ2-5)
CASSPRGSSETQYF

SEQ ID NO: 539499 - protein, 15 aa, Homo sapiens
  CDR3 for alpha chain variable domain of TCR clone 269750 (TRAV3, TRAJ32)
CAGSSYGGATNKLIF

SEQ ID NO: 539500 - protein, 14 aa, Homo sapiens
  CDR3 for beta chain variable domain of TCR clone 269750 (TRBV20-1, TRBJ1-4)
CSARDGSGGEKLFF

SEQ ID NO: 539501 - protein, 11 aa, Homo sapiens
  CDR3 for alpha chain variable domain of TCR clone 269751 (TRAV2, TRAJ33)
CAVESNYQLIW

SEQ ID NO: 539502 - protein, 15 aa, Homo sapiens
  CDR3 for beta chain variable domain of TCR clone 269751 (TRBV20-1, TRBJ2-7)
CRARDRVSGMDEQYF

SEQ ID NO: 539503 - protein, 11 aa, Homo sapiens
  CDR3 for alpha chain variable domain of TCR clone 269752 (TRAV16, TRAJ33)
CALHSNYQLIW

SEQ ID NO: 539504 - protein, 16 aa, Homo sapiens
  CDR3 for beta chain variable domain of TCR clone 269752 (TRBV5-4, TRBJ2-3)
CASQQPGAGGADTQYF

SEQ ID NO: 539505 - protein, 21 aa, Homo sapiens
  CDR3 for alpha chain variable domain of TCR clone 269753 (TRAV41, TRAJ42)
TASHPRDSAVYICAPQGNLIF

SEQ ID NO: 539506 - protein, 14 aa, Homo sapiens
  CDR3 for beta chain variable domain of TCR clone 269753 (TRBV19, TRBJ2-1)
CASPTFVLSGEQFF

SEQ ID NO: 539507 - protein, 12 aa, Homo sapiens
  CDR3 for alpha chain variable domain of TCR clone 269754 (TRAV13-1, TRAJ15)
SAASQAGTALIF

SEQ ID NO: 539508 - protein, 18 aa, Homo sapiens
  CDR3 for beta chain variable domain of TCR clone 269754 (TRBV7-9, TRBJ2-3)
CASSLPINGQISADTQYF

SEQ ID NO: 539509 - protein, 14 aa, Homo sapiens
  CDR3 for alpha chain variable domain of TCR clone 269755 (TRAV12-3, TRAJ10)
RHLPLTGGGNKLTF

SEQ ID NO: 539510 - protein, 12 aa, Homo sapiens
  CDR3 for beta chain variable domain of TCR clone 269755 (TRBV7-3, TRBJ2-5)
CASSSPGGTQYF

SEQ ID NO: 539511 - protein, 14 aa, Homo sapiens
  CDR3 for alpha chain variable domain of TCR clone 269756 (TRAV38-1, TRAJ45)
CAYYSGGGADGLTF

SEQ ID NO: 539512 - protein, 15 aa, Homo sapiens
  CDR3 for beta chain variable domain of TCR clone 269756 (TRBV5-5, TRBJ2-1)
CASSPEAETYNEQFF

SEQ ID NO: 539513 - protein, 16 aa, Homo sapiens
  CDR3 for alpha chain variable domain of TCR clone 269757 (TRAV12-3, TRAJ53)
CAMSPGSGGSNYKLPF

SEQ ID NO: 539514 - protein, 13 aa, Homo sapiens
  CDR3 for beta chain variable domain of TCR clone 269757 (TRBV20-1, TRBJ2-2)
CSASAAGTGELFF

SEQ ID NO: 539515 - protein, 13 aa, Homo sapiens
  CDR3 for alpha chain variable domain of TCR clone 269758 (TRAV35, TRAJ58)
CAGLETSGSSLTF

SEQ ID NO: 539516 - protein, 15 aa, Homo sapiens
  CDR3 for beta chain variable domain of TCR clone 269758 (TRBV20-1, TRBJ2-1)
CSARFSAGGLNEQFF

SEQ ID NO: 539517 - protein, 15 aa, Homo sapiens
  CDR3 for alpha chain variable domain of TCR clone 269759 (TRAV26-1, TRAJ12)
IASSELMDSSYKLIF

SEQ ID NO: 539518 - protein, 11 aa, Homo sapiens
  CDR3 for beta chain variable domain of TCR clone 269759 (TRBV7-9, TRBJ2-3)
CASSPPDTQYC

SEQ ID NO: 539519 - protein, 10 aa, Homo sapiens
  CDR3 for alpha chain variable domain of TCR clone 269760 (TRAV2, TRAJ34)
CAVVNDKLIF

SEQ ID NO: 539520 - protein, 13 aa, Homo sapiens
  CDR3 for beta chain variable domain of TCR clone 269760 (TRBV19, TRBJ1-2)
CASSVPGQDGYTF

SEQ ID NO: 539521 - protein, 14 aa, Homo sapiens
  CDR3 for alpha chain variable domain of TCR clone 269761 (TRAV3, TRAJ8)
CAALMNTGFQKLVF

SEQ ID NO: 539522 - protein, 15 aa, Homo sapiens
  CDR3 for beta chain variable domain of TCR clone 269761 (TRBV28, TRBJ2-5)
CASSLGLGSQETQYF

SEQ ID NO: 539523 - protein, 13 aa, Homo sapiens
  CDR3 for alpha chain variable domain of TCR clone 269762 (TRAV2, TRAJ20)
CAVEDPSEYKLSF

SEQ ID NO: 539524 - protein, 16 aa, Homo sapiens
  CDR3 for beta chain variable domain of TCR clone 269762 (TRBV25-1, TRBJ2-7)
CASSELTGGVIYEQYF

SEQ ID NO: 539525 - protein, 13 aa, Homo sapiens
  CDR3 for alpha chain variable domain of TCR clone 269763 (TRAV12-1, TRAJ13)
CVVTSGGYQKVTF

SEQ ID NO: 539526 - protein, 14 aa, Homo sapiens
  CDR3 for beta chain variable domain of TCR clone 269763 (TRBV27, TRBJ2-7)
CASSLAGLSYEQFF

SEQ ID NO: 539527 - protein, 14 aa, Homo sapiens
  CDR3 for alpha chain variable domain of TCR clone 269764 (TRAV1-2, TRAJ16)
CAVNRFSDGQKLLF

SEQ ID NO: 539528 - protein, 18 aa, Homo sapiens
  CDR3 for beta chain variable domain of TCR clone 269764 (TRBV13, TRBJ2-5)
CASSLGRGQDPVLRARHA

SEQ ID NO: 539529 - protein, 19 aa, Homo sapiens
  CDR3 for alpha chain variable domain of TCR clone 269765 (TRAV1-2, TRAJ18)
CLLPLCCERRGSTLGRLSF

SEQ ID NO: 539530 - protein, 15 aa, Homo sapiens
  CDR3 for beta chain variable domain of TCR clone 269765 (TRBV20-1, TRBJ2-1)
CSAEGGLLAGDEQFF

SEQ ID NO: 539531 - protein, 13 aa, Homo sapiens
  CDR3 for alpha chain variable domain of TCR clone 269766 (TRAV13-2, TRAJ13)
CAERPGGYQKVTF

SEQ ID NO: 539532 - protein, 15 aa, Homo sapiens
  CDR3 for beta chain variable domain of TCR clone 269766 (TRBV4-1, TRBJ1-4)
CASSDTGGTNEKLLF

SEQ ID NO: 539533 - protein, 15 aa, Homo sapiens
  CDR3 for alpha chain variable domain of TCR clone 269767 (TRAV27, TRAJ38)
CAGRFNAGNNRKLIW

SEQ ID NO: 539534 - protein, 12 aa, Homo sapiens
  CDR3 for beta chain variable domain of TCR clone 269767 (TRBV11-2, TRBJ2-2)
CASSLGGGELFF

SEQ ID NO: 539535 - protein, 14 aa, Homo sapiens
  CDR3 for alpha chain variable domain of TCR clone 269768 (TRAV17, TRAJ35)
CATDRPGSGNVLHC

SEQ ID NO: 539536 - protein, 19 aa, Homo sapiens
  CDR3 for beta chain variable domain of TCR clone 269768 (TRBV11-3, TRBJ2-2)
CASSTRPGAKTTNTGELFF

SEQ ID NO: 539537 - protein, 16 aa, Homo sapiens
  CDR3 for alpha chain variable domain of TCR clone 269769 (TRAV16, TRAJ52)
CARKMNYGGSQGKLTF

SEQ ID NO: 539538 - protein, 15 aa, Homo sapiens
  CDR3 for beta chain variable domain of TCR clone 269769 (TRBV29-1, TRBJ2-1)
CSGRDRKSSYNEQFF

SEQ ID NO: 539539 - protein, 14 aa, Homo sapiens
  CDR3 for alpha chain variable domain of TCR clone 269770 (TRAV1-2, TRAJ8)
CAVREDTGCQKLVC

SEQ ID NO: 539540 - protein, 15 aa, Homo sapiens
  CDR3 for beta chain variable domain of TCR clone 269770 (TRBV6-3, TRBJ2-7)
CASSSPGTVFYEQYF

SEQ ID NO: 539541 - protein, 17 aa, Homo sapiens
  CDR3 for alpha chain variable domain of TCR clone 269771 (TRAV4, TRAJ42)
CLVGVLNYGGSQGSLLF

SEQ ID NO: 539542 - protein, 12 aa, Homo sapiens
  CDR3 for beta chain variable domain of TCR clone 269771 (TRBV20-1, TRBJ2-1)
CSAQYTYNEQFF

SEQ ID NO: 539543 - protein, 14 aa, Homo sapiens
  CDR3 for alpha chain variable domain of TCR clone 269772 (TRAV12-2, TRAJ6)
CASKWGGGSYIPTF

SEQ ID NO: 539544 - protein, 14 aa, Homo sapiens
  CDR3 for beta chain variable domain of TCR clone 269772 (TRBV19, TRBJ2-1)
CASPTFVLSGEQFF

SEQ ID NO: 539545 - protein, 14 aa, Homo sapiens
  CDR3 for alpha chain variable domain of TCR clone 269773 (TRAV17, TRAJ53)
FATDAGGSNYKLTF

SEQ ID NO: 539546 - protein, 17 aa, Homo sapiens
  CDR3 for beta chain variable domain of TCR clone 269773 (TRBV20-1, TRBJ2-1)
CSASSSGLAGSYNEQFF

SEQ ID NO: 539547 - protein, 21 aa, Homo sapiens
  CDR3 for alpha chain variable domain of TCR clone 269774 (TRAV1-1, TRAJ6)
CLLLLRCERLERTGVSYIPTF

SEQ ID NO: 539548 - protein, 13 aa, Homo sapiens
  CDR3 for beta chain variable domain of TCR clone 269774 (TRBV10-2, TRBJ2-7)
CASGASGGYEQYF

SEQ ID NO: 539549 - protein, 13 aa, Homo sapiens
  CDR3 for alpha chain variable domain of TCR clone 269775 (TRAV8-3, TRAJ44)
CAVVPGTASKLTF

SEQ ID NO: 539550 - protein, 14 aa, Homo sapiens
  CDR3 for beta chain variable domain of TCR clone 269775 (TRBV11-2, TRBJ2-3)
CASLRLARTDTQYF

SEQ ID NO: 539551 - protein, 12 aa, Homo sapiens
  CDR3 for alpha chain variable domain of TCR clone 269776 (TRAV20, TRAJ42)
CAVRGSQGNLIF

SEQ ID NO: 539552 - protein, 15 aa, Homo sapiens
  CDR3 for beta chain variable domain of TCR clone 269776 (TRBV20-1, TRBJ2-7)
CSAREPGPGSYEQYF

SEQ ID NO: 539553 - protein, 14 aa, Homo sapiens
  CDR3 for alpha chain variable domain of TCR clone 269777 (TRAV26-1, TRAJ38)
CISDNAGNNRKLSW

SEQ ID NO: 539554 - protein, 13 aa, Homo sapiens
  CDR3 for beta chain variable domain of TCR clone 269777 (TRBV20-1, TRBJ1-1)
CSARGGGNTEAFF

SEQ ID NO: 539555 - protein, 14 aa, Homo sapiens
  CDR3 for alpha chain variable domain of TCR clone 269778 (TRAV2, TRAJ37)
CAVDFTSNPGKLIF

SEQ ID NO: 539556 - protein, 12 aa, Homo sapiens
  CDR3 for beta chain variable domain of TCR clone 269778 (TRBV29-1, TRBJ2-3)
CSVTGGADTQYF

SEQ ID NO: 539557 - protein, 11 aa, Homo sapiens
  CDR3 for alpha chain variable domain of TCR clone 269779 (TRAV12-2, TRAJ29)
CAVTLRSPLVF

SEQ ID NO: 539558 - protein, 13 aa, Homo sapiens
  CDR3 for beta chain variable domain of TCR clone 269779 (TRBV10-3, TRBJ2-7)
CASKLAVNYEQYF

SEQ ID NO: 539559 - protein, 14 aa, Homo sapiens
  CDR3 for alpha chain variable domain of TCR clone 269780 (TRAV1-2, TRAJ16)
CAVNRFSDGQKLLF

SEQ ID NO: 539560 - protein, 15 aa, Homo sapiens
  CDR3 for beta chain variable domain of TCR clone 269780 (TRBV7-9, TRBJ1-4)
CAGSRTGGFNEKLFF

SEQ ID NO: 539561 - protein, 16 aa, Homo sapiens
  CDR3 for alpha chain variable domain of TCR clone 269781 (TRAV17, TRAJ22)
CATEAISSGSARQLTF

SEQ ID NO: 539562 - protein, 15 aa, Homo sapiens
  CDR3 for beta chain variable domain of TCR clone 269781 (TRBV5-1, TRBJ2-1)
CASSPPRAPYNEQFF

SEQ ID NO: 539563 - protein, 19 aa, Homo sapiens
  CDR3 for alpha chain variable domain of TCR clone 269782 (TRAV26-1, TRAJ28)
CIVTVAHAYSGAGSYQLTF

SEQ ID NO: 539564 - protein, 17 aa, Homo sapiens
  CDR3 for beta chain variable domain of TCR clone 269782 (TRBV9, TRBJ2-2)
CASSVGGQGTDTGELFF

SEQ ID NO: 539565 - protein, 11 aa, Homo sapiens
  CDR3 for alpha chain variable domain of TCR clone 269783 (TRAV21, TRAJ11)
CAVNGYSTLTF

SEQ ID NO: 539566 - protein, 16 aa, Homo sapiens
  CDR3 for beta chain variable domain of TCR clone 269783 (TRBV12-4, TRBJ2-1)
CASSAVGQGNGDEQFF

SEQ ID NO: 539567 - protein, 13 aa, Homo sapiens
  CDR3 for alpha chain variable domain of TCR clone 269784 (TRAV1-2, TRAJ9)
CAALNTGGFKTIF

SEQ ID NO: 539568 - protein, 20 aa, Homo sapiens
  CDR3 for beta chain variable domain of TCR clone 269784 (TRBV28, TRBJ2-1)
CASTPIVRSPGLAGGNEQFF

SEQ ID NO: 539569 - protein, 16 aa, Homo sapiens
  CDR3 for alpha chain variable domain of TCR clone 269785 (TRAV8-2, TRAJ48)
CVVSDVSNFGNEKLTF

SEQ ID NO: 539570 - protein, 13 aa, Homo sapiens
  CDR3 for beta chain variable domain of TCR clone 269785 (TRBV12-5, TRBJ2-3)
CASGDRQSDTQYF

SEQ ID NO: 539571 - protein, 14 aa, Homo sapiens
  CDR3 for alpha chain variable domain of TCR clone 269786 (TRAV3, TRAJ20)
CAVPPAPNDYKLSF

SEQ ID NO: 539572 - protein, 19 aa, Homo sapiens
  CDR3 for beta chain variable domain of TCR clone 269786 (TRBV7-9, TRBJ2-1)
CASSHNRGALLRSYNEQFF

SEQ ID NO: 539573 - protein, 14 aa, Homo sapiens
  CDR3 for alpha chain variable domain of TCR clone 269787 (TRAV38-1, TRAJ40)
CALRPTSGTYKYIF

SEQ ID NO: 539574 - protein, 12 aa, Homo sapiens
  CDR3 for beta chain variable domain of TCR clone 269787 (TRBV19, TRBJ2-7)
CASTSGTYEQYF

SEQ ID NO: 539575 - protein, 11 aa, Homo sapiens
  CDR3 for alpha chain variable domain of TCR clone 269788 (TRAV12-3, TRAJ43)
CAMSVSNDMRF

SEQ ID NO: 539576 - protein, 13 aa, Homo sapiens
  CDR3 for beta chain variable domain of TCR clone 269788 (TRBV19, TRBJ1-4)
CASSTTMGQKLFC

SEQ ID NO: 539577 - protein, 14 aa, Homo sapiens
  CDR3 for alpha chain variable domain of TCR clone 269789 (TRAV8-4, TRAJ16)
CAVSPVGRWPEAAL

SEQ ID NO: 539578 - protein, 15 aa, Homo sapiens
  CDR3 for beta chain variable domain of TCR clone 269789 (TRBV11-3, TRBJ2-7)
CACSPGPASSYEQYF

SEQ ID NO: 539579 - protein, 14 aa, Homo sapiens
  CDR3 for alpha chain variable domain of TCR clone 269790 (TRAV1-2, TRAJ16)
CAVNRFSDGQKLLF

SEQ ID NO: 539580 - protein, 18 aa, Homo sapiens
  CDR3 for beta chain variable domain of TCR clone 269790 (TRBV10-3, TRBJ2-7)
CAISESGRPSGGRVEQYF

SEQ ID NO: 539581 - protein, 20 aa, Homo sapiens
  CDR3 for alpha chain variable domain of TCR clone 269791 (TRAV13-1, TRAJ20)
NLKTRLSTSVQQVNDYKLSF

SEQ ID NO: 539582 - protein, 14 aa, Homo sapiens
  CDR3 for beta chain variable domain of TCR clone 269791 (TRBV7-6, TRBJ2-3)
CASSLTGGTDTQYF

SEQ ID NO: 539583 - protein, 11 aa, Homo sapiens
  CDR3 for alpha chain variable domain of TCR clone 269792 (TRAV21, TRAJ7)
CAAYGNNRLAF

SEQ ID NO: 539584 - protein, 14 aa, Homo sapiens
  CDR3 for beta chain variable domain of TCR clone 269792 (TRBV4-1, TRBJ2-7)
CASSRTGVAVEQYF

SEQ ID NO: 539585 - protein, 13 aa, Homo sapiens
  CDR3 for alpha chain variable domain of TCR clone 269793 (TRAV1-1, TRAJ20)
CAVRGSNDYKLSF

SEQ ID NO: 539586 - protein, 19 aa, Homo sapiens
  CDR3 for beta chain variable domain of TCR clone 269793 (TRBV25-1, TRBJ2-2)
CAILVYRVDRGRKTGELFF

SEQ ID NO: 539587 - protein, 14 aa, Homo sapiens
  CDR3 for alpha chain variable domain of TCR clone 269794 (TRAV12-2, TRAJ5)
CAVNRSTGRRALTF

SEQ ID NO: 539588 - protein, 14 aa, Homo sapiens
  CDR3 for beta chain variable domain of TCR clone 269794 (TRBV18, TRBJ2-5)
CASSPGVSQETQCF

SEQ ID NO: 539589 - protein, 16 aa, Homo sapiens
  CDR3 for alpha chain variable domain of TCR clone 269795 (TRAV13-1, TRAJ48)
CAASIFGNFGNEKLTF

SEQ ID NO: 539590 - protein, 14 aa, Homo sapiens
  CDR3 for beta chain variable domain of TCR clone 269795 (TRBV5-1, TRBJ1-1)
CASSLAVGSGEAFF

SEQ ID NO: 539591 - protein, 14 aa, Homo sapiens
  CDR3 for alpha chain variable domain of TCR clone 269796 (TRAV13-2, TRAJ45)
CAETSGGGADGLTF

SEQ ID NO: 539592 - protein, 17 aa, Homo sapiens
  CDR3 for beta chain variable domain of TCR clone 269796 (TRBV4-1, TRBJ2-3)
CASSQGYVSGGTDTQYF

SEQ ID NO: 539593 - protein, 19 aa, Homo sapiens
  CDR3 for alpha chain variable domain of TCR clone 269797 (TRAV29/DV5, TRAJ49)
CSVLLCSKLTVDTGNQFYF

SEQ ID NO: 539594 - protein, 16 aa, Homo sapiens
  CDR3 for beta chain variable domain of TCR clone 269797 (TRBV12-5, TRBJ2-5)
CASGPRTSGNHETQYF

SEQ ID NO: 539595 - protein, 16 aa, Homo sapiens
  CDR3 for alpha chain variable domain of TCR clone 269798 (TRAV16, TRAJ42)
CARKMNYVGSQGNLIF

SEQ ID NO: 539596 - protein, 13 aa, Homo sapiens
  CDR3 for beta chain variable domain of TCR clone 269798 (TRBV20-1, TRBJ2-7)
CGASPPSSYEQYF

SEQ ID NO: 539597 - protein, 14 aa, Homo sapiens
  CDR3 for alpha chain variable domain of TCR clone 269799 (TRAV17, TRAJ49)
CATDARDTGNQFYF

SEQ ID NO: 539598 - protein, 14 aa, Homo sapiens
  CDR3 for beta chain variable domain of TCR clone 269799 (TRBV5-1, TRBJ2-7)
CGSSRGESLYEQYF

SEQ ID NO: 539599 - protein, 11 aa, Homo sapiens
  CDR3 for alpha chain variable domain of TCR clone 269800 (TRAV2, TRAJ33)
CAVESNYQLIW

SEQ ID NO: 539600 - protein, 16 aa, Homo sapiens
  CDR3 for beta chain variable domain of TCR clone 269800 (TRBV7-2, TRBJ1-4)
CASSLAPGRRDEKLFF

SEQ ID NO: 539601 - protein, 14 aa, Homo sapiens
  CDR3 for alpha chain variable domain of TCR clone 269801 (TRAV12-2, TRAJ17)
CAVLFKAAGNKLTF

SEQ ID NO: 539602 - protein, 15 aa, Homo sapiens
  CDR3 for beta chain variable domain of TCR clone 269801 (TRBV20-1, TRBJ2-7)
CSARDRVSGMGEQYF

SEQ ID NO: 539603 - protein, 11 aa, Homo sapiens
  CDR3 for alpha chain variable domain of TCR clone 269802 (TRAV3, TRAJ17)
PRGAAGNQLTF

SEQ ID NO: 539604 - protein, 12 aa, Homo sapiens
  CDR3 for beta chain variable domain of TCR clone 269802 (TRBV11-2, TRBJ2-2)
CASSLGGGELFF

SEQ ID NO: 539605 - protein, 16 aa, Homo sapiens
  CDR3 for alpha chain variable domain of TCR clone 269803 (TRAV12-2, TRAJ40)
CAVIRGGTSGTHKYIF

SEQ ID NO: 539606 - protein, 16 aa, Homo sapiens
  CDR3 for beta chain variable domain of TCR clone 269803 (TRBV7-9, TRBJ2-1)
CASSDVAGGSYNEQFF

SEQ ID NO: 539607 - protein, 15 aa, Homo sapiens
  CDR3 for alpha chain variable domain of TCR clone 269804 (TRAV26-1, TRAJ44)
CIARVPFGTARKLTF

SEQ ID NO: 539608 - protein, 15 aa, Homo sapiens
  CDR3 for beta chain variable domain of TCR clone 269804 (TRBV20-1, TRBJ1-1)
CSASRGVTGNTEAFF

SEQ ID NO: 539609 - protein, 16 aa, Homo sapiens
  CDR3 for alpha chain variable domain of TCR clone 269805 (TRAV14/DV4, TRAJ54)
CAMREGRIQGAQKLVF

SEQ ID NO: 539610 - protein, 16 aa, Homo sapiens
  CDR3 for beta chain variable domain of TCR clone 269805 (TRBV11-3, TRBJ2-5)
CASSSVVAGSTETQYF

SEQ ID NO: 539611 - protein, 14 aa, Homo sapiens
  CDR3 for alpha chain variable domain of TCR clone 269806 (TRAV2, TRAJ9)
CAVEVRSGGFKTIF

SEQ ID NO: 539612 - protein, 16 aa, Homo sapiens
  CDR3 for beta chain variable domain of TCR clone 269806 (TRBV19, TRBJ2-1)
CASSSKGTRSYNEQFF

SEQ ID NO: 539613 - protein, 23 aa, Homo sapiens
  CDR3 for alpha chain variable domain of TCR clone 269807 (TRAV13-1, TRAJ42)
CAASKKAKEISSLEKALNSLLNQ

SEQ ID NO: 539614 - protein, 15 aa, Homo sapiens
  CDR3 for beta chain variable domain of TCR clone 269807 (TRBV28, TRBJ2-7)
CASKKPSGRAYEQYF

SEQ ID NO: 539615 - protein, 14 aa, Homo sapiens
  CDR3 for alpha chain variable domain of TCR clone 269808 (TRAV17, TRAJ31)
CATVPLSGNARLMV

SEQ ID NO: 539616 - protein, 15 aa, Homo sapiens
  CDR3 for beta chain variable domain of TCR clone 269808 (TRBV15, TRBJ2-2)
CATSGTGGRVGELFF

SEQ ID NO: 539617 - protein, 16 aa, Homo sapiens
  CDR3 for alpha chain variable domain of TCR clone 269809 (TRAV30, TRAJ24)
CGTEIVDADSWGKFQF

SEQ ID NO: 539618 - protein, 14 aa, Homo sapiens
  CDR3 for beta chain variable domain of TCR clone 269809 (TRBV7-2, TRBJ2-7)
CASSPKTSFYEQYC

SEQ ID NO: 539619 - protein, 16 aa, Homo sapiens
  CDR3 for alpha chain variable domain of TCR clone 269810 (TRAV25, TRAJ53)
CAGPKGSGGSNYKLTF

SEQ ID NO: 539620 - protein, 12 aa, Homo sapiens
  CDR3 for beta chain variable domain of TCR clone 269810 (TRBV12-4, TRBJ2-7)
CASSLGGYEQYF

SEQ ID NO: 539621 - protein, 13 aa, Homo sapiens
  CDR3 for alpha chain variable domain of TCR clone 269811 (TRAV38-1, TRAJ52)
CAFRGTSHGKLTF

SEQ ID NO: 539622 - protein, 15 aa, Homo sapiens
  CDR3 for beta chain variable domain of TCR clone 269811 (TRBV7-8, TRBJ2-5)
CASSDAAGSQETQYF

SEQ ID NO: 539623 - protein, 15 aa, Homo sapiens
  CDR3 for alpha chain variable domain of TCR clone 269812 (TRAV26-1, TRAJ29)
CIVRVEGSGNTPLVF

SEQ ID NO: 539624 - protein, 16 aa, Homo sapiens
  CDR3 for beta chain variable domain of TCR clone 269812 (TRBV29-1, TRBJ2-7)
CSVEDAEDGTAYEQYF

SEQ ID NO: 539625 - protein, 21 aa, Homo sapiens
  CDR3 for alpha chain variable domain of TCR clone 269813 (TRAV8-3, TRAJ10)
CAVGHTHGRRKQTHLWDRHSA

SEQ ID NO: 539626 - protein, 10 aa, Homo sapiens
  CDR3 for beta chain variable domain of TCR clone 269813 (TRBV20-1, TRBJ2-5)
CSARFETQYL

SEQ ID NO: 539627 - protein, 10 aa, Homo sapiens
  CDR3 for alpha chain variable domain of TCR clone 269814 (TRAV13-1, TRAJ26)
CAPYGQNFVF

SEQ ID NO: 539628 - protein, 12 aa, Homo sapiens
  CDR3 for beta chain variable domain of TCR clone 269814 (TRBV7-9, TRBJ1-1)
CASSLVRGEAFF

SEQ ID NO: 539629 - protein, 13 aa, Homo sapiens
  CDR3 for alpha chain variable domain of TCR clone 269815 (TRAV26-1, TRAJ29)
CIVRRPGNTPLFF

SEQ ID NO: 539630 - protein, 16 aa, Homo sapiens
  CDR3 for beta chain variable domain of TCR clone 269815 (TRBV4-3, TRBJ2-1)
CASSQERLAGFNEQFF

SEQ ID NO: 539631 - protein, 15 aa, Homo sapiens
  CDR3 for alpha chain variable domain of TCR clone 269816 (TRAV29/DV5, TRAJ29)
CAASERSSGNTPLVF

SEQ ID NO: 539632 - protein, 17 aa, Homo sapiens
  CDR3 for beta chain variable domain of TCR clone 269816 (TRBV4-1, TRBJ1-4)
CASSQEGHRGVEEKLFF

SEQ ID NO: 539633 - protein, 14 aa, Homo sapiens
  CDR3 for alpha chain variable domain of TCR clone 269817 (TRAV12-3, TRAJ10)
SATYLTGGGNKLTF

SEQ ID NO: 539634 - protein, 12 aa, Homo sapiens
  CDR3 for beta chain variable domain of TCR clone 269817 (TRBV7-9, TRBJ2-7)
CASSIKREEQYF

SEQ ID NO: 539635 - protein, 11 aa, Homo sapiens
  CDR3 for alpha chain variable domain of TCR clone 269818 (TRAV13-2, TRAJ23)
CAESPRGKLIF

SEQ ID NO: 539636 - protein, 12 aa, Homo sapiens
  CDR3 for beta chain variable domain of TCR clone 269818 (TRBV11-2, TRBJ2-2)
CACSLGGGELFF

SEQ ID NO: 539637 - protein, 14 aa, Homo sapiens
  CDR3 for alpha chain variable domain of TCR clone 269819 (TRAV9-2, TRAJ39)
CALYIYNAGNMLTF

SEQ ID NO: 539638 - protein, 16 aa, Homo sapiens
  CDR3 for beta chain variable domain of TCR clone 269819 (TRBV18, TRBJ1-5)
CASSPSTGNSNQPQHF

SEQ ID NO: 539639 - protein, 14 aa, Homo sapiens
  CDR3 for alpha chain variable domain of TCR clone 269820 (TRAV8-4, TRAJ4)
CAVSPSGGYNKLIL

SEQ ID NO: 539640 - protein, 15 aa, Homo sapiens
  CDR3 for beta chain variable domain of TCR clone 269820 (TRBV7-8, TRBJ2-3)
CASSLSADSGGAQYF

SEQ ID NO: 539641 - protein, 16 aa, Homo sapiens
  CDR3 for alpha chain variable domain of TCR clone 269821 (TRAV8-3, TRAJ13)
CAVGAYPSGGYQKVTF

SEQ ID NO: 539642 - protein, 17 aa, Homo sapiens
  CDR3 for beta chain variable domain of TCR clone 269821 (TRBV13, TRBJ2-3)
CASSLSRVAGGSNTQYF

SEQ ID NO: 539643 - protein, 13 aa, Homo sapiens
  CDR3 for alpha chain variable domain of TCR clone 269822 (TRAV26-1, TRAJ40)
CIVATSGTYKYIF

SEQ ID NO: 539644 - protein, 17 aa, Homo sapiens
  CDR3 for beta chain variable domain of TCR clone 269822 (TRBV19, TRBJ2-7)
CASSISFYDSYPYEQYF

SEQ ID NO: 539645 - protein, 18 aa, Homo sapiens
  CDR3 for alpha chain variable domain of TCR clone 269823 (TRAV12-3, TRAJ52)
CAMSRTNPGGTSYGKLTF

SEQ ID NO: 539646 - protein, 17 aa, Homo sapiens
  CDR3 for beta chain variable domain of TCR clone 269823 (TRBV7-3, TRBJ2-3)
CASSLMKRMRGADTQYF

SEQ ID NO: 539647 - protein, 15 aa, Homo sapiens
  CDR3 for alpha chain variable domain of TCR clone 269824 (TRAV39, TRAJ30)
CAVDPWRNRDDKIIF

SEQ ID NO: 539648 - protein, 14 aa, Homo sapiens
  CDR3 for beta chain variable domain of TCR clone 269824 (TRBV7-2, TRBJ2-7)
CASSFIGRVYEQYF

SEQ ID NO: 539649 - protein, 14 aa, Homo sapiens
  CDR3 for alpha chain variable domain of TCR clone 269825 (TRAV12-3, TRAJ10)
SHLPLTGGGNKLTF

SEQ ID NO: 539650 - protein, 14 aa, Homo sapiens
  CDR3 for beta chain variable domain of TCR clone 269825 (TRBV19, TRBJ2-7)
CASTLQGRPYEQYF

SEQ ID NO: 539651 - protein, 13 aa, Homo sapiens
  CDR3 for alpha chain variable domain of TCR clone 269826 (TRAV23/DV6, TRAJ47)
CAASMTRGTKLVF

SEQ ID NO: 539652 - protein, 14 aa, Homo sapiens
  CDR3 for beta chain variable domain of TCR clone 269826 (TRBV7-3, TRBJ1-1)
CASSLKGGNTEAFF

SEQ ID NO: 539653 - protein, 13 aa, Homo sapiens
  CDR3 for alpha chain variable domain of TCR clone 269827 (TRAV12-3, TRAJ10)
CAVGTGGGNKLTF

SEQ ID NO: 539654 - protein, 14 aa, Homo sapiens
  CDR3 for beta chain variable domain of TCR clone 269827 (TRBV7-3, TRBJ2-1)
CASSLAGGTNEQFF

SEQ ID NO: 539655 - protein, 13 aa, Homo sapiens
  CDR3 for alpha chain variable domain of TCR clone 269828 (TRAV1-1, TRAJ33)
CAVRRASNYQLIW

SEQ ID NO: 539656 - protein, 16 aa, Homo sapiens
  CDR3 for beta chain variable domain of TCR clone 269828 (TRBV6-1, TRBJ2-2)
CASSAFRGGDTGELFF

SEQ ID NO: 539657 - protein, 13 aa, Homo sapiens
  CDR3 for alpha chain variable domain of TCR clone 269829 (TRAV12-1, TRAJ21)
CVVIGDYFNKFYF

SEQ ID NO: 539658 - protein, 14 aa, Homo sapiens
  CDR3 for beta chain variable domain of TCR clone 269829 (TRBV7-3, TRBJ2-2)
CASSLYPLTGELFF

SEQ ID NO: 539659 - protein, 13 aa, Homo sapiens
  CDR3 for alpha chain variable domain of TCR clone 269830 (TRAV8-3, TRAJ12)
WVLRMDRSYKLIF

SEQ ID NO: 539660 - protein, 15 aa, Homo sapiens
  CDR3 for beta chain variable domain of TCR clone 269830 (TRBV6-5, TRBJ1-5)
CASSYSWGSNQPQHF

SEQ ID NO: 539661 - protein, 16 aa, Homo sapiens
  CDR3 for alpha chain variable domain of TCR clone 269831 (TRAV13-2, TRAJ37)
CAENIRGSSNTGKIIF

SEQ ID NO: 539662 - protein, 15 aa, Homo sapiens
  CDR3 for beta chain variable domain of TCR clone 269831 (TRBV5-1, TRBJ2-7)
CASSPQGRPLDEQYF

SEQ ID NO: 539663 - protein, 17 aa, Homo sapiens
  CDR3 for alpha chain variable domain of TCR clone 269832 (TRAV3, TRAJ10)
EASNTVILTGGGNKLTF

SEQ ID NO: 539664 - protein, 12 aa, Homo sapiens
  CDR3 for beta chain variable domain of TCR clone 269832 (TRBV20-1, TRBJ2-1)
CSAIGPRNEQFF

SEQ ID NO: 539665 - protein, 12 aa, Homo sapiens
  CDR3 for alpha chain variable domain of TCR clone 269833 (TRAV20, TRAJ23)
CAVHNQGGKLIF

SEQ ID NO: 539666 - protein, 16 aa, Homo sapiens
  CDR3 for beta chain variable domain of TCR clone 269833 (TRBV7-9, TRBJ1-2)
CASSLGFSSGEDGYTF

SEQ ID NO: 539667 - protein, 12 aa, Homo sapiens
  CDR3 for alpha chain variable domain of TCR clone 269834 (TRAV8-4, TRAJ43)
CAVSGNNNDMRF

SEQ ID NO: 539668 - protein, 14 aa, Homo sapiens
  CDR3 for beta chain variable domain of TCR clone 269834 (TRBV11-2, TRBJ1-2)
CASSLGTANYGYAF

SEQ ID NO: 539669 - protein, 14 aa, Homo sapiens
  CDR3 for alpha chain variable domain of TCR clone 269835 (TRAV23/DV6, TRAJ11)
CAALIGGGYSTLTF

SEQ ID NO: 539670 - protein, 13 aa, Homo sapiens
  CDR3 for beta chain variable domain of TCR clone 269835 (TRBV11-3, TRBJ1-1)
YASSLGGNTEAFF

SEQ ID NO: 539671 - protein, 11 aa, Homo sapiens
  CDR3 for alpha chain variable domain of TCR clone 269836 (TRAV14/DV4, TRAJ43)
CAMREREDMRF

SEQ ID NO: 539672 - protein, 13 aa, Homo sapiens
  CDR3 for beta chain variable domain of TCR clone 269836 (TRBV7-9, TRBJ1-2)
CASSLKQNYGYTF

SEQ ID NO: 539673 - protein, 13 aa, Homo sapiens
  CDR3 for alpha chain variable domain of TCR clone 269837 (TRAV8-6, TRAJ13)
CAVSSGGYQKVTF

SEQ ID NO: 539674 - protein, 15 aa, Homo sapiens
  CDR3 for beta chain variable domain of TCR clone 269837 (TRBV7-9, TRBJ2-7)
RASSLPMGQANEQYF

SEQ ID NO: 539675 - protein, 14 aa, Homo sapiens
  CDR3 for alpha chain variable domain of TCR clone 269838 (TRAV16, TRAJ26)
CALSSANYGQNFVF

SEQ ID NO: 539676 - protein, 15 aa, Homo sapiens
  CDR3 for beta chain variable domain of TCR clone 269838 (TRBV6-3, TRBJ2-7)
CASSSPGTVFYEQYF

SEQ ID NO: 539677 - protein, 13 aa, Homo sapiens
  CDR3 for alpha chain variable domain of TCR clone 269839 (TRAV27, TRAJ29)
CAGAHSGNTPLVF

SEQ ID NO: 539678 - protein, 16 aa, Homo sapiens
  CDR3 for beta chain variable domain of TCR clone 269839 (TRBV7-2, TRBJ1-2)
CASSSNQDRRGHGYTF

SEQ ID NO: 539679 - protein, 16 aa, Homo sapiens
  CDR3 for alpha chain variable domain of TCR clone 269840 (TRAV30, TRAJ24)
CGTEIVDANSWGKFQF

SEQ ID NO: 539680 - protein, 15 aa, Homo sapiens
  CDR3 for beta chain variable domain of TCR clone 269840 (TRBV20-1, TRBJ2-7)
CSARDRVAGMDEQYF

SEQ ID NO: 539681 - protein, 11 aa, Homo sapiens
  CDR3 for alpha chain variable domain of TCR clone 269841 (TRAV12-3, TRAJ49)
CAANTGNQFYF

SEQ ID NO: 539682 - protein, 12 aa, Homo sapiens
  CDR3 for beta chain variable domain of TCR clone 269841 (TRBV6-3, TRBJ2-7)
CAGSEPGFEQYF

SEQ ID NO: 539683 - protein, 13 aa, Homo sapiens
  CDR3 for alpha chain variable domain of TCR clone 269842 (TRAV27, TRAJ49)
CAPRPYTGHQFYF

SEQ ID NO: 539684 - protein, 16 aa, Homo sapiens
  CDR3 for beta chain variable domain of TCR clone 269842 (TRBV4-1, TRBJ1-2)
CASRQDAGQVLYGYTF

SEQ ID NO: 539685 - protein, 13 aa, Homo sapiens
  CDR3 for alpha chain variable domain of TCR clone 269843 (TRAV12-1, TRAJ6)
CVLFPGGSYIPTF

SEQ ID NO: 539686 - protein, 15 aa, Homo sapiens
  CDR3 for beta chain variable domain of TCR clone 269843 (TRBV6-5, TRBJ2-1)
CASSYDAGAGNEQFF

SEQ ID NO: 539687 - protein, 12 aa, Homo sapiens
  CDR3 for alpha chain variable domain of TCR clone 269844 (TRAV17, TRAJ4)
CATDGGYNKLIF

SEQ ID NO: 539688 - protein, 17 aa, Homo sapiens
  CDR3 for beta chain variable domain of TCR clone 269844 (TRBV13, TRBJ2-3)
CASSLSRVAEGRNTQYL

SEQ ID NO: 539689 - protein, 13 aa, Homo sapiens
  CDR3 for alpha chain variable domain of TCR clone 269845 (TRAV12-1, TRAJ16)
CVVNGPDGQKLRF

SEQ ID NO: 539690 - protein, 13 aa, Homo sapiens
  CDR3 for beta chain variable domain of TCR clone 269845 (TRBV2, TRBJ1-1)
CARNPTGGFHAFF

SEQ ID NO: 539691 - protein, 15 aa, Homo sapiens
  CDR3 for alpha chain variable domain of TCR clone 269846 (TRAV35, TRAJ58)
CAGRSQETSGSRLTF

SEQ ID NO: 539692 - protein, 16 aa, Homo sapiens
  CDR3 for beta chain variable domain of TCR clone 269846 (TRBV5-1, TRBJ1-1)
CASSSGGNSLNTEAFF

SEQ ID NO: 539693 - protein, 10 aa, Homo sapiens
  CDR3 for alpha chain variable domain of TCR clone 269847 (TRAV2, TRAJ34)
CAVVNDKLIF

SEQ ID NO: 539694 - protein, 20 aa, Homo sapiens
  CDR3 for beta chain variable domain of TCR clone 269847 (TRBV19, TRBJ2-1)
CASSISRTVTSTRLNNEHFF

SEQ ID NO: 539695 - protein, 15 aa, Homo sapiens
  CDR3 for alpha chain variable domain of TCR clone 269848 (TRAV8-4, TRAJ37)
CAVSRGSGNTGKLIF

SEQ ID NO: 539696 - protein, 15 aa, Homo sapiens
  CDR3 for beta chain variable domain of TCR clone 269848 (TRBV5-1, TRBJ2-7)
CASSLDLTSSYEQYL

SEQ ID NO: 539697 - protein, 14 aa, Homo sapiens
  CDR3 for alpha chain variable domain of TCR clone 269849 (TRAV12-2, TRAJ32)
CAHPESGAKNKLIF

SEQ ID NO: 539698 - protein, 14 aa, Homo sapiens
  CDR3 for beta chain variable domain of TCR clone 269849 (TRBV4-2, TRBJ2-3)
CASRETRAPGMQYF

SEQ ID NO: 539699 - protein, 11 aa, Homo sapiens
  CDR3 for alpha chain variable domain of TCR clone 269850 (TRAV12-1, TRAJ20)
CGEPGRLKLSF

SEQ ID NO: 539700 - protein, 12 aa, Homo sapiens
  CDR3 for beta chain variable domain of TCR clone 269850 (TRBV11-2, TRBJ2-2)
CASSLGGGELFF

SEQ ID NO: 539701 - protein, 11 aa, Homo sapiens
  CDR3 for alpha chain variable domain of TCR clone 269851 (TRAV4, TRAJ28)
CLVGDNRAETL

SEQ ID NO: 539702 - protein, 13 aa, Homo sapiens
  CDR3 for beta chain variable domain of TCR clone 269851 (TRBV20-1, TRBJ2-7)
CGATHTSGYEQYF

SEQ ID NO: 539703 - protein, 14 aa, Homo sapiens
  CDR3 for alpha chain variable domain of TCR clone 269852 (TRAV2, TRAJ37)
CAVDFTSNTGKLIF

SEQ ID NO: 539704 - protein, 13 aa, Homo sapiens
  CDR3 for beta chain variable domain of TCR clone 269852 (TRBV20-1, TRBJ1-1)
GSAPLGGGTEAFF

SEQ ID NO: 539705 - protein, 14 aa, Homo sapiens
  CDR3 for alpha chain variable domain of TCR clone 269853 (TRAV1-2, TRAJ8)
CAVREDTGFHKPVF

SEQ ID NO: 539706 - protein, 15 aa, Homo sapiens
  CDR3 for beta chain variable domain of TCR clone 269853 (TRBV20-1, TRBJ2-7)
CSARDRVSGMDEQYF

SEQ ID NO: 539707 - protein, 14 aa, Homo sapiens
  CDR3 for alpha chain variable domain of TCR clone 269854 (TRAV12-1, TRAJ9)
CVVTGYTGGFKTIF

SEQ ID NO: 539708 - protein, 13 aa, Homo sapiens
  CDR3 for beta chain variable domain of TCR clone 269854 (TRBV20-1, TRBJ1-1)
WSARAGGNTEAFF

SEQ ID NO: 539709 - protein, 12 aa, Homo sapiens
  CDR3 for alpha chain variable domain of TCR clone 269855 (TRAV12-3, TRAJ17)
CAMTFKGNKLTF

SEQ ID NO: 539710 - protein, 12 aa, Homo sapiens
  CDR3 for beta chain variable domain of TCR clone 269855 (TRBV2, TRBJ2-1)
CAYGPPGNEQFF

SEQ ID NO: 539711 - protein, 14 aa, Homo sapiens
  CDR3 for alpha chain variable domain of TCR clone 269856 (TRAV35, TRAJ22)
CAGLRLGCARQLTF

SEQ ID NO: 539712 - protein, 15 aa, Homo sapiens
  CDR3 for beta chain variable domain of TCR clone 269856 (TRBV12-4, TRBJ2-5)
CASSPPTGLQETQYF

SEQ ID NO: 539713 - protein, 13 aa, Homo sapiens
  CDR3 for alpha chain variable domain of TCR clone 269857 (TRAV8-6, TRAJ49)
SAVITNTGNQFYF

SEQ ID NO: 539714 - protein, 14 aa, Homo sapiens
  CDR3 for beta chain variable domain of TCR clone 269857 (TRBV5-1, TRBJ2-7)
CASSRGESLYEQYF

SEQ ID NO: 539715 - protein, 14 aa, Homo sapiens
  CDR3 for alpha chain variable domain of TCR clone 269858 (TRAV16, TRAJ57)
VALPTQGGSEKLVF

SEQ ID NO: 539716 - protein, 15 aa, Homo sapiens
  CDR3 for beta chain variable domain of TCR clone 269858 (TRBV28, TRBJ1-3)
CASWGGHLSGNTIYF

SEQ ID NO: 539717 - protein, 15 aa, Homo sapiens
  CDR3 for alpha chain variable domain of TCR clone 269859 (TRAV26-1, TRAJ56)
CIVRVATGANSKLKF

SEQ ID NO: 539718 - protein, 15 aa, Homo sapiens
  CDR3 for beta chain variable domain of TCR clone 269859 (TRBV27, TRBJ2-7)
CTSSPQREGQREQYF

SEQ ID NO: 539719 - protein, 19 aa, Homo sapiens
  CDR3 for alpha chain variable domain of TCR clone 269860 (TRAV3, TRAJ6)
CAVRDGPGQEEATYLPLEE

SEQ ID NO: 539720 - protein, 14 aa, Homo sapiens
  CDR3 for beta chain variable domain of TCR clone 269860 (TRBV7-2, TRBJ2-7)
CASSPKTSFYEQYF

SEQ ID NO: 539721 - protein, 16 aa, Homo sapiens
  CDR3 for alpha chain variable domain of TCR clone 269861 (TRAV12-3, TRAJ53)
CAMSTGSGGSNYKLKF

SEQ ID NO: 539722 - protein, 11 aa, Homo sapiens
  CDR3 for beta chain variable domain of TCR clone 269861 (TRBV29-1, TRBJ2-5)
CSEDRTGTQYF

SEQ ID NO: 539723 - protein, 14 aa, Homo sapiens
  CDR3 for alpha chain variable domain of TCR clone 269862 (TRAV12-3, TRAJ9)
CAMSPNTGGFKTIF

SEQ ID NO: 539724 - protein, 13 aa, Homo sapiens
  CDR3 for beta chain variable domain of TCR clone 269862 (TRBV6-5, TRBJ2-1)
CASSYELSNEQFF

SEQ ID NO: 539725 - protein, 14 aa, Homo sapiens
  CDR3 for alpha chain variable domain of TCR clone 269863 (TRAV13-1, TRAJ35)
CAASKGGSRNVLHC

SEQ ID NO: 539726 - protein, 13 aa, Homo sapiens
  CDR3 for beta chain variable domain of TCR clone 269863 (TRBV7-3, TRBJ1-1)
CASSQDWGAEAFF

SEQ ID NO: 539727 - protein, 15 aa, Homo sapiens
  CDR3 for alpha chain variable domain of TCR clone 269864 (TRAV1-2, TRAJ30)
CAVRPHGNRDDKIIF

SEQ ID NO: 539728 - protein, 13 aa, Homo sapiens
  CDR3 for beta chain variable domain of TCR clone 269864 (TRBV4-1, TRBJ2-7)
CASSQGQAYEQNF

SEQ ID NO: 539729 - protein, 14 aa, Homo sapiens
  CDR3 for alpha chain variable domain of TCR clone 269865 (TRAV1-2, TRAJ16)
CAVNRFSDGQKLLF

SEQ ID NO: 539730 - protein, 16 aa, Homo sapiens
  CDR3 for beta chain variable domain of TCR clone 269865 (TRBV12-4, TRBJ1-5)
CASSRPVGGYNQPQHF

SEQ ID NO: 539731 - protein, 12 aa, Homo sapiens
  CDR3 for alpha chain variable domain of TCR clone 269866 (TRAV3, TRAJ43)
CAVRDPYNDMRF

SEQ ID NO: 539732 - protein, 15 aa, Homo sapiens
  CDR3 for beta chain variable domain of TCR clone 269866 (TRBV27, TRBJ1-5)
CASSLGTGFDQPQHF

SEQ ID NO: 539733 - protein, 17 aa, Homo sapiens
  CDR3 for alpha chain variable domain of TCR clone 269867 (TRAV13-2, TRAJ28)
CAEGPAGSGAGSYQLTF

SEQ ID NO: 539734 - protein, 14 aa, Homo sapiens
  CDR3 for beta chain variable domain of TCR clone 269867 (TRBV6-1, TRBJ1-3)
CASVQGGGGNTIYF

SEQ ID NO: 539735 - protein, 13 aa, Homo sapiens
  CDR3 for alpha chain variable domain of TCR clone 269868 (TRAV21, TRAJ57)
CAVTQGGSEKLVF

SEQ ID NO: 539736 - protein, 13 aa, Homo sapiens
  CDR3 for beta chain variable domain of TCR clone 269868 (TRBV12-4, TRBJ2-7)
CASSPTETYEQYF

SEQ ID NO: 539737 - protein, 17 aa, Homo sapiens
  CDR3 for alpha chain variable domain of TCR clone 269869 (TRAV13-1, TRAJ28)
CAASPPYSGAGSYQLTF

SEQ ID NO: 539738 - protein, 15 aa, Homo sapiens
  CDR3 for beta chain variable domain of TCR clone 269869 (TRBV6-3, TRBJ2-2)
CASSFSATLTGELFF

SEQ ID NO: 539739 - protein, 12 aa, Homo sapiens
  CDR3 for alpha chain variable domain of TCR clone 269870 (TRAV12-1, TRAJ40)
CVVNGETYKYIF

SEQ ID NO: 539740 - protein, 16 aa, Homo sapiens
  CDR3 for beta chain variable domain of TCR clone 269870 (TRBV11-3, TRBJ2-5)
CASSSVVAGSTETQYF

SEQ ID NO: 539741 - protein, 14 aa, Homo sapiens
  CDR3 for alpha chain variable domain of TCR clone 269871 (TRAV8-4, TRAJ13)
CAVTLSGGYQKVTF

SEQ ID NO: 539742 - protein, 12 aa, Homo sapiens
  CDR3 for beta chain variable domain of TCR clone 269871 (TRBV11-2, TRBJ2-2)
CASSLPTGELFF

SEQ ID NO: 539743 - protein, 16 aa, Homo sapiens
  CDR3 for alpha chain variable domain of TCR clone 269872 (TRAV3, TRAJ10)
CAVRDMNAGGGNKLTI

SEQ ID NO: 539744 - protein, 16 aa, Homo sapiens
  CDR3 for beta chain variable domain of TCR clone 269872 (TRBV6-3, TRBJ1-2)
CASSYSRRASNYGYTF

SEQ ID NO: 539745 - protein, 16 aa, Homo sapiens
  CDR3 for alpha chain variable domain of TCR clone 269873 (TRAV12-3, TRAJ10)
CAMKKGITGGGNKRTF

SEQ ID NO: 539746 - protein, 12 aa, Homo sapiens
  CDR3 for beta chain variable domain of TCR clone 269873 (TRBV20-1, TRBJ2-7)
CSAITPTKEQYF

SEQ ID NO: 539747 - protein, 14 aa, Homo sapiens
  CDR3 for alpha chain variable domain of TCR clone 269874 (TRAV35, TRAJ50)
CAGYRKTSYDKVIF

SEQ ID NO: 539748 - protein, 13 aa, Homo sapiens
  CDR3 for beta chain variable domain of TCR clone 269874 (TRBV7-7, TRBJ2-3)
CASSLSREDTQYF

SEQ ID NO: 539749 - protein, 13 aa, Homo sapiens
  CDR3 for alpha chain variable domain of TCR clone 269875 (TRAV36/DV7, TRAJ29)
CAVEPSGNTPLVF

SEQ ID NO: 539750 - protein, 11 aa, Homo sapiens
  CDR3 for beta chain variable domain of TCR clone 269875 (TRBV19, TRBJ2-7)
CASGNSCEQYF

SEQ ID NO: 539751 - protein, 18 aa, Homo sapiens
  CDR3 for alpha chain variable domain of TCR clone 269876 (TRAV17, TRAJ45)
CATSLDLYSGGGADGLTF

SEQ ID NO: 539752 - protein, 15 aa, Homo sapiens
  CDR3 for beta chain variable domain of TCR clone 269876 (TRBV11-2, TRBJ2-1)
CASSKNPGLIHEQFF

SEQ ID NO: 539753 - protein, 10 aa, Homo sapiens
  CDR3 for alpha chain variable domain of TCR clone 269877 (TRAV1-2, TRAJ34)
CAVNTDKLIF

SEQ ID NO: 539754 - protein, 14 aa, Homo sapiens
  CDR3 for beta chain variable domain of TCR clone 269877 (TRBV12-4, TRBJ1-1)
CASSLGTGGTEAFF

SEQ ID NO: 539755 - protein, 13 aa, Homo sapiens
  CDR3 for alpha chain variable domain of TCR clone 269878 (TRAV3, TRAJ27)
CAVRPLGAGKSTF

SEQ ID NO: 539756 - protein, 12 aa, Homo sapiens
  CDR3 for beta chain variable domain of TCR clone 269878 (TRBV24-1, TRBJ2-3)
CATSDSTDTQYF

SEQ ID NO: 539757 - protein, 15 aa, Homo sapiens
  CDR3 for alpha chain variable domain of TCR clone 269879 (TRAV14/DV4, TRAJ12)
CAMRDERDSSYKLIF

SEQ ID NO: 539758 - protein, 16 aa, Homo sapiens
  CDR3 for beta chain variable domain of TCR clone 269879 (TRBV11-2, TRBJ1-2)
CASSLDRGGNNYGYTF

SEQ ID NO: 539759 - protein, 15 aa, Homo sapiens
  CDR3 for alpha chain variable domain of TCR clone 269880 (TRAV2, TRAJ9)
CAVEDRGTGGFKTIF

SEQ ID NO: 539760 - protein, 13 aa, Homo sapiens
  CDR3 for beta chain variable domain of TCR clone 269880 (TRBV7-3, TRBJ2-1)
CASSLDSYNEQFF

SEQ ID NO: 539761 - protein, 14 aa, Homo sapiens
  CDR3 for alpha chain variable domain of TCR clone 269881 (TRAV20, TRAJ4)
CAVRLGGGYNKLIF

SEQ ID NO: 539762 - protein, 21 aa, Homo sapiens
  CDR3 for beta chain variable domain of TCR clone 269881 (TRBV15, TRBJ2-1)
AWGTQPCTCGPPAEVDTARFF

SEQ ID NO: 539763 - protein, 12 aa, Homo sapiens
  CDR3 for alpha chain variable domain of TCR clone 269882 (TRAV12-1, TRAJ40)
CVVYSGTCKYIF

SEQ ID NO: 539764 - protein, 18 aa, Homo sapiens
  CDR3 for beta chain variable domain of TCR clone 269882 (TRBV11-2, TRBJ2-3)
CSSSLGGASRGAPNTQYF

SEQ ID NO: 539765 - protein, 12 aa, Homo sapiens
  CDR3 for alpha chain variable domain of TCR clone 269883 (TRAV12-2, TRAJ30)
CAVRNRDDKIIF

SEQ ID NO: 539766 - protein, 15 aa, Homo sapiens
  CDR3 for beta chain variable domain of TCR clone 269883 (TRBV9, TRBJ1-6)
CASSVAGTGDSPLHF

SEQ ID NO: 539767 - protein, 14 aa, Homo sapiens
  CDR3 for alpha chain variable domain of TCR clone 269884 (TRAV8-3, TRAJ4)
CAVGASGGYNKLIF

SEQ ID NO: 539768 - protein, 15 aa, Homo sapiens
  CDR3 for beta chain variable domain of TCR clone 269884 (TRBV5-1, TRBJ2-2)
CASSSQGGNTGELFF

SEQ ID NO: 539769 - protein, 12 aa, Homo sapiens
  CDR3 for alpha chain variable domain of TCR clone 269885 (TRAV12-3, TRAJ17)
CAMTLTGNKLTF

SEQ ID NO: 539770 - protein, 13 aa, Homo sapiens
  CDR3 for beta chain variable domain of TCR clone 269885 (TRBV4-1, TRBJ2-1)
CARSQAGGDEQFF

SEQ ID NO: 539771 - protein, 16 aa, Homo sapiens
  CDR3 for alpha chain variable domain of TCR clone 269886 (TRAV23/DV6, TRAJ9)
CAASIGGNTGGFTTIF

SEQ ID NO: 539772 - protein, 14 aa, Homo sapiens
  CDR3 for beta chain variable domain of TCR clone 269886 (TRBV6-1, TRBJ2-5)
CASSYAGGEETQYF

SEQ ID NO: 539773 - protein, 14 aa, Homo sapiens
  CDR3 for alpha chain variable domain of TCR clone 269887 (TRAV23/DV6, TRAJ22)
CADISSGSARQLTF

SEQ ID NO: 539774 - protein, 16 aa, Homo sapiens
  CDR3 for beta chain variable domain of TCR clone 269887 (TRBV5-7, TRBJ2-5)
CASIRGQTGNQETQYF

SEQ ID NO: 539775 - protein, 14 aa, Homo sapiens
  CDR3 for alpha chain variable domain of TCR clone 269888 (TRAV17, TRAJ54)
CATDANQGAQKLVF

SEQ ID NO: 539776 - protein, 13 aa, Homo sapiens
  CDR3 for beta chain variable domain of TCR clone 269888 (TRBV7-3, TRBJ2-5)
CASSFRGGETQYF

SEQ ID NO: 539777 - protein, 16 aa, Homo sapiens
  CDR3 for alpha chain variable domain of TCR clone 269889 (TRAV30, TRAJ24)
CGTEIVDADSWGNSSL

SEQ ID NO: 539778 - protein, 17 aa, Homo sapiens
  CDR3 for beta chain variable domain of TCR clone 269889 (TRBV20-1, TRBJ2-2)
CSASGSGQGGLTGELFF

SEQ ID NO: 539779 - protein, 16 aa, Homo sapiens
  CDR3 for alpha chain variable domain of TCR clone 269890 (TRAV3, TRAJ37)
CAVRVRGSGNTGKLII

SEQ ID NO: 539780 - protein, 13 aa, Homo sapiens
  CDR3 for beta chain variable domain of TCR clone 269890 (TRBV14, TRBJ2-1)
CASSQDRRNEQFF

SEQ ID NO: 539781 - protein, 13 aa, Homo sapiens
  CDR3 for alpha chain variable domain of TCR clone 269891 (TRAV13-1, TRAJ43)
CAASLSNNNDMRF

SEQ ID NO: 539782 - protein, 14 aa, Homo sapiens
  CDR3 for beta chain variable domain of TCR clone 269891 (TRBV5-4, TRBJ1-1)
CASSLDSRRDEAFF

SEQ ID NO: 539783 - protein, 12 aa, Homo sapiens
  CDR3 for alpha chain variable domain of TCR clone 269892 (TRAV12-3, TRAJ29)
CAAREGNTPLVF

SEQ ID NO: 539784 - protein, 17 aa, Homo sapiens
  CDR3 for beta chain variable domain of TCR clone 269892 (TRBV18, TRBJ2-1)
CACSPLAAGAGDNEQFF

SEQ ID NO: 539785 - protein, 13 aa, Homo sapiens
  CDR3 for alpha chain variable domain of TCR clone 269893 (TRAV12-2, TRAJ36)
CREPPTGANNLFF

SEQ ID NO: 539786 - protein, 13 aa, Homo sapiens
  CDR3 for beta chain variable domain of TCR clone 269893 (TRBV20-1, TRBJ1-6)
CSAPTGLGSPLHF

SEQ ID NO: 539787 - protein, 15 aa, Homo sapiens
  CDR3 for alpha chain variable domain of TCR clone 269894 (TRAV3, TRAJ47)
CTVRDIGEYGNKLVL

SEQ ID NO: 539788 - protein, 14 aa, Homo sapiens
  CDR3 for beta chain variable domain of TCR clone 269894 (TRBV13, TRBJ2-5)
CASSLERVGETQYF

SEQ ID NO: 539789 - protein, 16 aa, Homo sapiens
  CDR3 for alpha chain variable domain of TCR clone 269895 (TRAV30, TRAJ24)
CVTEIVGADSWGKFQF

SEQ ID NO: 539790 - protein, 15 aa, Homo sapiens
  CDR3 for beta chain variable domain of TCR clone 269895 (TRBV7-9, TRBJ1-4)
CASSARTGGNEKLFF

SEQ ID NO: 539791 - protein, 17 aa, Homo sapiens
  CDR3 for alpha chain variable domain of TCR clone 269896 (TRAV3, TRAJ42)
CAARDRDYGGSQGNLIF

SEQ ID NO: 539792 - protein, 14 aa, Homo sapiens
  CDR3 for beta chain variable domain of TCR clone 269896 (TRBV7-2, TRBJ2-5)
CASSPRGSSETQYF

SEQ ID NO: 539793 - protein, 14 aa, Homo sapiens
  CDR3 for alpha chain variable domain of TCR clone 269897 (TRAV36/DV7, TRAJ16)
CAVEADSDGHKLLF

SEQ ID NO: 539794 - protein, 15 aa, Homo sapiens
  CDR3 for beta chain variable domain of TCR clone 269897 (TRBV5-4, TRBJ2-3)
CATKSSGGALDTQYF

SEQ ID NO: 539795 - protein, 14 aa, Homo sapiens
  CDR3 for alpha chain variable domain of TCR clone 269898 (TRAV12-2, TRAJ40)
CAVKIPSGTYKYIF

SEQ ID NO: 539796 - protein, 14 aa, Homo sapiens
  CDR3 for beta chain variable domain of TCR clone 269898 (TRBV5-5, TRBJ2-7)
CASSLGQGTYEQYF

SEQ ID NO: 539797 - protein, 13 aa, Homo sapiens
  CDR3 for alpha chain variable domain of TCR clone 269899 (TRAV12-3, TRAJ33)
CAMSVNSNYQLIW

SEQ ID NO: 539798 - protein, 16 aa, Homo sapiens
  CDR3 for beta chain variable domain of TCR clone 269899 (TRBV6-1, TRBJ1-1)
CASRDSGRGMNTEAFF

SEQ ID NO: 539799 - protein, 12 aa, Homo sapiens
  CDR3 for alpha chain variable domain of TCR clone 269900 (TRAV12-3, TRAJ17)
CAMTLTGNKLTF

SEQ ID NO: 539800 - protein, 15 aa, Homo sapiens
  CDR3 for beta chain variable domain of TCR clone 269900 (TRBV6-3, TRBJ2-7)
CASSPPGTVFYEQYF

SEQ ID NO: 539801 - protein, 12 aa, Homo sapiens
  CDR3 for alpha chain variable domain of TCR clone 269901 (TRAV12-3, TRAJ17)
CGMTLTGNKLTF

SEQ ID NO: 539802 - protein, 13 aa, Homo sapiens
  CDR3 for beta chain variable domain of TCR clone 269901 (TRBV7-9, TRBJ1-2)
CASSLKQNYGYTF

SEQ ID NO: 539803 - protein, 17 aa, Homo sapiens
  CDR3 for alpha chain variable domain of TCR clone 269902 (TRAV3, TRAJ6)
CAVRDGPRAGGSYIPTF

SEQ ID NO: 539804 - protein, 14 aa, Homo sapiens
  CDR3 for beta chain variable domain of TCR clone 269902 (TRBV12-5, TRBJ2-5)
CASGSRTHQETQYF

SEQ ID NO: 539805 - protein, 11 aa, Homo sapiens
  CDR3 for alpha chain variable domain of TCR clone 269903 (TRAV12-1, TRAJ21)
CVVNNFNKFYF

SEQ ID NO: 539806 - protein, 16 aa, Homo sapiens
  CDR3 for beta chain variable domain of TCR clone 269903 (TRBV2, TRBJ2-3)
CASSTSVEGVTDTQYF

SEQ ID NO: 539807 - protein, 17 aa, Homo sapiens
  CDR3 for alpha chain variable domain of TCR clone 269904 (TRAV3, TRAJ42)
CAVRDREYGGSQGNLIF

SEQ ID NO: 539808 - protein, 11 aa, Homo sapiens
  CDR3 for beta chain variable domain of TCR clone 269904 (TRBV12-4, TRBJ2-3)
CASTATDTQYF

SEQ ID NO: 539809 - protein, 14 aa, Homo sapiens
  CDR3 for alpha chain variable domain of TCR clone 269905 (TRAV13-1, TRAJ44)
CAAKATGTASKLTF

SEQ ID NO: 539810 - protein, 17 aa, Homo sapiens
  CDR3 for beta chain variable domain of TCR clone 269905 (TRBV7-3, TRBJ2-3)
CASSLMTRMRGADTQYF

SEQ ID NO: 539811 - protein, 13 aa, Homo sapiens
  CDR3 for alpha chain variable domain of TCR clone 269906 (TRAV12-3, TRAJ7)
WAMTPYGNNRLAF

SEQ ID NO: 539812 - protein, 16 aa, Homo sapiens
  CDR3 for beta chain variable domain of TCR clone 269906 (TRBV20-1, TRBJ1-4)
CSARPYGGELNEKLFF

SEQ ID NO: 539813 - protein, 13 aa, Homo sapiens
  CDR3 for alpha chain variable domain of TCR clone 269907 (TRAV12-1, TRAJ13)
CVVTSGGYQKVTF

SEQ ID NO: 539814 - protein, 13 aa, Homo sapiens
  CDR3 for beta chain variable domain of TCR clone 269907 (TRBV27, TRBJ2-1)
CQQCYGGYNEQFF

SEQ ID NO: 539815 - protein, 16 aa, Homo sapiens
  CDR3 for alpha chain variable domain of TCR clone 269908 (TRAV30, TRAJ24)
CGTEIVDADSWGKFQC

SEQ ID NO: 539816 - protein, 14 aa, Homo sapiens
  CDR3 for beta chain variable domain of TCR clone 269908 (TRBV20-1, TRBJ1-1)
CSAQTRIGGTEAFF

SEQ ID NO: 539817 - protein, 14 aa, Homo sapiens
  CDR3 for alpha chain variable domain of TCR clone 269909 (TRAV3, TRAJ21)
RALGRGSTNFTLDL

SEQ ID NO: 539818 - protein, 14 aa, Homo sapiens
  CDR3 for beta chain variable domain of TCR clone 269909 (TRBV7-9, TRBJ2-4)
CASSLAMGGNIQYF

SEQ ID NO: 539819 - protein, 15 aa, Homo sapiens
  CDR3 for alpha chain variable domain of TCR clone 269910 (TRAV21, TRAJ53)
CATLNSGGSNYKLTF

SEQ ID NO: 539820 - protein, 17 aa, Homo sapiens
  CDR3 for beta chain variable domain of TCR clone 269910 (TRBV3-1, TRBJ2-7)
CASSQDLTGLSSYEQYF

SEQ ID NO: 539821 - protein, 14 aa, Homo sapiens
  CDR3 for alpha chain variable domain of TCR clone 269911 (TRAV16, TRAJ33)
CALSAMESNYQLIW

SEQ ID NO: 539822 - protein, 12 aa, Homo sapiens
  CDR3 for beta chain variable domain of TCR clone 269911 (TRBV28, TRBJ2-6)
CAIQAGANVLTF

SEQ ID NO: 539823 - protein, 15 aa, Homo sapiens
  CDR3 for alpha chain variable domain of TCR clone 269912 (TRAV13-1, TRAJ10)
CAATILTGGGNKRTF

SEQ ID NO: 539824 - protein, 15 aa, Homo sapiens
  CDR3 for beta chain variable domain of TCR clone 269912 (TRBV2, TRBJ2-7)
CASTLLGSGATEQYF

SEQ ID NO: 539825 - protein, 15 aa, Homo sapiens
  CDR3 for alpha chain variable domain of TCR clone 269913 (TRAV12-1, TRAJ9)
CVLSFGDTGGFKTIF

SEQ ID NO: 539826 - protein, 12 aa, Homo sapiens
  CDR3 for beta chain variable domain of TCR clone 269913 (TRBV12-4, TRBJ2-7)
CASSLGGYEQYF

SEQ ID NO: 539827 - protein, 10 aa, Homo sapiens
  CDR3 for alpha chain variable domain of TCR clone 269914 (TRAV12-3, TRAJ49)
YAMNDDQFYF

SEQ ID NO: 539828 - protein, 13 aa, Homo sapiens
  CDR3 for beta chain variable domain of TCR clone 269914 (TRBV12-4, TRBJ1-1)
CASSPETGFEAFF

SEQ ID NO: 539829 - protein, 12 aa, Homo sapiens
  CDR3 for alpha chain variable domain of TCR clone 269915 (TRAV12-2, TRAJ43)
CAALPVTDDMRF

SEQ ID NO: 539830 - protein, 14 aa, Homo sapiens
  CDR3 for beta chain variable domain of TCR clone 269915 (TRBV12-5, TRBJ2-5)
CASGSRTHQETQYF

SEQ ID NO: 539831 - protein, 15 aa, Homo sapiens
  CDR3 for alpha chain variable domain of TCR clone 269916 (TRAV20, TRAJ6)
CAVRLQSGGIYIPTF

SEQ ID NO: 539832 - protein, 14 aa, Homo sapiens
  CDR3 for beta chain variable domain of TCR clone 269916 (TRBV12-4, TRBJ2-7)
CASSASGGWYEQYF

SEQ ID NO: 539833 - protein, 12 aa, Homo sapiens
  CDR3 for alpha chain variable domain of TCR clone 269917 (TRAV12-2, TRAJ44)
CADTGTSSKLTF

SEQ ID NO: 539834 - protein, 17 aa, Homo sapiens
  CDR3 for beta chain variable domain of TCR clone 269917 (TRBV20-1, TRBJ1-1)
CSARGTGGSYGNTGAFF

SEQ ID NO: 539835 - protein, 13 aa, Homo sapiens
  CDR3 for alpha chain variable domain of TCR clone 269918 (TRAV21, TRAJ47)
CDVSGLYGNKLVF

SEQ ID NO: 539836 - protein, 17 aa, Homo sapiens
  CDR3 for beta chain variable domain of TCR clone 269918 (TRBV15, TRBJ2-3)
CATSGTTSEEGTDTQYF

SEQ ID NO: 539837 - protein, 14 aa, Homo sapiens
  CDR3 for alpha chain variable domain of TCR clone 269919 (TRAV36/DV7, TRAJ33)
CAVLPRDSNYQLIC

SEQ ID NO: 539838 - protein, 13 aa, Homo sapiens
  CDR3 for beta chain variable domain of TCR clone 269919 (TRBV5-5, TRBJ1-2)
CASSFWRGEDYAF

SEQ ID NO: 539839 - protein, 14 aa, Homo sapiens
  CDR3 for alpha chain variable domain of TCR clone 269920 (TRAV29/DV5, TRAJ47)
CAASEPEYGNKLVF

SEQ ID NO: 539840 - protein, 17 aa, Homo sapiens
  CDR3 for beta chain variable domain of TCR clone 269920 (TRBV11-2, TRBJ2-1)
CTSSLYPPGVEYNEQFF

SEQ ID NO: 539841 - protein, 16 aa, Homo sapiens
  CDR3 for alpha chain variable domain of TCR clone 269921 (TRAV3, TRAJ21)
CAVRVSERGNFNKFYF

SEQ ID NO: 539842 - protein, 13 aa, Homo sapiens
  CDR3 for beta chain variable domain of TCR clone 269921 (TRBV27, TRBJ2-7)
CASSLTTGYEQYF

SEQ ID NO: 539843 - protein, 12 aa, Homo sapiens
  CDR3 for alpha chain variable domain of TCR clone 269922 (TRAV12-3, TRAJ17)
CAMTLTGNKLTF

SEQ ID NO: 539844 - protein, 14 aa, Homo sapiens
  CDR3 for beta chain variable domain of TCR clone 269922 (TRBV7-3, TRBJ2-1)
CASSLAGGTNELFF

SEQ ID NO: 539845 - protein, 14 aa, Homo sapiens
  CDR3 for alpha chain variable domain of TCR clone 269923 (TRAV13-2, TRAJ17)
CAENSKAAGNKLTF

SEQ ID NO: 539846 - protein, 15 aa, Homo sapiens
  CDR3 for beta chain variable domain of TCR clone 269923 (TRBV7-2, TRBJ2-3)
CASSLASARTDTQYF

SEQ ID NO: 539847 - protein, 12 aa, Homo sapiens
  CDR3 for alpha chain variable domain of TCR clone 269924 (TRAV12-2, TRAJ4)
GWPEGGYNKLIF

SEQ ID NO: 539848 - protein, 16 aa, Homo sapiens
  CDR3 for beta chain variable domain of TCR clone 269924 (TRBV6-1, TRBJ2-5)
CASSETLDMGAETQYF

SEQ ID NO: 539849 - protein, 14 aa, Homo sapiens
  CDR3 for alpha chain variable domain of TCR clone 269925 (TRAV13-1, TRAJ44)
CAAKVTGTASKLAF

SEQ ID NO: 539850 - protein, 17 aa, Homo sapiens
  CDR3 for beta chain variable domain of TCR clone 269925 (TRBV7-3, TRBJ2-3)
CASSLMKRMRGADTQYF

SEQ ID NO: 539851 - protein, 14 aa, Homo sapiens
  CDR3 for alpha chain variable domain of TCR clone 269926 (TRAV21, TRAJ45)
CAVSSGGGADGLTF

SEQ ID NO: 539852 - protein, 14 aa, Homo sapiens
  CDR3 for beta chain variable domain of TCR clone 269926 (TRBV11-2, TRBJ2-7)
CASSLGAGAYEQYF

SEQ ID NO: 539853 - protein, 13 aa, Homo sapiens
  CDR3 for alpha chain variable domain of TCR clone 269927 (TRAV22, TRAJ26)
CAVEHNYGQNFVF

SEQ ID NO: 539854 - protein, 16 aa, Homo sapiens
  CDR3 for beta chain variable domain of TCR clone 269927 (TRBV7-2, TRBJ2-6)
CASSVRRASGANVLTF

SEQ ID NO: 539855 - protein, 15 aa, Homo sapiens
  CDR3 for alpha chain variable domain of TCR clone 269928 (TRAV3, TRAJ9)
CAVRARNTGGFKTIF

SEQ ID NO: 539856 - protein, 13 aa, Homo sapiens
  CDR3 for beta chain variable domain of TCR clone 269928 (TRBV11-2, TRBJ2-5)
CASSFSSQETQYF

SEQ ID NO: 539857 - protein, 11 aa, Homo sapiens
  CDR3 for alpha chain variable domain of TCR clone 269929 (TRAV2, TRAJ13)
CASGGYQKVNF

SEQ ID NO: 539858 - protein, 15 aa, Homo sapiens
  CDR3 for beta chain variable domain of TCR clone 269929 (TRBV5-1, TRBJ2-1)
CASSPPRAPYNEQFF

SEQ ID NO: 539859 - protein, 13 aa, Homo sapiens
  CDR3 for alpha chain variable domain of TCR clone 269930 (TRAV12-2, TRAJ43)
CAVSGDNNNDMRF

SEQ ID NO: 539860 - protein, 15 aa, Homo sapiens
  CDR3 for beta chain variable domain of TCR clone 269930 (TRBV11-3, TRBJ2-3)
CASLKDGREGDTQYF

SEQ ID NO: 539861 - protein, 12 aa, Homo sapiens
  CDR3 for alpha chain variable domain of TCR clone 269931 (TRAV12-3, TRAJ17)
CAMTLTGNKLTF

SEQ ID NO: 539862 - protein, 15 aa, Homo sapiens
  CDR3 for beta chain variable domain of TCR clone 269931 (TRBV20-1, TRBJ1-4)
CSARFITGEDEKLFF

SEQ ID NO: 539863 - protein, 18 aa, Homo sapiens
  CDR3 for alpha chain variable domain of TCR clone 269932 (TRAV21, TRAJ52)
CAVRPSPAGGTSYGKLTF

SEQ ID NO: 539864 - protein, 16 aa, Homo sapiens
  CDR3 for beta chain variable domain of TCR clone 269932 (TRBV11-2, TRBJ2-1)
CASSPRLAGVYNEQFF

SEQ ID NO: 539865 - protein, 11 aa, Homo sapiens
  CDR3 for alpha chain variable domain of TCR clone 269933 (TRAV2, TRAJ13)
CASGGYKKVTF

SEQ ID NO: 539866 - protein, 15 aa, Homo sapiens
  CDR3 for beta chain variable domain of TCR clone 269933 (TRBV29-1, TRBJ2-1)
CSGRDRKSSYNEQFF

SEQ ID NO: 539867 - protein, 18 aa, Homo sapiens
  CDR3 for alpha chain variable domain of TCR clone 269934 (TRAV21, TRAJ52)
CAVRPSPAGGTSYGKLTF

SEQ ID NO: 539868 - protein, 16 aa, Homo sapiens
  CDR3 for beta chain variable domain of TCR clone 269934 (TRBV2, TRBJ1-1)
CASSPPNRGMNTEAFF

SEQ ID NO: 539869 - protein, 14 aa, Homo sapiens
  CDR3 for alpha chain variable domain of TCR clone 269935 (TRAV12-2, TRAJ11)
CAVNMNSGYSTLTF

SEQ ID NO: 539870 - protein, 14 aa, Homo sapiens
  CDR3 for beta chain variable domain of TCR clone 269935 (TRBV20-1, TRBJ1-1)
CSAQTRIGGTEAFF

SEQ ID NO: 539871 - protein, 14 aa, Homo sapiens
  CDR3 for alpha chain variable domain of TCR clone 269936 (TRAV12-2, TRAJ13)
CTVKKTGGYQKVTF

SEQ ID NO: 539872 - protein, 16 aa, Homo sapiens
  CDR3 for beta chain variable domain of TCR clone 269936 (TRBV20-1, TRBJ1-4)
CSAPGQGLLTNEKLFF

SEQ ID NO: 539873 - protein, 15 aa, Homo sapiens
  CDR3 for alpha chain variable domain of TCR clone 269937 (TRAV27, TRAJ38)
CAARRNAGNNRKLIW

SEQ ID NO: 539874 - protein, 15 aa, Homo sapiens
  CDR3 for beta chain variable domain of TCR clone 269937 (TRBV11-2, TRBJ2-2)
CASSLDTGNTGELFF

SEQ ID NO: 539875 - protein, 14 aa, Homo sapiens
  CDR3 for alpha chain variable domain of TCR clone 269938 (TRAV13-1, TRAJ20)
CAARPGSNDYKLSF

SEQ ID NO: 539876 - protein, 16 aa, Homo sapiens
  CDR3 for beta chain variable domain of TCR clone 269938 (TRBV18, TRBJ1-1)
CASSPGVGGRGGEAFF

SEQ ID NO: 539877 - protein, 11 aa, Homo sapiens
  CDR3 for alpha chain variable domain of TCR clone 269939 (TRAV2, TRAJ21)
CAVFNFNKFYF

SEQ ID NO: 539878 - protein, 14 aa, Homo sapiens
  CDR3 for beta chain variable domain of TCR clone 269939 (TRBV15, TRBJ2-3)
CATRSGTSTDTEYF

SEQ ID NO: 539879 - protein, 14 aa, Homo sapiens
  CDR3 for alpha chain variable domain of TCR clone 269940 (TRAV2, TRAJ12)
CAVDAMDSSYKLIF

SEQ ID NO: 539880 - protein, 13 aa, Homo sapiens
  CDR3 for beta chain variable domain of TCR clone 269940 (TRBV7-9, TRBJ1-2)
CASSLKQNYGYTF

SEQ ID NO: 539881 - protein, 13 aa, Homo sapiens
  CDR3 for alpha chain variable domain of TCR clone 269941 (TRAV2, TRAJ40)
CAVVTSGTYKYIF

SEQ ID NO: 539882 - protein, 14 aa, Homo sapiens
  CDR3 for beta chain variable domain of TCR clone 269941 (TRBV19, TRBJ2-1)
CARPTFGLSGEQFF

SEQ ID NO: 539883 - protein, 19 aa, Homo sapiens
  CDR3 for alpha chain variable domain of TCR clone 269942 (TRAV2, TRAJ20)
ILQVREADAAVYRDCKLSF

SEQ ID NO: 539884 - protein, 12 aa, Homo sapiens
  CDR3 for beta chain variable domain of TCR clone 269942 (TRBV11-2, TRBJ2-2)
CASSLGGRELFF

SEQ ID NO: 539885 - protein, 16 aa, Homo sapiens
  CDR3 for alpha chain variable domain of TCR clone 269943 (TRAV2, TRAJ4)
CAVEDRFSGGYNKLIF

SEQ ID NO: 539886 - protein, 15 aa, Homo sapiens
  CDR3 for beta chain variable domain of TCR clone 269943 (TRBV7-7, TRBJ2-1)
CASSPTGGGEVEQFF

SEQ ID NO: 539887 - protein, 14 aa, Homo sapiens
  CDR3 for alpha chain variable domain of TCR clone 269944 (TRAV20, TRAJ10)
CAVRVEGGGNKLTF

SEQ ID NO: 539888 - protein, 18 aa, Homo sapiens
  CDR3 for beta chain variable domain of TCR clone 269944 (TRBV24-1, TRBJ2-1)
CATSDLMFLGMGVHEQFF

SEQ ID NO: 539889 - protein, 12 aa, Homo sapiens
  CDR3 for alpha chain variable domain of TCR clone 269945 (TRAV17, TRAJ57)
CATDGGSEKLVF

SEQ ID NO: 539890 - protein, 12 aa, Homo sapiens
  CDR3 for beta chain variable domain of TCR clone 269945 (TRBV29-1, TRBJ2-2)
CSVDKYTWELFF

SEQ ID NO: 539891 - protein, 12 aa, Homo sapiens
  CDR3 for alpha chain variable domain of TCR clone 269946 (TRAV24, TRAJ40)
CAFMPGTYKYIF

SEQ ID NO: 539892 - protein, 11 aa, Homo sapiens
  CDR3 for beta chain variable domain of TCR clone 269946 (TRBV10-1, TRBJ2-3)
CASSDSDTHYF

SEQ ID NO: 539893 - protein, 13 aa, Homo sapiens
  CDR3 for alpha chain variable domain of TCR clone 269947 (TRAV36/DV7, TRAJ34)
CAVGEVNTDKLIF

SEQ ID NO: 539894 - protein, 15 aa, Homo sapiens
  CDR3 for beta chain variable domain of TCR clone 269947 (TRBV20-1, TRBJ2-7)
CSARDRVSGMDEQYF

SEQ ID NO: 539895 - protein, 10 aa, Homo sapiens
  CDR3 for alpha chain variable domain of TCR clone 269948 (TRAV12-1, TRAJ37)
ARGNTGKLIF

SEQ ID NO: 539896 - protein, 15 aa, Homo sapiens
  CDR3 for beta chain variable domain of TCR clone 269948 (TRBV7-2, TRBJ2-3)
CASSLDQGGTDTQYF

SEQ ID NO: 539897 - protein, 13 aa, Homo sapiens
  CDR3 for alpha chain variable domain of TCR clone 269949 (TRAV2, TRAJ24)
CAVTTDSWGKLQF

SEQ ID NO: 539898 - protein, 14 aa, Homo sapiens
  CDR3 for beta chain variable domain of TCR clone 269949 (TRBV13, TRBJ2-5)
CASSVGRGKETQYF

SEQ ID NO: 539899 - protein, 15 aa, Homo sapiens
  CDR3 for alpha chain variable domain of TCR clone 269950 (TRAV26-2, TRAJ28)
CILVESGAGSYQLTF

SEQ ID NO: 539900 - protein, 11 aa, Homo sapiens
  CDR3 for beta chain variable domain of TCR clone 269950 (TRBV25-1, TRBJ2-7)
WASSTSYEQYF

SEQ ID NO: 539901 - protein, 17 aa, Homo sapiens
  CDR3 for alpha chain variable domain of TCR clone 269951 (TRAV4, TRAJ13)
CLVGVQGSSGGYQEVTF

SEQ ID NO: 539902 - protein, 18 aa, Homo sapiens
  CDR3 for beta chain variable domain of TCR clone 269951 (TRBV15, TRBJ2-3)
CATSRDGARSGDTDTQYF

SEQ ID NO: 539903 - protein, 11 aa, Homo sapiens
  CDR3 for alpha chain variable domain of TCR clone 269952 (TRAV23/DV6, TRAJ48)
CAPRWGEKLTF

SEQ ID NO: 539904 - protein, 22 aa, Homo sapiens
  CDR3 for beta chain variable domain of TCR clone 269952 (TRBV11-2, TRBJ1-4)
CASSLDITRRGIPRKDNEKLFF

SEQ ID NO: 539905 - protein, 13 aa, Homo sapiens
  CDR3 for alpha chain variable domain of TCR clone 269953 (TRAV38-2/DV8, TRAJ34)
CAYRTWNTDRLIF

SEQ ID NO: 539906 - protein, 18 aa, Homo sapiens
  CDR3 for beta chain variable domain of TCR clone 269953 (TRBV6-6, TRBJ1-3)
CASSYSKWDSISGNTIYF

SEQ ID NO: 539907 - protein, 14 aa, Homo sapiens
  CDR3 for alpha chain variable domain of TCR clone 269954 (TRAV2, TRAJ9)
CAVEDRSGGFKTIF

SEQ ID NO: 539908 - protein, 20 aa, Homo sapiens
  CDR3 for beta chain variable domain of TCR clone 269954 (TRBV28, TRBJ2-1)
RASTPIGRSPGLAGGNEQFF

SEQ ID NO: 539909 - protein, 16 aa, Homo sapiens
  CDR3 for alpha chain variable domain of TCR clone 269955 (TRAV16, TRAJ42)
CALSGYYGGSQGNLIF

SEQ ID NO: 539910 - protein, 15 aa, Homo sapiens
  CDR3 for beta chain variable domain of TCR clone 269955 (TRBV7-9, TRBJ1-6)
CASSSPGRGNSPLHF

SEQ ID NO: 539911 - protein, 14 aa, Homo sapiens
  CDR3 for alpha chain variable domain of TCR clone 269956 (TRAV8-4, TRAJ5)
CAVSTDTGRRALTF

SEQ ID NO: 539912 - protein, 11 aa, Homo sapiens
  CDR3 for beta chain variable domain of TCR clone 269956 (TRBV6-3, TRBJ2-3)
CATGQADTQYF

SEQ ID NO: 539913 - protein, 13 aa, Homo sapiens
  CDR3 for alpha chain variable domain of TCR clone 269957 (TRAV21, TRAJ27)
CAARPGNAGKSTF

SEQ ID NO: 539914 - protein, 14 aa, Homo sapiens
  CDR3 for beta chain variable domain of TCR clone 269957 (TRBV19, TRBJ1-1)
CASSKVTGVTEAFF

SEQ ID NO: 539915 - protein, 16 aa, Homo sapiens
  CDR3 for alpha chain variable domain of TCR clone 269958 (TRAV30, TRAJ24)
CRTEIVDADSWGKFQF

SEQ ID NO: 539916 - protein, 16 aa, Homo sapiens
  CDR3 for beta chain variable domain of TCR clone 269958 (TRBV28, TRBJ2-7)
CASSLFFETGGPEQYF

SEQ ID NO: 539917 - protein, 15 aa, Homo sapiens
  CDR3 for alpha chain variable domain of TCR clone 269959 (TRAV17, TRAJ4)
CATGTWSGGYNKLIF

SEQ ID NO: 539918 - protein, 15 aa, Homo sapiens
  CDR3 for beta chain variable domain of TCR clone 269959 (TRBV11-2, TRBJ2-2)
CASSSDRVNAGELFF

SEQ ID NO: 539919 - protein, 13 aa, Homo sapiens
  CDR3 for alpha chain variable domain of TCR clone 269960 (TRAV21, TRAJ27)
CAARPGNAGKSTF

SEQ ID NO: 539920 - protein, 16 aa, Homo sapiens
  CDR3 for beta chain variable domain of TCR clone 269960 (TRBV20-1, TRBJ1-4)
CSAPGQGVLTNEKLFF

SEQ ID NO: 539921 - protein, 18 aa, Homo sapiens
  CDR3 for alpha chain variable domain of TCR clone 269961 (TRAV13-1, TRAJ45)
CAASIGVYSGGGADGLTF

SEQ ID NO: 539922 - protein, 15 aa, Homo sapiens
  CDR3 for beta chain variable domain of TCR clone 269961 (TRBV24-1, TRBJ1-1)
CATSDRRGVNTEAFF

SEQ ID NO: 539923 - protein, 15 aa, Homo sapiens
  CDR3 for alpha chain variable domain of TCR clone 269962 (TRAV12-1, TRAJ42)
CVVTRDGGSQGNLIF

SEQ ID NO: 539924 - protein, 14 aa, Homo sapiens
  CDR3 for beta chain variable domain of TCR clone 269962 (TRBV11-2, TRBJ2-3)
CASSLGGGVNTQYF

SEQ ID NO: 539925 - protein, 12 aa, Homo sapiens
  CDR3 for alpha chain variable domain of TCR clone 269963 (TRAV1-2, TRAJ29)
CAVPSGNTPLVV

SEQ ID NO: 539926 - protein, 12 aa, Homo sapiens
  CDR3 for beta chain variable domain of TCR clone 269963 (TRBV7-9, TRBJ2-7)
CASSFGSYEQYF

SEQ ID NO: 539927 - protein, 13 aa, Homo sapiens
  CDR3 for alpha chain variable domain of TCR clone 269964 (TRAV3, TRAJ27)
CAVRPLGAGKSTF

SEQ ID NO: 539928 - protein, 15 aa, Homo sapiens
  CDR3 for beta chain variable domain of TCR clone 269964 (TRBV19, TRBJ1-5)
CASSIVWADNQPQHF

SEQ ID NO: 539929 - protein, 17 aa, Homo sapiens
  CDR3 for alpha chain variable domain of TCR clone 269965 (TRAV29/DV5, TRAJ45)
CAADGHFSGGGADGLTF

SEQ ID NO: 539930 - protein, 15 aa, Homo sapiens
  CDR3 for beta chain variable domain of TCR clone 269965 (TRBV5-1, TRBJ2-1)
CASSPPRAPYNEQFF

SEQ ID NO: 539931 - protein, 17 aa, Homo sapiens
  CDR3 for alpha chain variable domain of TCR clone 269966 (TRAV27, TRAJ42)
CAERVIYYGGSQGNHIF

SEQ ID NO: 539932 - protein, 14 aa, Homo sapiens
  CDR3 for beta chain variable domain of TCR clone 269966 (TRBV6-6, TRBJ2-3)
CASRLQREADTQYF

SEQ ID NO: 539933 - protein, 16 aa, Homo sapiens
  CDR3 for alpha chain variable domain of TCR clone 269967 (TRAV3, TRAJ37)
CAVRPHGSGNTGTLIF

SEQ ID NO: 539934 - protein, 14 aa, Homo sapiens
  CDR3 for beta chain variable domain of TCR clone 269967 (TRBV20-1, TRBJ2-1)
CSARGGSSYNEQFF

SEQ ID NO: 539935 - protein, 14 aa, Homo sapiens
  CDR3 for alpha chain variable domain of TCR clone 269968 (TRAV13-1, TRAJ44)
CAAKATGTASKLTF

SEQ ID NO: 539936 - protein, 16 aa, Homo sapiens
  CDR3 for beta chain variable domain of TCR clone 269968 (TRBV6-1, TRBJ2-1)
CASILRQGSSYNEQFF

SEQ ID NO: 539937 - protein, 12 aa, Homo sapiens
  CDR3 for alpha chain variable domain of TCR clone 269969 (TRAV24, TRAJ26)
CALDNYGQNFVF

SEQ ID NO: 539938 - protein, 15 aa, Homo sapiens
  CDR3 for beta chain variable domain of TCR clone 269969 (TRBV20-1, TRBJ2-7)
CSARDRVSGMDEQYF

SEQ ID NO: 539939 - protein, 16 aa, Homo sapiens
  CDR3 for alpha chain variable domain of TCR clone 269970 (TRAV8-3, TRAJ53)
CAVGGWTGGSNYKLTF

SEQ ID NO: 539940 - protein, 15 aa, Homo sapiens
  CDR3 for beta chain variable domain of TCR clone 269970 (TRBV28, TRBJ2-1)
CASSIIAGGRSEQFF

SEQ ID NO: 539941 - protein, 13 aa, Homo sapiens
  CDR3 for alpha chain variable domain of TCR clone 269971 (TRAV8-4, TRAJ27)
CAVSPRNAGKSTF

SEQ ID NO: 539942 - protein, 12 aa, Homo sapiens
  CDR3 for beta chain variable domain of TCR clone 269971 (TRBV11-2, TRBJ2-1)
CASSPGNNEQFF

SEQ ID NO: 539943 - protein, 13 aa, Homo sapiens
  CDR3 for alpha chain variable domain of TCR clone 269972 (TRAV13-1, TRAJ21)
CAASIYNFNKFYF

SEQ ID NO: 539944 - protein, 13 aa, Homo sapiens
  CDR3 for beta chain variable domain of TCR clone 269972 (TRBV7-6, TRBJ2-3)
CASSLRSDNTQYF

SEQ ID NO: 539945 - protein, 14 aa, Homo sapiens
  CDR3 for alpha chain variable domain of TCR clone 269973 (TRAV12-1, TRAJ23)
CVVIVYNQGGKLIF

SEQ ID NO: 539946 - protein, 16 aa, Homo sapiens
  CDR3 for beta chain variable domain of TCR clone 269973 (TRBV7-9, TRBJ2-1)
CASSDVAGGSYNEQFF

SEQ ID NO: 539947 - protein, 16 aa, Homo sapiens
  CDR3 for alpha chain variable domain of TCR clone 269974 (TRAV12-3, TRAJ53)
CAMRPGSGGSNYKLTF

SEQ ID NO: 539948 - protein, 11 aa, Homo sapiens
  CDR3 for beta chain variable domain of TCR clone 269974 (TRBV29-1, TRBJ2-5)
CSKDRTGTQYF

SEQ ID NO: 539949 - protein, 14 aa, Homo sapiens
  CDR3 for alpha chain variable domain of TCR clone 269975 (TRAV8-2, TRAJ4)
CVVSPSGGYNKLIF

SEQ ID NO: 539950 - protein, 15 aa, Homo sapiens
  CDR3 for beta chain variable domain of TCR clone 269975 (TRBV2, TRBJ2-1)
CASSELAGSYNEQFS

SEQ ID NO: 539951 - protein, 13 aa, Homo sapiens
  CDR3 for alpha chain variable domain of TCR clone 269976 (TRAV23/DV6, TRAJ43)
CAASMGGNNDMRF

SEQ ID NO: 539952 - protein, 15 aa, Homo sapiens
  CDR3 for beta chain variable domain of TCR clone 269976 (TRBV9, TRBJ1-6)
CASSVAGTGDSPLHF

SEQ ID NO: 539953 - protein, 14 aa, Homo sapiens
  CDR3 for alpha chain variable domain of TCR clone 269977 (TRAV12-2, TRAJ13)
CAVNPSGGYQKVTF

SEQ ID NO: 539954 - protein, 13 aa, Homo sapiens
  CDR3 for beta chain variable domain of TCR clone 269977 (TRBV12-5, TRBJ2-3)
CASGDRQSDTQYF

SEQ ID NO: 539955 - protein, 12 aa, Homo sapiens
  CDR3 for alpha chain variable domain of TCR clone 269978 (TRAV12-3, TRAJ17)
CAMTRTGDKLTF

SEQ ID NO: 539956 - protein, 15 aa, Homo sapiens
  CDR3 for beta chain variable domain of TCR clone 269978 (TRBV20-1, TRBJ2-7)
CSARDRVSGMDEQYF

SEQ ID NO: 539957 - protein, 13 aa, Homo sapiens
  CDR3 for alpha chain variable domain of TCR clone 269979 (TRAV13-2, TRAJ48)
CAEMDLGNEKLTI

SEQ ID NO: 539958 - protein, 15 aa, Homo sapiens
  CDR3 for beta chain variable domain of TCR clone 269979 (TRBV7-9, TRBJ1-6)
CASSSPGRGNSPLHF

SEQ ID NO: 539959 - protein, 14 aa, Homo sapiens
  CDR3 for alpha chain variable domain of TCR clone 269980 (TRAV12-2, TRAJ40)
CAVKIPSGTYKYIF

SEQ ID NO: 539960 - protein, 14 aa, Homo sapiens
  CDR3 for beta chain variable domain of TCR clone 269980 (TRBV28, TRBJ2-2)
CASRIRSGTGELFF

SEQ ID NO: 539961 - protein, 11 aa, Homo sapiens
  CDR3 for alpha chain variable domain of TCR clone 269981 (TRAV20, TRAJ34)
CTRDNTDKLIF

SEQ ID NO: 539962 - protein, 15 aa, Homo sapiens
  CDR3 for beta chain variable domain of TCR clone 269981 (TRBV2, TRBJ2-1)
CASSVTSEGTDEQVF

SEQ ID NO: 539963 - protein, 16 aa, Homo sapiens
  CDR3 for alpha chain variable domain of TCR clone 269982 (TRAV30, TRAJ24)
CGTEIVDADSWGKFQF

SEQ ID NO: 539964 - protein, 12 aa, Homo sapiens
  CDR3 for beta chain variable domain of TCR clone 269982 (TRBV11-2, TRBJ2-2)
CASSLPTAELFF

SEQ ID NO: 539965 - protein, 14 aa, Homo sapiens
  CDR3 for alpha chain variable domain of TCR clone 269983 (TRAV13-1, TRAJ35)
CAASKGGFGNVKHC

SEQ ID NO: 539966 - protein, 13 aa, Homo sapiens
  CDR3 for beta chain variable domain of TCR clone 269983 (TRBV7-3, TRBJ1-1)
CASSQDWGAEAFF

SEQ ID NO: 539967 - protein, 15 aa, Homo sapiens
  CDR3 for alpha chain variable domain of TCR clone 269984 (TRAV12-1, TRAJ8)
CVVNVENTGFQKLVF

SEQ ID NO: 539968 - protein, 16 aa, Homo sapiens
  CDR3 for beta chain variable domain of TCR clone 269984 (TRBV19, TRBJ1-5)
CASSTWTGGGNQPQHF

SEQ ID NO: 539969 - protein, 14 aa, Homo sapiens
  CDR3 for alpha chain variable domain of TCR clone 269985 (TRAV27, TRAJ13)
CRSSNSGGYQKVTF

SEQ ID NO: 539970 - protein, 15 aa, Homo sapiens
  CDR3 for beta chain variable domain of TCR clone 269985 (TRBV20-1, TRBJ2-7)
CSARDRVSGMDEQYF

SEQ ID NO: 539971 - protein, 11 aa, Homo sapiens
  CDR3 for alpha chain variable domain of TCR clone 269986 (TRAV2, TRAJ13)
CASGGYKKVTF

SEQ ID NO: 539972 - protein, 12 aa, Homo sapiens
  CDR3 for beta chain variable domain of TCR clone 269986 (TRBV19, TRBJ2-1)
CASSRQGAEQFF

SEQ ID NO: 539973 - protein, 15 aa, Homo sapiens
  CDR3 for alpha chain variable domain of TCR clone 269987 (TRAV38-2/DV8, TRAJ57)
CAYKSGLGGSEKLVF

SEQ ID NO: 539974 - protein, 16 aa, Homo sapiens
  CDR3 for beta chain variable domain of TCR clone 269987 (TRBV13, TRBJ2-2)
CASSPRTGEHTGELFF

SEQ ID NO: 539975 - protein, 14 aa, Homo sapiens
  CDR3 for alpha chain variable domain of TCR clone 269988 (TRAV12-3, TRAJ10)
SHLPLTGGGNKLTF

SEQ ID NO: 539976 - protein, 14 aa, Homo sapiens
  CDR3 for beta chain variable domain of TCR clone 269988 (TRBV7-6, TRBJ2-7)
CASSLGTGSYEQYF

SEQ ID NO: 539977 - protein, 12 aa, Homo sapiens
  CDR3 for alpha chain variable domain of TCR clone 269989 (TRAV26-2, TRAJ21)
CILKGNFNNFYF

SEQ ID NO: 539978 - protein, 14 aa, Homo sapiens
  CDR3 for beta chain variable domain of TCR clone 269989 (TRBV7-9, TRBJ1-1)
CASTPLQSYTEAFF

SEQ ID NO: 539979 - protein, 16 aa, Homo sapiens
  CDR3 for alpha chain variable domain of TCR clone 269990 (TRAV3, TRAJ23)
CAVKIGIYNQGGTLIF

SEQ ID NO: 539980 - protein, 17 aa, Homo sapiens
  CDR3 for beta chain variable domain of TCR clone 269990 (TRBV10-3, TRBJ2-6)
CAISESTAPSGANVLTF

SEQ ID NO: 539981 - protein, 14 aa, Homo sapiens
  CDR3 for alpha chain variable domain of TCR clone 269991 (TRAV12-1, TRAJ38)
CGELKAGNNRKLIW

SEQ ID NO: 539982 - protein, 13 aa, Homo sapiens
  CDR3 for beta chain variable domain of TCR clone 269991 (TRBV12-4, TRBJ1-2)
CASSLRQGKGYTF

SEQ ID NO: 539983 - protein, 11 aa, Homo sapiens
  CDR3 for alpha chain variable domain of TCR clone 269992 (TRAV1-2, TRAJ20)
CAVSNDYKLSF

SEQ ID NO: 539984 - protein, 18 aa, Homo sapiens
  CDR3 for beta chain variable domain of TCR clone 269992 (TRBV7-9, TRBJ2-7)
CASSLTTSGSRTWYEQYF

SEQ ID NO: 539985 - protein, 13 aa, Homo sapiens
  CDR3 for alpha chain variable domain of TCR clone 269993 (TRAV23/DV6, TRAJ16)
CAASISDGQKLLF

SEQ ID NO: 539986 - protein, 13 aa, Homo sapiens
  CDR3 for beta chain variable domain of TCR clone 269993 (TRBV12-5, TRBJ2-3)
CASGDRQSDTQYF

SEQ ID NO: 539987 - protein, 15 aa, Homo sapiens
  CDR3 for alpha chain variable domain of TCR clone 269994 (TRAV3, TRAJ17)
CAVRDTGAAGNKLTF

SEQ ID NO: 539988 - protein, 14 aa, Homo sapiens
  CDR3 for beta chain variable domain of TCR clone 269994 (TRBV6-3, TRBJ1-1)
CASSNLLPGAEAFF

SEQ ID NO: 539989 - protein, 19 aa, Homo sapiens
  CDR3 for alpha chain variable domain of TCR clone 269995 (TRAV26-1, TRAJ44)
CCVLFIVRANTGTASKLTF

SEQ ID NO: 539990 - protein, 16 aa, Homo sapiens
  CDR3 for beta chain variable domain of TCR clone 269995 (TRBV7-7, TRBJ2-1)
CASSLASGTSYNGQFF

SEQ ID NO: 539991 - protein, 15 aa, Homo sapiens
  CDR3 for alpha chain variable domain of TCR clone 269996 (TRAV35, TRAJ50)
CAGQLRKTSYDKVIF

SEQ ID NO: 539992 - protein, 12 aa, Homo sapiens
  CDR3 for beta chain variable domain of TCR clone 269996 (TRBV7-8, TRBJ2-7)
CASSLGDREQYF

SEQ ID NO: 539993 - protein, 12 aa, Homo sapiens
  CDR3 for alpha chain variable domain of TCR clone 269997 (TRAV2, TRAJ33)
CAFMDSNYQLIW

SEQ ID NO: 539994 - protein, 19 aa, Homo sapiens
  CDR3 for beta chain variable domain of TCR clone 269997 (TRBV7-2, TRBJ2-3)
CASSFLSRNWGGGTDTQYF

SEQ ID NO: 539995 - protein, 19 aa, Homo sapiens
  CDR3 for alpha chain variable domain of TCR clone 269998 (TRAV1-2, TRAJ26)
CLLPLCCERPDNYGQNFVF

SEQ ID NO: 539996 - protein, 14 aa, Homo sapiens
  CDR3 for beta chain variable domain of TCR clone 269998 (TRBV4-2, TRBJ1-2)
CASSPGGSNYGYTF

SEQ ID NO: 539997 - protein, 14 aa, Homo sapiens
  CDR3 for alpha chain variable domain of TCR clone 269999 (TRAV29/DV5, TRAJ49)
CAASAQNTGNQFYF

SEQ ID NO: 539998 - protein, 14 aa, Homo sapiens
  CDR3 for beta chain variable domain of TCR clone 269999 (TRBV20-1, TRBJ2-7)
CSASEAGEKYEQFF

SEQ ID NO: 539999 - protein, 13 aa, Homo sapiens
  CDR3 for alpha chain variable domain of TCR clone 270000 (TRAV26-1, TRAJ33)
CIVRVEGNYQLIW

SEQ ID NO: 540000 - protein, 14 aa, Homo sapiens
  CDR3 for beta chain variable domain of TCR clone 270000 (TRBV19, TRBJ2-1)
CASSLLASINEQFF

SEQ ID NO: 540001 - protein, 14 aa, Homo sapiens
  CDR3 for alpha chain variable domain of TCR clone 270001 (TRAV3, TRAJ34)
CAVRAPGNTDKLIF

SEQ ID NO: 540002 - protein, 13 aa, Homo sapiens
  CDR3 for beta chain variable domain of TCR clone 270001 (TRBV2, TRBJ1-4)
CASNRGTNEKLFF

SEQ ID NO: 540003 - protein, 11 aa, Homo sapiens
  CDR3 for alpha chain variable domain of TCR clone 270002 (TRAV26-1, TRAJ26)
CIKGYGQNFVF

SEQ ID NO: 540004 - protein, 13 aa, Homo sapiens
  CDR3 for beta chain variable domain of TCR clone 270002 (TRBV7-2, TRBJ2-5)
CQQLVRGGETQYF

SEQ ID NO: 540005 - protein, 12 aa, Homo sapiens
  CDR3 for alpha chain variable domain of TCR clone 270003 (TRAV12-3, TRAJ17)
CAMTLTGNKLTF

SEQ ID NO: 540006 - protein, 13 aa, Homo sapiens
  CDR3 for beta chain variable domain of TCR clone 270003 (TRBV2, TRBJ2-7)
CASSGAAAYEQYF

SEQ ID NO: 540007 - protein, 14 aa, Homo sapiens
  CDR3 for alpha chain variable domain of TCR clone 270004 (TRAV12-1, TRAJ54)
CVVNIYQGAQKLVF

SEQ ID NO: 540008 - protein, 15 aa, Homo sapiens
  CDR3 for beta chain variable domain of TCR clone 270004 (TRBV5-5, TRBJ1-5)
CASSSTPGSNQPQHF

SEQ ID NO: 540009 - protein, 15 aa, Homo sapiens
  CDR3 for alpha chain variable domain of TCR clone 270005 (TRAV1-2, TRAJ30)
CAVRPHGNRDDKIIF

SEQ ID NO: 540010 - protein, 15 aa, Homo sapiens
  CDR3 for beta chain variable domain of TCR clone 270005 (TRBV6-6, TRBJ2-7)
CASSYSYGGSYEQYF

SEQ ID NO: 540011 - protein, 12 aa, Homo sapiens
  CDR3 for alpha chain variable domain of TCR clone 270006 (TRAV17, TRAJ57)
CATDGGSEKLFF

SEQ ID NO: 540012 - protein, 13 aa, Homo sapiens
  CDR3 for beta chain variable domain of TCR clone 270006 (TRBV7-9, TRBJ2-7)
CASSVAGAYEQYF

SEQ ID NO: 540013 - protein, 12 aa, Homo sapiens
  CDR3 for alpha chain variable domain of TCR clone 270007 (TRAV29/DV5, TRAJ34)
CAASGNTDKLIF

SEQ ID NO: 540014 - protein, 14 aa, Homo sapiens
  CDR3 for beta chain variable domain of TCR clone 270007 (TRBV7-6, TRBJ2-3)
CASSLGTVTDTQYF

SEQ ID NO: 540015 - protein, 14 aa, Homo sapiens
  CDR3 for alpha chain variable domain of TCR clone 270008 (TRAV22, TRAJ53)
CAVGAGGSNYKLTF

SEQ ID NO: 540016 - protein, 15 aa, Homo sapiens
  CDR3 for beta chain variable domain of TCR clone 270008 (TRBV5-1, TRBJ2-1)
CASSQAGYWWNEQFF

SEQ ID NO: 540017 - protein, 13 aa, Homo sapiens
  CDR3 for alpha chain variable domain of TCR clone 270009 (TRAV21, TRAJ27)
CAARPGNAGRSTF

SEQ ID NO: 540018 - protein, 14 aa, Homo sapiens
  CDR3 for beta chain variable domain of TCR clone 270009 (TRBV7-6, TRBJ2-3)
CASSLGTVIDTQYF

SEQ ID NO: 540019 - protein, 21 aa, Homo sapiens
  CDR3 for alpha chain variable domain of TCR clone 270010 (TRAV29/DV5, TRAJ52)
CSVLLCSKREAGGTSYGKLTF

SEQ ID NO: 540020 - protein, 16 aa, Homo sapiens
  CDR3 for beta chain variable domain of TCR clone 270010 (TRBV5-1, TRBJ2-5)
CASSAARAGAQETQYF

SEQ ID NO: 540021 - protein, 18 aa, Homo sapiens
  CDR3 for alpha chain variable domain of TCR clone 270011 (TRAV9-2, TRAJ52)
CALSRHNAGGTSNGKLTF

SEQ ID NO: 540022 - protein, 13 aa, Homo sapiens
  CDR3 for beta chain variable domain of TCR clone 270011 (TRBV7-9, TRBJ1-2)
CASSLKQNYGYTF

SEQ ID NO: 540023 - protein, 16 aa, Homo sapiens
  CDR3 for alpha chain variable domain of TCR clone 270012 (TRAV14/DV4, TRAJ20)
CAMREGRSRAEYKLSF

SEQ ID NO: 540024 - protein, 17 aa, Homo sapiens
  CDR3 for beta chain variable domain of TCR clone 270012 (TRBV15, TRBJ1-1)
CATSRVGGADGDTEAFF

SEQ ID NO: 540025 - protein, 11 aa, Homo sapiens
  CDR3 for alpha chain variable domain of TCR clone 270013 (TRAV3, TRAJ21)
CAVGNFNKFYF

SEQ ID NO: 540026 - protein, 16 aa, Homo sapiens
  CDR3 for beta chain variable domain of TCR clone 270013 (TRBV19, TRBJ2-1)
CASSKAGPSSYNDQFF

SEQ ID NO: 540027 - protein, 16 aa, Homo sapiens
  CDR3 for alpha chain variable domain of TCR clone 270014 (TRAV3, TRAJ37)
CAVRGKGSCNTGKLIL

SEQ ID NO: 540028 - protein, 14 aa, Homo sapiens
  CDR3 for beta chain variable domain of TCR clone 270014 (TRBV7-2, TRBJ2-7)
CASSPKTSFYEQYF

SEQ ID NO: 540029 - protein, 12 aa, Homo sapiens
  CDR3 for alpha chain variable domain of TCR clone 270015 (TRAV20, TRAJ39)
CAVGNAGNMLTF

SEQ ID NO: 540030 - protein, 17 aa, Homo sapiens
  CDR3 for beta chain variable domain of TCR clone 270015 (TRBV7-3, TRBJ2-2)
CASSLSGTSGGTGELFL

SEQ ID NO: 540031 - protein, 15 aa, Homo sapiens
  CDR3 for alpha chain variable domain of TCR clone 270016 (TRAV8-4, TRAJ8)
CAVSDLNTGFQKLVV

SEQ ID NO: 540032 - protein, 14 aa, Homo sapiens
  CDR3 for beta chain variable domain of TCR clone 270016 (TRBV7-2, TRBJ2-3)
CASSQTGSSYTQYF

SEQ ID NO: 540033 - protein, 15 aa, Homo sapiens
  CDR3 for alpha chain variable domain of TCR clone 270017 (TRAV4, TRAJ39)
CLVGPNNNAGNMLTF

SEQ ID NO: 540034 - protein, 13 aa, Homo sapiens
  CDR3 for beta chain variable domain of TCR clone 270017 (TRBV28, TRBJ2-1)
CASRSGGLNEQFF

SEQ ID NO: 540035 - protein, 16 aa, Homo sapiens
  CDR3 for alpha chain variable domain of TCR clone 270018 (TRAV30, TRAJ24)
CGTEIVDADSWGKFQF

SEQ ID NO: 540036 - protein, 14 aa, Homo sapiens
  CDR3 for beta chain variable domain of TCR clone 270018 (TRBV19, TRBJ2-1)
CASPTFVVSGEQFF

SEQ ID NO: 540037 - protein, 15 aa, Homo sapiens
  CDR3 for alpha chain variable domain of TCR clone 270019 (TRAV13-1, TRAJ32)
CAASNGWWCSKQAHL

SEQ ID NO: 540038 - protein, 17 aa, Homo sapiens
  CDR3 for beta chain variable domain of TCR clone 270019 (TRBV15, TRBJ1-2)
CATSGREIDVVNYGYTF

SEQ ID NO: 540039 - protein, 13 aa, Homo sapiens
  CDR3 for alpha chain variable domain of TCR clone 270020 (TRAV9-2, TRAJ49)
CALIQIGGNQFYF

SEQ ID NO: 540040 - protein, 15 aa, Homo sapiens
  CDR3 for beta chain variable domain of TCR clone 270020 (TRBV27, TRBJ2-1)
CASSNGGGSSNEQFF

SEQ ID NO: 540041 - protein, 15 aa, Homo sapiens
  CDR3 for alpha chain variable domain of TCR clone 270021 (TRAV8-3, TRAJ45)
CASSYSGGGADGLTF

SEQ ID NO: 540042 - protein, 15 aa, Homo sapiens
  CDR3 for beta chain variable domain of TCR clone 270021 (TRBV27, TRBJ1-4)
CASRPRHATNEKLFF

SEQ ID NO: 540043 - protein, 16 aa, Homo sapiens
  CDR3 for alpha chain variable domain of TCR clone 270022 (TRAV30, TRAJ24)
CGTEIVDADSWGKFQF

SEQ ID NO: 540044 - protein, 14 aa, Homo sapiens
  CDR3 for beta chain variable domain of TCR clone 270022 (TRBV5-1, TRBJ2-7)
CASSFASGVNEQYF

SEQ ID NO: 540045 - protein, 15 aa, Homo sapiens
  CDR3 for alpha chain variable domain of TCR clone 270023 (TRAV26-1, TRAJ44)
CIVRMGTGTASKLTF

SEQ ID NO: 540046 - protein, 15 aa, Homo sapiens
  CDR3 for beta chain variable domain of TCR clone 270023 (TRBV19, TRBJ1-1)
CASTSGQIQNTEAFF

SEQ ID NO: 540047 - protein, 11 aa, Homo sapiens
  CDR3 for alpha chain variable domain of TCR clone 270024 (TRAV21, TRAJ34)
CAHYNTDKLIF

SEQ ID NO: 540048 - protein, 16 aa, Homo sapiens
  CDR3 for beta chain variable domain of TCR clone 270024 (TRBV20-1, TRBJ2-1)
CSARDLKQGMNNEQFF

SEQ ID NO: 540049 - protein, 16 aa, Homo sapiens
  CDR3 for alpha chain variable domain of TCR clone 270025 (TRAV26-1, TRAJ36)
CIVRVSYQTGANNLFF

SEQ ID NO: 540050 - protein, 15 aa, Homo sapiens
  CDR3 for beta chain variable domain of TCR clone 270025 (TRBV5-1, TRBJ2-5)
CASSLGLAEQETQYF

SEQ ID NO: 540051 - protein, 18 aa, Homo sapiens
  CDR3 for alpha chain variable domain of TCR clone 270026 (TRAV13-1, TRAJ52)
CAASKRSAGGTSYGRLTF

SEQ ID NO: 540052 - protein, 13 aa, Homo sapiens
  CDR3 for beta chain variable domain of TCR clone 270026 (TRBV12-4, TRBJ1-2)
CARSLRQGKGYTF

SEQ ID NO: 540053 - protein, 18 aa, Homo sapiens
  CDR3 for alpha chain variable domain of TCR clone 270027 (TRAV21, TRAJ52)
CAVRPSPAGGTSYGKLTF

SEQ ID NO: 540054 - protein, 18 aa, Homo sapiens
  CDR3 for beta chain variable domain of TCR clone 270027 (TRBV11-2, TRBJ2-6)
CASSLNPFLGTGANVLTF

SEQ ID NO: 540055 - protein, 12 aa, Homo sapiens
  CDR3 for alpha chain variable domain of TCR clone 270028 (TRAV12-3, TRAJ17)
CAMTLTGNKLTF

SEQ ID NO: 540056 - protein, 15 aa, Homo sapiens
  CDR3 for beta chain variable domain of TCR clone 270028 (TRBV20-1, TRBJ2-7)
CSARDRVTGVDEQYF

SEQ ID NO: 540057 - protein, 14 aa, Homo sapiens
  CDR3 for alpha chain variable domain of TCR clone 270029 (TRAV16, TRAJ54)
CSLSGVQGAQKLVF

SEQ ID NO: 540058 - protein, 15 aa, Homo sapiens
  CDR3 for beta chain variable domain of TCR clone 270029 (TRBV18, TRBJ2-2)
CASSTSGLHTGELFF

SEQ ID NO: 540059 - protein, 12 aa, Homo sapiens
  CDR3 for alpha chain variable domain of TCR clone 270030 (TRAV12-3, TRAJ17)
CAMTLTGTKLTF

SEQ ID NO: 540060 - protein, 16 aa, Homo sapiens
  CDR3 for beta chain variable domain of TCR clone 270030 (TRBV7-2, TRBJ2-3)
CASSLAGAGSGDTQYF

SEQ ID NO: 540061 - protein, 16 aa, Homo sapiens
  CDR3 for alpha chain variable domain of TCR clone 270031 (TRAV3, TRAJ21)
CAVRDIERGNFNNFYF

SEQ ID NO: 540062 - protein, 13 aa, Homo sapiens
  CDR3 for beta chain variable domain of TCR clone 270031 (TRBV27, TRBJ2-7)
RASSLTTGYEQYF

SEQ ID NO: 540063 - protein, 12 aa, Homo sapiens
  CDR3 for alpha chain variable domain of TCR clone 270032 (TRAV27, TRAJ36)
ASTPAGANNLFF

SEQ ID NO: 540064 - protein, 12 aa, Homo sapiens
  CDR3 for beta chain variable domain of TCR clone 270032 (TRBV11-2, TRBJ2-2)
CASSLGGGELFF

SEQ ID NO: 540065 - protein, 10 aa, Homo sapiens
  CDR3 for alpha chain variable domain of TCR clone 270033 (TRAV1-2, TRAJ31)
CVSEDARLMF

SEQ ID NO: 540066 - protein, 15 aa, Homo sapiens
  CDR3 for beta chain variable domain of TCR clone 270033 (TRBV27, TRBJ2-1)
CASSNGGGSSNEQFF

SEQ ID NO: 540067 - protein, 14 aa, Homo sapiens
  CDR3 for alpha chain variable domain of TCR clone 270034 (TRAV26-1, TRAJ38)
CIADNAGNNRKLIW

SEQ ID NO: 540068 - protein, 15 aa, Homo sapiens
  CDR3 for beta chain variable domain of TCR clone 270034 (TRBV20-1, TRBJ2-7)
CSARDRVPGMDEQYF

SEQ ID NO: 540069 - protein, 17 aa, Homo sapiens
  CDR3 for alpha chain variable domain of TCR clone 270035 (TRAV13-1, TRAJ52)
CAAGRNAGGTSCGKLTF

SEQ ID NO: 540070 - protein, 15 aa, Homo sapiens
  CDR3 for beta chain variable domain of TCR clone 270035 (TRBV13, TRBJ1-5)
CASSFGQGGVQPQHF

SEQ ID NO: 540071 - protein, 16 aa, Homo sapiens
  CDR3 for alpha chain variable domain of TCR clone 270036 (TRAV16, TRAJ4)
CALSRMFSGGYNKLIF

SEQ ID NO: 540072 - protein, 14 aa, Homo sapiens
  CDR3 for beta chain variable domain of TCR clone 270036 (TRBV7-9, TRBJ2-1)
CASSLGVADNEQFF

SEQ ID NO: 540073 - protein, 13 aa, Homo sapiens
  CDR3 for alpha chain variable domain of TCR clone 270037 (TRAV27, TRAJ42)
CAGARGSQGNLTF

SEQ ID NO: 540074 - protein, 15 aa, Homo sapiens
  CDR3 for beta chain variable domain of TCR clone 270037 (TRBV10-3, TRBJ2-2)
CAIRTDREDTGELFF

SEQ ID NO: 540075 - protein, 14 aa, Homo sapiens
  CDR3 for alpha chain variable domain of TCR clone 270038 (TRAV12-2, TRAJ45)
CAVNIGGGADGLTY

SEQ ID NO: 540076 - protein, 17 aa, Homo sapiens
  CDR3 for beta chain variable domain of TCR clone 270038 (TRBV7-8, TRBJ2-6)
CASSAGTGGAGANVLTF

SEQ ID NO: 540077 - protein, 16 aa, Homo sapiens
  CDR3 for alpha chain variable domain of TCR clone 270039 (TRAV16, TRAJ42)
CARKMNYGGSQGNLIF

SEQ ID NO: 540078 - protein, 13 aa, Homo sapiens
  CDR3 for beta chain variable domain of TCR clone 270039 (TRBV20-1, TRBJ2-7)
CSASPPSSYEQYF

SEQ ID NO: 540079 - protein, 14 aa, Homo sapiens
  CDR3 for alpha chain variable domain of TCR clone 270040 (TRAV8-2, TRAJ11)
CVVSEKSGCSTLTF

SEQ ID NO: 540080 - protein, 16 aa, Homo sapiens
  CDR3 for beta chain variable domain of TCR clone 270040 (TRBV28, TRBJ2-1)
FASSSPEYPRDNEQFF

SEQ ID NO: 540081 - protein, 12 aa, Homo sapiens
  CDR3 for alpha chain variable domain of TCR clone 270041 (TRAV13-1, TRAJ15)
CAASQAGTALIF

SEQ ID NO: 540082 - protein, 15 aa, Homo sapiens
  CDR3 for beta chain variable domain of TCR clone 270041 (TRBV20-1, TRBJ2-7)
CSARDRVSGMDEQYF

SEQ ID NO: 540083 - protein, 10 aa, Homo sapiens
  CDR3 for alpha chain variable domain of TCR clone 270042 (TRAV26-1, )
CIVRVITVSS

SEQ ID NO: 540084 - protein, 14 aa, Homo sapiens
  CDR3 for beta chain variable domain of TCR clone 270042 (TRBV7-6, TRBJ2-3)
CASSLGTVTDTQYF

SEQ ID NO: 540085 - protein, 14 aa, Homo sapiens
  CDR3 for alpha chain variable domain of TCR clone 270043 (TRAV29/DV5, TRAJ34)
CAASASGNTDKLIF

SEQ ID NO: 540086 - protein, 13 aa, Homo sapiens
  CDR3 for beta chain variable domain of TCR clone 270043 (TRBV7-3, TRBJ1-1)
CASSQDWGAEAFF

SEQ ID NO: 540087 - protein, 15 aa, Homo sapiens
  CDR3 for alpha chain variable domain of TCR clone 270044 (TRAV26-1, TRAJ29)
CIVRVEGSGNIPLVL

SEQ ID NO: 540088 - protein, 15 aa, Homo sapiens
  CDR3 for beta chain variable domain of TCR clone 270044 (TRBV7-9, TRBJ1-5)
CASSQGHQPNQPQHF

SEQ ID NO: 540089 - protein, 14 aa, Homo sapiens
  CDR3 for alpha chain variable domain of TCR clone 270045 (TRAV3, TRAJ21)
CALGLGSTNFTLDL

SEQ ID NO: 540090 - protein, 14 aa, Homo sapiens
  CDR3 for beta chain variable domain of TCR clone 270045 (TRBV7-9, TRBJ2-4)
CASSLAMGGNIQYF

SEQ ID NO: 540091 - protein, 14 aa, Homo sapiens
  CDR3 for alpha chain variable domain of TCR clone 270046 (TRAV27, TRAJ17)
CRSTIRAAGNKLTF

SEQ ID NO: 540092 - protein, 16 aa, Homo sapiens
  CDR3 for beta chain variable domain of TCR clone 270046 (TRBV5-7, TRBJ2-5)
CASALAPAGGRETQYF

SEQ ID NO: 540093 - protein, 12 aa, Homo sapiens
  CDR3 for alpha chain variable domain of TCR clone 270047 (TRAV13-2, TRAJ23)
CAERHRGGKLIF

SEQ ID NO: 540094 - protein, 13 aa, Homo sapiens
  CDR3 for beta chain variable domain of TCR clone 270047 (TRBV12-4, TRBJ2-1)
CASSFSGFNEQFF

SEQ ID NO: 540095 - protein, 15 aa, Homo sapiens
  CDR3 for alpha chain variable domain of TCR clone 270048 (TRAV3, TRAJ3)
CDVRDRDSSASKIIF

SEQ ID NO: 540096 - protein, 18 aa, Homo sapiens
  CDR3 for beta chain variable domain of TCR clone 270048 (TRBV25-1, TRBJ1-2)
CASSGLQNGQGLIFGYTF

SEQ ID NO: 540097 - protein, 16 aa, Homo sapiens
  CDR3 for alpha chain variable domain of TCR clone 270049 (TRAV1-2, TRAJ35)
CAVRGLTIGVGNVLHC

SEQ ID NO: 540098 - protein, 13 aa, Homo sapiens
  CDR3 for beta chain variable domain of TCR clone 270049 (TRBV6-6, TRBJ2-1)
CASSLHQGDEQFF

SEQ ID NO: 540099 - protein, 15 aa, Homo sapiens
  CDR3 for alpha chain variable domain of TCR clone 270050 (TRAV2, TRAJ15)
CAVEDRCQAGTALIF

SEQ ID NO: 540100 - protein, 17 aa, Homo sapiens
  CDR3 for beta chain variable domain of TCR clone 270050 (TRBV11-2, TRBJ2-1)
CASSLYPPGVEYNEQFF

SEQ ID NO: 540101 - protein, 17 aa, Homo sapiens
  CDR3 for alpha chain variable domain of TCR clone 270051 (TRAV8-6, TRAJ58)
CAVSSWVGETSGSRLTF

SEQ ID NO: 540102 - protein, 15 aa, Homo sapiens
  CDR3 for beta chain variable domain of TCR clone 270051 (TRBV20-1, TRBJ2-7)
CSASDRVSGMDEQYF

SEQ ID NO: 540103 - protein, 14 aa, Homo sapiens
  CDR3 for alpha chain variable domain of TCR clone 270052 (TRAV20, TRAJ42)
CAVQAGGSHGNLIL

SEQ ID NO: 540104 - protein, 14 aa, Homo sapiens
  CDR3 for beta chain variable domain of TCR clone 270052 (TRBV28, TRBJ1-2)
CASRIQGANYGYTF

SEQ ID NO: 540105 - protein, 23 aa, Homo sapiens
  CDR3 for alpha chain variable domain of TCR clone 270053 (TRAV8-3, )
CAVVTTRIPDIQNPNPAVYQLRD

SEQ ID NO: 540106 - protein, 14 aa, Homo sapiens
  CDR3 for beta chain variable domain of TCR clone 270053 (TRBV11-2, TRBJ2-5)
CASSRTGGIETQYF

SEQ ID NO: 540107 - protein, 18 aa, Homo sapiens
  CDR3 for alpha chain variable domain of TCR clone 270054 (TRAV12-3, TRAJ52)
GAMSVGGAGGTSYGKLTF

SEQ ID NO: 540108 - protein, 14 aa, Homo sapiens
  CDR3 for beta chain variable domain of TCR clone 270054 (TRBV7-2, TRBJ2-7)
CASRSQGAAYEQYF

SEQ ID NO: 540109 - protein, 14 aa, Homo sapiens
  CDR3 for alpha chain variable domain of TCR clone 270055 (TRAV27, TRAJ12)
CAGARMDSSYKLIF

SEQ ID NO: 540110 - protein, 18 aa, Homo sapiens
  CDR3 for beta chain variable domain of TCR clone 270055 (TRBV10-3, TRBJ2-7)
CAISESGRPSGRRVEQYF

SEQ ID NO: 540111 - protein, 13 aa, Homo sapiens
  CDR3 for alpha chain variable domain of TCR clone 270056 (TRAV22, TRAJ12)
CTGRMDSSYKLIF

SEQ ID NO: 540112 - protein, 13 aa, Homo sapiens
  CDR3 for beta chain variable domain of TCR clone 270056 (TRBV2, TRBJ2-7)
CASSVGESGEQYF

SEQ ID NO: 540113 - protein, 17 aa, Homo sapiens
  CDR3 for alpha chain variable domain of TCR clone 270057 (TRAV3, TRAJ6)
CAVRDGPRAGGSYIPTF

SEQ ID NO: 540114 - protein, 14 aa, Homo sapiens
  CDR3 for beta chain variable domain of TCR clone 270057 (TRBV7-2, TRBJ2-7)
CGSSPKTRFYEQYF

SEQ ID NO: 540115 - protein, 15 aa, Homo sapiens
  CDR3 for alpha chain variable domain of TCR clone 270058 (TRAV17, TRAJ22)
CATVAPSGSARQLTF

SEQ ID NO: 540116 - protein, 16 aa, Homo sapiens
  CDR3 for beta chain variable domain of TCR clone 270058 (TRBV10-3, TRBJ2-7)
CAISADVVDRPYEQYF

SEQ ID NO: 540117 - protein, 16 aa, Homo sapiens
  CDR3 for alpha chain variable domain of TCR clone 270059 (TRAV23/DV6, TRAJ48)
CAASGVVNFGNEKLTL

SEQ ID NO: 540118 - protein, 15 aa, Homo sapiens
  CDR3 for beta chain variable domain of TCR clone 270059 (TRBV20-1, TRBJ2-5)
CSAGLAGVSQETQYF

SEQ ID NO: 540119 - protein, 15 aa, Homo sapiens
  CDR3 for alpha chain variable domain of TCR clone 270060 (TRAV27, TRAJ50)
CAGRERGNSYDKVLF

SEQ ID NO: 540120 - protein, 18 aa, Homo sapiens
  CDR3 for beta chain variable domain of TCR clone 270060 (TRBV10-3, TRBJ1-5)
CAISDQVGRLISPSILVM

SEQ ID NO: 540121 - protein, 14 aa, Homo sapiens
  CDR3 for alpha chain variable domain of TCR clone 270061 (TRAV8-3, TRAJ36)
CAVGPITGANNLFF

SEQ ID NO: 540122 - protein, 15 aa, Homo sapiens
  CDR3 for beta chain variable domain of TCR clone 270061 (TRBV4-1, TRBJ2-1)
SASSQDPGNYNEQFF

SEQ ID NO: 540123 - protein, 13 aa, Homo sapiens
  CDR3 for alpha chain variable domain of TCR clone 270062 (TRAV2, TRAJ15)
CAVASQAGTVLIF

SEQ ID NO: 540124 - protein, 15 aa, Homo sapiens
  CDR3 for beta chain variable domain of TCR clone 270062 (TRBV20-1, TRBJ2-7)
CSARDRVSGMDEQYF

SEQ ID NO: 540125 - protein, 23 aa, Homo sapiens
  CDR3 for alpha chain variable domain of TCR clone 270063 (TRAV6, TRAJ34)
ISQPPSLQTQLPTSVPYTDKLIF

SEQ ID NO: 540126 - protein, 16 aa, Homo sapiens
  CDR3 for beta chain variable domain of TCR clone 270063 (TRBV6-6, TRBJ2-7)
CASRASGRARSYEQYV

SEQ ID NO: 540127 - protein, 10 aa, Homo sapiens
  CDR3 for alpha chain variable domain of TCR clone 270064 (TRAV12-3, TRAJ49)
CAMNDDQFYF

SEQ ID NO: 540128 - protein, 15 aa, Homo sapiens
  CDR3 for beta chain variable domain of TCR clone 270064 (TRBV7-2, TRBJ1-2)
YASSPRAGWNYGYTF

SEQ ID NO: 540129 - protein, 12 aa, Homo sapiens
  CDR3 for alpha chain variable domain of TCR clone 270065 (TRAV12-1, TRAJ31)
RVVNRNNVRLMF

SEQ ID NO: 540130 - protein, 15 aa, Homo sapiens
  CDR3 for beta chain variable domain of TCR clone 270065 (TRBV5-1, TRBJ1-1)
CASSSTTGTNTEAFF

SEQ ID NO: 540131 - protein, 12 aa, Homo sapiens
  CDR3 for alpha chain variable domain of TCR clone 270066 (TRAV21, TRAJ27)
CAANTNAGKSTF

SEQ ID NO: 540132 - protein, 15 aa, Homo sapiens
  CDR3 for beta chain variable domain of TCR clone 270066 (TRBV29-1, TRBJ1-4)
CSVVGIGYINEKLFF

SEQ ID NO: 540133 - protein, 14 aa, Homo sapiens
  CDR3 for alpha chain variable domain of TCR clone 270067 (TRAV12-3, TRAJ6)
CAMSATGGSYIRTF

SEQ ID NO: 540134 - protein, 16 aa, Homo sapiens
  CDR3 for beta chain variable domain of TCR clone 270067 (TRBV4-2, TRBJ2-1)
CASSPRAGQGANEQFF

SEQ ID NO: 540135 - protein, 15 aa, Homo sapiens
  CDR3 for alpha chain variable domain of TCR clone 270068 (TRAV3, TRAJ5)
FAVRDLDTGRRALTF

SEQ ID NO: 540136 - protein, 13 aa, Homo sapiens
  CDR3 for beta chain variable domain of TCR clone 270068 (TRBV12-4, TRBJ2-7)
CASSPTETDEQYF

SEQ ID NO: 540137 - protein, 12 aa, Homo sapiens
  CDR3 for alpha chain variable domain of TCR clone 270069 (TRAV13-1, TRAJ27)
CAAHTNSGKSTF

SEQ ID NO: 540138 - protein, 14 aa, Homo sapiens
  CDR3 for beta chain variable domain of TCR clone 270069 (TRBV12-5, TRBJ2-5)
CASGSRTHQETQYF

SEQ ID NO: 540139 - protein, 14 aa, Homo sapiens
  CDR3 for alpha chain variable domain of TCR clone 270070 (TRAV12-3, TRAJ42)
CAMNYGGSQGNLIF

SEQ ID NO: 540140 - protein, 16 aa, Homo sapiens
  CDR3 for beta chain variable domain of TCR clone 270070 (TRBV7-7, TRBJ2-1)
CASSLASGTSYNEQFF

SEQ ID NO: 540141 - protein, 15 aa, Homo sapiens
  CDR3 for alpha chain variable domain of TCR clone 270071 (TRAV12-1, TRAJ10)
CVVNKLTGGGNKLTF

SEQ ID NO: 540142 - protein, 17 aa, Homo sapiens
  CDR3 for beta chain variable domain of TCR clone 270071 (TRBV5-1, TRBJ1-6)
CASSPALQGSDNSPLHF

SEQ ID NO: 540143 - protein, 15 aa, Homo sapiens
  CDR3 for alpha chain variable domain of TCR clone 270072 (TRAV3, TRAJ47)
CAVRDIGEYGNKLVF

SEQ ID NO: 540144 - protein, 13 aa, Homo sapiens
  CDR3 for beta chain variable domain of TCR clone 270072 (TRBV7-6, TRBJ2-7)
CASSLDHTHEQYF

SEQ ID NO: 540145 - protein, 14 aa, Homo sapiens
  CDR3 for alpha chain variable domain of TCR clone 270073 (TRAV13-1, TRAJ44)
CAAKATGTASKLTF

SEQ ID NO: 540146 - protein, 13 aa, Homo sapiens
  CDR3 for beta chain variable domain of TCR clone 270073 (TRBV24-1, TRBJ2-2)
CATSDWSTGELFF

SEQ ID NO: 540147 - protein, 13 aa, Homo sapiens
  CDR3 for alpha chain variable domain of TCR clone 270074 (TRAV8-1, TRAJ15)
CAVKNQAGTAPIF

SEQ ID NO: 540148 - protein, 15 aa, Homo sapiens
  CDR3 for beta chain variable domain of TCR clone 270074 (TRBV7-3, TRBJ2-7)
CASSLTPTGYDEQYF

SEQ ID NO: 540149 - protein, 12 aa, Homo sapiens
  CDR3 for alpha chain variable domain of TCR clone 270075 (TRAV3, TRAJ20)
CAVRDPDYKLSF

SEQ ID NO: 540150 - protein, 13 aa, Homo sapiens
  CDR3 for beta chain variable domain of TCR clone 270075 (TRBV7-2, TRBJ2-7)
CASSSPSGSEQYF

SEQ ID NO: 540151 - protein, 12 aa, Homo sapiens
  CDR3 for alpha chain variable domain of TCR clone 270076 (TRAV12-2, TRAJ10)
WGVTGGGNKLTF

SEQ ID NO: 540152 - protein, 14 aa, Homo sapiens
  CDR3 for beta chain variable domain of TCR clone 270076 (TRBV7-9, TRBJ2-7)
CASSLSSGLNEQYF

SEQ ID NO: 540153 - protein, 13 aa, Homo sapiens
  CDR3 for alpha chain variable domain of TCR clone 270077 (TRAV13-1, TRAJ39)
CSKYSNAGNMLTF

SEQ ID NO: 540154 - protein, 13 aa, Homo sapiens
  CDR3 for beta chain variable domain of TCR clone 270077 (TRBV7-9, TRBJ2-3)
CASSPGSTDTQYF

SEQ ID NO: 540155 - protein, 11 aa, Homo sapiens
  CDR3 for alpha chain variable domain of TCR clone 270078 (TRAV12-1, TRAJ43)
CVEYDNNDMRF

SEQ ID NO: 540156 - protein, 14 aa, Homo sapiens
  CDR3 for beta chain variable domain of TCR clone 270078 (TRBV11-2, TRBJ2-5)
CASSRTGGIETQYF

SEQ ID NO: 540157 - protein, 15 aa, Homo sapiens
  CDR3 for alpha chain variable domain of TCR clone 270079 (TRAV12-1, TRAJ37)
CVVSIMGGNTGKLIF

SEQ ID NO: 540158 - protein, 12 aa, Homo sapiens
  CDR3 for beta chain variable domain of TCR clone 270079 (TRBV2, TRBJ2-7)
CASSRVGYEQYF

SEQ ID NO: 540159 - protein, 12 aa, Homo sapiens
  CDR3 for alpha chain variable domain of TCR clone 270080 (TRAV1-2, TRAJ29)
CAVLSGNTPLVF

SEQ ID NO: 540160 - protein, 12 aa, Homo sapiens
  CDR3 for beta chain variable domain of TCR clone 270080 (TRBV7-9, TRBJ2-7)
CASSFGSYEQYF

SEQ ID NO: 540161 - protein, 12 aa, Homo sapiens
  CDR3 for alpha chain variable domain of TCR clone 270081 (TRAV13-1, TRAJ21)
CAAKEGFNKFYS

SEQ ID NO: 540162 - protein, 18 aa, Homo sapiens
  CDR3 for beta chain variable domain of TCR clone 270081 (TRBV20-1, TRBJ2-6)
CSAETTPTHGSGANVLTF

SEQ ID NO: 540163 - protein, 15 aa, Homo sapiens
  CDR3 for alpha chain variable domain of TCR clone 270082 (TRAV27, TRAJ38)
CAARRNAGNNRKLIL

SEQ ID NO: 540164 - protein, 14 aa, Homo sapiens
  CDR3 for beta chain variable domain of TCR clone 270082 (TRBV19, TRBJ2-1)
CASPTFVLSGEQFF

SEQ ID NO: 540165 - protein, 15 aa, Homo sapiens
  CDR3 for alpha chain variable domain of TCR clone 270083 (TRAV26-1, TRAJ56)
CIVRVATGANSKLTF

SEQ ID NO: 540166 - protein, 15 aa, Homo sapiens
  CDR3 for beta chain variable domain of TCR clone 270083 (TRBV27, TRBJ2-7)
CASSPQREGQHEQYF

SEQ ID NO: 540167 - protein, 16 aa, Homo sapiens
  CDR3 for alpha chain variable domain of TCR clone 270084 (TRAV12-2, TRAJ28)
CAVITDSGAGSYQLTF

SEQ ID NO: 540168 - protein, 14 aa, Homo sapiens
  CDR3 for beta chain variable domain of TCR clone 270084 (TRBV25-1, TRBJ1-1)
CASTHLGGNTEAFL

SEQ ID NO: 540169 - protein, 11 aa, Homo sapiens
  CDR3 for alpha chain variable domain of TCR clone 270085 (TRAV3, TRAJ21)
CAVGNFNKFYF

SEQ ID NO: 540170 - protein, 12 aa, Homo sapiens
  CDR3 for beta chain variable domain of TCR clone 270085 (TRBV28, TRBJ2-7)
CASSVPPYEQYF

SEQ ID NO: 540171 - protein, 14 aa, Homo sapiens
  CDR3 for alpha chain variable domain of TCR clone 270086 (TRAV8-2, TRAJ26)
CVVSDWNYGQNLVF

SEQ ID NO: 540172 - protein, 12 aa, Homo sapiens
  CDR3 for beta chain variable domain of TCR clone 270086 (TRBV5-4, TRBJ2-5)
CASNRAGETQYF

SEQ ID NO: 540173 - protein, 11 aa, Homo sapiens
  CDR3 for alpha chain variable domain of TCR clone 270087 (TRAV8-3, TRAJ34)
CAVVITDKLIF

SEQ ID NO: 540174 - protein, 12 aa, Homo sapiens
  CDR3 for beta chain variable domain of TCR clone 270087 (TRBV11-3, TRBJ2-3)
CASRRTTDTQYF

SEQ ID NO: 540175 - protein, 18 aa, Homo sapiens
  CDR3 for alpha chain variable domain of TCR clone 270088 (TRAV21, TRAJ52)
CAARPSPAGGTSYGKLTF

SEQ ID NO: 540176 - protein, 17 aa, Homo sapiens
  CDR3 for beta chain variable domain of TCR clone 270088 (TRBV13, TRBJ2-3)
CARSLSRVAGGRNTQYF

SEQ ID NO: 540177 - protein, 14 aa, Homo sapiens
  CDR3 for alpha chain variable domain of TCR clone 270089 (TRAV13-2, TRAJ43)
CAEIPTYNINDMRF

SEQ ID NO: 540178 - protein, 15 aa, Homo sapiens
  CDR3 for beta chain variable domain of TCR clone 270089 (TRBV7-9, TRBJ2-2)
CASGPLDTFPGELFF

SEQ ID NO: 540179 - protein, 15 aa, Homo sapiens
  CDR3 for alpha chain variable domain of TCR clone 270090 (TRAV8-3, TRAJ45)
CASSYSGGGADGLTF

SEQ ID NO: 540180 - protein, 15 aa, Homo sapiens
  CDR3 for beta chain variable domain of TCR clone 270090 (TRBV7-9, TRBJ1-4)
CASSRTGGFNEKLFF

SEQ ID NO: 540181 - protein, 17 aa, Homo sapiens
  CDR3 for alpha chain variable domain of TCR clone 270091 (TRAV17, TRAJ28)
CATDPRRGGAGSYQLTF

SEQ ID NO: 540182 - protein, 14 aa, Homo sapiens
  CDR3 for beta chain variable domain of TCR clone 270091 (TRBV12-5, TRBJ2-5)
CASGSRTHQETQYF

SEQ ID NO: 540183 - protein, 13 aa, Homo sapiens
  CDR3 for alpha chain variable domain of TCR clone 270092 (TRAV21, TRAJ44)
CAAHTGTASKLTF

SEQ ID NO: 540184 - protein, 19 aa, Homo sapiens
  CDR3 for beta chain variable domain of TCR clone 270092 (TRBV3-1, TRBJ2-1)
CASSRMSVPGLAGKNEQFF

SEQ ID NO: 540185 - protein, 10 aa, Homo sapiens
  CDR3 for alpha chain variable domain of TCR clone 270093 (TRAV12-1, TRAJ43)
CVVHNNDMRF

SEQ ID NO: 540186 - protein, 16 aa, Homo sapiens
  CDR3 for beta chain variable domain of TCR clone 270093 (TRBV19, TRBJ1-4)
CASSINRATTNEKLFF

SEQ ID NO: 540187 - protein, 17 aa, Homo sapiens
  CDR3 for alpha chain variable domain of TCR clone 270094 (TRAV3, TRAJ7)
CAVRDVSPLEGTTDSLL

SEQ ID NO: 540188 - protein, 17 aa, Homo sapiens
  CDR3 for beta chain variable domain of TCR clone 270094 (TRBV15, TRBJ1-2)
CATSGREIDVVNYGYTF

SEQ ID NO: 540189 - protein, 17 aa, Homo sapiens
  CDR3 for alpha chain variable domain of TCR clone 270095 (TRAV38-1, TRAJ28)
CAFMKPTPGAGSYQLTF

SEQ ID NO: 540190 - protein, 15 aa, Homo sapiens
  CDR3 for beta chain variable domain of TCR clone 270095 (TRBV5-1, TRBJ2-4)
CASSLGGGGSYIQYF

SEQ ID NO: 540191 - protein, 11 aa, Homo sapiens
  CDR3 for alpha chain variable domain of TCR clone 270096 (TRAV39, TRAJ49)
CAVDISTQFYF

SEQ ID NO: 540192 - protein, 20 aa, Homo sapiens
  CDR3 for beta chain variable domain of TCR clone 270096 (TRBV19, TRBJ2-1)
CASSISRTVTSTRLNNEQFF

SEQ ID NO: 540193 - protein, 10 aa, Homo sapiens
  CDR3 for alpha chain variable domain of TCR clone 270097 (TRAV23/DV6, TRAJ57)
CAASSTLSQG

SEQ ID NO: 540194 - protein, 14 aa, Homo sapiens
  CDR3 for beta chain variable domain of TCR clone 270097 (TRBV15, TRBJ2-3)
CATRSGTSTDTQYF

SEQ ID NO: 540195 - protein, 14 aa, Homo sapiens
  CDR3 for alpha chain variable domain of TCR clone 270098 (TRAV12-2, TRAJ52)
CRCAGGTSDGKLTF

SEQ ID NO: 540196 - protein, 13 aa, Homo sapiens
  CDR3 for beta chain variable domain of TCR clone 270098 (TRBV11-2, TRBJ2-1)
CASSLRLTHEQFF

SEQ ID NO: 540197 - protein, 12 aa, Homo sapiens
  CDR3 for alpha chain variable domain of TCR clone 270099 (TRAV36/DV7, TRAJ54)
CDVVRGAQKLVF

SEQ ID NO: 540198 - protein, 13 aa, Homo sapiens
  CDR3 for beta chain variable domain of TCR clone 270099 (TRBV20-1, TRBJ1-1)
CSARGGGNTEAFF

SEQ ID NO: 540199 - protein, 12 aa, Homo sapiens
  CDR3 for alpha chain variable domain of TCR clone 270100 (TRAV13-2, TRAJ23)
CAERHRGGKPIF

SEQ ID NO: 540200 - protein, 13 aa, Homo sapiens
  CDR3 for beta chain variable domain of TCR clone 270100 (TRBV14, TRBJ1-1)
CASSREFGTEAFF

SEQ ID NO: 540201 - protein, 14 aa, Homo sapiens
  CDR3 for alpha chain variable domain of TCR clone 270101 (TRAV1-2, TRAJ16)
CVVNRFSDGQKLLF

SEQ ID NO: 540202 - protein, 15 aa, Homo sapiens
  CDR3 for beta chain variable domain of TCR clone 270101 (TRBV5-8, TRBJ1-1)
CASSFSGTSLKGAFF

SEQ ID NO: 540203 - protein, 15 aa, Homo sapiens
  CDR3 for alpha chain variable domain of TCR clone 270102 (TRAV38-2/DV8, TRAJ45)
CAYWDSGGGADGLTF

SEQ ID NO: 540204 - protein, 15 aa, Homo sapiens
  CDR3 for beta chain variable domain of TCR clone 270102 (TRBV28, TRBJ2-5)
CASSSGRTIQETQYF

SEQ ID NO: 540205 - protein, 14 aa, Homo sapiens
  CDR3 for alpha chain variable domain of TCR clone 270103 (TRAV17, TRAJ32)
CATDPGGATKKPIF

SEQ ID NO: 540206 - protein, 14 aa, Homo sapiens
  CDR3 for beta chain variable domain of TCR clone 270103 (TRBV2, TRBJ1-5)
CASSANRGGQPQHF

SEQ ID NO: 540207 - protein, 15 aa, Homo sapiens
  CDR3 for alpha chain variable domain of TCR clone 270104 (TRAV3, TRAJ13)
CDVRVYSGGYQKVTF

SEQ ID NO: 540208 - protein, 15 aa, Homo sapiens
  CDR3 for beta chain variable domain of TCR clone 270104 (TRBV5-7, TRBJ1-2)
CASSLVVAANYGYTF

SEQ ID NO: 540209 - protein, 17 aa, Homo sapiens
  CDR3 for alpha chain variable domain of TCR clone 270105 (TRAV23/DV6, TRAJ57)
CSASSTLSQGGFEKLVF

SEQ ID NO: 540210 - protein, 14 aa, Homo sapiens
  CDR3 for beta chain variable domain of TCR clone 270105 (TRBV25-1, TRBJ1-1)
CASTHLGGNTEAFF

SEQ ID NO: 540211 - protein, 15 aa, Homo sapiens
  CDR3 for alpha chain variable domain of TCR clone 270106 (TRAV29/DV5, TRAJ24)
CAASGATDGWGKFQF

SEQ ID NO: 540212 - protein, 20 aa, Homo sapiens
  CDR3 for beta chain variable domain of TCR clone 270106 (TRBV11-2, TRBJ2-2)
LRTRPCISVPAASLPGSCFF

SEQ ID NO: 540213 - protein, 14 aa, Homo sapiens
  CDR3 for alpha chain variable domain of TCR clone 270107 (TRAV26-1, TRAJ38)
CIADNAGNNRKLIW

SEQ ID NO: 540214 - protein, 13 aa, Homo sapiens
  CDR3 for beta chain variable domain of TCR clone 270107 (TRBV4-1, TRBJ2-7)
CASRQGQAYEQYF

SEQ ID NO: 540215 - protein, 21 aa, Homo sapiens
  CDR3 for alpha chain variable domain of TCR clone 270108 (TRAV1-2, TRAJ37)
CLLPLCCERFHGSGNTGKLTF

SEQ ID NO: 540216 - protein, 14 aa, Homo sapiens
  CDR3 for beta chain variable domain of TCR clone 270108 (TRBV2, TRBJ2-5)
CASSAVLAQENQYF

SEQ ID NO: 540217 - protein, 14 aa, Homo sapiens
  CDR3 for alpha chain variable domain of TCR clone 270109 (TRAV38-1, TRAJ45)
CAYYSGGGADGLTF

SEQ ID NO: 540218 - protein, 19 aa, Homo sapiens
  CDR3 for beta chain variable domain of TCR clone 270109 (TRBV28, TRBJ2-1)
CQTPIGRSPGLAGGNEQFF

SEQ ID NO: 540219 - protein, 16 aa, Homo sapiens
  CDR3 for alpha chain variable domain of TCR clone 270110 (TRAV12-2, TRAJ40)
CAVIRGGTSGTYTYIF

SEQ ID NO: 540220 - protein, 14 aa, Homo sapiens
  CDR3 for beta chain variable domain of TCR clone 270110 (TRBV20-1, TRBJ2-5)
CSARDGRAGETQYF

SEQ ID NO: 540221 - protein, 11 aa, Homo sapiens
  CDR3 for alpha chain variable domain of TCR clone 270111 (TRAV21, TRAJ39)
LLVNAGNMLTF

SEQ ID NO: 540222 - protein, 15 aa, Homo sapiens
  CDR3 for beta chain variable domain of TCR clone 270111 (TRBV7-8, TRBJ1-2)
CASSLVRDGGLGYTF

SEQ ID NO: 540223 - protein, 13 aa, Homo sapiens
  CDR3 for alpha chain variable domain of TCR clone 270112 (TRAV8-6, TRAJ24)
CAVSSDSWGKLQF

SEQ ID NO: 540224 - protein, 15 aa, Homo sapiens
  CDR3 for beta chain variable domain of TCR clone 270112 (TRBV20-1, TRBJ2-7)
CSARDRVSGMDEQYF

SEQ ID NO: 540225 - protein, 11 aa, Homo sapiens
  CDR3 for alpha chain variable domain of TCR clone 270113 (TRAV12-1, TRAJ40)
CGYSGTYKYIF

SEQ ID NO: 540226 - protein, 14 aa, Homo sapiens
  CDR3 for beta chain variable domain of TCR clone 270113 (TRBV4-2, TRBJ2-1)
CASGLDRAYNEQFF

SEQ ID NO: 540227 - protein, 12 aa, Homo sapiens
  CDR3 for alpha chain variable domain of TCR clone 270114 (TRAV1-2, TRAJ9)
CAGYTVGFKTIF

SEQ ID NO: 540228 - protein, 15 aa, Homo sapiens
  CDR3 for beta chain variable domain of TCR clone 270114 (TRBV11-2, TRBJ2-1)
CASSPAGQPLNEQFF

SEQ ID NO: 540229 - protein, 13 aa, Homo sapiens
  CDR3 for alpha chain variable domain of TCR clone 270115 (TRAV2, TRAJ40)
CAVVTSGTYKYIF

SEQ ID NO: 540230 - protein, 12 aa, Homo sapiens
  CDR3 for beta chain variable domain of TCR clone 270115 (TRBV11-3, TRBJ2-5)
CASSKRLETQYF

SEQ ID NO: 540231 - protein, 14 aa, Homo sapiens
  CDR3 for alpha chain variable domain of TCR clone 270116 (TRAV1-1, TRAJ23)
CAVSIYNQGGKLIF

SEQ ID NO: 540232 - protein, 15 aa, Homo sapiens
  CDR3 for beta chain variable domain of TCR clone 270116 (TRBV9, TRBJ1-6)
CASSVAGTGDSTLHF

SEQ ID NO: 540233 - protein, 14 aa, Homo sapiens
  CDR3 for alpha chain variable domain of TCR clone 270117 (TRAV8-4, TRAJ17)
CAVSGQAAGNKLTF

SEQ ID NO: 540234 - protein, 15 aa, Homo sapiens
  CDR3 for beta chain variable domain of TCR clone 270117 (TRBV7-2, TRBJ1-2)
CASSLAPDRGLGYTF

SEQ ID NO: 540235 - protein, 14 aa, Homo sapiens
  CDR3 for alpha chain variable domain of TCR clone 270118 (TRAV12-3, TRAJ15)
CAMIPPQAGTALIF

SEQ ID NO: 540236 - protein, 14 aa, Homo sapiens
  CDR3 for beta chain variable domain of TCR clone 270118 (TRBV20-1, TRBJ2-2)
CSVRRRLATGELFF

SEQ ID NO: 540237 - protein, 12 aa, Homo sapiens
  CDR3 for alpha chain variable domain of TCR clone 270119 (TRAV21, TRAJ13)
PGPSGGYQKVTF

SEQ ID NO: 540238 - protein, 15 aa, Homo sapiens
  CDR3 for beta chain variable domain of TCR clone 270119 (TRBV5-5, TRBJ2-2)
CASSRQASGAGELFF

SEQ ID NO: 540239 - protein, 14 aa, Homo sapiens
  CDR3 for alpha chain variable domain of TCR clone 270120 (TRAV29/DV5, TRAJ32)
CAAAYGGATHKLIF

SEQ ID NO: 540240 - protein, 11 aa, Homo sapiens
  CDR3 for beta chain variable domain of TCR clone 270120 (TRBV11-2, TRBJ2-2)
CASSLPGELFF

SEQ ID NO: 540241 - protein, 13 aa, Homo sapiens
  CDR3 for alpha chain variable domain of TCR clone 270121 (TRAV8-2, TRAJ15)
CVVSGPGRNFSDL

SEQ ID NO: 540242 - protein, 16 aa, Homo sapiens
  CDR3 for beta chain variable domain of TCR clone 270121 (TRBV20-1, TRBJ1-4)
CSARPYGGELNEKLFF

SEQ ID NO: 540243 - protein, 15 aa, Homo sapiens
  CDR3 for alpha chain variable domain of TCR clone 270122 (TRAV3, TRAJ3)
CAVRDMSSSAPKIIF

SEQ ID NO: 540244 - protein, 14 aa, Homo sapiens
  CDR3 for beta chain variable domain of TCR clone 270122 (TRBV19, TRBJ2-1)
CASPTFVLSGQQFF

SEQ ID NO: 540245 - protein, 13 aa, Homo sapiens
  CDR3 for alpha chain variable domain of TCR clone 270123 (TRAV12-1, TRAJ34)
CVVNQGNTDKLIF

SEQ ID NO: 540246 - protein, 15 aa, Homo sapiens
  CDR3 for beta chain variable domain of TCR clone 270123 (TRBV6-6, TRBJ2-7)
CASSYSYGGSYEQYF

SEQ ID NO: 540247 - protein, 14 aa, Homo sapiens
  CDR3 for alpha chain variable domain of TCR clone 270124 (TRAV1-2, TRAJ16)
CAVNRFSDGQKLLF

SEQ ID NO: 540248 - protein, 15 aa, Homo sapiens
  CDR3 for beta chain variable domain of TCR clone 270124 (TRBV7-3, TRBJ2-2)
CQQLKAGTLSGELFF

SEQ ID NO: 540249 - protein, 13 aa, Homo sapiens
  CDR3 for alpha chain variable domain of TCR clone 270125 (TRAV8-1, TRAJ39)
CAGLNNAGNMLTF

SEQ ID NO: 540250 - protein, 17 aa, Homo sapiens
  CDR3 for beta chain variable domain of TCR clone 270125 (TRBV19, TRBJ2-3)
CASGIEPAGGGTDTQYF

SEQ ID NO: 540251 - protein, 14 aa, Homo sapiens
  CDR3 for alpha chain variable domain of TCR clone 270126 (TRAV29/DV5, TRAJ36)
CAARRKTGANNLFF

SEQ ID NO: 540252 - protein, 15 aa, Homo sapiens
  CDR3 for beta chain variable domain of TCR clone 270126 (TRBV7-9, TRBJ1-4)
CASSRTGGFNEKLFF

SEQ ID NO: 540253 - protein, 15 aa, Homo sapiens
  CDR3 for alpha chain variable domain of TCR clone 270127 (TRAV26-1, TRAJ48)
CIARWAWFGNEKLTF

SEQ ID NO: 540254 - protein, 12 aa, Homo sapiens
  CDR3 for beta chain variable domain of TCR clone 270127 (TRBV19, TRBJ2-5)
CASSIAEETQYF

SEQ ID NO: 540255 - protein, 14 aa, Homo sapiens
  CDR3 for alpha chain variable domain of TCR clone 270128 (TRAV12-1, TRAJ12)
CVVTRMDSSYELIF

SEQ ID NO: 540256 - protein, 14 aa, Homo sapiens
  CDR3 for beta chain variable domain of TCR clone 270128 (TRBV4-1, TRBJ2-7)
CASSPVAGGDEQYF

SEQ ID NO: 540257 - protein, 12 aa, Homo sapiens
  CDR3 for alpha chain variable domain of TCR clone 270129 (TRAV13-1, TRAJ52)
HAGGTSYGKLTF

SEQ ID NO: 540258 - protein, 14 aa, Homo sapiens
  CDR3 for beta chain variable domain of TCR clone 270129 (TRBV4-1, TRBJ2-2)
CVSSQAVNTGELFF

SEQ ID NO: 540259 - protein, 19 aa, Homo sapiens
  CDR3 for alpha chain variable domain of TCR clone 270130 (TRAV29/DV5, TRAJ49)
CSVLLCSKLTVDTGNQFYF

SEQ ID NO: 540260 - protein, 17 aa, Homo sapiens
  CDR3 for beta chain variable domain of TCR clone 270130 (TRBV13, TRBJ2-3)
RASSLSRVAGGRNTQYF

SEQ ID NO: 540261 - protein, 14 aa, Homo sapiens
  CDR3 for alpha chain variable domain of TCR clone 270131 (TRAV12-3, TRAJ10)
SHLPLTGGGNKLTF

SEQ ID NO: 540262 - protein, 15 aa, Homo sapiens
  CDR3 for beta chain variable domain of TCR clone 270131 (TRBV7-9, TRBJ1-6)
CASSSRGRGNSPLHF

SEQ ID NO: 540263 - protein, 16 aa, Homo sapiens
  CDR3 for alpha chain variable domain of TCR clone 270132 (TRAV3, TRAJ21)
CAVRDIERGNFNKIYF

SEQ ID NO: 540264 - protein, 13 aa, Homo sapiens
  CDR3 for beta chain variable domain of TCR clone 270132 (TRBV27, TRBJ2-7)
CASSLTTGYEQYF

SEQ ID NO: 540265 - protein, 13 aa, Homo sapiens
  CDR3 for alpha chain variable domain of TCR clone 270133 (TRAV1-2, TRAJ9)
CAVLNTGGFKTIC

SEQ ID NO: 540266 - protein, 13 aa, Homo sapiens
  CDR3 for beta chain variable domain of TCR clone 270133 (TRBV19, TRBJ2-7)
CASRKAGGSEQYF

SEQ ID NO: 540267 - protein, 11 aa, Homo sapiens
  CDR3 for alpha chain variable domain of TCR clone 270134 (TRAV1-2, TRAJ40)
CAVPGTYKYIF

SEQ ID NO: 540268 - protein, 16 aa, Homo sapiens
  CDR3 for beta chain variable domain of TCR clone 270134 (TRBV4-2, TRBJ1-1)
CASRPLDGGGDTEAFF

SEQ ID NO: 540269 - protein, 14 aa, Homo sapiens
  CDR3 for alpha chain variable domain of TCR clone 270135 (TRAV13-1, TRAJ26)
CAANSAHYGQNFVF

SEQ ID NO: 540270 - protein, 17 aa, Homo sapiens
  CDR3 for beta chain variable domain of TCR clone 270135 (TRBV25-1, TRBJ2-5)
CASSRRGGRGGQETQYF

SEQ ID NO: 540271 - protein, 13 aa, Homo sapiens
  CDR3 for alpha chain variable domain of TCR clone 270136 (TRAV1-2, TRAJ33)
CAVSEDNNYQLIW

SEQ ID NO: 540272 - protein, 16 aa, Homo sapiens
  CDR3 for beta chain variable domain of TCR clone 270136 (TRBV4-2, TRBJ2-7)
CASSQDGVERGYEQYF

SEQ ID NO: 540273 - protein, 11 aa, Homo sapiens
  CDR3 for alpha chain variable domain of TCR clone 270137 (TRAV16, TRAJ33)
CALHSNYQLIW

SEQ ID NO: 540274 - protein, 16 aa, Homo sapiens
  CDR3 for beta chain variable domain of TCR clone 270137 (TRBV20-1, TRBJ1-4)
CSAPGQGLLTNEKLFF

SEQ ID NO: 540275 - protein, 11 aa, Homo sapiens
  CDR3 for alpha chain variable domain of TCR clone 270138 (TRAV2, TRAJ21)
CAVFNLNKFYF

SEQ ID NO: 540276 - protein, 14 aa, Homo sapiens
  CDR3 for beta chain variable domain of TCR clone 270138 (TRBV6-1, TRBJ1-3)
CASVQGGGGNTIYF

SEQ ID NO: 540277 - protein, 13 aa, Homo sapiens
  CDR3 for alpha chain variable domain of TCR clone 270139 (TRAV8-2, TRAJ49)
CVVSPSTGNQFLF

SEQ ID NO: 540278 - protein, 14 aa, Homo sapiens
  CDR3 for beta chain variable domain of TCR clone 270139 (TRBV11-2, TRBJ2-7)
CASSRSGGAGEQYF

SEQ ID NO: 540279 - protein, 13 aa, Homo sapiens
  CDR3 for alpha chain variable domain of TCR clone 270140 (TRAV12-3, TRAJ48)
CAMSLVGNEKLTF

SEQ ID NO: 540280 - protein, 11 aa, Homo sapiens
  CDR3 for beta chain variable domain of TCR clone 270140 (TRBV7-2, TRBJ2-7)
CASSSGLWEYF

SEQ ID NO: 540281 - protein, 13 aa, Homo sapiens
  CDR3 for alpha chain variable domain of TCR clone 270141 (TRAV21, TRAJ27)
CAACPGNAGKSTF

SEQ ID NO: 540282 - protein, 20 aa, Homo sapiens
  CDR3 for beta chain variable domain of TCR clone 270141 (TRBV4-2, TRBJ2-7)
CASSQASGGNLRAVLRAGHQ

SEQ ID NO: 540283 - protein, 13 aa, Homo sapiens
  CDR3 for alpha chain variable domain of TCR clone 270142 (TRAV2, TRAJ40)
CAVVTSGTYKYIF

SEQ ID NO: 540284 - protein, 14 aa, Homo sapiens
  CDR3 for beta chain variable domain of TCR clone 270142 (TRBV7-9, TRBJ2-1)
CACSSMVGFGEQFF

SEQ ID NO: 540285 - protein, 17 aa, Homo sapiens
  CDR3 for alpha chain variable domain of TCR clone 270143 (TRAV2, TRAJ22)
ILQVREADAAEQRQLTF

SEQ ID NO: 540286 - protein, 16 aa, Homo sapiens
  CDR3 for beta chain variable domain of TCR clone 270143 (TRBV2, TRBJ2-5)
CASSATQGVGEETQSF

SEQ ID NO: 540287 - protein, 13 aa, Homo sapiens
  CDR3 for alpha chain variable domain of TCR clone 270144 (TRAV2, TRAJ15)
CAVASQAGTALIF

SEQ ID NO: 540288 - protein, 12 aa, Homo sapiens
  CDR3 for beta chain variable domain of TCR clone 270144 (TRBV6-3, TRBJ2-7)
CASSRQGYEQYF

SEQ ID NO: 540289 - protein, 16 aa, Homo sapiens
  CDR3 for alpha chain variable domain of TCR clone 270145 (TRAV8-2, TRAJ7)
CVVSEGPYYGNNRLAF

SEQ ID NO: 540290 - protein, 16 aa, Homo sapiens
  CDR3 for beta chain variable domain of TCR clone 270145 (TRBV20-1, TRBJ1-4)
CSAPGQGLLTNENLFF

SEQ ID NO: 540291 - protein, 13 aa, Homo sapiens
  CDR3 for alpha chain variable domain of TCR clone 270146 (TRAV13-1, TRAJ39)
CAASIWAGNMLTF

SEQ ID NO: 540292 - protein, 13 aa, Homo sapiens
  CDR3 for beta chain variable domain of TCR clone 270146 (TRBV11-2, TRBJ1-3)
CARSLEPVNTIYF

SEQ ID NO: 540293 - protein, 17 aa, Homo sapiens
  CDR3 for alpha chain variable domain of TCR clone 270147 (TRAV3, TRAJ42)
CAVRDRDYGGSQGNHIF

SEQ ID NO: 540294 - protein, 13 aa, Homo sapiens
  CDR3 for beta chain variable domain of TCR clone 270147 (TRBV20-1, TRBJ2-5)
CSARRGTGATQYF

SEQ ID NO: 540295 - protein, 10 aa, Homo sapiens
  CDR3 for alpha chain variable domain of TCR clone 270148 (TRAV21, TRAJ34)
CAVTNTDKLI

SEQ ID NO: 540296 - protein, 12 aa, Homo sapiens
  CDR3 for beta chain variable domain of TCR clone 270148 (TRBV7-9, TRBJ1-1)
CASSLVRGEAFF

SEQ ID NO: 540297 - protein, 15 aa, Homo sapiens
  CDR3 for alpha chain variable domain of TCR clone 270149 (TRAV12-1, TRAJ9)
CVVSFGATGGFTTIF

SEQ ID NO: 540298 - protein, 13 aa, Homo sapiens
  CDR3 for beta chain variable domain of TCR clone 270149 (TRBV2, TRBJ1-4)
CASSERAGEKLFF

SEQ ID NO: 540299 - protein, 17 aa, Homo sapiens
  CDR3 for alpha chain variable domain of TCR clone 270150 (TRAV26-2, TRAJ42)
CILRDVGYGGSQGNLIF

SEQ ID NO: 540300 - protein, 13 aa, Homo sapiens
  CDR3 for beta chain variable domain of TCR clone 270150 (TRBV18, TRBJ1-1)
CASSPETKPEAFF

SEQ ID NO: 540301 - protein, 23 aa, Homo sapiens
  CDR3 for alpha chain variable domain of TCR clone 270151 (TRAV26-1, TRAJ38)
CIADNAGNNHIQNPDPAVYQLRD

SEQ ID NO: 540302 - protein, 16 aa, Homo sapiens
  CDR3 for beta chain variable domain of TCR clone 270151 (TRBV7-9, TRBJ1-2)
CASSLGFSSGEDGYSF

SEQ ID NO: 540303 - protein, 16 aa, Homo sapiens
  CDR3 for alpha chain variable domain of TCR clone 270152 (TRAV20, TRAJ22)
CAVQASSSGSARQLTF

SEQ ID NO: 540304 - protein, 13 aa, Homo sapiens
  CDR3 for beta chain variable domain of TCR clone 270152 (TRBV7-2, TRBJ2-5)
CSSSQTSVETQYF

SEQ ID NO: 540305 - protein, 11 aa, Homo sapiens
  CDR3 for alpha chain variable domain of TCR clone 270153 (TRAV13-2, TRAJ43)
CAERGNNDMRF

SEQ ID NO: 540306 - protein, 12 aa, Homo sapiens
  CDR3 for beta chain variable domain of TCR clone 270153 (TRBV7-9, TRBJ2-2)
CASSLDTGELFF

SEQ ID NO: 540307 - protein, 14 aa, Homo sapiens
  CDR3 for alpha chain variable domain of TCR clone 270154 (TRAV12-2, TRAJ13)
CAVKKTGGYQKVTF

SEQ ID NO: 540308 - protein, 13 aa, Homo sapiens
  CDR3 for beta chain variable domain of TCR clone 270154 (TRBV11-2, TRBJ2-1)
CASSLGLAGGRFF

SEQ ID NO: 540309 - protein, 10 aa, Homo sapiens
  CDR3 for alpha chain variable domain of TCR clone 270155 (TRAV8-3, TRAJ28)
CAVGAVGSYR

SEQ ID NO: 540310 - protein, 14 aa, Homo sapiens
  CDR3 for beta chain variable domain of TCR clone 270155 (TRBV7-2, TRBJ2-7)
CASRSQGAAYEQYF

SEQ ID NO: 540311 - protein, 13 aa, Homo sapiens
  CDR3 for alpha chain variable domain of TCR clone 270156 (TRAV27, TRAJ57)
CRSAQGGSENLVF

SEQ ID NO: 540312 - protein, 11 aa, Homo sapiens
  CDR3 for beta chain variable domain of TCR clone 270156 (TRBV11-2, TRBJ1-1)
CASSINTEAFF

SEQ ID NO: 540313 - protein, 14 aa, Homo sapiens
  CDR3 for alpha chain variable domain of TCR clone 270157 (TRAV12-2, TRAJ40)
CAAKIPSGTYKYIF

SEQ ID NO: 540314 - protein, 17 aa, Homo sapiens
  CDR3 for beta chain variable domain of TCR clone 270157 (TRBV13, TRBJ2-3)
CASSLARVAGGRNTQYF

SEQ ID NO: 540315 - protein, 14 aa, Homo sapiens
  CDR3 for alpha chain variable domain of TCR clone 270158 (TRAV9-2, TRAJ22)
CALTGASSARQLTF

SEQ ID NO: 540316 - protein, 16 aa, Homo sapiens
  CDR3 for beta chain variable domain of TCR clone 270158 (TRBV6-1, TRBJ2-5)
CASSETLDRGAETQYF

SEQ ID NO: 540317 - protein, 15 aa, Homo sapiens
  CDR3 for alpha chain variable domain of TCR clone 270159 (TRAV8-6, TRAJ23)
CAVREFYNQGGKRIF

SEQ ID NO: 540318 - protein, 15 aa, Homo sapiens
  CDR3 for beta chain variable domain of TCR clone 270159 (TRBV20-1, TRBJ2-1)
CSAITGTSGSNEQFF

SEQ ID NO: 540319 - protein, 14 aa, Homo sapiens
  CDR3 for alpha chain variable domain of TCR clone 270160 (TRAV26-1, TRAJ38)
CIADNAGNNCKLIW

SEQ ID NO: 540320 - protein, 13 aa, Homo sapiens
  CDR3 for beta chain variable domain of TCR clone 270160 (TRBV20-1, TRBJ1-1)
CSARGGGNTDAFF

SEQ ID NO: 540321 - protein, 13 aa, Homo sapiens
  CDR3 for alpha chain variable domain of TCR clone 270161 (TRAV8-3, TRAJ36)
FSVGATGANNLFF

SEQ ID NO: 540322 - protein, 15 aa, Homo sapiens
  CDR3 for beta chain variable domain of TCR clone 270161 (TRBV7-2, TRBJ1-2)
CASSPRAGWNYGYTF

SEQ ID NO: 540323 - protein, 15 aa, Homo sapiens
  CDR3 for alpha chain variable domain of TCR clone 270162 (TRAV35, TRAJ58)
CAGRRQETSGSRLTF

SEQ ID NO: 540324 - protein, 15 aa, Homo sapiens
  CDR3 for beta chain variable domain of TCR clone 270162 (TRBV7-6, TRBJ2-1)
GASSSLAGEGNEQFF

SEQ ID NO: 540325 - protein, 14 aa, Homo sapiens
  CDR3 for alpha chain variable domain of TCR clone 270163 (TRAV3, TRAJ6)
CAVRDWGGSYIPTF

SEQ ID NO: 540326 - protein, 15 aa, Homo sapiens
  CDR3 for beta chain variable domain of TCR clone 270163 (TRBV5-1, TRBJ2-1)
CASSPPRAPYNEQSF

SEQ ID NO: 540327 - protein, 21 aa, Homo sapiens
  CDR3 for alpha chain variable domain of TCR clone 270164 (TRAV21, TRAJ37)
CAVRTAGSSNRQTNLWARDNF

SEQ ID NO: 540328 - protein, 13 aa, Homo sapiens
  CDR3 for beta chain variable domain of TCR clone 270164 (TRBV7-9, TRBJ2-5)
CASLPSGRETQYF

SEQ ID NO: 540329 - protein, 13 aa, Homo sapiens
  CDR3 for alpha chain variable domain of TCR clone 270165 (TRAV8-3, TRAJ36)
CAVGATGANNLFF

SEQ ID NO: 540330 - protein, 12 aa, Homo sapiens
  CDR3 for beta chain variable domain of TCR clone 270165 (TRBV5-7, TRBJ1-1)
CASSLGRGKAFF

SEQ ID NO: 540331 - protein, 13 aa, Homo sapiens
  CDR3 for alpha chain variable domain of TCR clone 270166 (TRAV12-1, TRAJ22)
SVVYSGSARQLTF

SEQ ID NO: 540332 - protein, 10 aa, Homo sapiens
  CDR3 for beta chain variable domain of TCR clone 270166 (TRBV6-3, TRBJ2-2)
CASRDGELFF

SEQ ID NO: 540333 - protein, 15 aa, Homo sapiens
  CDR3 for alpha chain variable domain of TCR clone 270167 (TRAV3, TRAJ12)
CAVRDIRDSSYKLIF

SEQ ID NO: 540334 - protein, 12 aa, Homo sapiens
  CDR3 for beta chain variable domain of TCR clone 270167 (TRBV11-2, TRBJ2-2)
CASSLGGGELFF

SEQ ID NO: 540335 - protein, 13 aa, Homo sapiens
  CDR3 for alpha chain variable domain of TCR clone 270168 (TRAV12-2, TRAJ42)
CAVKRGSQGNLIF

SEQ ID NO: 540336 - protein, 12 aa, Homo sapiens
  CDR3 for beta chain variable domain of TCR clone 270168 (TRBV5-7, TRBJ1-2)
CASSLVQNGYTF

SEQ ID NO: 540337 - protein, 14 aa, Homo sapiens
  CDR3 for alpha chain variable domain of TCR clone 270169 (TRAV1-2, TRAJ8)
CAVREDTGFQKLVF

SEQ ID NO: 540338 - protein, 14 aa, Homo sapiens
  CDR3 for beta chain variable domain of TCR clone 270169 (TRBV7-9, TRBJ1-1)
CASPPLQSYTEAFF

SEQ ID NO: 540339 - protein, 12 aa, Homo sapiens
  CDR3 for alpha chain variable domain of TCR clone 270170 (TRAV16, TRAJ26)
CALRSYGQNLVF

SEQ ID NO: 540340 - protein, 14 aa, Homo sapiens
  CDR3 for beta chain variable domain of TCR clone 270170 (TRBV10-3, TRBJ2-1)
CAISSDLAYNEQFF

SEQ ID NO: 540341 - protein, 15 aa, Homo sapiens
  CDR3 for alpha chain variable domain of TCR clone 270171 (TRAV2, TRAJ9)
CAVEDRCTGGFKTIF

SEQ ID NO: 540342 - protein, 16 aa, Homo sapiens
  CDR3 for beta chain variable domain of TCR clone 270171 (TRBV12-5, TRBJ2-5)
CASGPRTSGNQETQYF

SEQ ID NO: 540343 - protein, 15 aa, Homo sapiens
  CDR3 for alpha chain variable domain of TCR clone 270172 (TRAV23/DV6, TRAJ18)
CAARYRGSTLVRLNF

SEQ ID NO: 540344 - protein, 13 aa, Homo sapiens
  CDR3 for beta chain variable domain of TCR clone 270172 (TRBV7-2, TRBJ2-7)
CASSSPSGSEQYF

SEQ ID NO: 540345 - protein, 15 aa, Homo sapiens
  CDR3 for alpha chain variable domain of TCR clone 270173 (TRAV17, TRAJ45)
CATAYSGGGADGLTF

SEQ ID NO: 540346 - protein, 11 aa, Homo sapiens
  CDR3 for beta chain variable domain of TCR clone 270173 (TRBV7-8, TRBJ2-7)
CASRLSLEQYF

SEQ ID NO: 540347 - protein, 15 aa, Homo sapiens
  CDR3 for alpha chain variable domain of TCR clone 270174 (TRAV3, TRAJ5)
CAARDRNTGRRALTF

SEQ ID NO: 540348 - protein, 15 aa, Homo sapiens
  CDR3 for beta chain variable domain of TCR clone 270174 (TRBV7-8, TRBJ2-1)
CASSLADSVYNEQFF

SEQ ID NO: 540349 - protein, 18 aa, Homo sapiens
  CDR3 for alpha chain variable domain of TCR clone 270175 (TRAV13-1, TRAJ52)
CAASKRSAGGTSYGKLTF

SEQ ID NO: 540350 - protein, 15 aa, Homo sapiens
  CDR3 for beta chain variable domain of TCR clone 270175 (TRBV7-2, TRBJ1-2)
CASSPRAVWNYGYTF

SEQ ID NO: 540351 - protein, 14 aa, Homo sapiens
  CDR3 for alpha chain variable domain of TCR clone 270176 (TRAV26-1, TRAJ39)
CIVRGSRAGNMLSF

SEQ ID NO: 540352 - protein, 13 aa, Homo sapiens
  CDR3 for beta chain variable domain of TCR clone 270176 (TRBV7-9, TRBJ1-2)
CASSLKQNYGYTF

SEQ ID NO: 540353 - protein, 14 aa, Homo sapiens
  CDR3 for alpha chain variable domain of TCR clone 270177 (TRAV38-2/DV8, TRAJ42)
GAYPEGGSQGNLIF

SEQ ID NO: 540354 - protein, 15 aa, Homo sapiens
  CDR3 for beta chain variable domain of TCR clone 270177 (TRBV19, TRBJ2-1)
CASSTGTSSYNEQFF

SEQ ID NO: 540355 - protein, 12 aa, Homo sapiens
  CDR3 for alpha chain variable domain of TCR clone 270178 (TRAV17, TRAJ30)
CVPERRDDKILF

SEQ ID NO: 540356 - protein, 14 aa, Homo sapiens
  CDR3 for beta chain variable domain of TCR clone 270178 (TRBV7-7, TRBJ2-2)
CASSRDRSTGELFF

SEQ ID NO: 540357 - protein, 11 aa, Homo sapiens
  CDR3 for alpha chain variable domain of TCR clone 270179 (TRAV13-2, TRAJ20)
CADSNDYKLSF

SEQ ID NO: 540358 - protein, 17 aa, Homo sapiens
  CDR3 for beta chain variable domain of TCR clone 270179 (TRBV4-1, TRBJ1-4)
CASSDTGGTMKNCFLAV

SEQ ID NO: 540359 - protein, 13 aa, Homo sapiens
  CDR3 for alpha chain variable domain of TCR clone 270180 (TRAV13-1, TRAJ39)
CSKYSNAGNMLTF

SEQ ID NO: 540360 - protein, 18 aa, Homo sapiens
  CDR3 for beta chain variable domain of TCR clone 270180 (TRBV10-2, TRBJ2-2)
CISAPEGHRQADAGELFF

SEQ ID NO: 540361 - protein, 15 aa, Homo sapiens
  CDR3 for alpha chain variable domain of TCR clone 270181 (TRAV8-2, TRAJ8)
WVVTDFPTGFQKLVF

SEQ ID NO: 540362 - protein, 16 aa, Homo sapiens
  CDR3 for beta chain variable domain of TCR clone 270181 (TRBV20-1, TRBJ2-4)
CSARAILAGQGDIQYF

SEQ ID NO: 540363 - protein, 16 aa, Homo sapiens
  CDR3 for alpha chain variable domain of TCR clone 270182 (TRAV30, TRAJ24)
CGTEIVDADSWGKFPF

SEQ ID NO: 540364 - protein, 14 aa, Homo sapiens
  CDR3 for beta chain variable domain of TCR clone 270182 (TRBV9, TRBJ2-7)
CASSVGVGSYEQYF

SEQ ID NO: 540365 - protein, 15 aa, Homo sapiens
  CDR3 for alpha chain variable domain of TCR clone 270183 (TRAV17, TRAJ57)
CATGPSQGGSERLVF

SEQ ID NO: 540366 - protein, 15 aa, Homo sapiens
  CDR3 for beta chain variable domain of TCR clone 270183 (TRBV25-1, TRBJ1-4)
CASSPGHSTNEKLFC

SEQ ID NO: 540367 - protein, 12 aa, Homo sapiens
  CDR3 for alpha chain variable domain of TCR clone 270184 (TRAV12-3, TRAJ17)
CAMTLTGNKLTF

SEQ ID NO: 540368 - protein, 15 aa, Homo sapiens
  CDR3 for beta chain variable domain of TCR clone 270184 (TRBV7-9, TRBJ2-7)
CASTPGVAGLYEQYF

SEQ ID NO: 540369 - protein, 12 aa, Homo sapiens
  CDR3 for alpha chain variable domain of TCR clone 270185 (TRAV35, TRAJ49)
CAGWNTGNQFYF

SEQ ID NO: 540370 - protein, 16 aa, Homo sapiens
  CDR3 for beta chain variable domain of TCR clone 270185 (TRBV5-1, TRBJ2-2)
CASSLCDTTNTGELFF

SEQ ID NO: 540371 - protein, 12 aa, Homo sapiens
  CDR3 for alpha chain variable domain of TCR clone 270186 (TRAV36/DV7, TRAJ50)
CAVEPENLLRQG

SEQ ID NO: 540372 - protein, 16 aa, Homo sapiens
  CDR3 for beta chain variable domain of TCR clone 270186 (TRBV11-2, TRBJ2-7)
CASSPTTGGVSYEQYF

SEQ ID NO: 540373 - protein, 14 aa, Homo sapiens
  CDR3 for alpha chain variable domain of TCR clone 270187 (TRAV35, TRAJ33)
CAGSSQDSNYQLIW

SEQ ID NO: 540374 - protein, 15 aa, Homo sapiens
  CDR3 for beta chain variable domain of TCR clone 270187 (TRBV20-1, TRBJ2-7)
CSAESWTSEAYELYF

SEQ ID NO: 540375 - protein, 15 aa, Homo sapiens
  CDR3 for alpha chain variable domain of TCR clone 270188 (TRAV13-1, TRAJ16)
CAARYQMARSCSLQG

SEQ ID NO: 540376 - protein, 13 aa, Homo sapiens
  CDR3 for beta chain variable domain of TCR clone 270188 (TRBV4-1, TRBJ2-1)
CASSLAGGDEQFF

SEQ ID NO: 540377 - protein, 16 aa, Homo sapiens
  CDR3 for alpha chain variable domain of TCR clone 270189 (TRAV26-1, TRAJ52)
CIVSNAGGTSYGKLTF

SEQ ID NO: 540378 - protein, 14 aa, Homo sapiens
  CDR3 for beta chain variable domain of TCR clone 270189 (TRBV7-3, TRBJ2-7)
CASSLKGASYEQYF

SEQ ID NO: 540379 - protein, 17 aa, Homo sapiens
  CDR3 for alpha chain variable domain of TCR clone 270190 (TRAV13-1, TRAJ28)
CAASPPYSGAGSYQLTF

SEQ ID NO: 540380 - protein, 14 aa, Homo sapiens
  CDR3 for beta chain variable domain of TCR clone 270190 (TRBV7-9, TRBJ2-1)
CASSPRDSLYEQFF

SEQ ID NO: 540381 - protein, 16 aa, Homo sapiens
  CDR3 for alpha chain variable domain of TCR clone 270191 (TRAV17, TRAJ22)
CATGTISSGSARQLPF

SEQ ID NO: 540382 - protein, 13 aa, Homo sapiens
  CDR3 for beta chain variable domain of TCR clone 270191 (TRBV11-2, TRBJ2-1)
CASSLGLAGGLFF

SEQ ID NO: 540383 - protein, 19 aa, Homo sapiens
  CDR3 for alpha chain variable domain of TCR clone 270192 (TRAV39, TRAJ43)
PCMTSLPPTSVPWANDMRF

SEQ ID NO: 540384 - protein, 15 aa, Homo sapiens
  CDR3 for beta chain variable domain of TCR clone 270192 (TRBV12-4, TRBJ2-5)
CASSPPTGRQETQYF

SEQ ID NO: 540385 - protein, 14 aa, Homo sapiens
  CDR3 for alpha chain variable domain of TCR clone 270193 (TRAV9-2, TRAJ39)
CALYIYNAGNMLTF

SEQ ID NO: 540386 - protein, 16 aa, Homo sapiens
  CDR3 for beta chain variable domain of TCR clone 270193 (TRBV20-1, TRBJ1-4)
CSATGQGLLTNEKLFF

SEQ ID NO: 540387 - protein, 15 aa, Homo sapiens
  CDR3 for alpha chain variable domain of TCR clone 270194 (TRAV8-3, TRAJ11)
CAVGLWNSGYSTLTF

SEQ ID NO: 540388 - protein, 16 aa, Homo sapiens
  CDR3 for beta chain variable domain of TCR clone 270194 (TRBV7-9, TRBJ1-2)
CASSLGFSSGEDGYTF

SEQ ID NO: 540389 - protein, 12 aa, Homo sapiens
  CDR3 for alpha chain variable domain of TCR clone 270195 (TRAV12-2, TRAJ10)
WGVTGGGNKLTF

SEQ ID NO: 540390 - protein, 16 aa, Homo sapiens
  CDR3 for beta chain variable domain of TCR clone 270195 (TRBV29-1, TRBJ1-2)
CSVEANRDIANYGYTF

SEQ ID NO: 540391 - protein, 14 aa, Homo sapiens
  CDR3 for alpha chain variable domain of TCR clone 270196 (TRAV13-1, TRAJ44)
YAAKATGTASQLTF

SEQ ID NO: 540392 - protein, 14 aa, Homo sapiens
  CDR3 for beta chain variable domain of TCR clone 270196 (TRBV7-8, TRBJ2-3)
CASSLEAGTDTQYF

SEQ ID NO: 540393 - protein, 14 aa, Homo sapiens
  CDR3 for alpha chain variable domain of TCR clone 270197 (TRAV36/DV7, TRAJ40)
CAVETTSGTYKYIF

SEQ ID NO: 540394 - protein, 15 aa, Homo sapiens
  CDR3 for beta chain variable domain of TCR clone 270197 (TRBV3-1, TRBJ2-7)
CASSQVRQGAYEQYF

SEQ ID NO: 540395 - protein, 13 aa, Homo sapiens
  CDR3 for alpha chain variable domain of TCR clone 270198 (TRAV2, TRAJ11)
CAVEEIGYSTLTF

SEQ ID NO: 540396 - protein, 13 aa, Homo sapiens
  CDR3 for beta chain variable domain of TCR clone 270198 (TRBV7-9, TRBJ1-2)
CASSLKQNYGYTF

SEQ ID NO: 540397 - protein, 16 aa, Homo sapiens
  CDR3 for alpha chain variable domain of TCR clone 270199 (TRAV20, TRAJ53)
CAVQAESGGSNYKLTF

SEQ ID NO: 540398 - protein, 15 aa, Homo sapiens
  CDR3 for beta chain variable domain of TCR clone 270199 (TRBV6-3, TRBJ2-7)
CASSSPGTVFYEQYF

SEQ ID NO: 540399 - protein, 15 aa, Homo sapiens
  CDR3 for alpha chain variable domain of TCR clone 270200 (TRAV16, TRAJ17)
CALSQIKAAGNKLTF

SEQ ID NO: 540400 - protein, 14 aa, Homo sapiens
  CDR3 for beta chain variable domain of TCR clone 270200 (TRBV18, TRBJ2-5)
CASSPGVSQETQYF

SEQ ID NO: 540401 - protein, 15 aa, Homo sapiens
  CDR3 for alpha chain variable domain of TCR clone 270201 (TRAV26-1, TRAJ39)
CIVRVASNSGNMLTF

SEQ ID NO: 540402 - protein, 14 aa, Homo sapiens
  CDR3 for beta chain variable domain of TCR clone 270201 (TRBV7-6, TRBJ2-3)
CASSVAGGTDTQYF

SEQ ID NO: 540403 - protein, 12 aa, Homo sapiens
  CDR3 for alpha chain variable domain of TCR clone 270202 (TRAV13-1, TRAJ20)
CAASRGDYKLSF

SEQ ID NO: 540404 - protein, 16 aa, Homo sapiens
  CDR3 for beta chain variable domain of TCR clone 270202 (TRBV19, TRBJ2-1)
CTSSKAGPSSYNEQFF

SEQ ID NO: 540405 - protein, 12 aa, Homo sapiens
  CDR3 for alpha chain variable domain of TCR clone 270203 (TRAV35, TRAJ49)
CAGWNTGNQFYF

SEQ ID NO: 540406 - protein, 16 aa, Homo sapiens
  CDR3 for beta chain variable domain of TCR clone 270203 (TRBV5-1, TRBJ2-2)
CASSLWGTTNTGELFF

SEQ ID NO: 540407 - protein, 15 aa, Homo sapiens
  CDR3 for alpha chain variable domain of TCR clone 270204 (TRAV13-1, TRAJ5)
CAVYIRDTGRRALTF

SEQ ID NO: 540408 - protein, 16 aa, Homo sapiens
  CDR3 for beta chain variable domain of TCR clone 270204 (TRBV12-4, TRBJ2-1)
CASTKQGMDRSNEQFF

SEQ ID NO: 540409 - protein, 15 aa, Homo sapiens
  CDR3 for alpha chain variable domain of TCR clone 270205 (TRAV20, TRAJ43)
CAVQAGKSSNNDMRF

SEQ ID NO: 540410 - protein, 15 aa, Homo sapiens
  CDR3 for beta chain variable domain of TCR clone 270205 (TRBV19, TRBJ1-5)
CASSIVWADNQPQHF

SEQ ID NO: 540411 - protein, 14 aa, Homo sapiens
  CDR3 for alpha chain variable domain of TCR clone 270206 (TRAV12-2, TRAJ17)
CAVLFKAAGNKLTF

SEQ ID NO: 540412 - protein, 14 aa, Homo sapiens
  CDR3 for beta chain variable domain of TCR clone 270206 (TRBV6-6, TRBJ2-7)
CASSDSGAGYEQYF

SEQ ID NO: 540413 - protein, 14 aa, Homo sapiens
  CDR3 for alpha chain variable domain of TCR clone 270207 (TRAV1-2, TRAJ8)
CAVREDTGFQKLVF

SEQ ID NO: 540414 - protein, 16 aa, Homo sapiens
  CDR3 for beta chain variable domain of TCR clone 270207 (TRBV3-1, TRBJ1-2)
CASSQGQGVQRDGYTF

SEQ ID NO: 540415 - protein, 16 aa, Homo sapiens
  CDR3 for alpha chain variable domain of TCR clone 270208 (TRAV27, TRAJ13)
CAGAKSDSGGYQEVTF

SEQ ID NO: 540416 - protein, 13 aa, Homo sapiens
  CDR3 for beta chain variable domain of TCR clone 270208 (TRBV2, TRBJ1-1)
CASSVLMNTEAFF

SEQ ID NO: 540417 - protein, 15 aa, Homo sapiens
  CDR3 for alpha chain variable domain of TCR clone 270209 (TRAV4, TRAJ28)
CLVEGSGAGSYHLTF

SEQ ID NO: 540418 - protein, 15 aa, Homo sapiens
  CDR3 for beta chain variable domain of TCR clone 270209 (TRBV9, TRBJ2-3)
CASSVRGLAVDTQYF

SEQ ID NO: 540419 - protein, 16 aa, Homo sapiens
  CDR3 for alpha chain variable domain of TCR clone 270210 (TRAV14/DV4, TRAJ54)
CAMREGRIQGAQKLVF

SEQ ID NO: 540420 - protein, 13 aa, Homo sapiens
  CDR3 for beta chain variable domain of TCR clone 270210 (TRBV4-2, TRBJ1-1)
CASSQAGNTETFF

SEQ ID NO: 540421 - protein, 14 aa, Homo sapiens
  CDR3 for alpha chain variable domain of TCR clone 270211 (TRAV1-2, TRAJ8)
CAVREDTGFQKLVF

SEQ ID NO: 540422 - protein, 14 aa, Homo sapiens
  CDR3 for beta chain variable domain of TCR clone 270211 (TRBV7-3, TRBJ2-1)
CASSLTGLNNEQFF

SEQ ID NO: 540423 - protein, 14 aa, Homo sapiens
  CDR3 for alpha chain variable domain of TCR clone 270212 (TRAV21, TRAJ38)
CAVMGAGNNRKRIW

SEQ ID NO: 540424 - protein, 13 aa, Homo sapiens
  CDR3 for beta chain variable domain of TCR clone 270212 (TRBV7-3, TRBJ2-5)
CASSIGFFETQYL

SEQ ID NO: 540425 - protein, 16 aa, Homo sapiens
  CDR3 for alpha chain variable domain of TCR clone 270213 (TRAV12-1, TRAJ12)
CVVNTLLMDSSYKLIF

SEQ ID NO: 540426 - protein, 14 aa, Homo sapiens
  CDR3 for beta chain variable domain of TCR clone 270213 (TRBV20-1, TRBJ2-5)
CSALVPGYQETQYF

SEQ ID NO: 540427 - protein, 11 aa, Homo sapiens
  CDR3 for alpha chain variable domain of TCR clone 270214 (TRAV12-1, TRAJ21)
CVVYNFNKFYF

SEQ ID NO: 540428 - protein, 16 aa, Homo sapiens
  CDR3 for beta chain variable domain of TCR clone 270214 (TRBV6-5, TRBJ2-7)
CASSCFRVGISDEQYF

SEQ ID NO: 540429 - protein, 17 aa, Homo sapiens
  CDR3 for alpha chain variable domain of TCR clone 270215 (TRAV3, TRAJ6)
GAVRDGPRAGGSSIPNF

SEQ ID NO: 540430 - protein, 14 aa, Homo sapiens
  CDR3 for beta chain variable domain of TCR clone 270215 (TRBV7-2, TRBJ2-7)
CASSPKTSFYEQYF

SEQ ID NO: 540431 - protein, 11 aa, Homo sapiens
  CDR3 for alpha chain variable domain of TCR clone 270216 (TRAV13-1, TRAJ20)
CSPRGLYKLSF

SEQ ID NO: 540432 - protein, 14 aa, Homo sapiens
  CDR3 for beta chain variable domain of TCR clone 270216 (TRBV28, TRBJ2-5)
CASTGAGGVETQYF

SEQ ID NO: 540433 - protein, 14 aa, Homo sapiens
  CDR3 for alpha chain variable domain of TCR clone 270217 (TRAV1-2, TRAJ8)
CAVREDTGFQKLVF

SEQ ID NO: 540434 - protein, 14 aa, Homo sapiens
  CDR3 for beta chain variable domain of TCR clone 270217 (TRBV5-1, TRBJ2-7)
CASRWDWQFHEQYF

SEQ ID NO: 540435 - protein, 14 aa, Homo sapiens
  CDR3 for alpha chain variable domain of TCR clone 270218 (TRAV13-1, TRAJ35)
CAASKGGFGNVLHC

SEQ ID NO: 540436 - protein, 12 aa, Homo sapiens
  CDR3 for beta chain variable domain of TCR clone 270218 (TRBV7-3, TRBJ2-5)
CASSSPGGTQYF

SEQ ID NO: 540437 - protein, 11 aa, Homo sapiens
  CDR3 for alpha chain variable domain of TCR clone 270219 (TRAV4, TRAJ31)
CLVGENARLMF

SEQ ID NO: 540438 - protein, 16 aa, Homo sapiens
  CDR3 for beta chain variable domain of TCR clone 270219 (TRBV7-2, TRBJ2-5)
CASSSKWLSGQETQYF

SEQ ID NO: 540439 - protein, 17 aa, Homo sapiens
  CDR3 for alpha chain variable domain of TCR clone 270220 (TRAV4, TRAJ13)
GLVGVQGSSGGYQKVTF

SEQ ID NO: 540440 - protein, 18 aa, Homo sapiens
  CDR3 for beta chain variable domain of TCR clone 270220 (TRBV15, TRBJ2-3)
CATSRDGARSWDTDTQYF

SEQ ID NO: 540441 - protein, 16 aa, Homo sapiens
  CDR3 for alpha chain variable domain of TCR clone 270221 (TRAV3, TRAJ37)
CAVRGKGSGTTGKLLF

SEQ ID NO: 540442 - protein, 12 aa, Homo sapiens
  CDR3 for beta chain variable domain of TCR clone 270221 (TRBV11-2, TRBJ2-2)
CASSLGGGELFF

SEQ ID NO: 540443 - protein, 13 aa, Homo sapiens
  CDR3 for alpha chain variable domain of TCR clone 270222 (TRAV16, TRAJ10)
CSLLTGGGNKLTF

SEQ ID NO: 540444 - protein, 12 aa, Homo sapiens
  CDR3 for beta chain variable domain of TCR clone 270222 (TRBV28, TRBJ2-7)
CASTGNHYEQYF

SEQ ID NO: 540445 - protein, 12 aa, Homo sapiens
  CDR3 for alpha chain variable domain of TCR clone 270223 (TRAV8-6, TRAJ15)
CAVSPAGTALIF

SEQ ID NO: 540446 - protein, 14 aa, Homo sapiens
  CDR3 for beta chain variable domain of TCR clone 270223 (TRBV12-4, TRBJ2-7)
CASSLTGRAYEQYF

SEQ ID NO: 540447 - protein, 16 aa, Homo sapiens
  CDR3 for alpha chain variable domain of TCR clone 270224 (TRAV30, TRAJ24)
CGTEIVDADSWGKFQC

SEQ ID NO: 540448 - protein, 14 aa, Homo sapiens
  CDR3 for beta chain variable domain of TCR clone 270224 (TRBV7-8, TRBJ2-3)
CASSLEAGTDTQYF

SEQ ID NO: 540449 - protein, 10 aa, Homo sapiens
  CDR3 for alpha chain variable domain of TCR clone 270225 (TRAV5, TRAJ34)
CAEDTDKLIF

SEQ ID NO: 540450 - protein, 16 aa, Homo sapiens
  CDR3 for beta chain variable domain of TCR clone 270225 (TRBV28, TRBJ2-1)
CASSSPEYPRDNEQFF

SEQ ID NO: 540451 - protein, 18 aa, Homo sapiens
  CDR3 for alpha chain variable domain of TCR clone 270226 (TRAV26-2, TRAJ45)
CILRLWGYSGGGADGLTF

SEQ ID NO: 540452 - protein, 15 aa, Homo sapiens
  CDR3 for beta chain variable domain of TCR clone 270226 (TRBV6-3, TRBJ2-7)
CASSSPGTVFYEQYF

SEQ ID NO: 540453 - protein, 13 aa, Homo sapiens
  CDR3 for alpha chain variable domain of TCR clone 270227 (TRAV12-1, TRAJ30)
CVVNTYRDAKIIF

SEQ ID NO: 540454 - protein, 13 aa, Homo sapiens
  CDR3 for beta chain variable domain of TCR clone 270227 (TRBV9, TRBJ1-2)
CASSRLGGGGYTF

SEQ ID NO: 540455 - protein, 16 aa, Homo sapiens
  CDR3 for alpha chain variable domain of TCR clone 270228 (TRAV30, TRAJ24)
CGTEIVDADSWGKFRF

SEQ ID NO: 540456 - protein, 15 aa, Homo sapiens
  CDR3 for beta chain variable domain of TCR clone 270228 (TRBV6-3, TRBJ2-7)
CASSSPGTVFYEQYF

SEQ ID NO: 540457 - protein, 11 aa, Homo sapiens
  CDR3 for alpha chain variable domain of TCR clone 270229 (TRAV2, TRAJ33)
CAVDSNYQVIC

SEQ ID NO: 540458 - protein, 13 aa, Homo sapiens
  CDR3 for beta chain variable domain of TCR clone 270229 (TRBV7-2, TRBJ2-4)
CASSREHANIQYF

SEQ ID NO: 540459 - protein, 12 aa, Homo sapiens
  CDR3 for alpha chain variable domain of TCR clone 270230 (TRAV8-3, TRAJ20)
CAVGANDYKLSF

SEQ ID NO: 540460 - protein, 14 aa, Homo sapiens
  CDR3 for beta chain variable domain of TCR clone 270230 (TRBV4-2, TRBJ2-5)
CASSQDRGRETQYF

SEQ ID NO: 540461 - protein, 14 aa, Homo sapiens
  CDR3 for alpha chain variable domain of TCR clone 270231 (TRAV20, TRAJ18)
CAVGRGSILGRLYF

SEQ ID NO: 540462 - protein, 14 aa, Homo sapiens
  CDR3 for beta chain variable domain of TCR clone 270231 (TRBV28, TRBJ2-4)
CASTQVTGVNIQYF

SEQ ID NO: 540463 - protein, 14 aa, Homo sapiens
  CDR3 for alpha chain variable domain of TCR clone 270232 (TRAV8-1, TRAJ36)
CAVNSPTWANNLFF

SEQ ID NO: 540464 - protein, 15 aa, Homo sapiens
  CDR3 for beta chain variable domain of TCR clone 270232 (TRBV7-2, TRBJ2-3)
CASSLEQGGTDTQYF

SEQ ID NO: 540465 - protein, 14 aa, Homo sapiens
  CDR3 for alpha chain variable domain of TCR clone 270233 (TRAV13-2, TRAJ15)
CAENPNQAGTALIF

SEQ ID NO: 540466 - protein, 16 aa, Homo sapiens
  CDR3 for beta chain variable domain of TCR clone 270233 (TRBV12-4, TRBJ1-2)
CASSPTATGTTRGYTF

SEQ ID NO: 540467 - protein, 13 aa, Homo sapiens
  CDR3 for alpha chain variable domain of TCR clone 270234 (TRAV13-2, TRAJ5)
CAVMDTGSRALTF

SEQ ID NO: 540468 - protein, 12 aa, Homo sapiens
  CDR3 for beta chain variable domain of TCR clone 270234 (TRBV28, TRBJ2-7)
CASSFSSYEQYF

SEQ ID NO: 540469 - protein, 16 aa, Homo sapiens
  CDR3 for alpha chain variable domain of TCR clone 270235 (TRAV3, TRAJ10)
CAVRDRLTGGGNKITF

SEQ ID NO: 540470 - protein, 15 aa, Homo sapiens
  CDR3 for beta chain variable domain of TCR clone 270235 (TRBV29-1, TRBJ2-7)
CSVEFFDRGSYEQYF

SEQ ID NO: 540471 - protein, 17 aa, Homo sapiens
  CDR3 for alpha chain variable domain of TCR clone 270236 (TRAV13-1, TRAJ52)
CAASSGAGGTSYGKLTF

SEQ ID NO: 540472 - protein, 13 aa, Homo sapiens
  CDR3 for beta chain variable domain of TCR clone 270236 (TRBV10-3, TRBJ2-7)
CASKLAVNYEQYF

SEQ ID NO: 540473 - protein, 12 aa, Homo sapiens
  CDR3 for alpha chain variable domain of TCR clone 270237 (TRAV4, TRAJ34)
CLVGEGTDKIIF

SEQ ID NO: 540474 - protein, 13 aa, Homo sapiens
  CDR3 for beta chain variable domain of TCR clone 270237 (TRBV2, TRBJ2-7)
CATSMGLVYEQYF

SEQ ID NO: 540475 - protein, 14 aa, Homo sapiens
  CDR3 for alpha chain variable domain of TCR clone 270238 (TRAV26-1, TRAJ38)
CIVVGAGNNRKLIG

SEQ ID NO: 540476 - protein, 12 aa, Homo sapiens
  CDR3 for beta chain variable domain of TCR clone 270238 (TRBV5-1, TRBJ2-5)
CASSWDQETQYF

SEQ ID NO: 540477 - protein, 11 aa, Homo sapiens
  CDR3 for alpha chain variable domain of TCR clone 270239 (TRAV2, TRAJ13)
CASGGYQKVTF

SEQ ID NO: 540478 - protein, 12 aa, Homo sapiens
  CDR3 for beta chain variable domain of TCR clone 270239 (TRBV28, TRBJ2-6)
CAIQAGANVLTF

SEQ ID NO: 540479 - protein, 15 aa, Homo sapiens
  CDR3 for alpha chain variable domain of TCR clone 270240 (TRAV12-1, TRAJ4)
CVVNPFSGGYNKRIF

SEQ ID NO: 540480 - protein, 16 aa, Homo sapiens
  CDR3 for beta chain variable domain of TCR clone 270240 (TRBV5-1, TRBJ1-1)
CASSKTGTEVGTEAFF

SEQ ID NO: 540481 - protein, 15 aa, Homo sapiens
  CDR3 for alpha chain variable domain of TCR clone 270241 (TRAV1-2, TRAJ26)
CAVRDLITMVRILSL

SEQ ID NO: 540482 - protein, 20 aa, Homo sapiens
  CDR3 for beta chain variable domain of TCR clone 270241 (TRBV7-8, TRBJ2-2)
CASSHLFPGPTIHITGELFF

SEQ ID NO: 540483 - protein, 15 aa, Homo sapiens
  CDR3 for alpha chain variable domain of TCR clone 270242 (TRAV26-1, TRAJ44)
CIVRIGTGTASKLTF

SEQ ID NO: 540484 - protein, 15 aa, Homo sapiens
  CDR3 for beta chain variable domain of TCR clone 270242 (TRBV7-6, TRBJ2-1)
CASSSLAEEGNEQFF

SEQ ID NO: 540485 - protein, 17 aa, Homo sapiens
  CDR3 for alpha chain variable domain of TCR clone 270243 (TRAV21, TRAJ24)
CAGIRLRSTDSWGQLQF

SEQ ID NO: 540486 - protein, 15 aa, Homo sapiens
  CDR3 for beta chain variable domain of TCR clone 270243 (TRBV7-2, TRBJ2-3)
CASSPRGLSTDTQYF

SEQ ID NO: 540487 - protein, 13 aa, Homo sapiens
  CDR3 for alpha chain variable domain of TCR clone 270244 (TRAV21, TRAJ36)
CAVIKTGANNLFF

SEQ ID NO: 540488 - protein, 13 aa, Homo sapiens
  CDR3 for beta chain variable domain of TCR clone 270244 (TRBV29-1, TRBJ2-3)
CSATRGGRYTQYF

SEQ ID NO: 540489 - protein, 13 aa, Homo sapiens
  CDR3 for alpha chain variable domain of TCR clone 270245 (TRAV12-1, TRAJ31)
CVVNMNNNARLMF

SEQ ID NO: 540490 - protein, 13 aa, Homo sapiens
  CDR3 for beta chain variable domain of TCR clone 270245 (TRBV7-3, TRBJ2-5)
CASSFRGGETQYF

SEQ ID NO: 540491 - protein, 14 aa, Homo sapiens
  CDR3 for alpha chain variable domain of TCR clone 270246 (TRAV13-1, TRAJ45)
CAAIGGGGADGLTF

SEQ ID NO: 540492 - protein, 16 aa, Homo sapiens
  CDR3 for beta chain variable domain of TCR clone 270246 (TRBV7-2, TRBJ1-1)
GASSLGAGWTNTEAFF

SEQ ID NO: 540493 - protein, 10 aa, Homo sapiens
  CDR3 for alpha chain variable domain of TCR clone 270247 (TRAV12-1, TRAJ37)
ARGNTGKLIF

SEQ ID NO: 540494 - protein, 16 aa, Homo sapiens
  CDR3 for beta chain variable domain of TCR clone 270247 (TRBV4-2, TRBJ1-4)
CASSQARGPTNEKLFF

SEQ ID NO: 540495 - protein, 14 aa, Homo sapiens
  CDR3 for alpha chain variable domain of TCR clone 270248 (TRAV17, TRAJ57)
TSVLYQGGSEKLVF

SEQ ID NO: 540496 - protein, 16 aa, Homo sapiens
  CDR3 for beta chain variable domain of TCR clone 270248 (TRBV4-3, TRBJ2-1)
CASSQERLAGFNEQFF

SEQ ID NO: 540497 - protein, 14 aa, Homo sapiens
  CDR3 for alpha chain variable domain of TCR clone 270249 (TRAV3, TRAJ8)
CAALMNTGFQKLVF

SEQ ID NO: 540498 - protein, 15 aa, Homo sapiens
  CDR3 for beta chain variable domain of TCR clone 270249 (TRBV28, TRBJ2-5)
YASSLGLGNQETQYF

SEQ ID NO: 540499 - protein, 16 aa, Homo sapiens
  CDR3 for alpha chain variable domain of TCR clone 270250 (TRAV8-3, TRAJ22)
CLVGDLYSGSARQLTF

SEQ ID NO: 540500 - protein, 14 aa, Homo sapiens
  CDR3 for beta chain variable domain of TCR clone 270250 (TRBV28, TRBJ2-3)
CASSWRGRADTQYF

SEQ ID NO: 540501 - protein, 23 aa, Homo sapiens
  CDR3 for alpha chain variable domain of TCR clone 270251 (TRAV26-1, TRAJ38)
CIADNAGNNHIQNPEPAVYQLRD

SEQ ID NO: 540502 - protein, 13 aa, Homo sapiens
  CDR3 for beta chain variable domain of TCR clone 270251 (TRBV5-4, TRBJ1-1)
CASSVDLGTEAFF

SEQ ID NO: 540503 - protein, 17 aa, Homo sapiens
  CDR3 for alpha chain variable domain of TCR clone 270252 (TRAV3, TRAJ38)
CAVRDGLNAGNNRKLIW

SEQ ID NO: 540504 - protein, 17 aa, Homo sapiens
  CDR3 for beta chain variable domain of TCR clone 270252 (TRBV20-1, TRBJ2-1)
CSASSSGLAGSYNEQFF

SEQ ID NO: 540505 - protein, 12 aa, Homo sapiens
  CDR3 for alpha chain variable domain of TCR clone 270253 (TRAV17, TRAJ4)
CATDGGYNKLIF

SEQ ID NO: 540506 - protein, 14 aa, Homo sapiens
  CDR3 for beta chain variable domain of TCR clone 270253 (TRBV20-1, TRBJ2-4)
CSASGRVGENIQYF

SEQ ID NO: 540507 - protein, 13 aa, Homo sapiens
  CDR3 for alpha chain variable domain of TCR clone 270254 (TRAV26-1, TRAJ54)
CIVRVKGAQKLVF

SEQ ID NO: 540508 - protein, 14 aa, Homo sapiens
  CDR3 for beta chain variable domain of TCR clone 270254 (TRBV11-2, TRBJ2-5)
CASSRTGGIETQYF

SEQ ID NO: 540509 - protein, 16 aa, Homo sapiens
  CDR3 for alpha chain variable domain of TCR clone 270255 (TRAV4, TRAJ22)
FLVGDLYSCSARQLTF

SEQ ID NO: 540510 - protein, 16 aa, Homo sapiens
  CDR3 for beta chain variable domain of TCR clone 270255 (TRBV7-9, TRBJ2-1)
CASSDVAGGSYNEQFF

SEQ ID NO: 540511 - protein, 13 aa, Homo sapiens
  CDR3 for alpha chain variable domain of TCR clone 270256 (TRAV20, TRAJ21)
CAVEGYNFNKFYF

SEQ ID NO: 540512 - protein, 12 aa, Homo sapiens
  CDR3 for beta chain variable domain of TCR clone 270256 (TRBV12-4, TRBJ2-7)
CASSLGGYEQYF

SEQ ID NO: 540513 - protein, 15 aa, Homo sapiens
  CDR3 for alpha chain variable domain of TCR clone 270257 (TRAV8-3, TRAJ27)
CAVGPPKTNVGKSTF

SEQ ID NO: 540514 - protein, 15 aa, Homo sapiens
  CDR3 for beta chain variable domain of TCR clone 270257 (TRBV7-2, TRBJ2-1)
CASSSGLAGGNEQFF

SEQ ID NO: 540515 - protein, 11 aa, Homo sapiens
  CDR3 for alpha chain variable domain of TCR clone 270258 (TRAV12-1, TRAJ30)
CVVNGQDKIIF

SEQ ID NO: 540516 - protein, 13 aa, Homo sapiens
  CDR3 for beta chain variable domain of TCR clone 270258 (TRBV2, TRBJ2-5)
CASGTPYQETQYF

SEQ ID NO: 540517 - protein, 12 aa, Homo sapiens
  CDR3 for alpha chain variable domain of TCR clone 270259 (TRAV4, TRAJ26)
CLVGDDGQNFVF

SEQ ID NO: 540518 - protein, 14 aa, Homo sapiens
  CDR3 for beta chain variable domain of TCR clone 270259 (TRBV6-1, TRBJ1-3)
CASVQGGGGNTIYF

SEQ ID NO: 540519 - protein, 15 aa, Homo sapiens
  CDR3 for alpha chain variable domain of TCR clone 270260 (TRAV12-2, TRAJ43)
CAFDMRFGAGTRLTV

SEQ ID NO: 540520 - protein, 13 aa, Homo sapiens
  CDR3 for beta chain variable domain of TCR clone 270260 (TRBV18, TRBJ1-1)
CASSGGRNTEAFF

SEQ ID NO: 540521 - protein, 11 aa, Homo sapiens
  CDR3 for alpha chain variable domain of TCR clone 270261 (TRAV20, TRAJ10)
CCAGGGNKLTF

SEQ ID NO: 540522 - protein, 15 aa, Homo sapiens
  CDR3 for beta chain variable domain of TCR clone 270261 (TRBV19, TRBJ2-7)
CASSFNSGGVWEQYF

SEQ ID NO: 540523 - protein, 14 aa, Homo sapiens
  CDR3 for alpha chain variable domain of TCR clone 270262 (TRAV1-2, TRAJ8)
CAVRENTGFQKLVF

SEQ ID NO: 540524 - protein, 13 aa, Homo sapiens
  CDR3 for beta chain variable domain of TCR clone 270262 (TRBV4-2, TRBJ1-1)
CASSQAGNTEAFF

SEQ ID NO: 540525 - protein, 12 aa, Homo sapiens
  CDR3 for alpha chain variable domain of TCR clone 270263 (TRAV12-3, TRAJ17)
CAMTLTGYKLTF

SEQ ID NO: 540526 - protein, 16 aa, Homo sapiens
  CDR3 for beta chain variable domain of TCR clone 270263 (TRBV12-5, TRBJ2-5)
CASGPRTSGNQETQYF

SEQ ID NO: 540527 - protein, 14 aa, Homo sapiens
  CDR3 for alpha chain variable domain of TCR clone 270264 (TRAV27, TRAJ22)
CAGVVPGSARQLTF

SEQ ID NO: 540528 - protein, 15 aa, Homo sapiens
  CDR3 for beta chain variable domain of TCR clone 270264 (TRBV11-2, TRBJ2-2)
CASSSDRVNAGELFF

SEQ ID NO: 540529 - protein, 14 aa, Homo sapiens
  CDR3 for alpha chain variable domain of TCR clone 270265 (TRAV8-4, TRAJ45)
CASGGGGGADGLTC

SEQ ID NO: 540530 - protein, 20 aa, Homo sapiens
  CDR3 for beta chain variable domain of TCR clone 270265 (TRBV4-3, TRBJ2-3)
CASSPRVEMRASGRPDTQYF

SEQ ID NO: 540531 - protein, 15 aa, Homo sapiens
  CDR3 for alpha chain variable domain of TCR clone 270266 (TRAV8-4, TRAJ53)
CAVSEGGGSNYKLTF

SEQ ID NO: 540532 - protein, 16 aa, Homo sapiens
  CDR3 for beta chain variable domain of TCR clone 270266 (TRBV5-4, TRBJ2-1)
CASSLALAGAYNEQFF

SEQ ID NO: 540533 - protein, 14 aa, Homo sapiens
  CDR3 for alpha chain variable domain of TCR clone 270267 (TRAV12-3, TRAJ10)
SHLPLTGGGNKLTF

SEQ ID NO: 540534 - protein, 15 aa, Homo sapiens
  CDR3 for beta chain variable domain of TCR clone 270267 (TRBV6-6, TRBJ1-5)
CASSSIQGTNQPQYF

SEQ ID NO: 540535 - protein, 11 aa, Homo sapiens
  CDR3 for alpha chain variable domain of TCR clone 270268 (TRAV12-1, TRAJ8)
CVVTGFQRLVF

SEQ ID NO: 540536 - protein, 14 aa, Homo sapiens
  CDR3 for beta chain variable domain of TCR clone 270268 (TRBV19, TRBJ2-1)
CASGKSTQYNEQFF

SEQ ID NO: 540537 - protein, 11 aa, Homo sapiens
  CDR3 for alpha chain variable domain of TCR clone 270269 (TRAV12-3, TRAJ43)
CAMNVSNDIRF

SEQ ID NO: 540538 - protein, 16 aa, Homo sapiens
  CDR3 for beta chain variable domain of TCR clone 270269 (TRBV7-3, TRBJ2-2)
CASSLKRGTLSGELFF

SEQ ID NO: 540539 - protein, 12 aa, Homo sapiens
  CDR3 for alpha chain variable domain of TCR clone 270270 (TRAV13-1, TRAJ11)
CAGPSGYSTLTF

SEQ ID NO: 540540 - protein, 13 aa, Homo sapiens
  CDR3 for beta chain variable domain of TCR clone 270270 (TRBV12-4, TRBJ1-5)
CGSSPDRAQPQHF

SEQ ID NO: 540541 - protein, 10 aa, Homo sapiens
  CDR3 for alpha chain variable domain of TCR clone 270271 (TRAV23/DV6, TRAJ57)
CAASSTLSQG

SEQ ID NO: 540542 - protein, 17 aa, Homo sapiens
  CDR3 for beta chain variable domain of TCR clone 270271 (TRBV7-6, TRBJ2-5)
CASSSPQAGDPSETQYF

SEQ ID NO: 540543 - protein, 15 aa, Homo sapiens
  CDR3 for alpha chain variable domain of TCR clone 270272 (TRAV20, TRAJ53)
CAVQASGGSNYKLTF

SEQ ID NO: 540544 - protein, 12 aa, Homo sapiens
  CDR3 for beta chain variable domain of TCR clone 270272 (TRBV7-6, TRBJ2-5)
RASSLSQDTQYF

SEQ ID NO: 540545 - protein, 10 aa, Homo sapiens
  CDR3 for alpha chain variable domain of TCR clone 270273 (TRAV38-2/DV8, TRAJ40)
CASGTYKYIF

SEQ ID NO: 540546 - protein, 15 aa, Homo sapiens
  CDR3 for beta chain variable domain of TCR clone 270273 (TRBV5-1, TRBJ2-1)
CASSPPRAPYNEQFF

SEQ ID NO: 540547 - protein, 12 aa, Homo sapiens
  CDR3 for alpha chain variable domain of TCR clone 270274 (TRAV12-3, TRAJ17)
CAMTLTGNKLTF

SEQ ID NO: 540548 - protein, 16 aa, Homo sapiens
  CDR3 for beta chain variable domain of TCR clone 270274 (TRBV15, TRBJ2-3)
CATRLSGGRAPDTQYF

SEQ ID NO: 540549 - protein, 15 aa, Homo sapiens
  CDR3 for alpha chain variable domain of TCR clone 270275 (TRAV38-2/DV8, TRAJ48)
CAYGGRDFGNGKLTF

SEQ ID NO: 540550 - protein, 18 aa, Homo sapiens
  CDR3 for beta chain variable domain of TCR clone 270275 (TRBV5-1, TRBJ1-6)
CASSRSGQGTARGSPLHF

SEQ ID NO: 540551 - protein, 10 aa, Homo sapiens
  CDR3 for alpha chain variable domain of TCR clone 270276 (TRAV26-1, TRAJ40)
CIAGTYKYIF

SEQ ID NO: 540552 - protein, 15 aa, Homo sapiens
  CDR3 for beta chain variable domain of TCR clone 270276 (TRBV19, TRBJ2-1)
CASNSPGVPLDEQFF

SEQ ID NO: 540553 - protein, 15 aa, Homo sapiens
  CDR3 for alpha chain variable domain of TCR clone 270277 (TRAV2, TRAJ22)
CAVPSRGGSARQLTF

SEQ ID NO: 540554 - protein, 16 aa, Homo sapiens
  CDR3 for beta chain variable domain of TCR clone 270277 (TRBV6-1, TRBJ2-2)
CASRRDGGTNTGELFF

SEQ ID NO: 540555 - protein, 10 aa, Homo sapiens
  CDR3 for alpha chain variable domain of TCR clone 270278 (TRAV12-3, TRAJ18)
CAMSAEAQPW

SEQ ID NO: 540556 - protein, 13 aa, Homo sapiens
  CDR3 for beta chain variable domain of TCR clone 270278 (TRBV25-1, TRBJ1-1)
CASSGQVRAEAFF

SEQ ID NO: 540557 - protein, 17 aa, Homo sapiens
  CDR3 for alpha chain variable domain of TCR clone 270279 (TRAV26-1, TRAJ47)
CIVPSLLYMEYGNKLVF

SEQ ID NO: 540558 - protein, 14 aa, Homo sapiens
  CDR3 for beta chain variable domain of TCR clone 270279 (TRBV7-3, TRBJ1-5)
RVSSFSGCNQPQHF

SEQ ID NO: 540559 - protein, 11 aa, Homo sapiens
  CDR3 for alpha chain variable domain of TCR clone 270280 (TRAV12-2, TRAJ49)
CAMNTGNQFYF

SEQ ID NO: 540560 - protein, 12 aa, Homo sapiens
  CDR3 for beta chain variable domain of TCR clone 270280 (TRBV2, TRBJ2-3)
CASSGRFDTQYF

SEQ ID NO: 540561 - protein, 12 aa, Homo sapiens
  CDR3 for alpha chain variable domain of TCR clone 270281 (TRAV29/DV5, TRAJ49)
CAATDTGNQFYS

SEQ ID NO: 540562 - protein, 12 aa, Homo sapiens
  CDR3 for beta chain variable domain of TCR clone 270281 (TRBV12-4, TRBJ2-7)
CASSLGGYEQYF

SEQ ID NO: 540563 - protein, 15 aa, Homo sapiens
  CDR3 for alpha chain variable domain of TCR clone 270282 (TRAV21, TRAJ24)
CAARSSTDSLGKLQF

SEQ ID NO: 540564 - protein, 14 aa, Homo sapiens
  CDR3 for beta chain variable domain of TCR clone 270282 (TRBV6-1, TRBJ1-3)
CASVQGGGGNTIYF

SEQ ID NO: 540565 - protein, 15 aa, Homo sapiens
  CDR3 for alpha chain variable domain of TCR clone 270283 (TRAV3, TRAJ17)
CAVRDTVAAGNKLTF

SEQ ID NO: 540566 - protein, 14 aa, Homo sapiens
  CDR3 for beta chain variable domain of TCR clone 270283 (TRBV6-3, TRBJ1-1)
CASSNLLPGAEAFF

SEQ ID NO: 540567 - protein, 15 aa, Homo sapiens
  CDR3 for alpha chain variable domain of TCR clone 270284 (TRAV3, TRAJ9)
CAVRDINTGGFKTNF

SEQ ID NO: 540568 - protein, 13 aa, Homo sapiens
  CDR3 for beta chain variable domain of TCR clone 270284 (TRBV19, TRBJ2-7)
CASSIPSVREQYF

SEQ ID NO: 540569 - protein, 12 aa, Homo sapiens
  CDR3 for alpha chain variable domain of TCR clone 270285 (TRAV8-3, TRAJ20)
CAVDFNDYKLSF

SEQ ID NO: 540570 - protein, 15 aa, Homo sapiens
  CDR3 for beta chain variable domain of TCR clone 270285 (TRBV9, TRBJ1-6)
CASSVAGTGDSPLHF

SEQ ID NO: 540571 - protein, 16 aa, Homo sapiens
  CDR3 for alpha chain variable domain of TCR clone 270286 (TRAV30, TRAJ32)
SAAQRRIWWCYNKLIF

SEQ ID NO: 540572 - protein, 13 aa, Homo sapiens
  CDR3 for beta chain variable domain of TCR clone 270286 (TRBV10-3, TRBJ2-7)
CASKLAVNYEQYF

SEQ ID NO: 540573 - protein, 10 aa, Homo sapiens
  CDR3 for alpha chain variable domain of TCR clone 270287 (TRAV36/DV7, TRAJ56)
CAGPAVELTF

SEQ ID NO: 540574 - protein, 15 aa, Homo sapiens
  CDR3 for beta chain variable domain of TCR clone 270287 (TRBV18, TRBJ1-2)
CASSPPQGLLGGYTF

SEQ ID NO: 540575 - protein, 13 aa, Homo sapiens
  CDR3 for alpha chain variable domain of TCR clone 270288 (TRAV20, TRAJ20)
CAVRWVRDYKLCF

SEQ ID NO: 540576 - protein, 14 aa, Homo sapiens
  CDR3 for beta chain variable domain of TCR clone 270288 (TRBV19, TRBJ2-2)
CASTVTANTGELFF

SEQ ID NO: 540577 - protein, 17 aa, Homo sapiens
  CDR3 for alpha chain variable domain of TCR clone 270289 (TRAV13-1, )
CAANIQNPDPAVYQLRD

SEQ ID NO: 540578 - protein, 18 aa, Homo sapiens
  CDR3 for beta chain variable domain of TCR clone 270289 (TRBV5-4, TRBJ2-3)
CASSWGTSGGTIRSILAQ

SEQ ID NO: 540579 - protein, 23 aa, Homo sapiens
  CDR3 for alpha chain variable domain of TCR clone 270290 (TRAV26-1, TRAJ38)
CISYNAGNNHIQNPDPAVYQLRD

SEQ ID NO: 540580 - protein, 13 aa, Homo sapiens
  CDR3 for beta chain variable domain of TCR clone 270290 (TRBV20-1, TRBJ1-1)
CSARGGGNTEAFF

SEQ ID NO: 540581 - protein, 18 aa, Homo sapiens
  CDR3 for alpha chain variable domain of TCR clone 270291 (TRAV8-4, TRAJ52)
CAVTRAHAGGTSYGRLTF

SEQ ID NO: 540582 - protein, 14 aa, Homo sapiens
  CDR3 for beta chain variable domain of TCR clone 270291 (TRBV19, TRBJ2-7)
CASTVQGRPYEQYF

SEQ ID NO: 540583 - protein, 14 aa, Homo sapiens
  CDR3 for alpha chain variable domain of TCR clone 270292 (TRAV8-3, TRAJ4)
CAVGASGGYNKLIL

SEQ ID NO: 540584 - protein, 16 aa, Homo sapiens
  CDR3 for beta chain variable domain of TCR clone 270292 (TRBV4-3, TRBJ2-2)
CASSRLQGSGTGELFF

SEQ ID NO: 540585 - protein, 14 aa, Homo sapiens
  CDR3 for alpha chain variable domain of TCR clone 270293 (TRAV8-4, TRAJ38)
CARLNAGNNRKLIW

SEQ ID NO: 540586 - protein, 12 aa, Homo sapiens
  CDR3 for beta chain variable domain of TCR clone 270293 (TRBV6-1, TRBJ2-7)
CPSSEPLYEQYF

SEQ ID NO: 540587 - protein, 23 aa, Homo sapiens
  CDR3 for alpha chain variable domain of TCR clone 270294 (TRAV1-1, TRAJ29)
LLQELQMKDSASYFLGGNTPLVF

SEQ ID NO: 540588 - protein, 13 aa, Homo sapiens
  CDR3 for beta chain variable domain of TCR clone 270294 (TRBV25-1, TRBJ2-7)
CSSSEDGYYEQYF

SEQ ID NO: 540589 - protein, 12 aa, Homo sapiens
  CDR3 for alpha chain variable domain of TCR clone 270295 (TRAV16, TRAJ10)
CSRTGGGNKLTF

SEQ ID NO: 540590 - protein, 17 aa, Homo sapiens
  CDR3 for beta chain variable domain of TCR clone 270295 (TRBV6-3, TRBJ2-7)
CTSVPAVPGTVFYEQYF

SEQ ID NO: 540591 - protein, 13 aa, Homo sapiens
  CDR3 for alpha chain variable domain of TCR clone 270296 (TRAV12-3, TRAJ6)
CANPSGGSYIPTF

SEQ ID NO: 540592 - protein, 14 aa, Homo sapiens
  CDR3 for beta chain variable domain of TCR clone 270296 (TRBV19, TRBJ1-1)
CDSSRDRDATEAFF

SEQ ID NO: 540593 - protein, 11 aa, Homo sapiens
  CDR3 for alpha chain variable domain of TCR clone 270297 (TRAV17, TRAJ9)
CGFTGGFKTIF

SEQ ID NO: 540594 - protein, 18 aa, Homo sapiens
  CDR3 for beta chain variable domain of TCR clone 270297 (TRBV12-4, TRBJ2-4)
CASSRTGAVDVAKNIQYF

SEQ ID NO: 540595 - protein, 17 aa, Homo sapiens
  CDR3 for alpha chain variable domain of TCR clone 270298 (TRAV4, TRAJ18)
CLVVAAGRGSTPGRLYF

SEQ ID NO: 540596 - protein, 17 aa, Homo sapiens
  CDR3 for beta chain variable domain of TCR clone 270298 (TRBV28, TRBJ2-2)
CASSLATGMGDAGELFF

SEQ ID NO: 540597 - protein, 15 aa, Homo sapiens
  CDR3 for alpha chain variable domain of TCR clone 270299 (TRAV30, TRAJ32)
CGTEILGGATNKLIF

SEQ ID NO: 540598 - protein, 13 aa, Homo sapiens
  CDR3 for beta chain variable domain of TCR clone 270299 (TRBV19, TRBJ2-7)
CASRKAGGSEQYF

SEQ ID NO: 540599 - protein, 10 aa, Homo sapiens
  CDR3 for alpha chain variable domain of TCR clone 270300 (TRAV3, TRAJ18)
CAVRLTEAQP

SEQ ID NO: 540600 - protein, 14 aa, Homo sapiens
  CDR3 for beta chain variable domain of TCR clone 270300 (TRBV7-2, TRBJ2-1)
CSTHGTGIYNEQFF

SEQ ID NO: 540601 - protein, 13 aa, Homo sapiens
  CDR3 for alpha chain variable domain of TCR clone 270301 (TRAV17, TRAJ21)
CATDGGNFNKFYF

SEQ ID NO: 540602 - protein, 13 aa, Homo sapiens
  CDR3 for beta chain variable domain of TCR clone 270301 (TRBV7-3, TRBJ2-2)
CASSLWSVGELFF

SEQ ID NO: 540603 - protein, 13 aa, Homo sapiens
  CDR3 for alpha chain variable domain of TCR clone 270302 (TRAV12-2, TRAJ4)
CAVRSGGYTKLIL

SEQ ID NO: 540604 - protein, 15 aa, Homo sapiens
  CDR3 for beta chain variable domain of TCR clone 270302 (TRBV10-3, TRBJ2-1)
CAISDVQHRAYEHFF

SEQ ID NO: 540605 - protein, 15 aa, Homo sapiens
  CDR3 for alpha chain variable domain of TCR clone 270303 (TRAV26-1, TRAJ37)
CIVRVATGNTGKLIF

SEQ ID NO: 540606 - protein, 13 aa, Homo sapiens
  CDR3 for beta chain variable domain of TCR clone 270303 (TRBV27, TRBJ2-3)
CASSWGRTDTQYF

SEQ ID NO: 540607 - protein, 11 aa, Homo sapiens
  CDR3 for alpha chain variable domain of TCR clone 270304 (TRAV21, TRAJ7)
CAANGNNRLAF

SEQ ID NO: 540608 - protein, 14 aa, Homo sapiens
  CDR3 for beta chain variable domain of TCR clone 270304 (TRBV4-1, TRBJ2-7)
CASSRTGVAFEQYF

SEQ ID NO: 540609 - protein, 12 aa, Homo sapiens
  CDR3 for alpha chain variable domain of TCR clone 270305 (TRAV3, TRAJ20)
CAVRDHDYKLIF

SEQ ID NO: 540610 - protein, 15 aa, Homo sapiens
  CDR3 for beta chain variable domain of TCR clone 270305 (TRBV9, TRBJ1-6)
CASSVAGRGDSPLHF

SEQ ID NO: 540611 - protein, 10 aa, Homo sapiens
  CDR3 for alpha chain variable domain of TCR clone 270306 (TRAV21, TRAJ43)
CAVRIVDMRF

SEQ ID NO: 540612 - protein, 13 aa, Homo sapiens
  CDR3 for beta chain variable domain of TCR clone 270306 (TRBV20-1, TRBJ2-7)
RSAPGLADYEQYF

SEQ ID NO: 540613 - protein, 14 aa, Homo sapiens
  CDR3 for alpha chain variable domain of TCR clone 270307 (TRAV1-2, TRAJ16)
CAVNRFSDGQKLLF

SEQ ID NO: 540614 - protein, 14 aa, Homo sapiens
  CDR3 for beta chain variable domain of TCR clone 270307 (TRBV4-1, TRBJ1-5)
CASSPKGDNQPQHF

SEQ ID NO: 540615 - protein, 14 aa, Homo sapiens
  CDR3 for alpha chain variable domain of TCR clone 270308 (TRAV12-2, TRAJ13)
CAVKKTGGYQKVTF

SEQ ID NO: 540616 - protein, 15 aa, Homo sapiens
  CDR3 for beta chain variable domain of TCR clone 270308 (TRBV20-1, TRBJ2-1)
CSARGIGRTYNEQFF

SEQ ID NO: 540617 - protein, 13 aa, Homo sapiens
  CDR3 for alpha chain variable domain of TCR clone 270309 (TRAV8-3, TRAJ6)
CAVEKGGSYIPTF

SEQ ID NO: 540618 - protein, 15 aa, Homo sapiens
  CDR3 for beta chain variable domain of TCR clone 270309 (TRBV28, TRBJ2-5)
CASSADRGRGETQYC

SEQ ID NO: 540619 - protein, 12 aa, Homo sapiens
  CDR3 for alpha chain variable domain of TCR clone 270310 (TRAV13-2, TRAJ23)
CAERHRGRKLIF

SEQ ID NO: 540620 - protein, 13 aa, Homo sapiens
  CDR3 for beta chain variable domain of TCR clone 270310 (TRBV2, TRBJ1-6)
CADSGSYNTPLHF

SEQ ID NO: 540621 - protein, 12 aa, Homo sapiens
  CDR3 for alpha chain variable domain of TCR clone 270311 (TRAV1-1, TRAJ8)
CVGVTGFQKLVF

SEQ ID NO: 540622 - protein, 17 aa, Homo sapiens
  CDR3 for beta chain variable domain of TCR clone 270311 (TRBV4-3, TRBJ2-1)
CASSQELAIVSSNEQFF

SEQ ID NO: 540623 - protein, 12 aa, Homo sapiens
  CDR3 for alpha chain variable domain of TCR clone 270312 (TRAV12-2, TRAJ3)
CAVWSSASKIIF

SEQ ID NO: 540624 - protein, 16 aa, Homo sapiens
  CDR3 for beta chain variable domain of TCR clone 270312 (TRBV4-2, TRBJ2-7)
CASSQDTSGGPSEQYF

SEQ ID NO: 540625 - protein, 15 aa, Homo sapiens
  CDR3 for alpha chain variable domain of TCR clone 270313 (TRAV8-3, TRAJ45)
CALSYSGGGADGLAF

SEQ ID NO: 540626 - protein, 13 aa, Homo sapiens
  CDR3 for beta chain variable domain of TCR clone 270313 (TRBV10-3, TRBJ2-7)
CASKLAVNYEQYF

SEQ ID NO: 540627 - protein, 14 aa, Homo sapiens
  CDR3 for alpha chain variable domain of TCR clone 270314 (TRAV23/DV6, TRAJ45)
CAVYSGGGADGLTF

SEQ ID NO: 540628 - protein, 15 aa, Homo sapiens
  CDR3 for beta chain variable domain of TCR clone 270314 (TRBV27, TRBJ2-1)
CASSPLAGGANEQFF

SEQ ID NO: 540629 - protein, 13 aa, Homo sapiens
  CDR3 for alpha chain variable domain of TCR clone 270315 (TRAV17, TRAJ7)
CATDNYVNNRLAF

SEQ ID NO: 540630 - protein, 13 aa, Homo sapiens
  CDR3 for beta chain variable domain of TCR clone 270315 (TRBV27, TRBJ2-1)
CASSSGSYNEQFF

SEQ ID NO: 540631 - protein, 14 aa, Homo sapiens
  CDR3 for alpha chain variable domain of TCR clone 270316 (TRAV16, TRAJ31)
CSKWRRGDNARLMF

SEQ ID NO: 540632 - protein, 16 aa, Homo sapiens
  CDR3 for beta chain variable domain of TCR clone 270316 (TRBV28, TRBJ2-7)
CASSVFFETGGPEQYF

SEQ ID NO: 540633 - protein, 15 aa, Homo sapiens
  CDR3 for alpha chain variable domain of TCR clone 270317 (TRAV8-2, TRAJ24)
CVVSGRTDSWGKLQF

SEQ ID NO: 540634 - protein, 13 aa, Homo sapiens
  CDR3 for beta chain variable domain of TCR clone 270317 (TRBV12-4, TRBJ1-2)
CASSLRQGKGYTF

SEQ ID NO: 540635 - protein, 15 aa, Homo sapiens
  CDR3 for alpha chain variable domain of TCR clone 270318 (TRAV12-2, TRAJ43)
CAFDMRFGARTRLTV

SEQ ID NO: 540636 - protein, 18 aa, Homo sapiens
  CDR3 for beta chain variable domain of TCR clone 270318 (TRBV20-1, TRBJ2-3)
CSASGLAGGPGTTDTQYL

SEQ ID NO: 540637 - protein, 14 aa, Homo sapiens
  CDR3 for alpha chain variable domain of TCR clone 270319 (TRAV12-1, TRAJ43)
CVVNGRSNNNDMRC

SEQ ID NO: 540638 - protein, 12 aa, Homo sapiens
  CDR3 for beta chain variable domain of TCR clone 270319 (TRBV29-1, TRBJ2-3)
CSVTGGADTQYF

SEQ ID NO: 540639 - protein, 14 aa, Homo sapiens
  CDR3 for alpha chain variable domain of TCR clone 270320 (TRAV1-2, TRAJ8)
CTVREDTGFQKLVF

SEQ ID NO: 540640 - protein, 13 aa, Homo sapiens
  CDR3 for beta chain variable domain of TCR clone 270320 (TRBV20-1, TRBJ1-4)
CSARTPYNEKLFF

SEQ ID NO: 540641 - protein, 15 aa, Homo sapiens
  CDR3 for alpha chain variable domain of TCR clone 270321 (TRAV26-2, TRAJ50)
CILRDEETSYDKVIF

SEQ ID NO: 540642 - protein, 17 aa, Homo sapiens
  CDR3 for beta chain variable domain of TCR clone 270321 (TRBV15, TRBJ1-5)
CATSGGLARTSNQPQHF

SEQ ID NO: 540643 - protein, 17 aa, Homo sapiens
  CDR3 for alpha chain variable domain of TCR clone 270322 (TRAV8-6, TRAJ58)
CAVSSWVGETSGARLTF

SEQ ID NO: 540644 - protein, 14 aa, Homo sapiens
  CDR3 for beta chain variable domain of TCR clone 270322 (TRBV4-2, TRBJ2-1)
CASSLDRAYNEQFL

SEQ ID NO: 540645 - protein, 14 aa, Homo sapiens
  CDR3 for alpha chain variable domain of TCR clone 270323 (TRAV17, TRAJ22)
CATSPSGSARQLTL

SEQ ID NO: 540646 - protein, 15 aa, Homo sapiens
  CDR3 for beta chain variable domain of TCR clone 270323 (TRBV4-1, TRBJ2-5)
CASSQWDLYQETQYF

SEQ ID NO: 540647 - protein, 15 aa, Homo sapiens
  CDR3 for alpha chain variable domain of TCR clone 270324 (TRAV21, TRAJ24)
CAARSSTDSWGKLQF

SEQ ID NO: 540648 - protein, 14 aa, Homo sapiens
  CDR3 for beta chain variable domain of TCR clone 270324 (TRBV9, TRBJ2-7)
CASSSHGSSYEQYF

SEQ ID NO: 540649 - protein, 15 aa, Homo sapiens
  CDR3 for alpha chain variable domain of TCR clone 270325 (TRAV26-1, TRAJ37)
CIVENGSGNTGKLIF

SEQ ID NO: 540650 - protein, 13 aa, Homo sapiens
  CDR3 for beta chain variable domain of TCR clone 270325 (TRBV7-9, TRBJ1-2)
CASSLKQNYGYTF

SEQ ID NO: 540651 - protein, 15 aa, Homo sapiens
  CDR3 for alpha chain variable domain of TCR clone 270326 (TRAV4, TRAJ26)
CLVGGLDNYRQNFVF

SEQ ID NO: 540652 - protein, 13 aa, Homo sapiens
  CDR3 for beta chain variable domain of TCR clone 270326 (TRBV20-1, TRBJ2-5)
CSASLTGRETQYF

SEQ ID NO: 540653 - protein, 14 aa, Homo sapiens
  CDR3 for alpha chain variable domain of TCR clone 270327 (TRAV8-4, TRAJ23)
CAVRAPGSGGKLIF

SEQ ID NO: 540654 - protein, 17 aa, Homo sapiens
  CDR3 for beta chain variable domain of TCR clone 270327 (TRBV4-3, TRBJ2-3)
CASSQDPLAGAVDTQYF

SEQ ID NO: 540655 - protein, 14 aa, Homo sapiens
  CDR3 for alpha chain variable domain of TCR clone 270328 (TRAV35, TRAJ33)
CAGSSQDSNYQLIW

SEQ ID NO: 540656 - protein, 14 aa, Homo sapiens
  CDR3 for beta chain variable domain of TCR clone 270328 (TRBV20-1, TRBJ2-1)
CSAQIGGSANEQLF

SEQ ID NO: 540657 - protein, 11 aa, Homo sapiens
  CDR3 for alpha chain variable domain of TCR clone 270329 (TRAV12-1, TRAJ21)
CVVNNFNKFYF

SEQ ID NO: 540658 - protein, 12 aa, Homo sapiens
  CDR3 for beta chain variable domain of TCR clone 270329 (TRBV11-2, TRBJ2-1)
CASSPGNNEQFF

SEQ ID NO: 540659 - protein, 11 aa, Homo sapiens
  CDR3 for alpha chain variable domain of TCR clone 270330 (TRAV26-2, TRAJ8)
CILTGFQKLVF

SEQ ID NO: 540660 - protein, 13 aa, Homo sapiens
  CDR3 for beta chain variable domain of TCR clone 270330 (TRBV7-2, TRBJ2-1)
CASSLGVYNEQFF

SEQ ID NO: 540661 - protein, 11 aa, Homo sapiens
  CDR3 for alpha chain variable domain of TCR clone 270331 (TRAV3, TRAJ21)
CAVGNFNKFYF

SEQ ID NO: 540662 - protein, 16 aa, Homo sapiens
  CDR3 for beta chain variable domain of TCR clone 270331 (TRBV20-1, TRBJ1-1)
CSARDRTLSMNTEAFF

SEQ ID NO: 540663 - protein, 14 aa, Homo sapiens
  CDR3 for alpha chain variable domain of TCR clone 270332 (TRAV17, TRAJ57)
CATDPQGGSEKLVF

SEQ ID NO: 540664 - protein, 15 aa, Homo sapiens
  CDR3 for beta chain variable domain of TCR clone 270332 (TRBV7-6, TRBJ1-5)
CASSQSSGINQPQHF

SEQ ID NO: 540665 - protein, 11 aa, Homo sapiens
  CDR3 for alpha chain variable domain of TCR clone 270333 (TRAV35, TRAJ21)
CAGDNFNKFYF

SEQ ID NO: 540666 - protein, 16 aa, Homo sapiens
  CDR3 for beta chain variable domain of TCR clone 270333 (TRBV4-3, TRBJ2-1)
CASSPLQGKGYNEQFF

SEQ ID NO: 540667 - protein, 15 aa, Homo sapiens
  CDR3 for alpha chain variable domain of TCR clone 270334 (TRAV21, TRAJ53)
CATLNSGGSNYKLTF

SEQ ID NO: 540668 - protein, 14 aa, Homo sapiens
  CDR3 for beta chain variable domain of TCR clone 270334 (TRBV2, TRBJ2-2)
CASSLFGGNGELFF

SEQ ID NO: 540669 - protein, 14 aa, Homo sapiens
  CDR3 for alpha chain variable domain of TCR clone 270335 (TRAV2, TRAJ9)
CAVEDRSGGVETIF

SEQ ID NO: 540670 - protein, 17 aa, Homo sapiens
  CDR3 for beta chain variable domain of TCR clone 270335 (TRBV20-1, TRBJ2-7)
CSATRAGGVAGVEEQYF

SEQ ID NO: 540671 - protein, 17 aa, Homo sapiens
  CDR3 for alpha chain variable domain of TCR clone 270336 (TRAV3, TRAJ6)
CAVRDGPRAGGSYIPTF

SEQ ID NO: 540672 - protein, 13 aa, Homo sapiens
  CDR3 for beta chain variable domain of TCR clone 270336 (TRBV4-1, TRBJ2-2)
FASSQENTGELFF

SEQ ID NO: 540673 - protein, 14 aa, Homo sapiens
  CDR3 for alpha chain variable domain of TCR clone 270337 (TRAV1-2, TRAJ16)
CAVNRSSDGQKLLF

SEQ ID NO: 540674 - protein, 12 aa, Homo sapiens
  CDR3 for beta chain variable domain of TCR clone 270337 (TRBV11-2, TRBJ2-2)
CASSLGGGELFF

SEQ ID NO: 540675 - protein, 12 aa, Homo sapiens
  CDR3 for alpha chain variable domain of TCR clone 270338 (TRAV26-1, TRAJ13)
CIVSSGYQKVTF

SEQ ID NO: 540676 - protein, 16 aa, Homo sapiens
  CDR3 for beta chain variable domain of TCR clone 270338 (TRBV27, TRBJ2-1)
CASSLSKGFGLDEQFF

SEQ ID NO: 540677 - protein, 11 aa, Homo sapiens
  CDR3 for alpha chain variable domain of TCR clone 270339 (TRAV13-1, TRAJ39)
CASHAGNMLTF

SEQ ID NO: 540678 - protein, 13 aa, Homo sapiens
  CDR3 for beta chain variable domain of TCR clone 270339 (TRBV11-2, TRBJ1-5)
CQQLRQGSQPQHF

SEQ ID NO: 540679 - protein, 14 aa, Homo sapiens
  CDR3 for alpha chain variable domain of TCR clone 270340 (TRAV1-2, TRAJ8)
CAVREDTGFHKLVF

SEQ ID NO: 540680 - protein, 15 aa, Homo sapiens
  CDR3 for beta chain variable domain of TCR clone 270340 (TRBV10-3, TRBJ1-1)
CAISEAGTGGTEAFF

SEQ ID NO: 540681 - protein, 19 aa, Homo sapiens
  CDR3 for alpha chain variable domain of TCR clone 270341 (TRAV26-1, TRAJ52)
CIVRAHRNAGGTSYGKLTF

SEQ ID NO: 540682 - protein, 15 aa, Homo sapiens
  CDR3 for beta chain variable domain of TCR clone 270341 (TRBV29-1, TRBJ2-1)
CSGRDRKSSYNEKFF

SEQ ID NO: 540683 - protein, 16 aa, Homo sapiens
  CDR3 for alpha chain variable domain of TCR clone 270342 (TRAV26-1, TRAJ37)
CIVRGDGSGNTGKLSF

SEQ ID NO: 540684 - protein, 17 aa, Homo sapiens
  CDR3 for beta chain variable domain of TCR clone 270342 (TRBV4-1, TRBJ2-7)
CASSRDPLGVRGGEQYF

SEQ ID NO: 540685 - protein, 12 aa, Homo sapiens
  CDR3 for alpha chain variable domain of TCR clone 270343 (TRAV8-3, TRAJ20)
CAVDFNDYKLSF

SEQ ID NO: 540686 - protein, 14 aa, Homo sapiens
  CDR3 for beta chain variable domain of TCR clone 270343 (TRBV15, TRBJ2-3)
CATRSGTSTDTQYF

SEQ ID NO: 540687 - protein, 14 aa, Homo sapiens
  CDR3 for alpha chain variable domain of TCR clone 270344 (TRAV35, TRAJ50)
CAGHRKTSYDKVIF

SEQ ID NO: 540688 - protein, 13 aa, Homo sapiens
  CDR3 for beta chain variable domain of TCR clone 270344 (TRBV7-7, TRBJ2-3)
CASSLSRADTQYF

SEQ ID NO: 540689 - protein, 14 aa, Homo sapiens
  CDR3 for alpha chain variable domain of TCR clone 270345 (TRAV35, TRAJ54)
CAGYLIQGAQKLVL

SEQ ID NO: 540690 - protein, 14 aa, Homo sapiens
  CDR3 for beta chain variable domain of TCR clone 270345 (TRBV7-2, TRBJ2-5)
CASSVGWAEETQYF

SEQ ID NO: 540691 - protein, 14 aa, Homo sapiens
  CDR3 for alpha chain variable domain of TCR clone 270346 (TRAV26-1, TRAJ49)
CIVRPSNTGNQFYF

SEQ ID NO: 540692 - protein, 15 aa, Homo sapiens
  CDR3 for beta chain variable domain of TCR clone 270346 (TRBV19, TRBJ1-1)
CASMGFRDVNGEAFF

SEQ ID NO: 540693 - protein, 18 aa, Homo sapiens
  CDR3 for alpha chain variable domain of TCR clone 270347 (TRAV26-2, TRAJ17)
CCVLLHPAIKAAGNKLTF

SEQ ID NO: 540694 - protein, 15 aa, Homo sapiens
  CDR3 for beta chain variable domain of TCR clone 270347 (TRBV27, TRBJ2-7)
CASSTAGTWSYEQYF

SEQ ID NO: 540695 - protein, 22 aa, Homo sapiens
  CDR3 for alpha chain variable domain of TCR clone 270348 (TRAV3, )
CAVRDCLNAGNDHIQNPDPAVY

SEQ ID NO: 540696 - protein, 14 aa, Homo sapiens
  CDR3 for beta chain variable domain of TCR clone 270348 (TRBV5-5, TRBJ1-5)
CASSGQGVDQPQHF

SEQ ID NO: 540697 - protein, 15 aa, Homo sapiens
  CDR3 for alpha chain variable domain of TCR clone 270349 (TRAV8-3, TRAJ45)
SASSYSGGGADGLTF

SEQ ID NO: 540698 - protein, 11 aa, Homo sapiens
  CDR3 for beta chain variable domain of TCR clone 270349 (TRBV12-4, TRBJ2-3)
CASTATDTQYF

SEQ ID NO: 540699 - protein, 12 aa, Homo sapiens
  CDR3 for alpha chain variable domain of TCR clone 270350 (TRAV36/DV7, TRAJ53)
CCSGGSNYKLTF

SEQ ID NO: 540700 - protein, 15 aa, Homo sapiens
  CDR3 for beta chain variable domain of TCR clone 270350 (TRBV12-4, TRBJ2-5)
CASSGTGQAQETQYF

SEQ ID NO: 540701 - protein, 12 aa, Homo sapiens
  CDR3 for alpha chain variable domain of TCR clone 270351 (TRAV21, TRAJ11)
WAATSGYSTLTF

SEQ ID NO: 540702 - protein, 14 aa, Homo sapiens
  CDR3 for beta chain variable domain of TCR clone 270351 (TRBV20-1, TRBJ2-7)
CSAPELAGVGEQYF

SEQ ID NO: 540703 - protein, 16 aa, Homo sapiens
  CDR3 for alpha chain variable domain of TCR clone 270352 (TRAV3, TRAJ10)
CAVRDMRAGGVNKLTF

SEQ ID NO: 540704 - protein, 20 aa, Homo sapiens
  CDR3 for beta chain variable domain of TCR clone 270352 (TRBV11-3, TRBJ2-7)
CASSQRTSGSLRAVLRAGHQ

SEQ ID NO: 540705 - protein, 11 aa, Homo sapiens
  CDR3 for alpha chain variable domain of TCR clone 270353 (TRAV1-2, TRAJ20)
CAVANDYKLSF

SEQ ID NO: 540706 - protein, 14 aa, Homo sapiens
  CDR3 for beta chain variable domain of TCR clone 270353 (TRBV7-3, TRBJ2-1)
CASSLAGGTNEQFF

SEQ ID NO: 540707 - protein, 16 aa, Homo sapiens
  CDR3 for alpha chain variable domain of TCR clone 270354 (TRAV8-3, TRAJ44)
CAVGASNTGTASKLTF

SEQ ID NO: 540708 - protein, 15 aa, Homo sapiens
  CDR3 for beta chain variable domain of TCR clone 270354 (TRBV27, TRBJ1-5)
CASTFNRGSNQSQHF

SEQ ID NO: 540709 - protein, 14 aa, Homo sapiens
  CDR3 for alpha chain variable domain of TCR clone 270355 (TRAV12-2, TRAJ44)
CAVNPAGTASKLTF

SEQ ID NO: 540710 - protein, 16 aa, Homo sapiens
  CDR3 for beta chain variable domain of TCR clone 270355 (TRBV2, TRBJ2-3)
CASSEISGRGDDTQYF

SEQ ID NO: 540711 - protein, 10 aa, Homo sapiens
  CDR3 for alpha chain variable domain of TCR clone 270356 (TRAV5, TRAJ34)
CAEDTDKLIF

SEQ ID NO: 540712 - protein, 12 aa, Homo sapiens
  CDR3 for beta chain variable domain of TCR clone 270356 (TRBV11-2, TRBJ2-2)
CASSLGGEELFF

SEQ ID NO: 540713 - protein, 13 aa, Homo sapiens
  CDR3 for alpha chain variable domain of TCR clone 270357 (TRAV2, TRAJ40)
CAVVTSGTYKYIF

SEQ ID NO: 540714 - protein, 16 aa, Homo sapiens
  CDR3 for beta chain variable domain of TCR clone 270357 (TRBV29-1, TRBJ1-2)
CSVEANRDIANYGYNF

SEQ ID NO: 540715 - protein, 15 aa, Homo sapiens
  CDR3 for alpha chain variable domain of TCR clone 270358 (TRAV4, TRAJ26)
CLVGDMNNYGQNFVF

SEQ ID NO: 540716 - protein, 18 aa, Homo sapiens
  CDR3 for beta chain variable domain of TCR clone 270358 (TRBV28, TRBJ1-4)
CTSVPAVQEQGPNEKLFF

SEQ ID NO: 540717 - protein, 14 aa, Homo sapiens
  CDR3 for alpha chain variable domain of TCR clone 270359 (TRAV35, TRAJ13)
CAGSPSGGYQKVTF

SEQ ID NO: 540718 - protein, 13 aa, Homo sapiens
  CDR3 for beta chain variable domain of TCR clone 270359 (TRBV29-1, TRBJ1-1)
CSVGDRRNTEAVF

SEQ ID NO: 540719 - protein, 12 aa, Homo sapiens
  CDR3 for alpha chain variable domain of TCR clone 270360 (TRAV30, TRAJ43)
CGTEERGNDMRF

SEQ ID NO: 540720 - protein, 13 aa, Homo sapiens
  CDR3 for beta chain variable domain of TCR clone 270360 (TRBV27, TRBJ2-7)
CASSFSQGYEQYC

SEQ ID NO: 540721 - protein, 13 aa, Homo sapiens
  CDR3 for alpha chain variable domain of TCR clone 270361 (TRAV17, TRAJ9)
CATDYTGGFKTIF

SEQ ID NO: 540722 - protein, 13 aa, Homo sapiens
  CDR3 for beta chain variable domain of TCR clone 270361 (TRBV11-2, TRBJ2-5)
CASSSTGEETQYF

SEQ ID NO: 540723 - protein, 11 aa, Homo sapiens
  CDR3 for alpha chain variable domain of TCR clone 270362 (TRAV2, TRAJ23)
CAVDTRGKLIF

SEQ ID NO: 540724 - protein, 14 aa, Homo sapiens
  CDR3 for beta chain variable domain of TCR clone 270362 (TRBV2, TRBJ2-3)
CASSEGQKTDTQYF

SEQ ID NO: 540725 - protein, 13 aa, Homo sapiens
  CDR3 for alpha chain variable domain of TCR clone 270363 (TRAV2, TRAJ21)
CAVADLYFNKFYF

SEQ ID NO: 540726 - protein, 15 aa, Homo sapiens
  CDR3 for beta chain variable domain of TCR clone 270363 (TRBV28, TRBJ2-5)
CASSPGQGSIETQYF

SEQ ID NO: 540727 - protein, 14 aa, Homo sapiens
  CDR3 for alpha chain variable domain of TCR clone 270364 (TRAV17, TRAJ57)
CATDPQGGSEKLVF

SEQ ID NO: 540728 - protein, 14 aa, Homo sapiens
  CDR3 for beta chain variable domain of TCR clone 270364 (TRBV19, TRBJ2-1)
CASKDPSSYNEQFF

SEQ ID NO: 540729 - protein, 15 aa, Homo sapiens
  CDR3 for alpha chain variable domain of TCR clone 270365 (TRAV12-2, TRAJ43)
CAFDILFGAGTRLTV

SEQ ID NO: 540730 - protein, 18 aa, Homo sapiens
  CDR3 for beta chain variable domain of TCR clone 270365 (TRBV20-1, TRBJ2-3)
CSASGLAGGPGTTDTQYF

SEQ ID NO: 540731 - protein, 13 aa, Homo sapiens
  CDR3 for alpha chain variable domain of TCR clone 270366 (TRAV24, TRAJ44)
CALLTGPASKLTF

SEQ ID NO: 540732 - protein, 16 aa, Homo sapiens
  CDR3 for beta chain variable domain of TCR clone 270366 (TRBV2, TRBJ2-3)
CASSTSVEGVTDTQYF

SEQ ID NO: 540733 - protein, 17 aa, Homo sapiens
  CDR3 for alpha chain variable domain of TCR clone 270367 (TRAV13-1, TRAJ52)
CAAGRNAGGTSSGKLQF

SEQ ID NO: 540734 - protein, 13 aa, Homo sapiens
  CDR3 for beta chain variable domain of TCR clone 270367 (TRBV7-2, TRBJ1-1)
CASNLKGAKVAFF

SEQ ID NO: 540735 - protein, 14 aa, Homo sapiens
  CDR3 for alpha chain variable domain of TCR clone 270368 (TRAV12-3, TRAJ15)
CAMIPPQAGPALIF

SEQ ID NO: 540736 - protein, 12 aa, Homo sapiens
  CDR3 for beta chain variable domain of TCR clone 270368 (TRBV11-2, TRBJ2-2)
CASRFGGGELFF

SEQ ID NO: 540737 - protein, 14 aa, Homo sapiens
  CDR3 for alpha chain variable domain of TCR clone 270369 (TRAV8-1, TRAJ34)
CAVNPSYKTDKLIF

SEQ ID NO: 540738 - protein, 16 aa, Homo sapiens
  CDR3 for beta chain variable domain of TCR clone 270369 (TRBV7-2, TRBJ2-6)
CASSLAGRSGANVLTF

SEQ ID NO: 540739 - protein, 16 aa, Homo sapiens
  CDR3 for alpha chain variable domain of TCR clone 270370 (TRAV3, TRAJ21)
CAVESQANFNKFTLDL

SEQ ID NO: 540740 - protein, 18 aa, Homo sapiens
  CDR3 for beta chain variable domain of TCR clone 270370 (TRBV7-9, TRBJ2-1)
CASSLAVSGTSGRNEQFF

SEQ ID NO: 540741 - protein, 11 aa, Homo sapiens
  CDR3 for alpha chain variable domain of TCR clone 270371 (TRAV12-2, TRAJ43)
RAAYNNNDMRF

SEQ ID NO: 540742 - protein, 14 aa, Homo sapiens
  CDR3 for beta chain variable domain of TCR clone 270371 (TRBV7-8, TRBJ1-2)
CASSAGTAIYGYTF

SEQ ID NO: 540743 - protein, 15 aa, Homo sapiens
  CDR3 for alpha chain variable domain of TCR clone 270372 (TRAV21, TRAJ24)
CTARSSTDSWGKLQF

SEQ ID NO: 540744 - protein, 11 aa, Homo sapiens
  CDR3 for beta chain variable domain of TCR clone 270372 (TRBV11-2, TRBJ2-2)
CASSLPGELFF

SEQ ID NO: 540745 - protein, 14 aa, Homo sapiens
  CDR3 for alpha chain variable domain of TCR clone 270373 (TRAV9-2, TRAJ39)
CALYIYNAGNMLTF

SEQ ID NO: 540746 - protein, 18 aa, Homo sapiens
  CDR3 for beta chain variable domain of TCR clone 270373 (TRBV12-4, TRBJ2-5)
CASSSRGGRDPVLRARHA

SEQ ID NO: 540747 - protein, 14 aa, Homo sapiens
  CDR3 for alpha chain variable domain of TCR clone 270374 (TRAV1-2, TRAJ16)
CAVNRFSDGQKLLF

SEQ ID NO: 540748 - protein, 14 aa, Homo sapiens
  CDR3 for beta chain variable domain of TCR clone 270374 (TRBV19, TRBJ1-1)
CATTSGTKGTEAFF

SEQ ID NO: 540749 - protein, 13 aa, Homo sapiens
  CDR3 for alpha chain variable domain of TCR clone 270375 (TRAV8-6, TRAJ40)
CAVSVTGTYKYIF

SEQ ID NO: 540750 - protein, 15 aa, Homo sapiens
  CDR3 for beta chain variable domain of TCR clone 270375 (TRBV4-1, TRBJ2-3)
CASGGGQGIPDTQYF

SEQ ID NO: 540751 - protein, 13 aa, Homo sapiens
  CDR3 for alpha chain variable domain of TCR clone 270376 (TRAV14/DV4, TRAJ23)
CAMREVKGGKLIF

SEQ ID NO: 540752 - protein, 16 aa, Homo sapiens
  CDR3 for beta chain variable domain of TCR clone 270376 (TRBV7-3, TRBJ2-2)
CASSLKRGTLSGELFF

SEQ ID NO: 540753 - protein, 15 aa, Homo sapiens
  CDR3 for alpha chain variable domain of TCR clone 270377 (TRAV3, TRAJ22)
CAVRDRGGSARQLTF

SEQ ID NO: 540754 - protein, 16 aa, Homo sapiens
  CDR3 for beta chain variable domain of TCR clone 270377 (TRBV13, TRBJ2-3)
CQQPLQGSGGGNTQYF

SEQ ID NO: 540755 - protein, 13 aa, Homo sapiens
  CDR3 for alpha chain variable domain of TCR clone 270378 (TRAV1-2, TRAJ9)
CAALNTVGFKTIF

SEQ ID NO: 540756 - protein, 14 aa, Homo sapiens
  CDR3 for beta chain variable domain of TCR clone 270378 (TRBV13, TRBJ2-3)
CASSSGSPTDTQYF

SEQ ID NO: 540757 - protein, 14 aa, Homo sapiens
  CDR3 for alpha chain variable domain of TCR clone 270379 (TRAV2, TRAJ29)
CAVTPPSGNTPLVF

SEQ ID NO: 540758 - protein, 14 aa, Homo sapiens
  CDR3 for beta chain variable domain of TCR clone 270379 (TRBV7-2, TRBJ2-7)
CASRSQGAAYEQYF

SEQ ID NO: 540759 - protein, 13 aa, Homo sapiens
  CDR3 for alpha chain variable domain of TCR clone 270380 (TRAV17, TRAJ6)
CAKGFGGSYIPTF

SEQ ID NO: 540760 - protein, 14 aa, Homo sapiens
  CDR3 for beta chain variable domain of TCR clone 270380 (TRBV5-1, TRBJ2-5)
CASSFGGSQETQYF

SEQ ID NO: 540761 - protein, 16 aa, Homo sapiens
  CDR3 for alpha chain variable domain of TCR clone 270381 (TRAV2, TRAJ4)
CAVEDRFSGGYNKLIF

SEQ ID NO: 540762 - protein, 13 aa, Homo sapiens
  CDR3 for beta chain variable domain of TCR clone 270381 (TRBV19, TRBJ1-2)
CASSQGQVYGYTF

SEQ ID NO: 540763 - protein, 11 aa, Homo sapiens
  CDR3 for alpha chain variable domain of TCR clone 270382 (TRAV3, TRAJ21)
CAVGNFYKFYF

SEQ ID NO: 540764 - protein, 16 aa, Homo sapiens
  CDR3 for beta chain variable domain of TCR clone 270382 (TRBV19, TRBJ2-1)
CASSKTGPSSYNEQFF

SEQ ID NO: 540765 - protein, 11 aa, Homo sapiens
  CDR3 for alpha chain variable domain of TCR clone 270383 (TRAV2, TRAJ13)
CASGGYQKVTF

SEQ ID NO: 540766 - protein, 14 aa, Homo sapiens
  CDR3 for beta chain variable domain of TCR clone 270383 (TRBV12-5, TRBJ2-5)
CASGPRTHQETQYF

SEQ ID NO: 540767 - protein, 15 aa, Homo sapiens
  CDR3 for alpha chain variable domain of TCR clone 270384 (TRAV12-2, TRAJ53)
CAVNGGGGSNYKLTF

SEQ ID NO: 540768 - protein, 16 aa, Homo sapiens
  CDR3 for beta chain variable domain of TCR clone 270384 (TRBV20-1, TRBJ2-1)
CSARDFSGRIGDEQFF

SEQ ID NO: 540769 - protein, 14 aa, Homo sapiens
  CDR3 for alpha chain variable domain of TCR clone 270385 (TRAV2, TRAJ9)
CAVEDRSGGFKTNF

SEQ ID NO: 540770 - protein, 19 aa, Homo sapiens
  CDR3 for beta chain variable domain of TCR clone 270385 (TRBV25-1, TRBJ2-2)
CAILVYRVDRGRKTGELFF

SEQ ID NO: 540771 - protein, 13 aa, Homo sapiens
  CDR3 for alpha chain variable domain of TCR clone 270386 (TRAV20, TRAJ56)
CAVQAGANSKLSF

SEQ ID NO: 540772 - protein, 14 aa, Homo sapiens
  CDR3 for beta chain variable domain of TCR clone 270386 (TRBV28, TRBJ1-1)
CASSPRTRWAEAFF

SEQ ID NO: 540773 - protein, 14 aa, Homo sapiens
  CDR3 for alpha chain variable domain of TCR clone 270387 (TRAV8-4, TRAJ13)
CAVTLSGGYQKVTF

SEQ ID NO: 540774 - protein, 15 aa, Homo sapiens
  CDR3 for beta chain variable domain of TCR clone 270387 (TRBV9, TRBJ1-6)
CASSGAGTGDSPLHF

SEQ ID NO: 540775 - protein, 15 aa, Homo sapiens
  CDR3 for alpha chain variable domain of TCR clone 270388 (TRAV12-3, TRAJ6)
CAMSATTGGSYIPTF

SEQ ID NO: 540776 - protein, 15 aa, Homo sapiens
  CDR3 for beta chain variable domain of TCR clone 270388 (TRBV20-1, TRBJ2-7)
CSARDRVSGMDEQYF

SEQ ID NO: 540777 - protein, 15 aa, Homo sapiens
  CDR3 for alpha chain variable domain of TCR clone 270389 (TRAV12-2, TRAJ8)
CAVREENTGCQKLVF

SEQ ID NO: 540778 - protein, 15 aa, Homo sapiens
  CDR3 for beta chain variable domain of TCR clone 270389 (TRBV28, TRBJ2-4)
CAAGSGTLLMGIQYF

SEQ ID NO: 540779 - protein, 12 aa, Homo sapiens
  CDR3 for alpha chain variable domain of TCR clone 270390 (TRAV8-4, TRAJ22)
CAATGSARQLTF

SEQ ID NO: 540780 - protein, 15 aa, Homo sapiens
  CDR3 for beta chain variable domain of TCR clone 270390 (TRBV7-8, TRBJ1-5)
CASSLERRGLEPQHF

SEQ ID NO: 540781 - protein, 18 aa, Homo sapiens
  CDR3 for alpha chain variable domain of TCR clone 270391 (TRAV21, TRAJ52)
CAVRPSPAGGTSYGKLTF

SEQ ID NO: 540782 - protein, 14 aa, Homo sapiens
  CDR3 for beta chain variable domain of TCR clone 270391 (TRBV6-6, TRBJ1-6)
CASSERPQVSPLHF

SEQ ID NO: 540783 - protein, 11 aa, Homo sapiens
  CDR3 for alpha chain variable domain of TCR clone 270392 (TRAV2, TRAJ13)
CASGGYQKVTF

SEQ ID NO: 540784 - protein, 14 aa, Homo sapiens
  CDR3 for beta chain variable domain of TCR clone 270392 (TRBV7-3, TRBJ2-7)
CASSYDKDYYEQYF

SEQ ID NO: 540785 - protein, 12 aa, Homo sapiens
  CDR3 for alpha chain variable domain of TCR clone 270393 (TRAV12-1, TRAJ40)
CVVYSGTYKYIF

SEQ ID NO: 540786 - protein, 15 aa, Homo sapiens
  CDR3 for beta chain variable domain of TCR clone 270393 (TRBV2, TRBJ1-2)
CASSEIGGANYGYTF

SEQ ID NO: 540787 - protein, 14 aa, Homo sapiens
  CDR3 for alpha chain variable domain of TCR clone 270394 (TRAV1-2, TRAJ16)
CAVNRFSDGQKLLF

SEQ ID NO: 540788 - protein, 14 aa, Homo sapiens
  CDR3 for beta chain variable domain of TCR clone 270394 (TRBV19, TRBJ2-1)
YASPTFVLSGEQFF

SEQ ID NO: 540789 - protein, 13 aa, Homo sapiens
  CDR3 for alpha chain variable domain of TCR clone 270395 (TRAV12-2, TRAJ4)
CAGFSGGYNKLIF

SEQ ID NO: 540790 - protein, 13 aa, Homo sapiens
  CDR3 for beta chain variable domain of TCR clone 270395 (TRBV4-2, TRBJ1-1)
CASSQAGNTEAFF

SEQ ID NO: 540791 - protein, 16 aa, Homo sapiens
  CDR3 for alpha chain variable domain of TCR clone 270396 (TRAV3, TRAJ37)
FAVRPHGSGNTGKLIF

SEQ ID NO: 540792 - protein, 15 aa, Homo sapiens
  CDR3 for beta chain variable domain of TCR clone 270396 (TRBV20-1, TRBJ2-7)
CSARDRVSGMDEQYF

SEQ ID NO: 540793 - protein, 11 aa, Homo sapiens
  CDR3 for alpha chain variable domain of TCR clone 270397 (TRAV2, TRAJ13)
CASGGYQKVTF

SEQ ID NO: 540794 - protein, 15 aa, Homo sapiens
  CDR3 for beta chain variable domain of TCR clone 270397 (TRBV7-3, TRBJ2-5)
CASSPPTGLQETQYF

SEQ ID NO: 540795 - protein, 12 aa, Homo sapiens
  CDR3 for alpha chain variable domain of TCR clone 270398 (TRAV1-2, TRAJ29)
CAVPSGNTPLVF

SEQ ID NO: 540796 - protein, 13 aa, Homo sapiens
  CDR3 for beta chain variable domain of TCR clone 270398 (TRBV7-9, TRBJ2-7)
CASSFGSYEQYFG

SEQ ID NO: 540797 - protein, 14 aa, Homo sapiens
  CDR3 for alpha chain variable domain of TCR clone 270399 (TRAV26-1, TRAJ39)
CIVRENNAGNMLTF

SEQ ID NO: 540798 - protein, 15 aa, Homo sapiens
  CDR3 for beta chain variable domain of TCR clone 270399 (TRBV28, TRBJ1-2)
CASSLMGGRRDGYTF

SEQ ID NO: 540799 - protein, 11 aa, Homo sapiens
  CDR3 for alpha chain variable domain of TCR clone 270400 (TRAV16, TRAJ31)
FSLFNNSILMF

SEQ ID NO: 540800 - protein, 15 aa, Homo sapiens
  CDR3 for beta chain variable domain of TCR clone 270400 (TRBV18, TRBJ1-1)
CASSPRQGENTEAFF

SEQ ID NO: 540801 - protein, 12 aa, Homo sapiens
  CDR3 for alpha chain variable domain of TCR clone 270401 (TRAV13-1, TRAJ49)
CAASIRSNQFYF

SEQ ID NO: 540802 - protein, 14 aa, Homo sapiens
  CDR3 for beta chain variable domain of TCR clone 270401 (TRBV7-2, TRBJ2-1)
CASSPVLAGNEQFF

SEQ ID NO: 540803 - protein, 13 aa, Homo sapiens
  CDR3 for alpha chain variable domain of TCR clone 270402 (TRAV12-1, TRAJ36)
CGDAQTGANNLFF

SEQ ID NO: 540804 - protein, 12 aa, Homo sapiens
  CDR3 for beta chain variable domain of TCR clone 270402 (TRBV12-5, TRBJ2-5)
CASGQGVETQYF

SEQ ID NO: 540805 - protein, 15 aa, Homo sapiens
  CDR3 for alpha chain variable domain of TCR clone 270403 (TRAV8-3, TRAJ27)
CAVGPSKTNAGKSTF

SEQ ID NO: 540806 - protein, 15 aa, Homo sapiens
  CDR3 for beta chain variable domain of TCR clone 270403 (TRBV19, TRBJ1-5)
CASSDSGPRNQPQHF

SEQ ID NO: 540807 - protein, 11 aa, Homo sapiens
  CDR3 for alpha chain variable domain of TCR clone 270404 (TRAV2, TRAJ13)
CASGVYQKVTF

SEQ ID NO: 540808 - protein, 14 aa, Homo sapiens
  CDR3 for beta chain variable domain of TCR clone 270404 (TRBV11-2, TRBJ2-7)
CASSLGAGAYEQYF

SEQ ID NO: 540809 - protein, 13 aa, Homo sapiens
  CDR3 for alpha chain variable domain of TCR clone 270405 (TRAV20, TRAJ34)
CAVRSYNTDKLIC

SEQ ID NO: 540810 - protein, 15 aa, Homo sapiens
  CDR3 for beta chain variable domain of TCR clone 270405 (TRBV27, TRBJ1-3)
CASSPSPGSGNTIYF

SEQ ID NO: 540811 - protein, 15 aa, Homo sapiens
  CDR3 for alpha chain variable domain of TCR clone 270406 (TRAV13-1, TRAJ17)
CAASIERAAGNKLPF

SEQ ID NO: 540812 - protein, 17 aa, Homo sapiens
  CDR3 for beta chain variable domain of TCR clone 270406 (TRBV13, TRBJ2-3)
CASSLSRVAGGRNTQYF

SEQ ID NO: 540813 - protein, 15 aa, Homo sapiens
  CDR3 for alpha chain variable domain of TCR clone 270407 (TRAV1-1, TRAJ5)
CAVRHMDTGRRALTF

SEQ ID NO: 540814 - protein, 17 aa, Homo sapiens
  CDR3 for beta chain variable domain of TCR clone 270407 (TRBV28, TRBJ2-7)
CASSPGLAGGYSSEQYF

SEQ ID NO: 540815 - protein, 15 aa, Homo sapiens
  CDR3 for alpha chain variable domain of TCR clone 270408 (TRAV20, TRAJ23)
CAVQAVRNQGGKLIF

SEQ ID NO: 540816 - protein, 14 aa, Homo sapiens
  CDR3 for beta chain variable domain of TCR clone 270408 (TRBV2, TRBJ2-5)
CASSEVLAQETQYF

SEQ ID NO: 540817 - protein, 18 aa, Homo sapiens
  CDR3 for alpha chain variable domain of TCR clone 270409 (TRAV8-3, TRAJ4)
WVRDPTSNDPGGYNKLLF

SEQ ID NO: 540818 - protein, 13 aa, Homo sapiens
  CDR3 for beta chain variable domain of TCR clone 270409 (TRBV20-1, TRBJ1-2)
CSATGIQCSGYTF

SEQ ID NO: 540819 - protein, 14 aa, Homo sapiens
  CDR3 for alpha chain variable domain of TCR clone 270410 (TRAV17, TRAJ15)
CATAPNHAGTALIL

SEQ ID NO: 540820 - protein, 14 aa, Homo sapiens
  CDR3 for beta chain variable domain of TCR clone 270410 (TRBV19, TRBJ2-7)
CASSMGQGAIEQYF

SEQ ID NO: 540821 - protein, 16 aa, Homo sapiens
  CDR3 for alpha chain variable domain of TCR clone 270411 (TRAV8-3, TRAJ13)
CAVGAYPSGGYQKVTF

SEQ ID NO: 540822 - protein, 15 aa, Homo sapiens
  CDR3 for beta chain variable domain of TCR clone 270411 (TRBV27, TRBJ1-6)
CASSFDRGLGSPLHF

SEQ ID NO: 540823 - protein, 19 aa, Homo sapiens
  CDR3 for alpha chain variable domain of TCR clone 270412 (TRAV12-1, TRAJ31)
SLLIRDSKLSDSATPRLMF

SEQ ID NO: 540824 - protein, 15 aa, Homo sapiens
  CDR3 for beta chain variable domain of TCR clone 270412 (TRBV6-1, TRBJ2-7)
CASSESMGDFYEQYF

SEQ ID NO: 540825 - protein, 11 aa, Homo sapiens
  CDR3 for alpha chain variable domain of TCR clone 270413 (TRAV2, TRAJ13)
CASGGYQKVIF

SEQ ID NO: 540826 - protein, 14 aa, Homo sapiens
  CDR3 for beta chain variable domain of TCR clone 270413 (TRBV12-4, TRBJ1-4)
CASRMTGRSEKLFF

SEQ ID NO: 540827 - protein, 15 aa, Homo sapiens
  CDR3 for alpha chain variable domain of TCR clone 270414 (TRAV26-1, TRAJ37)
CIVRVADGNTGKLIF

SEQ ID NO: 540828 - protein, 16 aa, Homo sapiens
  CDR3 for beta chain variable domain of TCR clone 270414 (TRBV7-7, TRBJ2-1)
CASSLASGTSYNEQFF

SEQ ID NO: 540829 - protein, 13 aa, Homo sapiens
  CDR3 for alpha chain variable domain of TCR clone 270415 (TRAV12-3, TRAJ33)
CAMGGNSNYQLIW

SEQ ID NO: 540830 - protein, 13 aa, Homo sapiens
  CDR3 for beta chain variable domain of TCR clone 270415 (TRBV7-2, TRBJ2-2)
CASSLAVTGELFF

SEQ ID NO: 540831 - protein, 15 aa, Homo sapiens
  CDR3 for alpha chain variable domain of TCR clone 270416 (TRAV29/DV5, TRAJ24)
CAASGATDSWGTFQF

SEQ ID NO: 540832 - protein, 12 aa, Homo sapiens
  CDR3 for beta chain variable domain of TCR clone 270416 (TRBV11-2, TRBJ2-2)
CASSRPTGELFF

SEQ ID NO: 540833 - protein, 15 aa, Homo sapiens
  CDR3 for alpha chain variable domain of TCR clone 270417 (TRAV26-1, TRAJ38)
CIADNAGNNHIQTLT

SEQ ID NO: 540834 - protein, 20 aa, Homo sapiens
  CDR3 for beta chain variable domain of TCR clone 270417 (TRBV7-8, TRBJ2-2)
CASSHLFPGPTIHITGELFF

SEQ ID NO: 540835 - protein, 19 aa, Homo sapiens
  CDR3 for alpha chain variable domain of TCR clone 270418 (TRAV1-2, TRAJ26)
CLLPLCCERPDNYGKNFVF

SEQ ID NO: 540836 - protein, 13 aa, Homo sapiens
  CDR3 for beta chain variable domain of TCR clone 270418 (TRBV19, TRBJ1-5)
CASSMRGYQPQHF

SEQ ID NO: 540837 - protein, 17 aa, Homo sapiens
  CDR3 for alpha chain variable domain of TCR clone 270419 (TRAV17, TRAJ28)
CATDPRRGWAGSYQRTF

SEQ ID NO: 540838 - protein, 16 aa, Homo sapiens
  CDR3 for beta chain variable domain of TCR clone 270419 (TRBV25-1, TRBJ1-1)
CASSGDRDRGRIEAFF

SEQ ID NO: 540839 - protein, 15 aa, Homo sapiens
  CDR3 for alpha chain variable domain of TCR clone 270420 (TRAV3, TRAJ5)
RAVRDLDTGKRPLTF

SEQ ID NO: 540840 - protein, 15 aa, Homo sapiens
  CDR3 for beta chain variable domain of TCR clone 270420 (TRBV3-1, TRBJ2-7)
CASSQVRQGAYEQYF

SEQ ID NO: 540841 - protein, 17 aa, Homo sapiens
  CDR3 for alpha chain variable domain of TCR clone 270421 (TRAV3, TRAJ12)
CAVGDGGRMDSSYKLIF

SEQ ID NO: 540842 - protein, 13 aa, Homo sapiens
  CDR3 for beta chain variable domain of TCR clone 270421 (TRBV15, TRBJ1-6)
CATSGGLNSPLHF

SEQ ID NO: 540843 - protein, 10 aa, Homo sapiens
  CDR3 for alpha chain variable domain of TCR clone 270422 (TRAV1-2, TRAJ23)
CAGQGGKLIF

SEQ ID NO: 540844 - protein, 15 aa, Homo sapiens
  CDR3 for beta chain variable domain of TCR clone 270422 (TRBV27, TRBJ2-1)
CASSNGGGSSNEQFF

SEQ ID NO: 540845 - protein, 13 aa, Homo sapiens
  CDR3 for alpha chain variable domain of TCR clone 270423 (TRAV12-3, TRAJ33)
CAMSVNSNYQLIW

SEQ ID NO: 540846 - protein, 14 aa, Homo sapiens
  CDR3 for beta chain variable domain of TCR clone 270423 (TRBV12-5, TRBJ2-5)
CASGSRTQQETQYF

SEQ ID NO: 540847 - protein, 13 aa, Homo sapiens
  CDR3 for alpha chain variable domain of TCR clone 270424 (TRAV8-1, TRAJ28)
CAVSGAGSYHLTF

SEQ ID NO: 540848 - protein, 14 aa, Homo sapiens
  CDR3 for beta chain variable domain of TCR clone 270424 (TRBV19, TRBJ2-5)
CASSMTGQQETQYF

SEQ ID NO: 540849 - protein, 15 aa, Homo sapiens
  CDR3 for alpha chain variable domain of TCR clone 270425 (TRAV26-1, TRAJ22)
CIVRVSFWFCKATDL

SEQ ID NO: 540850 - protein, 13 aa, Homo sapiens
  CDR3 for beta chain variable domain of TCR clone 270425 (TRBV7-9, TRBJ1-2)
CASSLKQNYGDAF

SEQ ID NO: 540851 - protein, 16 aa, Homo sapiens
  CDR3 for alpha chain variable domain of TCR clone 270426 (TRAV26-1, TRAJ53)
CIVRVAMGGSNYKLTF

SEQ ID NO: 540852 - protein, 20 aa, Homo sapiens
  CDR3 for beta chain variable domain of TCR clone 270426 (TRBV28, TRBJ2-1)
CASTPIGRSPGLAGGNEQFF

SEQ ID NO: 540853 - protein, 14 aa, Homo sapiens
  CDR3 for alpha chain variable domain of TCR clone 270427 (TRAV13-1, TRAJ44)
CAAKATGTASKLTF

SEQ ID NO: 540854 - protein, 17 aa, Homo sapiens
  CDR3 for beta chain variable domain of TCR clone 270427 (TRBV7-3, TRBJ2-3)
CASSLMKRRRGADTHYF

SEQ ID NO: 540855 - protein, 14 aa, Homo sapiens
  CDR3 for alpha chain variable domain of TCR clone 270428 (TRAV8-4, TRAJ27)
CAVSKEPMQANQPL

SEQ ID NO: 540856 - protein, 16 aa, Homo sapiens
  CDR3 for beta chain variable domain of TCR clone 270428 (TRBV2, TRBJ2-7)
CASSSTRRGSSYEQYF

SEQ ID NO: 540857 - protein, 11 aa, Homo sapiens
  CDR3 for alpha chain variable domain of TCR clone 270429 (TRAV35, TRAJ30)
CAGPGDDKIIF

SEQ ID NO: 540858 - protein, 14 aa, Homo sapiens
  CDR3 for beta chain variable domain of TCR clone 270429 (TRBV7-6, TRBJ1-6)
CASSQAGGGSPLHV

SEQ ID NO: 540859 - protein, 10 aa, Homo sapiens
  CDR3 for alpha chain variable domain of TCR clone 270430 (TRAV21, TRAJ20)
CAVNVGRLQA

SEQ ID NO: 540860 - protein, 15 aa, Homo sapiens
  CDR3 for beta chain variable domain of TCR clone 270430 (TRBV6-1, TRBJ2-5)
CASSEFPLMGETQSF

SEQ ID NO: 540861 - protein, 11 aa, Homo sapiens
  CDR3 for alpha chain variable domain of TCR clone 270431 (TRAV8-6, TRAJ23)
CAVISGGKLIF

SEQ ID NO: 540862 - protein, 13 aa, Homo sapiens
  CDR3 for beta chain variable domain of TCR clone 270431 (TRBV12-5, TRBJ2-3)
CASGDRQSDTQYF

SEQ ID NO: 540863 - protein, 12 aa, Homo sapiens
  CDR3 for alpha chain variable domain of TCR clone 270432 (TRAV13-1, TRAJ49)
CAASPMGNQFYF

SEQ ID NO: 540864 - protein, 13 aa, Homo sapiens
  CDR3 for beta chain variable domain of TCR clone 270432 (TRBV20-1, TRBJ2-2)
CSASVAGTGELFF

SEQ ID NO: 540865 - protein, 15 aa, Homo sapiens
  CDR3 for alpha chain variable domain of TCR clone 270433 (TRAV8-3, TRAJ45)
CASSYSRGGADGLTF

SEQ ID NO: 540866 - protein, 13 aa, Homo sapiens
  CDR3 for beta chain variable domain of TCR clone 270433 (TRBV7-2, TRBJ2-2)
CASSSVRAGELFF

SEQ ID NO: 540867 - protein, 15 aa, Homo sapiens
  CDR3 for alpha chain variable domain of TCR clone 270434 (TRAV17, TRAJ52)
CATEAGGTSYGKLTF

SEQ ID NO: 540868 - protein, 15 aa, Homo sapiens
  CDR3 for beta chain variable domain of TCR clone 270434 (TRBV9, TRBJ1-6)
CASSVAGTGDSPLHF

SEQ ID NO: 540869 - protein, 13 aa, Homo sapiens
  CDR3 for alpha chain variable domain of TCR clone 270435 (TRAV26-2, TRAJ43)
CILRAANNNDMRF

SEQ ID NO: 540870 - protein, 16 aa, Homo sapiens
  CDR3 for beta chain variable domain of TCR clone 270435 (TRBV28, TRBJ1-5)
CASSLTGQGWNQTQHF

SEQ ID NO: 540871 - protein, 12 aa, Homo sapiens
  CDR3 for alpha chain variable domain of TCR clone 270436 (TRAV41, TRAJ45)
CAVGRGADGPTF

SEQ ID NO: 540872 - protein, 13 aa, Homo sapiens
  CDR3 for beta chain variable domain of TCR clone 270436 (TRBV7-2, TRBJ2-1)
CASSLGQSGEQFF

SEQ ID NO: 540873 - protein, 13 aa, Homo sapiens
  CDR3 for alpha chain variable domain of TCR clone 270437 (TRAV1-2, TRAJ31)
CAVRPSNNARLMF

SEQ ID NO: 540874 - protein, 12 aa, Homo sapiens
  CDR3 for beta chain variable domain of TCR clone 270437 (TRBV7-8, TRBJ2-7)
CASSLGDREQYF

SEQ ID NO: 540875 - protein, 16 aa, Homo sapiens
  CDR3 for alpha chain variable domain of TCR clone 270438 (TRAV20, TRAJ53)
CAVRRGSGGSNYKLTF

SEQ ID NO: 540876 - protein, 11 aa, Homo sapiens
  CDR3 for beta chain variable domain of TCR clone 270438 (TRBV7-9, TRBJ2-3)
CASSWGDTQYF

SEQ ID NO: 540877 - protein, 14 aa, Homo sapiens
  CDR3 for alpha chain variable domain of TCR clone 270439 (TRAV38-1, TRAJ28)
CAFTSGAGSYQLTF

SEQ ID NO: 540878 - protein, 13 aa, Homo sapiens
  CDR3 for beta chain variable domain of TCR clone 270439 (TRBV6-3, TRBJ1-1)
CASSYGRGSGAFF

SEQ ID NO: 540879 - protein, 12 aa, Homo sapiens
  CDR3 for alpha chain variable domain of TCR clone 270440 (TRAV12-1, TRAJ34)
CVVAGATDKLIF

SEQ ID NO: 540880 - protein, 14 aa, Homo sapiens
  CDR3 for beta chain variable domain of TCR clone 270440 (TRBV25-1, TRBJ1-1)
CASTHLGGNTEAFF

SEQ ID NO: 540881 - protein, 13 aa, Homo sapiens
  CDR3 for alpha chain variable domain of TCR clone 270441 (TRAV8-3, TRAJ28)
CAVGAVGSYQLTV

SEQ ID NO: 540882 - protein, 17 aa, Homo sapiens
  CDR3 for beta chain variable domain of TCR clone 270441 (TRBV11-2, TRBJ2-1)
CASSLYPPGVEYNEQFF

SEQ ID NO: 540883 - protein, 18 aa, Homo sapiens
  CDR3 for alpha chain variable domain of TCR clone 270442 (TRAV35, TRAJ28)
CAGHNSPLSGAGSYQLTF

SEQ ID NO: 540884 - protein, 12 aa, Homo sapiens
  CDR3 for beta chain variable domain of TCR clone 270442 (TRBV7-9, TRBJ1-1)
CASSLEGTEAFF

SEQ ID NO: 540885 - protein, 14 aa, Homo sapiens
  CDR3 for alpha chain variable domain of TCR clone 270443 (TRAV17, TRAJ9)
CATVTLGGGFKTIF

SEQ ID NO: 540886 - protein, 15 aa, Homo sapiens
  CDR3 for beta chain variable domain of TCR clone 270443 (TRBV25-1, TRBJ2-5)
CASSDTRGYQETQYF

SEQ ID NO: 540887 - protein, 17 aa, Homo sapiens
  CDR3 for alpha chain variable domain of TCR clone 270444 (TRAV38-2/DV8, TRAJ48)
CAYRSVFRGLGNGKLTF

SEQ ID NO: 540888 - protein, 15 aa, Homo sapiens
  CDR3 for beta chain variable domain of TCR clone 270444 (TRBV5-1, TRBJ2-5)
CASSRLGTVQETQYF

SEQ ID NO: 540889 - protein, 11 aa, Homo sapiens
  CDR3 for alpha chain variable domain of TCR clone 270445 (TRAV13-1, TRAJ6)
CATLGSYIPTF

SEQ ID NO: 540890 - protein, 12 aa, Homo sapiens
  CDR3 for beta chain variable domain of TCR clone 270445 (TRBV11-2, TRBJ2-1)
CARSPGNNEQFF

SEQ ID NO: 540891 - protein, 16 aa, Homo sapiens
  CDR3 for alpha chain variable domain of TCR clone 270446 (TRAV21, TRAJ58)
CAVRGDRETSGSRLTF

SEQ ID NO: 540892 - protein, 18 aa, Homo sapiens
  CDR3 for beta chain variable domain of TCR clone 270446 (TRBV5-5, TRBJ1-5)
CASSLRQVKGSSNQPQHF

SEQ ID NO: 540893 - protein, 15 aa, Homo sapiens
  CDR3 for alpha chain variable domain of TCR clone 270447 (TRAV13-2, TRAJ58)
CVTAQKETSGSRLTF

SEQ ID NO: 540894 - protein, 14 aa, Homo sapiens
  CDR3 for beta chain variable domain of TCR clone 270447 (TRBV7-2, TRBJ2-3)
CASRRGIAADTQYF

SEQ ID NO: 540895 - protein, 17 aa, Homo sapiens
  CDR3 for alpha chain variable domain of TCR clone 270448 (TRAV3, TRAJ42)
CAVRDRDYGGSQGNSIF

SEQ ID NO: 540896 - protein, 15 aa, Homo sapiens
  CDR3 for beta chain variable domain of TCR clone 270448 (TRBV6-6, TRBJ2-7)
CASSYSYGGSYEQYF

SEQ ID NO: 540897 - protein, 11 aa, Homo sapiens
  CDR3 for alpha chain variable domain of TCR clone 270449 (TRAV2, TRAJ13)
CASGGYQKVTF

SEQ ID NO: 540898 - protein, 16 aa, Homo sapiens
  CDR3 for beta chain variable domain of TCR clone 270449 (TRBV19, TRBJ2-2)
CASSFPGQGLAGELFF

SEQ ID NO: 540899 - protein, 11 aa, Homo sapiens
  CDR3 for alpha chain variable domain of TCR clone 270450 (TRAV12-3, TRAJ43)
CAMSVSNDMRF

SEQ ID NO: 540900 - protein, 16 aa, Homo sapiens
  CDR3 for beta chain variable domain of TCR clone 270450 (TRBV28, TRBJ2-4)
CASSLIQGSLGNIQYF

SEQ ID NO: 540901 - protein, 14 aa, Homo sapiens
  CDR3 for alpha chain variable domain of TCR clone 270451 (TRAV29/DV5, TRAJ26)
CAASVSPRVRLLSF

SEQ ID NO: 540902 - protein, 17 aa, Homo sapiens
  CDR3 for beta chain variable domain of TCR clone 270451 (TRBV20-1, TRBJ2-2)
CSASGSGQGGLTGELFF

SEQ ID NO: 540903 - protein, 13 aa, Homo sapiens
  CDR3 for alpha chain variable domain of TCR clone 270452 (TRAV8-3, TRAJ37)
CAVPSSNTGKLIF

SEQ ID NO: 540904 - protein, 12 aa, Homo sapiens
  CDR3 for beta chain variable domain of TCR clone 270452 (TRBV11-2, TRBJ2-1)
CATSPGNNEQFF

SEQ ID NO: 540905 - protein, 16 aa, Homo sapiens
  CDR3 for alpha chain variable domain of TCR clone 270453 (TRAV8-3, TRAJ13)
WAVGAYPSGGYQKVTF

SEQ ID NO: 540906 - protein, 14 aa, Homo sapiens
  CDR3 for beta chain variable domain of TCR clone 270453 (TRBV18, TRBJ2-5)
CASSPRASSETQYF

SEQ ID NO: 540907 - protein, 16 aa, Homo sapiens
  CDR3 for alpha chain variable domain of TCR clone 270454 (TRAV22, TRAJ45)
CAVERGKRGGADGLTF

SEQ ID NO: 540908 - protein, 13 aa, Homo sapiens
  CDR3 for beta chain variable domain of TCR clone 270454 (TRBV27, TRBJ1-1)
CASSLSIGAEGFF

SEQ ID NO: 540909 - protein, 14 aa, Homo sapiens
  CDR3 for alpha chain variable domain of TCR clone 270455 (TRAV17, TRAJ57)
CATDPQSGSEKLVF

SEQ ID NO: 540910 - protein, 18 aa, Homo sapiens
  CDR3 for beta chain variable domain of TCR clone 270455 (TRBV7-9, TRBJ2-7)
CASSLTTSGSRTWYEQYF

SEQ ID NO: 540911 - protein, 14 aa, Homo sapiens
  CDR3 for alpha chain variable domain of TCR clone 270456 (TRAV12-2, TRAJ9)
CAVNMEGGGFKTIF

SEQ ID NO: 540912 - protein, 14 aa, Homo sapiens
  CDR3 for beta chain variable domain of TCR clone 270456 (TRBV27, TRBJ2-5)
CAGSSLKGWETQYF

SEQ ID NO: 540913 - protein, 12 aa, Homo sapiens
  CDR3 for alpha chain variable domain of TCR clone 270457 (TRAV12-2, TRAJ28)
CAVRAGSYQLTF

SEQ ID NO: 540914 - protein, 19 aa, Homo sapiens
  CDR3 for beta chain variable domain of TCR clone 270457 (TRBV19, TRBJ2-2)
CASTRPGLAGGRVTGELFF

SEQ ID NO: 540915 - protein, 13 aa, Homo sapiens
  CDR3 for alpha chain variable domain of TCR clone 270458 (TRAV13-1, TRAJ37)
CSAVSGNTGKLIF

SEQ ID NO: 540916 - protein, 17 aa, Homo sapiens
  CDR3 for beta chain variable domain of TCR clone 270458 (TRBV10-2, TRBJ1-6)
CASSENRGSSYNSPLHF

SEQ ID NO: 540917 - protein, 14 aa, Homo sapiens
  CDR3 for alpha chain variable domain of TCR clone 270459 (TRAV16, TRAJ40)
CALFRASGTYKYIF

SEQ ID NO: 540918 - protein, 16 aa, Homo sapiens
  CDR3 for beta chain variable domain of TCR clone 270459 (TRBV18, TRBJ1-2)
CASSPGTGDYNYGYTF

SEQ ID NO: 540919 - protein, 12 aa, Homo sapiens
  CDR3 for alpha chain variable domain of TCR clone 270460 (TRAV21, TRAJ30)
CAVMNRDDKIIF

SEQ ID NO: 540920 - protein, 17 aa, Homo sapiens
  CDR3 for beta chain variable domain of TCR clone 270460 (TRBV5-1, TRBJ1-1)
YASRPIRTGGVNTEAFF

SEQ ID NO: 540921 - protein, 14 aa, Homo sapiens
  CDR3 for alpha chain variable domain of TCR clone 270461 (TRAV1-2, TRAJ16)
CAVNRFSDGEKLLF

SEQ ID NO: 540922 - protein, 14 aa, Homo sapiens
  CDR3 for beta chain variable domain of TCR clone 270461 (TRBV12-5, TRBJ2-5)
CASGSRTHQETQYF

SEQ ID NO: 540923 - protein, 12 aa, Homo sapiens
  CDR3 for alpha chain variable domain of TCR clone 270462 (TRAV20, TRAJ39)
CAVGNAGNMLTF

SEQ ID NO: 540924 - protein, 13 aa, Homo sapiens
  CDR3 for beta chain variable domain of TCR clone 270462 (TRBV29-1, TRBJ2-5)
CSARDRVEETQYF

SEQ ID NO: 540925 - protein, 15 aa, Homo sapiens
  CDR3 for alpha chain variable domain of TCR clone 270463 (TRAV8-3, TRAJ11)
CAVGLLNSGYSTLTF

SEQ ID NO: 540926 - protein, 13 aa, Homo sapiens
  CDR3 for beta chain variable domain of TCR clone 270463 (TRBV7-9, TRBJ1-1)
CASSQDWGAEAFF

SEQ ID NO: 540927 - protein, 14 aa, Homo sapiens
  CDR3 for alpha chain variable domain of TCR clone 270464 (TRAV12-2, TRAJ45)
CAVNIGGGADGLTF

SEQ ID NO: 540928 - protein, 13 aa, Homo sapiens
  CDR3 for beta chain variable domain of TCR clone 270464 (TRBV19, TRBJ2-2)
CASSIWSTVELFF

SEQ ID NO: 540929 - protein, 13 aa, Homo sapiens
  CDR3 for alpha chain variable domain of TCR clone 270465 (TRAV21, TRAJ57)
CAVTQGGSEKLVF

SEQ ID NO: 540930 - protein, 12 aa, Homo sapiens
  CDR3 for beta chain variable domain of TCR clone 270465 (TRBV11-2, TRBJ2-2)
CASSLPTGELFF

SEQ ID NO: 540931 - protein, 14 aa, Homo sapiens
  CDR3 for alpha chain variable domain of TCR clone 270466 (TRAV12-3, TRAJ58)
CAMSTETSGSRLTY

SEQ ID NO: 540932 - protein, 13 aa, Homo sapiens
  CDR3 for beta chain variable domain of TCR clone 270466 (TRBV27, TRBJ2-3)
CASSWGRTDTQYF

SEQ ID NO: 540933 - protein, 13 aa, Homo sapiens
  CDR3 for alpha chain variable domain of TCR clone 270467 (TRAV26-2, TRAJ43)
CILRAVNNNDMRF

SEQ ID NO: 540934 - protein, 13 aa, Homo sapiens
  CDR3 for beta chain variable domain of TCR clone 270467 (TRBV7-8, TRBJ1-1)
CASTATGPTEAFF

SEQ ID NO: 540935 - protein, 16 aa, Homo sapiens
  CDR3 for alpha chain variable domain of TCR clone 270468 (TRAV3, TRAJ37)
WAVRGKGSGNTGKLIF

SEQ ID NO: 540936 - protein, 16 aa, Homo sapiens
  CDR3 for beta chain variable domain of TCR clone 270468 (TRBV12-4, TRBJ1-5)
CASSRPVGGSNQPQHF

SEQ ID NO: 540937 - protein, 11 aa, Homo sapiens
  CDR3 for alpha chain variable domain of TCR clone 270469 (TRAV12-3, TRAJ49)
CAANTGNQFYF

SEQ ID NO: 540938 - protein, 13 aa, Homo sapiens
  CDR3 for beta chain variable domain of TCR clone 270469 (TRBV19, TRBJ2-5)
CASSGRAGETQYF

SEQ ID NO: 540939 - protein, 11 aa, Homo sapiens
  CDR3 for alpha chain variable domain of TCR clone 270470 (TRAV13-1, TRAJ52)
PGGTSYGKLTF

SEQ ID NO: 540940 - protein, 16 aa, Homo sapiens
  CDR3 for beta chain variable domain of TCR clone 270470 (TRBV28, TRBJ2-7)
WASSPWVATGDLSQYF

SEQ ID NO: 540941 - protein, 15 aa, Homo sapiens
  CDR3 for alpha chain variable domain of TCR clone 270471 (TRAV26-1, TRAJ44)
CIIRANTGTASKLTF

SEQ ID NO: 540942 - protein, 16 aa, Homo sapiens
  CDR3 for beta chain variable domain of TCR clone 270471 (TRBV7-7, TRBJ2-1)
CASSLASGTSYNEHFF

SEQ ID NO: 540943 - protein, 14 aa, Homo sapiens
  CDR3 for alpha chain variable domain of TCR clone 270472 (TRAV2, TRAJ9)
CAVEDRSGGFKTIV

SEQ ID NO: 540944 - protein, 11 aa, Homo sapiens
  CDR3 for beta chain variable domain of TCR clone 270472 (TRBV7-9, TRBJ2-5)
CASSLGETQYF

SEQ ID NO: 540945 - protein, 12 aa, Homo sapiens
  CDR3 for alpha chain variable domain of TCR clone 270473 (TRAV17, TRAJ12)
CATLRSSYKLIF

SEQ ID NO: 540946 - protein, 16 aa, Homo sapiens
  CDR3 for beta chain variable domain of TCR clone 270473 (TRBV7-3, TRBJ2-1)
CASSLEGYRSYNEQFF

SEQ ID NO: 540947 - protein, 11 aa, Homo sapiens
  CDR3 for alpha chain variable domain of TCR clone 270474 (TRAV1-2, TRAJ20)
CAVANDYKLSF

SEQ ID NO: 540948 - protein, 17 aa, Homo sapiens
  CDR3 for beta chain variable domain of TCR clone 270474 (TRBV24-1, TRBJ2-1)
CATSDVSTRGTYNEQFF

SEQ ID NO: 540949 - protein, 14 aa, Homo sapiens
  CDR3 for alpha chain variable domain of TCR clone 270475 (TRAV17, TRAJ57)
CATDPQGGSEKLVF

SEQ ID NO: 540950 - protein, 13 aa, Homo sapiens
  CDR3 for beta chain variable domain of TCR clone 270475 (TRBV19, TRBJ2-7)
CASSPRQSYEPYF

SEQ ID NO: 540951 - protein, 17 aa, Homo sapiens
  CDR3 for alpha chain variable domain of TCR clone 270476 (TRAV3, TRAJ6)
CAVRDGPRAGGSDIPTL

SEQ ID NO: 540952 - protein, 14 aa, Homo sapiens
  CDR3 for beta chain variable domain of TCR clone 270476 (TRBV7-2, TRBJ2-7)
CASSPKTSFYEQYF

SEQ ID NO: 540953 - protein, 17 aa, Homo sapiens
  CDR3 for alpha chain variable domain of TCR clone 270477 (TRAV1-2, TRAJ9)
CAVRGPNPDTGGFKTIF

SEQ ID NO: 540954 - protein, 15 aa, Homo sapiens
  CDR3 for beta chain variable domain of TCR clone 270477 (TRBV7-2, TRBJ2-2)
CASRRPGQNTGELFF

SEQ ID NO: 540955 - protein, 10 aa, Homo sapiens
  CDR3 for alpha chain variable domain of TCR clone 270478 (TRAV26-1, TRAJ22)
CIAGSRQLTF

SEQ ID NO: 540956 - protein, 17 aa, Homo sapiens
  CDR3 for beta chain variable domain of TCR clone 270478 (TRBV20-1, TRBJ2-2)
CSASGSGQGGLTGELFF

SEQ ID NO: 540957 - protein, 13 aa, Homo sapiens
  CDR3 for alpha chain variable domain of TCR clone 270479 (TRAV3, TRAJ27)
CAVRPLGAGKSTF

SEQ ID NO: 540958 - protein, 14 aa, Homo sapiens
  CDR3 for beta chain variable domain of TCR clone 270479 (TRBV7-2, TRBJ2-7)
CASSPKTSFYEQYL

SEQ ID NO: 540959 - protein, 14 aa, Homo sapiens
  CDR3 for alpha chain variable domain of TCR clone 270480 (TRAV27, TRAJ22)
CAGLPSVSARQLTF

SEQ ID NO: 540960 - protein, 14 aa, Homo sapiens
  CDR3 for beta chain variable domain of TCR clone 270480 (TRBV7-9, TRBJ2-3)
CASSLEDGTDTQYF

SEQ ID NO: 540961 - protein, 16 aa, Homo sapiens
  CDR3 for alpha chain variable domain of TCR clone 270481 (TRAV8-6, TRAJ32)
CAVSDPYGGATNKLIF

SEQ ID NO: 540962 - protein, 18 aa, Homo sapiens
  CDR3 for beta chain variable domain of TCR clone 270481 (TRBV4-2, TRBJ2-6)
CASSHLQGVLTGANVLTF

SEQ ID NO: 540963 - protein, 11 aa, Homo sapiens
  CDR3 for alpha chain variable domain of TCR clone 270482 (TRAV2, TRAJ33)
CAVESNYQSIW

SEQ ID NO: 540964 - protein, 16 aa, Homo sapiens
  CDR3 for beta chain variable domain of TCR clone 270482 (TRBV20-1, TRBJ1-4)
CSAPGQGLLTNEKLFF

SEQ ID NO: 540965 - protein, 14 aa, Homo sapiens
  CDR3 for alpha chain variable domain of TCR clone 270483 (TRAV9-2, TRAJ39)
CAHYIYNAGNMLTF

SEQ ID NO: 540966 - protein, 14 aa, Homo sapiens
  CDR3 for beta chain variable domain of TCR clone 270483 (TRBV10-2, TRBJ2-1)
CASSEGTSEDEQFF

SEQ ID NO: 540967 - protein, 16 aa, Homo sapiens
  CDR3 for alpha chain variable domain of TCR clone 270484 (TRAV3, TRAJ34)
CAVRARGTPTSSSLGL

SEQ ID NO: 540968 - protein, 10 aa, Homo sapiens
  CDR3 for beta chain variable domain of TCR clone 270484 (TRBV6-3, TRBJ2-7)
CASSSPRQFS

SEQ ID NO: 540969 - protein, 18 aa, Homo sapiens
  CDR3 for alpha chain variable domain of TCR clone 270485 (TRAV21, TRAJ52)
CAVRPSPAGGTSYGNMTF

SEQ ID NO: 540970 - protein, 13 aa, Homo sapiens
  CDR3 for beta chain variable domain of TCR clone 270485 (TRBV19, TRBJ1-2)
CASSVPGQDGYTF

SEQ ID NO: 540971 - protein, 12 aa, Homo sapiens
  CDR3 for alpha chain variable domain of TCR clone 270486 (TRAV8-6, TRAJ11)
CAVSSGDSTLTF

SEQ ID NO: 540972 - protein, 11 aa, Homo sapiens
  CDR3 for beta chain variable domain of TCR clone 270486 (TRBV20-1, TRBJ1-5)
CSAQGDQPQHF

SEQ ID NO: 540973 - protein, 17 aa, Homo sapiens
  CDR3 for alpha chain variable domain of TCR clone 270487 (TRAV26-1, TRAJ22)
CIVRVPSHSGSARQLTF

SEQ ID NO: 540974 - protein, 16 aa, Homo sapiens
  CDR3 for beta chain variable domain of TCR clone 270487 (TRBV28, TRBJ2-1)
CASSRSGRVVGNEQFF

SEQ ID NO: 540975 - protein, 14 aa, Homo sapiens
  CDR3 for alpha chain variable domain of TCR clone 270488 (TRAV17, TRAJ35)
CATDRPGFGNVLHC

SEQ ID NO: 540976 - protein, 19 aa, Homo sapiens
  CDR3 for beta chain variable domain of TCR clone 270488 (TRBV11-3, TRBJ2-2)
CASSTRPAAKTTNTGELFF

SEQ ID NO: 540977 - protein, 13 aa, Homo sapiens
  CDR3 for alpha chain variable domain of TCR clone 270489 (TRAV27, TRAJ42)
CAGARGSQGNLNF

SEQ ID NO: 540978 - protein, 15 aa, Homo sapiens
  CDR3 for beta chain variable domain of TCR clone 270489 (TRBV10-3, TRBJ2-2)
CAIRTDREDTGELFF

SEQ ID NO: 540979 - protein, 15 aa, Homo sapiens
  CDR3 for alpha chain variable domain of TCR clone 270490 (TRAV4, TRAJ28)
CLVEGSGAGSYQLTF

SEQ ID NO: 540980 - protein, 15 aa, Homo sapiens
  CDR3 for beta chain variable domain of TCR clone 270490 (TRBV9, TRBJ2-3)
CASIVRGLAVDTQYF

SEQ ID NO: 540981 - protein, 10 aa, Homo sapiens
  CDR3 for alpha chain variable domain of TCR clone 270491 (TRAV30, TRAJ48)
CGIGNEKLTF

SEQ ID NO: 540982 - protein, 16 aa, Homo sapiens
  CDR3 for beta chain variable domain of TCR clone 270491 (TRBV27, TRBJ2-1)
SMNVEPGTSGDNKQFF

SEQ ID NO: 540983 - protein, 13 aa, Homo sapiens
  CDR3 for alpha chain variable domain of TCR clone 270492 (TRAV12-3, TRAJ9)
CAMRNTGGFKTIL

SEQ ID NO: 540984 - protein, 16 aa, Homo sapiens
  CDR3 for beta chain variable domain of TCR clone 270492 (TRBV19, TRBJ2-1)
CASSIDGSFAYNEQFF

SEQ ID NO: 540985 - protein, 12 aa, Homo sapiens
  CDR3 for alpha chain variable domain of TCR clone 270493 (TRAV29/DV5, TRAJ15)
CASNQAGTALIF

SEQ ID NO: 540986 - protein, 15 aa, Homo sapiens
  CDR3 for beta chain variable domain of TCR clone 270493 (TRBV11-2, TRBJ2-2)
CASSSDRVYAGELFF

SEQ ID NO: 540987 - protein, 14 aa, Homo sapiens
  CDR3 for alpha chain variable domain of TCR clone 270494 (TRAV12-1, TRAJ23)
CVVIVYNQGGKLIF

SEQ ID NO: 540988 - protein, 15 aa, Homo sapiens
  CDR3 for beta chain variable domain of TCR clone 270494 (TRBV7-9, TRBJ2-2)
CASGPLDTFPGELFF

SEQ ID NO: 540989 - protein, 13 aa, Homo sapiens
  CDR3 for alpha chain variable domain of TCR clone 270495 (TRAV36/DV7, TRAJ49)
GAGDSNTGNQFYF

SEQ ID NO: 540990 - protein, 12 aa, Homo sapiens
  CDR3 for beta chain variable domain of TCR clone 270495 (TRBV11-2, TRBJ2-2)
CASSLGGGELFF

SEQ ID NO: 540991 - protein, 12 aa, Homo sapiens
  CDR3 for alpha chain variable domain of TCR clone 270496 (TRAV16, TRAJ10)
CSRTGGGSKLTF

SEQ ID NO: 540992 - protein, 15 aa, Homo sapiens
  CDR3 for beta chain variable domain of TCR clone 270496 (TRBV6-3, TRBJ2-7)
CASSSPGTVLYEQYF

SEQ ID NO: 540993 - protein, 14 aa, Homo sapiens
  CDR3 for alpha chain variable domain of TCR clone 270497 (TRAV12-2, TRAJ13)
CAVKKTGGYQKVTF

SEQ ID NO: 540994 - protein, 13 aa, Homo sapiens
  CDR3 for beta chain variable domain of TCR clone 270497 (TRBV4-1, TRBJ1-1)
CASSQLGTGEAFF

SEQ ID NO: 540995 - protein, 14 aa, Homo sapiens
  CDR3 for alpha chain variable domain of TCR clone 270498 (TRAV13-1, TRAJ26)
CAASSAHYGQNFVF

SEQ ID NO: 540996 - protein, 17 aa, Homo sapiens
  CDR3 for beta chain variable domain of TCR clone 270498 (TRBV25-1, TRBJ2-5)
CASSRRGGRGGQETQYS

SEQ ID NO: 540997 - protein, 12 aa, Homo sapiens
  CDR3 for alpha chain variable domain of TCR clone 270499 (TRAV17, TRAJ53)
CAGGGSNYKLTV

SEQ ID NO: 540998 - protein, 16 aa, Homo sapiens
  CDR3 for beta chain variable domain of TCR clone 270499 (TRBV11-2, TRBJ2-3)
CASSFQGRGALDTQYF

SEQ ID NO: 540999 - protein, 15 aa, Homo sapiens
  CDR3 for alpha chain variable domain of TCR clone 270500 (TRAV8-4, TRAJ24)
CAVRDKMTAGGNCSL

SEQ ID NO: 541000 - protein, 14 aa, Homo sapiens
  CDR3 for beta chain variable domain of TCR clone 270500 (TRBV7-2, TRBJ2-3)
RASSQTGSSYTQYF

SEQ ID NO: 541001 - protein, 14 aa, Homo sapiens
  CDR3 for alpha chain variable domain of TCR clone 270501 (TRAV12-2, TRAJ17)
CAALFKAAGNKLTF

SEQ ID NO: 541002 - protein, 17 aa, Homo sapiens
  CDR3 for beta chain variable domain of TCR clone 270501 (TRBV20-1, TRBJ2-3)
CSASLLGRGGSADTQYF

SEQ ID NO: 541003 - protein, 13 aa, Homo sapiens
  CDR3 for alpha chain variable domain of TCR clone 270502 (TRAV3, TRAJ27)
CAVRHLGASKSTF

SEQ ID NO: 541004 - protein, 13 aa, Homo sapiens
  CDR3 for beta chain variable domain of TCR clone 270502 (TRBV7-9, TRBJ2-3)
CASSPGSTDTQYF

SEQ ID NO: 541005 - protein, 17 aa, Homo sapiens
  CDR3 for alpha chain variable domain of TCR clone 270503 (TRAV2, TRAJ29)
CCLLLCCSEFRKHTLVF

SEQ ID NO: 541006 - protein, 14 aa, Homo sapiens
  CDR3 for beta chain variable domain of TCR clone 270503 (TRBV7-9, TRBJ2-4)
CASSLAMGGNIQYF

SEQ ID NO: 541007 - protein, 15 aa, Homo sapiens
  CDR3 for alpha chain variable domain of TCR clone 270504 (TRAV8-4, TRAJ6)
CSVSAPSGGSYIPTF

SEQ ID NO: 541008 - protein, 15 aa, Homo sapiens
  CDR3 for beta chain variable domain of TCR clone 270504 (TRBV7-3, TRBJ2-2)
CASKANGANTGELFF

SEQ ID NO: 541009 - protein, 12 aa, Homo sapiens
  CDR3 for alpha chain variable domain of TCR clone 270505 (TRAV13-1, TRAJ21)
CAAKGGFNKFYF

SEQ ID NO: 541010 - protein, 16 aa, Homo sapiens
  CDR3 for beta chain variable domain of TCR clone 270505 (TRBV7-8, TRBJ2-4)
CASSAERTLAKNIQYF

SEQ ID NO: 541011 - protein, 15 aa, Homo sapiens
  CDR3 for alpha chain variable domain of TCR clone 270506 (TRAV17, TRAJ28)
CATDPSGAGSYQLTF

SEQ ID NO: 541012 - protein, 12 aa, Homo sapiens
  CDR3 for beta chain variable domain of TCR clone 270506 (TRBV11-1, TRBJ1-1)
CASSLFGGEAFF

SEQ ID NO: 541013 - protein, 16 aa, Homo sapiens
  CDR3 for alpha chain variable domain of TCR clone 270507 (TRAV3, TRAJ37)
CAVRGRGSGNTGKLIF

SEQ ID NO: 541014 - protein, 16 aa, Homo sapiens
  CDR3 for beta chain variable domain of TCR clone 270507 (TRBV11-2, TRBJ2-5)
CASSGQGYSPQETQYF

SEQ ID NO: 541015 - protein, 13 aa, Homo sapiens
  CDR3 for alpha chain variable domain of TCR clone 270508 (TRAV16, TRAJ26)
CITVLCLGHNFVF

SEQ ID NO: 541016 - protein, 12 aa, Homo sapiens
  CDR3 for beta chain variable domain of TCR clone 270508 (TRBV11-2, TRBJ2-1)
CASSPGNNEQFF

SEQ ID NO: 541017 - protein, 15 aa, Homo sapiens
  CDR3 for alpha chain variable domain of TCR clone 270509 (TRAV12-3, TRAJ27)
CAMRAYNTNAGKSTF

SEQ ID NO: 541018 - protein, 14 aa, Homo sapiens
  CDR3 for beta chain variable domain of TCR clone 270509 (TRBV20-1, TRBJ2-1)
CSAQIGGSANEQFF

SEQ ID NO: 541019 - protein, 15 aa, Homo sapiens
  CDR3 for alpha chain variable domain of TCR clone 270510 (TRAV8-4, TRAJ48)
CAVSAAYFGNEKLTF

SEQ ID NO: 541020 - protein, 12 aa, Homo sapiens
  CDR3 for beta chain variable domain of TCR clone 270510 (TRBV3-1, TRBJ2-5)
CASSQGGETQYF

SEQ ID NO: 541021 - protein, 14 aa, Homo sapiens
  CDR3 for alpha chain variable domain of TCR clone 270511 (TRAV29/DV5, TRAJ45)
CAASFRGGADGLPF

SEQ ID NO: 541022 - protein, 11 aa, Homo sapiens
  CDR3 for beta chain variable domain of TCR clone 270511 (TRBV11-2, TRBJ2-2)
CASSLPGEMFF

SEQ ID NO: 541023 - protein, 11 aa, Homo sapiens
  CDR3 for alpha chain variable domain of TCR clone 270512 (TRAV29/DV5, TRAJ37)
CATSNTGKLIF

SEQ ID NO: 541024 - protein, 13 aa, Homo sapiens
  CDR3 for beta chain variable domain of TCR clone 270512 (TRBV12-4, TRBJ2-3)
CASSSPLGCTQYF

SEQ ID NO: 541025 - protein, 14 aa, Homo sapiens
  CDR3 for alpha chain variable domain of TCR clone 270513 (TRAV38-1, TRAJ45)
CAYYSGGGADGLTF

SEQ ID NO: 541026 - protein, 15 aa, Homo sapiens
  CDR3 for beta chain variable domain of TCR clone 270513 (TRBV2, TRBJ2-5)
CASSGTVAAGETQYF

SEQ ID NO: 541027 - protein, 15 aa, Homo sapiens
  CDR3 for alpha chain variable domain of TCR clone 270514 (TRAV1-2, TRAJ38)
CAVSENAGNNRKLIL

SEQ ID NO: 541028 - protein, 16 aa, Homo sapiens
  CDR3 for beta chain variable domain of TCR clone 270514 (TRBV4-1, TRBJ2-7)
CASSLTAGQATYEQYF

SEQ ID NO: 541029 - protein, 12 aa, Homo sapiens
  CDR3 for alpha chain variable domain of TCR clone 270515 (TRAV21, TRAJ29)
FAVNSGNTPLVF

SEQ ID NO: 541030 - protein, 15 aa, Homo sapiens
  CDR3 for beta chain variable domain of TCR clone 270515 (TRBV12-4, TRBJ1-2)
CASRLGVAGNYGYTF

SEQ ID NO: 541031 - protein, 13 aa, Homo sapiens
  CDR3 for alpha chain variable domain of TCR clone 270516 (TRAV12-1, TRAJ20)
CVVNVPNDYKLSF

SEQ ID NO: 541032 - protein, 13 aa, Homo sapiens
  CDR3 for beta chain variable domain of TCR clone 270516 (TRBV13, TRBJ2-5)
CASSPEVGETQYF

SEQ ID NO: 541033 - protein, 19 aa, Homo sapiens
  CDR3 for alpha chain variable domain of TCR clone 270517 (TRAV9-2, TRAJ52)
CALIFSLLSGGTSYGKLTF

SEQ ID NO: 541034 - protein, 14 aa, Homo sapiens
  CDR3 for beta chain variable domain of TCR clone 270517 (TRBV7-6, TRBJ2-7)
CASSLFQDSYEQYF

SEQ ID NO: 541035 - protein, 12 aa, Homo sapiens
  CDR3 for alpha chain variable domain of TCR clone 270518 (TRAV8-3, TRAJ26)
CAGDNYGQNFFF

SEQ ID NO: 541036 - protein, 13 aa, Homo sapiens
  CDR3 for beta chain variable domain of TCR clone 270518 (TRBV20-1, TRBJ2-5)
CSARGDYQETQYF

SEQ ID NO: 541037 - protein, 14 aa, Homo sapiens
  CDR3 for alpha chain variable domain of TCR clone 270519 (TRAV8-3, TRAJ9)
CAVVYNTGGFKTIF

SEQ ID NO: 541038 - protein, 14 aa, Homo sapiens
  CDR3 for beta chain variable domain of TCR clone 270519 (TRBV7-3, TRBJ2-2)
GASSSGGYTGELFF

SEQ ID NO: 541039 - protein, 15 aa, Homo sapiens
  CDR3 for alpha chain variable domain of TCR clone 270520 (TRAV26-1, TRAJ29)
CIVRVEGPGNTTLVF

SEQ ID NO: 541040 - protein, 15 aa, Homo sapiens
  CDR3 for beta chain variable domain of TCR clone 270520 (TRBV7-9, TRBJ1-5)
CASSQGHQPNQPQHF

SEQ ID NO: 541041 - protein, 10 aa, Homo sapiens
  CDR3 for alpha chain variable domain of TCR clone 270521 (TRAV8-4, TRAJ43)
CAVSADDMRF

SEQ ID NO: 541042 - protein, 17 aa, Homo sapiens
  CDR3 for beta chain variable domain of TCR clone 270521 (TRBV24-1, TRBJ2-1)
CATSDVSTSGTYNEQFF

SEQ ID NO: 541043 - protein, 13 aa, Homo sapiens
  CDR3 for alpha chain variable domain of TCR clone 270522 (TRAV3, TRAJ21)
CAVREPDFNKFYF

SEQ ID NO: 541044 - protein, 13 aa, Homo sapiens
  CDR3 for beta chain variable domain of TCR clone 270522 (TRBV7-9, TRBJ1-2)
CASSLRQNYGYTF

SEQ ID NO: 541045 - protein, 11 aa, Homo sapiens
  CDR3 for alpha chain variable domain of TCR clone 270523 (TRAV12-3, TRAJ43)
CAMSVSNDMRF

SEQ ID NO: 541046 - protein, 14 aa, Homo sapiens
  CDR3 for beta chain variable domain of TCR clone 270523 (TRBV28, TRBJ1-2)
CASRIQGANYGYTF

SEQ ID NO: 541047 - protein, 13 aa, Homo sapiens
  CDR3 for alpha chain variable domain of TCR clone 270524 (TRAV39, TRAJ33)
CAANPDSNYQLFW

SEQ ID NO: 541048 - protein, 13 aa, Homo sapiens
  CDR3 for beta chain variable domain of TCR clone 270524 (TRBV18, TRBJ1-1)
CASSGGRNTEAFF

SEQ ID NO: 541049 - protein, 14 aa, Homo sapiens
  CDR3 for alpha chain variable domain of TCR clone 270525 (TRAV12-2, TRAJ13)
CAVKKTGGYQKVTF

SEQ ID NO: 541050 - protein, 15 aa, Homo sapiens
  CDR3 for beta chain variable domain of TCR clone 270525 (TRBV28, TRBJ2-1)
CASSIIAGGRSEQCF

SEQ ID NO: 541051 - protein, 15 aa, Homo sapiens
  CDR3 for alpha chain variable domain of TCR clone 270526 (TRAV2, TRAJ9)
CAVEDRGTGGFRTIF

SEQ ID NO: 541052 - protein, 16 aa, Homo sapiens
  CDR3 for beta chain variable domain of TCR clone 270526 (TRBV24-1, TRBJ2-3)
CATSDPGTGATDTQYY

SEQ ID NO: 541053 - protein, 13 aa, Homo sapiens
  CDR3 for alpha chain variable domain of TCR clone 270527 (TRAV2, TRAJ40)
CAVVTSGTYKYIF

SEQ ID NO: 541054 - protein, 16 aa, Homo sapiens
  CDR3 for beta chain variable domain of TCR clone 270527 (TRBV3-1, TRBJ2-7)
CASSQGATGVAYEQYF

SEQ ID NO: 541055 - protein, 22 aa, Homo sapiens
  CDR3 for alpha chain variable domain of TCR clone 270528 (TRAV8-6, TRAJ36)
CAVSDWLGQTTSSLGLERDSPL

SEQ ID NO: 541056 - protein, 15 aa, Homo sapiens
  CDR3 for beta chain variable domain of TCR clone 270528 (TRBV10-3, TRBJ2-2)
CAISVATSNTGELFF

SEQ ID NO: 541057 - protein, 17 aa, Homo sapiens
  CDR3 for alpha chain variable domain of TCR clone 270529 (TRAV36/DV7, TRAJ52)
CAVAQRAGGTSSGKLTF

SEQ ID NO: 541058 - protein, 14 aa, Homo sapiens
  CDR3 for beta chain variable domain of TCR clone 270529 (TRBV11-2, TRBJ1-5)
CASSLDRGRQPQHF

SEQ ID NO: 541059 - protein, 15 aa, Homo sapiens
  CDR3 for alpha chain variable domain of TCR clone 270530 (TRAV20, TRAJ53)
CAVQASGGSHYKLTF

SEQ ID NO: 541060 - protein, 15 aa, Homo sapiens
  CDR3 for beta chain variable domain of TCR clone 270530 (TRBV9, TRBJ2-1)
CASSLAGSSYNEQFF

SEQ ID NO: 541061 - protein, 12 aa, Homo sapiens
  CDR3 for alpha chain variable domain of TCR clone 270531 (TRAV8-3, TRAJ26)
CAGDNYGQNFVF

SEQ ID NO: 541062 - protein, 14 aa, Homo sapiens
  CDR3 for beta chain variable domain of TCR clone 270531 (TRBV7-2, TRBJ2-7)
CASSLDPGPYEQYF

SEQ ID NO: 541063 - protein, 14 aa, Homo sapiens
  CDR3 for alpha chain variable domain of TCR clone 270532 (TRAV3, TRAJ17)
CAVRDAAAGTTLTF

SEQ ID NO: 541064 - protein, 13 aa, Homo sapiens
  CDR3 for beta chain variable domain of TCR clone 270532 (TRBV2, TRBJ1-1)
CASSVSGYTEAFF

SEQ ID NO: 541065 - protein, 14 aa, Homo sapiens
  CDR3 for alpha chain variable domain of TCR clone 270533 (TRAV35, TRAJ42)
CAGRYGGSTGNLIF

SEQ ID NO: 541066 - protein, 15 aa, Homo sapiens
  CDR3 for beta chain variable domain of TCR clone 270533 (TRBV7-9, TRBJ2-1)
CASSLGWGRANEQFF

SEQ ID NO: 541067 - protein, 12 aa, Homo sapiens
  CDR3 for alpha chain variable domain of TCR clone 270534 (TRAV12-3, TRAJ17)
CAMTLTGNKLTF

SEQ ID NO: 541068 - protein, 14 aa, Homo sapiens
  CDR3 for beta chain variable domain of TCR clone 270534 (TRBV7-6, TRBJ2-3)
CASSVGTVTDTQYF

SEQ ID NO: 541069 - protein, 12 aa, Homo sapiens
  CDR3 for alpha chain variable domain of TCR clone 270535 (TRAV1-1, TRAJ8)
CSGGTGFQKLVF

SEQ ID NO: 541070 - protein, 15 aa, Homo sapiens
  CDR3 for beta chain variable domain of TCR clone 270535 (TRBV7-9, TRBJ1-4)
CASGRTGGFNEKLFF

SEQ ID NO: 541071 - protein, 14 aa, Homo sapiens
  CDR3 for alpha chain variable domain of TCR clone 270536 (TRAV12-3, TRAJ10)
SHLPRTGGGNKLTF

SEQ ID NO: 541072 - protein, 14 aa, Homo sapiens
  CDR3 for beta chain variable domain of TCR clone 270536 (TRBV7-2, TRBJ2-7)
CASSPKTSFYEQYF

SEQ ID NO: 541073 - protein, 14 aa, Homo sapiens
  CDR3 for alpha chain variable domain of TCR clone 270537 (TRAV16, TRAJ15)
CALSFIQAGTALIF

SEQ ID NO: 541074 - protein, 16 aa, Homo sapiens
  CDR3 for beta chain variable domain of TCR clone 270537 (TRBV9, TRBJ2-7)
CSSSAGPDRSPYEQYF

SEQ ID NO: 541075 - protein, 14 aa, Homo sapiens
  CDR3 for alpha chain variable domain of TCR clone 270538 (TRAV26-1, TRAJ40)
CIVRLLSGTYKYIF

SEQ ID NO: 541076 - protein, 12 aa, Homo sapiens
  CDR3 for beta chain variable domain of TCR clone 270538 (TRBV3-1, TRBJ1-1)
CQQQLQGAEAFF

SEQ ID NO: 541077 - protein, 15 aa, Homo sapiens
  CDR3 for alpha chain variable domain of TCR clone 270539 (TRAV3, TRAJ3)
CAVRDRDSSASKIIF

SEQ ID NO: 541078 - protein, 16 aa, Homo sapiens
  CDR3 for beta chain variable domain of TCR clone 270539 (TRBV13, TRBJ2-2)
CASSPRTGEHTGELFL

SEQ ID NO: 541079 - protein, 11 aa, Homo sapiens
  CDR3 for alpha chain variable domain of TCR clone 270540 (TRAV1-2, TRAJ20)
CAVANDYKLSF

SEQ ID NO: 541080 - protein, 14 aa, Homo sapiens
  CDR3 for beta chain variable domain of TCR clone 270540 (TRBV7-9, TRBJ1-1)
CASTPLQSYTEAFI

SEQ ID NO: 541081 - protein, 14 aa, Homo sapiens
  CDR3 for alpha chain variable domain of TCR clone 270541 (TRAV26-1, TRAJ48)
CVVRVPFGNEKLTF

SEQ ID NO: 541082 - protein, 15 aa, Homo sapiens
  CDR3 for beta chain variable domain of TCR clone 270541 (TRBV18, TRBJ2-1)
CQLTLSQHKGDEQFF

SEQ ID NO: 541083 - protein, 14 aa, Homo sapiens
  CDR3 for alpha chain variable domain of TCR clone 270542 (TRAV1-2, TRAJ16)
CAVNRFSDGQKLLS

SEQ ID NO: 541084 - protein, 14 aa, Homo sapiens
  CDR3 for beta chain variable domain of TCR clone 270542 (TRBV11-2, TRBJ2-5)
CASSRTGGIETQYF

SEQ ID NO: 541085 - protein, 14 aa, Homo sapiens
  CDR3 for alpha chain variable domain of TCR clone 270543 (TRAV38-1, TRAJ45)
CAYYSGGGADGLTF

SEQ ID NO: 541086 - protein, 13 aa, Homo sapiens
  CDR3 for beta chain variable domain of TCR clone 270543 (TRBV7-9, TRBJ1-2)
CASSLKQNYGYTF

SEQ ID NO: 541087 - protein, 15 aa, Homo sapiens
  CDR3 for alpha chain variable domain of TCR clone 270544 (TRAV21, TRAJ53)
CATLNSGGSNYKLTF

SEQ ID NO: 541088 - protein, 15 aa, Homo sapiens
  CDR3 for beta chain variable domain of TCR clone 270544 (TRBV5-1, TRBJ2-1)
CGSSPPRAPYNEQFF

SEQ ID NO: 541089 - protein, 14 aa, Homo sapiens
  CDR3 for alpha chain variable domain of TCR clone 270545 (TRAV1-2, TRAJ16)
CAVRSASAGQKLLF

SEQ ID NO: 541090 - protein, 17 aa, Homo sapiens
  CDR3 for beta chain variable domain of TCR clone 270545 (TRBV7-3, TRBJ2-3)
CASSLMKRMRGADTQYF

SEQ ID NO: 541091 - protein, 15 aa, Homo sapiens
  CDR3 for alpha chain variable domain of TCR clone 270546 (TRAV3, TRAJ29)
CAVRDLSSGNTPLVF

SEQ ID NO: 541092 - protein, 17 aa, Homo sapiens
  CDR3 for beta chain variable domain of TCR clone 270546 (TRBV20-1, TRBJ2-1)
CSARDPLAGIWDNEHFF

SEQ ID NO: 541093 - protein, 17 aa, Homo sapiens
  CDR3 for alpha chain variable domain of TCR clone 270547 (TRAV3, TRAJ6)
CAVRDGPRAGGSYIPTF

SEQ ID NO: 541094 - protein, 20 aa, Homo sapiens
  CDR3 for beta chain variable domain of TCR clone 270547 (TRBV28, TRBJ2-1)
GASTPIGRSPGLAGGNEQFF

SEQ ID NO: 541095 - protein, 14 aa, Homo sapiens
  CDR3 for alpha chain variable domain of TCR clone 270548 (TRAV8-3, TRAJ7)
RAAIELYGNNRLAF

SEQ ID NO: 541096 - protein, 15 aa, Homo sapiens
  CDR3 for beta chain variable domain of TCR clone 270548 (TRBV3-1, TRBJ2-1)
CASSTGDTNYNEQFF

SEQ ID NO: 541097 - protein, 16 aa, Homo sapiens
  CDR3 for alpha chain variable domain of TCR clone 270549 (TRAV8-3, TRAJ13)
CAVGAYPSGGYQKVTF

SEQ ID NO: 541098 - protein, 15 aa, Homo sapiens
  CDR3 for beta chain variable domain of TCR clone 270549 (TRBV6-6, TRBJ2-7)
CASSYSYGGSYEQYF

SEQ ID NO: 541099 - protein, 11 aa, Homo sapiens
  CDR3 for alpha chain variable domain of TCR clone 270550 (TRAV12-3, TRAJ27)
CAMANAGKSTF

SEQ ID NO: 541100 - protein, 14 aa, Homo sapiens
  CDR3 for beta chain variable domain of TCR clone 270550 (TRBV4-1, TRBJ2-2)
CASRQAVNTGELFF

SEQ ID NO: 541101 - protein, 16 aa, Homo sapiens
  CDR3 for alpha chain variable domain of TCR clone 270551 (TRAV26-1, TRAJ37)
CIVRGDGSGNTGKLIF

SEQ ID NO: 541102 - protein, 14 aa, Homo sapiens
  CDR3 for beta chain variable domain of TCR clone 270551 (TRBV19, TRBJ2-2)
FASSGQGIAGELFF

SEQ ID NO: 541103 - protein, 14 aa, Homo sapiens
  CDR3 for alpha chain variable domain of TCR clone 270552 (TRAV12-2, TRAJ13)
CAVKKTGCYQKVTF

SEQ ID NO: 541104 - protein, 14 aa, Homo sapiens
  CDR3 for beta chain variable domain of TCR clone 270552 (TRBV4-2, TRBJ2-1)
CASGLDRAYNEQFF

SEQ ID NO: 541105 - protein, 12 aa, Homo sapiens
  CDR3 for alpha chain variable domain of TCR clone 270553 (TRAV12-3, TRAJ17)
CAMTLTGHKLTF

SEQ ID NO: 541106 - protein, 16 aa, Homo sapiens
  CDR3 for beta chain variable domain of TCR clone 270553 (TRBV19, TRBJ2-1)
CASSKAGPSSYNEQFF

SEQ ID NO: 541107 - protein, 13 aa, Homo sapiens
  CDR3 for alpha chain variable domain of TCR clone 270554 (TRAV35, TRAJ48)
CAGHEWGNEKLTF

SEQ ID NO: 541108 - protein, 15 aa, Homo sapiens
  CDR3 for beta chain variable domain of TCR clone 270554 (TRBV27, TRBJ2-7)
CASSPQREGQREQYF

SEQ ID NO: 541109 - protein, 12 aa, Homo sapiens
  CDR3 for alpha chain variable domain of TCR clone 270555 (TRAV2, TRAJ9)
CAVGAGGFKTIF

SEQ ID NO: 541110 - protein, 15 aa, Homo sapiens
  CDR3 for beta chain variable domain of TCR clone 270555 (TRBV10-2, TRBJ2-6)
CASSEQGTGANVLTF

SEQ ID NO: 541111 - protein, 16 aa, Homo sapiens
  CDR3 for alpha chain variable domain of TCR clone 270556 (TRAV3, TRAJ10)
CAVRDMRAGGGNKLTF

SEQ ID NO: 541112 - protein, 15 aa, Homo sapiens
  CDR3 for beta chain variable domain of TCR clone 270556 (TRBV7-3, TRBJ2-1)
CASSLAGAGADEQFF

SEQ ID NO: 541113 - protein, 16 aa, Homo sapiens
  CDR3 for alpha chain variable domain of TCR clone 270557 (TRAV30, TRAJ24)
CGTEIVDADSWGKFQF

SEQ ID NO: 541114 - protein, 16 aa, Homo sapiens
  CDR3 for beta chain variable domain of TCR clone 270557 (TRBV12-5, TRBJ2-5)
CASGPRTSGDQETQYF

SEQ ID NO: 541115 - protein, 12 aa, Homo sapiens
  CDR3 for alpha chain variable domain of TCR clone 270558 (TRAV35, TRAJ30)
CAGLNRDDKIII

SEQ ID NO: 541116 - protein, 15 aa, Homo sapiens
  CDR3 for beta chain variable domain of TCR clone 270558 (TRBV9, TRBJ1-6)
CASSVAGTGDSPLHF

SEQ ID NO: 541117 - protein, 13 aa, Homo sapiens
  CDR3 for alpha chain variable domain of TCR clone 270559 (TRAV8-4, TRAJ47)
CAVTALYGNKLVF

SEQ ID NO: 541118 - protein, 13 aa, Homo sapiens
  CDR3 for beta chain variable domain of TCR clone 270559 (TRBV7-9, TRBJ2-3)
CASSPGSTDTQYF

SEQ ID NO: 541119 - protein, 16 aa, Homo sapiens
  CDR3 for alpha chain variable domain of TCR clone 270560 (TRAV30, TRAJ24)
CGTEIVDAASWGKFHF

SEQ ID NO: 541120 - protein, 14 aa, Homo sapiens
  CDR3 for beta chain variable domain of TCR clone 270560 (TRBV12-5, TRBJ2-5)
CASGSRTHQETQYF

SEQ ID NO: 541121 - protein, 14 aa, Homo sapiens
  CDR3 for alpha chain variable domain of TCR clone 270561 (TRAV1-2, TRAJ8)
CAVREDTGFQRLVF

SEQ ID NO: 541122 - protein, 13 aa, Homo sapiens
  CDR3 for beta chain variable domain of TCR clone 270561 (TRBV20-1, TRBJ1-6)
CSAPLGVGSPLHF

SEQ ID NO: 541123 - protein, 13 aa, Homo sapiens
  CDR3 for alpha chain variable domain of TCR clone 270562 (TRAV2, TRAJ29)
CADQNSGNTPLVF

SEQ ID NO: 541124 - protein, 13 aa, Homo sapiens
  CDR3 for beta chain variable domain of TCR clone 270562 (TRBV28, TRBJ1-2)
CASSPGSRNGYTF

SEQ ID NO: 541125 - protein, 14 aa, Homo sapiens
  CDR3 for alpha chain variable domain of TCR clone 270563 (TRAV12-1, TRAJ9)
CGELINTGGFKTIF

SEQ ID NO: 541126 - protein, 11 aa, Homo sapiens
  CDR3 for beta chain variable domain of TCR clone 270563 (TRBV29-1, TRBJ2-5)
CSEDRTGTQYF

SEQ ID NO: 541127 - protein, 14 aa, Homo sapiens
  CDR3 for alpha chain variable domain of TCR clone 270564 (TRAV26-2, TRAJ32)
CILFRGGATNKLIF

SEQ ID NO: 541128 - protein, 14 aa, Homo sapiens
  CDR3 for beta chain variable domain of TCR clone 270564 (TRBV2, TRBJ2-2)
CQQWVWAGTGELFF

SEQ ID NO: 541129 - protein, 11 aa, Homo sapiens
  CDR3 for alpha chain variable domain of TCR clone 270565 (TRAV21, TRAJ34)
CTVTNTDKLIF

SEQ ID NO: 541130 - protein, 12 aa, Homo sapiens
  CDR3 for beta chain variable domain of TCR clone 270565 (TRBV7-9, TRBJ1-1)
CASSLVRGEAFF

SEQ ID NO: 541131 - protein, 11 aa, Homo sapiens
  CDR3 for alpha chain variable domain of TCR clone 270566 (TRAV21, TRAJ26)
CCVNYGQNFVF

SEQ ID NO: 541132 - protein, 13 aa, Homo sapiens
  CDR3 for beta chain variable domain of TCR clone 270566 (TRBV4-1, TRBJ1-1)
CASSQLGTGEAFF

SEQ ID NO: 541133 - protein, 14 aa, Homo sapiens
  CDR3 for alpha chain variable domain of TCR clone 270567 (TRAV38-1, TRAJ45)
CASHSGGGADGLTF

SEQ ID NO: 541134 - protein, 13 aa, Homo sapiens
  CDR3 for beta chain variable domain of TCR clone 270567 (TRBV7-9, TRBJ2-2)
CASNSAGTGELFF

SEQ ID NO: 541135 - protein, 12 aa, Homo sapiens
  CDR3 for alpha chain variable domain of TCR clone 270568 (TRAV13-1, TRAJ21)
CAAKEGFKKFYF

SEQ ID NO: 541136 - protein, 12 aa, Homo sapiens
  CDR3 for beta chain variable domain of TCR clone 270568 (TRBV11-2, TRBJ2-2)
CASSLGGGELFF

SEQ ID NO: 541137 - protein, 16 aa, Homo sapiens
  CDR3 for alpha chain variable domain of TCR clone 270569 (TRAV20, TRAJ22)
CAVQASSSGSARQLTF

SEQ ID NO: 541138 - protein, 16 aa, Homo sapiens
  CDR3 for beta chain variable domain of TCR clone 270569 (TRBV11-3, TRBJ2-5)
CASSAAGTGEGETQYF

SEQ ID NO: 541139 - protein, 16 aa, Homo sapiens
  CDR3 for alpha chain variable domain of TCR clone 270570 (TRAV3, TRAJ10)
CAVRDMRAGGGNKLTF

SEQ ID NO: 541140 - protein, 12 aa, Homo sapiens
  CDR3 for beta chain variable domain of TCR clone 270570 (TRBV9, TRBJ2-1)
CASSVGGTDIFF

SEQ ID NO: 541141 - protein, 16 aa, Homo sapiens
  CDR3 for alpha chain variable domain of TCR clone 270571 (TRAV12-3, TRAJ53)
CAMSPGSGGSNYKLTF

SEQ ID NO: 541142 - protein, 16 aa, Homo sapiens
  CDR3 for beta chain variable domain of TCR clone 270571 (TRBV2, TRBJ2-3)
CANSTSVEGVTDTQYF

SEQ ID NO: 541143 - protein, 17 aa, Homo sapiens
  CDR3 for alpha chain variable domain of TCR clone 270572 (TRAV3, TRAJ28)
CAVREAYSGAGSYQRTF

SEQ ID NO: 541144 - protein, 11 aa, Homo sapiens
  CDR3 for beta chain variable domain of TCR clone 270572 (TRBV19, TRBJ2-2)
CASRYSGELFF

SEQ ID NO: 541145 - protein, 12 aa, Homo sapiens
  CDR3 for alpha chain variable domain of TCR clone 270573 (TRAV12-3, TRAJ40)
CAMSSGTYKYIF

SEQ ID NO: 541146 - protein, 16 aa, Homo sapiens
  CDR3 for beta chain variable domain of TCR clone 270573 (TRBV4-1, TRBJ2-5)
CASSQTSGGPLETQYF

SEQ ID NO: 541147 - protein, 11 aa, Homo sapiens
  CDR3 for alpha chain variable domain of TCR clone 270574 (TRAV4, TRAJ23)
CLVAPGGKLIF

SEQ ID NO: 541148 - protein, 13 aa, Homo sapiens
  CDR3 for beta chain variable domain of TCR clone 270574 (TRBV19, TRBJ1-2)
CASSQGQVYGYTF

SEQ ID NO: 541149 - protein, 13 aa, Homo sapiens
  CDR3 for alpha chain variable domain of TCR clone 270575 (TRAV13-1, TRAJ12)
CAASPDSSYKLIF

SEQ ID NO: 541150 - protein, 14 aa, Homo sapiens
  CDR3 for beta chain variable domain of TCR clone 270575 (TRBV7-3, TRBJ2-3)
CASSPGASRDTQYF

SEQ ID NO: 541151 - protein, 15 aa, Homo sapiens
  CDR3 for alpha chain variable domain of TCR clone 270576 (TRAV13-1, TRAJ10)
CAATILTGGGNKLTF

SEQ ID NO: 541152 - protein, 15 aa, Homo sapiens
  CDR3 for beta chain variable domain of TCR clone 270576 (TRBV2, TRBJ2-7)
CASTLLGSGATEQYV

SEQ ID NO: 541153 - protein, 14 aa, Homo sapiens
  CDR3 for alpha chain variable domain of TCR clone 270577 (TRAV12-3, TRAJ12)
CAMSEVDSSYKLIF

SEQ ID NO: 541154 - protein, 16 aa, Homo sapiens
  CDR3 for beta chain variable domain of TCR clone 270577 (TRBV12-5, TRBJ2-5)
CASGPRTSGDQETQYF

SEQ ID NO: 541155 - protein, 16 aa, Homo sapiens
  CDR3 for alpha chain variable domain of TCR clone 270578 (TRAV30, TRAJ24)
CGAEIVDADSWGKFQF

SEQ ID NO: 541156 - protein, 17 aa, Homo sapiens
  CDR3 for beta chain variable domain of TCR clone 270578 (TRBV20-1, TRBJ2-1)
CSASSSGLAGSYNEQFF

SEQ ID NO: 541157 - protein, 12 aa, Homo sapiens
  CDR3 for alpha chain variable domain of TCR clone 270579 (TRAV8-6, TRAJ36)
CAVSDWLGQTTS

SEQ ID NO: 541158 - protein, 12 aa, Homo sapiens
  CDR3 for beta chain variable domain of TCR clone 270579 (TRBV11-2, TRBJ2-2)
CASSLGGGELFF

SEQ ID NO: 541159 - protein, 16 aa, Homo sapiens
  CDR3 for alpha chain variable domain of TCR clone 270580 (TRAV3, TRAJ10)
CAVRDMRAGGGNKLTF

SEQ ID NO: 541160 - protein, 13 aa, Homo sapiens
  CDR3 for beta chain variable domain of TCR clone 270580 (TRBV19, TRBJ1-2)
CASSQGQVYGYTF

SEQ ID NO: 541161 - protein, 13 aa, Homo sapiens
  CDR3 for alpha chain variable domain of TCR clone 270581 (TRAV21, TRAJ27)
CAARPVNAGKSTF

SEQ ID NO: 541162 - protein, 16 aa, Homo sapiens
  CDR3 for beta chain variable domain of TCR clone 270581 (TRBV2, TRBJ2-1)
CASRPRSGGPYGEQFF

SEQ ID NO: 541163 - protein, 13 aa, Homo sapiens
  CDR3 for alpha chain variable domain of TCR clone 270582 (TRAV1-2, TRAJ9)
CAALNTGGFKTIF

SEQ ID NO: 541164 - protein, 15 aa, Homo sapiens
  CDR3 for beta chain variable domain of TCR clone 270582 (TRBV4-1, TRBJ2-1)
CASSQDAGGLYEQFF

SEQ ID NO: 541165 - protein, 17 aa, Homo sapiens
  CDR3 for alpha chain variable domain of TCR clone 270583 (TRAV4, TRAJ28)
CLVGDRALGLGVTNSLS

SEQ ID NO: 541166 - protein, 15 aa, Homo sapiens
  CDR3 for beta chain variable domain of TCR clone 270583 (TRBV5-5, TRBJ1-5)
CASSLEDRGYQPQHF

SEQ ID NO: 541167 - protein, 15 aa, Homo sapiens
  CDR3 for alpha chain variable domain of TCR clone 270584 (TRAV23/DV6, TRAJ18)
CAASFRGSTLVRLYF

SEQ ID NO: 541168 - protein, 13 aa, Homo sapiens
  CDR3 for beta chain variable domain of TCR clone 270584 (TRBV28, TRBJ2-7)
CAILDRAGGEQYF

SEQ ID NO: 541169 - protein, 15 aa, Homo sapiens
  CDR3 for alpha chain variable domain of TCR clone 270585 (TRAV12-3, TRAJ6)
CAMSPASGGSYIPTF

SEQ ID NO: 541170 - protein, 15 aa, Homo sapiens
  CDR3 for beta chain variable domain of TCR clone 270585 (TRBV2, TRBJ1-2)
CASIESRTVNYGYTF

SEQ ID NO: 541171 - protein, 14 aa, Homo sapiens
  CDR3 for alpha chain variable domain of TCR clone 270586 (TRAV3, TRAJ21)
CAVRDKYNFNKFYF

SEQ ID NO: 541172 - protein, 17 aa, Homo sapiens
  CDR3 for beta chain variable domain of TCR clone 270586 (TRBV4-1, TRBJ2-7)
CASSRDPLGVRGGEQYF

SEQ ID NO: 541173 - protein, 12 aa, Homo sapiens
  CDR3 for alpha chain variable domain of TCR clone 270587 (TRAV12-3, TRAJ20)
CAMVRGDYKLIF

SEQ ID NO: 541174 - protein, 12 aa, Homo sapiens
  CDR3 for beta chain variable domain of TCR clone 270587 (TRBV29-1, TRBJ1-1)
CSESDGNTEAFF

SEQ ID NO: 541175 - protein, 12 aa, Homo sapiens
  CDR3 for alpha chain variable domain of TCR clone 270588 (TRAV12-2, TRAJ4)
GWPEGGYNKLIF

SEQ ID NO: 541176 - protein, 15 aa, Homo sapiens
  CDR3 for beta chain variable domain of TCR clone 270588 (TRBV7-3, TRBJ2-1)
CASSLSSGSFDEQFF

SEQ ID NO: 541177 - protein, 19 aa, Homo sapiens
  CDR3 for alpha chain variable domain of TCR clone 270589 (TRAV1-2, TRAJ26)
CLLPLCCDRPDNYGQNFVF

SEQ ID NO: 541178 - protein, 15 aa, Homo sapiens
  CDR3 for beta chain variable domain of TCR clone 270589 (TRBV9, TRBJ1-6)
CASSVAGTGYSPLHF

SEQ ID NO: 541179 - protein, 16 aa, Homo sapiens
  CDR3 for alpha chain variable domain of TCR clone 270590 (TRAV3, TRAJ37)
CAVRGKGSGNTGKLIF

SEQ ID NO: 541180 - protein, 16 aa, Homo sapiens
  CDR3 for beta chain variable domain of TCR clone 270590 (TRBV27, TRBJ2-2)
CASSLSGFWVTGELFF

SEQ ID NO: 541181 - protein, 14 aa, Homo sapiens
  CDR3 for alpha chain variable domain of TCR clone 270591 (TRAV2, TRAJ9)
CAVEDRSVGFKTIF

SEQ ID NO: 541182 - protein, 17 aa, Homo sapiens
  CDR3 for beta chain variable domain of TCR clone 270591 (TRBV7-8, TRBJ2-6)
CASSAGTGGAGANVLTF

SEQ ID NO: 541183 - protein, 15 aa, Homo sapiens
  CDR3 for alpha chain variable domain of TCR clone 270592 (TRAV26-1, TRAJ15)
CIIRAANQAGTALIF

SEQ ID NO: 541184 - protein, 15 aa, Homo sapiens
  CDR3 for beta chain variable domain of TCR clone 270592 (TRBV20-1, TRBJ1-1)
CSARSAATSNTEAFF

SEQ ID NO: 541185 - protein, 14 aa, Homo sapiens
  CDR3 for alpha chain variable domain of TCR clone 270593 (TRAV12-2, TRAJ17)
CAVLFKAAGNKLTF

SEQ ID NO: 541186 - protein, 18 aa, Homo sapiens
  CDR3 for beta chain variable domain of TCR clone 270593 (TRBV18, TRBJ1-3)
CASSPRGGAGPSGNTIYF

SEQ ID NO: 541187 - protein, 14 aa, Homo sapiens
  CDR3 for alpha chain variable domain of TCR clone 270594 (TRAV13-1, TRAJ13)
CAAIPLVGYQKVTF

SEQ ID NO: 541188 - protein, 15 aa, Homo sapiens
  CDR3 for beta chain variable domain of TCR clone 270594 (TRBV18, TRBJ2-1)
CASSPPSASYNEQFF

SEQ ID NO: 541189 - protein, 13 aa, Homo sapiens
  CDR3 for alpha chain variable domain of TCR clone 270595 (TRAV12-1, TRAJ26)
CVVRRNYGQNFVF

SEQ ID NO: 541190 - protein, 15 aa, Homo sapiens
  CDR3 for beta chain variable domain of TCR clone 270595 (TRBV5-1, TRBJ2-3)
CASSVTSGSTDTQYF

SEQ ID NO: 541191 - protein, 12 aa, Homo sapiens
  CDR3 for alpha chain variable domain of TCR clone 270596 (TRAV1-2, TRAJ29)
CAVPSGNTPLVF

SEQ ID NO: 541192 - protein, 17 aa, Homo sapiens
  CDR3 for beta chain variable domain of TCR clone 270596 (TRBV27, TRBJ2-1)
CASSPMKGQGSYNEQFF

SEQ ID NO: 541193 - protein, 17 aa, Homo sapiens
  CDR3 for alpha chain variable domain of TCR clone 270597 (TRAV3, TRAJ12)
CAVRDGGRMDSSYKLIF

SEQ ID NO: 541194 - protein, 13 aa, Homo sapiens
  CDR3 for beta chain variable domain of TCR clone 270597 (TRBV5-1, TRBJ2-1)
CASSLGSYNEQFF

SEQ ID NO: 541195 - protein, 13 aa, Homo sapiens
  CDR3 for alpha chain variable domain of TCR clone 270598 (TRAV12-1, TRAJ22)
CVAPGGSARQLTF

SEQ ID NO: 541196 - protein, 12 aa, Homo sapiens
  CDR3 for beta chain variable domain of TCR clone 270598 (TRBV29-1, TRBJ2-3)
CSVTGGADTQYF

SEQ ID NO: 541197 - protein, 12 aa, Homo sapiens
  CDR3 for alpha chain variable domain of TCR clone 270599 (TRAV26-1, TRAJ36)
CIVRVRADNLFF

SEQ ID NO: 541198 - protein, 16 aa, Homo sapiens
  CDR3 for beta chain variable domain of TCR clone 270599 (TRBV11-2, TRBJ2-2)
CASSLRTGNLIGELFF

SEQ ID NO: 541199 - protein, 13 aa, Homo sapiens
  CDR3 for alpha chain variable domain of TCR clone 270600 (TRAV2, TRAJ29)
CAVYSSGNTPLVF

SEQ ID NO: 541200 - protein, 18 aa, Homo sapiens
  CDR3 for beta chain variable domain of TCR clone 270600 (TRBV6-6, TRBJ1-3)
CASSYSKWDSISGNTIYF

SEQ ID NO: 541201 - protein, 16 aa, Homo sapiens
  CDR3 for alpha chain variable domain of TCR clone 270601 (TRAV12-2, TRAJ40)
FAVIRGGTSGTYKYIL

SEQ ID NO: 541202 - protein, 14 aa, Homo sapiens
  CDR3 for beta chain variable domain of TCR clone 270601 (TRBV5-7, TRBJ1-5)
CASSRTGGGQPQHF

SEQ ID NO: 541203 - protein, 15 aa, Homo sapiens
  CDR3 for alpha chain variable domain of TCR clone 270602 (TRAV12-2, TRAJ57)
CAVSTGQGGSEKLVF

SEQ ID NO: 541204 - protein, 14 aa, Homo sapiens
  CDR3 for beta chain variable domain of TCR clone 270602 (TRBV20-1, TRBJ2-1)
CSAHPGLPYNEQFF

SEQ ID NO: 541205 - protein, 13 aa, Homo sapiens
  CDR3 for alpha chain variable domain of TCR clone 270603 (TRAV13-1, TRAJ40)
CAARTSGTYNYIF

SEQ ID NO: 541206 - protein, 17 aa, Homo sapiens
  CDR3 for beta chain variable domain of TCR clone 270603 (TRBV4-1, TRBJ2-3)
CASSQGYVSGGTDTQYF

SEQ ID NO: 541207 - protein, 14 aa, Homo sapiens
  CDR3 for alpha chain variable domain of TCR clone 270604 (TRAV13-2, TRAJ45)
CAEMPGGGADGLTF

SEQ ID NO: 541208 - protein, 14 aa, Homo sapiens
  CDR3 for beta chain variable domain of TCR clone 270604 (TRBV2, TRBJ1-4)
CASNQGGLSLGLVF

SEQ ID NO: 541209 - protein, 12 aa, Homo sapiens
  CDR3 for alpha chain variable domain of TCR clone 270605 (TRAV22, TRAJ43)
CAVELNNNDMRF

SEQ ID NO: 541210 - protein, 12 aa, Homo sapiens
  CDR3 for beta chain variable domain of TCR clone 270605 (TRBV7-9, TRBJ1-5)
CASSPQGQPQHF

SEQ ID NO: 541211 - protein, 12 aa, Homo sapiens
  CDR3 for alpha chain variable domain of TCR clone 270606 (TRAV12-3, TRAJ17)
CAMTLTGNKLTF

SEQ ID NO: 541212 - protein, 13 aa, Homo sapiens
  CDR3 for beta chain variable domain of TCR clone 270606 (TRBV15, TRBJ2-3)
CATSGTGTDTQYF

SEQ ID NO: 541213 - protein, 16 aa, Homo sapiens
  CDR3 for alpha chain variable domain of TCR clone 270607 (TRAV8-3, TRAJ13)
CAVGAYPSGGYQKVTF

SEQ ID NO: 541214 - protein, 15 aa, Homo sapiens
  CDR3 for beta chain variable domain of TCR clone 270607 (TRBV19, TRBJ1-5)
CASSLVWADNQPQHF

SEQ ID NO: 541215 - protein, 13 aa, Homo sapiens
  CDR3 for alpha chain variable domain of TCR clone 270608 (TRAV10, TRAJ15)
CVVSGQAGTALIF

SEQ ID NO: 541216 - protein, 12 aa, Homo sapiens
  CDR3 for beta chain variable domain of TCR clone 270608 (TRBV6-1, TRBJ1-2)
CASSDTIDGDMA

SEQ ID NO: 541217 - protein, 15 aa, Homo sapiens
  CDR3 for alpha chain variable domain of TCR clone 270609 (TRAV38-1, TRAJ57)
CAFMDSQGGSEKLVF

SEQ ID NO: 541218 - protein, 16 aa, Homo sapiens
  CDR3 for beta chain variable domain of TCR clone 270609 (TRBV7-3, TRBJ2-2)
CASSLTGTGTTGELFF

SEQ ID NO: 541219 - protein, 13 aa, Homo sapiens
  CDR3 for alpha chain variable domain of TCR clone 270610 (TRAV20, TRAJ26)
CSVPTSYGQNFVF

SEQ ID NO: 541220 - protein, 16 aa, Homo sapiens
  CDR3 for beta chain variable domain of TCR clone 270610 (TRBV28, TRBJ2-7)
CASSSPQGRDVYEQYF

SEQ ID NO: 541221 - protein, 12 aa, Homo sapiens
  CDR3 for alpha chain variable domain of TCR clone 270611 (TRAV13-2, TRAJ23)
CAERHRGGKLIF

SEQ ID NO: 541222 - protein, 16 aa, Homo sapiens
  CDR3 for beta chain variable domain of TCR clone 270611 (TRBV20-1, TRBJ1-4)
CSAPGQGLLADEHLFF

SEQ ID NO: 541223 - protein, 12 aa, Homo sapiens
  CDR3 for alpha chain variable domain of TCR clone 270612 (TRAV16, TRAJ56)
CAPTGDNSKLTF

SEQ ID NO: 541224 - protein, 17 aa, Homo sapiens
  CDR3 for beta chain variable domain of TCR clone 270612 (TRBV27, TRBJ2-6)
CASSLTGFASGANVLTF

SEQ ID NO: 541225 - protein, 14 aa, Homo sapiens
  CDR3 for alpha chain variable domain of TCR clone 270613 (TRAV35, TRAJ13)
CAGSPSGGYQKVTF

SEQ ID NO: 541226 - protein, 13 aa, Homo sapiens
  CDR3 for beta chain variable domain of TCR clone 270613 (TRBV29-1, TRBJ1-1)
GSVGDSRNTEAFF

SEQ ID NO: 541227 - protein, 12 aa, Homo sapiens
  CDR3 for alpha chain variable domain of TCR clone 270614 (TRAV16, TRAJ10)
CSRTGGGNNITF

SEQ ID NO: 541228 - protein, 12 aa, Homo sapiens
  CDR3 for beta chain variable domain of TCR clone 270614 (TRBV11-3, TRBJ1-1)
CASSHRQGEAFF

SEQ ID NO: 541229 - protein, 14 aa, Homo sapiens
  CDR3 for alpha chain variable domain of TCR clone 270615 (TRAV8-2, TRAJ4)
CVVSPSGGYNKLIF

SEQ ID NO: 541230 - protein, 13 aa, Homo sapiens
  CDR3 for beta chain variable domain of TCR clone 270615 (TRBV12-5, TRBJ2-3)
CASGDQQSDTQYF

SEQ ID NO: 541231 - protein, 15 aa, Homo sapiens
  CDR3 for alpha chain variable domain of TCR clone 270616 (TRAV12-3, TRAJ22)
CAMRAISGSARQLTF

SEQ ID NO: 541232 - protein, 14 aa, Homo sapiens
  CDR3 for beta chain variable domain of TCR clone 270616 (TRBV25-1, TRBJ1-1)
CASTHLGGNTEAFF

SEQ ID NO: 541233 - protein, 12 aa, Homo sapiens
  CDR3 for alpha chain variable domain of TCR clone 270617 (TRAV36/DV7, TRAJ54)
CAVVRGAQKLVF

SEQ ID NO: 541234 - protein, 18 aa, Homo sapiens
  CDR3 for beta chain variable domain of TCR clone 270617 (TRBV20-1, TRBJ2-3)
CSASGLAGGPGTTDTQCF

SEQ ID NO: 541235 - protein, 11 aa, Homo sapiens
  CDR3 for alpha chain variable domain of TCR clone 270618 (TRAV12-1, TRAJ26)
CVVAYGQNFVF

SEQ ID NO: 541236 - protein, 15 aa, Homo sapiens
  CDR3 for beta chain variable domain of TCR clone 270618 (TRBV12-4, TRBJ2-5)
CASSGTGHAQETQYF

SEQ ID NO: 541237 - protein, 12 aa, Homo sapiens
  CDR3 for alpha chain variable domain of TCR clone 270619 (TRAV13-1, TRAJ27)
CAAHTNAGKSTF

SEQ ID NO: 541238 - protein, 13 aa, Homo sapiens
  CDR3 for beta chain variable domain of TCR clone 270619 (TRBV28, TRBJ2-7)
CASRSSGVYEQYF

SEQ ID NO: 541239 - protein, 15 aa, Homo sapiens
  CDR3 for alpha chain variable domain of TCR clone 270620 (TRAV26-1, TRAJ29)
CIVRVEGSGNTPLVF

SEQ ID NO: 541240 - protein, 17 aa, Homo sapiens
  CDR3 for beta chain variable domain of TCR clone 270620 (TRBV4-3, TRBJ1-1)
CASSQDLSGLVNTEAFF

SEQ ID NO: 541241 - protein, 11 aa, Homo sapiens
  CDR3 for alpha chain variable domain of TCR clone 270621 (TRAV3, TRAJ21)
CAVGNFNKFYF

SEQ ID NO: 541242 - protein, 16 aa, Homo sapiens
  CDR3 for beta chain variable domain of TCR clone 270621 (TRBV4-1, TRBJ2-7)
CASSQEWTSGPLEQYF

SEQ ID NO: 541243 - protein, 14 aa, Homo sapiens
  CDR3 for alpha chain variable domain of TCR clone 270622 (TRAV26-1, TRAJ46)
CIVRVGREKQRRQA

SEQ ID NO: 541244 - protein, 16 aa, Homo sapiens
  CDR3 for beta chain variable domain of TCR clone 270622 (TRBV27, TRBJ2-2)
CASSFRGLVRTGELFF

SEQ ID NO: 541245 - protein, 15 aa, Homo sapiens
  CDR3 for alpha chain variable domain of TCR clone 270623 (TRAV25, TRAJ52)
CAGTSGGTSYGKLTF

SEQ ID NO: 541246 - protein, 13 aa, Homo sapiens
  CDR3 for beta chain variable domain of TCR clone 270623 (TRBV9, TRBJ2-1)
CASSPSGGNEQFF

SEQ ID NO: 541247 - protein, 13 aa, Homo sapiens
  CDR3 for alpha chain variable domain of TCR clone 270624 (TRAV26-1, TRAJ34)
CIVRVGNTDKLIF

SEQ ID NO: 541248 - protein, 15 aa, Homo sapiens
  CDR3 for beta chain variable domain of TCR clone 270624 (TRBV7-3, TRBJ1-2)
CASSPQGFALGGYTF

SEQ ID NO: 541249 - protein, 14 aa, Homo sapiens
  CDR3 for alpha chain variable domain of TCR clone 270625 (TRAV26-1, TRAJ49)
CIVRPSNTGNQFYF

SEQ ID NO: 541250 - protein, 11 aa, Homo sapiens
  CDR3 for beta chain variable domain of TCR clone 270625 (TRBV29-1, TRBJ2-5)
CSEDRTGTQYF

SEQ ID NO: 541251 - protein, 12 aa, Homo sapiens
  CDR3 for alpha chain variable domain of TCR clone 270626 (TRAV1-1, TRAJ8)
CAGGTGFQKLVF

SEQ ID NO: 541252 - protein, 13 aa, Homo sapiens
  CDR3 for beta chain variable domain of TCR clone 270626 (TRBV7-3, TRBJ1-1)
CASSQDWGAEAFL

SEQ ID NO: 541253 - protein, 14 aa, Homo sapiens
  CDR3 for alpha chain variable domain of TCR clone 270627 (TRAV12-1, TRAJ30)
CVPTGTNRDDKIIF

SEQ ID NO: 541254 - protein, 11 aa, Homo sapiens
  CDR3 for beta chain variable domain of TCR clone 270627 (TRBV4-1, TRBJ2-2)
CASEHTGGLFF

SEQ ID NO: 541255 - protein, 14 aa, Homo sapiens
  CDR3 for alpha chain variable domain of TCR clone 270628 (TRAV38-1, TRAJ29)
CAFITPSGNTPLIF

SEQ ID NO: 541256 - protein, 15 aa, Homo sapiens
  CDR3 for beta chain variable domain of TCR clone 270628 (TRBV5-1, TRBJ2-1)
CASSPPRAPYNEQFF

SEQ ID NO: 541257 - protein, 18 aa, Homo sapiens
  CDR3 for alpha chain variable domain of TCR clone 270629 (TRAV21, TRAJ52)
CAVRRANAGGTSYGKLTF

SEQ ID NO: 541258 - protein, 16 aa, Homo sapiens
  CDR3 for beta chain variable domain of TCR clone 270629 (TRBV12-5, TRBJ2-5)
CASGPRTSGNQETQYF

SEQ ID NO: 541259 - protein, 14 aa, Homo sapiens
  CDR3 for alpha chain variable domain of TCR clone 270630 (TRAV8-6, TRAJ48)
CAVRTNFGNEKLTF

SEQ ID NO: 541260 - protein, 15 aa, Homo sapiens
  CDR3 for beta chain variable domain of TCR clone 270630 (TRBV7-2, TRBJ2-1)
YASSLVGSSYNEQFF

SEQ ID NO: 541261 - protein, 14 aa, Homo sapiens
  CDR3 for alpha chain variable domain of TCR clone 270631 (TRAV2, TRAJ22)
CAVGRGGSARQLSL

SEQ ID NO: 541262 - protein, 12 aa, Homo sapiens
  CDR3 for beta chain variable domain of TCR clone 270631 (TRBV19, TRBJ2-1)
CASSMQDTEQFF

SEQ ID NO: 541263 - protein, 12 aa, Homo sapiens
  CDR3 for alpha chain variable domain of TCR clone 270632 (TRAV3, TRAJ29)
CAAFPGNTPLVF

SEQ ID NO: 541264 - protein, 15 aa, Homo sapiens
  CDR3 for beta chain variable domain of TCR clone 270632 (TRBV7-9, TRBJ1-5)
CASSQGHQPNQPQHF

SEQ ID NO: 541265 - protein, 16 aa, Homo sapiens
  CDR3 for alpha chain variable domain of TCR clone 270633 (TRAV30, TRAJ24)
CGTEIVDADSWGKFQF

SEQ ID NO: 541266 - protein, 17 aa, Homo sapiens
  CDR3 for beta chain variable domain of TCR clone 270633 (TRBV7-9, TRBJ2-2)
CASSLGVAGMNTGELFF

SEQ ID NO: 541267 - protein, 15 aa, Homo sapiens
  CDR3 for alpha chain variable domain of TCR clone 270634 (TRAV26-1, TRAJ44)
CIARVPFGTASNLTF

SEQ ID NO: 541268 - protein, 17 aa, Homo sapiens
  CDR3 for beta chain variable domain of TCR clone 270634 (TRBV24-1, TRBJ2-4)
CATSDAEARGVRNIQYF

SEQ ID NO: 541269 - protein, 23 aa, Homo sapiens
  CDR3 for alpha chain variable domain of TCR clone 270635 (TRAV26-1, TRAJ38)
CIADNAGNNHIQNPDPAVYQLRD

SEQ ID NO: 541270 - protein, 14 aa, Homo sapiens
  CDR3 for beta chain variable domain of TCR clone 270635 (TRBV7-9, TRBJ2-5)
CASSLVGGEETQYF

SEQ ID NO: 541271 - protein, 17 aa, Homo sapiens
  CDR3 for alpha chain variable domain of TCR clone 270636 (TRAV1-1, TRAJ31)
CAVPKQCQTHVWIWNSA

SEQ ID NO: 541272 - protein, 17 aa, Homo sapiens
  CDR3 for beta chain variable domain of TCR clone 270636 (TRBV27, TRBJ2-6)
CASSAGTGFSGANVLTF

SEQ ID NO: 541273 - protein, 14 aa, Homo sapiens
  CDR3 for alpha chain variable domain of TCR clone 270637 (TRAV17, TRAJ6)
CATDASGGIYIPTF

SEQ ID NO: 541274 - protein, 19 aa, Homo sapiens
  CDR3 for beta chain variable domain of TCR clone 270637 (TRBV4-3, TRBJ2-7)
CASSQEFIGWQVTPYEQYF

SEQ ID NO: 541275 - protein, 17 aa, Homo sapiens
  CDR3 for alpha chain variable domain of TCR clone 270638 (TRAV3, TRAJ42)
CAVRDRAYGGSQGNRIF

SEQ ID NO: 541276 - protein, 14 aa, Homo sapiens
  CDR3 for beta chain variable domain of TCR clone 270638 (TRBV19, TRBJ2-5)
CASSMTGQQETQYF

SEQ ID NO: 541277 - protein, 13 aa, Homo sapiens
  CDR3 for alpha chain variable domain of TCR clone 270639 (TRAV13-1, TRAJ39)
CSKYSNAGNMLTF

SEQ ID NO: 541278 - protein, 14 aa, Homo sapiens
  CDR3 for beta chain variable domain of TCR clone 270639 (TRBV7-6, TRBJ2-3)
CASSLGTVTDTQYF

SEQ ID NO: 541279 - protein, 17 aa, Homo sapiens
  CDR3 for alpha chain variable domain of TCR clone 270640 (TRAV13-1, TRAJ28)
CAASPPYSGAGSYQLTF

SEQ ID NO: 541280 - protein, 15 aa, Homo sapiens
  CDR3 for beta chain variable domain of TCR clone 270640 (TRBV19, TRBJ2-1)
CASSHLRQALNEQFF

SEQ ID NO: 541281 - protein, 13 aa, Homo sapiens
  CDR3 for alpha chain variable domain of TCR clone 270641 (TRAV2, TRAJ12)
CAAGADSSYKLIF

SEQ ID NO: 541282 - protein, 13 aa, Homo sapiens
  CDR3 for beta chain variable domain of TCR clone 270641 (TRBV20-1, TRBJ2-1)
CSARASPRDEQFF

SEQ ID NO: 541283 - protein, 12 aa, Homo sapiens
  CDR3 for alpha chain variable domain of TCR clone 270642 (TRAV4, TRAJ26)
CLVGDYGQNFVF

SEQ ID NO: 541284 - protein, 16 aa, Homo sapiens
  CDR3 for beta chain variable domain of TCR clone 270642 (TRBV7-2, TRBJ1-2)
FASSSNQDRRGHGYTF

SEQ ID NO: 541285 - protein, 13 aa, Homo sapiens
  CDR3 for alpha chain variable domain of TCR clone 270643 (TRAV12-3, TRAJ33)
CAMSVNSNYQLIW

SEQ ID NO: 541286 - protein, 11 aa, Homo sapiens
  CDR3 for beta chain variable domain of TCR clone 270643 (TRBV7-3, TRBJ2-5)
CASSLRETQYF

SEQ ID NO: 541287 - protein, 14 aa, Homo sapiens
  CDR3 for alpha chain variable domain of TCR clone 270644 (TRAV12-2, TRAJ17)
CAVLFKAAGNKLTF

SEQ ID NO: 541288 - protein, 16 aa, Homo sapiens
  CDR3 for beta chain variable domain of TCR clone 270644 (TRBV20-1, TRBJ1-4)
CSAPRQGVLTNEKLFF

SEQ ID NO: 541289 - protein, 14 aa, Homo sapiens
  CDR3 for alpha chain variable domain of TCR clone 270645 (TRAV12-1, TRAJ30)
CVVNIGNRDDKIIF

SEQ ID NO: 541290 - protein, 14 aa, Homo sapiens
  CDR3 for beta chain variable domain of TCR clone 270645 (TRBV7-9, TRBJ2-5)
CASSPRPSWETQYF

SEQ ID NO: 541291 - protein, 11 aa, Homo sapiens
  CDR3 for alpha chain variable domain of TCR clone 270646 (TRAV21, TRAJ34)
CAHYNTDKLIF

SEQ ID NO: 541292 - protein, 16 aa, Homo sapiens
  CDR3 for beta chain variable domain of TCR clone 270646 (TRBV10-3, TRBJ2-1)
CAISGVGDGGGGEQFF

SEQ ID NO: 541293 - protein, 14 aa, Homo sapiens
  CDR3 for alpha chain variable domain of TCR clone 270647 (TRAV4, TRAJ34)
CLVGDLYNTDNLIF

SEQ ID NO: 541294 - protein, 11 aa, Homo sapiens
  CDR3 for beta chain variable domain of TCR clone 270647 (TRBV11-2, TRBJ2-2)
CASSLPGELFF

SEQ ID NO: 541295 - protein, 13 aa, Homo sapiens
  CDR3 for alpha chain variable domain of TCR clone 270648 (TRAV3, TRAJ20)
CCEAFCNDYKLSF

SEQ ID NO: 541296 - protein, 15 aa, Homo sapiens
  CDR3 for beta chain variable domain of TCR clone 270648 (TRBV6-5, TRBJ2-1)
CASSYDAGAGDEQFF

SEQ ID NO: 541297 - protein, 16 aa, Homo sapiens
  CDR3 for alpha chain variable domain of TCR clone 270649 (TRAV30, TRAJ24)
CGTEIVDADSWGKFQF

SEQ ID NO: 541298 - protein, 16 aa, Homo sapiens
  CDR3 for beta chain variable domain of TCR clone 270649 (TRBV5-1, TRBJ2-2)
CASSSRTGGLTGELFF

SEQ ID NO: 541299 - protein, 15 aa, Homo sapiens
  CDR3 for alpha chain variable domain of TCR clone 270650 (TRAV8-6, TRAJ6)
CAVSFTSGGSYIPTF

SEQ ID NO: 541300 - protein, 13 aa, Homo sapiens
  CDR3 for beta chain variable domain of TCR clone 270650 (TRBV29-1, TRBJ2-1)
CSFEGGRVNEQFF

SEQ ID NO: 541301 - protein, 12 aa, Homo sapiens
  CDR3 for alpha chain variable domain of TCR clone 270651 (TRAV8-2, TRAJ45)
CVQGGGADGLTF

SEQ ID NO: 541302 - protein, 16 aa, Homo sapiens
  CDR3 for beta chain variable domain of TCR clone 270651 (TRBV7-6, TRBJ2-7)
CASSGGTGALSYEQYF

SEQ ID NO: 541303 - protein, 12 aa, Homo sapiens
  CDR3 for alpha chain variable domain of TCR clone 270652 (TRAV20, TRAJ20)
CAVRVNDYKLSF

SEQ ID NO: 541304 - protein, 14 aa, Homo sapiens
  CDR3 for beta chain variable domain of TCR clone 270652 (TRBV20-1, TRBJ2-1)
CSAQRGGSANEQLF

SEQ ID NO: 541305 - protein, 14 aa, Homo sapiens
  CDR3 for alpha chain variable domain of TCR clone 270653 (TRAV12-3, TRAJ10)
SHLPLTGGGNKLTF

SEQ ID NO: 541306 - protein, 15 aa, Homo sapiens
  CDR3 for beta chain variable domain of TCR clone 270653 (TRBV10-2, TRBJ2-6)
CASSEQGTGANLLTF

SEQ ID NO: 541307 - protein, 15 aa, Homo sapiens
  CDR3 for alpha chain variable domain of TCR clone 270654 (TRAV3, TRAJ22)
CAARDRGGSARQLTF

SEQ ID NO: 541308 - protein, 14 aa, Homo sapiens
  CDR3 for beta chain variable domain of TCR clone 270654 (TRBV12-5, TRBJ2-5)
CASDSRTHQETQYF

SEQ ID NO: 541309 - protein, 12 aa, Homo sapiens
  CDR3 for alpha chain variable domain of TCR clone 270655 (TRAV12-3, TRAJ17)
CAMTLTGNKLTF

SEQ ID NO: 541310 - protein, 15 aa, Homo sapiens
  CDR3 for beta chain variable domain of TCR clone 270655 (TRBV20-1, TRBJ2-7)
CSARDQVSGMYEQYF

SEQ ID NO: 541311 - protein, 11 aa, Homo sapiens
  CDR3 for alpha chain variable domain of TCR clone 270656 (TRAV2, TRAJ13)
CASGGYRKVTF

SEQ ID NO: 541312 - protein, 14 aa, Homo sapiens
  CDR3 for beta chain variable domain of TCR clone 270656 (TRBV7-3, TRBJ2-7)
CASSYDQDYYEQYF

SEQ ID NO: 541313 - protein, 11 aa, Homo sapiens
  CDR3 for alpha chain variable domain of TCR clone 270657 (TRAV4, TRAJ20)
CLVGDQVTTTS

SEQ ID NO: 541314 - protein, 15 aa, Homo sapiens
  CDR3 for beta chain variable domain of TCR clone 270657 (TRBV18, TRBJ2-7)
CASSPSSTGNYEQYF

SEQ ID NO: 541315 - protein, 14 aa, Homo sapiens
  CDR3 for alpha chain variable domain of TCR clone 270658 (TRAV3, TRAJ9)
CAVRLNTGGFKTIF

SEQ ID NO: 541316 - protein, 19 aa, Homo sapiens
  CDR3 for beta chain variable domain of TCR clone 270658 (TRBV7-2, TRBJ2-3)
CASSFLSRNWGGGTDTQYF

SEQ ID NO: 541317 - protein, 13 aa, Homo sapiens
  CDR3 for alpha chain variable domain of TCR clone 270659 (TRAV13-1, TRAJ10)
CAALEGGGNKLTF

SEQ ID NO: 541318 - protein, 13 aa, Homo sapiens
  CDR3 for beta chain variable domain of TCR clone 270659 (TRBV7-9, TRBJ1-2)
CASSLKQNYGYTL

SEQ ID NO: 541319 - protein, 13 aa, Homo sapiens
  CDR3 for alpha chain variable domain of TCR clone 270660 (TRAV17, TRAJ5)
CAPMDTGRRALTF

SEQ ID NO: 541320 - protein, 15 aa, Homo sapiens
  CDR3 for beta chain variable domain of TCR clone 270660 (TRBV7-9, TRBJ2-7)
CASSLALAEAYEQYF

SEQ ID NO: 541321 - protein, 17 aa, Homo sapiens
  CDR3 for alpha chain variable domain of TCR clone 270661 (TRAV3, TRAJ42)
CAVRDRDYVGSQGNLIF

SEQ ID NO: 541322 - protein, 18 aa, Homo sapiens
  CDR3 for beta chain variable domain of TCR clone 270661 (TRBV20-1, TRBJ2-3)
CSASGLAGGPETTDTQYF

SEQ ID NO: 541323 - protein, 13 aa, Homo sapiens
  CDR3 for alpha chain variable domain of TCR clone 270662 (TRAV12-1, TRAJ21)
CVVIGDNFNKFYF

SEQ ID NO: 541324 - protein, 14 aa, Homo sapiens
  CDR3 for beta chain variable domain of TCR clone 270662 (TRBV2, TRBJ2-7)
CASSLTSGGYEQYF

SEQ ID NO: 541325 - protein, 18 aa, Homo sapiens
  CDR3 for alpha chain variable domain of TCR clone 270663 (TRAV21, TRAJ52)
CAVRPSPAGGTSYGKLTF

SEQ ID NO: 541326 - protein, 13 aa, Homo sapiens
  CDR3 for beta chain variable domain of TCR clone 270663 (TRBV29-1, TRBJ2-1)
CSVEGVRVNEQFF

SEQ ID NO: 541327 - protein, 23 aa, Homo sapiens
  CDR3 for alpha chain variable domain of TCR clone 270664 (TRAV26-1, TRAJ38)
CIADNAGNNHIQNPDPAGYQLRD

SEQ ID NO: 541328 - protein, 15 aa, Homo sapiens
  CDR3 for beta chain variable domain of TCR clone 270664 (TRBV27, TRBJ2-1)
CASSSGGGSSNEQFF

SEQ ID NO: 541329 - protein, 14 aa, Homo sapiens
  CDR3 for alpha chain variable domain of TCR clone 270665 (TRAV2, TRAJ11)
CAVLPNSGYSTLTF

SEQ ID NO: 541330 - protein, 15 aa, Homo sapiens
  CDR3 for beta chain variable domain of TCR clone 270665 (TRBV4-1, TRBJ1-3)
CASSQDLRVGNTIYF

SEQ ID NO: 541331 - protein, 17 aa, Homo sapiens
  CDR3 for alpha chain variable domain of TCR clone 270666 (TRAV38-1, TRAJ45)
CAFMRSHSGGGAYGLTF

SEQ ID NO: 541332 - protein, 14 aa, Homo sapiens
  CDR3 for beta chain variable domain of TCR clone 270666 (TRBV28, TRBJ2-7)
CASSLLRISYEQYF

SEQ ID NO: 541333 - protein, 14 aa, Homo sapiens
  CDR3 for alpha chain variable domain of TCR clone 270667 (TRAV12-2, TRAJ45)
CAVNKGGGADGLTF

SEQ ID NO: 541334 - protein, 15 aa, Homo sapiens
  CDR3 for beta chain variable domain of TCR clone 270667 (TRBV9, TRBJ1-6)
CTSSVAGTGDSPLHF

SEQ ID NO: 541335 - protein, 13 aa, Homo sapiens
  CDR3 for alpha chain variable domain of TCR clone 270668 (TRAV12-3, TRAJ31)
CAMSANNNARLMF

SEQ ID NO: 541336 - protein, 16 aa, Homo sapiens
  CDR3 for beta chain variable domain of TCR clone 270668 (TRBV7-9, TRBJ1-2)
CASSLGFSSGEDGYTV

SEQ ID NO: 541337 - protein, 13 aa, Homo sapiens
  CDR3 for alpha chain variable domain of TCR clone 270669 (TRAV1-2, TRAJ20)
CAVRDGNEYKLSF

SEQ ID NO: 541338 - protein, 14 aa, Homo sapiens
  CDR3 for beta chain variable domain of TCR clone 270669 (TRBV7-2, TRBJ2-3)
CQQLRGGGRDTQYF

SEQ ID NO: 541339 - protein, 13 aa, Homo sapiens
  CDR3 for alpha chain variable domain of TCR clone 270670 (TRAV35, TRAJ48)
GRSRVFGNEKLNF

SEQ ID NO: 541340 - protein, 14 aa, Homo sapiens
  CDR3 for beta chain variable domain of TCR clone 270670 (TRBV20-1, TRBJ2-5)
CSALVPGYQETQYF

SEQ ID NO: 541341 - protein, 15 aa, Homo sapiens
  CDR3 for alpha chain variable domain of TCR clone 270671 (TRAV19, TRAJ23)
CALSEVGNQGGKLIF

SEQ ID NO: 541342 - protein, 14 aa, Homo sapiens
  CDR3 for beta chain variable domain of TCR clone 270671 (TRBV10-2, TRBJ1-5)
CASSSTGRNQPQHF

SEQ ID NO: 541343 - protein, 14 aa, Homo sapiens
  CDR3 for alpha chain variable domain of TCR clone 270672 (TRAV12-2, TRAJ9)
CAVNALEGGFKTIF

SEQ ID NO: 541344 - protein, 16 aa, Homo sapiens
  CDR3 for beta chain variable domain of TCR clone 270672 (TRBV19, TRBJ1-6)
YASSVAPVAGNSPLHF

SEQ ID NO: 541345 - protein, 14 aa, Homo sapiens
  CDR3 for alpha chain variable domain of TCR clone 270673 (TRAV17, TRAJ12)
CATDEKDSSYKLIF

SEQ ID NO: 541346 - protein, 17 aa, Homo sapiens
  CDR3 for beta chain variable domain of TCR clone 270673 (TRBV7-8, TRBJ2-6)
CASSAGTGGAGANVLTF

SEQ ID NO: 541347 - protein, 10 aa, Homo sapiens
  CDR3 for alpha chain variable domain of TCR clone 270674 (TRAV23/DV6, TRAJ57)
CAASSTLLQG

SEQ ID NO: 541348 - protein, 14 aa, Homo sapiens
  CDR3 for beta chain variable domain of TCR clone 270674 (TRBV25-1, TRBJ1-1)
CASTHLGGDTEAFF

SEQ ID NO: 541349 - protein, 16 aa, Homo sapiens
  CDR3 for alpha chain variable domain of TCR clone 270675 (TRAV3, TRAJ37)
CAVRGKGSGNTGKLIF

SEQ ID NO: 541350 - protein, 15 aa, Homo sapiens
  CDR3 for beta chain variable domain of TCR clone 270675 (TRBV9, TRBJ1-4)
CASSVGGSNNEKLFF

SEQ ID NO: 541351 - protein, 14 aa, Homo sapiens
  CDR3 for alpha chain variable domain of TCR clone 270676 (TRAV23/DV6, TRAJ22)
CAASVSGSARQLTV

SEQ ID NO: 541352 - protein, 15 aa, Homo sapiens
  CDR3 for beta chain variable domain of TCR clone 270676 (TRBV20-1, TRBJ2-7)
CSARDRVSGMDEQYF

SEQ ID NO: 541353 - protein, 13 aa, Homo sapiens
  CDR3 for alpha chain variable domain of TCR clone 270677 (TRAV13-2, TRAJ13)
CAERPGGYQKVTF

SEQ ID NO: 541354 - protein, 15 aa, Homo sapiens
  CDR3 for beta chain variable domain of TCR clone 270677 (TRBV11-3, TRBJ2-7)
CASSPGPASSYEQYV

SEQ ID NO: 541355 - protein, 15 aa, Homo sapiens
  CDR3 for alpha chain variable domain of TCR clone 270678 (TRAV26-1, TRAJ44)
CIVRIGTGTASKLTF

SEQ ID NO: 541356 - protein, 16 aa, Homo sapiens
  CDR3 for beta chain variable domain of TCR clone 270678 (TRBV7-3, TRBJ2-2)
CASSLKRGTLSGELFF

SEQ ID NO: 541357 - protein, 13 aa, Homo sapiens
  CDR3 for alpha chain variable domain of TCR clone 270679 (TRAV29/DV5, TRAJ31)
CAASRNNYARLMF

SEQ ID NO: 541358 - protein, 12 aa, Homo sapiens
  CDR3 for beta chain variable domain of TCR clone 270679 (TRBV28, TRBJ2-3)
CASSLYRDTQYL

SEQ ID NO: 541359 - protein, 15 aa, Homo sapiens
  CDR3 for alpha chain variable domain of TCR clone 270680 (TRAV8-4, TRAJ37)
CAVSRGSVNTGKLIF

SEQ ID NO: 541360 - protein, 16 aa, Homo sapiens
  CDR3 for beta chain variable domain of TCR clone 270680 (TRBV7-3, TRBJ2-3)
CASSLSGYRPEDTQYF

SEQ ID NO: 541361 - protein, 13 aa, Homo sapiens
  CDR3 for alpha chain variable domain of TCR clone 270681 (TRAV35, TRAJ21)
CAGQLSDFNKFYF

SEQ ID NO: 541362 - protein, 11 aa, Homo sapiens
  CDR3 for beta chain variable domain of TCR clone 270681 (TRBV7-6, TRBJ2-5)
CASSSQETQYF

SEQ ID NO: 541363 - protein, 17 aa, Homo sapiens
  CDR3 for alpha chain variable domain of TCR clone 270682 (TRAV17, TRAJ28)
CATDPRRGGAGSYQLTF

SEQ ID NO: 541364 - protein, 16 aa, Homo sapiens
  CDR3 for beta chain variable domain of TCR clone 270682 (TRBV25-1, TRBJ1-1)
CASSGDRDRGLSEAFF

SEQ ID NO: 541365 - protein, 16 aa, Homo sapiens
  CDR3 for alpha chain variable domain of TCR clone 270683 (TRAV12-1, TRAJ48)
CVVNMVSNFGHEKLTF

SEQ ID NO: 541366 - protein, 18 aa, Homo sapiens
  CDR3 for beta chain variable domain of TCR clone 270683 (TRBV11-2, TRBJ2-6)
CASSLNPFLGTGANVLTF

SEQ ID NO: 541367 - protein, 12 aa, Homo sapiens
  CDR3 for alpha chain variable domain of TCR clone 270684 (TRAV1-1, TRAJ23)
CAVTNQGGKLIF

SEQ ID NO: 541368 - protein, 14 aa, Homo sapiens
  CDR3 for beta chain variable domain of TCR clone 270684 (TRBV12-5, TRBJ2-5)
CASGSRTHQETQYF

SEQ ID NO: 541369 - protein, 14 aa, Homo sapiens
  CDR3 for alpha chain variable domain of TCR clone 270685 (TRAV35, TRAJ38)
CAGSNAGNNRKLIW

SEQ ID NO: 541370 - protein, 12 aa, Homo sapiens
  CDR3 for beta chain variable domain of TCR clone 270685 (TRBV19, TRBJ2-7)
SASTDRGYEQYF

SEQ ID NO: 541371 - protein, 14 aa, Homo sapiens
  CDR3 for alpha chain variable domain of TCR clone 270686 (TRAV1-2, TRAJ8)
CAVREDIGFQKLVF

SEQ ID NO: 541372 - protein, 15 aa, Homo sapiens
  CDR3 for beta chain variable domain of TCR clone 270686 (TRBV4-1, TRBJ2-7)
CASSQNTGRLYEQYF

SEQ ID NO: 541373 - protein, 19 aa, Homo sapiens
  CDR3 for alpha chain variable domain of TCR clone 270687 (TRAV26-1, TRAJ52)
CIVRAHRNAGGTSYGKLTF

SEQ ID NO: 541374 - protein, 17 aa, Homo sapiens
  CDR3 for beta chain variable domain of TCR clone 270687 (TRBV4-1, TRBJ2-7)
CASSRDPLGVRGGEQYF

SEQ ID NO: 541375 - protein, 13 aa, Homo sapiens
  CDR3 for alpha chain variable domain of TCR clone 270688 (TRAV3, TRAJ27)
FAVRPLGAGKSTF

SEQ ID NO: 541376 - protein, 12 aa, Homo sapiens
  CDR3 for beta chain variable domain of TCR clone 270688 (TRBV6-1, TRBJ2-7)
CASSDYSYEQYF

SEQ ID NO: 541377 - protein, 14 aa, Homo sapiens
  CDR3 for alpha chain variable domain of TCR clone 270689 (TRAV1-2, TRAJ16)
CAVNRFSDGQKLRF

SEQ ID NO: 541378 - protein, 15 aa, Homo sapiens
  CDR3 for beta chain variable domain of TCR clone 270689 (TRBV7-9, TRBJ2-2)
CASGPLDTFPGELFF

SEQ ID NO: 541379 - protein, 13 aa, Homo sapiens
  CDR3 for alpha chain variable domain of TCR clone 270690 (TRAV21, TRAJ57)
CAVTQGGSEKLVF

SEQ ID NO: 541380 - protein, 13 aa, Homo sapiens
  CDR3 for beta chain variable domain of TCR clone 270690 (TRBV20-1, TRBJ2-2)
CSALSGGAGELFF

SEQ ID NO: 541381 - protein, 16 aa, Homo sapiens
  CDR3 for alpha chain variable domain of TCR clone 270691 (TRAV30, TRAJ24)
CGTEIVDADSWGKFQF

SEQ ID NO: 541382 - protein, 12 aa, Homo sapiens
  CDR3 for beta chain variable domain of TCR clone 270691 (TRBV11-2, TRBJ2-2)
SASSLPTGELFF

SEQ ID NO: 541383 - protein, 14 aa, Homo sapiens
  CDR3 for alpha chain variable domain of TCR clone 270692 (TRAV14/DV4, TRAJ15)
CAIRRDQAGTALIF

SEQ ID NO: 541384 - protein, 16 aa, Homo sapiens
  CDR3 for beta chain variable domain of TCR clone 270692 (TRBV15, TRBJ2-3)
CATSRDLGIVTDTQYF

SEQ ID NO: 541385 - protein, 16 aa, Homo sapiens
  CDR3 for alpha chain variable domain of TCR clone 270693 (TRAV26-1, )
CIDIQNPDPAVYQLRD

SEQ ID NO: 541386 - protein, 19 aa, Homo sapiens
  CDR3 for beta chain variable domain of TCR clone 270693 (TRBV19, TRBJ2-5)
CASSIEQVTDLFLGETQYF

SEQ ID NO: 541387 - protein, 16 aa, Homo sapiens
  CDR3 for alpha chain variable domain of TCR clone 270694 (TRAV8-6, TRAJ39)
CAVMPMNNNAGNMLTC

SEQ ID NO: 541388 - protein, 16 aa, Homo sapiens
  CDR3 for beta chain variable domain of TCR clone 270694 (TRBV15, TRBJ2-5)
CATSRYLEAAQETQYF

SEQ ID NO: 541389 - protein, 13 aa, Homo sapiens
  CDR3 for alpha chain variable domain of TCR clone 270695 (TRAV8-3, TRAJ36)
CAVGATGANNLFF

SEQ ID NO: 541390 - protein, 15 aa, Homo sapiens
  CDR3 for beta chain variable domain of TCR clone 270695 (TRBV7-9, TRBJ1-1)
CASSLLEQGGTEAFF

SEQ ID NO: 541391 - protein, 12 aa, Homo sapiens
  CDR3 for alpha chain variable domain of TCR clone 270696 (TRAV12-2, TRAJ3)
CAVWSSSSKIIF

SEQ ID NO: 541392 - protein, 12 aa, Homo sapiens
  CDR3 for beta chain variable domain of TCR clone 270696 (TRBV11-2, TRBJ2-1)
CASSPGNNEQFF

SEQ ID NO: 541393 - protein, 11 aa, Homo sapiens
  CDR3 for alpha chain variable domain of TCR clone 270697 (TRAV2, TRAJ13)
CASGGYQKVTF

SEQ ID NO: 541394 - protein, 15 aa, Homo sapiens
  CDR3 for beta chain variable domain of TCR clone 270697 (TRBV2, TRBJ2-1)
CASSELAGSYNEQFF

SEQ ID NO: 541395 - protein, 18 aa, Homo sapiens
  CDR3 for alpha chain variable domain of TCR clone 270698 (TRAV21, TRAJ52)
CAVRPSPAGGTSYGNLTF

SEQ ID NO: 541396 - protein, 16 aa, Homo sapiens
  CDR3 for beta chain variable domain of TCR clone 270698 (TRBV7-9, TRBJ1-2)
CASSLGFSSGEDGYTF

SEQ ID NO: 541397 - protein, 10 aa, Homo sapiens
  CDR3 for alpha chain variable domain of TCR clone 270699 (TRAV8-4, TRAJ48)
FNFGNEKLTL

SEQ ID NO: 541398 - protein, 14 aa, Homo sapiens
  CDR3 for beta chain variable domain of TCR clone 270699 (TRBV7-9, TRBJ2-2)
CASSLGRRTGELFF

SEQ ID NO: 541399 - protein, 15 aa, Homo sapiens
  CDR3 for alpha chain variable domain of TCR clone 270700 (TRAV8-3, TRAJ45)
CASSYSGGGADGLTF

SEQ ID NO: 541400 - protein, 13 aa, Homo sapiens
  CDR3 for beta chain variable domain of TCR clone 270700 (TRBV19, TRBJ1-2)
CASSVRGQDGYTF

SEQ ID NO: 541401 - protein, 16 aa, Homo sapiens
  CDR3 for alpha chain variable domain of TCR clone 270701 (TRAV26-2, TRAJ48)
CILRPPFNIGNEKLTF

SEQ ID NO: 541402 - protein, 15 aa, Homo sapiens
  CDR3 for beta chain variable domain of TCR clone 270701 (TRBV20-1, TRBJ2-3)
CSARVEGTYTDTQYF

SEQ ID NO: 541403 - protein, 15 aa, Homo sapiens
  CDR3 for alpha chain variable domain of TCR clone 270702 (TRAV21, TRAJ53)
CATLNSGGSNYKLTF

SEQ ID NO: 541404 - protein, 16 aa, Homo sapiens
  CDR3 for beta chain variable domain of TCR clone 270702 (TRBV9, TRBJ2-1)
CATSVGGGGNYNEQFF

SEQ ID NO: 541405 - protein, 11 aa, Homo sapiens
  CDR3 for alpha chain variable domain of TCR clone 270703 (TRAV2, TRAJ13)
CASVGYQKVTF

SEQ ID NO: 541406 - protein, 15 aa, Homo sapiens
  CDR3 for beta chain variable domain of TCR clone 270703 (TRBV29-1, TRBJ2-1)
CSVPTGLALYNEQFF

SEQ ID NO: 541407 - protein, 17 aa, Homo sapiens
  CDR3 for alpha chain variable domain of TCR clone 270704 (TRAV36/DV7, TRAJ37)
CAVIARRQTNLWARDNF

SEQ ID NO: 541408 - protein, 14 aa, Homo sapiens
  CDR3 for beta chain variable domain of TCR clone 270704 (TRBV19, TRBJ2-1)
CASEVTGARNEQFF

SEQ ID NO: 541409 - protein, 14 aa, Homo sapiens
  CDR3 for alpha chain variable domain of TCR clone 270705 (TRAV26-2, TRAJ54)
CILRDVRGAQKLVF

SEQ ID NO: 541410 - protein, 15 aa, Homo sapiens
  CDR3 for beta chain variable domain of TCR clone 270705 (TRBV4-1, TRBJ1-4)
CASSDTGGTNEKLFF

SEQ ID NO: 541411 - protein, 12 aa, Homo sapiens
  CDR3 for alpha chain variable domain of TCR clone 270706 (TRAV13-2, TRAJ23)
CAERHRGGKLIF

SEQ ID NO: 541412 - protein, 14 aa, Homo sapiens
  CDR3 for beta chain variable domain of TCR clone 270706 (TRBV19, TRBJ2-7)
CASSMGQGAIEQYF

SEQ ID NO: 541413 - protein, 11 aa, Homo sapiens
  CDR3 for alpha chain variable domain of TCR clone 270707 (TRAV12-1, TRAJ34)
CVVNKGRELVF

SEQ ID NO: 541414 - protein, 12 aa, Homo sapiens
  CDR3 for beta chain variable domain of TCR clone 270707 (TRBV11-2, TRBJ2-2)
CASSLGGGELFF

SEQ ID NO: 541415 - protein, 13 aa, Homo sapiens
  CDR3 for alpha chain variable domain of TCR clone 270708 (TRAV23/DV6, TRAJ24)
CAASTDSWGKLQF

SEQ ID NO: 541416 - protein, 16 aa, Homo sapiens
  CDR3 for beta chain variable domain of TCR clone 270708 (TRBV27, TRBJ2-2)
CASSFRGLVRTGELFF

SEQ ID NO: 541417 - protein, 14 aa, Homo sapiens
  CDR3 for alpha chain variable domain of TCR clone 270709 (TRAV1-2, TRAJ24)
CAVLTTDSWGQFQF

SEQ ID NO: 541418 - protein, 21 aa, Homo sapiens
  CDR3 for beta chain variable domain of TCR clone 270709 (TRBV6-5, TRBJ1-3)
CASSYWEKIAQGMSSGNTIYF

SEQ ID NO: 541419 - protein, 15 aa, Homo sapiens
  CDR3 for alpha chain variable domain of TCR clone 270710 (TRAV12-3, TRAJ6)
CAMSATTGGSYIPTF

SEQ ID NO: 541420 - protein, 12 aa, Homo sapiens
  CDR3 for beta chain variable domain of TCR clone 270710 (TRBV7-9, TRBJ2-7)
CASSRTVYEQYF

SEQ ID NO: 541421 - protein, 15 aa, Homo sapiens
  CDR3 for alpha chain variable domain of TCR clone 270711 (TRAV13-1, TRAJ17)
CAASRAGAAGNKLSF

SEQ ID NO: 541422 - protein, 17 aa, Homo sapiens
  CDR3 for beta chain variable domain of TCR clone 270711 (TRBV25-1, TRBJ2-1)
CASSAYGQGRGVYEQFF

SEQ ID NO: 541423 - protein, 14 aa, Homo sapiens
  CDR3 for alpha chain variable domain of TCR clone 270712 (TRAV35, TRAJ38)
CAGSNDGNNRKLLW

SEQ ID NO: 541424 - protein, 12 aa, Homo sapiens
  CDR3 for beta chain variable domain of TCR clone 270712 (TRBV19, TRBJ2-7)
CASTDRGYEQYF

SEQ ID NO: 541425 - protein, 13 aa, Homo sapiens
  CDR3 for alpha chain variable domain of TCR clone 270713 (TRAV13-1, TRAJ39)
CSKYSNAGNMLTF

SEQ ID NO: 541426 - protein, 13 aa, Homo sapiens
  CDR3 for beta chain variable domain of TCR clone 270713 (TRBV12-4, TRBJ1-2)
CASSLDSNYGYTF

SEQ ID NO: 541427 - protein, 14 aa, Homo sapiens
  CDR3 for alpha chain variable domain of TCR clone 270714 (TRAV2, TRAJ37)
CAVDFTSNTGKLMF

SEQ ID NO: 541428 - protein, 13 aa, Homo sapiens
  CDR3 for beta chain variable domain of TCR clone 270714 (TRBV20-1, TRBJ1-1)
CSAPLGGGTEAFF

SEQ ID NO: 541429 - protein, 14 aa, Homo sapiens
  CDR3 for alpha chain variable domain of TCR clone 270715 (TRAV26-1, TRAJ40)
CIVRLLSGTYKYIF

SEQ ID NO: 541430 - protein, 13 aa, Homo sapiens
  CDR3 for beta chain variable domain of TCR clone 270715 (TRBV3-1, TRBJ1-1)
CASSQLQGAEAFF

SEQ ID NO: 541431 - protein, 18 aa, Homo sapiens
  CDR3 for alpha chain variable domain of TCR clone 270716 (TRAV21, TRAJ52)
CAVRPSPAGGTSYGKLTF

SEQ ID NO: 541432 - protein, 15 aa, Homo sapiens
  CDR3 for beta chain variable domain of TCR clone 270716 (TRBV7-2, TRBJ2-3)
CASSSTGLETDTQYF

SEQ ID NO: 541433 - protein, 15 aa, Homo sapiens
  CDR3 for alpha chain variable domain of TCR clone 270717 (TRAV12-2, TRAJ43)
CAFDMRFGAGTRLTV

SEQ ID NO: 541434 - protein, 13 aa, Homo sapiens
  CDR3 for beta chain variable domain of TCR clone 270717 (TRBV7-2, TRBJ2-2)
CASSSRPTGELFF

SEQ ID NO: 541435 - protein, 16 aa, Homo sapiens
  CDR3 for alpha chain variable domain of TCR clone 270718 (TRAV30, TRAJ24)
CGTEIVDADSWRKFQF

SEQ ID NO: 541436 - protein, 14 aa, Homo sapiens
  CDR3 for beta chain variable domain of TCR clone 270718 (TRBV12-5, TRBJ2-5)
CAGGSRTHQETQYF

SEQ ID NO: 541437 - protein, 15 aa, Homo sapiens
  CDR3 for alpha chain variable domain of TCR clone 270719 (TRAV1-2, TRAJ24)
CAVRGSTDSWGKFEF

SEQ ID NO: 541438 - protein, 16 aa, Homo sapiens
  CDR3 for beta chain variable domain of TCR clone 270719 (TRBV20-1, TRBJ2-1)
CSAATQGPVSYNEQFF

SEQ ID NO: 541439 - protein, 15 aa, Homo sapiens
  CDR3 for alpha chain variable domain of TCR clone 270720 (TRAV23/DV6, TRAJ30)
CAASSQESRDDKIIF

SEQ ID NO: 541440 - protein, 17 aa, Homo sapiens
  CDR3 for beta chain variable domain of TCR clone 270720 (TRBV4-3, TRBJ2-1)
CASSQFSSGGASGEQFF

SEQ ID NO: 541441 - protein, 16 aa, Homo sapiens
  CDR3 for alpha chain variable domain of TCR clone 270721 (TRAV1-2, TRAJ27)
CAVREPQTPMQANQPL

SEQ ID NO: 541442 - protein, 13 aa, Homo sapiens
  CDR3 for beta chain variable domain of TCR clone 270721 (TRBV6-1, TRBJ1-2)
CDSSAREGYGYTF

SEQ ID NO: 541443 - protein, 14 aa, Homo sapiens
  CDR3 for alpha chain variable domain of TCR clone 270722 (TRAV23/DV6, TRAJ45)
CAASWGGGAEGRTF

SEQ ID NO: 541444 - protein, 15 aa, Homo sapiens
  CDR3 for beta chain variable domain of TCR clone 270722 (TRBV4-2, TRBJ1-2)
CASSRNTGAGYGYTF

SEQ ID NO: 541445 - protein, 15 aa, Homo sapiens
  CDR3 for alpha chain variable domain of TCR clone 270723 (TRAV12-1, TRAJ36)
CVVNEHQTGANNLYF

SEQ ID NO: 541446 - protein, 12 aa, Homo sapiens
  CDR3 for beta chain variable domain of TCR clone 270723 (TRBV29-1, TRBJ2-3)
CSVTGGADTQYF

SEQ ID NO: 541447 - protein, 13 aa, Homo sapiens
  CDR3 for alpha chain variable domain of TCR clone 270724 (TRAV27, TRAJ27)
CAGGITNAGNQPL

SEQ ID NO: 541448 - protein, 13 aa, Homo sapiens
  CDR3 for beta chain variable domain of TCR clone 270724 (TRBV20-1, TRBJ1-2)
CSASLGVGYGYTF

SEQ ID NO: 541449 - protein, 11 aa, Homo sapiens
  CDR3 for alpha chain variable domain of TCR clone 270725 (TRAV13-1, TRAJ39)
CASHAGNLLTF

SEQ ID NO: 541450 - protein, 15 aa, Homo sapiens
  CDR3 for beta chain variable domain of TCR clone 270725 (TRBV20-1, TRBJ2-7)
CSARDRVSGMDEQYF

SEQ ID NO: 541451 - protein, 18 aa, Homo sapiens
  CDR3 for alpha chain variable domain of TCR clone 270726 (TRAV13-1, TRAJ52)
CAAKNPNAGGTSYGKLTF

SEQ ID NO: 541452 - protein, 14 aa, Homo sapiens
  CDR3 for beta chain variable domain of TCR clone 270726 (TRBV7-2, TRBJ2-7)
CASSTKTSFYEQYF

SEQ ID NO: 541453 - protein, 16 aa, Homo sapiens
  CDR3 for alpha chain variable domain of TCR clone 270727 (TRAV4, TRAJ9)
CLVGEPNRPGGFKTIF

SEQ ID NO: 541454 - protein, 14 aa, Homo sapiens
  CDR3 for beta chain variable domain of TCR clone 270727 (TRBV20-1, TRBJ1-1)
CSAQTRIGGTEAFF

SEQ ID NO: 541455 - protein, 14 aa, Homo sapiens
  CDR3 for alpha chain variable domain of TCR clone 270728 (TRAV29/DV5, TRAJ45)
CAASFRGVADGLNF

SEQ ID NO: 541456 - protein, 11 aa, Homo sapiens
  CDR3 for beta chain variable domain of TCR clone 270728 (TRBV11-2, TRBJ2-2)
CASSLPGELFF

SEQ ID NO: 541457 - protein, 14 aa, Homo sapiens
  CDR3 for alpha chain variable domain of TCR clone 270729 (TRAV20, TRAJ44)
CAVQDTGTASKLTF

SEQ ID NO: 541458 - protein, 14 aa, Homo sapiens
  CDR3 for beta chain variable domain of TCR clone 270729 (TRBV5-7, TRBJ1-5)
CASSRTGGGQPQHF

SEQ ID NO: 541459 - protein, 14 aa, Homo sapiens
  CDR3 for alpha chain variable domain of TCR clone 270730 (TRAV13-1, TRAJ35)
CAASKGGFGNVMHC

SEQ ID NO: 541460 - protein, 14 aa, Homo sapiens
  CDR3 for beta chain variable domain of TCR clone 270730 (TRBV7-8, TRBJ2-3)
CASSFTDGQDTQYF

SEQ ID NO: 541461 - protein, 14 aa, Homo sapiens
  CDR3 for alpha chain variable domain of TCR clone 270731 (TRAV34, TRAJ22)
CGADTSGSARQLTF

SEQ ID NO: 541462 - protein, 16 aa, Homo sapiens
  CDR3 for beta chain variable domain of TCR clone 270731 (TRBV2, TRBJ2-3)
CQHRGAPRRWTDTQHF

SEQ ID NO: 541463 - protein, 15 aa, Homo sapiens
  CDR3 for alpha chain variable domain of TCR clone 270732 (TRAV21, TRAJ52)
CAVRGGGTSYGKLTF

SEQ ID NO: 541464 - protein, 13 aa, Homo sapiens
  CDR3 for beta chain variable domain of TCR clone 270732 (TRBV6-5, TRBJ2-5)
CATAPSPQETEYF

SEQ ID NO: 541465 - protein, 14 aa, Homo sapiens
  CDR3 for alpha chain variable domain of TCR clone 270733 (TRAV35, TRAJ22)
CAGLRPGSVRQLTF

SEQ ID NO: 541466 - protein, 15 aa, Homo sapiens
  CDR3 for beta chain variable domain of TCR clone 270733 (TRBV12-4, TRBJ2-5)
CASGPPTGLQETQYF

SEQ ID NO: 541467 - protein, 14 aa, Homo sapiens
  CDR3 for alpha chain variable domain of TCR clone 270734 (TRAV12-2, TRAJ40)
CAVKIPSGTHKYIF

SEQ ID NO: 541468 - protein, 17 aa, Homo sapiens
  CDR3 for beta chain variable domain of TCR clone 270734 (TRBV13, TRBJ2-3)
CASSLSRVAGGRNTQYC

SEQ ID NO: 541469 - protein, 13 aa, Homo sapiens
  CDR3 for alpha chain variable domain of TCR clone 270735 (TRAV12-2, TRAJ20)
CAVYPSNDYKLSF

SEQ ID NO: 541470 - protein, 14 aa, Homo sapiens
  CDR3 for beta chain variable domain of TCR clone 270735 (TRBV4-2, TRBJ1-5)
CASSRDRGNQPQHF

SEQ ID NO: 541471 - protein, 22 aa, Homo sapiens
  CDR3 for alpha chain variable domain of TCR clone 270736 (TRAV8-3, TRAJ6)
CAVAYQEEATYLHLEEEPALLF

SEQ ID NO: 541472 - protein, 14 aa, Homo sapiens
  CDR3 for beta chain variable domain of TCR clone 270736 (TRBV28, TRBJ2-7)
CASSLLTISYEQYF

SEQ ID NO: 541473 - protein, 15 aa, Homo sapiens
  CDR3 for alpha chain variable domain of TCR clone 270737 (TRAV26-1, TRAJ29)
CIVRATNSGNTPLVF

SEQ ID NO: 541474 - protein, 12 aa, Homo sapiens
  CDR3 for beta chain variable domain of TCR clone 270737 (TRBV20-1, TRBJ1-2)
CSASWQGYGYTF

SEQ ID NO: 541475 - protein, 14 aa, Homo sapiens
  CDR3 for alpha chain variable domain of TCR clone 270738 (TRAV1-2, TRAJ8)
CAVREDTGFQKLVF

SEQ ID NO: 541476 - protein, 14 aa, Homo sapiens
  CDR3 for beta chain variable domain of TCR clone 270738 (TRBV6-1, TRBJ2-5)
CASSTRTAQGTQYF

SEQ ID NO: 541477 - protein, 16 aa, Homo sapiens
  CDR3 for alpha chain variable domain of TCR clone 270739 (TRAV3, TRAJ4)
CAVRAFFYGGYNKLIF

SEQ ID NO: 541478 - protein, 16 aa, Homo sapiens
  CDR3 for beta chain variable domain of TCR clone 270739 (TRBV6-1, TRBJ1-6)
CASSERGGSGNSPLHF

SEQ ID NO: 541479 - protein, 12 aa, Homo sapiens
  CDR3 for alpha chain variable domain of TCR clone 270740 (TRAV26-1, TRAJ36)
CIVRVRADNLFF

SEQ ID NO: 541480 - protein, 14 aa, Homo sapiens
  CDR3 for beta chain variable domain of TCR clone 270740 (TRBV14, TRBJ2-3)
CASSRKLAADTPYF

SEQ ID NO: 541481 - protein, 13 aa, Homo sapiens
  CDR3 for alpha chain variable domain of TCR clone 270741 (TRAV8-1, TRAJ39)
CAVANNAGNMLTF

SEQ ID NO: 541482 - protein, 15 aa, Homo sapiens
  CDR3 for beta chain variable domain of TCR clone 270741 (TRBV7-2, TRBJ2-1)
CASSLSRGAYNEQFF

SEQ ID NO: 541483 - protein, 10 aa, Homo sapiens
  CDR3 for alpha chain variable domain of TCR clone 270742 (TRAV23/DV6, TRAJ31)
CARGGARLMF

SEQ ID NO: 541484 - protein, 13 aa, Homo sapiens
  CDR3 for beta chain variable domain of TCR clone 270742 (TRBV29-1, TRBJ2-1)
CSVEGGRVNEQFF

SEQ ID NO: 541485 - protein, 15 aa, Homo sapiens
  CDR3 for alpha chain variable domain of TCR clone 270743 (TRAV8-3, TRAJ27)
CAVGPSKTNAGKSTF

SEQ ID NO: 541486 - protein, 14 aa, Homo sapiens
  CDR3 for beta chain variable domain of TCR clone 270743 (TRBV20-1, TRBJ1-3)
CSASPTGAGNTIYF

SEQ ID NO: 541487 - protein, 15 aa, Homo sapiens
  CDR3 for alpha chain variable domain of TCR clone 270744 (TRAV8-2, TRAJ16)
CVMSDGFSDGQKLLF

SEQ ID NO: 541488 - protein, 15 aa, Homo sapiens
  CDR3 for beta chain variable domain of TCR clone 270744 (TRBV7-2, TRBJ2-1)
CASSSGLAGGNEQFF

SEQ ID NO: 541489 - protein, 11 aa, Homo sapiens
  CDR3 for alpha chain variable domain of TCR clone 270745 (TRAV21, TRAJ34)
CDVTNTDKLIF

SEQ ID NO: 541490 - protein, 12 aa, Homo sapiens
  CDR3 for beta chain variable domain of TCR clone 270745 (TRBV7-9, TRBJ1-1)
CASSLVRGEAFF

SEQ ID NO: 541491 - protein, 12 aa, Homo sapiens
  CDR3 for alpha chain variable domain of TCR clone 270746 (TRAV21, TRAJ29)
CAVTSGNSPLVF

SEQ ID NO: 541492 - protein, 15 aa, Homo sapiens
  CDR3 for beta chain variable domain of TCR clone 270746 (TRBV10-2, TRBJ2-6)
CASSEQGTGANVLSF

SEQ ID NO: 541493 - protein, 16 aa, Homo sapiens
  CDR3 for alpha chain variable domain of TCR clone 270747 (TRAV38-1, TRAJ39)
CAFMKHYLGAGNMLTF

SEQ ID NO: 541494 - protein, 13 aa, Homo sapiens
  CDR3 for beta chain variable domain of TCR clone 270747 (TRBV7-2, TRBJ2-2)
CASSLAVTGELFF

SEQ ID NO: 541495 - protein, 16 aa, Homo sapiens
  CDR3 for alpha chain variable domain of TCR clone 270748 (TRAV30, TRAJ24)
CGTEIADADSGGKFQF

SEQ ID NO: 541496 - protein, 14 aa, Homo sapiens
  CDR3 for beta chain variable domain of TCR clone 270748 (TRBV12-5, TRBJ2-5)
CASGSRTHQETQYF

SEQ ID NO: 541497 - protein, 11 aa, Homo sapiens
  CDR3 for alpha chain variable domain of TCR clone 270749 (TRAV12-3, TRAJ17)
CAMTLTGKLTF

SEQ ID NO: 541498 - protein, 15 aa, Homo sapiens
  CDR3 for beta chain variable domain of TCR clone 270749 (TRBV20-1, TRBJ2-7)
CSARDRFSGMDEQYF

SEQ ID NO: 541499 - protein, 12 aa, Homo sapiens
  CDR3 for alpha chain variable domain of TCR clone 270750 (TRAV3, TRAJ20)
RAVRDPDYKLSF

SEQ ID NO: 541500 - protein, 14 aa, Homo sapiens
  CDR3 for beta chain variable domain of TCR clone 270750 (TRBV4-2, TRBJ2-1)
CASGLDRAYNEQFF

SEQ ID NO: 541501 - protein, 16 aa, Homo sapiens
  CDR3 for alpha chain variable domain of TCR clone 270751 (TRAV21, TRAJ37)
CAVRSRGSSNTGKLIF

SEQ ID NO: 541502 - protein, 16 aa, Homo sapiens
  CDR3 for beta chain variable domain of TCR clone 270751 (TRBV2, TRBJ2-1)
CASSVGGSLSYNEQFF

SEQ ID NO: 541503 - protein, 13 aa, Homo sapiens
  CDR3 for alpha chain variable domain of TCR clone 270752 (TRAV2, TRAJ40)
CAVVTSGTYKYIF

SEQ ID NO: 541504 - protein, 13 aa, Homo sapiens
  CDR3 for beta chain variable domain of TCR clone 270752 (TRBV5-8, TRBJ1-2)
CASSLSPNYGYTF

SEQ ID NO: 541505 - protein, 18 aa, Homo sapiens
  CDR3 for alpha chain variable domain of TCR clone 270753 (TRAV21, TRAJ52)
CAVSPSPAGGTSYGKLTF

SEQ ID NO: 541506 - protein, 17 aa, Homo sapiens
  CDR3 for beta chain variable domain of TCR clone 270753 (TRBV13, TRBJ2-3)
CASSPSRVAGGRNTQYF

SEQ ID NO: 541507 - protein, 12 aa, Homo sapiens
  CDR3 for alpha chain variable domain of TCR clone 270754 (TRAV21, TRAJ33)
RAKMDSNYQLIW

SEQ ID NO: 541508 - protein, 14 aa, Homo sapiens
  CDR3 for beta chain variable domain of TCR clone 270754 (TRBV2, TRBJ2-7)
SASSLTSGGYEQYF

SEQ ID NO: 541509 - protein, 16 aa, Homo sapiens
  CDR3 for alpha chain variable domain of TCR clone 270755 (TRAV13-1, TRAJ48)
CAASIFGNFGNEKLTF

SEQ ID NO: 541510 - protein, 14 aa, Homo sapiens
  CDR3 for beta chain variable domain of TCR clone 270755 (TRBV7-3, TRBJ1-1)
CASSLRGGNTEAFF

SEQ ID NO: 541511 - protein, 14 aa, Homo sapiens
  CDR3 for alpha chain variable domain of TCR clone 270756 (TRAV3, TRAJ34)
CAVRAPGNTDRLIF

SEQ ID NO: 541512 - protein, 17 aa, Homo sapiens
  CDR3 for beta chain variable domain of TCR clone 270756 (TRBV19, TRBJ2-7)
CASSISFYDSYPYEQYF

SEQ ID NO: 541513 - protein, 12 aa, Homo sapiens
  CDR3 for alpha chain variable domain of TCR clone 270757 (TRAV29/DV5, TRAJ41)
CAASDSGYALNF

SEQ ID NO: 541514 - protein, 15 aa, Homo sapiens
  CDR3 for beta chain variable domain of TCR clone 270757 (TRBV15, TRBJ1-3)
CATSRYRGPGNTIYF

SEQ ID NO: 541515 - protein, 21 aa, Homo sapiens
  CDR3 for alpha chain variable domain of TCR clone 270758 (TRAV1-1, TRAJ22)
CLLLLRCERSGSSGSARQLTF

SEQ ID NO: 541516 - protein, 12 aa, Homo sapiens
  CDR3 for beta chain variable domain of TCR clone 270758 (TRBV5-5, TRBJ2-5)
CASSYFGETKYF

SEQ ID NO: 541517 - protein, 14 aa, Homo sapiens
  CDR3 for alpha chain variable domain of TCR clone 270759 (TRAV1-2, TRAJ8)
CAVREDTGFQKLEF

SEQ ID NO: 541518 - protein, 15 aa, Homo sapiens
  CDR3 for beta chain variable domain of TCR clone 270759 (TRBV6-3, TRBJ2-7)
CASSSPRTVFYEQYF

SEQ ID NO: 541519 - protein, 12 aa, Homo sapiens
  CDR3 for alpha chain variable domain of TCR clone 270760 (TRAV23/DV6, TRAJ16)
CAATSTGQKLLF

SEQ ID NO: 541520 - protein, 15 aa, Homo sapiens
  CDR3 for beta chain variable domain of TCR clone 270760 (TRBV28, TRBJ1-2)
CASSSYRGLVYGYTF

SEQ ID NO: 541521 - protein, 15 aa, Homo sapiens
  CDR3 for alpha chain variable domain of TCR clone 270761 (TRAV23/DV6, TRAJ13)
CAAWPGGGGYQKVTF

SEQ ID NO: 541522 - protein, 15 aa, Homo sapiens
  CDR3 for beta chain variable domain of TCR clone 270761 (TRBV27, TRBJ2-1)
CASSNGGGSSNEQFF

SEQ ID NO: 541523 - protein, 16 aa, Homo sapiens
  CDR3 for alpha chain variable domain of TCR clone 270762 (TRAV12-2, TRAJ52)
CRLANAGGTSHGKLTF

SEQ ID NO: 541524 - protein, 14 aa, Homo sapiens
  CDR3 for beta chain variable domain of TCR clone 270762 (TRBV7-6, TRBJ2-3)
CASSLGTVTDTQYF

SEQ ID NO: 541525 - protein, 14 aa, Homo sapiens
  CDR3 for alpha chain variable domain of TCR clone 270763 (TRAV1-2, TRAJ16)
CAVNRFSAGQKLLF

SEQ ID NO: 541526 - protein, 14 aa, Homo sapiens
  CDR3 for beta chain variable domain of TCR clone 270763 (TRBV19, TRBJ2-1)
CASPTFVLSGEQFF

SEQ ID NO: 541527 - protein, 17 aa, Homo sapiens
  CDR3 for alpha chain variable domain of TCR clone 270764 (TRAV3, TRAJ6)
CAVRDGPRAGGSYIPTF

SEQ ID NO: 541528 - protein, 14 aa, Homo sapiens
  CDR3 for beta chain variable domain of TCR clone 270764 (TRBV7-2, TRBJ2-7)
CARSPKTSLYEQYF

SEQ ID NO: 541529 - protein, 15 aa, Homo sapiens
  CDR3 for alpha chain variable domain of TCR clone 270765 (TRAV26-1, TRAJ42)
CIVRVKGGSQGNLIF

SEQ ID NO: 541530 - protein, 14 aa, Homo sapiens
  CDR3 for beta chain variable domain of TCR clone 270765 (TRBV19, TRBJ2-2)
CATTGHANNGELFF

SEQ ID NO: 541531 - protein, 15 aa, Homo sapiens
  CDR3 for alpha chain variable domain of TCR clone 270766 (TRAV3, TRAJ16)
CAVRDGFSDGQQLLF

SEQ ID NO: 541532 - protein, 17 aa, Homo sapiens
  CDR3 for beta chain variable domain of TCR clone 270766 (TRBV6-1, TRBJ2-3)
CASRTRGLAQSTDTQYF

SEQ ID NO: 541533 - protein, 13 aa, Homo sapiens
  CDR3 for alpha chain variable domain of TCR clone 270767 (TRAV13-2, TRAJ40)
CAELISGTYKYIF

SEQ ID NO: 541534 - protein, 14 aa, Homo sapiens
  CDR3 for beta chain variable domain of TCR clone 270767 (TRBV19, TRBJ1-5)
CASVTEVYNQPQHF

SEQ ID NO: 541535 - protein, 17 aa, Homo sapiens
  CDR3 for alpha chain variable domain of TCR clone 270768 (TRAV3, TRAJ6)
CAVRDGPRAGGSYIPTF

SEQ ID NO: 541536 - protein, 14 aa, Homo sapiens
  CDR3 for beta chain variable domain of TCR clone 270768 (TRBV28, TRBJ1-2)
CASRIQGANYGYTF

SEQ ID NO: 541537 - protein, 10 aa, Homo sapiens
  CDR3 for alpha chain variable domain of TCR clone 270769 (TRAV1-2, TRAJ18)
CAVRGEAQPW

SEQ ID NO: 541538 - protein, 15 aa, Homo sapiens
  CDR3 for beta chain variable domain of TCR clone 270769 (TRBV20-1, TRBJ2-1)
CSAEGGLLAGDQQFF

SEQ ID NO: 541539 - protein, 14 aa, Homo sapiens
  CDR3 for alpha chain variable domain of TCR clone 270770 (TRAV26-1, TRAJ45)
CIEATGGGADGLTF

SEQ ID NO: 541540 - protein, 13 aa, Homo sapiens
  CDR3 for beta chain variable domain of TCR clone 270770 (TRBV7-6, TRBJ1-2)
CASSLVADYGDTF

SEQ ID NO: 541541 - protein, 17 aa, Homo sapiens
  CDR3 for alpha chain variable domain of TCR clone 270771 (TRAV38-1, TRAJ28)
CAFMKHTSGAGSYQLTF

SEQ ID NO: 541542 - protein, 14 aa, Homo sapiens
  CDR3 for beta chain variable domain of TCR clone 270771 (TRBV18, TRBJ2-7)
CASSPRGGAYEQYF

SEQ ID NO: 541543 - protein, 14 aa, Homo sapiens
  CDR3 for alpha chain variable domain of TCR clone 270772 (TRAV26-1, TRAJ45)
CIEVTGGGADGLTL

SEQ ID NO: 541544 - protein, 13 aa, Homo sapiens
  CDR3 for beta chain variable domain of TCR clone 270772 (TRBV7-6, TRBJ1-2)
CASSLMADYGYTF

SEQ ID NO: 541545 - protein, 12 aa, Homo sapiens
  CDR3 for alpha chain variable domain of TCR clone 270773 (TRAV38-1, TRAJ20)
CAFIWNDYKLSF

SEQ ID NO: 541546 - protein, 11 aa, Homo sapiens
  CDR3 for beta chain variable domain of TCR clone 270773 (TRBV6-3, TRBJ2-3)
CATGQADTQYF

SEQ ID NO: 541547 - protein, 17 aa, Homo sapiens
  CDR3 for alpha chain variable domain of TCR clone 270774 (TRAV3, TRAJ6)
CAVRYGPRAEGSYIPTF

SEQ ID NO: 541548 - protein, 14 aa, Homo sapiens
  CDR3 for beta chain variable domain of TCR clone 270774 (TRBV7-2, TRBJ2-7)
CASSPKTSFYEQYF

SEQ ID NO: 541549 - protein, 16 aa, Homo sapiens
  CDR3 for alpha chain variable domain of TCR clone 270775 (TRAV30, TRAJ24)
CGTEIVDADSWGKFKF

SEQ ID NO: 541550 - protein, 13 aa, Homo sapiens
  CDR3 for beta chain variable domain of TCR clone 270775 (TRBV19, TRBJ1-1)
CASSGQVNTEAFF

SEQ ID NO: 541551 - protein, 16 aa, Homo sapiens
  CDR3 for alpha chain variable domain of TCR clone 270776 (TRAV23/DV6, TRAJ12)
CAAIDLGAMDSSYKVI

SEQ ID NO: 541552 - protein, 12 aa, Homo sapiens
  CDR3 for beta chain variable domain of TCR clone 270776 (TRBV10-3, TRBJ2-2)
CAIRENTGELFF

SEQ ID NO: 541553 - protein, 13 aa, Homo sapiens
  CDR3 for alpha chain variable domain of TCR clone 270777 (TRAV35, TRAJ33)
CAGLMDSNYQLIW

SEQ ID NO: 541554 - protein, 13 aa, Homo sapiens
  CDR3 for beta chain variable domain of TCR clone 270777 (TRBV10-3, TRBJ2-1)
CAISEFGGREQFF

SEQ ID NO: 541555 - protein, 13 aa, Homo sapiens
  CDR3 for alpha chain variable domain of TCR clone 270778 (TRAV26-1, TRAJ36)
CIVVGTGANNLFF

SEQ ID NO: 541556 - protein, 15 aa, Homo sapiens
  CDR3 for beta chain variable domain of TCR clone 270778 (TRBV5-7, TRBJ2-7)
CASSGGRPVPYEQYF

SEQ ID NO: 541557 - protein, 16 aa, Homo sapiens
  CDR3 for alpha chain variable domain of TCR clone 270779 (TRAV26-1, TRAJ6)
CIVRVPRTGGSYIPTF

SEQ ID NO: 541558 - protein, 15 aa, Homo sapiens
  CDR3 for beta chain variable domain of TCR clone 270779 (TRBV10-3, TRBJ2-7)
CAISDMTALPYEQYF

SEQ ID NO: 541559 - protein, 13 aa, Homo sapiens
  CDR3 for alpha chain variable domain of TCR clone 270780 (TRAV30, TRAJ24)
CGTVTDSWGKLQF

SEQ ID NO: 541560 - protein, 16 aa, Homo sapiens
  CDR3 for beta chain variable domain of TCR clone 270780 (TRBV7-2, TRBJ2-3)
CASSPQGLSNTDTQYF

SEQ ID NO: 541561 - protein, 13 aa, Homo sapiens
  CDR3 for alpha chain variable domain of TCR clone 270781 (TRAV26-2, TRAJ43)
CILRAVNNNDMRF

SEQ ID NO: 541562 - protein, 17 aa, Homo sapiens
  CDR3 for beta chain variable domain of TCR clone 270781 (TRBV7-3, TRBJ2-3)
CASSFMKRMRGADTQYF

SEQ ID NO: 541563 - protein, 13 aa, Homo sapiens
  CDR3 for alpha chain variable domain of TCR clone 270782 (TRAV36/DV7, TRAJ34)
CAVGEVNTDKLIF

SEQ ID NO: 541564 - protein, 15 aa, Homo sapiens
  CDR3 for beta chain variable domain of TCR clone 270782 (TRBV5-1, TRBJ2-5)
CASSFKGGDQETQYF

SEQ ID NO: 541565 - protein, 17 aa, Homo sapiens
  CDR3 for alpha chain variable domain of TCR clone 270783 (TRAV4, TRAJ13)
CLVGVHGSSGGYQKVTF

SEQ ID NO: 541566 - protein, 16 aa, Homo sapiens
  CDR3 for beta chain variable domain of TCR clone 270783 (TRBV28, TRBJ2-7)
CASSLFFETGGPEQYF

SEQ ID NO: 541567 - protein, 13 aa, Homo sapiens
  CDR3 for alpha chain variable domain of TCR clone 270784 (TRAV21, TRAJ27)
CAARPGHAGKSTF

SEQ ID NO: 541568 - protein, 13 aa, Homo sapiens
  CDR3 for beta chain variable domain of TCR clone 270784 (TRBV11-2, TRBJ2-7)
CASSGTRPYEQYF

SEQ ID NO: 541569 - protein, 16 aa, Homo sapiens
  CDR3 for alpha chain variable domain of TCR clone 270785 (TRAV12-1, TRAJ42)
CVVTPYYGGSQGNLIF

SEQ ID NO: 541570 - protein, 14 aa, Homo sapiens
  CDR3 for beta chain variable domain of TCR clone 270785 (TRBV11-2, TRBJ2-3)
CASSRLARTDTQYF

SEQ ID NO: 541571 - protein, 16 aa, Homo sapiens
  CDR3 for alpha chain variable domain of TCR clone 270786 (TRAV30, TRAJ24)
CGTAIVDADSWGKFQF

SEQ ID NO: 541572 - protein, 14 aa, Homo sapiens
  CDR3 for beta chain variable domain of TCR clone 270786 (TRBV7-6, TRBJ2-3)
CASSLGTVTDTQYF

SEQ ID NO: 541573 - protein, 14 aa, Homo sapiens
  CDR3 for alpha chain variable domain of TCR clone 270787 (TRAV12-2, TRAJ13)
CAVMKTGGYQKVTF

SEQ ID NO: 541574 - protein, 15 aa, Homo sapiens
  CDR3 for beta chain variable domain of TCR clone 270787 (TRBV28, TRBJ2-5)
CASSPPWSYQETQYF

SEQ ID NO: 541575 - protein, 13 aa, Homo sapiens
  CDR3 for alpha chain variable domain of TCR clone 270788 (TRAV36/DV7, TRAJ54)
CAVDIQGAQKLVF

SEQ ID NO: 541576 - protein, 16 aa, Homo sapiens
  CDR3 for beta chain variable domain of TCR clone 270788 (TRBV4-2, TRBJ2-1)
CASSQETATPYNEQFF

SEQ ID NO: 541577 - protein, 15 aa, Homo sapiens
  CDR3 for alpha chain variable domain of TCR clone 270789 (TRAV16, TRAJ48)
CALFISNFGNEKLTF

SEQ ID NO: 541578 - protein, 15 aa, Homo sapiens
  CDR3 for beta chain variable domain of TCR clone 270789 (TRBV7-2, TRBJ2-3)
CASSLAGAFIDTQYF

SEQ ID NO: 541579 - protein, 14 aa, Homo sapiens
  CDR3 for alpha chain variable domain of TCR clone 270790 (TRAV3, TRAJ6)
CAVRDPWGSYIPTF

SEQ ID NO: 541580 - protein, 15 aa, Homo sapiens
  CDR3 for beta chain variable domain of TCR clone 270790 (TRBV19, TRBJ1-6)
CASITQGAVGSPLHF

SEQ ID NO: 541581 - protein, 16 aa, Homo sapiens
  CDR3 for alpha chain variable domain of TCR clone 270791 (TRAV12-3, TRAJ53)
CAMSPGSGGSNYKLTF

SEQ ID NO: 541582 - protein, 16 aa, Homo sapiens
  CDR3 for beta chain variable domain of TCR clone 270791 (TRBV4-2, TRBJ1-4)
CASSQARGPTNEKLFF

SEQ ID NO: 541583 - protein, 14 aa, Homo sapiens
  CDR3 for alpha chain variable domain of TCR clone 270792 (TRAV1-2, TRAJ16)
CAVNRFSDSQKLLF

SEQ ID NO: 541584 - protein, 13 aa, Homo sapiens
  CDR3 for beta chain variable domain of TCR clone 270792 (TRBV4-1, TRBJ2-1)
CASSQAGGDEQFF

SEQ ID NO: 541585 - protein, 14 aa, Homo sapiens
  CDR3 for alpha chain variable domain of TCR clone 270793 (TRAV21, TRAJ35)
CAVMPIGFGNVLHF

SEQ ID NO: 541586 - protein, 18 aa, Homo sapiens
  CDR3 for beta chain variable domain of TCR clone 270793 (TRBV11-2, TRBJ2-3)
CASSLGGASRGAPNTQYF

SEQ ID NO: 541587 - protein, 14 aa, Homo sapiens
  CDR3 for alpha chain variable domain of TCR clone 270794 (TRAV16, TRAJ39)
CALSKNNAGDMLTF

SEQ ID NO: 541588 - protein, 19 aa, Homo sapiens
  CDR3 for beta chain variable domain of TCR clone 270794 (TRBV6-6, TRBJ2-1)
AAPSQTSVYFCASSYEQFF

SEQ ID NO: 541589 - protein, 14 aa, Homo sapiens
  CDR3 for alpha chain variable domain of TCR clone 270795 (TRAV13-1, TRAJ35)
CAASKGGFGNVLHC

SEQ ID NO: 541590 - protein, 16 aa, Homo sapiens
  CDR3 for beta chain variable domain of TCR clone 270795 (TRBV7-8, TRBJ2-4)
CASSAERTLAKNIQYF

SEQ ID NO: 541591 - protein, 14 aa, Homo sapiens
  CDR3 for alpha chain variable domain of TCR clone 270796 (TRAV13-1, TRAJ35)
CAASKGGFGNVLHC

SEQ ID NO: 541592 - protein, 23 aa, Homo sapiens
  CDR3 for beta chain variable domain of TCR clone 270796 (TRBV7-2, TRBJ2-5)
RRTRPCISGPAASLGGGEETQYF

SEQ ID NO: 541593 - protein, 15 aa, Homo sapiens
  CDR3 for alpha chain variable domain of TCR clone 270797 (TRAV17, TRAJ6)
CATDLPSGGSYIPTF

SEQ ID NO: 541594 - protein, 16 aa, Homo sapiens
  CDR3 for beta chain variable domain of TCR clone 270797 (TRBV4-1, TRBJ2-7)
CASSQEPTGYSYEQYF

SEQ ID NO: 541595 - protein, 12 aa, Homo sapiens
  CDR3 for alpha chain variable domain of TCR clone 270798 (TRAV29/DV5, TRAJ54)
CATSRGAQKLVF

SEQ ID NO: 541596 - protein, 15 aa, Homo sapiens
  CDR3 for beta chain variable domain of TCR clone 270798 (TRBV6-5, TRBJ2-1)
CASSYDAGAGNEQFF

SEQ ID NO: 541597 - protein, 14 aa, Homo sapiens
  CDR3 for alpha chain variable domain of TCR clone 270799 (TRAV12-2, TRAJ33)
CAVKRERSNYQLIW

SEQ ID NO: 541598 - protein, 12 aa, Homo sapiens
  CDR3 for beta chain variable domain of TCR clone 270799 (TRBV24-1, TRBJ2-3)
CATSDSTDTQYF

SEQ ID NO: 541599 - protein, 16 aa, Homo sapiens
  CDR3 for alpha chain variable domain of TCR clone 270800 (TRAV26-1, TRAJ53)
CIVRAAMGGSNYKLTF

SEQ ID NO: 541600 - protein, 12 aa, Homo sapiens
  CDR3 for beta chain variable domain of TCR clone 270800 (TRBV7-3, TRBJ1-1)
CQQPGLGAEAFF

SEQ ID NO: 541601 - protein, 13 aa, Homo sapiens
  CDR3 for alpha chain variable domain of TCR clone 270801 (TRAV5, TRAJ30)
CAEIANRDDKIIF

SEQ ID NO: 541602 - protein, 15 aa, Homo sapiens
  CDR3 for beta chain variable domain of TCR clone 270801 (TRBV20-1, TRBJ2-7)
CSARDRVSEMDEQYF

SEQ ID NO: 541603 - protein, 14 aa, Homo sapiens
  CDR3 for alpha chain variable domain of TCR clone 270802 (TRAV16, TRAJ32)
CALKSGGATNKLIF

SEQ ID NO: 541604 - protein, 14 aa, Homo sapiens
  CDR3 for beta chain variable domain of TCR clone 270802 (TRBV7-8, TRBJ2-3)
CASSLEAGTDTQYF

SEQ ID NO: 541605 - protein, 12 aa, Homo sapiens
  CDR3 for alpha chain variable domain of TCR clone 270803 (TRAV29/DV5, TRAJ15)
CASNQAGTALIF

SEQ ID NO: 541606 - protein, 15 aa, Homo sapiens
  CDR3 for beta chain variable domain of TCR clone 270803 (TRBV27, TRBJ2-1)
CASSNGGGSSNEQFF

SEQ ID NO: 541607 - protein, 16 aa, Homo sapiens
  CDR3 for alpha chain variable domain of TCR clone 270804 (TRAV14/DV4, TRAJ54)
CAMREGRIQGAQKLGF

SEQ ID NO: 541608 - protein, 16 aa, Homo sapiens
  CDR3 for beta chain variable domain of TCR clone 270804 (TRBV12-5, TRBJ2-5)
CASGPRTSGNQETQYF

SEQ ID NO: 541609 - protein, 14 aa, Homo sapiens
  CDR3 for alpha chain variable domain of TCR clone 270805 (TRAV13-1, TRAJ35)
CAASKGGFGNVLHC

SEQ ID NO: 541610 - protein, 15 aa, Homo sapiens
  CDR3 for beta chain variable domain of TCR clone 270805 (TRBV28, TRBJ1-3)
CASSMGWASGNTIYF

SEQ ID NO: 541611 - protein, 14 aa, Homo sapiens
  CDR3 for alpha chain variable domain of TCR clone 270806 (TRAV12-1, TRAJ12)
CVVTRMDSSYKLIF

SEQ ID NO: 541612 - protein, 17 aa, Homo sapiens
  CDR3 for beta chain variable domain of TCR clone 270806 (TRBV4-1, TRBJ1-4)
CASSQEGPRGVEEKLFF

SEQ ID NO: 541613 - protein, 15 aa, Homo sapiens
  CDR3 for alpha chain variable domain of TCR clone 270807 (TRAV8-4, TRAJ37)
CAVTYGSSNTGKLIF

SEQ ID NO: 541614 - protein, 14 aa, Homo sapiens
  CDR3 for beta chain variable domain of TCR clone 270807 (TRBV6-1, TRBJ1-3)
CASVQGGGGNTTYF

SEQ ID NO: 541615 - protein, 14 aa, Homo sapiens
  CDR3 for alpha chain variable domain of TCR clone 270808 (TRAV17, TRAJ34)
CATDSLEGTDKLIF

SEQ ID NO: 541616 - protein, 11 aa, Homo sapiens
  CDR3 for beta chain variable domain of TCR clone 270808 (TRBV19, TRBJ1-1)
CASSIGSEAFF

SEQ ID NO: 541617 - protein, 13 aa, Homo sapiens
  CDR3 for alpha chain variable domain of TCR clone 270809 (TRAV13-2, TRAJ22)
CLGWISSARQLTF

SEQ ID NO: 541618 - protein, 15 aa, Homo sapiens
  CDR3 for beta chain variable domain of TCR clone 270809 (TRBV20-1, TRBJ2-7)
CSARDRVSGMDEQYF

SEQ ID NO: 541619 - protein, 12 aa, Homo sapiens
  CDR3 for alpha chain variable domain of TCR clone 270810 (TRAV17, TRAJ30)
CATDARGDKIIF

SEQ ID NO: 541620 - protein, 15 aa, Homo sapiens
  CDR3 for beta chain variable domain of TCR clone 270810 (TRBV4-1, TRBJ2-1)
CASSQGGELYNEQFF

SEQ ID NO: 541621 - protein, 14 aa, Homo sapiens
  CDR3 for alpha chain variable domain of TCR clone 270811 (TRAV14/DV4, TRAJ57)
CAMREEGGSEKLVF

SEQ ID NO: 541622 - protein, 15 aa, Homo sapiens
  CDR3 for beta chain variable domain of TCR clone 270811 (TRBV12-4, TRBJ2-5)
CASSPPTGLQETQYF

SEQ ID NO: 541623 - protein, 14 aa, Homo sapiens
  CDR3 for alpha chain variable domain of TCR clone 270812 (TRAV12-1, TRAJ30)
CVVNIGARDDKIIF

SEQ ID NO: 541624 - protein, 13 aa, Homo sapiens
  CDR3 for beta chain variable domain of TCR clone 270812 (TRBV12-5, TRBJ2-1)
CASGLGRGNEQFF

SEQ ID NO: 541625 - protein, 13 aa, Homo sapiens
  CDR3 for alpha chain variable domain of TCR clone 270813 (TRAV3, TRAJ29)
CAVRDIIDTPLVF

SEQ ID NO: 541626 - protein, 14 aa, Homo sapiens
  CDR3 for beta chain variable domain of TCR clone 270813 (TRBV27, TRBJ2-1)
WASSATGGYNEQFF

SEQ ID NO: 541627 - protein, 15 aa, Homo sapiens
  CDR3 for alpha chain variable domain of TCR clone 270814 (TRAV3, TRAJ5)
CAVRDLDTGRRALTF

SEQ ID NO: 541628 - protein, 13 aa, Homo sapiens
  CDR3 for beta chain variable domain of TCR clone 270814 (TRBV12-4, TRBJ2-7)
CASSPTEIYEQYF

SEQ ID NO: 541629 - protein, 14 aa, Homo sapiens
  CDR3 for alpha chain variable domain of TCR clone 270815 (TRAV1-2, TRAJ8)
CAVREDTGFQKLVF

SEQ ID NO: 541630 - protein, 15 aa, Homo sapiens
  CDR3 for beta chain variable domain of TCR clone 270815 (TRBV28, TRBJ1-3)
CASSMGWAAGNTIYF

SEQ ID NO: 541631 - protein, 14 aa, Homo sapiens
  CDR3 for alpha chain variable domain of TCR clone 270816 (TRAV1-2, TRAJ8)
FAVREDTGFQKLVF

SEQ ID NO: 541632 - protein, 20 aa, Homo sapiens
  CDR3 for beta chain variable domain of TCR clone 270816 (TRBV7-8, TRBJ2-2)
CASSHLFPGPTIHITGELFF

SEQ ID NO: 541633 - protein, 14 aa, Homo sapiens
  CDR3 for alpha chain variable domain of TCR clone 270817 (TRAV12-3, TRAJ10)
SHLPLTGGGNKLTF

SEQ ID NO: 541634 - protein, 15 aa, Homo sapiens
  CDR3 for beta chain variable domain of TCR clone 270817 (TRBV6-5, TRBJ2-1)
CASSYDAGSGNEQFF

SEQ ID NO: 541635 - protein, 15 aa, Homo sapiens
  CDR3 for alpha chain variable domain of TCR clone 270818 (TRAV13-2, TRAJ35)
CAESSNIGFGNVLHC

SEQ ID NO: 541636 - protein, 13 aa, Homo sapiens
  CDR3 for beta chain variable domain of TCR clone 270818 (TRBV10-2, TRBJ2-5)
CASSTLARETQYF

SEQ ID NO: 541637 - protein, 12 aa, Homo sapiens
  CDR3 for alpha chain variable domain of TCR clone 270819 (TRAV3, TRAJ43)
CAVRDPNNDMRS

SEQ ID NO: 541638 - protein, 14 aa, Homo sapiens
  CDR3 for beta chain variable domain of TCR clone 270819 (TRBV7-2, TRBJ2-7)
CASSPKTSFYEQYF

SEQ ID NO: 541639 - protein, 11 aa, Homo sapiens
  CDR3 for alpha chain variable domain of TCR clone 270820 (TRAV12-3, TRAJ43)
CAMSDSNDMRF

SEQ ID NO: 541640 - protein, 15 aa, Homo sapiens
  CDR3 for beta chain variable domain of TCR clone 270820 (TRBV11-3, TRBJ2-3)
CASLKDGREGDTQYF

SEQ ID NO: 541641 - protein, 13 aa, Homo sapiens
  CDR3 for alpha chain variable domain of TCR clone 270821 (TRAV12-2, TRAJ7)
CAVSLYGNNRLAF

SEQ ID NO: 541642 - protein, 17 aa, Homo sapiens
  CDR3 for beta chain variable domain of TCR clone 270821 (TRBV13, TRBJ2-3)
CASSLSRVAGGRNTQYF

SEQ ID NO: 541643 - protein, 11 aa, Homo sapiens
  CDR3 for alpha chain variable domain of TCR clone 270822 (TRAV2, TRAJ13)
CASGGYQKVTF

SEQ ID NO: 541644 - protein, 15 aa, Homo sapiens
  CDR3 for beta chain variable domain of TCR clone 270822 (TRBV2, TRBJ2-1)
CASSEEREGDNEQFF

SEQ ID NO: 541645 - protein, 14 aa, Homo sapiens
  CDR3 for alpha chain variable domain of TCR clone 270823 (TRAV13-1, TRAJ40)
CAAGMTSGTYKYTF

SEQ ID NO: 541646 - protein, 15 aa, Homo sapiens
  CDR3 for beta chain variable domain of TCR clone 270823 (TRBV7-3, TRBJ2-1)
CASSPTGGGEVEQFF

SEQ ID NO: 541647 - protein, 11 aa, Homo sapiens
  CDR3 for alpha chain variable domain of TCR clone 270824 (TRAV3, TRAJ21)
CAVGTFNKFYF

SEQ ID NO: 541648 - protein, 16 aa, Homo sapiens
  CDR3 for beta chain variable domain of TCR clone 270824 (TRBV19, TRBJ2-1)
CASSKAGPSPYNEQFF

SEQ ID NO: 541649 - protein, 14 aa, Homo sapiens
  CDR3 for alpha chain variable domain of TCR clone 270825 (TRAV1-2, TRAJ16)
CAVNRFADGQKLLF

SEQ ID NO: 541650 - protein, 13 aa, Homo sapiens
  CDR3 for beta chain variable domain of TCR clone 270825 (TRBV7-3, TRBJ1-1)
CASSQDWGAEAFF

SEQ ID NO: 541651 - protein, 12 aa, Homo sapiens
  CDR3 for alpha chain variable domain of TCR clone 270826 (TRAV21, TRAJ11)
CAATSGYSPLTL

SEQ ID NO: 541652 - protein, 14 aa, Homo sapiens
  CDR3 for beta chain variable domain of TCR clone 270826 (TRBV20-1, TRBJ2-7)
CSAPELAGVGEQYF

SEQ ID NO: 541653 - protein, 11 aa, Homo sapiens
  CDR3 for alpha chain variable domain of TCR clone 270827 (TRAV8-1, TRAJ48)
CLYFGNEKLTF

SEQ ID NO: 541654 - protein, 17 aa, Homo sapiens
  CDR3 for beta chain variable domain of TCR clone 270827 (TRBV11-2, TRBJ2-1)
CASSLYPPGVEYNEQFF

SEQ ID NO: 541655 - protein, 15 aa, Homo sapiens
  CDR3 for alpha chain variable domain of TCR clone 270828 (TRAV27, TRAJ38)
CAARRNAGNNRKLTG

SEQ ID NO: 541656 - protein, 13 aa, Homo sapiens
  CDR3 for beta chain variable domain of TCR clone 270828 (TRBV12-5, TRBJ2-3)
CASGDRQSDTQYF

SEQ ID NO: 541657 - protein, 13 aa, Homo sapiens
  CDR3 for alpha chain variable domain of TCR clone 270829 (TRAV20, TRAJ37)
CAGCSSNTGKLIF

SEQ ID NO: 541658 - protein, 11 aa, Homo sapiens
  CDR3 for beta chain variable domain of TCR clone 270829 (TRBV29-1, TRBJ2-5)
CSEDRTGTQYF

SEQ ID NO: 541659 - protein, 15 aa, Homo sapiens
  CDR3 for alpha chain variable domain of TCR clone 270830 (TRAV17, TRAJ57)
CATGPSQGGSEKLVF

SEQ ID NO: 541660 - protein, 16 aa, Homo sapiens
  CDR3 for beta chain variable domain of TCR clone 270830 (TRBV12-4, TRBJ1-5)
CASSRPVGGCNQPQHF

SEQ ID NO: 541661 - protein, 13 aa, Homo sapiens
  CDR3 for alpha chain variable domain of TCR clone 270831 (TRAV13-2, TRAJ48)
CAEMDFGNEKLTF

SEQ ID NO: 541662 - protein, 17 aa, Homo sapiens
  CDR3 for beta chain variable domain of TCR clone 270831 (TRBV11-2, TRBJ2-6)
CASSQRDIFSGANVLTF

SEQ ID NO: 541663 - protein, 14 aa, Homo sapiens
  CDR3 for alpha chain variable domain of TCR clone 270832 (TRAV16, TRAJ32)
CALKSGGATNKLIF

SEQ ID NO: 541664 - protein, 17 aa, Homo sapiens
  CDR3 for beta chain variable domain of TCR clone 270832 (TRBV5-7, TRBJ2-1)
CASSSYWGLAGRNEQFF

SEQ ID NO: 541665 - protein, 14 aa, Homo sapiens
  CDR3 for alpha chain variable domain of TCR clone 270833 (TRAV1-2, TRAJ16)
CAVNRFSDGQKLPF

SEQ ID NO: 541666 - protein, 17 aa, Homo sapiens
  CDR3 for beta chain variable domain of TCR clone 270833 (TRBV15, TRBJ1-2)
CATSGREIDVVNYGYTV

SEQ ID NO: 541667 - protein, 13 aa, Homo sapiens
  CDR3 for alpha chain variable domain of TCR clone 270834 (TRAV2, TRAJ40)
CAVVTSGTYKYIL

SEQ ID NO: 541668 - protein, 14 aa, Homo sapiens
  CDR3 for beta chain variable domain of TCR clone 270834 (TRBV19, TRBJ2-1)
CASPAFVLSGEQFF

SEQ ID NO: 541669 - protein, 15 aa, Homo sapiens
  CDR3 for alpha chain variable domain of TCR clone 270835 (TRAV27, TRAJ38)
RATRRNAGNNRKLIW

SEQ ID NO: 541670 - protein, 14 aa, Homo sapiens
  CDR3 for beta chain variable domain of TCR clone 270835 (TRBV7-8, TRBJ2-3)
CASSLEAGTDTQYF

SEQ ID NO: 541671 - protein, 13 aa, Homo sapiens
  CDR3 for alpha chain variable domain of TCR clone 270836 (TRAV12-3, TRAJ47)
CAMKKEYGNKLVF

SEQ ID NO: 541672 - protein, 17 aa, Homo sapiens
  CDR3 for beta chain variable domain of TCR clone 270836 (TRBV11-2, TRBJ2-1)
CASSLSPPGVEYNEQFF

SEQ ID NO: 541673 - protein, 23 aa, Homo sapiens
  CDR3 for alpha chain variable domain of TCR clone 270837 (TRAV26-1, TRAJ38)
CIVRPLNAGNNHIQNPDPAVYQL

SEQ ID NO: 541674 - protein, 15 aa, Homo sapiens
  CDR3 for beta chain variable domain of TCR clone 270837 (TRBV11-2, TRBJ2-2)
CASSSDRVNAGELFF

SEQ ID NO: 541675 - protein, 16 aa, Homo sapiens
  CDR3 for alpha chain variable domain of TCR clone 270838 (TRAV8-6, TRAJ27)
CALSASLTPMQANQPL

SEQ ID NO: 541676 - protein, 15 aa, Homo sapiens
  CDR3 for beta chain variable domain of TCR clone 270838 (TRBV5-1, TRBJ1-1)
CASSWTGRGNTEAFF

SEQ ID NO: 541677 - protein, 15 aa, Homo sapiens
  CDR3 for alpha chain variable domain of TCR clone 270839 (TRAV2, TRAJ15)
CAVEDREQAGTALIF

SEQ ID NO: 541678 - protein, 13 aa, Homo sapiens
  CDR3 for beta chain variable domain of TCR clone 270839 (TRBV10-2, TRBJ2-3)
CASTESGDHTQYF

SEQ ID NO: 541679 - protein, 12 aa, Homo sapiens
  CDR3 for alpha chain variable domain of TCR clone 270840 (TRAV12-3, TRAJ17)
CAMTLTGNKLTS

SEQ ID NO: 541680 - protein, 15 aa, Homo sapiens
  CDR3 for beta chain variable domain of TCR clone 270840 (TRBV20-1, TRBJ2-7)
CSASDRVSGMDEQYF

SEQ ID NO: 541681 - protein, 14 aa, Homo sapiens
  CDR3 for alpha chain variable domain of TCR clone 270841 (TRAV21, TRAJ35)
CAVMPIGFGSVLHS

SEQ ID NO: 541682 - protein, 12 aa, Homo sapiens
  CDR3 for beta chain variable domain of TCR clone 270841 (TRBV7-9, TRBJ2-7)
CASSIKREEQYF

SEQ ID NO: 541683 - protein, 12 aa, Homo sapiens
  CDR3 for alpha chain variable domain of TCR clone 270842 (TRAV13-1, TRAJ27)
CAAHTNAGKSTF

SEQ ID NO: 541684 - protein, 19 aa, Homo sapiens
  CDR3 for beta chain variable domain of TCR clone 270842 (TRBV25-1, TRBJ2-2)
CAILVYRVDRGRKTGELFF

SEQ ID NO: 541685 - protein, 11 aa, Homo sapiens
  CDR3 for alpha chain variable domain of TCR clone 270843 (TRAV12-2, TRAJ33)
CAVTSNYQLIW

SEQ ID NO: 541686 - protein, 14 aa, Homo sapiens
  CDR3 for beta chain variable domain of TCR clone 270843 (TRBV12-4, TRBJ2-2)
YASNQGANTGELFF

SEQ ID NO: 541687 - protein, 13 aa, Homo sapiens
  CDR3 for alpha chain variable domain of TCR clone 270844 (TRAV26-1, TRAJ29)
CIVRRSGNTPLVF

SEQ ID NO: 541688 - protein, 12 aa, Homo sapiens
  CDR3 for beta chain variable domain of TCR clone 270844 (TRBV7-8, TRBJ2-7)
CASSLGDREQYF

SEQ ID NO: 541689 - protein, 13 aa, Homo sapiens
  CDR3 for alpha chain variable domain of TCR clone 270845 (TRAV3, TRAJ20)
CAVRSLNDYKLSF

SEQ ID NO: 541690 - protein, 13 aa, Homo sapiens
  CDR3 for beta chain variable domain of TCR clone 270845 (TRBV7-3, TRBJ1-1)
CASSQDWGDEAFF

SEQ ID NO: 541691 - protein, 13 aa, Homo sapiens
  CDR3 for alpha chain variable domain of TCR clone 270846 (TRAV27, TRAJ17)
CAGAATAGNKLTF

SEQ ID NO: 541692 - protein, 15 aa, Homo sapiens
  CDR3 for beta chain variable domain of TCR clone 270846 (TRBV5-1, TRBJ2-3)
CASRNHAGSTDTQYF

SEQ ID NO: 541693 - protein, 15 aa, Homo sapiens
  CDR3 for alpha chain variable domain of TCR clone 270847 (TRAV8-3, TRAJ15)
CAVGAPNQAGTALIF

SEQ ID NO: 541694 - protein, 14 aa, Homo sapiens
  CDR3 for beta chain variable domain of TCR clone 270847 (TRBV20-1, TRBJ2-1)
CGPNDEASYNEQCF

SEQ ID NO: 541695 - protein, 22 aa, Homo sapiens
  CDR3 for alpha chain variable domain of TCR clone 270848 (TRAV2, TRAJ38)
CAVEDFPNAGNNHIQNPDPAVY

SEQ ID NO: 541696 - protein, 13 aa, Homo sapiens
  CDR3 for beta chain variable domain of TCR clone 270848 (TRBV7-9, TRBJ1-2)
CASSLKQNYGYTF

SEQ ID NO: 541697 - protein, 16 aa, Homo sapiens
  CDR3 for alpha chain variable domain of TCR clone 270849 (TRAV30, TRAJ24)
CGTEIVDADSWGKFQF

SEQ ID NO: 541698 - protein, 15 aa, Homo sapiens
  CDR3 for beta chain variable domain of TCR clone 270849 (TRBV5-1, TRBJ1-1)
CDSSLAPRGNTEAFF

SEQ ID NO: 541699 - protein, 17 aa, Homo sapiens
  CDR3 for alpha chain variable domain of TCR clone 270850 (TRAV8-6, TRAJ58)
CAVSSWVGETSGSRLTF

SEQ ID NO: 541700 - protein, 14 aa, Homo sapiens
  CDR3 for beta chain variable domain of TCR clone 270850 (TRBV19, TRBJ2-1)
CASPTFVWSGEQFF

SEQ ID NO: 541701 - protein, 15 aa, Homo sapiens
  CDR3 for alpha chain variable domain of TCR clone 270851 (TRAV3, TRAJ22)
CAVRDRGGSARQLTF

SEQ ID NO: 541702 - protein, 15 aa, Homo sapiens
  CDR3 for beta chain variable domain of TCR clone 270851 (TRBV11-2, TRBJ1-2)
CASSLEGVQRNGYTF

SEQ ID NO: 541703 - protein, 12 aa, Homo sapiens
  CDR3 for alpha chain variable domain of TCR clone 270852 (TRAV23/DV6, TRAJ30)
CAASKGDDKINF

SEQ ID NO: 541704 - protein, 17 aa, Homo sapiens
  CDR3 for beta chain variable domain of TCR clone 270852 (TRBV13, TRBJ2-3)
CASSLSRVAGGRNTQYF

SEQ ID NO: 541705 - protein, 15 aa, Homo sapiens
  CDR3 for alpha chain variable domain of TCR clone 270853 (TRAV38-1, TRAJ30)
CAFMMSYGGVDKIIF

SEQ ID NO: 541706 - protein, 16 aa, Homo sapiens
  CDR3 for beta chain variable domain of TCR clone 270853 (TRBV7-9, TRBJ2-7)
CASSFGLAGPSYEQYF

SEQ ID NO: 541707 - protein, 15 aa, Homo sapiens
  CDR3 for alpha chain variable domain of TCR clone 270854 (TRAV12-1, TRAJ9)
CVVSFGDTGGFKTIF

SEQ ID NO: 541708 - protein, 15 aa, Homo sapiens
  CDR3 for beta chain variable domain of TCR clone 270854 (TRBV12-4, TRBJ1-1)
CASSLGGLSDTEAFF

SEQ ID NO: 541709 - protein, 14 aa, Homo sapiens
  CDR3 for alpha chain variable domain of TCR clone 270855 (TRAV3, TRAJ28)
CAVRRGAGSYQLTF

SEQ ID NO: 541710 - protein, 16 aa, Homo sapiens
  CDR3 for beta chain variable domain of TCR clone 270855 (TRBV4-1, TRBJ2-7)
CASSQEWTSGPIEQYF

SEQ ID NO: 541711 - protein, 10 aa, Homo sapiens
  CDR3 for alpha chain variable domain of TCR clone 270856 (TRAV20, TRAJ22)
CAAPARQLTF

SEQ ID NO: 541712 - protein, 14 aa, Homo sapiens
  CDR3 for beta chain variable domain of TCR clone 270856 (TRBV19, TRBJ2-1)
CASSMGTGATEQFF

SEQ ID NO: 541713 - protein, 14 aa, Homo sapiens
  CDR3 for alpha chain variable domain of TCR clone 270857 (TRAV1-2, TRAJ16)
CAVNRFSDGQKLLF

SEQ ID NO: 541714 - protein, 14 aa, Homo sapiens
  CDR3 for beta chain variable domain of TCR clone 270857 (TRBV12-4, TRBJ1-3)
CASGQTVSGNTIYF

SEQ ID NO: 541715 - protein, 14 aa, Homo sapiens
  CDR3 for alpha chain variable domain of TCR clone 270858 (TRAV12-3, TRAJ54)
CAMRGIQGAQKLVF

SEQ ID NO: 541716 - protein, 13 aa, Homo sapiens
  CDR3 for beta chain variable domain of TCR clone 270858 (TRBV19, TRBJ1-1)
CASSPSKGGEAFF

SEQ ID NO: 541717 - protein, 14 aa, Homo sapiens
  CDR3 for alpha chain variable domain of TCR clone 270859 (TRAV26-2, TRAJ32)
CCVGYGGATNRLIF

SEQ ID NO: 541718 - protein, 14 aa, Homo sapiens
  CDR3 for beta chain variable domain of TCR clone 270859 (TRBV4-2, TRBJ2-1)
CASGLDRAYNEQFF

SEQ ID NO: 541719 - protein, 16 aa, Homo sapiens
  CDR3 for alpha chain variable domain of TCR clone 270860 (TRAV16, TRAJ52)
CSLSAAGGTSYGTLTF

SEQ ID NO: 541720 - protein, 12 aa, Homo sapiens
  CDR3 for beta chain variable domain of TCR clone 270860 (TRBV12-4, TRBJ1-3)
CASSFSGNTIYF

SEQ ID NO: 541721 - protein, 12 aa, Homo sapiens
  CDR3 for alpha chain variable domain of TCR clone 270861 (TRAV13-1, TRAJ21)
CAAKEGFNKFYF

SEQ ID NO: 541722 - protein, 19 aa, Homo sapiens
  CDR3 for beta chain variable domain of TCR clone 270861 (TRBV2, TRBJ2-7)
CASSDDATSGRANDYEQYF

SEQ ID NO: 541723 - protein, 17 aa, Homo sapiens
  CDR3 for alpha chain variable domain of TCR clone 270862 (TRAV13-1, TRAJ28)
CAASPPYSGAGSYQLTF

SEQ ID NO: 541724 - protein, 12 aa, Homo sapiens
  CDR3 for beta chain variable domain of TCR clone 270862 (TRBV11-2, TRBJ2-2)
CASTLPTGELFF

SEQ ID NO: 541725 - protein, 16 aa, Homo sapiens
  CDR3 for alpha chain variable domain of TCR clone 270863 (TRAV20, TRAJ10)
CAVLRGLTGGGDKLTF

SEQ ID NO: 541726 - protein, 14 aa, Homo sapiens
  CDR3 for beta chain variable domain of TCR clone 270863 (TRBV19, TRBJ1-5)
CASRAPDSFLAQHF

SEQ ID NO: 541727 - protein, 12 aa, Homo sapiens
  CDR3 for alpha chain variable domain of TCR clone 270864 (TRAV29/DV5, TRAJ34)
CAASDNTGKLIF

SEQ ID NO: 541728 - protein, 13 aa, Homo sapiens
  CDR3 for beta chain variable domain of TCR clone 270864 (TRBV4-2, TRBJ1-1)
CASSQAGNTEAFF

SEQ ID NO: 541729 - protein, 12 aa, Homo sapiens
  CDR3 for alpha chain variable domain of TCR clone 270865 (TRAV27, TRAJ13)
CAGVRGYQKVTF

SEQ ID NO: 541730 - protein, 16 aa, Homo sapiens
  CDR3 for beta chain variable domain of TCR clone 270865 (TRBV28, TRBJ2-1)
CASSSSYIGSLNEQFF

SEQ ID NO: 541731 - protein, 16 aa, Homo sapiens
  CDR3 for alpha chain variable domain of TCR clone 270866 (TRAV3, TRAJ21)
CAVRDIERGNLNTFYF

SEQ ID NO: 541732 - protein, 14 aa, Homo sapiens
  CDR3 for beta chain variable domain of TCR clone 270866 (TRBV7-9, TRBJ2-5)
CASSLDTAQETQYF

SEQ ID NO: 541733 - protein, 14 aa, Homo sapiens
  CDR3 for alpha chain variable domain of TCR clone 270867 (TRAV12-1, TRAJ17)
CVVNCKAAGNKLTF

SEQ ID NO: 541734 - protein, 17 aa, Homo sapiens
  CDR3 for beta chain variable domain of TCR clone 270867 (TRBV20-1, TRBJ2-1)
CSASSSGLAGSCDEQFF

SEQ ID NO: 541735 - protein, 14 aa, Homo sapiens
  CDR3 for alpha chain variable domain of TCR clone 270868 (TRAV12-3, TRAJ10)
SHLPLTGGGNKLTF

SEQ ID NO: 541736 - protein, 15 aa, Homo sapiens
  CDR3 for beta chain variable domain of TCR clone 270868 (TRBV12-4, TRBJ1-5)
CASTRGSGFGQPQHF

SEQ ID NO: 541737 - protein, 14 aa, Homo sapiens
  CDR3 for alpha chain variable domain of TCR clone 270869 (TRAV1-1, TRAJ27)
CAVIYNTNAGKSTF

SEQ ID NO: 541738 - protein, 13 aa, Homo sapiens
  CDR3 for beta chain variable domain of TCR clone 270869 (TRBV20-1, TRBJ1-2)
CSATGIQGSGYTF

SEQ ID NO: 541739 - protein, 11 aa, Homo sapiens
  CDR3 for alpha chain variable domain of TCR clone 270870 (TRAV2, TRAJ13)
CASGGYQKVTF

SEQ ID NO: 541740 - protein, 15 aa, Homo sapiens
  CDR3 for beta chain variable domain of TCR clone 270870 (TRBV11-2, TRBJ2-2)
CASSPSGGGTGELFF

SEQ ID NO: 541741 - protein, 14 aa, Homo sapiens
  CDR3 for alpha chain variable domain of TCR clone 270871 (TRAV26-1, TRAJ38)
CIADNAGNNRKLIW

SEQ ID NO: 541742 - protein, 15 aa, Homo sapiens
  CDR3 for beta chain variable domain of TCR clone 270871 (TRBV7-2, TRBJ2-1)
CASSFQADEYNEQFF

SEQ ID NO: 541743 - protein, 18 aa, Homo sapiens
  CDR3 for alpha chain variable domain of TCR clone 270872 (TRAV13-1, TRAJ52)
CAASKRSAGGTSYGKLTF

SEQ ID NO: 541744 - protein, 13 aa, Homo sapiens
  CDR3 for beta chain variable domain of TCR clone 270872 (TRBV4-1, TRBJ2-1)
CASSQEVQYEQFF

SEQ ID NO: 541745 - protein, 12 aa, Homo sapiens
  CDR3 for alpha chain variable domain of TCR clone 270873 (TRAV1-1, TRAJ39)
CAVPVVGNMLTF

SEQ ID NO: 541746 - protein, 14 aa, Homo sapiens
  CDR3 for beta chain variable domain of TCR clone 270873 (TRBV4-1, TRBJ2-2)
CASSQAVNTGELFF

SEQ ID NO: 541747 - protein, 14 aa, Homo sapiens
  CDR3 for alpha chain variable domain of TCR clone 270874 (TRAV23/DV6, TRAJ27)
CAASRDTNAGKPTF

SEQ ID NO: 541748 - protein, 13 aa, Homo sapiens
  CDR3 for beta chain variable domain of TCR clone 270874 (TRBV20-1, TRBJ1-5)
CSASGRGNQPQHF

SEQ ID NO: 541749 - protein, 11 aa, Homo sapiens
  CDR3 for alpha chain variable domain of TCR clone 270875 (TRAV12-1, TRAJ13)
CVVTSGGYQQV

SEQ ID NO: 541750 - protein, 16 aa, Homo sapiens
  CDR3 for beta chain variable domain of TCR clone 270875 (TRBV10-3, TRBJ1-6)
CAISERRGQGNSPLHF

SEQ ID NO: 541751 - protein, 14 aa, Homo sapiens
  CDR3 for alpha chain variable domain of TCR clone 270876 (TRAV3, TRAJ37)
CAVKESGNTGKLIF

SEQ ID NO: 541752 - protein, 15 aa, Homo sapiens
  CDR3 for beta chain variable domain of TCR clone 270876 (TRBV4-3, TRBJ1-1)
CASSQELGRGTEAFF

SEQ ID NO: 541753 - protein, 15 aa, Homo sapiens
  CDR3 for alpha chain variable domain of TCR clone 270877 (TRAV8-4, TRAJ40)
CAVSSITSGTYKYIF

SEQ ID NO: 541754 - protein, 13 aa, Homo sapiens
  CDR3 for beta chain variable domain of TCR clone 270877 (TRBV20-1, TRBJ2-2)
CSASAAGTGELFF

SEQ ID NO: 541755 - protein, 16 aa, Homo sapiens
  CDR3 for alpha chain variable domain of TCR clone 270878 (TRAV25, TRAJ53)
CAGPKGSGGSNYKLTF

SEQ ID NO: 541756 - protein, 18 aa, Homo sapiens
  CDR3 for beta chain variable domain of TCR clone 270878 (TRBV7-6, TRBJ2-1)
CASSPRTSGMSSYNEQFF

SEQ ID NO: 541757 - protein, 11 aa, Homo sapiens
  CDR3 for alpha chain variable domain of TCR clone 270879 (TRAV30, TRAJ23)
CGTEIAGTLIF

SEQ ID NO: 541758 - protein, 16 aa, Homo sapiens
  CDR3 for beta chain variable domain of TCR clone 270879 (TRBV7-2, TRBJ2-7)
CASTSQAASGGYEQYF

SEQ ID NO: 541759 - protein, 17 aa, Homo sapiens
  CDR3 for alpha chain variable domain of TCR clone 270880 (TRAV12-2, TRAJ6)
CSPQGPPRAGGSYIPTF

SEQ ID NO: 541760 - protein, 16 aa, Homo sapiens
  CDR3 for beta chain variable domain of TCR clone 270880 (TRBV19, TRBJ2-2)
CASSTAWASNTGELFF

SEQ ID NO: 541761 - protein, 13 aa, Homo sapiens
  CDR3 for alpha chain variable domain of TCR clone 270881 (TRAV8-3, TRAJ28)
CAVGAVGSYQLTF

SEQ ID NO: 541762 - protein, 15 aa, Homo sapiens
  CDR3 for beta chain variable domain of TCR clone 270881 (TRBV28, TRBJ2-1)
CASSIIAGGRSEQFF

SEQ ID NO: 541763 - protein, 14 aa, Homo sapiens
  CDR3 for alpha chain variable domain of TCR clone 270882 (TRAV8-3, TRAJ36)
CAVGPITAANNLFF

SEQ ID NO: 541764 - protein, 15 aa, Homo sapiens
  CDR3 for beta chain variable domain of TCR clone 270882 (TRBV4-1, TRBJ2-1)
CASSQDPGNYNEQFF

SEQ ID NO: 541765 - protein, 14 aa, Homo sapiens
  CDR3 for alpha chain variable domain of TCR clone 270883 (TRAV12-3, TRAJ33)
CAMSVPGSNYQLIW

SEQ ID NO: 541766 - protein, 15 aa, Homo sapiens
  CDR3 for beta chain variable domain of TCR clone 270883 (TRBV20-1, TRBJ2-7)
CSAESGTSGAYEQYF

SEQ ID NO: 541767 - protein, 17 aa, Homo sapiens
  CDR3 for alpha chain variable domain of TCR clone 270884 (TRAV3, TRAJ42)
CAVRDRDYGGSQGNLIF

SEQ ID NO: 541768 - protein, 14 aa, Homo sapiens
  CDR3 for beta chain variable domain of TCR clone 270884 (TRBV12-4, TRBJ2-2)
CASNQGANTGELFF

SEQ ID NO: 541769 - protein, 15 aa, Homo sapiens
  CDR3 for alpha chain variable domain of TCR clone 270885 (TRAV35, TRAJ50)
CAGQLRKTSYDMVIF

SEQ ID NO: 541770 - protein, 12 aa, Homo sapiens
  CDR3 for beta chain variable domain of TCR clone 270885 (TRBV5-1, TRBJ2-5)
CASSLGLETQYF

SEQ ID NO: 541771 - protein, 14 aa, Homo sapiens
  CDR3 for alpha chain variable domain of TCR clone 270886 (TRAV12-1, TRAJ30)
CVPTWTNRDDKIIF

SEQ ID NO: 541772 - protein, 11 aa, Homo sapiens
  CDR3 for beta chain variable domain of TCR clone 270886 (TRBV4-1, TRBJ2-2)
CASEHTGELFF

SEQ ID NO: 541773 - protein, 15 aa, Homo sapiens
  CDR3 for alpha chain variable domain of TCR clone 270887 (TRAV3, TRAJ29)
CAVRDSLSGNTPLVF

SEQ ID NO: 541774 - protein, 15 aa, Homo sapiens
  CDR3 for beta chain variable domain of TCR clone 270887 (TRBV18, TRBJ2-3)
CASSPGLAGGDTQYF

SEQ ID NO: 541775 - protein, 15 aa, Homo sapiens
  CDR3 for alpha chain variable domain of TCR clone 270888 (TRAV38-1, TRAJ37)
CAFIHGSGNTGKLIF

SEQ ID NO: 541776 - protein, 12 aa, Homo sapiens
  CDR3 for beta chain variable domain of TCR clone 270888 (TRBV7-9, TRBJ2-7)
CASSRGSYEQYF

SEQ ID NO: 541777 - protein, 17 aa, Homo sapiens
  CDR3 for alpha chain variable domain of TCR clone 270889 (TRAV3, TRAJ12)
CAVRDGGRMDGSYKLIF

SEQ ID NO: 541778 - protein, 13 aa, Homo sapiens
  CDR3 for beta chain variable domain of TCR clone 270889 (TRBV7-3, TRBJ1-1)
CASSQDWGAEAFF

SEQ ID NO: 541779 - protein, 16 aa, Homo sapiens
  CDR3 for alpha chain variable domain of TCR clone 270890 (TRAV30, TRAJ24)
CGTEIVDADSWGRFQF

SEQ ID NO: 541780 - protein, 14 aa, Homo sapiens
  CDR3 for beta chain variable domain of TCR clone 270890 (TRBV12-5, TRBJ2-5)
CASGSRTHQETQYL

SEQ ID NO: 541781 - protein, 18 aa, Homo sapiens
  CDR3 for alpha chain variable domain of TCR clone 270891 (TRAV8-3, TRAJ28)
CAVGATLGLGVTNSLSGR

SEQ ID NO: 541782 - protein, 14 aa, Homo sapiens
  CDR3 for beta chain variable domain of TCR clone 270891 (TRBV7-2, TRBJ2-1)
CASSLGVGYNEQFF

SEQ ID NO: 541783 - protein, 16 aa, Homo sapiens
  CDR3 for alpha chain variable domain of TCR clone 270892 (TRAV12-3, TRAJ53)
CAMSPGSGGTNYKLTF

SEQ ID NO: 541784 - protein, 11 aa, Homo sapiens
  CDR3 for beta chain variable domain of TCR clone 270892 (TRBV29-1, TRBJ2-5)
CSEDRTGTQYC

SEQ ID NO: 541785 - protein, 13 aa, Homo sapiens
  CDR3 for alpha chain variable domain of TCR clone 270893 (TRAV21, TRAJ20)
CAVGLRVDYKLSV

SEQ ID NO: 541786 - protein, 11 aa, Homo sapiens
  CDR3 for beta chain variable domain of TCR clone 270893 (TRBV25-1, TRBJ2-1)
CATTRISEQFF

SEQ ID NO: 541787 - protein, 12 aa, Homo sapiens
  CDR3 for alpha chain variable domain of TCR clone 270894 (TRAV12-2, TRAJ10)
WGVTGGGNKLTF

SEQ ID NO: 541788 - protein, 16 aa, Homo sapiens
  CDR3 for beta chain variable domain of TCR clone 270894 (TRBV6-4, TRBJ1-2)
CASSETVGDPNYGYTF

SEQ ID NO: 541789 - protein, 19 aa, Homo sapiens
  CDR3 for alpha chain variable domain of TCR clone 270895 (TRAV26-1, TRAJ28)
CIVRVAHAYSGAGSSQLTF

SEQ ID NO: 541790 - protein, 12 aa, Homo sapiens
  CDR3 for beta chain variable domain of TCR clone 270895 (TRBV12-4, TRBJ2-3)
CASSLGQDTQYF

SEQ ID NO: 541791 - protein, 13 aa, Homo sapiens
  CDR3 for alpha chain variable domain of TCR clone 270896 (TRAV8-3, TRAJ4)
WVFYSGGYNKLIF

SEQ ID NO: 541792 - protein, 14 aa, Homo sapiens
  CDR3 for beta chain variable domain of TCR clone 270896 (TRBV7-9, TRBJ2-3)
CARSLEDGTDTQYF

SEQ ID NO: 541793 - protein, 11 aa, Homo sapiens
  CDR3 for alpha chain variable domain of TCR clone 270897 (TRAV35, TRAJ34)
CWARNTDKLIF

SEQ ID NO: 541794 - protein, 15 aa, Homo sapiens
  CDR3 for beta chain variable domain of TCR clone 270897 (TRBV19, TRBJ1-1)
CASTSGQIQNTEAFF

SEQ ID NO: 541795 - protein, 14 aa, Homo sapiens
  CDR3 for alpha chain variable domain of TCR clone 270898 (TRAV20, TRAJ42)
CAVQAGGSQGNLIF

SEQ ID NO: 541796 - protein, 14 aa, Homo sapiens
  CDR3 for beta chain variable domain of TCR clone 270898 (TRBV10-3, TRBJ2-2)
CAASSRVNTGELFF

SEQ ID NO: 541797 - protein, 14 aa, Homo sapiens
  CDR3 for alpha chain variable domain of TCR clone 270899 (TRAV26-2, TRAJ32)
CILFRGGATNKLIF

SEQ ID NO: 541798 - protein, 15 aa, Homo sapiens
  CDR3 for beta chain variable domain of TCR clone 270899 (TRBV2, TRBJ2-2)
CASSGFGAGTGELYF

SEQ ID NO: 541799 - protein, 11 aa, Homo sapiens
  CDR3 for alpha chain variable domain of TCR clone 270900 (TRAV21, TRAJ34)
CAVTNTDKLIF

SEQ ID NO: 541800 - protein, 18 aa, Homo sapiens
  CDR3 for beta chain variable domain of TCR clone 270900 (TRBV11-2, TRBJ2-3)
WASSLGGASRGAPNTQYF

SEQ ID NO: 541801 - protein, 15 aa, Homo sapiens
  CDR3 for alpha chain variable domain of TCR clone 270901 (TRAV13-1, TRAJ57)
QVPPLSQGGSEKLVF

SEQ ID NO: 541802 - protein, 15 aa, Homo sapiens
  CDR3 for beta chain variable domain of TCR clone 270901 (TRBV6-3, TRBJ2-2)
CASRGMTVDTGELFF

SEQ ID NO: 541803 - protein, 13 aa, Homo sapiens
  CDR3 for alpha chain variable domain of TCR clone 270902 (TRAV2, TRAJ15)
CAVASQAGTALIL

SEQ ID NO: 541804 - protein, 15 aa, Homo sapiens
  CDR3 for beta chain variable domain of TCR clone 270902 (TRBV28, TRBJ2-1)
CASSIIAGGRSEQFF

SEQ ID NO: 541805 - protein, 11 aa, Homo sapiens
  CDR3 for alpha chain variable domain of TCR clone 270903 (TRAV13-1, TRAJ6)
CATLGSYIPTF

SEQ ID NO: 541806 - protein, 13 aa, Homo sapiens
  CDR3 for beta chain variable domain of TCR clone 270903 (TRBV6-6, TRBJ2-1)
CASSLHQGDEPFF

SEQ ID NO: 541807 - protein, 14 aa, Homo sapiens
  CDR3 for alpha chain variable domain of TCR clone 270904 (TRAV8-4, TRAJ4)
CAVSPSGGYNKLIF

SEQ ID NO: 541808 - protein, 16 aa, Homo sapiens
  CDR3 for beta chain variable domain of TCR clone 270904 (TRBV4-3, TRBJ2-7)
CASSPRTSGRSYEQYF

SEQ ID NO: 541809 - protein, 14 aa, Homo sapiens
  CDR3 for alpha chain variable domain of TCR clone 270905 (TRAV8-6, TRAJ57)
CAVSSKGGSDKLVF

SEQ ID NO: 541810 - protein, 14 aa, Homo sapiens
  CDR3 for beta chain variable domain of TCR clone 270905 (TRBV18, TRBJ2-7)
CASSPRGGAYEQYF

SEQ ID NO: 541811 - protein, 13 aa, Homo sapiens
  CDR3 for alpha chain variable domain of TCR clone 270906 (TRAV38-1, TRAJ42)
CARWGGSQGNLIF

SEQ ID NO: 541812 - protein, 10 aa, Homo sapiens
  CDR3 for beta chain variable domain of TCR clone 270906 (TRBV2, TRBJ2-5)
CASSAATQYV

SEQ ID NO: 541813 - protein, 14 aa, Homo sapiens
  CDR3 for alpha chain variable domain of TCR clone 270907 (TRAV2, TRAJ39)
CAVEGDNAGNMLTF

SEQ ID NO: 541814 - protein, 14 aa, Homo sapiens
  CDR3 for beta chain variable domain of TCR clone 270907 (TRBV28, TRBJ2-7)
CASSLAGRPYEQYF

SEQ ID NO: 541815 - protein, 14 aa, Homo sapiens
  CDR3 for alpha chain variable domain of TCR clone 270908 (TRAV17, TRAJ16)
CATADFSDGQKLLF

SEQ ID NO: 541816 - protein, 15 aa, Homo sapiens
  CDR3 for beta chain variable domain of TCR clone 270908 (TRBV18, TRBJ2-1)
CASSPPRASYNEQFC

SEQ ID NO: 541817 - protein, 14 aa, Homo sapiens
  CDR3 for alpha chain variable domain of TCR clone 270909 (TRAV13-1, TRAJ6)
CAASITGGSYIPTF

SEQ ID NO: 541818 - protein, 17 aa, Homo sapiens
  CDR3 for beta chain variable domain of TCR clone 270909 (TRBV5-5, TRBJ1-2)
CASSLGSLDGQSEGYTF

SEQ ID NO: 541819 - protein, 14 aa, Homo sapiens
  CDR3 for alpha chain variable domain of TCR clone 270910 (TRAV13-2, TRAJ17)
CAENSKAAGNKLTI

SEQ ID NO: 541820 - protein, 14 aa, Homo sapiens
  CDR3 for beta chain variable domain of TCR clone 270910 (TRBV4-1, TRBJ2-2)
CASSQAVNTGELFF

SEQ ID NO: 541821 - protein, 16 aa, Homo sapiens
  CDR3 for alpha chain variable domain of TCR clone 270911 (TRAV2, TRAJ4)
CAVEDRFSGGYNTLIF

SEQ ID NO: 541822 - protein, 13 aa, Homo sapiens
  CDR3 for beta chain variable domain of TCR clone 270911 (TRBV7-7, TRBJ2-5)
CASSRSGQETQYF

SEQ ID NO: 541823 - protein, 11 aa, Homo sapiens
  CDR3 for alpha chain variable domain of TCR clone 270912 (TRAV21, TRAJ33)
CAVLSNYQLIW

SEQ ID NO: 541824 - protein, 15 aa, Homo sapiens
  CDR3 for beta chain variable domain of TCR clone 270912 (TRBV11-2, TRBJ2-7)
CDSSLMVGGSYEQYF

SEQ ID NO: 541825 - protein, 14 aa, Homo sapiens
  CDR3 for alpha chain variable domain of TCR clone 270913 (TRAV14/DV4, TRAJ26)
CAMREGNYGQNFVF

SEQ ID NO: 541826 - protein, 16 aa, Homo sapiens
  CDR3 for beta chain variable domain of TCR clone 270913 (TRBV9, TRBJ1-2)
CASSVEEKVSPYGYTF

SEQ ID NO: 541827 - protein, 14 aa, Homo sapiens
  CDR3 for alpha chain variable domain of TCR clone 270914 (TRAV12-2, TRAJ3)
CAVSLYSSASKIIF

SEQ ID NO: 541828 - protein, 14 aa, Homo sapiens
  CDR3 for beta chain variable domain of TCR clone 270914 (TRBV27, TRBJ2-1)
CAGNIAETYNEQFF

SEQ ID NO: 541829 - protein, 17 aa, Homo sapiens
  CDR3 for alpha chain variable domain of TCR clone 270915 (TRAV38-1, TRAJ45)
CAFMRSHSGGGADGLTF

SEQ ID NO: 541830 - protein, 15 aa, Homo sapiens
  CDR3 for beta chain variable domain of TCR clone 270915 (TRBV19, TRBJ2-1)
CASSPPGQGPNEQFF

SEQ ID NO: 541831 - protein, 13 aa, Homo sapiens
  CDR3 for alpha chain variable domain of TCR clone 270916 (TRAV12-2, TRAJ52)
CAVSGTSYGKLTF

SEQ ID NO: 541832 - protein, 14 aa, Homo sapiens
  CDR3 for beta chain variable domain of TCR clone 270916 (TRBV13, TRBJ2-5)
CASSLERVGETQYF

SEQ ID NO: 541833 - protein, 12 aa, Homo sapiens
  CDR3 for alpha chain variable domain of TCR clone 270917 (TRAV12-1, TRAJ23)
CVVNIPGGKLIF

SEQ ID NO: 541834 - protein, 14 aa, Homo sapiens
  CDR3 for beta chain variable domain of TCR clone 270917 (TRBV7-2, TRBJ1-1)
CASSFLTGTTEAFF

SEQ ID NO: 541835 - protein, 13 aa, Homo sapiens
  CDR3 for alpha chain variable domain of TCR clone 270918 (TRAV8-4, TRAJ48)
CAVSLFGNEKLTF

SEQ ID NO: 541836 - protein, 16 aa, Homo sapiens
  CDR3 for beta chain variable domain of TCR clone 270918 (TRBV6-1, TRBJ2-5)
CASSETLDRGAETQYF

SEQ ID NO: 541837 - protein, 15 aa, Homo sapiens
  CDR3 for alpha chain variable domain of TCR clone 270919 (TRAV8-3, TRAJ15)
CAMGAPNQAGTALIF

SEQ ID NO: 541838 - protein, 14 aa, Homo sapiens
  CDR3 for beta chain variable domain of TCR clone 270919 (TRBV20-1, TRBJ2-1)
CSPNDEASYNEQFF

SEQ ID NO: 541839 - protein, 14 aa, Homo sapiens
  CDR3 for alpha chain variable domain of TCR clone 270920 (TRAV1-2, TRAJ6)
CAVRSSGGSYIPTF

SEQ ID NO: 541840 - protein, 16 aa, Homo sapiens
  CDR3 for beta chain variable domain of TCR clone 270920 (TRBV7-3, TRBJ2-2)
CASSLKRGTLSGELSF

SEQ ID NO: 541841 - protein, 12 aa, Homo sapiens
  CDR3 for alpha chain variable domain of TCR clone 270921 (TRAV12-3, TRAJ17)
CAMTLTGNKLTC

SEQ ID NO: 541842 - protein, 13 aa, Homo sapiens
  CDR3 for beta chain variable domain of TCR clone 270921 (TRBV20-1, TRBJ2-5)
CSARGDYQETQYF

SEQ ID NO: 541843 - protein, 13 aa, Homo sapiens
  CDR3 for alpha chain variable domain of TCR clone 270922 (TRAV3, TRAJ29)
CAVRDIIDTSLVF

SEQ ID NO: 541844 - protein, 14 aa, Homo sapiens
  CDR3 for beta chain variable domain of TCR clone 270922 (TRBV27, TRBJ2-1)
CASSATGGYNEQFF

SEQ ID NO: 541845 - protein, 12 aa, Homo sapiens
  CDR3 for alpha chain variable domain of TCR clone 270923 (TRAV12-1, TRAJ34)
CVVAGATDKLII

SEQ ID NO: 541846 - protein, 12 aa, Homo sapiens
  CDR3 for beta chain variable domain of TCR clone 270923 (TRBV7-9, TRBJ1-1)
CASSLVRGEAFF

SEQ ID NO: 541847 - protein, 14 aa, Homo sapiens
  CDR3 for alpha chain variable domain of TCR clone 270924 (TRAV1-2, TRAJ8)
CAVREDTGFQKLVF

SEQ ID NO: 541848 - protein, 12 aa, Homo sapiens
  CDR3 for beta chain variable domain of TCR clone 270924 (TRBV28, TRBJ2-6)
CAIQAGANDLTF

SEQ ID NO: 541849 - protein, 15 aa, Homo sapiens
  CDR3 for alpha chain variable domain of TCR clone 270925 (TRAV29/DV5, TRAJ57)
CAASFLRGGSEKLVF

SEQ ID NO: 541850 - protein, 15 aa, Homo sapiens
  CDR3 for beta chain variable domain of TCR clone 270925 (TRBV5-1, TRBJ1-3)
CASSLEGGSGNTIYF

SEQ ID NO: 541851 - protein, 11 aa, Homo sapiens
  CDR3 for alpha chain variable domain of TCR clone 270926 (TRAV1-2, TRAJ20)
CAVANDYKLSF

SEQ ID NO: 541852 - protein, 18 aa, Homo sapiens
  CDR3 for beta chain variable domain of TCR clone 270926 (TRBV20-1, TRBJ2-6)
CSAGTRPTHGSGANVLTF

SEQ ID NO: 541853 - protein, 13 aa, Homo sapiens
  CDR3 for alpha chain variable domain of TCR clone 270927 (TRAV8-6, TRAJ9)
CAVWDTGGFKTIF

SEQ ID NO: 541854 - protein, 14 aa, Homo sapiens
  CDR3 for beta chain variable domain of TCR clone 270927 (TRBV2, TRBJ2-1)
CASSDALIYHEQFF

SEQ ID NO: 541855 - protein, 14 aa, Homo sapiens
  CDR3 for alpha chain variable domain of TCR clone 270928 (TRAV12-3, TRAJ12)
CTMSEGDSSYKLIF

SEQ ID NO: 541856 - protein, 12 aa, Homo sapiens
  CDR3 for beta chain variable domain of TCR clone 270928 (TRBV18, TRBJ1-4)
CASSPSREKLFF

SEQ ID NO: 541857 - protein, 13 aa, Homo sapiens
  CDR3 for alpha chain variable domain of TCR clone 270929 (TRAV27, TRAJ45)
CRSSGGGADGLTF

SEQ ID NO: 541858 - protein, 15 aa, Homo sapiens
  CDR3 for beta chain variable domain of TCR clone 270929 (TRBV28, TRBJ2-5)
CASSSGRTIQETQYF

SEQ ID NO: 541859 - protein, 14 aa, Homo sapiens
  CDR3 for alpha chain variable domain of TCR clone 270930 (TRAV35, TRAJ42)
CAGRYGGSQGNLIF

SEQ ID NO: 541860 - protein, 15 aa, Homo sapiens
  CDR3 for beta chain variable domain of TCR clone 270930 (TRBV7-9, TRBJ2-1)
CASSLGWGRAYEQFF

SEQ ID NO: 541861 - protein, 12 aa, Homo sapiens
  CDR3 for alpha chain variable domain of TCR clone 270931 (TRAV13-1, TRAJ21)
CAAKEGFNKFYF

SEQ ID NO: 541862 - protein, 17 aa, Homo sapiens
  CDR3 for beta chain variable domain of TCR clone 270931 (TRBV20-1, TRBJ2-1)
CSASSSGLAGSYNEQFF

SEQ ID NO: 541863 - protein, 17 aa, Homo sapiens
  CDR3 for alpha chain variable domain of TCR clone 270932 (TRAV13-1, TRAJ52)
CAASSGAGGTSYGKLTF

SEQ ID NO: 541864 - protein, 14 aa, Homo sapiens
  CDR3 for beta chain variable domain of TCR clone 270932 (TRBV2, TRBJ2-7)
CASSPKTSFYEQYF

SEQ ID NO: 541865 - protein, 15 aa, Homo sapiens
  CDR3 for alpha chain variable domain of TCR clone 270933 (TRAV3, TRAJ22)
CAVRDRGGSARQLTF

SEQ ID NO: 541866 - protein, 13 aa, Homo sapiens
  CDR3 for beta chain variable domain of TCR clone 270933 (TRBV7-7, TRBJ2-5)
CASSRSGQETQYF

SEQ ID NO: 541867 - protein, 14 aa, Homo sapiens
  CDR3 for alpha chain variable domain of TCR clone 270934 (TRAV27, TRAJ41)
CAVRTQIPGMHSTS

SEQ ID NO: 541868 - protein, 15 aa, Homo sapiens
  CDR3 for beta chain variable domain of TCR clone 270934 (TRBV5-1, TRBJ2-3)
CASSLGLGIHRYAVF

SEQ ID NO: 541869 - protein, 11 aa, Homo sapiens
  CDR3 for alpha chain variable domain of TCR clone 270935 (TRAV35, TRAJ57)
GPQGGSEKLVF

SEQ ID NO: 541870 - protein, 16 aa, Homo sapiens
  CDR3 for beta chain variable domain of TCR clone 270935 (TRBV7-2, TRBJ1-5)
CASSWTGGPGNQPQHV

SEQ ID NO: 541871 - protein, 15 aa, Homo sapiens
  CDR3 for alpha chain variable domain of TCR clone 270936 (TRAV27, TRAJ38)
CAARRNAGNNRKLIG

SEQ ID NO: 541872 - protein, 13 aa, Homo sapiens
  CDR3 for beta chain variable domain of TCR clone 270936 (TRBV12-5, TRBJ2-3)
CASGERQSDTQYF

SEQ ID NO: 541873 - protein, 14 aa, Homo sapiens
  CDR3 for alpha chain variable domain of TCR clone 270937 (TRAV35, TRAJ40)
CAGHPISGTYKYIF

SEQ ID NO: 541874 - protein, 13 aa, Homo sapiens
  CDR3 for beta chain variable domain of TCR clone 270937 (TRBV7-2, TRBJ1-6)
CASSLGSNSPLHF

SEQ ID NO: 541875 - protein, 12 aa, Homo sapiens
  CDR3 for alpha chain variable domain of TCR clone 270938 (TRAV12-1, TRAJ40)
CVFYSRTYKYIF

SEQ ID NO: 541876 - protein, 18 aa, Homo sapiens
  CDR3 for beta chain variable domain of TCR clone 270938 (TRBV12-4, TRBJ2-2)
CASSLVAGTRGRTGELFF

SEQ ID NO: 541877 - protein, 16 aa, Homo sapiens
  CDR3 for alpha chain variable domain of TCR clone 270939 (TRAV8-3, TRAJ47)
CAVGEAGQEYGNKLVF

SEQ ID NO: 541878 - protein, 13 aa, Homo sapiens
  CDR3 for beta chain variable domain of TCR clone 270939 (TRBV7-9, TRBJ1-2)
CASSLKQNYGYTF

SEQ ID NO: 541879 - protein, 17 aa, Homo sapiens
  CDR3 for alpha chain variable domain of TCR clone 270940 (TRAV3, TRAJ38)
CAVRDCLNAGNDRKLIW

SEQ ID NO: 541880 - protein, 13 aa, Homo sapiens
  CDR3 for beta chain variable domain of TCR clone 270940 (TRBV23-1, TRBJ1-4)
CASRGKFNEKLFF

SEQ ID NO: 541881 - protein, 13 aa, Homo sapiens
  CDR3 for alpha chain variable domain of TCR clone 270941 (TRAV35, TRAJ42)
CAGFPGSQGNLFF

SEQ ID NO: 541882 - protein, 14 aa, Homo sapiens
  CDR3 for beta chain variable domain of TCR clone 270941 (TRBV4-1, TRBJ2-2)
CASSQAVNTGELFF

SEQ ID NO: 541883 - protein, 14 aa, Homo sapiens
  CDR3 for alpha chain variable domain of TCR clone 270942 (TRAV13-1, TRAJ44)
CAAKATGTASQLTL

SEQ ID NO: 541884 - protein, 17 aa, Homo sapiens
  CDR3 for beta chain variable domain of TCR clone 270942 (TRBV7-3, TRBJ2-3)
RASSLMKRMRGADTQYF

SEQ ID NO: 541885 - protein, 14 aa, Homo sapiens
  CDR3 for alpha chain variable domain of TCR clone 270943 (TRAV38-1, TRAJ40)
CALRPTSGTYKYIF

SEQ ID NO: 541886 - protein, 12 aa, Homo sapiens
  CDR3 for beta chain variable domain of TCR clone 270943 (TRBV2, TRBJ2-1)
CAYGPPGNEQFF

SEQ ID NO: 541887 - protein, 15 aa, Homo sapiens
  CDR3 for alpha chain variable domain of TCR clone 270944 (TRAV12-3, TRAJ6)
CAMSATTGGSYIPTF

SEQ ID NO: 541888 - protein, 11 aa, Homo sapiens
  CDR3 for beta chain variable domain of TCR clone 270944 (TRBV7-9, TRBJ2-3)
CASSGPDTQYF

SEQ ID NO: 541889 - protein, 14 aa, Homo sapiens
  CDR3 for alpha chain variable domain of TCR clone 270945 (TRAV12-2, TRAJ40)
CAVKIPSGTYKFIF

SEQ ID NO: 541890 - protein, 15 aa, Homo sapiens
  CDR3 for beta chain variable domain of TCR clone 270945 (TRBV20-1, TRBJ1-4)
CSARREWGVNEKLFF

SEQ ID NO: 541891 - protein, 14 aa, Homo sapiens
  CDR3 for alpha chain variable domain of TCR clone 270946 (TRAV13-2, TRAJ43)
CAEIPTYNNNDMRF

SEQ ID NO: 541892 - protein, 15 aa, Homo sapiens
  CDR3 for beta chain variable domain of TCR clone 270946 (TRBV7-9, TRBJ2-2)
CASGPLDALPGELFF

SEQ ID NO: 541893 - protein, 12 aa, Homo sapiens
  CDR3 for alpha chain variable domain of TCR clone 270947 (TRAV12-2, TRAJ10)
WGVTGGGNKLTF

SEQ ID NO: 541894 - protein, 14 aa, Homo sapiens
  CDR3 for beta chain variable domain of TCR clone 270947 (TRBV29-1, TRBJ2-5)
CSVETSGSGETQYF

SEQ ID NO: 541895 - protein, 13 aa, Homo sapiens
  CDR3 for alpha chain variable domain of TCR clone 270948 (TRAV20, TRAJ49)
CAVQARTGNQFYF

SEQ ID NO: 541896 - protein, 14 aa, Homo sapiens
  CDR3 for beta chain variable domain of TCR clone 270948 (TRBV7-2, TRBJ2-7)
CARSPKTSFYEQYF

SEQ ID NO: 541897 - protein, 14 aa, Homo sapiens
  CDR3 for alpha chain variable domain of TCR clone 270949 (TRAV12-2, TRAJ13)
CAVKNTGGYQKVTF

SEQ ID NO: 541898 - protein, 14 aa, Homo sapiens
  CDR3 for beta chain variable domain of TCR clone 270949 (TRBV12-5, TRBJ2-5)
CASGSRTHQETQYF

SEQ ID NO: 541899 - protein, 11 aa, Homo sapiens
  CDR3 for alpha chain variable domain of TCR clone 270950 (TRAV21, TRAJ39)
LLVNAGNMLTF

SEQ ID NO: 541900 - protein, 16 aa, Homo sapiens
  CDR3 for beta chain variable domain of TCR clone 270950 (TRBV19, TRBJ1-1)
CASRPRSEALNTEAFF

SEQ ID NO: 541901 - protein, 13 aa, Homo sapiens
  CDR3 for alpha chain variable domain of TCR clone 270951 (TRAV16, TRAJ37)
CALRGSNTGKLIF

SEQ ID NO: 541902 - protein, 14 aa, Homo sapiens
  CDR3 for beta chain variable domain of TCR clone 270951 (TRBV19, TRBJ2-1)
CASKDPGLANEQFF

SEQ ID NO: 541903 - protein, 13 aa, Homo sapiens
  CDR3 for alpha chain variable domain of TCR clone 270952 (TRAV16, TRAJ48)
CALRSFGNEKLTF

SEQ ID NO: 541904 - protein, 11 aa, Homo sapiens
  CDR3 for beta chain variable domain of TCR clone 270952 (TRBV29-1, TRBJ2-5)
CSEDRTGTQYF

SEQ ID NO: 541905 - protein, 12 aa, Homo sapiens
  CDR3 for alpha chain variable domain of TCR clone 270953 (TRAV1-2, TRAJ33)
CAALDSNYQLIW

SEQ ID NO: 541906 - protein, 14 aa, Homo sapiens
  CDR3 for beta chain variable domain of TCR clone 270953 (TRBV12-4, TRBJ1-2)
CASSFVGTAYGYTF

SEQ ID NO: 541907 - protein, 15 aa, Homo sapiens
  CDR3 for alpha chain variable domain of TCR clone 270954 (TRAV8-4, TRAJ48)
CAVSAAYFGNEKLTF

SEQ ID NO: 541908 - protein, 12 aa, Homo sapiens
  CDR3 for beta chain variable domain of TCR clone 270954 (TRBV3-1, TRBJ2-5)
CASSHRGETQYF

SEQ ID NO: 541909 - protein, 22 aa, Homo sapiens
  CDR3 for alpha chain variable domain of TCR clone 270955 (TRAV13-1, TRAJ32)
CAASNGWWCYKQAHLWNWHSAF

SEQ ID NO: 541910 - protein, 15 aa, Homo sapiens
  CDR3 for beta chain variable domain of TCR clone 270955 (TRBV20-1, TRBJ2-7)
CSARDRVSGMDEQYF

SEQ ID NO: 541911 - protein, 14 aa, Homo sapiens
  CDR3 for alpha chain variable domain of TCR clone 270956 (TRAV1-2, TRAJ16)
CAVNRFSDGQKLLF

SEQ ID NO: 541912 - protein, 16 aa, Homo sapiens
  CDR3 for beta chain variable domain of TCR clone 270956 (TRBV11-2, TRBJ2-7)
CASSPTTGGVSYEQYF

SEQ ID NO: 541913 - protein, 13 aa, Homo sapiens
  CDR3 for alpha chain variable domain of TCR clone 270957 (TRAV8-3, TRAJ5)
CAVGPRGRRALTF

SEQ ID NO: 541914 - protein, 13 aa, Homo sapiens
  CDR3 for beta chain variable domain of TCR clone 270957 (TRBV7-3, TRBJ1-1)
CASSQDWGAEAFF

SEQ ID NO: 541915 - protein, 13 aa, Homo sapiens
  CDR3 for alpha chain variable domain of TCR clone 270958 (TRAV12-2, TRAJ40)
CAVKRTGPYKYIF

SEQ ID NO: 541916 - protein, 15 aa, Homo sapiens
  CDR3 for beta chain variable domain of TCR clone 270958 (TRBV12-4, TRBJ1-2)
CASSPITGGGYGYSF

SEQ ID NO: 541917 - protein, 13 aa, Homo sapiens
  CDR3 for alpha chain variable domain of TCR clone 270959 (TRAV26-1, TRAJ31)
CIVRADGNARLMF

SEQ ID NO: 541918 - protein, 17 aa, Homo sapiens
  CDR3 for beta chain variable domain of TCR clone 270959 (TRBV11-2, TRBJ2-1)
CASSLYPPGVEYNEQFF

SEQ ID NO: 541919 - protein, 15 aa, Homo sapiens
  CDR3 for alpha chain variable domain of TCR clone 270960 (TRAV27, TRAJ38)
CAARRNAGNNRKLIW

SEQ ID NO: 541920 - protein, 17 aa, Homo sapiens
  CDR3 for beta chain variable domain of TCR clone 270960 (TRBV7-6, TRBJ2-5)
CASSPGLADPWGETQYF

SEQ ID NO: 541921 - protein, 15 aa, Homo sapiens
  CDR3 for alpha chain variable domain of TCR clone 270961 (TRAV35, TRAJ40)
CAGQLGSSGTYKYIF

SEQ ID NO: 541922 - protein, 14 aa, Homo sapiens
  CDR3 for beta chain variable domain of TCR clone 270961 (TRBV7-3, TRBJ2-1)
CASSLAGGTNEQFF

SEQ ID NO: 541923 - protein, 10 aa, Homo sapiens
  CDR3 for alpha chain variable domain of TCR clone 270962 (TRAV27, TRAJ43)
CAGANNDMRF

SEQ ID NO: 541924 - protein, 14 aa, Homo sapiens
  CDR3 for beta chain variable domain of TCR clone 270962 (TRBV12-5, TRBJ2-5)
CASGSRTHQETQYF

SEQ ID NO: 541925 - protein, 13 aa, Homo sapiens
  CDR3 for alpha chain variable domain of TCR clone 270963 (TRAV20, TRAJ7)
CAVLQGGTTDSLL

SEQ ID NO: 541926 - protein, 16 aa, Homo sapiens
  CDR3 for beta chain variable domain of TCR clone 270963 (TRBV6-1, TRBJ2-5)
CASSLRTGGVGETQYF

SEQ ID NO: 541927 - protein, 16 aa, Homo sapiens
  CDR3 for alpha chain variable domain of TCR clone 270964 (TRAV21, TRAJ37)
CAVRTAGSSNTGKLFF

SEQ ID NO: 541928 - protein, 13 aa, Homo sapiens
  CDR3 for beta chain variable domain of TCR clone 270964 (TRBV7-9, TRBJ2-5)
CASLPSGRETQYF

SEQ ID NO: 541929 - protein, 15 aa, Homo sapiens
  CDR3 for alpha chain variable domain of TCR clone 270965 (TRAV3, TRAJ22)
CAVRDRGGSVRQLTF

SEQ ID NO: 541930 - protein, 16 aa, Homo sapiens
  CDR3 for beta chain variable domain of TCR clone 270965 (TRBV5-4, TRBJ2-3)
CASQQPGAGGADTQYC

SEQ ID NO: 541931 - protein, 12 aa, Homo sapiens
  CDR3 for alpha chain variable domain of TCR clone 270966 (TRAV16, TRAJ10)
CSRTGGGNNITF

SEQ ID NO: 541932 - protein, 14 aa, Homo sapiens
  CDR3 for beta chain variable domain of TCR clone 270966 (TRBV12-4, TRBJ2-2)
CASSWRGVTGELFF

SEQ ID NO: 541933 - protein, 14 aa, Homo sapiens
  CDR3 for alpha chain variable domain of TCR clone 270967 (TRAV1-2, TRAJ16)
CAVNRFSDGQKLLF

SEQ ID NO: 541934 - protein, 20 aa, Homo sapiens
  CDR3 for beta chain variable domain of TCR clone 270967 (TRBV28, TRBJ2-1)
GASTPIGRSPGLAGGNEQFF

SEQ ID NO: 541935 - protein, 13 aa, Homo sapiens
  CDR3 for alpha chain variable domain of TCR clone 270968 (TRAV12-3, TRAJ53)
CAMRGGSNYKLTF

SEQ ID NO: 541936 - protein, 15 aa, Homo sapiens
  CDR3 for beta chain variable domain of TCR clone 270968 (TRBV2, TRBJ2-1)
CSTQARLVMIGEQFF

SEQ ID NO: 541937 - protein, 14 aa, Homo sapiens
  CDR3 for alpha chain variable domain of TCR clone 270969 (TRAV12-1, TRAJ42)
CVVIYGGSQGNLIF

SEQ ID NO: 541938 - protein, 13 aa, Homo sapiens
  CDR3 for beta chain variable domain of TCR clone 270969 (TRBV18, TRBJ2-5)
CASSPTGKETQYF

SEQ ID NO: 541939 - protein, 16 aa, Homo sapiens
  CDR3 for alpha chain variable domain of TCR clone 270970 (TRAV23/DV6, TRAJ9)
CAASIGGNTGGCKTIF

SEQ ID NO: 541940 - protein, 12 aa, Homo sapiens
  CDR3 for beta chain variable domain of TCR clone 270970 (TRBV11-2, TRBJ2-1)
CASSVQREAQFF

SEQ ID NO: 541941 - protein, 10 aa, Homo sapiens
  CDR3 for alpha chain variable domain of TCR clone 270971 (TRAV1-2, TRAJ31)
CVSEDARLMF

SEQ ID NO: 541942 - protein, 13 aa, Homo sapiens
  CDR3 for beta chain variable domain of TCR clone 270971 (TRBV27, TRBJ2-7)
CASSLTTGYEQYF

SEQ ID NO: 541943 - protein, 14 aa, Homo sapiens
  CDR3 for alpha chain variable domain of TCR clone 270972 (TRAV21, TRAJ35)
CAVMPIGFGNVLHC

SEQ ID NO: 541944 - protein, 11 aa, Homo sapiens
  CDR3 for beta chain variable domain of TCR clone 270972 (TRBV6-3, TRBJ2-3)
CATGQADTQYF

SEQ ID NO: 541945 - protein, 14 aa, Homo sapiens
  CDR3 for alpha chain variable domain of TCR clone 270973 (TRAV23/DV6, TRAJ37)
CAASTSRNTDKLIF

SEQ ID NO: 541946 - protein, 15 aa, Homo sapiens
  CDR3 for beta chain variable domain of TCR clone 270973 (TRBV7-9, TRBJ2-7)
CASSPGGGLTYEQYF

SEQ ID NO: 541947 - protein, 12 aa, Homo sapiens
  CDR3 for alpha chain variable domain of TCR clone 270974 (TRAV21, TRAJ3)
CCFYSSASKIIF

SEQ ID NO: 541948 - protein, 16 aa, Homo sapiens
  CDR3 for beta chain variable domain of TCR clone 270974 (TRBV19, TRBJ2-1)
CASSKAGTSSYNEQFF

SEQ ID NO: 541949 - protein, 15 aa, Homo sapiens
  CDR3 for alpha chain variable domain of TCR clone 270975 (TRAV13-1, TRAJ44)
CAASRGGGTASKLTF

SEQ ID NO: 541950 - protein, 16 aa, Homo sapiens
  CDR3 for beta chain variable domain of TCR clone 270975 (TRBV29-1, TRBJ2-7)
CRVEVVGTSGSYEQYF

SEQ ID NO: 541951 - protein, 11 aa, Homo sapiens
  CDR3 for alpha chain variable domain of TCR clone 270976 (TRAV3, TRAJ43)
CAVRGVGTMTF

SEQ ID NO: 541952 - protein, 12 aa, Homo sapiens
  CDR3 for beta chain variable domain of TCR clone 270976 (TRBV5-1, TRBJ2-7)
CASSLDSYEQYF

SEQ ID NO: 541953 - protein, 10 aa, Homo sapiens
  CDR3 for alpha chain variable domain of TCR clone 270977 (TRAV12-1, TRAJ37)
ARGNTGKLIF

SEQ ID NO: 541954 - protein, 13 aa, Homo sapiens
  CDR3 for beta chain variable domain of TCR clone 270977 (TRBV4-2, TRBJ1-1)
CASSQAGNTEAFF

SEQ ID NO: 541955 - protein, 16 aa, Homo sapiens
  CDR3 for alpha chain variable domain of TCR clone 270978 (TRAV3, TRAJ21)
CAVRDIERGNFNKFYL

SEQ ID NO: 541956 - protein, 13 aa, Homo sapiens
  CDR3 for beta chain variable domain of TCR clone 270978 (TRBV27, TRBJ2-7)
FASSLTTGYEQYF

SEQ ID NO: 541957 - protein, 14 aa, Homo sapiens
  CDR3 for alpha chain variable domain of TCR clone 270979 (TRAV8-3, TRAJ4)
CAVGASGGYHKLIF

SEQ ID NO: 541958 - protein, 13 aa, Homo sapiens
  CDR3 for beta chain variable domain of TCR clone 270979 (TRBV18, TRBJ2-5)
CASSLQGQETQYF

SEQ ID NO: 541959 - protein, 15 aa, Homo sapiens
  CDR3 for alpha chain variable domain of TCR clone 270980 (TRAV29/DV5, TRAJ40)
FAASAQGSGTYKYIF

SEQ ID NO: 541960 - protein, 15 aa, Homo sapiens
  CDR3 for beta chain variable domain of TCR clone 270980 (TRBV7-2, TRBJ2-3)
CASSLAGAFIGTQYF

SEQ ID NO: 541961 - protein, 13 aa, Homo sapiens
  CDR3 for alpha chain variable domain of TCR clone 270981 (TRAV2, TRAJ40)
CAVVTSGTYKYIL

SEQ ID NO: 541962 - protein, 15 aa, Homo sapiens
  CDR3 for beta chain variable domain of TCR clone 270981 (TRBV19, TRBJ2-1)
CASSIGLAGWDEQFF

SEQ ID NO: 541963 - protein, 14 aa, Homo sapiens
  CDR3 for alpha chain variable domain of TCR clone 270982 (TRAV1-2, TRAJ16)
CAVNRFSDGQKLPF

SEQ ID NO: 541964 - protein, 16 aa, Homo sapiens
  CDR3 for beta chain variable domain of TCR clone 270982 (TRBV27, TRBJ2-2)
CASSFRGLVRTGELFF

SEQ ID NO: 541965 - protein, 13 aa, Homo sapiens
  CDR3 for alpha chain variable domain of TCR clone 270983 (TRAV12-2, TRAJ9)
CAVLETGGFNTIF

SEQ ID NO: 541966 - protein, 15 aa, Homo sapiens
  CDR3 for beta chain variable domain of TCR clone 270983 (TRBV6-3, TRBJ2-7)
CASSRTGVNLYEQYF

SEQ ID NO: 541967 - protein, 14 aa, Homo sapiens
  CDR3 for alpha chain variable domain of TCR clone 270984 (TRAV1-2, TRAJ16)
CAVNRFSDGQKQLF

SEQ ID NO: 541968 - protein, 15 aa, Homo sapiens
  CDR3 for beta chain variable domain of TCR clone 270984 (TRBV7-9, TRBJ1-6)
CASSSPGRGNSPLHF

SEQ ID NO: 541969 - protein, 14 aa, Homo sapiens
  CDR3 for alpha chain variable domain of TCR clone 270985 (TRAV12-3, TRAJ29)
CAMILLSGNTPLVF

SEQ ID NO: 541970 - protein, 16 aa, Homo sapiens
  CDR3 for beta chain variable domain of TCR clone 270985 (TRBV28, TRBJ2-7)
CASSSGTSGRGYEKYF

SEQ ID NO: 541971 - protein, 16 aa, Homo sapiens
  CDR3 for alpha chain variable domain of TCR clone 270986 (TRAV20, TRAJ10)
CAVLRGLTRGGNKLTF

SEQ ID NO: 541972 - protein, 14 aa, Homo sapiens
  CDR3 for beta chain variable domain of TCR clone 270986 (TRBV19, TRBJ1-5)
CASRAPDSFLSQHF

SEQ ID NO: 541973 - protein, 13 aa, Homo sapiens
  CDR3 for alpha chain variable domain of TCR clone 270987 (TRAV1-2, TRAJ9)
CSVLNTAGFKTIF

SEQ ID NO: 541974 - protein, 14 aa, Homo sapiens
  CDR3 for beta chain variable domain of TCR clone 270987 (TRBV20-1, TRBJ2-3)
CSARGGTSTDTQYF

SEQ ID NO: 541975 - protein, 18 aa, Homo sapiens
  CDR3 for alpha chain variable domain of TCR clone 270988 (TRAV26-1, TRAJ22)
CIVRVSFWFCKATDLLIW

SEQ ID NO: 541976 - protein, 12 aa, Homo sapiens
  CDR3 for beta chain variable domain of TCR clone 270988 (TRBV11-2, TRBJ2-2)
CASSLGGGELFF

SEQ ID NO: 541977 - protein, 15 aa, Homo sapiens
  CDR3 for alpha chain variable domain of TCR clone 270989 (TRAV23/DV6, TRAJ18)
CAARYRGSTLGRLNF

SEQ ID NO: 541978 - protein, 14 aa, Homo sapiens
  CDR3 for beta chain variable domain of TCR clone 270989 (TRBV5-1, TRBJ2-1)
CASSALWAGNEQFF

SEQ ID NO: 541979 - protein, 14 aa, Homo sapiens
  CDR3 for alpha chain variable domain of TCR clone 270990 (TRAV16, TRAJ33)
CALSAMDSNYQLIW

SEQ ID NO: 541980 - protein, 15 aa, Homo sapiens
  CDR3 for beta chain variable domain of TCR clone 270990 (TRBV19, TRBJ2-4)
CAGRGPRRGENIQYF

SEQ ID NO: 541981 - protein, 15 aa, Homo sapiens
  CDR3 for alpha chain variable domain of TCR clone 270991 (TRAV36/DV7, TRAJ53)
CAVEGSGGSNYKLTF

SEQ ID NO: 541982 - protein, 12 aa, Homo sapiens
  CDR3 for beta chain variable domain of TCR clone 270991 (TRBV11-3, TRBJ2-2)
CASSLGGGELFF

SEQ ID NO: 541983 - protein, 15 aa, Homo sapiens
  CDR3 for alpha chain variable domain of TCR clone 270992 (TRAV21, TRAJ53)
CATLNSGGSNYKLTF

SEQ ID NO: 541984 - protein, 14 aa, Homo sapiens
  CDR3 for beta chain variable domain of TCR clone 270992 (TRBV7-2, TRBJ2-7)
CASRSQGAAYEQYS

SEQ ID NO: 541985 - protein, 14 aa, Homo sapiens
  CDR3 for alpha chain variable domain of TCR clone 270993 (TRAV1-2, TRAJ8)
CAVREDTGVQKLVF

SEQ ID NO: 541986 - protein, 13 aa, Homo sapiens
  CDR3 for beta chain variable domain of TCR clone 270993 (TRBV12-5, TRBJ2-3)
CASGDRQSDTQYF

SEQ ID NO: 541987 - protein, 15 aa, Homo sapiens
  CDR3 for alpha chain variable domain of TCR clone 270994 (TRAV3, TRAJ20)
CAVRDIKLSDYKLTF

SEQ ID NO: 541988 - protein, 15 aa, Homo sapiens
  CDR3 for beta chain variable domain of TCR clone 270994 (TRBV7-9, TRBJ1-6)
CASSSPGRGNSTLHF

SEQ ID NO: 541989 - protein, 21 aa, Homo sapiens
  CDR3 for alpha chain variable domain of TCR clone 270995 (TRAV41, TRAJ45)
TASHPRDSAGASGGGADGLTF

SEQ ID NO: 541990 - protein, 16 aa, Homo sapiens
  CDR3 for beta chain variable domain of TCR clone 270995 (TRBV7-3, TRBJ2-2)
CASSLTGTGTTGELFF

SEQ ID NO: 541991 - protein, 15 aa, Homo sapiens
  CDR3 for alpha chain variable domain of TCR clone 270996 (TRAV8-3, TRAJ11)
CAVGLLNSGYSTLTF

SEQ ID NO: 541992 - protein, 15 aa, Homo sapiens
  CDR3 for beta chain variable domain of TCR clone 270996 (TRBV11-2, TRBJ2-1)
CASSRNRGLMYEQFF

SEQ ID NO: 541993 - protein, 16 aa, Homo sapiens
  CDR3 for alpha chain variable domain of TCR clone 270997 (TRAV1-2, TRAJ10)
CAVRGVLTGGGNKLTF

SEQ ID NO: 541994 - protein, 15 aa, Homo sapiens
  CDR3 for beta chain variable domain of TCR clone 270997 (TRBV7-9, TRBJ2-7)
CASSSGSPQPYEQYF

SEQ ID NO: 541995 - protein, 13 aa, Homo sapiens
  CDR3 for alpha chain variable domain of TCR clone 270998 (TRAV8-3, TRAJ43)
CAVVPYNNNDMRF

SEQ ID NO: 541996 - protein, 15 aa, Homo sapiens
  CDR3 for beta chain variable domain of TCR clone 270998 (TRBV7-9, TRBJ1-6)
CASSSPGRGNSPLHF

SEQ ID NO: 541997 - protein, 12 aa, Homo sapiens
  CDR3 for alpha chain variable domain of TCR clone 270999 (TRAV12-3, TRAJ17)
CAMTLTGNKLTF

SEQ ID NO: 541998 - protein, 14 aa, Homo sapiens
  CDR3 for beta chain variable domain of TCR clone 270999 (TRBV6-3, TRBJ2-1)
CASLHSAYYNEQFF

SEQ ID NO: 541999 - protein, 14 aa, Homo sapiens
  CDR3 for alpha chain variable domain of TCR clone 271000 (TRAV20, TRAJ20)
CAVLRGYNDYKLSF

SEQ ID NO: 542000 - protein, 13 aa, Homo sapiens
  CDR3 for beta chain variable domain of TCR clone 271000 (TRBV19, TRBJ2-5)
CASSGTAPETQYF

SEQ ID NO: 542001 - protein, 15 aa, Homo sapiens
  CDR3 for alpha chain variable domain of TCR clone 271001 (TRAV21, TRAJ13)
CAVRPTSGGYQKGTC

SEQ ID NO: 542002 - protein, 18 aa, Homo sapiens
  CDR3 for beta chain variable domain of TCR clone 271001 (TRBV11-3, TRBJ2-1)
CASSSYPGGRDSYNEQFF

SEQ ID NO: 542003 - protein, 15 aa, Homo sapiens
  CDR3 for alpha chain variable domain of TCR clone 271002 (TRAV8-3, TRAJ40)
CAAPSLGSGTYRYIF

SEQ ID NO: 542004 - protein, 16 aa, Homo sapiens
  CDR3 for beta chain variable domain of TCR clone 271002 (TRBV7-3, TRBJ2-3)
CASSFSGYRPAATQYF

SEQ ID NO: 542005 - protein, 14 aa, Homo sapiens
  CDR3 for alpha chain variable domain of TCR clone 271003 (TRAV17, TRAJ39)
CATDPVRAGNMLTF

SEQ ID NO: 542006 - protein, 15 aa, Homo sapiens
  CDR3 for beta chain variable domain of TCR clone 271003 (TRBV5-7, TRBJ1-5)
CASSYGKLWDQPQHF

SEQ ID NO: 542007 - protein, 15 aa, Homo sapiens
  CDR3 for alpha chain variable domain of TCR clone 271004 (TRAV21, TRAJ24)
CAARSSTDSWGKLQF

SEQ ID NO: 542008 - protein, 17 aa, Homo sapiens
  CDR3 for beta chain variable domain of TCR clone 271004 (TRBV20-1, TRBJ2-2)
CSASGAGQGGLTGELFF

SEQ ID NO: 542009 - protein, 13 aa, Homo sapiens
  CDR3 for alpha chain variable domain of TCR clone 271005 (TRAV2, TRAJ40)
CAVVTSGTYKYIF

SEQ ID NO: 542010 - protein, 16 aa, Homo sapiens
  CDR3 for beta chain variable domain of TCR clone 271005 (TRBV7-9, TRBJ1-3)
CASSLGAGSSGNPIYF

SEQ ID NO: 542011 - protein, 12 aa, Homo sapiens
  CDR3 for alpha chain variable domain of TCR clone 271006 (TRAV12-3, TRAJ17)
CAMTLTGNKPTF

SEQ ID NO: 542012 - protein, 15 aa, Homo sapiens
  CDR3 for beta chain variable domain of TCR clone 271006 (TRBV20-1, TRBJ2-7)
CSDRDRVSRMDEQYF

SEQ ID NO: 542013 - protein, 13 aa, Homo sapiens
  CDR3 for alpha chain variable domain of TCR clone 271007 (TRAV16, TRAJ48)
FSPLNFGSEKLTF

SEQ ID NO: 542014 - protein, 11 aa, Homo sapiens
  CDR3 for beta chain variable domain of TCR clone 271007 (TRBV7-9, TRBJ2-3)
CASSPTDTQYF

SEQ ID NO: 542015 - protein, 14 aa, Homo sapiens
  CDR3 for alpha chain variable domain of TCR clone 271008 (TRAV4, TRAJ9)
CLVGPGTGGFKTNF

SEQ ID NO: 542016 - protein, 15 aa, Homo sapiens
  CDR3 for beta chain variable domain of TCR clone 271008 (TRBV7-2, TRBJ2-1)
CASSLASGRVNEQFF

SEQ ID NO: 542017 - protein, 11 aa, Homo sapiens
  CDR3 for alpha chain variable domain of TCR clone 271009 (TRAV13-1, TRAJ6)
CATLGSYIPTF

SEQ ID NO: 542018 - protein, 13 aa, Homo sapiens
  CDR3 for beta chain variable domain of TCR clone 271009 (TRBV6-6, TRBJ2-1)
CASRVHQGDEQFF

SEQ ID NO: 542019 - protein, 16 aa, Homo sapiens
  CDR3 for alpha chain variable domain of TCR clone 271010 (TRAV30, TRAJ24)
CGTEIADADSWGKFQF

SEQ ID NO: 542020 - protein, 14 aa, Homo sapiens
  CDR3 for beta chain variable domain of TCR clone 271010 (TRBV12-5, TRBJ2-5)
CASGLRTHQETQYF

SEQ ID NO: 542021 - protein, 10 aa, Homo sapiens
  CDR3 for alpha chain variable domain of TCR clone 271011 (TRAV1-2, TRAJ18)
CAVRGEAQPW

SEQ ID NO: 542022 - protein, 16 aa, Homo sapiens
  CDR3 for beta chain variable domain of TCR clone 271011 (TRBV12-4, TRBJ1-5)
CASSRPVGGSNQPQHS

SEQ ID NO: 542023 - protein, 11 aa, Homo sapiens
  CDR3 for alpha chain variable domain of TCR clone 271012 (TRAV13-1, TRAJ30)
CAASRDDKIIF

SEQ ID NO: 542024 - protein, 16 aa, Homo sapiens
  CDR3 for beta chain variable domain of TCR clone 271012 (TRBV7-9, TRBJ1-2)
CASSLGFSSGEDGYTF

SEQ ID NO: 542025 - protein, 16 aa, Homo sapiens
  CDR3 for alpha chain variable domain of TCR clone 271013 (TRAV8-3, TRAJ8)
FAVPRDGNTGFQKLVF

SEQ ID NO: 542026 - protein, 15 aa, Homo sapiens
  CDR3 for beta chain variable domain of TCR clone 271013 (TRBV6-1, TRBJ2-6)
CASSSRPSGANVLTF

SEQ ID NO: 542027 - protein, 10 aa, Homo sapiens
  CDR3 for alpha chain variable domain of TCR clone 271014 (TRAV12-3, TRAJ18)
CAMIAEAQPW

SEQ ID NO: 542028 - protein, 13 aa, Homo sapiens
  CDR3 for beta chain variable domain of TCR clone 271014 (TRBV15, TRBJ1-6)
CATSGGLNSPLHF

SEQ ID NO: 542029 - protein, 15 aa, Homo sapiens
  CDR3 for alpha chain variable domain of TCR clone 271015 (TRAV26-1, TRAJ3)
CIVRSGYSSAPKINF

SEQ ID NO: 542030 - protein, 14 aa, Homo sapiens
  CDR3 for beta chain variable domain of TCR clone 271015 (TRBV13, TRBJ2-5)
CASYRLLAEETQYF

SEQ ID NO: 542031 - protein, 16 aa, Homo sapiens
  CDR3 for alpha chain variable domain of TCR clone 271016 (TRAV17, TRAJ28)
CACGSYSGAGSYQLTF

SEQ ID NO: 542032 - protein, 14 aa, Homo sapiens
  CDR3 for beta chain variable domain of TCR clone 271016 (TRBV7-2, TRBJ2-7)
CASSHKTSFYEQYF

SEQ ID NO: 542033 - protein, 15 aa, Homo sapiens
  CDR3 for alpha chain variable domain of TCR clone 271017 (TRAV26-2, TRAJ39)
CSLRWNNNAGNMLTF

SEQ ID NO: 542034 - protein, 15 aa, Homo sapiens
  CDR3 for beta chain variable domain of TCR clone 271017 (TRBV5-4, TRBJ1-1)
CASSSLGWANTEAFF

SEQ ID NO: 542035 - protein, 13 aa, Homo sapiens
  CDR3 for alpha chain variable domain of TCR clone 271018 (TRAV8-4, TRAJ49)
CAVSDPGGNQFYF

SEQ ID NO: 542036 - protein, 17 aa, Homo sapiens
  CDR3 for beta chain variable domain of TCR clone 271018 (TRBV13, TRBJ2-3)
CVSSLSRVAGGRNTQYF

SEQ ID NO: 542037 - protein, 11 aa, Homo sapiens
  CDR3 for alpha chain variable domain of TCR clone 271019 (TRAV35, TRAJ30)
CAGPGDDKIIF

SEQ ID NO: 542038 - protein, 18 aa, Homo sapiens
  CDR3 for beta chain variable domain of TCR clone 271019 (TRBV7-6, TRBJ2-1)
CASSPRTSGMSSYNEQFC

SEQ ID NO: 542039 - protein, 14 aa, Homo sapiens
  CDR3 for alpha chain variable domain of TCR clone 271020 (TRAV1-2, TRAJ16)
CAVNRFSDGQKLLF

SEQ ID NO: 542040 - protein, 15 aa, Homo sapiens
  CDR3 for beta chain variable domain of TCR clone 271020 (TRBV28, TRBJ2-1)
CASSIIAGGRSEQLF

SEQ ID NO: 542041 - protein, 18 aa, Homo sapiens
  CDR3 for alpha chain variable domain of TCR clone 271021 (TRAV12-3, TRAJ52)
CAMSVGGAGGTSYGKLTF

SEQ ID NO: 542042 - protein, 16 aa, Homo sapiens
  CDR3 for beta chain variable domain of TCR clone 271021 (TRBV10-3, TRBJ2-1)
CAISGVGDGGGGEQFF

SEQ ID NO: 542043 - protein, 16 aa, Homo sapiens
  CDR3 for alpha chain variable domain of TCR clone 271022 (TRAV30, TRAJ24)
CGTEIVDAHSWGKFQF

SEQ ID NO: 542044 - protein, 12 aa, Homo sapiens
  CDR3 for beta chain variable domain of TCR clone 271022 (TRBV6-3, TRBJ2-7)
CASSLTPYEQYF

SEQ ID NO: 542045 - protein, 11 aa, Homo sapiens
  CDR3 for alpha chain variable domain of TCR clone 271023 (TRAV12-3, TRAJ43)
CAMSVPNDMRI

SEQ ID NO: 542046 - protein, 13 aa, Homo sapiens
  CDR3 for beta chain variable domain of TCR clone 271023 (TRBV27, TRBJ1-4)
CASSLMGDEKLFF

SEQ ID NO: 542047 - protein, 15 aa, Homo sapiens
  CDR3 for alpha chain variable domain of TCR clone 271024 (TRAV13-1, TRAJ17)
CAASIERAAGNKLTL

SEQ ID NO: 542048 - protein, 14 aa, Homo sapiens
  CDR3 for beta chain variable domain of TCR clone 271024 (TRBV4-1, TRBJ2-2)
CASSQAVNTGELFF

SEQ ID NO: 542049 - protein, 16 aa, Homo sapiens
  CDR3 for alpha chain variable domain of TCR clone 271025 (TRAV1-2, TRAJ10)
CAARGVLTGGGNKLTF

SEQ ID NO: 542050 - protein, 13 aa, Homo sapiens
  CDR3 for beta chain variable domain of TCR clone 271025 (TRBV12-4, TRBJ1-1)
CASSPGTGFEAFF

SEQ ID NO: 542051 - protein, 12 aa, Homo sapiens
  CDR3 for alpha chain variable domain of TCR clone 271026 (TRAV8-3, TRAJ22)
FGGQSSARQLTF

SEQ ID NO: 542052 - protein, 15 aa, Homo sapiens
  CDR3 for beta chain variable domain of TCR clone 271026 (TRBV20-1, TRBJ1-1)
CSASRGVTGNTEAFF

SEQ ID NO: 542053 - protein, 16 aa, Homo sapiens
  CDR3 for alpha chain variable domain of TCR clone 271027 (TRAV8-3, TRAJ44)
CAVGTLMTGTASKLTF

SEQ ID NO: 542054 - protein, 17 aa, Homo sapiens
  CDR3 for beta chain variable domain of TCR clone 271027 (TRBV28, TRBJ2-5)
CASSTPEGDALQETQYF

SEQ ID NO: 542055 - protein, 14 aa, Homo sapiens
  CDR3 for alpha chain variable domain of TCR clone 271028 (TRAV1-2, TRAJ6)
CAVSLSGGSYIPTF

SEQ ID NO: 542056 - protein, 17 aa, Homo sapiens
  CDR3 for beta chain variable domain of TCR clone 271028 (TRBV28, TRBJ2-7)
CASSPGGSVFTSSTSGR

SEQ ID NO: 542057 - protein, 16 aa, Homo sapiens
  CDR3 for alpha chain variable domain of TCR clone 271029 (TRAV3, TRAJ37)
CAVRPHRSGNTGKLIF

SEQ ID NO: 542058 - protein, 14 aa, Homo sapiens
  CDR3 for beta chain variable domain of TCR clone 271029 (TRBV25-1, TRBJ1-1)
CASTHLGGNTEAFF

SEQ ID NO: 542059 - protein, 17 aa, Homo sapiens
  CDR3 for alpha chain variable domain of TCR clone 271030 (TRAV8-6, TRAJ58)
CAVSSWVGETSGSRLIF

SEQ ID NO: 542060 - protein, 15 aa, Homo sapiens
  CDR3 for beta chain variable domain of TCR clone 271030 (TRBV6-5, TRBJ2-1)
CASSYDAGAGNEQFF

SEQ ID NO: 542061 - protein, 14 aa, Homo sapiens
  CDR3 for alpha chain variable domain of TCR clone 271031 (TRAV12-2, TRAJ13)
CAVKKTGGYQKVTF

SEQ ID NO: 542062 - protein, 13 aa, Homo sapiens
  CDR3 for beta chain variable domain of TCR clone 271031 (TRBV9, TRBJ2-7)
CASSVGTAYEQYL

SEQ ID NO: 542063 - protein, 14 aa, Homo sapiens
  CDR3 for alpha chain variable domain of TCR clone 271032 (TRAV21, TRAJ21)
CAVKGFGNFNKFYF

SEQ ID NO: 542064 - protein, 13 aa, Homo sapiens
  CDR3 for beta chain variable domain of TCR clone 271032 (TRBV18, TRBJ1-1)
CASSPETKPEASV

SEQ ID NO: 542065 - protein, 13 aa, Homo sapiens
  CDR3 for alpha chain variable domain of TCR clone 271033 (TRAV1-1, TRAJ6)
CAVRLGGSYIPTF

SEQ ID NO: 542066 - protein, 15 aa, Homo sapiens
  CDR3 for beta chain variable domain of TCR clone 271033 (TRBV5-5, TRBJ2-2)
CASSRQASGAGELFF

SEQ ID NO: 542067 - protein, 11 aa, Homo sapiens
  CDR3 for alpha chain variable domain of TCR clone 271034 (TRAV21, TRAJ11)
CAVNGYSTLNF

SEQ ID NO: 542068 - protein, 16 aa, Homo sapiens
  CDR3 for beta chain variable domain of TCR clone 271034 (TRBV4-3, TRBJ2-2)
CASSHLQGSGTGELFF

SEQ ID NO: 542069 - protein, 12 aa, Homo sapiens
  CDR3 for alpha chain variable domain of TCR clone 271035 (TRAV12-3, TRAJ17)
CAMTLTGNKLTF

SEQ ID NO: 542070 - protein, 15 aa, Homo sapiens
  CDR3 for beta chain variable domain of TCR clone 271035 (TRBV20-1, TRBJ2-7)
GSARDRVAGMDEQCF

SEQ ID NO: 542071 - protein, 15 aa, Homo sapiens
  CDR3 for alpha chain variable domain of TCR clone 271036 (TRAV38-1, TRAJ57)
CAFMKHQGGSEKLVF

SEQ ID NO: 542072 - protein, 16 aa, Homo sapiens
  CDR3 for beta chain variable domain of TCR clone 271036 (TRBV2, TRBJ2-1)
CASSVGGSLSYNEQFF

SEQ ID NO: 542073 - protein, 14 aa, Homo sapiens
  CDR3 for alpha chain variable domain of TCR clone 271037 (TRAV30, TRAJ33)
CGTVAPRSNYQLIW

SEQ ID NO: 542074 - protein, 15 aa, Homo sapiens
  CDR3 for beta chain variable domain of TCR clone 271037 (TRBV6-1, TRBJ1-5)
CASSELREGNQPQHF

SEQ ID NO: 542075 - protein, 13 aa, Homo sapiens
  CDR3 for alpha chain variable domain of TCR clone 271038 (TRAV22, TRAJ29)
CAVWGSGNTHLVF

SEQ ID NO: 542076 - protein, 13 aa, Homo sapiens
  CDR3 for beta chain variable domain of TCR clone 271038 (TRBV4-2, TRBJ1-1)
CASSQAGNTEAFF

SEQ ID NO: 542077 - protein, 15 aa, Homo sapiens
  CDR3 for alpha chain variable domain of TCR clone 271039 (TRAV26-1, TRAJ29)
CIVRVEGSGNTPLVF

SEQ ID NO: 542078 - protein, 15 aa, Homo sapiens
  CDR3 for beta chain variable domain of TCR clone 271039 (TRBV18, TRBJ2-3)
CASSPLAGETDTQYF

SEQ ID NO: 542079 - protein, 16 aa, Homo sapiens
  CDR3 for alpha chain variable domain of TCR clone 271040 (TRAV8-2, TRAJ7)
CVVSEGPYYGNNRLAF

SEQ ID NO: 542080 - protein, 14 aa, Homo sapiens
  CDR3 for beta chain variable domain of TCR clone 271040 (TRBV25-1, TRBJ1-2)
CASSEATGPYGYTF

SEQ ID NO: 542081 - protein, 16 aa, Homo sapiens
  CDR3 for alpha chain variable domain of TCR clone 271041 (TRAV12-2, TRAJ5)
CAVTRGSGTGRRALTF

SEQ ID NO: 542082 - protein, 12 aa, Homo sapiens
  CDR3 for beta chain variable domain of TCR clone 271041 (TRBV7-9, TRBJ1-4)
CASSTDREKLFF

SEQ ID NO: 542083 - protein, 12 aa, Homo sapiens
  CDR3 for alpha chain variable domain of TCR clone 271042 (TRAV13-1, TRAJ21)
CAATEGFNKFYF

SEQ ID NO: 542084 - protein, 18 aa, Homo sapiens
  CDR3 for beta chain variable domain of TCR clone 271042 (TRBV20-1, TRBJ2-6)
CSAETTPTHGSGANVLTF

SEQ ID NO: 542085 - protein, 14 aa, Homo sapiens
  CDR3 for alpha chain variable domain of TCR clone 271043 (TRAV12-1, TRAJ9)
CVVTGYTGGFKTIF

SEQ ID NO: 542086 - protein, 13 aa, Homo sapiens
  CDR3 for beta chain variable domain of TCR clone 271043 (TRBV20-1, TRBJ1-1)
CSARAGGYTEAFF

SEQ ID NO: 542087 - protein, 13 aa, Homo sapiens
  CDR3 for alpha chain variable domain of TCR clone 271044 (TRAV17, TRAJ5)
CAPMDTGRRALTF

SEQ ID NO: 542088 - protein, 16 aa, Homo sapiens
  CDR3 for beta chain variable domain of TCR clone 271044 (TRBV4-3, TRBJ2-2)
CASSHLQGSGTGELFF

SEQ ID NO: 542089 - protein, 12 aa, Homo sapiens
  CDR3 for alpha chain variable domain of TCR clone 271045 (TRAV27, TRAJ13)
CAGAGGYQKVTF

SEQ ID NO: 542090 - protein, 14 aa, Homo sapiens
  CDR3 for beta chain variable domain of TCR clone 271045 (TRBV27, TRBJ2-2)
CASSSRLVPGELFF

SEQ ID NO: 542091 - protein, 15 aa, Homo sapiens
  CDR3 for alpha chain variable domain of TCR clone 271046 (TRAV17, TRAJ22)
CATVAPSGSARPLTF

SEQ ID NO: 542092 - protein, 16 aa, Homo sapiens
  CDR3 for beta chain variable domain of TCR clone 271046 (TRBV10-3, TRBJ2-7)
CAISADFADRPYEQYF

SEQ ID NO: 542093 - protein, 13 aa, Homo sapiens
  CDR3 for alpha chain variable domain of TCR clone 271047 (TRAV13-1, TRAJ5)
CAASDTGRSALTF

SEQ ID NO: 542094 - protein, 14 aa, Homo sapiens
  CDR3 for beta chain variable domain of TCR clone 271047 (TRBV19, TRBJ2-1)
CASPTFVLSGEQFF

SEQ ID NO: 542095 - protein, 12 aa, Homo sapiens
  CDR3 for alpha chain variable domain of TCR clone 271048 (TRAV13-1, TRAJ9)
CASNTGGFKTIF

SEQ ID NO: 542096 - protein, 18 aa, Homo sapiens
  CDR3 for beta chain variable domain of TCR clone 271048 (TRBV11-2, TRBJ2-3)
CASSLGGASRGAPNTQYF

SEQ ID NO: 542097 - protein, 14 aa, Homo sapiens
  CDR3 for alpha chain variable domain of TCR clone 271049 (TRAV12-2, TRAJ45)
CAVYSGGGADGLTF

SEQ ID NO: 542098 - protein, 12 aa, Homo sapiens
  CDR3 for beta chain variable domain of TCR clone 271049 (TRBV20-1, TRBJ2-1)
CSARLEVNEQFF

SEQ ID NO: 542099 - protein, 12 aa, Homo sapiens
  CDR3 for alpha chain variable domain of TCR clone 271050 (TRAV4, TRAJ26)
CLVGDYGQNFVF

SEQ ID NO: 542100 - protein, 12 aa, Homo sapiens
  CDR3 for beta chain variable domain of TCR clone 271050 (TRBV2, TRBJ2-3)
CASSGRFDTQYF

SEQ ID NO: 542101 - protein, 13 aa, Homo sapiens
  CDR3 for alpha chain variable domain of TCR clone 271051 (TRAV12-1, TRAJ3)
CVVNPRGASKIIF

SEQ ID NO: 542102 - protein, 13 aa, Homo sapiens
  CDR3 for beta chain variable domain of TCR clone 271051 (TRBV28, TRBJ1-5)
CASSDSGNQPQHF

SEQ ID NO: 542103 - protein, 14 aa, Homo sapiens
  CDR3 for alpha chain variable domain of TCR clone 271052 (TRAV2, TRAJ3)
CAVPPYSSASKIIF

SEQ ID NO: 542104 - protein, 14 aa, Homo sapiens
  CDR3 for beta chain variable domain of TCR clone 271052 (TRBV11-2, TRBJ1-2)
CASSLGTANYGYTF

SEQ ID NO: 542105 - protein, 15 aa, Homo sapiens
  CDR3 for alpha chain variable domain of TCR clone 271053 (TRAV30, TRAJ32)
CGTEILCGATNKLIV

SEQ ID NO: 542106 - protein, 13 aa, Homo sapiens
  CDR3 for beta chain variable domain of TCR clone 271053 (TRBV6-3, TRBJ2-7)
CASSFSGGYEQYF

SEQ ID NO: 542107 - protein, 14 aa, Homo sapiens
  CDR3 for alpha chain variable domain of TCR clone 271054 (TRAV1-1, TRAJ30)
CAVRSLNRDDKIIF

SEQ ID NO: 542108 - protein, 12 aa, Homo sapiens
  CDR3 for beta chain variable domain of TCR clone 271054 (TRBV29-1, TRBJ2-3)
CSVTGGADTQYF

SEQ ID NO: 542109 - protein, 12 aa, Homo sapiens
  CDR3 for alpha chain variable domain of TCR clone 271055 (TRAV8-3, TRAJ26)
CAGDNYGQNFVF

SEQ ID NO: 542110 - protein, 15 aa, Homo sapiens
  CDR3 for beta chain variable domain of TCR clone 271055 (TRBV5-4, TRBJ2-5)
CASSFFGEGMETQYF

SEQ ID NO: 542111 - protein, 14 aa, Homo sapiens
  CDR3 for alpha chain variable domain of TCR clone 271056 (TRAV3, TRAJ30)
CAVRDIGRDDKIIF

SEQ ID NO: 542112 - protein, 15 aa, Homo sapiens
  CDR3 for beta chain variable domain of TCR clone 271056 (TRBV10-3, TRBJ1-1)
CAISEAGTCGTEAFF

SEQ ID NO: 542113 - protein, 17 aa, Homo sapiens
  CDR3 for alpha chain variable domain of TCR clone 271057 (TRAV3, TRAJ6)
CAVRDGPRAGGSYIPTF

SEQ ID NO: 542114 - protein, 10 aa, Homo sapiens
  CDR3 for beta chain variable domain of TCR clone 271057 (TRBV7-9, TRBJ1-1)
CASSFTEAFF

SEQ ID NO: 542115 - protein, 12 aa, Homo sapiens
  CDR3 for alpha chain variable domain of TCR clone 271058 (TRAV13-1, TRAJ21)
CAAKEGFNKFYF

SEQ ID NO: 542116 - protein, 17 aa, Homo sapiens
  CDR3 for beta chain variable domain of TCR clone 271058 (TRBV20-1, TRBJ2-1)
CSASSSGIAGSYNEQFF

SEQ ID NO: 542117 - protein, 17 aa, Homo sapiens
  CDR3 for alpha chain variable domain of TCR clone 271059 (TRAV26-1, TRAJ53)
CIVRVDDSGGSNYKLTF

SEQ ID NO: 542118 - protein, 15 aa, Homo sapiens
  CDR3 for beta chain variable domain of TCR clone 271059 (TRBV7-2, TRBJ2-1)
CASSSGLAGGNEQFF

SEQ ID NO: 542119 - protein, 13 aa, Homo sapiens
  CDR3 for alpha chain variable domain of TCR clone 271060 (TRAV21, TRAJ45)
CAVMGGGADGLTF

SEQ ID NO: 542120 - protein, 16 aa, Homo sapiens
  CDR3 for beta chain variable domain of TCR clone 271060 (TRBV20-1, TRBJ2-1)
CSARGHLAGGRGEQFF

SEQ ID NO: 542121 - protein, 12 aa, Homo sapiens
  CDR3 for alpha chain variable domain of TCR clone 271061 (TRAV13-1, TRAJ15)
CAASQAGTALIF

SEQ ID NO: 542122 - protein, 13 aa, Homo sapiens
  CDR3 for beta chain variable domain of TCR clone 271061 (TRBV27, TRBJ2-7)
CASSLTTGYEQYF

SEQ ID NO: 542123 - protein, 13 aa, Homo sapiens
  CDR3 for alpha chain variable domain of TCR clone 271062 (TRAV12-3, TRAJ33)
CAMSVNSNYQLIC

SEQ ID NO: 542124 - protein, 13 aa, Homo sapiens
  CDR3 for beta chain variable domain of TCR clone 271062 (TRBV7-9, TRBJ1-2)
CTSSLKQNYGYTF

SEQ ID NO: 542125 - protein, 20 aa, Homo sapiens
  CDR3 for alpha chain variable domain of TCR clone 271063 (TRAV26-1, TRAJ57)
CCVLLHRQNETQGGSEKLVF

SEQ ID NO: 542126 - protein, 16 aa, Homo sapiens
  CDR3 for beta chain variable domain of TCR clone 271063 (TRBV4-2, TRBJ2-7)
CASSQEELAGTYEQYF

SEQ ID NO: 542127 - protein, 11 aa, Homo sapiens
  CDR3 for alpha chain variable domain of TCR clone 271064 (TRAV1-1, TRAJ23)
CAVRQGGKLIF

SEQ ID NO: 542128 - protein, 15 aa, Homo sapiens
  CDR3 for beta chain variable domain of TCR clone 271064 (TRBV20-1, TRBJ2-7)
CSARVPAAYFYEQYF

SEQ ID NO: 542129 - protein, 18 aa, Homo sapiens
  CDR3 for alpha chain variable domain of TCR clone 271065 (TRAV12-3, TRAJ52)
CAMSVGGAGGTSYGKLTF

SEQ ID NO: 542130 - protein, 16 aa, Homo sapiens
  CDR3 for beta chain variable domain of TCR clone 271065 (TRBV20-1, TRBJ1-4)
CSARPYGGELNEKLFF

SEQ ID NO: 542131 - protein, 16 aa, Homo sapiens
  CDR3 for alpha chain variable domain of TCR clone 271066 (TRAV3, TRAJ37)
CAVRGKRSGNTGKLIF

SEQ ID NO: 542132 - protein, 16 aa, Homo sapiens
  CDR3 for beta chain variable domain of TCR clone 271066 (TRBV19, TRBJ2-1)
CASSKAGPSSYNEQFF

SEQ ID NO: 542133 - protein, 11 aa, Homo sapiens
  CDR3 for alpha chain variable domain of TCR clone 271067 (TRAV35, TRAJ30)
CAGPGDDKIIF

SEQ ID NO: 542134 - protein, 18 aa, Homo sapiens
  CDR3 for beta chain variable domain of TCR clone 271067 (TRBV7-6, TRBJ2-1)
CASSPRTSGMRSYNEQFF

SEQ ID NO: 542135 - protein, 15 aa, Homo sapiens
  CDR3 for alpha chain variable domain of TCR clone 271068 (TRAV3, TRAJ17)
CAVSPKEAAGNKLTF

SEQ ID NO: 542136 - protein, 12 aa, Homo sapiens
  CDR3 for beta chain variable domain of TCR clone 271068 (TRBV7-9, TRBJ1-6)
CASSLMTSPLHS

SEQ ID NO: 542137 - protein, 12 aa, Homo sapiens
  CDR3 for alpha chain variable domain of TCR clone 271069 (TRAV27, TRAJ35)
CAGADFGDVLHC

SEQ ID NO: 542138 - protein, 16 aa, Homo sapiens
  CDR3 for beta chain variable domain of TCR clone 271069 (TRBV6-1, TRBJ2-1)
CASISRQGSSYNEQFF

SEQ ID NO: 542139 - protein, 14 aa, Homo sapiens
  CDR3 for alpha chain variable domain of TCR clone 271070 (TRAV12-1, TRAJ45)
CVVNIGGGADGLTF

SEQ ID NO: 542140 - protein, 14 aa, Homo sapiens
  CDR3 for beta chain variable domain of TCR clone 271070 (TRBV6-6, TRBJ2-7)
CASSDSGAGYEQYF

SEQ ID NO: 542141 - protein, 14 aa, Homo sapiens
  CDR3 for alpha chain variable domain of TCR clone 271071 (TRAV26-1, TRAJ15)
CIVRANQAGAALIF

SEQ ID NO: 542142 - protein, 16 aa, Homo sapiens
  CDR3 for beta chain variable domain of TCR clone 271071 (TRBV20-1, TRBJ1-4)
CSAIGGPRGANEKLFF

SEQ ID NO: 542143 - protein, 23 aa, Homo sapiens
  CDR3 for alpha chain variable domain of TCR clone 271072 (TRAV26-1, TRAJ38)
CIVRPLNAGNNHIQNPDPAVYQL

SEQ ID NO: 542144 - protein, 17 aa, Homo sapiens
  CDR3 for beta chain variable domain of TCR clone 271072 (TRBV20-1, TRBJ2-1)
CSARDPLAGVWDNEQFF

SEQ ID NO: 542145 - protein, 14 aa, Homo sapiens
  CDR3 for alpha chain variable domain of TCR clone 271073 (TRAV12-1, TRAJ29)
CVVIGPSGNTPLVF

SEQ ID NO: 542146 - protein, 14 aa, Homo sapiens
  CDR3 for beta chain variable domain of TCR clone 271073 (TRBV19, TRBJ2-1)
CASPTFVLSGEQFF

SEQ ID NO: 542147 - protein, 18 aa, Homo sapiens
  CDR3 for alpha chain variable domain of TCR clone 271074 (TRAV21, TRAJ52)
CAVRPSPAGGTSYGKLTF

SEQ ID NO: 542148 - protein, 14 aa, Homo sapiens
  CDR3 for beta chain variable domain of TCR clone 271074 (TRBV20-1, TRBJ2-1)
CSAHPGLPYNEQFF

SEQ ID NO: 542149 - protein, 18 aa, Homo sapiens
  CDR3 for alpha chain variable domain of TCR clone 271075 (TRAV13-1, TRAJ52)
CAAKNPNAGGTSYGKLTF

SEQ ID NO: 542150 - protein, 12 aa, Homo sapiens
  CDR3 for beta chain variable domain of TCR clone 271075 (TRBV5-1, TRBJ1-1)
CASSCGNTEAFF

SEQ ID NO: 542151 - protein, 11 aa, Homo sapiens
  CDR3 for alpha chain variable domain of TCR clone 271076 (TRAV21, TRAJ11)
CAMNGYSTLTF

SEQ ID NO: 542152 - protein, 13 aa, Homo sapiens
  CDR3 for beta chain variable domain of TCR clone 271076 (TRBV19, TRBJ2-7)
CASSIDRTYEQYF

SEQ ID NO: 542153 - protein, 13 aa, Homo sapiens
  CDR3 for alpha chain variable domain of TCR clone 271077 (TRAV12-2, TRAJ20)
CAVYPSNDYKLSF

SEQ ID NO: 542154 - protein, 15 aa, Homo sapiens
  CDR3 for beta chain variable domain of TCR clone 271077 (TRBV27, TRBJ2-5)
CATSLYPRGGETQYF

SEQ ID NO: 542155 - protein, 14 aa, Homo sapiens
  CDR3 for alpha chain variable domain of TCR clone 271078 (TRAV3, TRAJ6)
CAVRRTGGSYIPTF

SEQ ID NO: 542156 - protein, 12 aa, Homo sapiens
  CDR3 for beta chain variable domain of TCR clone 271078 (TRBV14, TRBJ2-7)
CASSSLKGEQYF

SEQ ID NO: 542157 - protein, 12 aa, Homo sapiens
  CDR3 for alpha chain variable domain of TCR clone 271079 (TRAV13-2, TRAJ23)
CAERHRGGKLIF

SEQ ID NO: 542158 - protein, 16 aa, Homo sapiens
  CDR3 for beta chain variable domain of TCR clone 271079 (TRBV20-1, TRBJ1-4)
CSATGQGLLTNEKLFS

SEQ ID NO: 542159 - protein, 14 aa, Homo sapiens
  CDR3 for alpha chain variable domain of TCR clone 271080 (TRAV8-4, TRAJ54)
CAVSEVLGAQKLVF

SEQ ID NO: 542160 - protein, 14 aa, Homo sapiens
  CDR3 for beta chain variable domain of TCR clone 271080 (TRBV19, TRBJ2-1)
CASPTFVLSGEQFF

SEQ ID NO: 542161 - protein, 11 aa, Homo sapiens
  CDR3 for alpha chain variable domain of TCR clone 271081 (TRAV12-3, TRAJ27)
CAMANAGKSTF

SEQ ID NO: 542162 - protein, 12 aa, Homo sapiens
  CDR3 for beta chain variable domain of TCR clone 271081 (TRBV11-2, TRBJ2-2)
CASSLGGGELLF

SEQ ID NO: 542163 - protein, 12 aa, Homo sapiens
  CDR3 for alpha chain variable domain of TCR clone 271082 (TRAV26-1, TRAJ36)
CIVRVRADNLFF

SEQ ID NO: 542164 - protein, 13 aa, Homo sapiens
  CDR3 for beta chain variable domain of TCR clone 271082 (TRBV11-2, TRBJ2-5)
CASSRGPSGTQYF

SEQ ID NO: 542165 - protein, 11 aa, Homo sapiens
  CDR3 for alpha chain variable domain of TCR clone 271083 (TRAV2, TRAJ13)
CASGGYQKVTF

SEQ ID NO: 542166 - protein, 12 aa, Homo sapiens
  CDR3 for beta chain variable domain of TCR clone 271083 (TRBV14, TRBJ1-1)
CASRPYETEAFF

SEQ ID NO: 542167 - protein, 17 aa, Homo sapiens
  CDR3 for alpha chain variable domain of TCR clone 271084 (TRAV29/DV5, TRAJ42)
CAASAGNYGGSQGNLIF

SEQ ID NO: 542168 - protein, 14 aa, Homo sapiens
  CDR3 for beta chain variable domain of TCR clone 271084 (TRBV7-2, TRBJ2-7)
CASRSQGAAYEQYF

SEQ ID NO: 542169 - protein, 12 aa, Homo sapiens
  CDR3 for alpha chain variable domain of TCR clone 271085 (TRAV1-1, TRAJ8)
CAGGTGFQKLVL

SEQ ID NO: 542170 - protein, 16 aa, Homo sapiens
  CDR3 for beta chain variable domain of TCR clone 271085 (TRBV12-5, TRBJ2-5)
CASGPRTSGNQETQYF

SEQ ID NO: 542171 - protein, 11 aa, Homo sapiens
  CDR3 for alpha chain variable domain of TCR clone 271086 (TRAV2, TRAJ13)
CASVCYQKVTF

SEQ ID NO: 542172 - protein, 15 aa, Homo sapiens
  CDR3 for beta chain variable domain of TCR clone 271086 (TRBV6-3, TRBJ2-3)
RLIHYSVGQADTQYF

SEQ ID NO: 542173 - protein, 12 aa, Homo sapiens
  CDR3 for alpha chain variable domain of TCR clone 271087 (TRAV21, TRAJ11)
CAATSGYSTLTF

SEQ ID NO: 542174 - protein, 15 aa, Homo sapiens
  CDR3 for beta chain variable domain of TCR clone 271087 (TRBV20-1, TRBJ2-1)
CSARGIGGTYNEQFF

SEQ ID NO: 542175 - protein, 14 aa, Homo sapiens
  CDR3 for alpha chain variable domain of TCR clone 271088 (TRAV1-2, TRAJ27)
FAPAEYTNAGKSTF

SEQ ID NO: 542176 - protein, 18 aa, Homo sapiens
  CDR3 for beta chain variable domain of TCR clone 271088 (TRBV28, TRBJ1-2)
CASRQQQGKRGSNYGYTF

SEQ ID NO: 542177 - protein, 16 aa, Homo sapiens
  CDR3 for alpha chain variable domain of TCR clone 271089 (TRAV3, TRAJ21)
CAVKDIERGNFNKFYF

SEQ ID NO: 542178 - protein, 15 aa, Homo sapiens
  CDR3 for beta chain variable domain of TCR clone 271089 (TRBV20-1, TRBJ2-7)
CSARDRVSGMDEQYF

SEQ ID NO: 542179 - protein, 14 aa, Homo sapiens
  CDR3 for alpha chain variable domain of TCR clone 271090 (TRAV1-2, TRAJ16)
CAVNRFSDGQKLLF

SEQ ID NO: 542180 - protein, 16 aa, Homo sapiens
  CDR3 for beta chain variable domain of TCR clone 271090 (TRBV7-9, TRBJ2-1)
CASSDVAGGSYNGQFF

SEQ ID NO: 542181 - protein, 13 aa, Homo sapiens
  CDR3 for alpha chain variable domain of TCR clone 271091 (TRAV29/DV5, TRAJ37)
CAAVPGNTGKLIF

SEQ ID NO: 542182 - protein, 13 aa, Homo sapiens
  CDR3 for beta chain variable domain of TCR clone 271091 (TRBV28, TRBJ2-7)
CASRPTLKREQYF

SEQ ID NO: 542183 - protein, 13 aa, Homo sapiens
  CDR3 for alpha chain variable domain of TCR clone 271092 (TRAV1-2, TRAJ9)
CAALNTGGFKTIF

SEQ ID NO: 542184 - protein, 12 aa, Homo sapiens
  CDR3 for beta chain variable domain of TCR clone 271092 (TRBV11-3, TRBJ1-1)
CASSDRQGEAFF

SEQ ID NO: 542185 - protein, 17 aa, Homo sapiens
  CDR3 for alpha chain variable domain of TCR clone 271093 (TRAV3, TRAJ42)
CAVRDRDYGGSQGNLIF

SEQ ID NO: 542186 - protein, 14 aa, Homo sapiens
  CDR3 for beta chain variable domain of TCR clone 271093 (TRBV19, TRBJ2-2)
CASSGQGIAGKLFF

SEQ ID NO: 542187 - protein, 22 aa, Homo sapiens
  CDR3 for alpha chain variable domain of TCR clone 271094 (TRAV12-3, TRAJ26)
CSSETHSPVIQPPTSPNQNFVF

SEQ ID NO: 542188 - protein, 15 aa, Homo sapiens
  CDR3 for beta chain variable domain of TCR clone 271094 (TRBV7-2, TRBJ1-1)
CASSLAGQGFTEAFF

SEQ ID NO: 542189 - protein, 14 aa, Homo sapiens
  CDR3 for alpha chain variable domain of TCR clone 271095 (TRAV12-3, TRAJ42)
CAMNYGGSQGSLIF

SEQ ID NO: 542190 - protein, 14 aa, Homo sapiens
  CDR3 for beta chain variable domain of TCR clone 271095 (TRBV19, TRBJ2-1)
CASPTFVLSGEQFF

SEQ ID NO: 542191 - protein, 15 aa, Homo sapiens
  CDR3 for alpha chain variable domain of TCR clone 271096 (TRAV3, TRAJ20)
CAVRDIKLSDYNLIF

SEQ ID NO: 542192 - protein, 15 aa, Homo sapiens
  CDR3 for beta chain variable domain of TCR clone 271096 (TRBV7-9, TRBJ1-6)
CASSSPGRGNPPLHF

SEQ ID NO: 542193 - protein, 15 aa, Homo sapiens
  CDR3 for alpha chain variable domain of TCR clone 271097 (TRAV3, TRAJ5)
CAVRDLDTGRRALTF

SEQ ID NO: 542194 - protein, 15 aa, Homo sapiens
  CDR3 for beta chain variable domain of TCR clone 271097 (TRBV6-3, TRBJ2-7)
CASSSPGTVFYEQYL

SEQ ID NO: 542195 - protein, 14 aa, Homo sapiens
  CDR3 for alpha chain variable domain of TCR clone 271098 (TRAV12-3, TRAJ58)
CAMSTETSGSRLTF

SEQ ID NO: 542196 - protein, 15 aa, Homo sapiens
  CDR3 for beta chain variable domain of TCR clone 271098 (TRBV4-1, TRBJ1-4)
CASSDTGGTNEKPFF

SEQ ID NO: 542197 - protein, 17 aa, Homo sapiens
  CDR3 for alpha chain variable domain of TCR clone 271099 (TRAV4, TRAJ20)
CTTASWVKGNNDYKLSF

SEQ ID NO: 542198 - protein, 17 aa, Homo sapiens
  CDR3 for beta chain variable domain of TCR clone 271099 (TRBV11-2, TRBJ2-1)
CASSLYPPGVQYNEQFF

SEQ ID NO: 542199 - protein, 13 aa, Homo sapiens
  CDR3 for alpha chain variable domain of TCR clone 271100 (TRAV27, TRAJ56)
CAVKPGANSKLTF

SEQ ID NO: 542200 - protein, 18 aa, Homo sapiens
  CDR3 for beta chain variable domain of TCR clone 271100 (TRBV11-2, TRBJ2-3)
CASSLGGASRGAPNTQYF

SEQ ID NO: 542201 - protein, 14 aa, Homo sapiens
  CDR3 for alpha chain variable domain of TCR clone 271101 (TRAV1-2, TRAJ8)
CAVREDTGFQKPVF

SEQ ID NO: 542202 - protein, 16 aa, Homo sapiens
  CDR3 for beta chain variable domain of TCR clone 271101 (TRBV2, TRBJ2-3)
CASSTSVEGATDTQYF

SEQ ID NO: 542203 - protein, 11 aa, Homo sapiens
  CDR3 for alpha chain variable domain of TCR clone 271102 (TRAV12-1, TRAJ40)
CVVPGTYKYIF

SEQ ID NO: 542204 - protein, 15 aa, Homo sapiens
  CDR3 for beta chain variable domain of TCR clone 271102 (TRBV18, TRBJ2-1)
CASSPPSASYNEQFF

SEQ ID NO: 542205 - protein, 10 aa, Homo sapiens
  CDR3 for alpha chain variable domain of TCR clone 271103 (TRAV39, TRAJ49)
CAVAGNQFYF

SEQ ID NO: 542206 - protein, 14 aa, Homo sapiens
  CDR3 for beta chain variable domain of TCR clone 271103 (TRBV7-8, TRBJ2-7)
CASSPRDRVHEQYV

SEQ ID NO: 542207 - protein, 15 aa, Homo sapiens
  CDR3 for alpha chain variable domain of TCR clone 271104 (TRAV8-3, TRAJ45)
GASSYSGGGADGLTF

SEQ ID NO: 542208 - protein, 12 aa, Homo sapiens
  CDR3 for beta chain variable domain of TCR clone 271104 (TRBV12-4, TRBJ2-7)
CASSLGGYEQYF

SEQ ID NO: 542209 - protein, 12 aa, Homo sapiens
  CDR3 for alpha chain variable domain of TCR clone 271105 (TRAV26-1, TRAJ36)
CIVRVRSDNLFF

SEQ ID NO: 542210 - protein, 13 aa, Homo sapiens
  CDR3 for beta chain variable domain of TCR clone 271105 (TRBV11-2, TRBJ2-5)
CASSRGPSETQYF

SEQ ID NO: 542211 - protein, 12 aa, Homo sapiens
  CDR3 for alpha chain variable domain of TCR clone 271106 (TRAV12-3, TRAJ17)
CAMTLTGNKLPF

SEQ ID NO: 542212 - protein, 13 aa, Homo sapiens
  CDR3 for beta chain variable domain of TCR clone 271106 (TRBV9, TRBJ2-2)
CASSPRPAGELFF

SEQ ID NO: 542213 - protein, 15 aa, Homo sapiens
  CDR3 for alpha chain variable domain of TCR clone 271107 (TRAV8-3, TRAJ45)
CASSYSGGGADVLTF

SEQ ID NO: 542214 - protein, 12 aa, Homo sapiens
  CDR3 for beta chain variable domain of TCR clone 271107 (TRBV29-1, TRBJ2-3)
CSVTGGADTQYF

SEQ ID NO: 542215 - protein, 17 aa, Homo sapiens
  CDR3 for alpha chain variable domain of TCR clone 271108 (TRAV8-6, TRAJ8)
CAVKEGIENTGFQKLGF

SEQ ID NO: 542216 - protein, 15 aa, Homo sapiens
  CDR3 for beta chain variable domain of TCR clone 271108 (TRBV7-2, TRBJ2-1)
CASSSGLAGGNEQFF

SEQ ID NO: 542217 - protein, 14 aa, Homo sapiens
  CDR3 for alpha chain variable domain of TCR clone 271109 (TRAV16, TRAJ15)
CALRPNQAGTALVF

SEQ ID NO: 542218 - protein, 16 aa, Homo sapiens
  CDR3 for beta chain variable domain of TCR clone 271109 (TRBV6-5, TRBJ2-2)
CASSYGRVPDTGELFF

SEQ ID NO: 542219 - protein, 16 aa, Homo sapiens
  CDR3 for alpha chain variable domain of TCR clone 271110 (TRAV3, TRAJ15)
CAVRDRTNQAGTALIF

SEQ ID NO: 542220 - protein, 12 aa, Homo sapiens
  CDR3 for beta chain variable domain of TCR clone 271110 (TRBV11-2, TRBJ2-2)
CASSLPTGELFF

SEQ ID NO: 542221 - protein, 13 aa, Homo sapiens
  CDR3 for alpha chain variable domain of TCR clone 271111 (TRAV8-3, TRAJ44)
CAVEPGTASKLTF

SEQ ID NO: 542222 - protein, 12 aa, Homo sapiens
  CDR3 for beta chain variable domain of TCR clone 271111 (TRBV7-8, TRBJ2-7)
CASSLGDREQYF

SEQ ID NO: 542223 - protein, 11 aa, Homo sapiens
  CDR3 for alpha chain variable domain of TCR clone 271112 (TRAV17, TRAJ49)
CATNTGNQFYF

SEQ ID NO: 542224 - protein, 12 aa, Homo sapiens
  CDR3 for beta chain variable domain of TCR clone 271112 (TRBV2, TRBJ2-7)
CASSGGSGIPYI

SEQ ID NO: 542225 - protein, 15 aa, Homo sapiens
  CDR3 for alpha chain variable domain of TCR clone 271113 (TRAV12-1, TRAJ44)
CVVFVNTGTASKLTF

SEQ ID NO: 542226 - protein, 17 aa, Homo sapiens
  CDR3 for beta chain variable domain of TCR clone 271113 (TRBV7-8, TRBJ2-6)
CASSAGTGGAGANVLTF

SEQ ID NO: 542227 - protein, 17 aa, Homo sapiens
  CDR3 for alpha chain variable domain of TCR clone 271114 (TRAV8-6, TRAJ58)
CAVSSWVGETSGSRLTF

SEQ ID NO: 542228 - protein, 10 aa, Homo sapiens
  CDR3 for beta chain variable domain of TCR clone 271114 (TRBV6-3, TRBJ2-7)
CASSSPGQFS

SEQ ID NO: 542229 - protein, 14 aa, Homo sapiens
  CDR3 for alpha chain variable domain of TCR clone 271115 (TRAV26-1, TRAJ54)
CIVRRTQGAQKLVF

SEQ ID NO: 542230 - protein, 14 aa, Homo sapiens
  CDR3 for beta chain variable domain of TCR clone 271115 (TRBV12-4, TRBJ2-3)
CQQFGLANTDTQYF

SEQ ID NO: 542231 - protein, 17 aa, Homo sapiens
  CDR3 for alpha chain variable domain of TCR clone 271116 (TRAV26-2, TRAJ40)
DAAVSRGNDGGTYKYIF

SEQ ID NO: 542232 - protein, 13 aa, Homo sapiens
  CDR3 for beta chain variable domain of TCR clone 271116 (TRBV10-3, TRBJ2-7)
CASKLAVNYEQYF

SEQ ID NO: 542233 - protein, 12 aa, Homo sapiens
  CDR3 for alpha chain variable domain of TCR clone 271117 (TRAV16, TRAJ49)
CALHEGGNQFYF

SEQ ID NO: 542234 - protein, 13 aa, Homo sapiens
  CDR3 for beta chain variable domain of TCR clone 271117 (TRBV7-9, TRBJ1-2)
CASSLKQNYGYTF

SEQ ID NO: 542235 - protein, 14 aa, Homo sapiens
  CDR3 for alpha chain variable domain of TCR clone 271118 (TRAV39, TRAJ48)
CAVVKDFGNEKLTF

SEQ ID NO: 542236 - protein, 13 aa, Homo sapiens
  CDR3 for beta chain variable domain of TCR clone 271118 (TRBV5-4, TRBJ1-1)
CASSVDLGTEAFF

SEQ ID NO: 542237 - protein, 13 aa, Homo sapiens
  CDR3 for alpha chain variable domain of TCR clone 271119 (TRAV13-1, TRAJ12)
CAASPDSSYKLIF

SEQ ID NO: 542238 - protein, 14 aa, Homo sapiens
  CDR3 for beta chain variable domain of TCR clone 271119 (TRBV19, TRBJ2-7)
CASTVQGRPYEQYF

SEQ ID NO: 542239 - protein, 14 aa, Homo sapiens
  CDR3 for alpha chain variable domain of TCR clone 271120 (TRAV12-2, TRAJ13)
CAVKKTGGYQKVTF

SEQ ID NO: 542240 - protein, 14 aa, Homo sapiens
  CDR3 for beta chain variable domain of TCR clone 271120 (TRBV12-5, TRBJ2-5)
CASGTRTHQETQYF

SEQ ID NO: 542241 - protein, 12 aa, Homo sapiens
  CDR3 for alpha chain variable domain of TCR clone 271121 (TRAV21, TRAJ49)
CAVSWTGNQLYF

SEQ ID NO: 542242 - protein, 18 aa, Homo sapiens
  CDR3 for beta chain variable domain of TCR clone 271121 (TRBV7-8, TRBJ2-1)
CASSPAEGLAGGINEQFF

SEQ ID NO: 542243 - protein, 11 aa, Homo sapiens
  CDR3 for alpha chain variable domain of TCR clone 271122 (TRAV3, TRAJ21)
CAVGNFNKFYF

SEQ ID NO: 542244 - protein, 11 aa, Homo sapiens
  CDR3 for beta chain variable domain of TCR clone 271122 (TRBV6-1, TRBJ2-1)
CASISSNEQFF

SEQ ID NO: 542245 - protein, 15 aa, Homo sapiens
  CDR3 for alpha chain variable domain of TCR clone 271123 (TRAV13-1, TRAJ57)
QVPPLSQGGSEQLVF

SEQ ID NO: 542246 - protein, 17 aa, Homo sapiens
  CDR3 for beta chain variable domain of TCR clone 271123 (TRBV7-3, TRBJ2-3)
CASSLMKRMRGADTQYF

SEQ ID NO: 542247 - protein, 14 aa, Homo sapiens
  CDR3 for alpha chain variable domain of TCR clone 271124 (TRAV17, TRAJ57)
CATDPQGGSEKLVC

SEQ ID NO: 542248 - protein, 18 aa, Homo sapiens
  CDR3 for beta chain variable domain of TCR clone 271124 (TRBV6-6, TRBJ1-3)
CASSYSKWDSISGNTIYF

SEQ ID NO: 542249 - protein, 16 aa, Homo sapiens
  CDR3 for alpha chain variable domain of TCR clone 271125 (TRAV3, TRAJ37)
CAVRGKGSGNTGKLLF

SEQ ID NO: 542250 - protein, 15 aa, Homo sapiens
  CDR3 for beta chain variable domain of TCR clone 271125 (TRBV7-9, TRBJ2-2)
CASGPLDTFPGELFF

SEQ ID NO: 542251 - protein, 15 aa, Homo sapiens
  CDR3 for alpha chain variable domain of TCR clone 271126 (TRAV21, TRAJ53)
CATLNSGGSNYKLTF

SEQ ID NO: 542252 - protein, 15 aa, Homo sapiens
  CDR3 for beta chain variable domain of TCR clone 271126 (TRBV20-1, TRBJ2-7)
CSARDRVSGMVEQYF

SEQ ID NO: 542253 - protein, 13 aa, Homo sapiens
  CDR3 for alpha chain variable domain of TCR clone 271127 (TRAV8-3, TRAJ36)
CAVGATGANTLFF

SEQ ID NO: 542254 - protein, 13 aa, Homo sapiens
  CDR3 for beta chain variable domain of TCR clone 271127 (TRBV12-4, TRBJ1-2)
CASSLRQGKGYTF

SEQ ID NO: 542255 - protein, 12 aa, Homo sapiens
  CDR3 for alpha chain variable domain of TCR clone 271128 (TRAV13-1, TRAJ49)
CAASPMGNQFYF

SEQ ID NO: 542256 - protein, 16 aa, Homo sapiens
  CDR3 for beta chain variable domain of TCR clone 271128 (TRBV13, TRBJ2-2)
CASSPRTGEHTGELFF

SEQ ID NO: 542257 - protein, 13 aa, Homo sapiens
  CDR3 for alpha chain variable domain of TCR clone 271129 (TRAV24, TRAJ42)
CAFSTGSQGNLIF

SEQ ID NO: 542258 - protein, 15 aa, Homo sapiens
  CDR3 for beta chain variable domain of TCR clone 271129 (TRBV6-3, TRBJ2-7)
CASSSPGTVFYEQYF

SEQ ID NO: 542259 - protein, 15 aa, Homo sapiens
  CDR3 for alpha chain variable domain of TCR clone 271130 (TRAV26-2, TRAJ13)
CILRDLSGGYQKVTF

SEQ ID NO: 542260 - protein, 14 aa, Homo sapiens
  CDR3 for beta chain variable domain of TCR clone 271130 (TRBV4-1, TRBJ2-3)
CASSQEGSKDTQYF

SEQ ID NO: 542261 - protein, 17 aa, Homo sapiens
  CDR3 for alpha chain variable domain of TCR clone 271131 (TRAV4, TRAJ42)
CLVGVLNYGGSQGNLIF

SEQ ID NO: 542262 - protein, 11 aa, Homo sapiens
  CDR3 for beta chain variable domain of TCR clone 271131 (TRBV7-9, TRBJ2-7)
CASSLNYEQYF

SEQ ID NO: 542263 - protein, 12 aa, Homo sapiens
  CDR3 for alpha chain variable domain of TCR clone 271132 (TRAV38-2/DV8, TRAJ32)
CAYFARANKLIF

SEQ ID NO: 542264 - protein, 15 aa, Homo sapiens
  CDR3 for beta chain variable domain of TCR clone 271132 (TRBV3-1, TRBJ2-7)
CASSLEPGESYEQYF

SEQ ID NO: 542265 - protein, 11 aa, Homo sapiens
  CDR3 for alpha chain variable domain of TCR clone 271133 (TRAV2, TRAJ13)
CASGVYQKVTF

SEQ ID NO: 542266 - protein, 11 aa, Homo sapiens
  CDR3 for beta chain variable domain of TCR clone 271133 (TRBV5-6, TRBJ2-5)
CASSLERTQYF

SEQ ID NO: 542267 - protein, 13 aa, Homo sapiens
  CDR3 for alpha chain variable domain of TCR clone 271134 (TRAV41, TRAJ22)
CAVYLGSARQLTF

SEQ ID NO: 542268 - protein, 17 aa, Homo sapiens
  CDR3 for beta chain variable domain of TCR clone 271134 (TRBV11-2, TRBJ2-1)
CGSSLYPPGVEYNEQFF

SEQ ID NO: 542269 - protein, 14 aa, Homo sapiens
  CDR3 for alpha chain variable domain of TCR clone 271135 (TRAV12-1, TRAJ17)
CVVNYKAGGNRLTF

SEQ ID NO: 542270 - protein, 17 aa, Homo sapiens
  CDR3 for beta chain variable domain of TCR clone 271135 (TRBV20-1, TRBJ2-1)
CSASSSGLAGSYNEQFF

SEQ ID NO: 542271 - protein, 15 aa, Homo sapiens
  CDR3 for alpha chain variable domain of TCR clone 271136 (TRAV23/DV6, TRAJ18)
CAARYRGSTLGRLYF

SEQ ID NO: 542272 - protein, 14 aa, Homo sapiens
  CDR3 for beta chain variable domain of TCR clone 271136 (TRBV3-1, TRBJ2-5)
CASSQGPDQETQYF

SEQ ID NO: 542273 - protein, 11 aa, Homo sapiens
  CDR3 for alpha chain variable domain of TCR clone 271137 (TRAV2, TRAJ20)
CAVTDDHKLSF

SEQ ID NO: 542274 - protein, 20 aa, Homo sapiens
  CDR3 for beta chain variable domain of TCR clone 271137 (TRBV19, TRBJ2-1)
CASSISRTVTSTRLNNEQFF

SEQ ID NO: 542275 - protein, 14 aa, Homo sapiens
  CDR3 for alpha chain variable domain of TCR clone 271138 (TRAV1-2, TRAJ16)
CAVNRFSDGQKLLF

SEQ ID NO: 542276 - protein, 17 aa, Homo sapiens
  CDR3 for beta chain variable domain of TCR clone 271138 (TRBV11-2, TRBJ2-1)
CASSLALAEFGRNEQFF

SEQ ID NO: 542277 - protein, 17 aa, Homo sapiens
  CDR3 for alpha chain variable domain of TCR clone 271139 (TRAV3, TRAJ6)
CAVSRRTDTGGSYIPTF

SEQ ID NO: 542278 - protein, 16 aa, Homo sapiens
  CDR3 for beta chain variable domain of TCR clone 271139 (TRBV3-1, TRBJ2-5)
CASSPQRGYDPETQYF

SEQ ID NO: 542279 - protein, 18 aa, Homo sapiens
  CDR3 for alpha chain variable domain of TCR clone 271140 (TRAV21, TRAJ52)
CAVRPSPAGGTGYGKLTF

SEQ ID NO: 542280 - protein, 14 aa, Homo sapiens
  CDR3 for beta chain variable domain of TCR clone 271140 (TRBV11-2, TRBJ2-3)
CASSRLARTDTQYF

SEQ ID NO: 542281 - protein, 11 aa, Homo sapiens
  CDR3 for alpha chain variable domain of TCR clone 271141 (TRAV3, TRAJ17)
CAEAAGYKLTF

SEQ ID NO: 542282 - protein, 15 aa, Homo sapiens
  CDR3 for beta chain variable domain of TCR clone 271141 (TRBV12-4, TRBJ2-7)
CASSLGSGGPYEQYF

SEQ ID NO: 542283 - protein, 17 aa, Homo sapiens
  CDR3 for alpha chain variable domain of TCR clone 271142 (TRAV3, TRAJ20)
CTSVLRDSRSNDYKLSF

SEQ ID NO: 542284 - protein, 14 aa, Homo sapiens
  CDR3 for beta chain variable domain of TCR clone 271142 (TRBV20-1, TRBJ2-7)
CSARRGNGIYEQYF

SEQ ID NO: 542285 - protein, 11 aa, Homo sapiens
  CDR3 for alpha chain variable domain of TCR clone 271143 (TRAV21, TRAJ27)
CAVRMQANQPL

SEQ ID NO: 542286 - protein, 17 aa, Homo sapiens
  CDR3 for beta chain variable domain of TCR clone 271143 (TRBV5-1, TRBJ2-5)
CASSPVALGQNQETQYF

SEQ ID NO: 542287 - protein, 15 aa, Homo sapiens
  CDR3 for alpha chain variable domain of TCR clone 271144 (TRAV26-1, TRAJ21)
CIVRVTNYNFNKFYF

SEQ ID NO: 542288 - protein, 16 aa, Homo sapiens
  CDR3 for beta chain variable domain of TCR clone 271144 (TRBV7-9, TRBJ2-3)
CASSLQGNPGTDTQYF

SEQ ID NO: 542289 - protein, 15 aa, Homo sapiens
  CDR3 for alpha chain variable domain of TCR clone 271145 (TRAV8-2, TRAJ24)
CVVSDRTDSWGKLQF

SEQ ID NO: 542290 - protein, 13 aa, Homo sapiens
  CDR3 for beta chain variable domain of TCR clone 271145 (TRBV7-9, TRBJ1-2)
CASSLKQNYGFTF

SEQ ID NO: 542291 - protein, 12 aa, Homo sapiens
  CDR3 for alpha chain variable domain of TCR clone 271146 (TRAV16, TRAJ10)
CSRTGGGNTLTF

SEQ ID NO: 542292 - protein, 13 aa, Homo sapiens
  CDR3 for beta chain variable domain of TCR clone 271146 (TRBV20-1, TRBJ2-7)
CSADPGATYEQYF

SEQ ID NO: 542293 - protein, 16 aa, Homo sapiens
  CDR3 for alpha chain variable domain of TCR clone 271147 (TRAV17, TRAJ22)
CATGPISSGSARQLTF

SEQ ID NO: 542294 - protein, 15 aa, Homo sapiens
  CDR3 for beta chain variable domain of TCR clone 271147 (TRBV29-1, TRBJ2-6)
CSVGDRGSGANVLTF

SEQ ID NO: 542295 - protein, 10 aa, Homo sapiens
  CDR3 for alpha chain variable domain of TCR clone 271148 (TRAV13-2, TRAJ49)
CADTGNQLYF

SEQ ID NO: 542296 - protein, 15 aa, Homo sapiens
  CDR3 for beta chain variable domain of TCR clone 271148 (TRBV6-6, TRBJ1-1)
CASSPRGDVETEAFF

SEQ ID NO: 542297 - protein, 14 aa, Homo sapiens
  CDR3 for alpha chain variable domain of TCR clone 271149 (TRAV3, TRAJ34)
CAVRAPGNPDKLIF

SEQ ID NO: 542298 - protein, 17 aa, Homo sapiens
  CDR3 for beta chain variable domain of TCR clone 271149 (TRBV20-1, TRBJ2-7)
CSAAPGLARGISYEQYF

SEQ ID NO: 542299 - protein, 16 aa, Homo sapiens
  CDR3 for alpha chain variable domain of TCR clone 271150 (TRAV30, TRAJ24)
CGTEIVDADSWGKSQF

SEQ ID NO: 542300 - protein, 17 aa, Homo sapiens
  CDR3 for beta chain variable domain of TCR clone 271150 (TRBV20-1, TRBJ2-1)
CSARDRRRASSYNEQFF

SEQ ID NO: 542301 - protein, 14 aa, Homo sapiens
  CDR3 for alpha chain variable domain of TCR clone 271151 (TRAV3, TRAJ27)
CAVRDDTNAGQSTF

SEQ ID NO: 542302 - protein, 15 aa, Homo sapiens
  CDR3 for beta chain variable domain of TCR clone 271151 (TRBV7-7, TRBJ2-2)
CATSKLAKNTGELFF

SEQ ID NO: 542303 - protein, 15 aa, Homo sapiens
  CDR3 for alpha chain variable domain of TCR clone 271152 (TRAV3, TRAJ22)
CAVRDRGGSARQLTF

SEQ ID NO: 542304 - protein, 14 aa, Homo sapiens
  CDR3 for beta chain variable domain of TCR clone 271152 (TRBV19, TRBJ1-5)
CTSSLGLIGQPQHF

SEQ ID NO: 542305 - protein, 16 aa, Homo sapiens
  CDR3 for alpha chain variable domain of TCR clone 271153 (TRAV8-3, TRAJ52)
CAVQPAGGTSYGKLTF

SEQ ID NO: 542306 - protein, 14 aa, Homo sapiens
  CDR3 for beta chain variable domain of TCR clone 271153 (TRBV25-1, TRBJ1-1)
CASTHLGGNTEAFF

SEQ ID NO: 542307 - protein, 14 aa, Homo sapiens
  CDR3 for alpha chain variable domain of TCR clone 271154 (TRAV9-2, TRAJ39)
CALYIYNAGNMLTF

SEQ ID NO: 542308 - protein, 13 aa, Homo sapiens
  CDR3 for beta chain variable domain of TCR clone 271154 (TRBV7-3, TRBJ2-5)
CASNFRGGETQYF

SEQ ID NO: 542309 - protein, 12 aa, Homo sapiens
  CDR3 for alpha chain variable domain of TCR clone 271155 (TRAV17, TRAJ4)
CATDGGYNKLIF

SEQ ID NO: 542310 - protein, 16 aa, Homo sapiens
  CDR3 for beta chain variable domain of TCR clone 271155 (TRBV7-9, TRBJ1-2)
CASSLGFSSGEDGYTF

SEQ ID NO: 542311 - protein, 14 aa, Homo sapiens
  CDR3 for alpha chain variable domain of TCR clone 271156 (TRAV35, TRAJ13)
CAGSPSGGYQKVTF

SEQ ID NO: 542312 - protein, 17 aa, Homo sapiens
  CDR3 for beta chain variable domain of TCR clone 271156 (TRBV18, TRBJ1-5)
CQLTTCRVCQNNQPQHF

SEQ ID NO: 542313 - protein, 15 aa, Homo sapiens
  CDR3 for alpha chain variable domain of TCR clone 271157 (TRAV3, TRAJ3)
CAVRDRDSSASKIIF

SEQ ID NO: 542314 - protein, 18 aa, Homo sapiens
  CDR3 for beta chain variable domain of TCR clone 271157 (TRBV25-1, TRBJ1-2)
CDSIGLQNGQGLIFGYTF

SEQ ID NO: 542315 - protein, 13 aa, Homo sapiens
  CDR3 for alpha chain variable domain of TCR clone 271158 (TRAV2, TRAJ23)
CAVEANQGGKLIF

SEQ ID NO: 542316 - protein, 17 aa, Homo sapiens
  CDR3 for beta chain variable domain of TCR clone 271158 (TRBV7-3, TRBJ2-3)
CASSLMKRMRGADTQYF

SEQ ID NO: 542317 - protein, 14 aa, Homo sapiens
  CDR3 for alpha chain variable domain of TCR clone 271159 (TRAV2, TRAJ29)
CAVTPPSGNTPLVV

SEQ ID NO: 542318 - protein, 15 aa, Homo sapiens
  CDR3 for beta chain variable domain of TCR clone 271159 (TRBV4-1, TRBJ2-3)
CASGRGQGIPDTQYF

SEQ ID NO: 542319 - protein, 16 aa, Homo sapiens
  CDR3 for alpha chain variable domain of TCR clone 271160 (TRAV27, TRAJ13)
CAGAKSDSGGYQKVTF

SEQ ID NO: 542320 - protein, 15 aa, Homo sapiens
  CDR3 for beta chain variable domain of TCR clone 271160 (TRBV29-1, TRBJ2-1)
CSVGRHALFYNEQCF

SEQ ID NO: 542321 - protein, 12 aa, Homo sapiens
  CDR3 for alpha chain variable domain of TCR clone 271161 (TRAV8-4, TRAJ24)
CAVSGRWGQLQF

SEQ ID NO: 542322 - protein, 14 aa, Homo sapiens
  CDR3 for beta chain variable domain of TCR clone 271161 (TRBV12-4, TRBJ2-5)
CASSSTEGTKTQYF

SEQ ID NO: 542323 - protein, 13 aa, Homo sapiens
  CDR3 for alpha chain variable domain of TCR clone 271162 (TRAV8-3, TRAJ20)
CSVGRPNDYKLSF

SEQ ID NO: 542324 - protein, 13 aa, Homo sapiens
  CDR3 for beta chain variable domain of TCR clone 271162 (TRBV6-5, TRBJ1-4)
CASSYLSQEKLFF

SEQ ID NO: 542325 - protein, 15 aa, Homo sapiens
  CDR3 for alpha chain variable domain of TCR clone 271163 (TRAV12-1, TRAJ44)
CVGFVNTGTASKLTF

SEQ ID NO: 542326 - protein, 16 aa, Homo sapiens
  CDR3 for beta chain variable domain of TCR clone 271163 (TRBV20-1, TRBJ2-5)
CSPGGTSGGYMETQYF

SEQ ID NO: 542327 - protein, 15 aa, Homo sapiens
  CDR3 for alpha chain variable domain of TCR clone 271164 (TRAV25, TRAJ52)
CAGRPVGTSYGKLTF

SEQ ID NO: 542328 - protein, 16 aa, Homo sapiens
  CDR3 for beta chain variable domain of TCR clone 271164 (TRBV12-4, TRBJ1-5)
CASSSGPRGSNQPQHF

SEQ ID NO: 542329 - protein, 14 aa, Homo sapiens
  CDR3 for alpha chain variable domain of TCR clone 271165 (TRAV12-2, TRAJ13)
CAVKKTGGYQKVTF

SEQ ID NO: 542330 - protein, 14 aa, Homo sapiens
  CDR3 for beta chain variable domain of TCR clone 271165 (TRBV14, TRBJ2-7)
CASRHRDKPYEQYF

SEQ ID NO: 542331 - protein, 15 aa, Homo sapiens
  CDR3 for alpha chain variable domain of TCR clone 271166 (TRAV12-1, TRAJ44)
CVADLPTCTASKLTF

SEQ ID NO: 542332 - protein, 13 aa, Homo sapiens
  CDR3 for beta chain variable domain of TCR clone 271166 (TRBV6-5, TRBJ2-5)
CASSPQGGETQYF

SEQ ID NO: 542333 - protein, 14 aa, Homo sapiens
  CDR3 for alpha chain variable domain of TCR clone 271167 (TRAV12-1, TRAJ46)
RVVTAKSSGDKLTF

SEQ ID NO: 542334 - protein, 17 aa, Homo sapiens
  CDR3 for beta chain variable domain of TCR clone 271167 (TRBV4-1, TRBJ2-3)
CASSQDPAGGPLDTQYF

SEQ ID NO: 542335 - protein, 14 aa, Homo sapiens
  CDR3 for alpha chain variable domain of TCR clone 271168 (TRAV27, TRAJ33)
CRSGSRDSNYQLIW

SEQ ID NO: 542336 - protein, 15 aa, Homo sapiens
  CDR3 for beta chain variable domain of TCR clone 271168 (TRBV16, TRBJ1-5)
CASSQSGTADQPQHF

SEQ ID NO: 542337 - protein, 12 aa, Homo sapiens
  CDR3 for alpha chain variable domain of TCR clone 271169 (TRAV30, TRAJ39)
CGRGNAGNMLTF

SEQ ID NO: 542338 - protein, 14 aa, Homo sapiens
  CDR3 for beta chain variable domain of TCR clone 271169 (TRBV10-3, TRBJ2-1)
CAIRTDRGLKEQFF

SEQ ID NO: 542339 - protein, 15 aa, Homo sapiens
  CDR3 for alpha chain variable domain of TCR clone 271170 (TRAV13-1, TRAJ43)
CAATPELGGNNNMRF

SEQ ID NO: 542340 - protein, 15 aa, Homo sapiens
  CDR3 for beta chain variable domain of TCR clone 271170 (TRBV10-2, TRBJ2-6)
CASSEQGTGANVLTF

SEQ ID NO: 542341 - protein, 15 aa, Homo sapiens
  CDR3 for alpha chain variable domain of TCR clone 271171 (TRAV4, TRAJ29)
CLVGAYRSQETHLLS

SEQ ID NO: 542342 - protein, 16 aa, Homo sapiens
  CDR3 for beta chain variable domain of TCR clone 271171 (TRBV6-1, TRBJ1-2)
CASSGAWQGRSHGYTF

SEQ ID NO: 542343 - protein, 16 aa, Homo sapiens
  CDR3 for alpha chain variable domain of TCR clone 271172 (TRAV3, TRAJ6)
CAVRDGLRRRKLHTYI

SEQ ID NO: 542344 - protein, 15 aa, Homo sapiens
  CDR3 for beta chain variable domain of TCR clone 271172 (TRBV5-1, TRBJ2-1)
CASSLAGSSYNEQFF

SEQ ID NO: 542345 - protein, 14 aa, Homo sapiens
  CDR3 for alpha chain variable domain of TCR clone 271173 (TRAV8-3, TRAJ44)
CAVGLTGTASKLTF

SEQ ID NO: 542346 - protein, 16 aa, Homo sapiens
  CDR3 for beta chain variable domain of TCR clone 271173 (TRBV24-1, TRBJ2-3)
CATSDPGTGATDTQYF

SEQ ID NO: 542347 - protein, 23 aa, Homo sapiens
  CDR3 for alpha chain variable domain of TCR clone 271174 (TRAV1-1, TRAJ29)
LLQELQMKDSASYFLGGNTPLFF

SEQ ID NO: 542348 - protein, 13 aa, Homo sapiens
  CDR3 for beta chain variable domain of TCR clone 271174 (TRBV25-1, TRBJ2-7)
CASSEDGDYEQYF

SEQ ID NO: 542349 - protein, 14 aa, Homo sapiens
  CDR3 for alpha chain variable domain of TCR clone 271175 (TRAV12-2, TRAJ17)
CAVLFKAAGTKLTF

SEQ ID NO: 542350 - protein, 17 aa, Homo sapiens
  CDR3 for beta chain variable domain of TCR clone 271175 (TRBV11-2, TRBJ2-1)
CASSLYPPGVEYNEQFF

SEQ ID NO: 542351 - protein, 14 aa, Homo sapiens
  CDR3 for alpha chain variable domain of TCR clone 271176 (TRAV35, TRAJ33)
CWPRGRDSNYQLIW

SEQ ID NO: 542352 - protein, 14 aa, Homo sapiens
  CDR3 for beta chain variable domain of TCR clone 271176 (TRBV25-1, TRBJ1-1)
CASTHLGGNTEAFF

SEQ ID NO: 542353 - protein, 11 aa, Homo sapiens
  CDR3 for alpha chain variable domain of TCR clone 271177 (TRAV1-2, TRAJ31)
CAVNNNARLMF

SEQ ID NO: 542354 - protein, 15 aa, Homo sapiens
  CDR3 for beta chain variable domain of TCR clone 271177 (TRBV28, TRBJ2-1)
CASSVIAGDRSEQFF

SEQ ID NO: 542355 - protein, 14 aa, Homo sapiens
  CDR3 for alpha chain variable domain of TCR clone 271178 (TRAV12-3, TRAJ10)
SHLPLTGGGNKLTF

SEQ ID NO: 542356 - protein, 16 aa, Homo sapiens
  CDR3 for beta chain variable domain of TCR clone 271178 (TRBV20-1, TRBJ2-2)
CSASASGIPGAGELFF

SEQ ID NO: 542357 - protein, 10 aa, Homo sapiens
  CDR3 for alpha chain variable domain of TCR clone 271179 (TRAV21, TRAJ20)
CAVDVGRLQA

SEQ ID NO: 542358 - protein, 15 aa, Homo sapiens
  CDR3 for beta chain variable domain of TCR clone 271179 (TRBV6-1, TRBJ2-5)
CASSEFPLMGETQYF

SEQ ID NO: 542359 - protein, 14 aa, Homo sapiens
  CDR3 for alpha chain variable domain of TCR clone 271180 (TRAV8-3, TRAJ35)
CAVVPQGFGNVLHC

SEQ ID NO: 542360 - protein, 15 aa, Homo sapiens
  CDR3 for beta chain variable domain of TCR clone 271180 (TRBV27, TRBJ2-1)
CASGNGGGPPMSSSS

SEQ ID NO: 542361 - protein, 13 aa, Homo sapiens
  CDR3 for alpha chain variable domain of TCR clone 271181 (TRAV3, TRAJ20)
CAVRDGGDYKLSF

SEQ ID NO: 542362 - protein, 16 aa, Homo sapiens
  CDR3 for beta chain variable domain of TCR clone 271181 (TRBV4-1, TRBJ2-5)
CASSQTSGGPLETQYL

SEQ ID NO: 542363 - protein, 13 aa, Homo sapiens
  CDR3 for alpha chain variable domain of TCR clone 271182 (TRAV12-3, TRAJ7)
CAMSASGNNRLAF

SEQ ID NO: 542364 - protein, 15 aa, Homo sapiens
  CDR3 for beta chain variable domain of TCR clone 271182 (TRBV4-1, TRBJ1-4)
CASSDTGGTNEKLFF

SEQ ID NO: 542365 - protein, 15 aa, Homo sapiens
  CDR3 for alpha chain variable domain of TCR clone 271183 (TRAV14/DV4, TRAJ26)
CAMREGQNYGQNFVF

SEQ ID NO: 542366 - protein, 14 aa, Homo sapiens
  CDR3 for beta chain variable domain of TCR clone 271183 (TRBV7-3, TRBJ2-7)
CASSLKADSYEQYF

SEQ ID NO: 542367 - protein, 17 aa, Homo sapiens
  CDR3 for alpha chain variable domain of TCR clone 271184 (TRAV26-1, TRAJ47)
CIVPSLLYMECGNKLVF

SEQ ID NO: 542368 - protein, 14 aa, Homo sapiens
  CDR3 for beta chain variable domain of TCR clone 271184 (TRBV7-3, TRBJ1-5)
RASSFSGCNQPQHF

SEQ ID NO: 542369 - protein, 13 aa, Homo sapiens
  CDR3 for alpha chain variable domain of TCR clone 271185 (TRAV22, TRAJ29)
CDVGGSGKTPLVF

SEQ ID NO: 542370 - protein, 13 aa, Homo sapiens
  CDR3 for beta chain variable domain of TCR clone 271185 (TRBV4-2, TRBJ1-1)
CASSKAGNTEAFF

SEQ ID NO: 542371 - protein, 14 aa, Homo sapiens
  CDR3 for alpha chain variable domain of TCR clone 271186 (TRAV12-2, TRAJ45)
CAVNIGGGADGLTF

SEQ ID NO: 542372 - protein, 15 aa, Homo sapiens
  CDR3 for beta chain variable domain of TCR clone 271186 (TRBV7-9, TRBJ1-1)
CASSLLEQGGTEAFF

SEQ ID NO: 542373 - protein, 15 aa, Homo sapiens
  CDR3 for alpha chain variable domain of TCR clone 271187 (TRAV35, TRAJ23)
CAGQRGYNQGGKLIF

SEQ ID NO: 542374 - protein, 16 aa, Homo sapiens
  CDR3 for beta chain variable domain of TCR clone 271187 (TRBV27, TRBJ2-1)
CASSFRLAGNYNEQFF

SEQ ID NO: 542375 - protein, 11 aa, Homo sapiens
  CDR3 for alpha chain variable domain of TCR clone 271188 (TRAV35, TRAJ34)
CWARNTDKLIF

SEQ ID NO: 542376 - protein, 13 aa, Homo sapiens
  CDR3 for beta chain variable domain of TCR clone 271188 (TRBV19, TRBJ1-2)
CASSVPGQDGYTF

SEQ ID NO: 542377 - protein, 14 aa, Homo sapiens
  CDR3 for alpha chain variable domain of TCR clone 271189 (TRAV12-3, TRAJ35)
CAMSLIGFGNVLHC

SEQ ID NO: 542378 - protein, 16 aa, Homo sapiens
  CDR3 for beta chain variable domain of TCR clone 271189 (TRBV7-6, TRBJ2-7)
CQRLSSASGNSYEQYF

SEQ ID NO: 542379 - protein, 14 aa, Homo sapiens
  CDR3 for alpha chain variable domain of TCR clone 271190 (TRAV12-2, TRAJ48)
CAVNAFFGNGKLTF

SEQ ID NO: 542380 - protein, 13 aa, Homo sapiens
  CDR3 for beta chain variable domain of TCR clone 271190 (TRBV28, TRBJ2-7)
CAGAQQGLDEQYF

SEQ ID NO: 542381 - protein, 12 aa, Homo sapiens
  CDR3 for alpha chain variable domain of TCR clone 271191 (TRAV29/DV5, TRAJ49)
CPATDTGNQFYF

SEQ ID NO: 542382 - protein, 19 aa, Homo sapiens
  CDR3 for beta chain variable domain of TCR clone 271191 (TRBV25-1, TRBJ2-2)
CAILVYRVDRGRKTGGLFF

SEQ ID NO: 542383 - protein, 12 aa, Homo sapiens
  CDR3 for alpha chain variable domain of TCR clone 271192 (TRAV30, TRAJ43)
CGTEERGNDMRF

SEQ ID NO: 542384 - protein, 13 aa, Homo sapiens
  CDR3 for beta chain variable domain of TCR clone 271192 (TRBV27, TRBJ2-7)
CASSYSQGYEQYF

SEQ ID NO: 542385 - protein, 11 aa, Homo sapiens
  CDR3 for alpha chain variable domain of TCR clone 271193 (TRAV1-2, TRAJ31)
CAVNNNARLMF

SEQ ID NO: 542386 - protein, 15 aa, Homo sapiens
  CDR3 for beta chain variable domain of TCR clone 271193 (TRBV12-4, TRBJ2-2)
CASSWVSGATGELFF

SEQ ID NO: 542387 - protein, 13 aa, Homo sapiens
  CDR3 for alpha chain variable domain of TCR clone 271194 (TRAV21, TRAJ49)
CAVRQSTGYQFYF

SEQ ID NO: 542388 - protein, 13 aa, Homo sapiens
  CDR3 for beta chain variable domain of TCR clone 271194 (TRBV6-6, TRBJ1-5)
CASRAYQDQPQHF

SEQ ID NO: 542389 - protein, 12 aa, Homo sapiens
  CDR3 for alpha chain variable domain of TCR clone 271195 (TRAV3, TRAJ43)
CAVRDPNNDMRF

SEQ ID NO: 542390 - protein, 20 aa, Homo sapiens
  CDR3 for beta chain variable domain of TCR clone 271195 (TRBV11-2, TRBJ2-2)
LRTRPCISVPAALEAGSCFF

SEQ ID NO: 542391 - protein, 14 aa, Homo sapiens
  CDR3 for alpha chain variable domain of TCR clone 271196 (TRAV1-2, TRAJ16)
CAVNRFSDGQKLLF

SEQ ID NO: 542392 - protein, 14 aa, Homo sapiens
  CDR3 for beta chain variable domain of TCR clone 271196 (TRBV7-2, TRBJ1-1)
CASSFLTGTTVAFF

SEQ ID NO: 542393 - protein, 15 aa, Homo sapiens
  CDR3 for alpha chain variable domain of TCR clone 271197 (TRAV12-1, TRAJ44)
CVADLPTGTASKLTF

SEQ ID NO: 542394 - protein, 14 aa, Homo sapiens
  CDR3 for beta chain variable domain of TCR clone 271197 (TRBV6-5, TRBJ1-1)
CASTHLGGNTEAFF

SEQ ID NO: 542395 - protein, 14 aa, Homo sapiens
  CDR3 for alpha chain variable domain of TCR clone 271198 (TRAV1-2, TRAJ8)
CAVREDTGFQKLVF

SEQ ID NO: 542396 - protein, 14 aa, Homo sapiens
  CDR3 for beta chain variable domain of TCR clone 271198 (TRBV5-1, TRBJ2-7)
CASSLEGRTYEQYF

SEQ ID NO: 542397 - protein, 15 aa, Homo sapiens
  CDR3 for alpha chain variable domain of TCR clone 271199 (TRAV12-2, TRAJ3)
CAVNIWYSSASKIIF

SEQ ID NO: 542398 - protein, 14 aa, Homo sapiens
  CDR3 for beta chain variable domain of TCR clone 271199 (TRBV7-2, TRBJ2-7)
CASRSQGAAYEQYF

SEQ ID NO: 542399 - protein, 11 aa, Homo sapiens
  CDR3 for alpha chain variable domain of TCR clone 271200 (TRAV1-2, TRAJ11)
CAVNGYSTLTF

SEQ ID NO: 542400 - protein, 20 aa, Homo sapiens
  CDR3 for beta chain variable domain of TCR clone 271200 (TRBV28, TRBJ2-1)
CASTPIGRSPGLAGGNEQFF

SEQ ID NO: 542401 - protein, 16 aa, Homo sapiens
  CDR3 for alpha chain variable domain of TCR clone 271201 (TRAV3, TRAJ18)
CAVRDGRGSTLGRLYV

SEQ ID NO: 542402 - protein, 14 aa, Homo sapiens
  CDR3 for beta chain variable domain of TCR clone 271201 (TRBV7-8, TRBJ2-5)
CASSATGGQETQYF

SEQ ID NO: 542403 - protein, 13 aa, Homo sapiens
  CDR3 for alpha chain variable domain of TCR clone 271202 (TRAV27, TRAJ27)
CAGGITNAGKSTF

SEQ ID NO: 542404 - protein, 13 aa, Homo sapiens
  CDR3 for beta chain variable domain of TCR clone 271202 (TRBV20-1, TRBJ1-2)
RSASLGVGYGYTF

SEQ ID NO: 542405 - protein, 13 aa, Homo sapiens
  CDR3 for alpha chain variable domain of TCR clone 271203 (TRAV13-1, TRAJ26)
CSPQGPDGQNFVF

SEQ ID NO: 542406 - protein, 15 aa, Homo sapiens
  CDR3 for beta chain variable domain of TCR clone 271203 (TRBV28, TRBJ2-5)
CASSFRQGALETQYF

SEQ ID NO: 542407 - protein, 11 aa, Homo sapiens
  CDR3 for alpha chain variable domain of TCR clone 271204 (TRAV2, TRAJ13)
CASGGYQRVTF

SEQ ID NO: 542408 - protein, 15 aa, Homo sapiens
  CDR3 for beta chain variable domain of TCR clone 271204 (TRBV29-1, TRBJ2-6)
CSVGDRGSGANVLTF

SEQ ID NO: 542409 - protein, 12 aa, Homo sapiens
  CDR3 for alpha chain variable domain of TCR clone 271205 (TRAV12-3, TRAJ17)
CAMTLTGNKLTF

SEQ ID NO: 542410 - protein, 18 aa, Homo sapiens
  CDR3 for beta chain variable domain of TCR clone 271205 (TRBV11-2, TRBJ2-3)
CASSLGGASRGAPNTQCF

SEQ ID NO: 542411 - protein, 14 aa, Homo sapiens
  CDR3 for alpha chain variable domain of TCR clone 271206 (TRAV12-2, TRAJ45)
CAVYSGGGADGLTF

SEQ ID NO: 542412 - protein, 14 aa, Homo sapiens
  CDR3 for beta chain variable domain of TCR clone 271206 (TRBV19, TRBJ2-1)
CASPTFVLSGEQFF

SEQ ID NO: 542413 - protein, 18 aa, Homo sapiens
  CDR3 for alpha chain variable domain of TCR clone 271207 (TRAV17, TRAJ45)
CATSLDLYSGGGADGLTF

SEQ ID NO: 542414 - protein, 13 aa, Homo sapiens
  CDR3 for beta chain variable domain of TCR clone 271207 (TRBV28, TRBJ2-7)
CASSPSGTYEQYF

SEQ ID NO: 542415 - protein, 12 aa, Homo sapiens
  CDR3 for alpha chain variable domain of TCR clone 271208 (TRAV13-1, TRAJ48)
CEANFGNEKLTF

SEQ ID NO: 542416 - protein, 12 aa, Homo sapiens
  CDR3 for beta chain variable domain of TCR clone 271208 (TRBV7-8, TRBJ2-7)
CASSLGDREQYF

SEQ ID NO: 542417 - protein, 12 aa, Homo sapiens
  CDR3 for alpha chain variable domain of TCR clone 271209 (TRAV12-3, TRAJ17)
CAITLTGNKLTF

SEQ ID NO: 542418 - protein, 14 aa, Homo sapiens
  CDR3 for beta chain variable domain of TCR clone 271209 (TRBV15, TRBJ2-5)
CATSRVSVRETQYF

SEQ ID NO: 542419 - protein, 11 aa, Homo sapiens
  CDR3 for alpha chain variable domain of TCR clone 271210 (TRAV27, TRAJ47)
SIVEYGNKLVF

SEQ ID NO: 542420 - protein, 18 aa, Homo sapiens
  CDR3 for beta chain variable domain of TCR clone 271210 (TRBV2, TRBJ2-1)
CASRGLAGGPRTNNEQFF

SEQ ID NO: 542421 - protein, 10 aa, Homo sapiens
  CDR3 for alpha chain variable domain of TCR clone 271211 (TRAV13-1, TRAJ30)
CAARDDKIIF

SEQ ID NO: 542422 - protein, 15 aa, Homo sapiens
  CDR3 for beta chain variable domain of TCR clone 271211 (TRBV9, TRBJ1-6)
CASSVAGTGDSPLHC

SEQ ID NO: 542423 - protein, 13 aa, Homo sapiens
  CDR3 for alpha chain variable domain of TCR clone 271212 (TRAV20, TRAJ42)
CRPVGGSQGNLIF

SEQ ID NO: 542424 - protein, 10 aa, Homo sapiens
  CDR3 for beta chain variable domain of TCR clone 271212 (TRBV2, TRBJ2-1)
CASTRTEQFF

SEQ ID NO: 542425 - protein, 15 aa, Homo sapiens
  CDR3 for alpha chain variable domain of TCR clone 271213 (TRAV35, TRAJ52)
CAGPRGGTSYGKLTF

SEQ ID NO: 542426 - protein, 14 aa, Homo sapiens
  CDR3 for beta chain variable domain of TCR clone 271213 (TRBV7-9, TRBJ2-7)
CASSIGQGAGEQYF

SEQ ID NO: 542427 - protein, 15 aa, Homo sapiens
  CDR3 for alpha chain variable domain of TCR clone 271214 (TRAV2, TRAJ24)
YAVVRLKNSWGKLQF

SEQ ID NO: 542428 - protein, 17 aa, Homo sapiens
  CDR3 for beta chain variable domain of TCR clone 271214 (TRBV13, TRBJ2-3)
CASSLSRVAGGRNTQYF

SEQ ID NO: 542429 - protein, 15 aa, Homo sapiens
  CDR3 for alpha chain variable domain of TCR clone 271215 (TRAV26-1, TRAJ23)
CIVRVAGYQGGKLIF

SEQ ID NO: 542430 - protein, 12 aa, Homo sapiens
  CDR3 for beta chain variable domain of TCR clone 271215 (TRBV7-8, TRBJ2-7)
CASSLGDREQYF

SEQ ID NO: 542431 - protein, 13 aa, Homo sapiens
  CDR3 for alpha chain variable domain of TCR clone 271216 (TRAV13-1, TRAJ5)
CAARVTGRRALTF

SEQ ID NO: 542432 - protein, 14 aa, Homo sapiens
  CDR3 for beta chain variable domain of TCR clone 271216 (TRBV7-9, TRBJ2-5)
CASSPAQDQETQYF

SEQ ID NO: 542433 - protein, 18 aa, Homo sapiens
  CDR3 for alpha chain variable domain of TCR clone 271217 (TRAV21, TRAJ52)
CAVMPSPAGGTSYGKLTF

SEQ ID NO: 542434 - protein, 15 aa, Homo sapiens
  CDR3 for beta chain variable domain of TCR clone 271217 (TRBV20-1, TRBJ1-5)
CSAFKNGQRNQPQHF

SEQ ID NO: 542435 - protein, 18 aa, Homo sapiens
  CDR3 for alpha chain variable domain of TCR clone 271218 (TRAV21, TRAJ52)
CAVRPSPAGGTSYGKMTF

SEQ ID NO: 542436 - protein, 17 aa, Homo sapiens
  CDR3 for beta chain variable domain of TCR clone 271218 (TRBV13, TRBJ2-3)
RASSLSRVAGGRNTQYF

SEQ ID NO: 542437 - protein, 13 aa, Homo sapiens
  CDR3 for alpha chain variable domain of TCR clone 271219 (TRAV20, TRAJ37)
CAGRYSNTGKLIF

SEQ ID NO: 542438 - protein, 11 aa, Homo sapiens
  CDR3 for beta chain variable domain of TCR clone 271219 (TRBV12-4, TRBJ2-3)
CASTATDTQYF

SEQ ID NO: 542439 - protein, 14 aa, Homo sapiens
  CDR3 for alpha chain variable domain of TCR clone 271220 (TRAV38-1, TRAJ39)
CAFAYNNAGNMLTF

SEQ ID NO: 542440 - protein, 13 aa, Homo sapiens
  CDR3 for beta chain variable domain of TCR clone 271220 (TRBV27, TRBJ2-1)
CASRTLGVGEQFF

SEQ ID NO: 542441 - protein, 16 aa, Homo sapiens
  CDR3 for alpha chain variable domain of TCR clone 271221 (TRAV8-6, TRAJ28)
CAVTSKPGAGSYPLTF

SEQ ID NO: 542442 - protein, 16 aa, Homo sapiens
  CDR3 for beta chain variable domain of TCR clone 271221 (TRBV12-4, TRBJ2-5)
CASSWRPSGDLETQYF

SEQ ID NO: 542443 - protein, 10 aa, Homo sapiens
  CDR3 for alpha chain variable domain of TCR clone 271222 (TRAV38-2/DV8, TRAJ40)
CASGTYKYIF

SEQ ID NO: 542444 - protein, 17 aa, Homo sapiens
  CDR3 for beta chain variable domain of TCR clone 271222 (TRBV18, TRBJ2-2)
CASSQRSSGQGPGELFF

SEQ ID NO: 542445 - protein, 18 aa, Homo sapiens
  CDR3 for alpha chain variable domain of TCR clone 271223 (TRAV13-1, TRAJ52)
CAAKNPNAGGTSYRKMTF

SEQ ID NO: 542446 - protein, 15 aa, Homo sapiens
  CDR3 for beta chain variable domain of TCR clone 271223 (TRBV28, TRBJ2-1)
CASSIIAGGRSEKFF

SEQ ID NO: 542447 - protein, 16 aa, Homo sapiens
  CDR3 for alpha chain variable domain of TCR clone 271224 (TRAV26-1, TRAJ36)
CIGRVPDQTGANNLFF

SEQ ID NO: 542448 - protein, 12 aa, Homo sapiens
  CDR3 for beta chain variable domain of TCR clone 271224 (TRBV29-1, TRBJ2-3)
CSVTGGADTQYF

SEQ ID NO: 542449 - protein, 13 aa, Homo sapiens
  CDR3 for alpha chain variable domain of TCR clone 271225 (TRAV27, TRAJ49)
CAPRPYTGNQFYF

SEQ ID NO: 542450 - protein, 15 aa, Homo sapiens
  CDR3 for beta chain variable domain of TCR clone 271225 (TRBV7-2, TRBJ2-1)
CASSSGLAGGNEQFF

SEQ ID NO: 542451 - protein, 15 aa, Homo sapiens
  CDR3 for alpha chain variable domain of TCR clone 271226 (TRAV8-3, )
CAVVTTRIPDIQNPD

SEQ ID NO: 542452 - protein, 14 aa, Homo sapiens
  CDR3 for beta chain variable domain of TCR clone 271226 (TRBV11-2, TRBJ2-7)
CASSPSTTSYEQYF

SEQ ID NO: 542453 - protein, 12 aa, Homo sapiens
  CDR3 for alpha chain variable domain of TCR clone 271227 (TRAV21, TRAJ24)
CAVMDSWGKLHF

SEQ ID NO: 542454 - protein, 16 aa, Homo sapiens
  CDR3 for beta chain variable domain of TCR clone 271227 (TRBV13, TRBJ2-2)
CASSEVFGANTGELFF

SEQ ID NO: 542455 - protein, 12 aa, Homo sapiens
  CDR3 for alpha chain variable domain of TCR clone 271228 (TRAV12-3, TRAJ29)
CAAREGNTPLVF

SEQ ID NO: 542456 - protein, 12 aa, Homo sapiens
  CDR3 for beta chain variable domain of TCR clone 271228 (TRBV11-2, TRBJ2-2)
CASSLGGGELFF

SEQ ID NO: 542457 - protein, 16 aa, Homo sapiens
  CDR3 for alpha chain variable domain of TCR clone 271229 (TRAV30, TRAJ24)
CGTEIVDADSWGKFQF

SEQ ID NO: 542458 - protein, 14 aa, Homo sapiens
  CDR3 for beta chain variable domain of TCR clone 271229 (TRBV7-2, TRBJ1-1)
CASSFLTGTPEAFF

SEQ ID NO: 542459 - protein, 11 aa, Homo sapiens
  CDR3 for alpha chain variable domain of TCR clone 271230 (TRAV13-1, TRAJ6)
CATLGSYIPTF

SEQ ID NO: 542460 - protein, 14 aa, Homo sapiens
  CDR3 for beta chain variable domain of TCR clone 271230 (TRBV7-8, TRBJ2-3)
CASSLEAGTDTQYF

SEQ ID NO: 542461 - protein, 14 aa, Homo sapiens
  CDR3 for alpha chain variable domain of TCR clone 271231 (TRAV1-2, TRAJ16)
CAVNRFSDGQKLLF

SEQ ID NO: 542462 - protein, 13 aa, Homo sapiens
  CDR3 for beta chain variable domain of TCR clone 271231 (TRBV27, TRBJ1-4)
CASSLMGDETLFF

SEQ ID NO: 542463 - protein, 12 aa, Homo sapiens
  CDR3 for alpha chain variable domain of TCR clone 271232 (TRAV21, TRAJ29)
CAVTSGNTPLVF

SEQ ID NO: 542464 - protein, 15 aa, Homo sapiens
  CDR3 for beta chain variable domain of TCR clone 271232 (TRBV12-4, TRBJ1-2)
CASRLGVAGIYGYTF

SEQ ID NO: 542465 - protein, 14 aa, Homo sapiens
  CDR3 for alpha chain variable domain of TCR clone 271233 (TRAV13-2, TRAJ6)
SAERGSGGSYIPTF

SEQ ID NO: 542466 - protein, 13 aa, Homo sapiens
  CDR3 for beta chain variable domain of TCR clone 271233 (TRBV19, TRBJ1-2)
CASSQGQVYGYTF

SEQ ID NO: 542467 - protein, 12 aa, Homo sapiens
  CDR3 for alpha chain variable domain of TCR clone 271234 (TRAV25, TRAJ16)
CAGQQDGQKLLF

SEQ ID NO: 542468 - protein, 13 aa, Homo sapiens
  CDR3 for beta chain variable domain of TCR clone 271234 (TRBV5-5, TRBJ1-2)
CASSFWRGEDYTF

SEQ ID NO: 542469 - protein, 15 aa, Homo sapiens
  CDR3 for alpha chain variable domain of TCR clone 271235 (TRAV8-3, TRAJ45)
CASSYSGGGADGLTF

SEQ ID NO: 542470 - protein, 18 aa, Homo sapiens
  CDR3 for beta chain variable domain of TCR clone 271235 (TRBV25-1, TRBJ1-2)
CASSGLQNGQGLIFGYTF

SEQ ID NO: 542471 - protein, 13 aa, Homo sapiens
  CDR3 for alpha chain variable domain of TCR clone 271236 (TRAV14/DV4, TRAJ23)
CAMREVKGGKLIF

SEQ ID NO: 542472 - protein, 14 aa, Homo sapiens
  CDR3 for beta chain variable domain of TCR clone 271236 (TRBV29-1, TRBJ1-3)
CSVADRVVGNTIYF

SEQ ID NO: 542473 - protein, 16 aa, Homo sapiens
  CDR3 for alpha chain variable domain of TCR clone 271237 (TRAV12-3, TRAJ53)
CAMSPGSGGSNYKLTF

SEQ ID NO: 542474 - protein, 13 aa, Homo sapiens
  CDR3 for beta chain variable domain of TCR clone 271237 (TRBV9, TRBJ2-7)
CASSASDSYEQYF

SEQ ID NO: 542475 - protein, 12 aa, Homo sapiens
  CDR3 for alpha chain variable domain of TCR clone 271238 (TRAV13-2, TRAJ54)
CGAHEGAQKLVF

SEQ ID NO: 542476 - protein, 13 aa, Homo sapiens
  CDR3 for beta chain variable domain of TCR clone 271238 (TRBV7-2, TRBJ1-6)
CASSLVGSSPLHF

SEQ ID NO: 542477 - protein, 16 aa, Homo sapiens
  CDR3 for alpha chain variable domain of TCR clone 271239 (TRAV8-2, TRAJ45)
CVVSEGTGGGADGLTF

SEQ ID NO: 542478 - protein, 16 aa, Homo sapiens
  CDR3 for beta chain variable domain of TCR clone 271239 (TRBV6-5, TRBJ2-7)
CASSSDPTSGFYEQYF

SEQ ID NO: 542479 - protein, 15 aa, Homo sapiens
  CDR3 for alpha chain variable domain of TCR clone 271240 (TRAV17, TRAJ57)
CATGPSQSGAEKLVF

SEQ ID NO: 542480 - protein, 15 aa, Homo sapiens
  CDR3 for beta chain variable domain of TCR clone 271240 (TRBV25-1, TRBJ1-4)
CASSPGDSTNEKLFF

SEQ ID NO: 542481 - protein, 14 aa, Homo sapiens
  CDR3 for alpha chain variable domain of TCR clone 271241 (TRAV13-1, TRAJ35)
CAASKGGFVYVLHC

SEQ ID NO: 542482 - protein, 13 aa, Homo sapiens
  CDR3 for beta chain variable domain of TCR clone 271241 (TRBV7-3, TRBJ1-1)
CASSQDWGAEAFF

SEQ ID NO: 542483 - protein, 14 aa, Homo sapiens
  CDR3 for alpha chain variable domain of TCR clone 271242 (TRAV23/DV6, TRAJ17)
CAASIGAAGNTLTF

SEQ ID NO: 542484 - protein, 12 aa, Homo sapiens
  CDR3 for beta chain variable domain of TCR clone 271242 (TRBV20-1, TRBJ2-5)
CSAGGAGETQYF

SEQ ID NO: 542485 - protein, 12 aa, Homo sapiens
  CDR3 for alpha chain variable domain of TCR clone 271243 (TRAV12-3, TRAJ20)
CAMVRGDYKLSF

SEQ ID NO: 542486 - protein, 16 aa, Homo sapiens
  CDR3 for beta chain variable domain of TCR clone 271243 (TRBV5-1, TRBJ2-3)
CASSLGLVVYTDTQYF

SEQ ID NO: 542487 - protein, 14 aa, Homo sapiens
  CDR3 for alpha chain variable domain of TCR clone 271244 (TRAV12-1, TRAJ17)
CVVNYKAAGNKLTF

SEQ ID NO: 542488 - protein, 14 aa, Homo sapiens
  CDR3 for beta chain variable domain of TCR clone 271244 (TRBV13, TRBJ2-7)
CASSGLAGLYEQYF

SEQ ID NO: 542489 - protein, 12 aa, Homo sapiens
  CDR3 for alpha chain variable domain of TCR clone 271245 (TRAV12-2, TRAJ44)
CADTGTASKLTF

SEQ ID NO: 542490 - protein, 17 aa, Homo sapiens
  CDR3 for beta chain variable domain of TCR clone 271245 (TRBV20-1, TRBJ1-1)
CSARGTGRSYGNTGAFF

SEQ ID NO: 542491 - protein, 12 aa, Homo sapiens
  CDR3 for alpha chain variable domain of TCR clone 271246 (TRAV26-2, TRAJ43)
CILAYNNNDMRF

SEQ ID NO: 542492 - protein, 13 aa, Homo sapiens
  CDR3 for beta chain variable domain of TCR clone 271246 (TRBV9, TRBJ2-1)
CASSPSGGNEQFF

SEQ ID NO: 542493 - protein, 15 aa, Homo sapiens
  CDR3 for alpha chain variable domain of TCR clone 271247 (TRAV12-3, TRAJ42)
CAMSGHGGSQGNLIF

SEQ ID NO: 542494 - protein, 13 aa, Homo sapiens
  CDR3 for beta chain variable domain of TCR clone 271247 (TRBV12-4, TRBJ1-2)
CASSLRQGKGYTF

SEQ ID NO: 542495 - protein, 13 aa, Homo sapiens
  CDR3 for alpha chain variable domain of TCR clone 271248 (TRAV3, TRAJ15)
CAVRDQAVTALIF

SEQ ID NO: 542496 - protein, 14 aa, Homo sapiens
  CDR3 for beta chain variable domain of TCR clone 271248 (TRBV11-1, TRBJ2-1)
CASSATTSGSIQFF

SEQ ID NO: 542497 - protein, 12 aa, Homo sapiens
  CDR3 for alpha chain variable domain of TCR clone 271249 (TRAV12-3, TRAJ17)
CAMTLTGNKLTF

SEQ ID NO: 542498 - protein, 12 aa, Homo sapiens
  CDR3 for beta chain variable domain of TCR clone 271249 (TRBV7-8, TRBJ2-7)
CASSIGDREQYF

SEQ ID NO: 542499 - protein, 15 aa, Homo sapiens
  CDR3 for alpha chain variable domain of TCR clone 271250 (TRAV8-3, TRAJ27)
CAVGPSKTNAGKSTF

SEQ ID NO: 542500 - protein, 17 aa, Homo sapiens
  CDR3 for beta chain variable domain of TCR clone 271250 (TRBV5-1, TRBJ2-5)
CASSLLGLAANQETQYF

SEQ ID NO: 542501 - protein, 14 aa, Homo sapiens
  CDR3 for alpha chain variable domain of TCR clone 271251 (TRAV13-1, TRAJ35)
CAASKGGFGNVLHR

SEQ ID NO: 542502 - protein, 13 aa, Homo sapiens
  CDR3 for beta chain variable domain of TCR clone 271251 (TRBV7-3, TRBJ1-1)
CASSQDWGAEAFF

SEQ ID NO: 542503 - protein, 14 aa, Homo sapiens
  CDR3 for alpha chain variable domain of TCR clone 271252 (TRAV26-1, TRAJ38)
CIADNAGNNRKMIW

SEQ ID NO: 542504 - protein, 15 aa, Homo sapiens
  CDR3 for beta chain variable domain of TCR clone 271252 (TRBV7-6, TRBJ1-4)
CASSLGAGAGEKLFF

SEQ ID NO: 542505 - protein, 15 aa, Homo sapiens
  CDR3 for alpha chain variable domain of TCR clone 271253 (TRAV23/DV6, TRAJ13)
YAAWPGGGGYQKVTF

SEQ ID NO: 542506 - protein, 17 aa, Homo sapiens
  CDR3 for beta chain variable domain of TCR clone 271253 (TRBV19, TRBJ2-7)
CASSISFYDSYPYEQYF

SEQ ID NO: 542507 - protein, 15 aa, Homo sapiens
  CDR3 for alpha chain variable domain of TCR clone 271254 (TRAV38-1, TRAJ37)
CAFVHGSVNTGKLIF

SEQ ID NO: 542508 - protein, 12 aa, Homo sapiens
  CDR3 for beta chain variable domain of TCR clone 271254 (TRBV7-9, TRBJ2-7)
CASSFGSYEQYF

SEQ ID NO: 542509 - protein, 14 aa, Homo sapiens
  CDR3 for alpha chain variable domain of TCR clone 271255 (TRAV8-3, TRAJ4)
CAVGASGGYNKLIF

SEQ ID NO: 542510 - protein, 16 aa, Homo sapiens
  CDR3 for beta chain variable domain of TCR clone 271255 (TRBV4-3, TRBJ2-2)
CASSHLEGSGTGELFF

SEQ ID NO: 542511 - protein, 12 aa, Homo sapiens
  CDR3 for alpha chain variable domain of TCR clone 271256 (TRAV12-3, TRAJ41)
CAMSYSGYALNF

SEQ ID NO: 542512 - protein, 17 aa, Homo sapiens
  CDR3 for beta chain variable domain of TCR clone 271256 (TRBV2, TRBJ1-6)
CASSLRSGGLMTSPLHF

SEQ ID NO: 542513 - protein, 12 aa, Homo sapiens
  CDR3 for alpha chain variable domain of TCR clone 271257 (TRAV23/DV6, TRAJ30)
CAASERDDKIIF

SEQ ID NO: 542514 - protein, 14 aa, Homo sapiens
  CDR3 for beta chain variable domain of TCR clone 271257 (TRBV18, TRBJ2-7)
CASSPRGGAYEQYF

SEQ ID NO: 542515 - protein, 16 aa, Homo sapiens
  CDR3 for alpha chain variable domain of TCR clone 271258 (TRAV13-2, TRAJ37)
CAENIRGSSNTGKLIF

SEQ ID NO: 542516 - protein, 17 aa, Homo sapiens
  CDR3 for beta chain variable domain of TCR clone 271258 (TRBV11-2, TRBJ2-1)
CASSLYPPGVEYNEQFF

SEQ ID NO: 542517 - protein, 14 aa, Homo sapiens
  CDR3 for alpha chain variable domain of TCR clone 271259 (TRAV29/DV5, TRAJ44)
CAASETGTASKLTF

SEQ ID NO: 542518 - protein, 16 aa, Homo sapiens
  CDR3 for beta chain variable domain of TCR clone 271259 (TRBV7-9, TRBJ1-3)
CASSQTSGLRMGTIYF

SEQ ID NO: 542519 - protein, 14 aa, Homo sapiens
  CDR3 for alpha chain variable domain of TCR clone 271260 (TRAV8-3, TRAJ39)
CAVGANNAGNMLTF

SEQ ID NO: 542520 - protein, 14 aa, Homo sapiens
  CDR3 for beta chain variable domain of TCR clone 271260 (TRBV11-2, TRBJ2-7)
CASSLVPGGDEQYF

SEQ ID NO: 542521 - protein, 11 aa, Homo sapiens
  CDR3 for alpha chain variable domain of TCR clone 271261 (TRAV2, TRAJ13)
CASGGYQKVTF

SEQ ID NO: 542522 - protein, 15 aa, Homo sapiens
  CDR3 for beta chain variable domain of TCR clone 271261 (TRBV5-7, TRBJ2-1)
CASSRRLAGDNEQFF

SEQ ID NO: 542523 - protein, 11 aa, Homo sapiens
  CDR3 for alpha chain variable domain of TCR clone 271262 (TRAV17, TRAJ43)
CATPRSNDMRF

SEQ ID NO: 542524 - protein, 15 aa, Homo sapiens
  CDR3 for beta chain variable domain of TCR clone 271262 (TRBV2, TRBJ2-7)
CASTLLGSGATEQYF

SEQ ID NO: 542525 - protein, 16 aa, Homo sapiens
  CDR3 for alpha chain variable domain of TCR clone 271263 (TRAV27, TRAJ13)
CAGAKSDSGGYQKVTF

SEQ ID NO: 542526 - protein, 12 aa, Homo sapiens
  CDR3 for beta chain variable domain of TCR clone 271263 (TRBV20-1, TRBJ2-5)
CRVAGAGETQYF

SEQ ID NO: 542527 - protein, 15 aa, Homo sapiens
  CDR3 for alpha chain variable domain of TCR clone 271264 (TRAV13-1, TRAJ44)
CAARRGGGTASKLTF

SEQ ID NO: 542528 - protein, 13 aa, Homo sapiens
  CDR3 for beta chain variable domain of TCR clone 271264 (TRBV4-1, TRBJ1-1)
CASSQLGTGEAFF

SEQ ID NO: 542529 - protein, 11 aa, Homo sapiens
  CDR3 for alpha chain variable domain of TCR clone 271265 (TRAV4, TRAJ31)
CLVGDNARLMF

SEQ ID NO: 542530 - protein, 16 aa, Homo sapiens
  CDR3 for beta chain variable domain of TCR clone 271265 (TRBV7-3, TRBJ2-1)
CASSLSSGGGAKEQFF

SEQ ID NO: 542531 - protein, 18 aa, Homo sapiens
  CDR3 for alpha chain variable domain of TCR clone 271266 (TRAV21, TRAJ52)
CAVRPFPAGGTSYGKLTF

SEQ ID NO: 542532 - protein, 15 aa, Homo sapiens
  CDR3 for beta chain variable domain of TCR clone 271266 (TRBV19, TRBJ1-1)
RASTSGQIQNTEAFF

SEQ ID NO: 542533 - protein, 14 aa, Homo sapiens
  CDR3 for alpha chain variable domain of TCR clone 271267 (TRAV17, TRAJ57)
CATDPQGGSENLVF

SEQ ID NO: 542534 - protein, 14 aa, Homo sapiens
  CDR3 for beta chain variable domain of TCR clone 271267 (TRBV7-8, TRBJ2-7)
CTSSPRDRVYEQYF

SEQ ID NO: 542535 - protein, 14 aa, Homo sapiens
  CDR3 for alpha chain variable domain of TCR clone 271268 (TRAV12-3, TRAJ29)
CAMRFYSGNTPLVF

SEQ ID NO: 542536 - protein, 15 aa, Homo sapiens
  CDR3 for beta chain variable domain of TCR clone 271268 (TRBV5-1, TRBJ2-3)
CASSPGGARTDAQYF

SEQ ID NO: 542537 - protein, 16 aa, Homo sapiens
  CDR3 for alpha chain variable domain of TCR clone 271269 (TRAV3, TRAJ21)
CAVRDIERGNFNKFFF

SEQ ID NO: 542538 - protein, 13 aa, Homo sapiens
  CDR3 for beta chain variable domain of TCR clone 271269 (TRBV2, TRBJ1-1)
CASSEGGNTEAFF

SEQ ID NO: 542539 - protein, 12 aa, Homo sapiens
  CDR3 for alpha chain variable domain of TCR clone 271270 (TRAV8-6, TRAJ11)
CAVSSEYSTLTF

SEQ ID NO: 542540 - protein, 18 aa, Homo sapiens
  CDR3 for beta chain variable domain of TCR clone 271270 (TRBV25-1, TRBJ1-2)
CASSGLQNGQGLIFGYTF

SEQ ID NO: 542541 - protein, 11 aa, Homo sapiens
  CDR3 for alpha chain variable domain of TCR clone 271271 (TRAV20, TRAJ23)
CACNQGGKLIF

SEQ ID NO: 542542 - protein, 13 aa, Homo sapiens
  CDR3 for beta chain variable domain of TCR clone 271271 (TRBV12-4, TRBJ1-2)
CASSLRQGKGYTF

SEQ ID NO: 542543 - protein, 12 aa, Homo sapiens
  CDR3 for alpha chain variable domain of TCR clone 271272 (TRAV12-1, TRAJ40)
CVVYSGTYKYIF

SEQ ID NO: 542544 - protein, 13 aa, Homo sapiens
  CDR3 for beta chain variable domain of TCR clone 271272 (TRBV4-1, TRBJ2-1)
CASSQEVQYEQFF

SEQ ID NO: 542545 - protein, 14 aa, Homo sapiens
  CDR3 for alpha chain variable domain of TCR clone 271273 (TRAV13-1, TRAJ40)
CAARSTSGTYKYIF

SEQ ID NO: 542546 - protein, 15 aa, Homo sapiens
  CDR3 for beta chain variable domain of TCR clone 271273 (TRBV18, TRBJ1-5)
CAISETGGNNQPQHF

SEQ ID NO: 542547 - protein, 12 aa, Homo sapiens
  CDR3 for alpha chain variable domain of TCR clone 271274 (TRAV12-3, TRAJ17)
CAMTLTGNKLTF

SEQ ID NO: 542548 - protein, 14 aa, Homo sapiens
  CDR3 for beta chain variable domain of TCR clone 271274 (TRBV19, TRBJ2-1)
CASPTFFLSGEHFF

SEQ ID NO: 542549 - protein, 14 aa, Homo sapiens
  CDR3 for alpha chain variable domain of TCR clone 271275 (TRAV27, TRAJ17)
CRSTIRAAGTKLTF

SEQ ID NO: 542550 - protein, 16 aa, Homo sapiens
  CDR3 for beta chain variable domain of TCR clone 271275 (TRBV5-7, TRBJ2-5)
CASALAPAGGRETQYF

SEQ ID NO: 542551 - protein, 11 aa, Homo sapiens
  CDR3 for alpha chain variable domain of TCR clone 271276 (TRAV8-4, TRAJ11)
CAVSDDSTLTF

SEQ ID NO: 542552 - protein, 14 aa, Homo sapiens
  CDR3 for beta chain variable domain of TCR clone 271276 (TRBV6-3, TRBJ1-5)
CASSYSRFAQHQHF

SEQ ID NO: 542553 - protein, 11 aa, Homo sapiens
  CDR3 for alpha chain variable domain of TCR clone 271277 (TRAV2, TRAJ13)
CASGGYQKVTF

SEQ ID NO: 542554 - protein, 14 aa, Homo sapiens
  CDR3 for beta chain variable domain of TCR clone 271277 (TRBV6-3, TRBJ1-1)
CASSNLLPGAEAYF

SEQ ID NO: 542555 - protein, 12 aa, Homo sapiens
  CDR3 for alpha chain variable domain of TCR clone 271278 (TRAV12-2, TRAJ4)
GWPEGGYNKLIF

SEQ ID NO: 542556 - protein, 15 aa, Homo sapiens
  CDR3 for beta chain variable domain of TCR clone 271278 (TRBV28, TRBJ1-5)
CASSLSGYSNQPQHF

SEQ ID NO: 542557 - protein, 13 aa, Homo sapiens
  CDR3 for alpha chain variable domain of TCR clone 271279 (TRAV23/DV6, TRAJ58)
CAASEIGGSRVTF

SEQ ID NO: 542558 - protein, 15 aa, Homo sapiens
  CDR3 for beta chain variable domain of TCR clone 271279 (TRBV19, TRBJ1-1)
CASTSGQIQNTEAFF

SEQ ID NO: 542559 - protein, 12 aa, Homo sapiens
  CDR3 for alpha chain variable domain of TCR clone 271280 (TRAV13-1, TRAJ16)
CAAVSDGKKLLF

SEQ ID NO: 542560 - protein, 16 aa, Homo sapiens
  CDR3 for beta chain variable domain of TCR clone 271280 (TRBV7-2, TRBJ2-1)
CASSLVAGAGYNEQFF

SEQ ID NO: 542561 - protein, 12 aa, Homo sapiens
  CDR3 for alpha chain variable domain of TCR clone 271281 (TRAV27, TRAJ35)
CAGADFGNVLHC

SEQ ID NO: 542562 - protein, 12 aa, Homo sapiens
  CDR3 for beta chain variable domain of TCR clone 271281 (TRBV13, TRBJ2-1)
CASSFGAQEQFF

SEQ ID NO: 542563 - protein, 14 aa, Homo sapiens
  CDR3 for alpha chain variable domain of TCR clone 271282 (TRAV12-2, TRAJ9)
CAANMEGGGFKTIF

SEQ ID NO: 542564 - protein, 14 aa, Homo sapiens
  CDR3 for beta chain variable domain of TCR clone 271282 (TRBV2, TRBJ2-5)
CASSEVLAQETQYF

SEQ ID NO: 542565 - protein, 15 aa, Homo sapiens
  CDR3 for alpha chain variable domain of TCR clone 271283 (TRAV12-3, TRAJ6)
CAMSATTGGRYIPTF

SEQ ID NO: 542566 - protein, 15 aa, Homo sapiens
  CDR3 for beta chain variable domain of TCR clone 271283 (TRBV28, TRBJ2-5)
CASSPPWSYQETQYF

SEQ ID NO: 542567 - protein, 16 aa, Homo sapiens
  CDR3 for alpha chain variable domain of TCR clone 271284 (TRAV30, TRAJ44)
CGTEDKRTGTASKLTF

SEQ ID NO: 542568 - protein, 13 aa, Homo sapiens
  CDR3 for beta chain variable domain of TCR clone 271284 (TRBV11-2, TRBJ2-5)
CASSSTGEETQYF

SEQ ID NO: 542569 - protein, 14 aa, Homo sapiens
  CDR3 for alpha chain variable domain of TCR clone 271285 (TRAV1-2, TRAJ8)
CAVREDTGFQKLLF

SEQ ID NO: 542570 - protein, 20 aa, Homo sapiens
  CDR3 for beta chain variable domain of TCR clone 271285 (TRBV28, TRBJ2-1)
CASTPIGRSPGLAGGNEQFF

SEQ ID NO: 542571 - protein, 16 aa, Homo sapiens
  CDR3 for alpha chain variable domain of TCR clone 271286 (TRAV3, TRAJ37)
CAVRGKGSGNTGKLIF

SEQ ID NO: 542572 - protein, 15 aa, Homo sapiens
  CDR3 for beta chain variable domain of TCR clone 271286 (TRBV7-9, TRBJ2-2)
CASGHLDTFPGELFF

SEQ ID NO: 542573 - protein, 14 aa, Homo sapiens
  CDR3 for alpha chain variable domain of TCR clone 271287 (TRAV26-1, TRAJ34)
CIVRVAYNTDKLIF

SEQ ID NO: 542574 - protein, 15 aa, Homo sapiens
  CDR3 for beta chain variable domain of TCR clone 271287 (TRBV20-1, TRBJ2-7)
CSARVPATYFYEQYF

SEQ ID NO: 542575 - protein, 12 aa, Homo sapiens
  CDR3 for alpha chain variable domain of TCR clone 271288 (TRAV12-3, TRAJ17)
CAMTLTGNKLTF

SEQ ID NO: 542576 - protein, 17 aa, Homo sapiens
  CDR3 for beta chain variable domain of TCR clone 271288 (TRBV20-1, TRBJ2-7)
CSARDRSLGWTNSTSGR

SEQ ID NO: 542577 - protein, 15 aa, Homo sapiens
  CDR3 for alpha chain variable domain of TCR clone 271289 (TRAV3, TRAJ9)
CAVRARNTGGFKTIF

SEQ ID NO: 542578 - protein, 14 aa, Homo sapiens
  CDR3 for beta chain variable domain of TCR clone 271289 (TRBV18, TRBJ2-5)
CASSPGVSQETQYF

SEQ ID NO: 542579 - protein, 13 aa, Homo sapiens
  CDR3 for alpha chain variable domain of TCR clone 271290 (TRAV8-3, TRAJ4)
WVFYSGGYNKLIF

SEQ ID NO: 542580 - protein, 16 aa, Homo sapiens
  CDR3 for beta chain variable domain of TCR clone 271290 (TRBV7-8, TRBJ2-3)
CASSTEGQRETYTQYF

SEQ ID NO: 542581 - protein, 15 aa, Homo sapiens
  CDR3 for alpha chain variable domain of TCR clone 271291 (TRAV2, TRAJ13)
CCLLLCFRGLQKVTF

SEQ ID NO: 542582 - protein, 14 aa, Homo sapiens
  CDR3 for beta chain variable domain of TCR clone 271291 (TRBV7-3, TRBJ2-7)
CASSYDQDYYEQYF

SEQ ID NO: 542583 - protein, 15 aa, Homo sapiens
  CDR3 for alpha chain variable domain of TCR clone 271292 (TRAV8-3, TRAJ23)
CAVGDRYNQGGKLIF

SEQ ID NO: 542584 - protein, 22 aa, Homo sapiens
  CDR3 for beta chain variable domain of TCR clone 271292 (TRBV29-1, TRBJ2-5)
TVSNMSPEDSRIYLCSAGTQYF

SEQ ID NO: 542585 - protein, 17 aa, Homo sapiens
  CDR3 for alpha chain variable domain of TCR clone 271293 (TRAV3, TRAJ42)
CAVRDRDYGGSQGNPIF

SEQ ID NO: 542586 - protein, 12 aa, Homo sapiens
  CDR3 for beta chain variable domain of TCR clone 271293 (TRBV29-1, TRBJ2-2)
CSVDKYTGELFF

SEQ ID NO: 542587 - protein, 12 aa, Homo sapiens
  CDR3 for alpha chain variable domain of TCR clone 271294 (TRAV12-1, TRAJ20)
CVAHFNDYKPSF

SEQ ID NO: 542588 - protein, 13 aa, Homo sapiens
  CDR3 for beta chain variable domain of TCR clone 271294 (TRBV5-7, TRBJ2-5)
CASSLRLQETQYF

SEQ ID NO: 542589 - protein, 16 aa, Homo sapiens
  CDR3 for alpha chain variable domain of TCR clone 271295 (TRAV26-1, TRAJ50)
CIVRALMKTSYDKVIF

SEQ ID NO: 542590 - protein, 13 aa, Homo sapiens
  CDR3 for beta chain variable domain of TCR clone 271295 (TRBV19, TRBJ1-3)
CASRLSLGNTIYF

SEQ ID NO: 542591 - protein, 15 aa, Homo sapiens
  CDR3 for alpha chain variable domain of TCR clone 271296 (TRAV3, TRAJ5)
CAVRDLDTGRRALTF

SEQ ID NO: 542592 - protein, 14 aa, Homo sapiens
  CDR3 for beta chain variable domain of TCR clone 271296 (TRBV20-1, TRBJ2-7)
CSAPYETSGYEQYF

SEQ ID NO: 542593 - protein, 10 aa, Homo sapiens
  CDR3 for alpha chain variable domain of TCR clone 271297 (TRAV12-3, TRAJ49)
CAMNDDQLYF

SEQ ID NO: 542594 - protein, 16 aa, Homo sapiens
  CDR3 for beta chain variable domain of TCR clone 271297 (TRBV20-1, TRBJ1-4)
CSAPGQGLLTNEKLFF

SEQ ID NO: 542595 - protein, 16 aa, Homo sapiens
  CDR3 for alpha chain variable domain of TCR clone 271298 (TRAV3, TRAJ28)
CAVLPRSGAGRYQLTF

SEQ ID NO: 542596 - protein, 13 aa, Homo sapiens
  CDR3 for beta chain variable domain of TCR clone 271298 (TRBV12-4, TRBJ2-5)
CASRLAVQETQHF

SEQ ID NO: 542597 - protein, 13 aa, Homo sapiens
  CDR3 for alpha chain variable domain of TCR clone 271299 (TRAV13-1, TRAJ21)
CEASIYNFNKFYF

SEQ ID NO: 542598 - protein, 12 aa, Homo sapiens
  CDR3 for beta chain variable domain of TCR clone 271299 (TRBV11-2, TRBJ2-1)
CASSPGNNEQFF

SEQ ID NO: 542599 - protein, 14 aa, Homo sapiens
  CDR3 for alpha chain variable domain of TCR clone 271300 (TRAV21, TRAJ45)
CAVHSGGGADGLTF

SEQ ID NO: 542600 - protein, 15 aa, Homo sapiens
  CDR3 for beta chain variable domain of TCR clone 271300 (TRBV12-4, TRBJ2-5)
CASSPPTGLQETQYF

SEQ ID NO: 542601 - protein, 16 aa, Homo sapiens
  CDR3 for alpha chain variable domain of TCR clone 271301 (TRAV8-3, TRAJ10)
CAVGPGVTGGGNKLTF

SEQ ID NO: 542602 - protein, 13 aa, Homo sapiens
  CDR3 for beta chain variable domain of TCR clone 271301 (TRBV18, TRBJ1-1)
CASSTGPSGEAFS

SEQ ID NO: 542603 - protein, 13 aa, Homo sapiens
  CDR3 for alpha chain variable domain of TCR clone 271302 (TRAV2, TRAJ21)
CAVEDNNFNKFYF

SEQ ID NO: 542604 - protein, 14 aa, Homo sapiens
  CDR3 for beta chain variable domain of TCR clone 271302 (TRBV19, TRBJ2-1)
CASPTFVLSGEQFF

SEQ ID NO: 542605 - protein, 13 aa, Homo sapiens
  CDR3 for alpha chain variable domain of TCR clone 271303 (TRAV27, TRAJ6)
CAGGTRGSYIPTF

SEQ ID NO: 542606 - protein, 16 aa, Homo sapiens
  CDR3 for beta chain variable domain of TCR clone 271303 (TRBV7-3, TRBJ2-1)
CASSLSSGGGAKEQFF

SEQ ID NO: 542607 - protein, 12 aa, Homo sapiens
  CDR3 for alpha chain variable domain of TCR clone 271304 (TRAV29/DV5, TRAJ15)
CASNQAGTALIF

SEQ ID NO: 542608 - protein, 15 aa, Homo sapiens
  CDR3 for beta chain variable domain of TCR clone 271304 (TRBV11-2, TRBJ2-2)
CASSSNRVNAGEMFF

SEQ ID NO: 542609 - protein, 12 aa, Homo sapiens
  CDR3 for alpha chain variable domain of TCR clone 271305 (TRAV13-1, TRAJ42)
VNYGGSHGNLIF

SEQ ID NO: 542610 - protein, 15 aa, Homo sapiens
  CDR3 for beta chain variable domain of TCR clone 271305 (TRBV20-1, TRBJ2-1)
CSASSARSSYNEQFF

SEQ ID NO: 542611 - protein, 14 aa, Homo sapiens
  CDR3 for alpha chain variable domain of TCR clone 271306 (TRAV1-2, TRAJ16)
CAVNRFSDGQKLLF

SEQ ID NO: 542612 - protein, 15 aa, Homo sapiens
  CDR3 for beta chain variable domain of TCR clone 271306 (TRBV19, TRBJ1-1)
CASTSGQIQNTEALF

SEQ ID NO: 542613 - protein, 15 aa, Homo sapiens
  CDR3 for alpha chain variable domain of TCR clone 271307 (TRAV16, TRAJ54)
CITALAKGGAQKLVF

SEQ ID NO: 542614 - protein, 12 aa, Homo sapiens
  CDR3 for beta chain variable domain of TCR clone 271307 (TRBV11-3, TRBJ1-1)
CASSHRQGEAFF

SEQ ID NO: 542615 - protein, 14 aa, Homo sapiens
  CDR3 for alpha chain variable domain of TCR clone 271308 (TRAV12-1, TRAJ17)
CVVNYKAAGNKLTF

SEQ ID NO: 542616 - protein, 15 aa, Homo sapiens
  CDR3 for beta chain variable domain of TCR clone 271308 (TRBV7-2, TRBJ1-2)
CASSLAPDRGLGYTF

SEQ ID NO: 542617 - protein, 17 aa, Homo sapiens
  CDR3 for alpha chain variable domain of TCR clone 271309 (TRAV36/DV7, TRAJ52)
CAVAQRAGGTSYGKLTF

SEQ ID NO: 542618 - protein, 19 aa, Homo sapiens
  CDR3 for beta chain variable domain of TCR clone 271309 (TRBV6-1, TRBJ1-3)
CASVQGGGWKHHIFWRGKL

SEQ ID NO: 542619 - protein, 16 aa, Homo sapiens
  CDR3 for alpha chain variable domain of TCR clone 271310 (TRAV30, TRAJ44)
CGTEDKRTGTASKLTF

SEQ ID NO: 542620 - protein, 14 aa, Homo sapiens
  CDR3 for beta chain variable domain of TCR clone 271310 (TRBV19, TRBJ2-1)
CASPTFVLSGEQFF

SEQ ID NO: 542621 - protein, 15 aa, Homo sapiens
  CDR3 for alpha chain variable domain of TCR clone 271311 (TRAV12-3, TRAJ45)
CAMSDSGGGADGLTF

SEQ ID NO: 542622 - protein, 15 aa, Homo sapiens
  CDR3 for beta chain variable domain of TCR clone 271311 (TRBV7-9, TRBJ1-6)
CASSSPGRGNSPLHF

SEQ ID NO: 542623 - protein, 14 aa, Homo sapiens
  CDR3 for alpha chain variable domain of TCR clone 271312 (TRAV26-1, TRAJ44)
CIVSNTGTASELTF

SEQ ID NO: 542624 - protein, 11 aa, Homo sapiens
  CDR3 for beta chain variable domain of TCR clone 271312 (TRBV19, TRBJ2-7)
CASSILGEQYF

SEQ ID NO: 542625 - protein, 13 aa, Homo sapiens
  CDR3 for alpha chain variable domain of TCR clone 271313 (TRAV27, TRAJ45)
CRSSGGGADGLTF

SEQ ID NO: 542626 - protein, 15 aa, Homo sapiens
  CDR3 for beta chain variable domain of TCR clone 271313 (TRBV2, TRBJ2-7)
CASSEGLARSYEQYF

SEQ ID NO: 542627 - protein, 14 aa, Homo sapiens
  CDR3 for alpha chain variable domain of TCR clone 271314 (TRAV1-2, TRAJ16)
CAVNWFSDGQKLLF

SEQ ID NO: 542628 - protein, 14 aa, Homo sapiens
  CDR3 for beta chain variable domain of TCR clone 271314 (TRBV19, TRBJ2-2)
CASSGQGIAGELFF

SEQ ID NO: 542629 - protein, 14 aa, Homo sapiens
  CDR3 for alpha chain variable domain of TCR clone 271315 (TRAV17, TRAJ57)
CATEAQGGSEKLVF

SEQ ID NO: 542630 - protein, 14 aa, Homo sapiens
  CDR3 for beta chain variable domain of TCR clone 271315 (TRBV12-5, TRBJ2-5)
CASGSRTHQETQCF

SEQ ID NO: 542631 - protein, 10 aa, Homo sapiens
  CDR3 for alpha chain variable domain of TCR clone 271316 (TRAV30, TRAJ20)
CGTDDYKLSF

SEQ ID NO: 542632 - protein, 16 aa, Homo sapiens
  CDR3 for beta chain variable domain of TCR clone 271316 (TRBV5-4, TRBJ2-3)
CASQQPGAGGADTQYF

SEQ ID NO: 542633 - protein, 16 aa, Homo sapiens
  CDR3 for alpha chain variable domain of TCR clone 271317 (TRAV38-2/DV8, TRAJ37)
CAYRRPRSSNTGKLIF

SEQ ID NO: 542634 - protein, 13 aa, Homo sapiens
  CDR3 for beta chain variable domain of TCR clone 271317 (TRBV11-2, TRBJ2-5)
CASSSTGEEAQYF

SEQ ID NO: 542635 - protein, 15 aa, Homo sapiens
  CDR3 for alpha chain variable domain of TCR clone 271318 (TRAV12-1, TRAJ42)
CVVTRDGGSEGNLIF

SEQ ID NO: 542636 - protein, 13 aa, Homo sapiens
  CDR3 for beta chain variable domain of TCR clone 271318 (TRBV27, TRBJ2-7)
CASSLTTGYEQYF

SEQ ID NO: 542637 - protein, 15 aa, Homo sapiens
  CDR3 for alpha chain variable domain of TCR clone 271319 (TRAV13-1, TRAJ10)
CAATILTGGGNKLTF

SEQ ID NO: 542638 - protein, 15 aa, Homo sapiens
  CDR3 for beta chain variable domain of TCR clone 271319 (TRBV2, TRBJ2-7)
CASTLLGSGATEQYS

SEQ ID NO: 542639 - protein, 12 aa, Homo sapiens
  CDR3 for alpha chain variable domain of TCR clone 271320 (TRAV36/DV7, TRAJ26)
CAVDNYGQNFVF

SEQ ID NO: 542640 - protein, 12 aa, Homo sapiens
  CDR3 for beta chain variable domain of TCR clone 271320 (TRBV11-2, TRBJ2-2)
CASSLGGGELFF

SEQ ID NO: 542641 - protein, 13 aa, Homo sapiens
  CDR3 for alpha chain variable domain of TCR clone 271321 (TRAV23/DV6, TRAJ34)
GAAIENNTDKPIF

SEQ ID NO: 542642 - protein, 13 aa, Homo sapiens
  CDR3 for beta chain variable domain of TCR clone 271321 (TRBV29-1, TRBJ2-7)
CSVGPSGGYEQYF

SEQ ID NO: 542643 - protein, 10 aa, Homo sapiens
  CDR3 for alpha chain variable domain of TCR clone 271322 (TRAV30, TRAJ48)
CGIGNEKLTF

SEQ ID NO: 542644 - protein, 16 aa, Homo sapiens
  CDR3 for beta chain variable domain of TCR clone 271322 (TRBV13, TRBJ2-2)
CASSPRTGEHTGELFF

SEQ ID NO: 542645 - protein, 14 aa, Homo sapiens
  CDR3 for alpha chain variable domain of TCR clone 271323 (TRAV8-4, TRAJ13)
CALTLSGGYQKVTF

SEQ ID NO: 542646 - protein, 14 aa, Homo sapiens
  CDR3 for beta chain variable domain of TCR clone 271323 (TRBV7-2, TRBJ1-2)
CASSQTRSTYGYTF

SEQ ID NO: 542647 - protein, 14 aa, Homo sapiens
  CDR3 for alpha chain variable domain of TCR clone 271324 (TRAV12-2, TRAJ40)
CAVKIHSGTYKYIF

SEQ ID NO: 542648 - protein, 16 aa, Homo sapiens
  CDR3 for beta chain variable domain of TCR clone 271324 (TRBV20-1, TRBJ2-1)
CSALTWTSGSYNEQFF

SEQ ID NO: 542649 - protein, 13 aa, Homo sapiens
  CDR3 for alpha chain variable domain of TCR clone 271325 (TRAV12-1, TRAJ16)
CVVNGPDGQKLLV

SEQ ID NO: 542650 - protein, 15 aa, Homo sapiens
  CDR3 for beta chain variable domain of TCR clone 271325 (TRBV6-3, TRBJ2-7)
CASSSPGTVFYEQYF

SEQ ID NO: 542651 - protein, 13 aa, Homo sapiens
  CDR3 for alpha chain variable domain of TCR clone 271326 (TRAV17, TRAJ15)
CATAARAGTALIF

SEQ ID NO: 542652 - protein, 15 aa, Homo sapiens
  CDR3 for beta chain variable domain of TCR clone 271326 (TRBV20-1, TRBJ2-7)
CSARDRVSGMDEQYF

SEQ ID NO: 542653 - protein, 14 aa, Homo sapiens
  CDR3 for alpha chain variable domain of TCR clone 271327 (TRAV12-2, TRAJ33)
CAVKRARSNYQLIW

SEQ ID NO: 542654 - protein, 15 aa, Homo sapiens
  CDR3 for beta chain variable domain of TCR clone 271327 (TRBV20-1, TRBJ2-7)
CSARDRVSGMDEQYV

SEQ ID NO: 542655 - protein, 11 aa, Homo sapiens
  CDR3 for alpha chain variable domain of TCR clone 271328 (TRAV2, TRAJ21)
CAVFNFNKFYF

SEQ ID NO: 542656 - protein, 13 aa, Homo sapiens
  CDR3 for beta chain variable domain of TCR clone 271328 (TRBV29-1, TRBJ1-3)
CSVEGGSGNTIYF

SEQ ID NO: 542657 - protein, 14 aa, Homo sapiens
  CDR3 for alpha chain variable domain of TCR clone 271329 (TRAV12-2, TRAJ9)
CAVNMAGGGFKTIF

SEQ ID NO: 542658 - protein, 14 aa, Homo sapiens
  CDR3 for beta chain variable domain of TCR clone 271329 (TRBV2, TRBJ2-5)
CASSEVLAQETQYF

SEQ ID NO: 542659 - protein, 13 aa, Homo sapiens
  CDR3 for alpha chain variable domain of TCR clone 271330 (TRAV30, TRAJ29)
CGTENSGNTPLVF

SEQ ID NO: 542660 - protein, 15 aa, Homo sapiens
  CDR3 for beta chain variable domain of TCR clone 271330 (TRBV7-8, TRBJ2-7)
CASSPGAGVLLEQYF

SEQ ID NO: 542661 - protein, 15 aa, Homo sapiens
  CDR3 for alpha chain variable domain of TCR clone 271331 (TRAV29/DV5, TRAJ42)
CAAKTDGGSQGKLIF

SEQ ID NO: 542662 - protein, 15 aa, Homo sapiens
  CDR3 for beta chain variable domain of TCR clone 271331 (TRBV5-1, TRBJ2-2)
CASSSQGGNTGELFF

SEQ ID NO: 542663 - protein, 13 aa, Homo sapiens
  CDR3 for alpha chain variable domain of TCR clone 271332 (TRAV8-3, TRAJ44)
CAVVPGTASNLTF

SEQ ID NO: 542664 - protein, 14 aa, Homo sapiens
  CDR3 for beta chain variable domain of TCR clone 271332 (TRBV11-2, TRBJ2-3)
CASSRLARTGTQYF

SEQ ID NO: 542665 - protein, 11 aa, Homo sapiens
  CDR3 for alpha chain variable domain of TCR clone 271333 (TRAV2, TRAJ13)
CASGGYQKVTF

SEQ ID NO: 542666 - protein, 15 aa, Homo sapiens
  CDR3 for beta chain variable domain of TCR clone 271333 (TRBV7-6, TRBJ1-5)
CASSQSSGINQPQHF

SEQ ID NO: 542667 - protein, 14 aa, Homo sapiens
  CDR3 for alpha chain variable domain of TCR clone 271334 (TRAV1-2, TRAJ16)
FAVNRFSDGQKLLF

SEQ ID NO: 542668 - protein, 16 aa, Homo sapiens
  CDR3 for beta chain variable domain of TCR clone 271334 (TRBV7-2, TRBJ2-5)
CASSSKWLSGQETQYF

SEQ ID NO: 542669 - protein, 13 aa, Homo sapiens
  CDR3 for alpha chain variable domain of TCR clone 271335 (TRAV13-1, TRAJ37)
CAARSGNTGKLIF

SEQ ID NO: 542670 - protein, 14 aa, Homo sapiens
  CDR3 for beta chain variable domain of TCR clone 271335 (TRBV12-4, TRBJ2-3)
CASSLGRGTDTQYF

SEQ ID NO: 542671 - protein, 12 aa, Homo sapiens
  CDR3 for alpha chain variable domain of TCR clone 271336 (TRAV12-3, TRAJ17)
CAMTLTGNKLTF

SEQ ID NO: 542672 - protein, 12 aa, Homo sapiens
  CDR3 for beta chain variable domain of TCR clone 271336 (TRBV11-3, TRBJ2-7)
CASSLPTYEQYF

SEQ ID NO: 542673 - protein, 17 aa, Homo sapiens
  CDR3 for alpha chain variable domain of TCR clone 271337 (TRAV3, TRAJ6)
CAVRDGPRAGGSYIPTF

SEQ ID NO: 542674 - protein, 20 aa, Homo sapiens
  CDR3 for beta chain variable domain of TCR clone 271337 (TRBV28, TRBJ2-1)
CGSTAIGRSPGLAGGNEQFL

SEQ ID NO: 542675 - protein, 16 aa, Homo sapiens
  CDR3 for alpha chain variable domain of TCR clone 271338 (TRAV4, TRAJ22)
CLVGDLYSGSARQLTF

SEQ ID NO: 542676 - protein, 17 aa, Homo sapiens
  CDR3 for beta chain variable domain of TCR clone 271338 (TRBV7-3, TRBJ2-3)
CASSLMKRMRGADTQYF

SEQ ID NO: 542677 - protein, 14 aa, Homo sapiens
  CDR3 for alpha chain variable domain of TCR clone 271339 (TRAV12-3, TRAJ57)
CAMSAWGGSEKLVF

SEQ ID NO: 542678 - protein, 14 aa, Homo sapiens
  CDR3 for beta chain variable domain of TCR clone 271339 (TRBV12-4, TRBJ1-1)
CASSLGTGGTEAFF

SEQ ID NO: 542679 - protein, 14 aa, Homo sapiens
  CDR3 for alpha chain variable domain of TCR clone 271340 (TRAV20, TRAJ42)
CAVQAGGSQGNLIF

SEQ ID NO: 542680 - protein, 14 aa, Homo sapiens
  CDR3 for beta chain variable domain of TCR clone 271340 (TRBV20-1, TRBJ1-1)
CSAQTRIGGTEAFF

SEQ ID NO: 542681 - protein, 14 aa, Homo sapiens
  CDR3 for alpha chain variable domain of TCR clone 271341 (TRAV9-2, TRAJ39)
CALYIYNAGNMLTF

SEQ ID NO: 542682 - protein, 14 aa, Homo sapiens
  CDR3 for beta chain variable domain of TCR clone 271341 (TRBV25-1, TRBJ2-1)
CASSPRGPYNEQFF

SEQ ID NO: 542683 - protein, 14 aa, Homo sapiens
  CDR3 for alpha chain variable domain of TCR clone 271342 (TRAV12-3, TRAJ54)
CAMSALQGAQKLVF

SEQ ID NO: 542684 - protein, 15 aa, Homo sapiens
  CDR3 for beta chain variable domain of TCR clone 271342 (TRBV7-9, TRBJ1-5)
CASSQGHQPNQPQHF

SEQ ID NO: 542685 - protein, 18 aa, Homo sapiens
  CDR3 for alpha chain variable domain of TCR clone 271343 (TRAV13-1, TRAJ52)
CAASKRSAGGTSYGKLTF

SEQ ID NO: 542686 - protein, 13 aa, Homo sapiens
  CDR3 for beta chain variable domain of TCR clone 271343 (TRBV12-4, TRBJ1-2)
CARSLRQGKGYTS

SEQ ID NO: 542687 - protein, 13 aa, Homo sapiens
  CDR3 for alpha chain variable domain of TCR clone 271344 (TRAV8-3, TRAJ43)
CAVGPDNNNDMRF

SEQ ID NO: 542688 - protein, 15 aa, Homo sapiens
  CDR3 for beta chain variable domain of TCR clone 271344 (TRBV7-2, TRBJ2-1)
CASSSGLAGGNEQFF

SEQ ID NO: 542689 - protein, 10 aa, Homo sapiens
  CDR3 for alpha chain variable domain of TCR clone 271345 (TRAV3, TRAJ30)
CAVREIEIIF

SEQ ID NO: 542690 - protein, 14 aa, Homo sapiens
  CDR3 for beta chain variable domain of TCR clone 271345 (TRBV11-3, TRBJ2-1)
CASSATTSGSIQFF

SEQ ID NO: 542691 - protein, 14 aa, Homo sapiens
  CDR3 for alpha chain variable domain of TCR clone 271346 (TRAV13-1, TRAJ35)
CAASKGGFGNVLHC

SEQ ID NO: 542692 - protein, 17 aa, Homo sapiens
  CDR3 for beta chain variable domain of TCR clone 271346 (TRBV3-1, TRBJ2-6)
CASSPNTGPAGANVLTF

SEQ ID NO: 542693 - protein, 13 aa, Homo sapiens
  CDR3 for alpha chain variable domain of TCR clone 271347 (TRAV3, TRAJ15)
CSVRNQAGTALIF

SEQ ID NO: 542694 - protein, 15 aa, Homo sapiens
  CDR3 for beta chain variable domain of TCR clone 271347 (TRBV11-1, TRBJ2-7)
CASSLNYGASYEQYF

SEQ ID NO: 542695 - protein, 17 aa, Homo sapiens
  CDR3 for alpha chain variable domain of TCR clone 271348 (TRAV8-6, TRAJ8)
CAVKEGIENTGFQKLVF

SEQ ID NO: 542696 - protein, 18 aa, Homo sapiens
  CDR3 for beta chain variable domain of TCR clone 271348 (TRBV3-1, TRBJ2-7)
CASSQEGGGRSWHYEQYF

SEQ ID NO: 542697 - protein, 14 aa, Homo sapiens
  CDR3 for alpha chain variable domain of TCR clone 271349 (TRAV20, TRAJ42)
CAVKAGGSQGNLIF

SEQ ID NO: 542698 - protein, 14 aa, Homo sapiens
  CDR3 for beta chain variable domain of TCR clone 271349 (TRBV28, TRBJ1-2)
CASRIQGANYGYTF

SEQ ID NO: 542699 - protein, 11 aa, Homo sapiens
  CDR3 for alpha chain variable domain of TCR clone 271350 (TRAV17, TRAJ9)
CATTGGFKTSF

SEQ ID NO: 542700 - protein, 11 aa, Homo sapiens
  CDR3 for beta chain variable domain of TCR clone 271350 (TRBV29-1, TRBJ2-5)
CSEDRTGTQYF

SEQ ID NO: 542701 - protein, 13 aa, Homo sapiens
  CDR3 for alpha chain variable domain of TCR clone 271351 (TRAV12-1, TRAJ29)
CVVNGPGNTPLVF

SEQ ID NO: 542702 - protein, 14 aa, Homo sapiens
  CDR3 for beta chain variable domain of TCR clone 271351 (TRBV11-2, TRBJ2-3)
CASSRLARTDTQYF

SEQ ID NO: 542703 - protein, 18 aa, Homo sapiens
  CDR3 for alpha chain variable domain of TCR clone 271352 (TRAV12-3, TRAJ52)
CAMSVGGAGGTSYGKLTF

SEQ ID NO: 542704 - protein, 14 aa, Homo sapiens
  CDR3 for beta chain variable domain of TCR clone 271352 (TRBV2, TRBJ2-1)
CASSDRAYYNEQFF

SEQ ID NO: 542705 - protein, 13 aa, Homo sapiens
  CDR3 for alpha chain variable domain of TCR clone 271353 (TRAV8-3, TRAJ21)
CVVLLYNFNKFYF

SEQ ID NO: 542706 - protein, 16 aa, Homo sapiens
  CDR3 for beta chain variable domain of TCR clone 271353 (TRBV5-4, TRBJ2-3)
CASQQPGAGGADTQYF

SEQ ID NO: 542707 - protein, 15 aa, Homo sapiens
  CDR3 for alpha chain variable domain of TCR clone 271354 (TRAV26-1, TRAJ29)
CIVRVEGSGNTPLVF

SEQ ID NO: 542708 - protein, 15 aa, Homo sapiens
  CDR3 for beta chain variable domain of TCR clone 271354 (TRBV5-7, TRBJ2-7)
CASSPYFEGSYEQYF

SEQ ID NO: 542709 - protein, 15 aa, Homo sapiens
  CDR3 for alpha chain variable domain of TCR clone 271355 (TRAV38-1, TRAJ37)
CAFIFGSGNTGKLIF

SEQ ID NO: 542710 - protein, 14 aa, Homo sapiens
  CDR3 for beta chain variable domain of TCR clone 271355 (TRBV2, TRBJ2-1)
CASRTGSSYNEQFF

SEQ ID NO: 542711 - protein, 12 aa, Homo sapiens
  CDR3 for alpha chain variable domain of TCR clone 271356 (TRAV3, TRAJ27)
CAVRDGVGKSTF

SEQ ID NO: 542712 - protein, 15 aa, Homo sapiens
  CDR3 for beta chain variable domain of TCR clone 271356 (TRBV13, TRBJ2-2)
CASGYRGRRTGELFF

SEQ ID NO: 542713 - protein, 15 aa, Homo sapiens
  CDR3 for alpha chain variable domain of TCR clone 271357 (TRAV2, TRAJ42)
CAVEGYGVSQGNLIF

SEQ ID NO: 542714 - protein, 16 aa, Homo sapiens
  CDR3 for beta chain variable domain of TCR clone 271357 (TRBV20-1, TRBJ1-4)
CSAPGQGLLTNEKLFF

SEQ ID NO: 542715 - protein, 14 aa, Homo sapiens
  CDR3 for alpha chain variable domain of TCR clone 271358 (TRAV1-1, TRAJ23)
CAVSIYNQGGKLIF

SEQ ID NO: 542716 - protein, 16 aa, Homo sapiens
  CDR3 for beta chain variable domain of TCR clone 271358 (TRBV5-1, TRBJ2-3)
CASSLGLAVYTDTQYF

SEQ ID NO: 542717 - protein, 16 aa, Homo sapiens
  CDR3 for alpha chain variable domain of TCR clone 271359 (TRAV12-1, TRAJ43)
CVVNPHRFGAGTRLTV

SEQ ID NO: 542718 - protein, 13 aa, Homo sapiens
  CDR3 for beta chain variable domain of TCR clone 271359 (TRBV12-4, TRBJ1-2)
CASSSRPNYGYTF

SEQ ID NO: 542719 - protein, 16 aa, Homo sapiens
  CDR3 for alpha chain variable domain of TCR clone 271360 (TRAV12-3, TRAJ53)
CAMSPGSGGSNYQLTF

SEQ ID NO: 542720 - protein, 20 aa, Homo sapiens
  CDR3 for beta chain variable domain of TCR clone 271360 (TRBV7-8, TRBJ2-2)
CASSHLFPGPTIHITGELFF

SEQ ID NO: 542721 - protein, 14 aa, Homo sapiens
  CDR3 for alpha chain variable domain of TCR clone 271361 (TRAV2, TRAJ29)
CAVTPPSGNTPLVF

SEQ ID NO: 542722 - protein, 13 aa, Homo sapiens
  CDR3 for beta chain variable domain of TCR clone 271361 (TRBV7-9, TRBJ1-2)
CASSLKQNYGYTF

SEQ ID NO: 542723 - protein, 12 aa, Homo sapiens
  CDR3 for alpha chain variable domain of TCR clone 271362 (TRAV38-1, TRAJ32)
CSPLGATDKLIF

SEQ ID NO: 542724 - protein, 14 aa, Homo sapiens
  CDR3 for beta chain variable domain of TCR clone 271362 (TRBV29-1, TRBJ2-5)
CSVETSGSGETQYF

SEQ ID NO: 542725 - protein, 16 aa, Homo sapiens
  CDR3 for alpha chain variable domain of TCR clone 271363 (TRAV38-2/DV8, TRAJ45)
CAYRGNSGGGADGLTF

SEQ ID NO: 542726 - protein, 17 aa, Homo sapiens
  CDR3 for beta chain variable domain of TCR clone 271363 (TRBV11-3, TRBJ2-5)
CASSLPGARGGKETQYF

SEQ ID NO: 542727 - protein, 14 aa, Homo sapiens
  CDR3 for alpha chain variable domain of TCR clone 271364 (TRAV16, TRAJ39)
CALSKNNAGNMLTF

SEQ ID NO: 542728 - protein, 12 aa, Homo sapiens
  CDR3 for beta chain variable domain of TCR clone 271364 (TRBV19, TRBJ1-4)
CASKDWTGGLFF

SEQ ID NO: 542729 - protein, 13 aa, Homo sapiens
  CDR3 for alpha chain variable domain of TCR clone 271365 (TRAV13-2, TRAJ48)
CAEMDFGNEKLTF

SEQ ID NO: 542730 - protein, 15 aa, Homo sapiens
  CDR3 for beta chain variable domain of TCR clone 271365 (TRBV3-1, TRBJ2-5)
CASSANLGGPETQYF

SEQ ID NO: 542731 - protein, 15 aa, Homo sapiens
  CDR3 for alpha chain variable domain of TCR clone 271366 (TRAV8-3, TRAJ11)
CAVGLVNSGYSTLTF

SEQ ID NO: 542732 - protein, 16 aa, Homo sapiens
  CDR3 for beta chain variable domain of TCR clone 271366 (TRBV6-6, TRBJ2-1)
CASSYSFSGSYNEQFF

SEQ ID NO: 542733 - protein, 12 aa, Homo sapiens
  CDR3 for alpha chain variable domain of TCR clone 271367 (TRAV12-3, TRAJ17)
CAMTLTGNTITF

SEQ ID NO: 542734 - protein, 15 aa, Homo sapiens
  CDR3 for beta chain variable domain of TCR clone 271367 (TRBV20-1, TRBJ2-7)
CSARDRVSGMDEQYF

SEQ ID NO: 542735 - protein, 16 aa, Homo sapiens
  CDR3 for alpha chain variable domain of TCR clone 271368 (TRAV3, TRAJ37)
CAVRGKGSGNTGKLIF

SEQ ID NO: 542736 - protein, 14 aa, Homo sapiens
  CDR3 for beta chain variable domain of TCR clone 271368 (TRBV28, TRBJ1-5)
CASQRTNSNQPQHF

SEQ ID NO: 542737 - protein, 16 aa, Homo sapiens
  CDR3 for alpha chain variable domain of TCR clone 271369 (TRAV12-1, TRAJ4)
CLVNPGISGGYNKLIF

SEQ ID NO: 542738 - protein, 12 aa, Homo sapiens
  CDR3 for beta chain variable domain of TCR clone 271369 (TRBV11-2, TRBJ2-2)
CASSLGGGELFF

SEQ ID NO: 542739 - protein, 13 aa, Homo sapiens
  CDR3 for alpha chain variable domain of TCR clone 271370 (TRAV21, TRAJ15)
CAVDNQAGTALIF

SEQ ID NO: 542740 - protein, 11 aa, Homo sapiens
  CDR3 for beta chain variable domain of TCR clone 271370 (TRBV7-8, TRBJ1-1)
CASSERQVALW

SEQ ID NO: 542741 - protein, 13 aa, Homo sapiens
  CDR3 for alpha chain variable domain of TCR clone 271371 (TRAV8-2, TRAJ43)
CVVSDQGGNDMRF

SEQ ID NO: 542742 - protein, 12 aa, Homo sapiens
  CDR3 for beta chain variable domain of TCR clone 271371 (TRBV7-9, TRBJ2-7)
CASRTGFDEQYF

SEQ ID NO: 542743 - protein, 11 aa, Homo sapiens
  CDR3 for alpha chain variable domain of TCR clone 271372 (TRAV26-1, TRAJ27)
CIDPKAGKSTF

SEQ ID NO: 542744 - protein, 18 aa, Homo sapiens
  CDR3 for beta chain variable domain of TCR clone 271372 (TRBV7-9, TRBJ2-6)
CASSFPGAGISGANVLTF

SEQ ID NO: 542745 - protein, 14 aa, Homo sapiens
  CDR3 for alpha chain variable domain of TCR clone 271373 (TRAV16, TRAJ44)
CALSTTGTASKLTF

SEQ ID NO: 542746 - protein, 14 aa, Homo sapiens
  CDR3 for beta chain variable domain of TCR clone 271373 (TRBV19, TRBJ1-5)
CASRAPESFLSQHF

SEQ ID NO: 542747 - protein, 14 aa, Homo sapiens
  CDR3 for alpha chain variable domain of TCR clone 271374 (TRAV35, TRAJ22)
CAGHLSGSARQLTF

SEQ ID NO: 542748 - protein, 14 aa, Homo sapiens
  CDR3 for beta chain variable domain of TCR clone 271374 (TRBV4-1, TRBJ2-2)
CASSQAMNTGELFF

SEQ ID NO: 542749 - protein, 18 aa, Homo sapiens
  CDR3 for alpha chain variable domain of TCR clone 271375 (TRAV21, TRAJ52)
CAVMPSPAGGTSYGNLTF

SEQ ID NO: 542750 - protein, 17 aa, Homo sapiens
  CDR3 for beta chain variable domain of TCR clone 271375 (TRBV13, TRBJ2-3)
CASSLSRVAGGRNTQYF

SEQ ID NO: 542751 - protein, 13 aa, Homo sapiens
  CDR3 for alpha chain variable domain of TCR clone 271376 (TRAV1-2, TRAJ9)
CAFLNTGGFKTIF

SEQ ID NO: 542752 - protein, 14 aa, Homo sapiens
  CDR3 for beta chain variable domain of TCR clone 271376 (TRBV20-1, TRBJ2-3)
CSARGGTSTDTQYF

SEQ ID NO: 542753 - protein, 15 aa, Homo sapiens
  CDR3 for alpha chain variable domain of TCR clone 271377 (TRAV12-1, TRAJ15)
CVVTRANQAGTALLF

SEQ ID NO: 542754 - protein, 14 aa, Homo sapiens
  CDR3 for beta chain variable domain of TCR clone 271377 (TRBV5-1, TRBJ1-1)
CASSLVSINTEAFF

SEQ ID NO: 542755 - protein, 11 aa, Homo sapiens
  CDR3 for alpha chain variable domain of TCR clone 271378 (TRAV3, TRAJ21)
CAVGNFHKFYF

SEQ ID NO: 542756 - protein, 19 aa, Homo sapiens
  CDR3 for beta chain variable domain of TCR clone 271378 (TRBV7-2, TRBJ2-3)
CASSFLSRNWGGGTDTQYF

SEQ ID NO: 542757 - protein, 13 aa, Homo sapiens
  CDR3 for alpha chain variable domain of TCR clone 271379 (TRAV20, TRAJ21)
CAVEGYNFNKLYF

SEQ ID NO: 542758 - protein, 13 aa, Homo sapiens
  CDR3 for beta chain variable domain of TCR clone 271379 (TRBV4-1, TRBJ2-2)
CASSQENTGELFF

SEQ ID NO: 542759 - protein, 11 aa, Homo sapiens
  CDR3 for alpha chain variable domain of TCR clone 271380 (TRAV3, TRAJ21)
CAVGNFYKFYF

SEQ ID NO: 542760 - protein, 16 aa, Homo sapiens
  CDR3 for beta chain variable domain of TCR clone 271380 (TRBV19, TRBJ2-1)
CASSNAGPSSYNEQFF

SEQ ID NO: 542761 - protein, 18 aa, Homo sapiens
  CDR3 for alpha chain variable domain of TCR clone 271381 (TRAV21, TRAJ52)
CAVRPSPAGGTSYGKLTF

SEQ ID NO: 542762 - protein, 16 aa, Homo sapiens
  CDR3 for beta chain variable domain of TCR clone 271381 (TRBV7-3, TRBJ2-2)
CASSLKRGILSGELFF

SEQ ID NO: 542763 - protein, 14 aa, Homo sapiens
  CDR3 for alpha chain variable domain of TCR clone 271382 (TRAV17, TRAJ22)
CATSPSGSARQLTF

SEQ ID NO: 542764 - protein, 17 aa, Homo sapiens
  CDR3 for beta chain variable domain of TCR clone 271382 (TRBV5-1, TRBJ2-2)
CASSLQPGQGQAGELFF

SEQ ID NO: 542765 - protein, 15 aa, Homo sapiens
  CDR3 for alpha chain variable domain of TCR clone 271383 (TRAV3, TRAJ36)
CAVRDLDTGREALTF

SEQ ID NO: 542766 - protein, 13 aa, Homo sapiens
  CDR3 for beta chain variable domain of TCR clone 271383 (TRBV12-4, TRBJ2-7)
CASSPTETYEQYF

SEQ ID NO: 542767 - protein, 12 aa, Homo sapiens
  CDR3 for alpha chain variable domain of TCR clone 271384 (TRAV21, TRAJ31)
CVLAGNNARLMF

SEQ ID NO: 542768 - protein, 13 aa, Homo sapiens
  CDR3 for beta chain variable domain of TCR clone 271384 (TRBV7-9, TRBJ1-2)
CASSLKQNYGYTF

SEQ ID NO: 542769 - protein, 15 aa, Homo sapiens
  CDR3 for alpha chain variable domain of TCR clone 271385 (TRAV4, TRAJ39)
CLVGPNNTAGNMLTF

SEQ ID NO: 542770 - protein, 12 aa, Homo sapiens
  CDR3 for beta chain variable domain of TCR clone 271385 (TRBV12-4, TRBJ2-7)
CASNPGGGEQYF

SEQ ID NO: 542771 - protein, 13 aa, Homo sapiens
  CDR3 for alpha chain variable domain of TCR clone 271386 (TRAV3, TRAJ21)
CAVREPDFNKFYF

SEQ ID NO: 542772 - protein, 14 aa, Homo sapiens
  CDR3 for beta chain variable domain of TCR clone 271386 (TRBV4-2, TRBJ2-1)
CASGLDMAYNEQFF

SEQ ID NO: 542773 - protein, 14 aa, Homo sapiens
  CDR3 for alpha chain variable domain of TCR clone 271387 (TRAV10, TRAJ36)
CMVKYEGGANNLFF

SEQ ID NO: 542774 - protein, 19 aa, Homo sapiens
  CDR3 for beta chain variable domain of TCR clone 271387 (TRBV7-2, TRBJ2-3)
CASSFLSRNWGGGTDTQYF

SEQ ID NO: 542775 - protein, 14 aa, Homo sapiens
  CDR3 for alpha chain variable domain of TCR clone 271388 (TRAV12-2, TRAJ17)
CAVNIKAAGNKLTF

SEQ ID NO: 542776 - protein, 13 aa, Homo sapiens
  CDR3 for beta chain variable domain of TCR clone 271388 (TRBV5-7, TRBJ2-6)
CASTSNGANVLTF

SEQ ID NO: 542777 - protein, 13 aa, Homo sapiens
  CDR3 for alpha chain variable domain of TCR clone 271389 (TRAV13-1, TRAJ43)
CAASKNNNNDMRF

SEQ ID NO: 542778 - protein, 15 aa, Homo sapiens
  CDR3 for beta chain variable domain of TCR clone 271389 (TRBV10-3, TRBJ2-1)
CAISDVQDRAYEQFF

SEQ ID NO: 542779 - protein, 14 aa, Homo sapiens
  CDR3 for alpha chain variable domain of TCR clone 271390 (TRAV12-2, TRAJ13)
CAVKKTGGYQKVTF

SEQ ID NO: 542780 - protein, 16 aa, Homo sapiens
  CDR3 for beta chain variable domain of TCR clone 271390 (TRBV4-2, TRBJ2-4)
CASSQELRGAKNIQYF

SEQ ID NO: 542781 - protein, 14 aa, Homo sapiens
  CDR3 for alpha chain variable domain of TCR clone 271391 (TRAV23/DV6, TRAJ13)
CAAMYSGGYQKVTF

SEQ ID NO: 542782 - protein, 14 aa, Homo sapiens
  CDR3 for beta chain variable domain of TCR clone 271391 (TRBV7-9, TRBJ2-1)
CASSPRDSFYEQFF

SEQ ID NO: 542783 - protein, 15 aa, Homo sapiens
  CDR3 for alpha chain variable domain of TCR clone 271392 (TRAV3, TRAJ22)
CAVRDRGGSARQLTF

SEQ ID NO: 542784 - protein, 15 aa, Homo sapiens
  CDR3 for beta chain variable domain of TCR clone 271392 (TRBV18, TRBJ2-7)
CASSPSSTGNYEQYF

SEQ ID NO: 542785 - protein, 14 aa, Homo sapiens
  CDR3 for alpha chain variable domain of TCR clone 271393 (TRAV16, TRAJ39)
CALSKNNAGNMLTF

SEQ ID NO: 542786 - protein, 15 aa, Homo sapiens
  CDR3 for beta chain variable domain of TCR clone 271393 (TRBV7-2, TRBJ2-7)
CASSLKGALTYEQYF

SEQ ID NO: 542787 - protein, 14 aa, Homo sapiens
  CDR3 for alpha chain variable domain of TCR clone 271394 (TRAV13-1, TRAJ44)
CAAKATGTASKLTF

SEQ ID NO: 542788 - protein, 15 aa, Homo sapiens
  CDR3 for beta chain variable domain of TCR clone 271394 (TRBV11-2, TRBJ2-7)
CASSLVGGRGYEQYF

SEQ ID NO: 542789 - protein, 14 aa, Homo sapiens
  CDR3 for alpha chain variable domain of TCR clone 271395 (TRAV26-1, TRAJ38)
CIADNAGNNRKLIW

SEQ ID NO: 542790 - protein, 17 aa, Homo sapiens
  CDR3 for beta chain variable domain of TCR clone 271395 (TRBV20-1, TRBJ2-1)
CSASWGSSGGPNNEQFF

SEQ ID NO: 542791 - protein, 12 aa, Homo sapiens
  CDR3 for alpha chain variable domain of TCR clone 271396 (TRAV3, TRAJ26)
CAVRDYGQNFVF

SEQ ID NO: 542792 - protein, 14 aa, Homo sapiens
  CDR3 for beta chain variable domain of TCR clone 271396 (TRBV19, TRBJ2-1)
CASSIGGDYNEQFF

SEQ ID NO: 542793 - protein, 13 aa, Homo sapiens
  CDR3 for alpha chain variable domain of TCR clone 271397 (TRAV26-1, TRAJ36)
CIVVGTGANNFFF

SEQ ID NO: 542794 - protein, 16 aa, Homo sapiens
  CDR3 for beta chain variable domain of TCR clone 271397 (TRBV10-3, TRBJ2-1)
CAISGVGDGGGGEQFF

SEQ ID NO: 542795 - protein, 18 aa, Homo sapiens
  CDR3 for alpha chain variable domain of TCR clone 271398 (TRAV26-1, TRAJ52)
CIVRVEGAGGTSYGQLTF

SEQ ID NO: 542796 - protein, 13 aa, Homo sapiens
  CDR3 for beta chain variable domain of TCR clone 271398 (TRBV7-3, TRBJ1-2)
CASSLKRGYGYTF

SEQ ID NO: 542797 - protein, 16 aa, Homo sapiens
  CDR3 for alpha chain variable domain of TCR clone 271399 (TRAV3, TRAJ37)
CAVRGKGSGNTGKLIF

SEQ ID NO: 542798 - protein, 16 aa, Homo sapiens
  CDR3 for beta chain variable domain of TCR clone 271399 (TRBV7-9, TRBJ2-1)
CASSRKNFSSPREQFF

SEQ ID NO: 542799 - protein, 13 aa, Homo sapiens
  CDR3 for alpha chain variable domain of TCR clone 271400 (TRAV23/DV6, TRAJ34)
CAAIENNTDKPIF

SEQ ID NO: 542800 - protein, 18 aa, Homo sapiens
  CDR3 for beta chain variable domain of TCR clone 271400 (TRBV20-1, TRBJ2-6)
CSAETTPTHGSGANVLTF

SEQ ID NO: 542801 - protein, 15 aa, Homo sapiens
  CDR3 for alpha chain variable domain of TCR clone 271401 (TRAV25, TRAJ52)
CAGRPGGTSYGKLTF

SEQ ID NO: 542802 - protein, 14 aa, Homo sapiens
  CDR3 for beta chain variable domain of TCR clone 271401 (TRBV12-4, TRBJ1-6)
CASNLQGKGSPLHF

SEQ ID NO: 542803 - protein, 14 aa, Homo sapiens
  CDR3 for alpha chain variable domain of TCR clone 271402 (TRAV1-2, TRAJ8)
CAVREDTGFQKLVF

SEQ ID NO: 542804 - protein, 15 aa, Homo sapiens
  CDR3 for beta chain variable domain of TCR clone 271402 (TRBV12-4, TRBJ2-7)
CASSQTGAISYEQYF

SEQ ID NO: 542805 - protein, 18 aa, Homo sapiens
  CDR3 for alpha chain variable domain of TCR clone 271403 (TRAV29/DV5, TRAJ52)
CAAGFRGAGGTSYGKLTF

SEQ ID NO: 542806 - protein, 16 aa, Homo sapiens
  CDR3 for beta chain variable domain of TCR clone 271403 (TRBV7-3, TRBJ2-2)
CASSLKRGTLSGELYF

SEQ ID NO: 542807 - protein, 15 aa, Homo sapiens
  CDR3 for alpha chain variable domain of TCR clone 271404 (TRAV21, TRAJ24)
CAARSSTDSWGKLQF

SEQ ID NO: 542808 - protein, 18 aa, Homo sapiens
  CDR3 for beta chain variable domain of TCR clone 271404 (TRBV20-1, TRBJ2-3)
CSASGLAGGPGTTDTQYF

SEQ ID NO: 542809 - protein, 14 aa, Homo sapiens
  CDR3 for alpha chain variable domain of TCR clone 271405 (TRAV1-2, TRAJ16)
CAVNRFSDGQKLLF

SEQ ID NO: 542810 - protein, 15 aa, Homo sapiens
  CDR3 for beta chain variable domain of TCR clone 271405 (TRBV7-2, TRBJ2-7)
CASSLDPAQGQEQYF

SEQ ID NO: 542811 - protein, 13 aa, Homo sapiens
  CDR3 for alpha chain variable domain of TCR clone 271406 (TRAV3, TRAJ27)
CAVRPLGAGKSTF

SEQ ID NO: 542812 - protein, 16 aa, Homo sapiens
  CDR3 for beta chain variable domain of TCR clone 271406 (TRBV10-3, TRBJ2-1)
CAISLTSGISYNEQFF

SEQ ID NO: 542813 - protein, 14 aa, Homo sapiens
  CDR3 for alpha chain variable domain of TCR clone 271407 (TRAV1-2, TRAJ8)
CAVREDTGFQKLVF

SEQ ID NO: 542814 - protein, 16 aa, Homo sapiens
  CDR3 for beta chain variable domain of TCR clone 271407 (TRBV12-5, TRBJ2-5)
RASGPRTSGNQETQYF

SEQ ID NO: 542815 - protein, 14 aa, Homo sapiens
  CDR3 for alpha chain variable domain of TCR clone 271408 (TRAV12-2, TRAJ33)
CAVQRARSNYQLIW

SEQ ID NO: 542816 - protein, 12 aa, Homo sapiens
  CDR3 for beta chain variable domain of TCR clone 271408 (TRBV24-1, TRBJ2-3)
CATSDSTDTQYL

SEQ ID NO: 542817 - protein, 14 aa, Homo sapiens
  CDR3 for alpha chain variable domain of TCR clone 271409 (TRAV12-1, TRAJ13)
CVVIDSGGYQKVTF

SEQ ID NO: 542818 - protein, 16 aa, Homo sapiens
  CDR3 for beta chain variable domain of TCR clone 271409 (TRBV27, TRBJ2-2)
CASSLRPGGAPGELFF

SEQ ID NO: 542819 - protein, 15 aa, Homo sapiens
  CDR3 for alpha chain variable domain of TCR clone 271410 (TRAV26-1, TRAJ44)
CIARVPFGTASKLTF

SEQ ID NO: 542820 - protein, 15 aa, Homo sapiens
  CDR3 for beta chain variable domain of TCR clone 271410 (TRBV7-2, TRBJ2-1)
CASTHGTGIYNEQFF

SEQ ID NO: 542821 - protein, 15 aa, Homo sapiens
  CDR3 for alpha chain variable domain of TCR clone 271411 (TRAV14/DV4, TRAJ15)
CAMREGWQAGTALIF

SEQ ID NO: 542822 - protein, 16 aa, Homo sapiens
  CDR3 for beta chain variable domain of TCR clone 271411 (TRBV18, TRBJ1-5)
CTSSPYRVEGNQPQHF

SEQ ID NO: 542823 - protein, 18 aa, Homo sapiens
  CDR3 for alpha chain variable domain of TCR clone 271412 (TRAV29/DV5, TRAJ26)
CSVLLCSKRKPEGQNFVF

SEQ ID NO: 542824 - protein, 15 aa, Homo sapiens
  CDR3 for beta chain variable domain of TCR clone 271412 (TRBV18, TRBJ2-7)
CASSPLQGRTYEQYF

SEQ ID NO: 542825 - protein, 14 aa, Homo sapiens
  CDR3 for alpha chain variable domain of TCR clone 271413 (TRAV2, TRAJ29)
CAGPFQFGNTPLVF

SEQ ID NO: 542826 - protein, 11 aa, Homo sapiens
  CDR3 for beta chain variable domain of TCR clone 271413 (TRBV29-1, TRBJ2-5)
CSEDRTGTQYF

SEQ ID NO: 542827 - protein, 14 aa, Homo sapiens
  CDR3 for alpha chain variable domain of TCR clone 271414 (TRAV2, TRAJ37)
RAVDFTSNTGKLIF

SEQ ID NO: 542828 - protein, 13 aa, Homo sapiens
  CDR3 for beta chain variable domain of TCR clone 271414 (TRBV24-1, TRBJ1-2)
CATSGTALDGYTF

SEQ ID NO: 542829 - protein, 15 aa, Homo sapiens
  CDR3 for alpha chain variable domain of TCR clone 271415 (TRAV3, TRAJ3)
CAVRDMSSSASKILF

SEQ ID NO: 542830 - protein, 14 aa, Homo sapiens
  CDR3 for beta chain variable domain of TCR clone 271415 (TRBV19, TRBJ2-1)
CASPTFVLSGEQFF

SEQ ID NO: 542831 - protein, 15 aa, Homo sapiens
  CDR3 for alpha chain variable domain of TCR clone 271416 (TRAV26-1, TRAJ29)
CIVRVEGSGNTPLVL

SEQ ID NO: 542832 - protein, 14 aa, Homo sapiens
  CDR3 for beta chain variable domain of TCR clone 271416 (TRBV18, TRBJ2-5)
CASSPGVSRETQYF

SEQ ID NO: 542833 - protein, 14 aa, Homo sapiens
  CDR3 for alpha chain variable domain of TCR clone 271417 (TRAV12-1, TRAJ17)
CVVNYKAAGNKLTF

SEQ ID NO: 542834 - protein, 17 aa, Homo sapiens
  CDR3 for beta chain variable domain of TCR clone 271417 (TRBV20-1, TRBJ2-1)
CSASSSWLAGSYNELFF

SEQ ID NO: 542835 - protein, 13 aa, Homo sapiens
  CDR3 for alpha chain variable domain of TCR clone 271418 (TRAV21, TRAJ27)
CAARPGNAGKSPF

SEQ ID NO: 542836 - protein, 14 aa, Homo sapiens
  CDR3 for beta chain variable domain of TCR clone 271418 (TRBV7-6, TRBJ2-3)
CASSLGTVSDTQYF

SEQ ID NO: 542837 - protein, 10 aa, Homo sapiens
  CDR3 for alpha chain variable domain of TCR clone 271419 (TRAV23/DV6, TRAJ57)
CAASSTLSQG

SEQ ID NO: 542838 - protein, 13 aa, Homo sapiens
  CDR3 for beta chain variable domain of TCR clone 271419 (TRBV18, TRBJ2-5)
CASSLQGQETQYF

SEQ ID NO: 542839 - protein, 14 aa, Homo sapiens
  CDR3 for alpha chain variable domain of TCR clone 271420 (TRAV12-2, TRAJ45)
CAVNIGGGADGLTF

SEQ ID NO: 542840 - protein, 11 aa, Homo sapiens
  CDR3 for beta chain variable domain of TCR clone 271420 (TRBV11-2, TRBJ1-1)
CASSINTEAFF

SEQ ID NO: 542841 - protein, 16 aa, Homo sapiens
  CDR3 for alpha chain variable domain of TCR clone 271421 (TRAV3, TRAJ37)
CAVRPHGSGNTGKLIF

SEQ ID NO: 542842 - protein, 13 aa, Homo sapiens
  CDR3 for beta chain variable domain of TCR clone 271421 (TRBV25-1, TRBJ1-1)
CQHPPGGNTEAFV

SEQ ID NO: 542843 - protein, 16 aa, Homo sapiens
  CDR3 for alpha chain variable domain of TCR clone 271422 (TRAV30, TRAJ24)
CGTEIVDADSWGKFQF

SEQ ID NO: 542844 - protein, 15 aa, Homo sapiens
  CDR3 for beta chain variable domain of TCR clone 271422 (TRBV7-9, TRBJ1-4)
CDSSARTGGNEKLFF

SEQ ID NO: 542845 - protein, 14 aa, Homo sapiens
  CDR3 for alpha chain variable domain of TCR clone 271423 (TRAV1-2, TRAJ8)
CAVREDTGFQKLVI

SEQ ID NO: 542846 - protein, 16 aa, Homo sapiens
  CDR3 for beta chain variable domain of TCR clone 271423 (TRBV4-1, TRBJ2-3)
CASSQSTSGAEDTQYF

SEQ ID NO: 542847 - protein, 23 aa, Homo sapiens
  CDR3 for alpha chain variable domain of TCR clone 271424 (TRAV8-6, TRAJ36)
CAVSDWLGQTTSSLGLERDSPLF

SEQ ID NO: 542848 - protein, 14 aa, Homo sapiens
  CDR3 for beta chain variable domain of TCR clone 271424 (TRBV7-2, TRBJ2-7)
CASSPKTSFYEQYF

SEQ ID NO: 542849 - protein, 16 aa, Homo sapiens
  CDR3 for alpha chain variable domain of TCR clone 271425 (TRAV30, TRAJ24)
CGTEIADADSWGKFQF

SEQ ID NO: 542850 - protein, 14 aa, Homo sapiens
  CDR3 for beta chain variable domain of TCR clone 271425 (TRBV12-5, TRBJ2-5)
CASGSRTQQETQYF

SEQ ID NO: 542851 - protein, 14 aa, Homo sapiens
  CDR3 for alpha chain variable domain of TCR clone 271426 (TRAV2, TRAJ9)
CAVEDRSGGFKTIF

SEQ ID NO: 542852 - protein, 15 aa, Homo sapiens
  CDR3 for beta chain variable domain of TCR clone 271426 (TRBV7-3, TRBJ2-1)
CASSLGQGPFGEQFF

SEQ ID NO: 542853 - protein, 18 aa, Homo sapiens
  CDR3 for alpha chain variable domain of TCR clone 271427 (TRAV21, TRAJ52)
CAVRPSPAGGTIYGKLTF

SEQ ID NO: 542854 - protein, 17 aa, Homo sapiens
  CDR3 for beta chain variable domain of TCR clone 271427 (TRBV14, TRBJ2-3)
CASSQEPSGLSTDTQYF

SEQ ID NO: 542855 - protein, 15 aa, Homo sapiens
  CDR3 for alpha chain variable domain of TCR clone 271428 (TRAV26-1, TRAJ29)
CIVRAEGSVNTPLVF

SEQ ID NO: 542856 - protein, 15 aa, Homo sapiens
  CDR3 for beta chain variable domain of TCR clone 271428 (TRBV7-9, TRBJ1-5)
CASSQGHQPNQPQHF

SEQ ID NO: 542857 - protein, 14 aa, Homo sapiens
  CDR3 for alpha chain variable domain of TCR clone 271429 (TRAV12-2, TRAJ40)
CAVKIPSGTYKYIF

SEQ ID NO: 542858 - protein, 15 aa, Homo sapiens
  CDR3 for beta chain variable domain of TCR clone 271429 (TRBV19, TRBJ2-5)
CASSRLAGVEETQYF

SEQ ID NO: 542859 - protein, 13 aa, Homo sapiens
  CDR3 for alpha chain variable domain of TCR clone 271430 (TRAV17, TRAJ5)
CALRGTGRRALTC

SEQ ID NO: 542860 - protein, 15 aa, Homo sapiens
  CDR3 for beta chain variable domain of TCR clone 271430 (TRBV9, TRBJ1-6)
CASSVAGTGDSPLHF

SEQ ID NO: 542861 - protein, 15 aa, Homo sapiens
  CDR3 for alpha chain variable domain of TCR clone 271431 (TRAV12-1, TRAJ44)
CVADLPTGTTSKLTL

SEQ ID NO: 542862 - protein, 13 aa, Homo sapiens
  CDR3 for beta chain variable domain of TCR clone 271431 (TRBV6-5, TRBJ2-5)
CASSPQGGETQYF

SEQ ID NO: 542863 - protein, 15 aa, Homo sapiens
  CDR3 for alpha chain variable domain of TCR clone 271432 (TRAV12-3, TRAJ11)
CAMSEENSGYSTLTF

SEQ ID NO: 542864 - protein, 14 aa, Homo sapiens
  CDR3 for beta chain variable domain of TCR clone 271432 (TRBV7-3, TRBJ2-1)
CASSLAGGTNEQFF

SEQ ID NO: 542865 - protein, 14 aa, Homo sapiens
  CDR3 for alpha chain variable domain of TCR clone 271433 (TRAV12-3, TRAJ10)
SHLPLTGGGNKLTF

SEQ ID NO: 542866 - protein, 13 aa, Homo sapiens
  CDR3 for beta chain variable domain of TCR clone 271433 (TRBV7-3, TRBJ2-5)
CASSSRGGETQYF

SEQ ID NO: 542867 - protein, 14 aa, Homo sapiens
  CDR3 for alpha chain variable domain of TCR clone 271434 (TRAV2, TRAJ9)
CAVADRSGGFKTIF

SEQ ID NO: 542868 - protein, 12 aa, Homo sapiens
  CDR3 for beta chain variable domain of TCR clone 271434 (TRBV12-4, TRBJ2-4)
CASSSSGNIQYF

SEQ ID NO: 542869 - protein, 16 aa, Homo sapiens
  CDR3 for alpha chain variable domain of TCR clone 271435 (TRAV13-1, TRAJ10)
CAASSHFTGGGNKLTF

SEQ ID NO: 542870 - protein, 15 aa, Homo sapiens
  CDR3 for beta chain variable domain of TCR clone 271435 (TRBV7-9, TRBJ1-6)
CASSSPGRENSPLHF

SEQ ID NO: 542871 - protein, 12 aa, Homo sapiens
  CDR3 for alpha chain variable domain of TCR clone 271436 (TRAV8-3, TRAJ26)
CAGDNYGQNFVF

SEQ ID NO: 542872 - protein, 14 aa, Homo sapiens
  CDR3 for beta chain variable domain of TCR clone 271436 (TRBV7-6, TRBJ2-7)
CASSLFQDSYEQYF

SEQ ID NO: 542873 - protein, 14 aa, Homo sapiens
  CDR3 for alpha chain variable domain of TCR clone 271437 (TRAV21, TRAJ9)
CCVGGGTGGFKTIF

SEQ ID NO: 542874 - protein, 13 aa, Homo sapiens
  CDR3 for beta chain variable domain of TCR clone 271437 (TRBV12-4, TRBJ1-2)
CASSSGLTVISTF

SEQ ID NO: 542875 - protein, 15 aa, Homo sapiens
  CDR3 for alpha chain variable domain of TCR clone 271438 (TRAV1-2, TRAJ3)
CAVRGGYSSASKIIF

SEQ ID NO: 542876 - protein, 17 aa, Homo sapiens
  CDR3 for beta chain variable domain of TCR clone 271438 (TRBV7-3, TRBJ2-3)
CASSLMKRMRGADTQYF

SEQ ID NO: 542877 - protein, 16 aa, Homo sapiens
  CDR3 for alpha chain variable domain of TCR clone 271439 (TRAV3, TRAJ10)
CVVRDMRAGGGNKLTF

SEQ ID NO: 542878 - protein, 20 aa, Homo sapiens
  CDR3 for beta chain variable domain of TCR clone 271439 (TRBV11-3, TRBJ2-7)
CASSQRTSGSLRAVLRAGHQ

SEQ ID NO: 542879 - protein, 17 aa, Homo sapiens
  CDR3 for alpha chain variable domain of TCR clone 271440 (TRAV3, TRAJ6)
CAVRDGPRAGGSYIPTS

SEQ ID NO: 542880 - protein, 13 aa, Homo sapiens
  CDR3 for beta chain variable domain of TCR clone 271440 (TRBV29-1, TRBJ1-1)
CSVGDSRNTEAFF

SEQ ID NO: 542881 - protein, 16 aa, Homo sapiens
  CDR3 for alpha chain variable domain of TCR clone 271441 (TRAV20, TRAJ22)
CAVQASSSGSARQLTF

SEQ ID NO: 542882 - protein, 10 aa, Homo sapiens
  CDR3 for beta chain variable domain of TCR clone 271441 (TRBV2, TRBJ2-5)
WASSAATQYF

SEQ ID NO: 542883 - protein, 14 aa, Homo sapiens
  CDR3 for alpha chain variable domain of TCR clone 271442 (TRAV13-1, TRAJ35)
CAASKGGFGNVLYV

SEQ ID NO: 542884 - protein, 13 aa, Homo sapiens
  CDR3 for beta chain variable domain of TCR clone 271442 (TRBV7-3, TRBJ1-1)
CASSQDWGAEAFF

SEQ ID NO: 542885 - protein, 17 aa, Homo sapiens
  CDR3 for alpha chain variable domain of TCR clone 271443 (TRAV8-6, TRAJ58)
CAVSSWVGETSGARLTF

SEQ ID NO: 542886 - protein, 12 aa, Homo sapiens
  CDR3 for beta chain variable domain of TCR clone 271443 (TRBV28, TRBJ2-3)
CASSLYRDTQYF

SEQ ID NO: 542887 - protein, 18 aa, Homo sapiens
  CDR3 for alpha chain variable domain of TCR clone 271444 (TRAV21, TRAJ52)
CAVRPSPAGGTSYGKLTF

SEQ ID NO: 542888 - protein, 11 aa, Homo sapiens
  CDR3 for beta chain variable domain of TCR clone 271444 (TRBV12-4, TRBJ2-7)
CASALKYEQYF

SEQ ID NO: 542889 - protein, 12 aa, Homo sapiens
  CDR3 for alpha chain variable domain of TCR clone 271445 (TRAV3, TRAJ34)
CAVLGNTDQLIF

SEQ ID NO: 542890 - protein, 13 aa, Homo sapiens
  CDR3 for beta chain variable domain of TCR clone 271445 (TRBV19, TRBJ2-1)
CASSIGTGNEQFF

SEQ ID NO: 542891 - protein, 13 aa, Homo sapiens
  CDR3 for alpha chain variable domain of TCR clone 271446 (TRAV12-2, TRAJ47)
CAVFMEYVNKLVF

SEQ ID NO: 542892 - protein, 14 aa, Homo sapiens
  CDR3 for beta chain variable domain of TCR clone 271446 (TRBV4-1, TRBJ1-5)
CASSQGPTNQPQHF

SEQ ID NO: 542893 - protein, 12 aa, Homo sapiens
  CDR3 for alpha chain variable domain of TCR clone 271447 (TRAV27, TRAJ35)
CAEADFGNVLHC

SEQ ID NO: 542894 - protein, 16 aa, Homo sapiens
  CDR3 for beta chain variable domain of TCR clone 271447 (TRBV6-1, TRBJ2-1)
CASILRQGSSYNEQFF

SEQ ID NO: 542895 - protein, 17 aa, Homo sapiens
  CDR3 for alpha chain variable domain of TCR clone 271448 (TRAV3, TRAJ6)
CAVRDGPRAGGSYIPPF

SEQ ID NO: 542896 - protein, 13 aa, Homo sapiens
  CDR3 for beta chain variable domain of TCR clone 271448 (TRBV20-1, TRBJ1-1)
CSARGGGNTEAFF

SEQ ID NO: 542897 - protein, 13 aa, Homo sapiens
  CDR3 for alpha chain variable domain of TCR clone 271449 (TRAV20, TRAJ45)
CTVKKRRCRLTHL

SEQ ID NO: 542898 - protein, 14 aa, Homo sapiens
  CDR3 for beta chain variable domain of TCR clone 271449 (TRBV15, TRBJ2-5)
CATSIGGLGETQYF

SEQ ID NO: 542899 - protein, 12 aa, Homo sapiens
  CDR3 for alpha chain variable domain of TCR clone 271450 (TRAV13-1, TRAJ53)
CAAGGSNDKLTF

SEQ ID NO: 542900 - protein, 11 aa, Homo sapiens
  CDR3 for beta chain variable domain of TCR clone 271450 (TRBV2, TRBJ1-1)
CASREGTEAFF

SEQ ID NO: 542901 - protein, 10 aa, Homo sapiens
  CDR3 for alpha chain variable domain of TCR clone 271451 (TRAV12-3, TRAJ49)
CAMNDDQFYF

SEQ ID NO: 542902 - protein, 12 aa, Homo sapiens
  CDR3 for beta chain variable domain of TCR clone 271451 (TRBV7-8, TRBJ2-7)
CASSLGDREQYF

SEQ ID NO: 542903 - protein, 14 aa, Homo sapiens
  CDR3 for alpha chain variable domain of TCR clone 271452 (TRAV1-1, TRAJ30)
SAVRSLNRDDKIIF

SEQ ID NO: 542904 - protein, 15 aa, Homo sapiens
  CDR3 for beta chain variable domain of TCR clone 271452 (TRBV27, TRBJ1-4)
CASSAQQDLNEKLFF

SEQ ID NO: 542905 - protein, 14 aa, Homo sapiens
  CDR3 for alpha chain variable domain of TCR clone 271453 (TRAV1-2, TRAJ16)
CADNRFSDGQKLLF

SEQ ID NO: 542906 - protein, 15 aa, Homo sapiens
  CDR3 for beta chain variable domain of TCR clone 271453 (TRBV9, TRBJ1-6)
CASSVAGTGDSPLHF

SEQ ID NO: 542907 - protein, 14 aa, Homo sapiens
  CDR3 for alpha chain variable domain of TCR clone 271454 (TRAV12-1, TRAJ26)
CVVKGSNYGQNFVF

SEQ ID NO: 542908 - protein, 15 aa, Homo sapiens
  CDR3 for beta chain variable domain of TCR clone 271454 (TRBV7-2, TRBJ2-3)
CASSLEQGGTDTQYF

SEQ ID NO: 542909 - protein, 15 aa, Homo sapiens
  CDR3 for alpha chain variable domain of TCR clone 271455 (TRAV2, TRAJ42)
CAVEGDGGSQGNLIF

SEQ ID NO: 542910 - protein, 14 aa, Homo sapiens
  CDR3 for beta chain variable domain of TCR clone 271455 (TRBV11-3, TRBJ2-7)
CASSPDRNTYEQYF

SEQ ID NO: 542911 - protein, 13 aa, Homo sapiens
  CDR3 for alpha chain variable domain of TCR clone 271456 (TRAV13-1, TRAJ39)
CAASIWAGNMLTF

SEQ ID NO: 542912 - protein, 12 aa, Homo sapiens
  CDR3 for beta chain variable domain of TCR clone 271456 (TRBV7-3, TRBJ1-2)
CASSKKGVPVTF

SEQ ID NO: 542913 - protein, 13 aa, Homo sapiens
  CDR3 for alpha chain variable domain of TCR clone 271457 (TRAV27, TRAJ3)
ASLRGSSASKIIF

SEQ ID NO: 542914 - protein, 18 aa, Homo sapiens
  CDR3 for beta chain variable domain of TCR clone 271457 (TRBV11-2, TRBJ2-3)
CASSLGGASRGAPNTQYF

SEQ ID NO: 542915 - protein, 15 aa, Homo sapiens
  CDR3 for alpha chain variable domain of TCR clone 271458 (TRAV3, TRAJ4)
CAVRDGTVGYNKLIF

SEQ ID NO: 542916 - protein, 13 aa, Homo sapiens
  CDR3 for beta chain variable domain of TCR clone 271458 (TRBV12-5, TRBJ1-2)
CASGVRTGNGYTF

SEQ ID NO: 542917 - protein, 13 aa, Homo sapiens
  CDR3 for alpha chain variable domain of TCR clone 271459 (TRAV21, TRAJ57)
CAVTQGGSEKLVF

SEQ ID NO: 542918 - protein, 16 aa, Homo sapiens
  CDR3 for beta chain variable domain of TCR clone 271459 (TRBV29-1, TRBJ2-7)
CSVGDAEDGTAYEQYF

SEQ ID NO: 542919 - protein, 13 aa, Homo sapiens
  CDR3 for alpha chain variable domain of TCR clone 271460 (TRAV17, TRAJ9)
CATDYTGGFKTIF

SEQ ID NO: 542920 - protein, 15 aa, Homo sapiens
  CDR3 for beta chain variable domain of TCR clone 271460 (TRBV6-5, TRBJ2-1)
CASSYDAGAGNEQFF

SEQ ID NO: 542921 - protein, 12 aa, Homo sapiens
  CDR3 for alpha chain variable domain of TCR clone 271461 (TRAV16, TRAJ10)
CSRTGGGNKLTF

SEQ ID NO: 542922 - protein, 14 aa, Homo sapiens
  CDR3 for beta chain variable domain of TCR clone 271461 (TRBV7-9, TRBJ2-5)
CASSLDTAQETQYF

SEQ ID NO: 542923 - protein, 11 aa, Homo sapiens
  CDR3 for alpha chain variable domain of TCR clone 271462 (TRAV12-2, TRAJ36)
CAVDGANNLFF

SEQ ID NO: 542924 - protein, 11 aa, Homo sapiens
  CDR3 for beta chain variable domain of TCR clone 271462 (TRBV7-2, TRBJ2-7)
CASSSGLWQYF

SEQ ID NO: 542925 - protein, 13 aa, Homo sapiens
  CDR3 for alpha chain variable domain of TCR clone 271463 (TRAV12-1, TRAJ9)
CVVLNTGGFKTIF

SEQ ID NO: 542926 - protein, 13 aa, Homo sapiens
  CDR3 for beta chain variable domain of TCR clone 271463 (TRBV20-1, TRBJ1-1)
CSARGGGNTGAFF

SEQ ID NO: 542927 - protein, 13 aa, Homo sapiens
  CDR3 for alpha chain variable domain of TCR clone 271464 (TRAV20, TRAJ29)
CAVQAVGNTPLGF

SEQ ID NO: 542928 - protein, 15 aa, Homo sapiens
  CDR3 for beta chain variable domain of TCR clone 271464 (TRBV10-2, TRBJ2-5)
CASRGSGGPQETQYF

SEQ ID NO: 542929 - protein, 15 aa, Homo sapiens
  CDR3 for alpha chain variable domain of TCR clone 271465 (TRAV17, TRAJ57)
CATGPSQGGSEKLVF

SEQ ID NO: 542930 - protein, 13 aa, Homo sapiens
  CDR3 for beta chain variable domain of TCR clone 271465 (TRBV19, TRBJ1-3)
CASRLSLGNTIYF

SEQ ID NO: 542931 - protein, 14 aa, Homo sapiens
  CDR3 for alpha chain variable domain of TCR clone 271466 (TRAV1-2, TRAJ8)
CAVREDTGFQKLVF

SEQ ID NO: 542932 - protein, 12 aa, Homo sapiens
  CDR3 for beta chain variable domain of TCR clone 271466 (TRBV12-4, TRBJ2-7)
CASNPGGGEQYF

SEQ ID NO: 542933 - protein, 16 aa, Homo sapiens
  CDR3 for alpha chain variable domain of TCR clone 271467 (TRAV30, TRAJ24)
CGTEIVDADSWGKFQC

SEQ ID NO: 542934 - protein, 15 aa, Homo sapiens
  CDR3 for beta chain variable domain of TCR clone 271467 (TRBV20-1, TRBJ2-4)
CSARDLTGGPNIQYF

SEQ ID NO: 542935 - protein, 13 aa, Homo sapiens
  CDR3 for alpha chain variable domain of TCR clone 271468 (TRAV21, TRAJ58)
CAVKESSGSRLTF

SEQ ID NO: 542936 - protein, 17 aa, Homo sapiens
  CDR3 for beta chain variable domain of TCR clone 271468 (TRBV5-1, TRBJ2-3)
CACSLAGWGSVVDTQYC

SEQ ID NO: 542937 - protein, 10 aa, Homo sapiens
  CDR3 for alpha chain variable domain of TCR clone 271469 (TRAV26-1, TRAJ22)
CIVSLNFFWF

SEQ ID NO: 542938 - protein, 12 aa, Homo sapiens
  CDR3 for beta chain variable domain of TCR clone 271469 (TRBV7-9, TRBJ2-7)
CASSIKREEQYF

SEQ ID NO: 542939 - protein, 13 aa, Homo sapiens
  CDR3 for alpha chain variable domain of TCR clone 271470 (TRAV25, TRAJ26)
CAGKDNYGQNFVF

SEQ ID NO: 542940 - protein, 15 aa, Homo sapiens
  CDR3 for beta chain variable domain of TCR clone 271470 (TRBV10-3, TRBJ2-1)
CAIRNGTSGHNEQFF

SEQ ID NO: 542941 - protein, 14 aa, Homo sapiens
  CDR3 for alpha chain variable domain of TCR clone 271471 (TRAV8-4, TRAJ15)
CAVILNQAGTALIF

SEQ ID NO: 542942 - protein, 12 aa, Homo sapiens
  CDR3 for beta chain variable domain of TCR clone 271471 (TRBV7-9, TRBJ1-6)
CASSASEPPLHF

SEQ ID NO: 542943 - protein, 12 aa, Homo sapiens
  CDR3 for alpha chain variable domain of TCR clone 271472 (TRAV1-2, TRAJ7)
CAVAYGNNRLAF

SEQ ID NO: 542944 - protein, 16 aa, Homo sapiens
  CDR3 for beta chain variable domain of TCR clone 271472 (TRBV5-1, TRBJ2-7)
CASSPMTGALSCEQYF

SEQ ID NO: 542945 - protein, 13 aa, Homo sapiens
  CDR3 for alpha chain variable domain of TCR clone 271473 (TRAV29/DV5, TRAJ47)
CAASAEYGNKLVF

SEQ ID NO: 542946 - protein, 15 aa, Homo sapiens
  CDR3 for beta chain variable domain of TCR clone 271473 (TRBV7-9, TRBJ1-4)
CASSARTGGNEKLFS

SEQ ID NO: 542947 - protein, 13 aa, Homo sapiens
  CDR3 for alpha chain variable domain of TCR clone 271474 (TRAV17, TRAJ5)
CAPMDTGRRALTF

SEQ ID NO: 542948 - protein, 15 aa, Homo sapiens
  CDR3 for beta chain variable domain of TCR clone 271474 (TRBV6-6, TRBJ2-5)
CASSPGGCLEGTQYF

SEQ ID NO: 542949 - protein, 15 aa, Homo sapiens
  CDR3 for alpha chain variable domain of TCR clone 271475 (TRAV26-1, TRAJ44)
CIARVPFGTASKITF

SEQ ID NO: 542950 - protein, 17 aa, Homo sapiens
  CDR3 for beta chain variable domain of TCR clone 271475 (TRBV24-1, TRBJ2-4)
CATSDAEARGVRNIQYF

SEQ ID NO: 542951 - protein, 16 aa, Homo sapiens
  CDR3 for alpha chain variable domain of TCR clone 271476 (TRAV8-3, TRAJ8)
CAVPRDGNTGFQKLVF

SEQ ID NO: 542952 - protein, 14 aa, Homo sapiens
  CDR3 for beta chain variable domain of TCR clone 271476 (TRBV7-8, TRBJ2-7)
CASSFRQGSYEQYF

SEQ ID NO: 542953 - protein, 10 aa, Homo sapiens
  CDR3 for alpha chain variable domain of TCR clone 271477 (TRAV12-1, TRAJ37)
ARGNTGELIV

SEQ ID NO: 542954 - protein, 15 aa, Homo sapiens
  CDR3 for beta chain variable domain of TCR clone 271477 (TRBV7-2, TRBJ2-3)
CASSLEQGGTDTQYF

SEQ ID NO: 542955 - protein, 15 aa, Homo sapiens
  CDR3 for alpha chain variable domain of TCR clone 271478 (TRAV17, TRAJ16)
CATALRFSGGQKLLF

SEQ ID NO: 542956 - protein, 15 aa, Homo sapiens
  CDR3 for beta chain variable domain of TCR clone 271478 (TRBV13, TRBJ1-5)
CASSFGQGGVQPQHF

SEQ ID NO: 542957 - protein, 18 aa, Homo sapiens
  CDR3 for alpha chain variable domain of TCR clone 271479 (TRAV23/DV6, )
CAEPDIQNPDPAVSQLRD

SEQ ID NO: 542958 - protein, 15 aa, Homo sapiens
  CDR3 for beta chain variable domain of TCR clone 271479 (TRBV12-4, TRBJ2-5)
CASTLNSGGGETQYF

SEQ ID NO: 542959 - protein, 14 aa, Homo sapiens
  CDR3 for alpha chain variable domain of TCR clone 271480 (TRAV16, TRAJ33)
CALSAMDSNYQLIW

SEQ ID NO: 542960 - protein, 14 aa, Homo sapiens
  CDR3 for beta chain variable domain of TCR clone 271480 (TRBV19, TRBJ2-1)
CARGARSFQWEQFF

SEQ ID NO: 542961 - protein, 16 aa, Homo sapiens
  CDR3 for alpha chain variable domain of TCR clone 271481 (TRAV3, TRAJ6)
CAVRDGMGRWKLHTYI

SEQ ID NO: 542962 - protein, 15 aa, Homo sapiens
  CDR3 for beta chain variable domain of TCR clone 271481 (TRBV5-1, TRBJ2-7)
CASSLGDFTTYEQYF

SEQ ID NO: 542963 - protein, 11 aa, Homo sapiens
  CDR3 for alpha chain variable domain of TCR clone 271482 (TRAV21, TRAJ23)
CAPQRRGKLIF

SEQ ID NO: 542964 - protein, 12 aa, Homo sapiens
  CDR3 for beta chain variable domain of TCR clone 271482 (TRBV7-9, TRBJ1-1)
CASSLVETEAFF

SEQ ID NO: 542965 - protein, 18 aa, Homo sapiens
  CDR3 for alpha chain variable domain of TCR clone 271483 (TRAV16, TRAJ52)
CALSGVDAGGTSYGKLTF

SEQ ID NO: 542966 - protein, 14 aa, Homo sapiens
  CDR3 for beta chain variable domain of TCR clone 271483 (TRBV19, TRBJ2-1)
CASPTFVLSGEQFF

SEQ ID NO: 542967 - protein, 15 aa, Homo sapiens
  CDR3 for alpha chain variable domain of TCR clone 271484 (TRAV2, TRAJ9)
CAVEDRGTGGFKTIF

SEQ ID NO: 542968 - protein, 15 aa, Homo sapiens
  CDR3 for beta chain variable domain of TCR clone 271484 (TRBV3-1, TRBJ2-2)
CASSQAVRETGELFF

SEQ ID NO: 542969 - protein, 14 aa, Homo sapiens
  CDR3 for alpha chain variable domain of TCR clone 271485 (TRAV38-1, TRAJ45)
CAYYSGGGADGLTF

SEQ ID NO: 542970 - protein, 13 aa, Homo sapiens
  CDR3 for beta chain variable domain of TCR clone 271485 (TRBV12-4, TRBJ1-2)
CASSLRQGKGYTF

SEQ ID NO: 542971 - protein, 17 aa, Homo sapiens
  CDR3 for alpha chain variable domain of TCR clone 271486 (TRAV12-2, TRAJ48)
CASNEKLTFGTGTRLTI

SEQ ID NO: 542972 - protein, 14 aa, Homo sapiens
  CDR3 for beta chain variable domain of TCR clone 271486 (TRBV5-1, TRBJ2-5)
CASSLAWKQETHYF

SEQ ID NO: 542973 - protein, 11 aa, Homo sapiens
  CDR3 for alpha chain variable domain of TCR clone 271487 (TRAV4, TRAJ31)
CLVGLNARLMF

SEQ ID NO: 542974 - protein, 16 aa, Homo sapiens
  CDR3 for beta chain variable domain of TCR clone 271487 (TRBV15, TRBJ2-6)
CATSVNGGFLANGLTF

SEQ ID NO: 542975 - protein, 13 aa, Homo sapiens
  CDR3 for alpha chain variable domain of TCR clone 271488 (TRAV17, TRAJ5)
CAPMDTGRRALTF

SEQ ID NO: 542976 - protein, 14 aa, Homo sapiens
  CDR3 for beta chain variable domain of TCR clone 271488 (TRBV29-1, TRBJ2-7)
RSVYQRQASYEQYF

SEQ ID NO: 542977 - protein, 14 aa, Homo sapiens
  CDR3 for alpha chain variable domain of TCR clone 271489 (TRAV12-2, TRAJ17)
CAVLFKAAGNKLTF

SEQ ID NO: 542978 - protein, 13 aa, Homo sapiens
  CDR3 for beta chain variable domain of TCR clone 271489 (TRBV7-2, TRBJ2-7)
CASSSPSGSEQYF

SEQ ID NO: 542979 - protein, 10 aa, Homo sapiens
  CDR3 for alpha chain variable domain of TCR clone 271490 (TRAV12-1, TRAJ37)
ARGNTGALIF

SEQ ID NO: 542980 - protein, 15 aa, Homo sapiens
  CDR3 for beta chain variable domain of TCR clone 271490 (TRBV7-2, TRBJ2-3)
CASSLEQGGTDTQYF

SEQ ID NO: 542981 - protein, 11 aa, Homo sapiens
  CDR3 for alpha chain variable domain of TCR clone 271491 (TRAV2, TRAJ13)
CASGGYQKGTF

SEQ ID NO: 542982 - protein, 15 aa, Homo sapiens
  CDR3 for beta chain variable domain of TCR clone 271491 (TRBV6-1, TRBJ2-2)
CASSRLRGDTGELFF

SEQ ID NO: 542983 - protein, 13 aa, Homo sapiens
  CDR3 for alpha chain variable domain of TCR clone 271492 (TRAV17, TRAJ26)
CATVDNYGQNFVF

SEQ ID NO: 542984 - protein, 16 aa, Homo sapiens
  CDR3 for beta chain variable domain of TCR clone 271492 (TRBV2, TRBJ2-1)
CACSVGGSLSYNEQFF

SEQ ID NO: 542985 - protein, 15 aa, Homo sapiens
  CDR3 for alpha chain variable domain of TCR clone 271493 (TRAV1-2, TRAJ15)
CAVDVMGSAGTALIF

SEQ ID NO: 542986 - protein, 17 aa, Homo sapiens
  CDR3 for beta chain variable domain of TCR clone 271493 (TRBV13, TRBJ2-3)
CASSLSRVAGGRNTQYF

SEQ ID NO: 542987 - protein, 14 aa, Homo sapiens
  CDR3 for alpha chain variable domain of TCR clone 271494 (TRAV12-2, TRAJ24)
CAVTPADSWGKLQF

SEQ ID NO: 542988 - protein, 13 aa, Homo sapiens
  CDR3 for beta chain variable domain of TCR clone 271494 (TRBV6-4, TRBJ1-5)
RASSADLNQPQHF

SEQ ID NO: 542989 - protein, 14 aa, Homo sapiens
  CDR3 for alpha chain variable domain of TCR clone 271495 (TRAV20, TRAJ20)
CAVRRGYNEYKLSF

SEQ ID NO: 542990 - protein, 13 aa, Homo sapiens
  CDR3 for beta chain variable domain of TCR clone 271495 (TRBV19, TRBJ2-5)
CASSETAPEAQYF

SEQ ID NO: 542991 - protein, 15 aa, Homo sapiens
  CDR3 for alpha chain variable domain of TCR clone 271496 (TRAV29/DV5, TRAJ53)
CAASASGGSNYKLTF

SEQ ID NO: 542992 - protein, 11 aa, Homo sapiens
  CDR3 for beta chain variable domain of TCR clone 271496 (TRBV12-4, TRBJ2-3)
CASTATDTQYF

SEQ ID NO: 542993 - protein, 13 aa, Homo sapiens
  CDR3 for alpha chain variable domain of TCR clone 271497 (TRAV17, TRAJ40)
CAGALGGTYPSIF

SEQ ID NO: 542994 - protein, 16 aa, Homo sapiens
  CDR3 for beta chain variable domain of TCR clone 271497 (TRBV11-2, TRBJ1-2)
CASSLDTGGADYGYTF

SEQ ID NO: 542995 - protein, 13 aa, Homo sapiens
  CDR3 for alpha chain variable domain of TCR clone 271498 (TRAV3, TRAJ13)
CAVRDGGYQKVTF

SEQ ID NO: 542996 - protein, 14 aa, Homo sapiens
  CDR3 for beta chain variable domain of TCR clone 271498 (TRBV19, TRBJ2-1)
CASPTFVLSGEQFF

SEQ ID NO: 542997 - protein, 11 aa, Homo sapiens
  CDR3 for alpha chain variable domain of TCR clone 271499 (TRAV17, TRAJ9)
CATTVGFKTIF

SEQ ID NO: 542998 - protein, 13 aa, Homo sapiens
  CDR3 for beta chain variable domain of TCR clone 271499 (TRBV20-1, TRBJ1-1)
CSAPLGGGTEAFF

SEQ ID NO: 542999 - protein, 14 aa, Homo sapiens
  CDR3 for alpha chain variable domain of TCR clone 271500 (TRAV12-3, TRAJ56)
CAMSVTGANSKLTF

SEQ ID NO: 543000 - protein, 14 aa, Homo sapiens
  CDR3 for beta chain variable domain of TCR clone 271500 (TRBV25-1, TRBJ1-1)
CASTHLGGNTEAFF

SEQ ID NO: 543001 - protein, 12 aa, Homo sapiens
  CDR3 for alpha chain variable domain of TCR clone 271501 (TRAV27, TRAJ48)
CAGARGNEKLTF

SEQ ID NO: 543002 - protein, 16 aa, Homo sapiens
  CDR3 for beta chain variable domain of TCR clone 271501 (TRBV19, TRBJ2-1)
CASSKAGPSSYNEQFF

SEQ ID NO: 543003 - protein, 12 aa, Homo sapiens
  CDR3 for alpha chain variable domain of TCR clone 271502 (TRAV30, TRAJ43)
CGTEERGNDMRF

SEQ ID NO: 543004 - protein, 15 aa, Homo sapiens
  CDR3 for beta chain variable domain of TCR clone 271502 (TRBV27, TRBJ2-1)
CASSSGLAGGNEQFF

SEQ ID NO: 543005 - protein, 15 aa, Homo sapiens
  CDR3 for alpha chain variable domain of TCR clone 271503 (TRAV2, TRAJ11)
CAVGGRDSGYSTLTF

SEQ ID NO: 543006 - protein, 12 aa, Homo sapiens
  CDR3 for beta chain variable domain of TCR clone 271503 (TRBV5-4, TRBJ2-7)
CASSLEAYEQYF

SEQ ID NO: 543007 - protein, 15 aa, Homo sapiens
  CDR3 for alpha chain variable domain of TCR clone 271504 (TRAV8-3, TRAJ45)
CASSYSGGGADGLTF

SEQ ID NO: 543008 - protein, 15 aa, Homo sapiens
  CDR3 for beta chain variable domain of TCR clone 271504 (TRBV7-6, TRBJ2-4)
CASSLGSAPQNIQYF

SEQ ID NO: 543009 - protein, 18 aa, Homo sapiens
  CDR3 for alpha chain variable domain of TCR clone 271505 (TRAV8-3, TRAJ6)
CAVGAENQEEATYLHLEE

SEQ ID NO: 543010 - protein, 14 aa, Homo sapiens
  CDR3 for beta chain variable domain of TCR clone 271505 (TRBV6-6, TRBJ2-7)
CASSDSGAGYEQYF

SEQ ID NO: 543011 - protein, 12 aa, Homo sapiens
  CDR3 for alpha chain variable domain of TCR clone 271506 (TRAV38-2/DV8, TRAJ48)
CALLSGNEKLTF

SEQ ID NO: 543012 - protein, 14 aa, Homo sapiens
  CDR3 for beta chain variable domain of TCR clone 271506 (TRBV11-2, TRBJ2-3)
CASSRRARTDTQYF

SEQ ID NO: 543013 - protein, 15 aa, Homo sapiens
  CDR3 for alpha chain variable domain of TCR clone 271507 (TRAV2, TRAJ28)
CGVPYSGAGSYQLTF

SEQ ID NO: 543014 - protein, 10 aa, Homo sapiens
  CDR3 for beta chain variable domain of TCR clone 271507 (TRBV23-1, TRBJ2-1)
KWSSYNEQFF

SEQ ID NO: 543015 - protein, 12 aa, Homo sapiens
  CDR3 for alpha chain variable domain of TCR clone 271508 (TRAV1-1, TRAJ24)
CAVRGSWGKFQF

SEQ ID NO: 543016 - protein, 14 aa, Homo sapiens
  CDR3 for beta chain variable domain of TCR clone 271508 (TRBV13, TRBJ2-1)
CASSTALSYNEQFF

SEQ ID NO: 543017 - protein, 17 aa, Homo sapiens
  CDR3 for alpha chain variable domain of TCR clone 271509 (TRAV8-6, TRAJ8)
CAVKEVIEDTGFQKLVF

SEQ ID NO: 543018 - protein, 12 aa, Homo sapiens
  CDR3 for beta chain variable domain of TCR clone 271509 (TRBV19, TRBJ1-4)
CASKDWPGGLFF

SEQ ID NO: 543019 - protein, 17 aa, Homo sapiens
  CDR3 for alpha chain variable domain of TCR clone 271510 (TRAV3, TRAJ6)
CAVRDGPRAGGSYIPTF

SEQ ID NO: 543020 - protein, 13 aa, Homo sapiens
  CDR3 for beta chain variable domain of TCR clone 271510 (TRBV12-4, TRBJ2-2)
CASSPLPPGELFF

SEQ ID NO: 543021 - protein, 12 aa, Homo sapiens
  CDR3 for alpha chain variable domain of TCR clone 271511 (TRAV2, TRAJ31)
CAVEDNNARLMF

SEQ ID NO: 543022 - protein, 18 aa, Homo sapiens
  CDR3 for beta chain variable domain of TCR clone 271511 (TRBV28, TRBJ2-7)
CASSLYAGDNSGLNEQYF

SEQ ID NO: 543023 - protein, 15 aa, Homo sapiens
  CDR3 for alpha chain variable domain of TCR clone 271512 (TRAV16, TRAJ17)
CALSGNKAAGNKLTF

SEQ ID NO: 543024 - protein, 15 aa, Homo sapiens
  CDR3 for beta chain variable domain of TCR clone 271512 (TRBV6-6, TRBJ2-5)
CASSPGGGLEETQYF

SEQ ID NO: 543025 - protein, 16 aa, Homo sapiens
  CDR3 for alpha chain variable domain of TCR clone 271513 (TRAV26-1, TRAJ37)
CIVRGDGSGNTGKLIF

SEQ ID NO: 543026 - protein, 17 aa, Homo sapiens
  CDR3 for beta chain variable domain of TCR clone 271513 (TRBV4-1, TRBJ2-7)
CASSRDLLGVRGGEQYF

SEQ ID NO: 543027 - protein, 11 aa, Homo sapiens
  CDR3 for alpha chain variable domain of TCR clone 271514 (TRAV2, TRAJ33)
CAVDSNSQLIW

SEQ ID NO: 543028 - protein, 15 aa, Homo sapiens
  CDR3 for beta chain variable domain of TCR clone 271514 (TRBV19, TRBJ1-2)
CASSVGRVLNYGYTF

SEQ ID NO: 543029 - protein, 15 aa, Homo sapiens
  CDR3 for alpha chain variable domain of TCR clone 271515 (TRAV26-1, TRAJ29)
CIVRVEGSGNKPLVL

SEQ ID NO: 543030 - protein, 14 aa, Homo sapiens
  CDR3 for beta chain variable domain of TCR clone 271515 (TRBV18, TRBJ2-5)
CASSPGVSQETQYF

SEQ ID NO: 543031 - protein, 15 aa, Homo sapiens
  CDR3 for alpha chain variable domain of TCR clone 271516 (TRAV8-2, TRAJ24)
CVVSDRPDSWGKLQF

SEQ ID NO: 543032 - protein, 11 aa, Homo sapiens
  CDR3 for beta chain variable domain of TCR clone 271516 (TRBV20-1, TRBJ1-2)
CSVQGAGGYTF

SEQ ID NO: 543033 - protein, 12 aa, Homo sapiens
  CDR3 for alpha chain variable domain of TCR clone 271517 (TRAV13-1, TRAJ49)
CAASISSNQFYF

SEQ ID NO: 543034 - protein, 14 aa, Homo sapiens
  CDR3 for beta chain variable domain of TCR clone 271517 (TRBV7-2, TRBJ2-1)
CASSPGLAGNEQFF

SEQ ID NO: 543035 - protein, 11 aa, Homo sapiens
  CDR3 for alpha chain variable domain of TCR clone 271518 (TRAV13-2, TRAJ36)
CAETGANNLFF

SEQ ID NO: 543036 - protein, 13 aa, Homo sapiens
  CDR3 for beta chain variable domain of TCR clone 271518 (TRBV7-9, TRBJ2-4)
CATGGLAGNSQYF

SEQ ID NO: 543037 - protein, 11 aa, Homo sapiens
  CDR3 for alpha chain variable domain of TCR clone 271519 (TRAV2, TRAJ21)
CAVFNFNKFYF

SEQ ID NO: 543038 - protein, 17 aa, Homo sapiens
  CDR3 for beta chain variable domain of TCR clone 271519 (TRBV18, TRBJ2-1)
CASSKGLSGGADNEQFF

SEQ ID NO: 543039 - protein, 12 aa, Homo sapiens
  CDR3 for alpha chain variable domain of TCR clone 271520 (TRAV8-3, TRAJ20)
CAVGGGDYKLSF

SEQ ID NO: 543040 - protein, 13 aa, Homo sapiens
  CDR3 for beta chain variable domain of TCR clone 271520 (TRBV15, TRBJ1-6)
CATSGGLNSPLHF

SEQ ID NO: 543041 - protein, 15 aa, Homo sapiens
  CDR3 for alpha chain variable domain of TCR clone 271521 (TRAV27, TRAJ38)
CAARRNAGNNRKLIW

SEQ ID NO: 543042 - protein, 12 aa, Homo sapiens
  CDR3 for beta chain variable domain of TCR clone 271521 (TRBV12-4, TRBJ1-5)
CASSLSGQPQHF

SEQ ID NO: 543043 - protein, 14 aa, Homo sapiens
  CDR3 for alpha chain variable domain of TCR clone 271522 (TRAV27, TRAJ12)
CAGARMDGSDKLIF

SEQ ID NO: 543044 - protein, 18 aa, Homo sapiens
  CDR3 for beta chain variable domain of TCR clone 271522 (TRBV10-3, TRBJ2-7)
CAISESGRPSGGRVEQYF

SEQ ID NO: 543045 - protein, 16 aa, Homo sapiens
  CDR3 for alpha chain variable domain of TCR clone 271523 (TRAV3, TRAJ6)
CAVRDGMGRRKLHTYI

SEQ ID NO: 543046 - protein, 15 aa, Homo sapiens
  CDR3 for beta chain variable domain of TCR clone 271523 (TRBV9, TRBJ2-1)
CASSLAGSPYNEQFF

SEQ ID NO: 543047 - protein, 14 aa, Homo sapiens
  CDR3 for alpha chain variable domain of TCR clone 271524 (TRAV16, TRAJ33)
CALSAMDSNYQLIW

SEQ ID NO: 543048 - protein, 13 aa, Homo sapiens
  CDR3 for beta chain variable domain of TCR clone 271524 (TRBV19, TRBJ2-5)
CASSMGGAGTQYF

SEQ ID NO: 543049 - protein, 14 aa, Homo sapiens
  CDR3 for alpha chain variable domain of TCR clone 271525 (TRAV1-2, TRAJ16)
CAVNRFSDGQKLLF

SEQ ID NO: 543050 - protein, 16 aa, Homo sapiens
  CDR3 for beta chain variable domain of TCR clone 271525 (TRBV7-2, TRBJ2-7)
CAGSLDLSGGAYEQYF

SEQ ID NO: 543051 - protein, 12 aa, Homo sapiens
  CDR3 for alpha chain variable domain of TCR clone 271526 (TRAV12-3, TRAJ17)
CAMTLTGNKLTF

SEQ ID NO: 543052 - protein, 15 aa, Homo sapiens
  CDR3 for beta chain variable domain of TCR clone 271526 (TRBV19, TRBJ2-1)
CASSILGEGRNGQFF

SEQ ID NO: 543053 - protein, 15 aa, Homo sapiens
  CDR3 for alpha chain variable domain of TCR clone 271527 (TRAV12-1, TRAJ42)
CVVTRDGGSQGNLIF

SEQ ID NO: 543054 - protein, 14 aa, Homo sapiens
  CDR3 for beta chain variable domain of TCR clone 271527 (TRBV9, TRBJ2-3)
CASSPLALPDTQYF

SEQ ID NO: 543055 - protein, 14 aa, Homo sapiens
  CDR3 for alpha chain variable domain of TCR clone 271528 (TRAV13-1, TRAJ40)
CAASMTSGTYKYIF

SEQ ID NO: 543056 - protein, 18 aa, Homo sapiens
  CDR3 for beta chain variable domain of TCR clone 271528 (TRBV11-2, TRBJ2-3)
CASSLGGASRGAPNTQYF

SEQ ID NO: 543057 - protein, 14 aa, Homo sapiens
  CDR3 for alpha chain variable domain of TCR clone 271529 (TRAV10, TRAJ34)
CVVSRGGDTDKLIF

SEQ ID NO: 543058 - protein, 17 aa, Homo sapiens
  CDR3 for beta chain variable domain of TCR clone 271529 (TRBV6-3, TRBJ2-3)
CASRRPLGGGSTDTQYL

SEQ ID NO: 543059 - protein, 13 aa, Homo sapiens
  CDR3 for alpha chain variable domain of TCR clone 271530 (TRAV1-1, TRAJ11)
CAVLNSGYSTLTF

SEQ ID NO: 543060 - protein, 15 aa, Homo sapiens
  CDR3 for beta chain variable domain of TCR clone 271530 (TRBV6-3, TRBJ2-7)
CASSSPGTVFYEQYF

SEQ ID NO: 543061 - protein, 16 aa, Homo sapiens
  CDR3 for alpha chain variable domain of TCR clone 271531 (TRAV23/DV6, TRAJ9)
CAASIGGNTGGFKTIF

SEQ ID NO: 543062 - protein, 12 aa, Homo sapiens
  CDR3 for beta chain variable domain of TCR clone 271531 (TRBV19, TRBJ2-7)
CASTDRDYEQYF

SEQ ID NO: 543063 - protein, 13 aa, Homo sapiens
  CDR3 for alpha chain variable domain of TCR clone 271532 (TRAV13-1, TRAJ42)
CAASELWRKPRTS

SEQ ID NO: 543064 - protein, 15 aa, Homo sapiens
  CDR3 for beta chain variable domain of TCR clone 271532 (TRBV20-1, TRBJ2-1)
CSASSARSSYNEQFF

SEQ ID NO: 543065 - protein, 10 aa, Homo sapiens
  CDR3 for alpha chain variable domain of TCR clone 271533 (TRAV23/DV6, TRAJ57)
CAASSTLSQG

SEQ ID NO: 543066 - protein, 16 aa, Homo sapiens
  CDR3 for beta chain variable domain of TCR clone 271533 (TRBV20-1, TRBJ1-4)
CSAPGQGLLTNEKLFF

SEQ ID NO: 543067 - protein, 14 aa, Homo sapiens
  CDR3 for alpha chain variable domain of TCR clone 271534 (TRAV1-2, TRAJ16)
CAVNRFSDGLKLLF

SEQ ID NO: 543068 - protein, 14 aa, Homo sapiens
  CDR3 for beta chain variable domain of TCR clone 271534 (TRBV7-2, TRBJ1-1)
CASSFLTGTTEAFF

SEQ ID NO: 543069 - protein, 16 aa, Homo sapiens
  CDR3 for alpha chain variable domain of TCR clone 271535 (TRAV35, TRAJ37)
CWAFLRGSSNTGKLIF

SEQ ID NO: 543070 - protein, 13 aa, Homo sapiens
  CDR3 for beta chain variable domain of TCR clone 271535 (TRBV2, TRBJ1-2)
CASSVRGNYGYNF

SEQ ID NO: 543071 - protein, 15 aa, Homo sapiens
  CDR3 for alpha chain variable domain of TCR clone 271536 (TRAV23/DV6, TRAJ45)
CAASSAGGGADGLTF

SEQ ID NO: 543072 - protein, 16 aa, Homo sapiens
  CDR3 for beta chain variable domain of TCR clone 271536 (TRBV12-5, TRBJ2-5)
CASGPRTSGNQETQYF

SEQ ID NO: 543073 - protein, 15 aa, Homo sapiens
  CDR3 for alpha chain variable domain of TCR clone 271537 (TRAV8-2, TRAJ24)
CVVSDRSDSWGKLQF

SEQ ID NO: 543074 - protein, 11 aa, Homo sapiens
  CDR3 for beta chain variable domain of TCR clone 271537 (TRBV20-1, TRBJ1-2)
CSVQGAGGYTF

SEQ ID NO: 543075 - protein, 14 aa, Homo sapiens
  CDR3 for alpha chain variable domain of TCR clone 271538 (TRAV12-2, TRAJ24)
CAVTPAASWGKLQF

SEQ ID NO: 543076 - protein, 15 aa, Homo sapiens
  CDR3 for beta chain variable domain of TCR clone 271538 (TRBV6-5, TRBJ2-1)
CASSYDAGAGNEQFF

SEQ ID NO: 543077 - protein, 18 aa, Homo sapiens
  CDR3 for alpha chain variable domain of TCR clone 271539 (TRAV12-3, TRAJ52)
CAMSRTNAGGTSYGKLTF

SEQ ID NO: 543078 - protein, 16 aa, Homo sapiens
  CDR3 for beta chain variable domain of TCR clone 271539 (TRBV7-8, TRBJ2-6)
CASRVGDSSGANVLTF

SEQ ID NO: 543079 - protein, 13 aa, Homo sapiens
  CDR3 for alpha chain variable domain of TCR clone 271540 (TRAV35, TRAJ36)
CAGPRIGANNLFF

SEQ ID NO: 543080 - protein, 15 aa, Homo sapiens
  CDR3 for beta chain variable domain of TCR clone 271540 (TRBV28, TRBJ2-5)
CASSPPWSYQETLYF

SEQ ID NO: 543081 - protein, 13 aa, Homo sapiens
  CDR3 for alpha chain variable domain of TCR clone 271541 (TRAV29/DV5, TRAJ44)
CAASTGTASKLTF

SEQ ID NO: 543082 - protein, 15 aa, Homo sapiens
  CDR3 for beta chain variable domain of TCR clone 271541 (TRBV20-1, TRBJ2-7)
CSARGPLAGGREQYF

SEQ ID NO: 543083 - protein, 14 aa, Homo sapiens
  CDR3 for alpha chain variable domain of TCR clone 271542 (TRAV12-1, TRAJ17)
CVVNHKAAGNKLTF

SEQ ID NO: 543084 - protein, 17 aa, Homo sapiens
  CDR3 for beta chain variable domain of TCR clone 271542 (TRBV20-1, TRBJ2-1)
CSASSSGLAGSYNEQLF

SEQ ID NO: 543085 - protein, 14 aa, Homo sapiens
  CDR3 for alpha chain variable domain of TCR clone 271543 (TRAV1-2, TRAJ8)
CAVREDTGFQKLVF

SEQ ID NO: 543086 - protein, 14 aa, Homo sapiens
  CDR3 for beta chain variable domain of TCR clone 271543 (TRBV7-9, TRBJ1-1)
CQQHRGTVNTEAFF

SEQ ID NO: 543087 - protein, 12 aa, Homo sapiens
  CDR3 for alpha chain variable domain of TCR clone 271544 (TRAV13-1, TRAJ53)
CAAGGSNYKLTF

SEQ ID NO: 543088 - protein, 14 aa, Homo sapiens
  CDR3 for beta chain variable domain of TCR clone 271544 (TRBV7-3, TRBJ2-1)
CASSLAGGTNEQFF

SEQ ID NO: 543089 - protein, 11 aa, Homo sapiens
  CDR3 for alpha chain variable domain of TCR clone 271545 (TRAV20, TRAJ34)
CRTKGTDKLIF

SEQ ID NO: 543090 - protein, 12 aa, Homo sapiens
  CDR3 for beta chain variable domain of TCR clone 271545 (TRBV7-8, TRBJ2-7)
CASSLGDREQYF

SEQ ID NO: 543091 - protein, 16 aa, Homo sapiens
  CDR3 for alpha chain variable domain of TCR clone 271546 (TRAV30, TRAJ24)
CGTEIVDADSWGKFQF

SEQ ID NO: 543092 - protein, 16 aa, Homo sapiens
  CDR3 for beta chain variable domain of TCR clone 271546 (TRBV6-1, TRBJ2-1)
CASILRQGSSSNEQFF

SEQ ID NO: 543093 - protein, 14 aa, Homo sapiens
  CDR3 for alpha chain variable domain of TCR clone 271547 (TRAV29/DV5, TRAJ48)
CAAMALFGNQKLTF

SEQ ID NO: 543094 - protein, 15 aa, Homo sapiens
  CDR3 for beta chain variable domain of TCR clone 271547 (TRBV7-2, TRBJ2-1)
CASTHGTGIYNEQFF

SEQ ID NO: 543095 - protein, 15 aa, Homo sapiens
  CDR3 for alpha chain variable domain of TCR clone 271548 (TRAV21, TRAJ53)
CATLNSGGSNYKLTF

SEQ ID NO: 543096 - protein, 12 aa, Homo sapiens
  CDR3 for beta chain variable domain of TCR clone 271548 (TRBV7-9, TRBJ2-7)
CATRTDAYEQYF

SEQ ID NO: 543097 - protein, 13 aa, Homo sapiens
  CDR3 for alpha chain variable domain of TCR clone 271549 (TRAV8-3, TRAJ36)
CAVGATGANNLFF

SEQ ID NO: 543098 - protein, 13 aa, Homo sapiens
  CDR3 for beta chain variable domain of TCR clone 271549 (TRBV3-1, TRBJ1-5)
CASSQFGDQPQHF

SEQ ID NO: 543099 - protein, 17 aa, Homo sapiens
  CDR3 for alpha chain variable domain of TCR clone 271550 (TRAV3, TRAJ6)
CAVRDGPRAGGSYIPTF

SEQ ID NO: 543100 - protein, 18 aa, Homo sapiens
  CDR3 for beta chain variable domain of TCR clone 271550 (TRBV7-9, TRBJ2-7)
CASSLTTSGSRTWYEQSF

SEQ ID NO: 543101 - protein, 14 aa, Homo sapiens
  CDR3 for alpha chain variable domain of TCR clone 271551 (TRAV1-2, TRAJ16)
CAVNRFSDGQKQLF

SEQ ID NO: 543102 - protein, 13 aa, Homo sapiens
  CDR3 for beta chain variable domain of TCR clone 271551 (TRBV11-2, TRBJ2-1)
CASSLGLAGGRFF

SEQ ID NO: 543103 - protein, 14 aa, Homo sapiens
  CDR3 for alpha chain variable domain of TCR clone 271552 (TRAV12-2, TRAJ13)
CAVKKPGGYQKVTF

SEQ ID NO: 543104 - protein, 15 aa, Homo sapiens
  CDR3 for beta chain variable domain of TCR clone 271552 (TRBV7-2, TRBJ1-3)
CASSPQGGSGNTIYF

SEQ ID NO: 543105 - protein, 17 aa, Homo sapiens
  CDR3 for alpha chain variable domain of TCR clone 271553 (TRAV26-1, TRAJ53)
CIVRVDDSGGSNYKLKF

SEQ ID NO: 543106 - protein, 17 aa, Homo sapiens
  CDR3 for beta chain variable domain of TCR clone 271553 (TRBV20-1, TRBJ2-7)
CSARVQPRTSTSSTSGR

SEQ ID NO: 543107 - protein, 16 aa, Homo sapiens
  CDR3 for alpha chain variable domain of TCR clone 271554 (TRAV38-1, TRAJ32)
CAFMKGGGGATNKLIL

SEQ ID NO: 543108 - protein, 13 aa, Homo sapiens
  CDR3 for beta chain variable domain of TCR clone 271554 (TRBV20-1, TRBJ2-5)
CSAREAFKETQYF

SEQ ID NO: 543109 - protein, 16 aa, Homo sapiens
  CDR3 for alpha chain variable domain of TCR clone 271555 (TRAV22, TRAJ45)
CAVERGKRGGADGLTF

SEQ ID NO: 543110 - protein, 11 aa, Homo sapiens
  CDR3 for beta chain variable domain of TCR clone 271555 (TRBV29-1, TRBJ2-5)
CSEDRTGTQFF

SEQ ID NO: 543111 - protein, 12 aa, Homo sapiens
  CDR3 for alpha chain variable domain of TCR clone 271556 (TRAV16, TRAJ10)
CSRTGGGNKLTF

SEQ ID NO: 543112 - protein, 13 aa, Homo sapiens
  CDR3 for beta chain variable domain of TCR clone 271556 (TRBV5-7, TRBJ2-1)
CASSLVESVEQFF

SEQ ID NO: 543113 - protein, 13 aa, Homo sapiens
  CDR3 for alpha chain variable domain of TCR clone 271557 (TRAV13-2, TRAJ48)
CAEMDFGNDKLTF

SEQ ID NO: 543114 - protein, 12 aa, Homo sapiens
  CDR3 for beta chain variable domain of TCR clone 271557 (TRBV5-1, TRBJ1-2)
CASSQDTYGYTF

SEQ ID NO: 543115 - protein, 14 aa, Homo sapiens
  CDR3 for alpha chain variable domain of TCR clone 271558 (TRAV16, TRAJ42)
CALLAGGSQGNLIF

SEQ ID NO: 543116 - protein, 12 aa, Homo sapiens
  CDR3 for beta chain variable domain of TCR clone 271558 (TRBV7-8, TRBJ2-7)
CASSLGDREQYF

SEQ ID NO: 543117 - protein, 16 aa, Homo sapiens
  CDR3 for alpha chain variable domain of TCR clone 271559 (TRAV3, TRAJ10)
CAVRDMRAGGGNKLNF

SEQ ID NO: 543118 - protein, 17 aa, Homo sapiens
  CDR3 for beta chain variable domain of TCR clone 271559 (TRBV6-5, TRBJ2-4)
CASRPTPGQGSKNIQYF

SEQ ID NO: 543119 - protein, 16 aa, Homo sapiens
  CDR3 for alpha chain variable domain of TCR clone 271560 (TRAV30, TRAJ24)
CGTEIVDAASWGKFQF

SEQ ID NO: 543120 - protein, 15 aa, Homo sapiens
  CDR3 for beta chain variable domain of TCR clone 271560 (TRBV28, TRBJ2-1)
CASSIIAGGRSEQFF

SEQ ID NO: 543121 - protein, 15 aa, Homo sapiens
  CDR3 for alpha chain variable domain of TCR clone 271561 (TRAV12-3, TRAJ10)
CASYILTGGGNKLTF

SEQ ID NO: 543122 - protein, 15 aa, Homo sapiens
  CDR3 for beta chain variable domain of TCR clone 271561 (TRBV7-2, TRBJ1-6)
CASSLGPDRGMPLRF

SEQ ID NO: 543123 - protein, 16 aa, Homo sapiens
  CDR3 for alpha chain variable domain of TCR clone 271562 (TRAV27, TRAJ34)
CAGGGWGDDNTDKLIF

SEQ ID NO: 543124 - protein, 11 aa, Homo sapiens
  CDR3 for beta chain variable domain of TCR clone 271562 (TRBV6-3, TRBJ2-3)
CATGQADTQYF

SEQ ID NO: 543125 - protein, 14 aa, Homo sapiens
  CDR3 for alpha chain variable domain of TCR clone 271563 (TRAV1-1, TRAJ35)
CAAPPIGFGNVLHF

SEQ ID NO: 543126 - protein, 14 aa, Homo sapiens
  CDR3 for beta chain variable domain of TCR clone 271563 (TRBV7-2, TRBJ2-7)
CASSLDPGPYEQYF

SEQ ID NO: 543127 - protein, 16 aa, Homo sapiens
  CDR3 for alpha chain variable domain of TCR clone 271564 (TRAV12-2, TRAJ10)
CAVNRVLTGGGNKLTF

SEQ ID NO: 543128 - protein, 12 aa, Homo sapiens
  CDR3 for beta chain variable domain of TCR clone 271564 (TRBV28, TRBJ2-7)
CVSSFSSYEQYF

SEQ ID NO: 543129 - protein, 12 aa, Homo sapiens
  CDR3 for alpha chain variable domain of TCR clone 271565 (TRAV13-1, TRAJ49)
CAASPMGNQFYF

SEQ ID NO: 543130 - protein, 16 aa, Homo sapiens
  CDR3 for beta chain variable domain of TCR clone 271565 (TRBV2, TRBJ1-2)
CASSEGQANSGYDYTF

SEQ ID NO: 543131 - protein, 23 aa, Homo sapiens
  CDR3 for alpha chain variable domain of TCR clone 271566 (TRAV26-1, TRAJ38)
CIADNAGNNHIQNTDPAVYQLRD

SEQ ID NO: 543132 - protein, 14 aa, Homo sapiens
  CDR3 for beta chain variable domain of TCR clone 271566 (TRBV7-9, TRBJ2-1)
CASSPRDSLYEQFF

SEQ ID NO: 543133 - protein, 16 aa, Homo sapiens
  CDR3 for alpha chain variable domain of TCR clone 271567 (TRAV3, TRAJ37)
CAVRGKGSGNTGKLIF

SEQ ID NO: 543134 - protein, 15 aa, Homo sapiens
  CDR3 for beta chain variable domain of TCR clone 271567 (TRBV7-9, TRBJ2-2)
CASGPLDAFPGELFF

SEQ ID NO: 543135 - protein, 14 aa, Homo sapiens
  CDR3 for alpha chain variable domain of TCR clone 271568 (TRAV13-2, TRAJ16)
CAENNWADGQKLLF

SEQ ID NO: 543136 - protein, 14 aa, Homo sapiens
  CDR3 for beta chain variable domain of TCR clone 271568 (TRBV7-9, TRBJ1-1)
CASSLGGLKTEAFF

SEQ ID NO: 543137 - protein, 13 aa, Homo sapiens
  CDR3 for alpha chain variable domain of TCR clone 271569 (TRAV21, TRAJ57)
CAVTQGGSEKLVF

SEQ ID NO: 543138 - protein, 13 aa, Homo sapiens
  CDR3 for beta chain variable domain of TCR clone 271569 (TRBV20-1, TRBJ2-7)
CSARAGSPNEQYF

SEQ ID NO: 543139 - protein, 14 aa, Homo sapiens
  CDR3 for alpha chain variable domain of TCR clone 271570 (TRAV10, TRAJ34)
CVVSRGGDTDKLIF

SEQ ID NO: 543140 - protein, 12 aa, Homo sapiens
  CDR3 for beta chain variable domain of TCR clone 271570 (TRBV2, TRBJ2-1)
CASSYYLNEQFF

SEQ ID NO: 543141 - protein, 13 aa, Homo sapiens
  CDR3 for alpha chain variable domain of TCR clone 271571 (TRAV25, TRAJ35)
CAGGGALGRCCIA

SEQ ID NO: 543142 - protein, 15 aa, Homo sapiens
  CDR3 for beta chain variable domain of TCR clone 271571 (TRBV12-4, TRBJ2-5)
CASSPPTGLQETQYF

SEQ ID NO: 543143 - protein, 14 aa, Homo sapiens
  CDR3 for alpha chain variable domain of TCR clone 271572 (TRAV20, TRAJ4)
CAVQASGGYNKLIF

SEQ ID NO: 543144 - protein, 15 aa, Homo sapiens
  CDR3 for beta chain variable domain of TCR clone 271572 (TRBV20-1, TRBJ2-7)
CSAGSGTSGAYEQYF

SEQ ID NO: 543145 - protein, 15 aa, Homo sapiens
  CDR3 for alpha chain variable domain of TCR clone 271573 (TRAV8-3, TRAJ23)
CAVGDRYNQGGKLIF

SEQ ID NO: 543146 - protein, 22 aa, Homo sapiens
  CDR3 for beta chain variable domain of TCR clone 271573 (TRBV29-1, TRBJ2-5)
TVSNMSPEDSSTYLCSARTQYF

SEQ ID NO: 543147 - protein, 14 aa, Homo sapiens
  CDR3 for alpha chain variable domain of TCR clone 271574 (TRAV12-2, TRAJ13)
CAVKKTGDYQKVTF

SEQ ID NO: 543148 - protein, 17 aa, Homo sapiens
  CDR3 for beta chain variable domain of TCR clone 271574 (TRBV7-3, TRBJ2-3)
CASSLMKRMRGADTQYF

SEQ ID NO: 543149 - protein, 14 aa, Homo sapiens
  CDR3 for alpha chain variable domain of TCR clone 271575 (TRAV9-2, TRAJ39)
CALYIYNAGNMLNF

SEQ ID NO: 543150 - protein, 15 aa, Homo sapiens
  CDR3 for beta chain variable domain of TCR clone 271575 (TRBV28, TRBJ1-3)
CASSMGWASGNTIYF

SEQ ID NO: 543151 - protein, 16 aa, Homo sapiens
  CDR3 for alpha chain variable domain of TCR clone 271576 (TRAV3, TRAJ37)
CAVRGKGSGNTGKLIF

SEQ ID NO: 543152 - protein, 15 aa, Homo sapiens
  CDR3 for beta chain variable domain of TCR clone 271576 (TRBV4-1, TRBJ2-5)
CASSQLAGGQETQYL

SEQ ID NO: 543153 - protein, 13 aa, Homo sapiens
  CDR3 for alpha chain variable domain of TCR clone 271577 (TRAV26-1, TRAJ33)
CIVRVEGNYQLIW

SEQ ID NO: 543154 - protein, 10 aa, Homo sapiens
  CDR3 for beta chain variable domain of TCR clone 271577 (TRBV12-4, TRBJ2-3)
CQTATDTQYF

SEQ ID NO: 543155 - protein, 20 aa, Homo sapiens
  CDR3 for alpha chain variable domain of TCR clone 271578 (TRAV26-1, TRAJ42)
CCVLLHRQTYYGGSQGNLIF

SEQ ID NO: 543156 - protein, 14 aa, Homo sapiens
  CDR3 for beta chain variable domain of TCR clone 271578 (TRBV7-6, TRBJ2-3)
CASSLGTVTDTQYF

SEQ ID NO: 543157 - protein, 14 aa, Homo sapiens
  CDR3 for alpha chain variable domain of TCR clone 271579 (TRAV2, TRAJ45)
CAVEDLFQEEVLTD

SEQ ID NO: 543158 - protein, 16 aa, Homo sapiens
  CDR3 for beta chain variable domain of TCR clone 271579 (TRBV19, TRBJ2-2)
CASRSPGTGATGEMFF

SEQ ID NO: 543159 - protein, 13 aa, Homo sapiens
  CDR3 for alpha chain variable domain of TCR clone 271580 (TRAV21, TRAJ27)
CAARPGNAGKSTF

SEQ ID NO: 543160 - protein, 12 aa, Homo sapiens
  CDR3 for beta chain variable domain of TCR clone 271580 (TRBV12-4, TRBJ2-1)
CASTYVLNEQFL

SEQ ID NO: 543161 - protein, 12 aa, Homo sapiens
  CDR3 for alpha chain variable domain of TCR clone 271581 (TRAV16, TRAJ10)
CSRTGGGNKLTF

SEQ ID NO: 543162 - protein, 14 aa, Homo sapiens
  CDR3 for beta chain variable domain of TCR clone 271581 (TRBV19, TRBJ2-2)
CASSGQGTAGEPFF

SEQ ID NO: 543163 - protein, 13 aa, Homo sapiens
  CDR3 for alpha chain variable domain of TCR clone 271582 (TRAV16, TRAJ26)
CITVLCLGQNFVF

SEQ ID NO: 543164 - protein, 12 aa, Homo sapiens
  CDR3 for beta chain variable domain of TCR clone 271582 (TRBV11-2, TRBJ2-1)
CASSPGNNEQVF

SEQ ID NO: 543165 - protein, 12 aa, Homo sapiens
  CDR3 for alpha chain variable domain of TCR clone 271583 (TRAV12-1, TRAJ40)
CLVYSGTYKYIF

SEQ ID NO: 543166 - protein, 15 aa, Homo sapiens
  CDR3 for beta chain variable domain of TCR clone 271583 (TRBV7-9, TRBJ1-6)
CASSSPGRGNSPLHF

SEQ ID NO: 543167 - protein, 15 aa, Homo sapiens
  CDR3 for alpha chain variable domain of TCR clone 271584 (TRAV8-4, TRAJ6)
CALSAPSGGSYIPTF

SEQ ID NO: 543168 - protein, 15 aa, Homo sapiens
  CDR3 for beta chain variable domain of TCR clone 271584 (TRBV7-3, TRBJ2-2)
CASKANGANTGELFF

SEQ ID NO: 543169 - protein, 17 aa, Homo sapiens
  CDR3 for alpha chain variable domain of TCR clone 271585 (TRAV19, TRAJ28)
CALSEASSGAGSYQLPF

SEQ ID NO: 543170 - protein, 13 aa, Homo sapiens
  CDR3 for beta chain variable domain of TCR clone 271585 (TRBV4-1, TRBJ2-7)
CASSQGQAYEQYF

SEQ ID NO: 543171 - protein, 18 aa, Homo sapiens
  CDR3 for alpha chain variable domain of TCR clone 271586 (TRAV1-2, TRAJ8)
CLLPLCCERGHRLSETLF

SEQ ID NO: 543172 - protein, 13 aa, Homo sapiens
  CDR3 for beta chain variable domain of TCR clone 271586 (TRBV10-3, TRBJ1-2)
CAISERDSYGYTF

SEQ ID NO: 543173 - protein, 13 aa, Homo sapiens
  CDR3 for alpha chain variable domain of TCR clone 271587 (TRAV24, TRAJ15)
CAFKDQAGTALIF

SEQ ID NO: 543174 - protein, 14 aa, Homo sapiens
  CDR3 for beta chain variable domain of TCR clone 271587 (TRBV2, TRBJ2-1)
CASSLSGSQCEQFF

SEQ ID NO: 543175 - protein, 13 aa, Homo sapiens
  CDR3 for alpha chain variable domain of TCR clone 271588 (TRAV14/DV4, TRAJ40)
CAMSGSGTYKYIF

SEQ ID NO: 543176 - protein, 15 aa, Homo sapiens
  CDR3 for beta chain variable domain of TCR clone 271588 (TRBV20-1, TRBJ2-7)
CSARDRVSGMDEQCF

SEQ ID NO: 543177 - protein, 13 aa, Homo sapiens
  CDR3 for alpha chain variable domain of TCR clone 271589 (TRAV17, TRAJ39)
CATDYGVGNMLTF

SEQ ID NO: 543178 - protein, 15 aa, Homo sapiens
  CDR3 for beta chain variable domain of TCR clone 271589 (TRBV10-1, TRBJ1-1)
CASSESQGGNTEAFF

SEQ ID NO: 543179 - protein, 14 aa, Homo sapiens
  CDR3 for alpha chain variable domain of TCR clone 271590 (TRAV1-2, TRAJ8)
CAVREDTGFQKLVF

SEQ ID NO: 543180 - protein, 15 aa, Homo sapiens
  CDR3 for beta chain variable domain of TCR clone 271590 (TRBV5-8, TRBJ2-7)
CASKGGTTISYEQYF

SEQ ID NO: 543181 - protein, 13 aa, Homo sapiens
  CDR3 for alpha chain variable domain of TCR clone 271591 (TRAV12-2, TRAJ24)
CAVSTDSWGKLEF

SEQ ID NO: 543182 - protein, 12 aa, Homo sapiens
  CDR3 for beta chain variable domain of TCR clone 271591 (TRBV7-6, TRBJ2-7)
CASSLADSEQYF

SEQ ID NO: 543183 - protein, 11 aa, Homo sapiens
  CDR3 for alpha chain variable domain of TCR clone 271592 (TRAV17, TRAJ36)
CAPTGANNLPF

SEQ ID NO: 543184 - protein, 12 aa, Homo sapiens
  CDR3 for beta chain variable domain of TCR clone 271592 (TRBV29-1, TRBJ2-3)
CSVTGGADTQYF

SEQ ID NO: 543185 - protein, 12 aa, Homo sapiens
  CDR3 for alpha chain variable domain of TCR clone 271593 (TRAV2, TRAJ37)
CAVAGNTGKLIF

SEQ ID NO: 543186 - protein, 14 aa, Homo sapiens
  CDR3 for beta chain variable domain of TCR clone 271593 (TRBV28, TRBJ2-2)
CASRIRSGTGELFF

SEQ ID NO: 543187 - protein, 11 aa, Homo sapiens
  CDR3 for alpha chain variable domain of TCR clone 271594 (TRAV2, TRAJ13)
CASGGYQKVTF

SEQ ID NO: 543188 - protein, 13 aa, Homo sapiens
  CDR3 for beta chain variable domain of TCR clone 271594 (TRBV4-2, TRBJ1-1)
CASSRAGNTEAFF

SEQ ID NO: 543189 - protein, 13 aa, Homo sapiens
  CDR3 for alpha chain variable domain of TCR clone 271595 (TRAV12-3, TRAJ7)
CAMTPYVNNRLAL

SEQ ID NO: 543190 - protein, 20 aa, Homo sapiens
  CDR3 for beta chain variable domain of TCR clone 271595 (TRBV28, TRBJ2-1)
CASTPIGRSPGLAGGNEQFF

SEQ ID NO: 543191 - protein, 14 aa, Homo sapiens
  CDR3 for alpha chain variable domain of TCR clone 271596 (TRAV23/DV6, TRAJ8)
CAARKNTGFTKLVF

SEQ ID NO: 543192 - protein, 16 aa, Homo sapiens
  CDR3 for beta chain variable domain of TCR clone 271596 (TRBV4-1, TRBJ2-6)
CASSQVGDPGANVLTF

SEQ ID NO: 543193 - protein, 14 aa, Homo sapiens
  CDR3 for alpha chain variable domain of TCR clone 271597 (TRAV29/DV5, TRAJ32)
CAVAYGGATNKLIF

SEQ ID NO: 543194 - protein, 15 aa, Homo sapiens
  CDR3 for beta chain variable domain of TCR clone 271597 (TRBV27, TRBJ2-7)
CASSTAGTGSYEQYF

SEQ ID NO: 543195 - protein, 13 aa, Homo sapiens
  CDR3 for alpha chain variable domain of TCR clone 271598 (TRAV17, TRAJ9)
CATDDTGGFKTIF

SEQ ID NO: 543196 - protein, 16 aa, Homo sapiens
  CDR3 for beta chain variable domain of TCR clone 271598 (TRBV7-7, TRBJ2-1)
CASSLASGTSYNGQFF

SEQ ID NO: 543197 - protein, 17 aa, Homo sapiens
  CDR3 for alpha chain variable domain of TCR clone 271599 (TRAV3, TRAJ6)
CAVSAGPRAGGSYIPTF

SEQ ID NO: 543198 - protein, 14 aa, Homo sapiens
  CDR3 for beta chain variable domain of TCR clone 271599 (TRBV7-2, TRBJ2-7)
CASSPKTSFYEQYF

SEQ ID NO: 543199 - protein, 15 aa, Homo sapiens
  CDR3 for alpha chain variable domain of TCR clone 271600 (TRAV8-2, TRAJ16)
CVVGDGFSDGQKLPF

SEQ ID NO: 543200 - protein, 14 aa, Homo sapiens
  CDR3 for beta chain variable domain of TCR clone 271600 (TRBV7-3, TRBJ1-1)
CASSLGTGYTEAFF

SEQ ID NO: 543201 - protein, 12 aa, Homo sapiens
  CDR3 for alpha chain variable domain of TCR clone 271601 (TRAV8-3, TRAJ20)
CAVGANDYKLSF

SEQ ID NO: 543202 - protein, 12 aa, Homo sapiens
  CDR3 for beta chain variable domain of TCR clone 271601 (TRBV7-9, TRBJ2-7)
CASSLEGYEQYF

SEQ ID NO: 543203 - protein, 12 aa, Homo sapiens
  CDR3 for alpha chain variable domain of TCR clone 271602 (TRAV2, TRAJ31)
CAVEDNNARLMF

SEQ ID NO: 543204 - protein, 14 aa, Homo sapiens
  CDR3 for beta chain variable domain of TCR clone 271602 (TRBV19, TRBJ2-7)
CASSIEASSYEQYF

SEQ ID NO: 543205 - protein, 14 aa, Homo sapiens
  CDR3 for alpha chain variable domain of TCR clone 271603 (TRAV2, TRAJ23)
CADIIYNQGGKLIF

SEQ ID NO: 543206 - protein, 13 aa, Homo sapiens
  CDR3 for beta chain variable domain of TCR clone 271603 (TRBV20-1, TRBJ2-3)
CSVTSGGAGTQYF

SEQ ID NO: 543207 - protein, 12 aa, Homo sapiens
  CDR3 for alpha chain variable domain of TCR clone 271604 (TRAV13-2, TRAJ8)
CAPLLGFQKLVF

SEQ ID NO: 543208 - protein, 13 aa, Homo sapiens
  CDR3 for beta chain variable domain of TCR clone 271604 (TRBV10-3, TRBJ2-7)
CASKLAVNYEQYF

SEQ ID NO: 543209 - protein, 17 aa, Homo sapiens
  CDR3 for alpha chain variable domain of TCR clone 271605 (TRAV35, TRAJ28)
CAGLQVYSGAGSYQLTF

SEQ ID NO: 543210 - protein, 17 aa, Homo sapiens
  CDR3 for beta chain variable domain of TCR clone 271605 (TRBV5-4, TRBJ2-3)
CISVPAVLTASTDTQYF

SEQ ID NO: 543211 - protein, 13 aa, Homo sapiens
  CDR3 for alpha chain variable domain of TCR clone 271606 (TRAV20, TRAJ37)
CAGCSSNTGKLIF

SEQ ID NO: 543212 - protein, 14 aa, Homo sapiens
  CDR3 for beta chain variable domain of TCR clone 271606 (TRBV4-1, TRBJ2-5)
CASSRSGSGETQYF

SEQ ID NO: 543213 - protein, 13 aa, Homo sapiens
  CDR3 for alpha chain variable domain of TCR clone 271607 (TRAV17, TRAJ29)
CATDAFRKHTSCL

SEQ ID NO: 543214 - protein, 12 aa, Homo sapiens
  CDR3 for beta chain variable domain of TCR clone 271607 (TRBV5-7, TRBJ2-6)
CSTSSGANVLTF

SEQ ID NO: 543215 - protein, 15 aa, Homo sapiens
  CDR3 for alpha chain variable domain of TCR clone 271608 (TRAV26-1, TRAJ15)
CIVRDANQAGTALLF

SEQ ID NO: 543216 - protein, 13 aa, Homo sapiens
  CDR3 for beta chain variable domain of TCR clone 271608 (TRBV10-3, TRBJ2-7)
CAISEAGPYEQYF

SEQ ID NO: 543217 - protein, 20 aa, Homo sapiens
  CDR3 for alpha chain variable domain of TCR clone 271609 (TRAV12-3, TRAJ52)
CAMTQSYQNAGGTSYGKLTF

SEQ ID NO: 543218 - protein, 16 aa, Homo sapiens
  CDR3 for beta chain variable domain of TCR clone 271609 (TRBV9, TRBJ1-3)
CASSVGLASSGNTIDF

SEQ ID NO: 543219 - protein, 15 aa, Homo sapiens
  CDR3 for alpha chain variable domain of TCR clone 271610 (TRAV14/DV4, TRAJ49)
CAMRGGRDTGNQFYF

SEQ ID NO: 543220 - protein, 17 aa, Homo sapiens
  CDR3 for beta chain variable domain of TCR clone 271610 (TRBV12-4, TRBJ1-5)
CASSLRGDRGPNQPQHF

SEQ ID NO: 543221 - protein, 13 aa, Homo sapiens
  CDR3 for alpha chain variable domain of TCR clone 271611 (TRAV30, TRAJ24)
CGTVTDSWGKLQF

SEQ ID NO: 543222 - protein, 12 aa, Homo sapiens
  CDR3 for beta chain variable domain of TCR clone 271611 (TRBV3-1, TRBJ1-1)
CASSQDPTEAFF

SEQ ID NO: 543223 - protein, 14 aa, Homo sapiens
  CDR3 for alpha chain variable domain of TCR clone 271612 (TRAV20, TRAJ40)
CAVSLTSGTYKYIF

SEQ ID NO: 543224 - protein, 14 aa, Homo sapiens
  CDR3 for beta chain variable domain of TCR clone 271612 (TRBV7-3, TRBJ2-1)
CASSLAGGTNEQFF

SEQ ID NO: 543225 - protein, 15 aa, Homo sapiens
  CDR3 for alpha chain variable domain of TCR clone 271613 (TRAV3, TRAJ17)
CAASIERAAGNKLTF

SEQ ID NO: 543226 - protein, 12 aa, Homo sapiens
  CDR3 for beta chain variable domain of TCR clone 271613 (TRBV5-7, TRBJ1-1)
CASSLGRGKAFF

SEQ ID NO: 543227 - protein, 14 aa, Homo sapiens
  CDR3 for alpha chain variable domain of TCR clone 271614 (TRAV23/DV6, TRAJ29)
CAASTFSGNTPLVF

SEQ ID NO: 543228 - protein, 18 aa, Homo sapiens
  CDR3 for beta chain variable domain of TCR clone 271614 (TRBV11-2, TRBJ2-3)
CASSLGGASRGAPNTQYF

SEQ ID NO: 543229 - protein, 10 aa, Homo sapiens
  CDR3 for alpha chain variable domain of TCR clone 271615 (TRAV23/DV6, TRAJ57)
CAASSTLSQG

SEQ ID NO: 543230 - protein, 15 aa, Homo sapiens
  CDR3 for beta chain variable domain of TCR clone 271615 (TRBV6-3, TRBJ2-2)
CASSFLATLTGELFF

SEQ ID NO: 543231 - protein, 13 aa, Homo sapiens
  CDR3 for alpha chain variable domain of TCR clone 271616 (TRAV17, TRAJ26)
CATVDNYGQNFVF

SEQ ID NO: 543232 - protein, 13 aa, Homo sapiens
  CDR3 for beta chain variable domain of TCR clone 271616 (TRBV14, TRBJ1-1)
CASSREFVTEAFF

SEQ ID NO: 543233 - protein, 14 aa, Homo sapiens
  CDR3 for alpha chain variable domain of TCR clone 271617 (TRAV29/DV5, TRAJ48)
CAAMALFGTEKLTF

SEQ ID NO: 543234 - protein, 15 aa, Homo sapiens
  CDR3 for beta chain variable domain of TCR clone 271617 (TRBV7-2, TRBJ2-1)
CASTHGTGIYNEQFF

SEQ ID NO: 543235 - protein, 14 aa, Homo sapiens
  CDR3 for alpha chain variable domain of TCR clone 271618 (TRAV2, TRAJ24)
CAPCQLGEIAGWSR

SEQ ID NO: 543236 - protein, 17 aa, Homo sapiens
  CDR3 for beta chain variable domain of TCR clone 271618 (TRBV5-1, TRBJ2-1)
CASSTGTSGYSYNEQFF

SEQ ID NO: 543237 - protein, 18 aa, Homo sapiens
  CDR3 for alpha chain variable domain of TCR clone 271619 (TRAV12-1, )
CVVNNIQNPDPAVYQLRD

SEQ ID NO: 543238 - protein, 17 aa, Homo sapiens
  CDR3 for beta chain variable domain of TCR clone 271619 (TRBV7-8, TRBJ2-6)
CASSAGTGGAGANVLTF

SEQ ID NO: 543239 - protein, 12 aa, Homo sapiens
  CDR3 for alpha chain variable domain of TCR clone 271620 (TRAV29/DV5, TRAJ34)
CAASSGTDKLIF

SEQ ID NO: 543240 - protein, 15 aa, Homo sapiens
  CDR3 for beta chain variable domain of TCR clone 271620 (TRBV2, TRBJ2-3)
CAGSDAGGPPDTQYF

SEQ ID NO: 543241 - protein, 15 aa, Homo sapiens
  CDR3 for alpha chain variable domain of TCR clone 271621 (TRAV26-1, TRDJ2)
CIVRVEGSGNTPLFF

SEQ ID NO: 543242 - protein, 15 aa, Homo sapiens
  CDR3 for beta chain variable domain of TCR clone 271621 (TRBV7-9, TRBJ1-5)
CASSQGHQPNQPQHF

SEQ ID NO: 543243 - protein, 19 aa, Homo sapiens
  CDR3 for alpha chain variable domain of TCR clone 271622 (TRAV25, TRAJ20)
TATQTTDVGILPHDYRLSF

SEQ ID NO: 543244 - protein, 17 aa, Homo sapiens
  CDR3 for beta chain variable domain of TCR clone 271622 (TRBV4-3, TRBJ2-1)
CASSQFSSGRASGEQFF

SEQ ID NO: 543245 - protein, 12 aa, Homo sapiens
  CDR3 for alpha chain variable domain of TCR clone 271623 (TRAV17, TRAJ39)
CATGAAGNMLTF

SEQ ID NO: 543246 - protein, 15 aa, Homo sapiens
  CDR3 for beta chain variable domain of TCR clone 271623 (TRBV27, TRBJ2-1)
CASSNGGGSSNEQFF

SEQ ID NO: 543247 - protein, 19 aa, Homo sapiens
  CDR3 for alpha chain variable domain of TCR clone 271624 (TRAV29/DV5, TRAJ49)
CSVLLCSKLTVDIGNQFYF

SEQ ID NO: 543248 - protein, 17 aa, Homo sapiens
  CDR3 for beta chain variable domain of TCR clone 271624 (TRBV13, TRBJ2-3)
CASSLSRVAGGRNTQYF

SEQ ID NO: 543249 - protein, 14 aa, Homo sapiens
  CDR3 for alpha chain variable domain of TCR clone 271625 (TRAV12-1, TRAJ23)
CVVIVYNQGGKLIF

SEQ ID NO: 543250 - protein, 15 aa, Homo sapiens
  CDR3 for beta chain variable domain of TCR clone 271625 (TRBV20-1, TRBJ1-5)
CSAKPPGQGPQQQHF

SEQ ID NO: 543251 - protein, 14 aa, Homo sapiens
  CDR3 for alpha chain variable domain of TCR clone 271626 (TRAV2, TRAJ29)
CAGPFQYGNTPLVF

SEQ ID NO: 543252 - protein, 18 aa, Homo sapiens
  CDR3 for beta chain variable domain of TCR clone 271626 (TRBV6-1, TRBJ1-6)
CASSGSGGRRINNSPLHF

SEQ ID NO: 543253 - protein, 14 aa, Homo sapiens
  CDR3 for alpha chain variable domain of TCR clone 271627 (TRAV23/DV6, TRAJ40)
CAASLTSGTYKYIF

SEQ ID NO: 543254 - protein, 12 aa, Homo sapiens
  CDR3 for beta chain variable domain of TCR clone 271627 (TRBV7-9, TRBJ1-5)
CASSPQGQPQHF

SEQ ID NO: 543255 - protein, 14 aa, Homo sapiens
  CDR3 for alpha chain variable domain of TCR clone 271628 (TRAV1-2, TRAJ16)
CAVNRFSDGKKLLF

SEQ ID NO: 543256 - protein, 17 aa, Homo sapiens
  CDR3 for beta chain variable domain of TCR clone 271628 (TRBV28, TRBJ2-5)
CASSFGGEWGGQETQYF

SEQ ID NO: 543257 - protein, 11 aa, Homo sapiens
  CDR3 for alpha chain variable domain of TCR clone 271629 (TRAV26-1, TRAJ37)
CIFRVGRKLIF

SEQ ID NO: 543258 - protein, 14 aa, Homo sapiens
  CDR3 for beta chain variable domain of TCR clone 271629 (TRBV7-2, TRBJ2-7)
CASSLPPGQGPQYF

SEQ ID NO: 543259 - protein, 13 aa, Homo sapiens
  CDR3 for alpha chain variable domain of TCR clone 271630 (TRAV13-2, TRAJ48)
CAEMDFGNEKLTF

SEQ ID NO: 543260 - protein, 15 aa, Homo sapiens
  CDR3 for beta chain variable domain of TCR clone 271630 (TRBV7-9, TRBJ1-6)
CAFSSPGRGNSPLHF

SEQ ID NO: 543261 - protein, 13 aa, Homo sapiens
  CDR3 for alpha chain variable domain of TCR clone 271631 (TRAV24, TRAJ5)
CACCGAGRRALTF

SEQ ID NO: 543262 - protein, 15 aa, Homo sapiens
  CDR3 for beta chain variable domain of TCR clone 271631 (TRBV6-5, TRBJ2-7)
CASSRTSGFSYEQYF

SEQ ID NO: 543263 - protein, 15 aa, Homo sapiens
  CDR3 for alpha chain variable domain of TCR clone 271632 (TRAV4, TRAJ39)
CLVGPNNNAGNILTF

SEQ ID NO: 543264 - protein, 12 aa, Homo sapiens
  CDR3 for beta chain variable domain of TCR clone 271632 (TRBV12-4, TRBJ2-7)
CASNPGGGEQYF

SEQ ID NO: 543265 - protein, 16 aa, Homo sapiens
  CDR3 for alpha chain variable domain of TCR clone 271633 (TRAV30, TRAJ48)
CGTEIKSNFGSEKLTF

SEQ ID NO: 543266 - protein, 17 aa, Homo sapiens
  CDR3 for beta chain variable domain of TCR clone 271633 (TRBV27, TRBJ2-1)
CASSSERGGQSADGQFF

SEQ ID NO: 543267 - protein, 16 aa, Homo sapiens
  CDR3 for alpha chain variable domain of TCR clone 271634 (TRAV4, TRAJ22)
CLVVDLYSGSARQLTF

SEQ ID NO: 543268 - protein, 16 aa, Homo sapiens
  CDR3 for beta chain variable domain of TCR clone 271634 (TRBV7-9, TRBJ2-3)
CASSPWREVGTDTQYF

SEQ ID NO: 543269 - protein, 14 aa, Homo sapiens
  CDR3 for alpha chain variable domain of TCR clone 271635 (TRAV2, TRAJ9)
CTVEDRSGGFKTIF

SEQ ID NO: 543270 - protein, 13 aa, Homo sapiens
  CDR3 for beta chain variable domain of TCR clone 271635 (TRBV20-1, TRBJ2-2)
CSASAAGTGELFF

SEQ ID NO: 543271 - protein, 14 aa, Homo sapiens
  CDR3 for alpha chain variable domain of TCR clone 271636 (TRAV16, TRAJ17)
CALSGRAASNKLTF

SEQ ID NO: 543272 - protein, 15 aa, Homo sapiens
  CDR3 for beta chain variable domain of TCR clone 271636 (TRBV3-1, TRBJ1-2)
CASSPTRLAEGGYTF

SEQ ID NO: 543273 - protein, 11 aa, Homo sapiens
  CDR3 for alpha chain variable domain of TCR clone 271637 (TRAV23/DV6, TRAJ58)
CAARLLRGETS

SEQ ID NO: 543274 - protein, 13 aa, Homo sapiens
  CDR3 for beta chain variable domain of TCR clone 271637 (TRBV12-4, TRBJ1-2)
CASSSGLTVISTF

SEQ ID NO: 543275 - protein, 15 aa, Homo sapiens
  CDR3 for alpha chain variable domain of TCR clone 271638 (TRAV25, TRAJ52)
CAGSPGGTSYGKLTF

SEQ ID NO: 543276 - protein, 17 aa, Homo sapiens
  CDR3 for beta chain variable domain of TCR clone 271638 (TRBV7-8, TRBJ2-6)
CASRAGTGGAGANVLTF

SEQ ID NO: 543277 - protein, 15 aa, Homo sapiens
  CDR3 for alpha chain variable domain of TCR clone 271639 (TRAV27, TRAJ38)
CAARRNAGNNRKRIW

SEQ ID NO: 543278 - protein, 16 aa, Homo sapiens
  CDR3 for beta chain variable domain of TCR clone 271639 (TRBV7-2, TRBJ2-1)
CASSPGLAGSNNEQFF

SEQ ID NO: 543279 - protein, 12 aa, Homo sapiens
  CDR3 for alpha chain variable domain of TCR clone 271640 (TRAV21, TRAJ6)
CAVKGGSYIPTF

SEQ ID NO: 543280 - protein, 12 aa, Homo sapiens
  CDR3 for beta chain variable domain of TCR clone 271640 (TRBV12-4, TRBJ2-1)
CASSPGRNEQFF

SEQ ID NO: 543281 - protein, 13 aa, Homo sapiens
  CDR3 for alpha chain variable domain of TCR clone 271641 (TRAV13-1, TRAJ4)
CAASIGGYNKLIF

SEQ ID NO: 543282 - protein, 15 aa, Homo sapiens
  CDR3 for beta chain variable domain of TCR clone 271641 (TRBV12-4, TRBJ2-5)
CASSPPTGLQETQYF

SEQ ID NO: 543283 - protein, 10 aa, Homo sapiens
  CDR3 for alpha chain variable domain of TCR clone 271642 (TRAV16, TRAJ22)
SAMYLRQLTF

SEQ ID NO: 543284 - protein, 14 aa, Homo sapiens
  CDR3 for beta chain variable domain of TCR clone 271642 (TRBV11-1, TRBJ2-7)
CASSFRQGSYEQYF

SEQ ID NO: 543285 - protein, 15 aa, Homo sapiens
  CDR3 for alpha chain variable domain of TCR clone 271643 (TRAV26-2, TRAJ57)
CILRDIRGGSEKLVF

SEQ ID NO: 543286 - protein, 13 aa, Homo sapiens
  CDR3 for beta chain variable domain of TCR clone 271643 (TRBV20-1, TRBJ2-1)
CSAGAGTYNEQFF

SEQ ID NO: 543287 - protein, 15 aa, Homo sapiens
  CDR3 for alpha chain variable domain of TCR clone 271644 (TRAV12-2, TRAJ43)
CAFDMRFGAGTRLTG

SEQ ID NO: 543288 - protein, 18 aa, Homo sapiens
  CDR3 for beta chain variable domain of TCR clone 271644 (TRBV20-1, TRBJ2-3)
CSASGLAGGQGTTDTQYF

SEQ ID NO: 543289 - protein, 14 aa, Homo sapiens
  CDR3 for alpha chain variable domain of TCR clone 271645 (TRAV27, TRAJ50)
CAGGRKTSYDKLIF

SEQ ID NO: 543290 - protein, 11 aa, Homo sapiens
  CDR3 for beta chain variable domain of TCR clone 271645 (TRBV12-4, TRBJ2-3)
CASSSVRGRYF

SEQ ID NO: 543291 - protein, 13 aa, Homo sapiens
  CDR3 for alpha chain variable domain of TCR clone 271646 (TRAV17, TRAJ7)
CATDNYGNNRLAF

SEQ ID NO: 543292 - protein, 16 aa, Homo sapiens
  CDR3 for beta chain variable domain of TCR clone 271646 (TRBV4-1, TRBJ2-5)
CASSQASAASSATQYF

SEQ ID NO: 543293 - protein, 13 aa, Homo sapiens
  CDR3 for alpha chain variable domain of TCR clone 271647 (TRAV13-1, TRAJ20)
WAARVSNDYKLSF

SEQ ID NO: 543294 - protein, 12 aa, Homo sapiens
  CDR3 for beta chain variable domain of TCR clone 271647 (TRBV20-1, TRBJ2-1)
CSARLGTDEQFF

SEQ ID NO: 543295 - protein, 13 aa, Homo sapiens
  CDR3 for alpha chain variable domain of TCR clone 271648 (TRAV3, TRAJ20)
CCEAFCNDYKLSF

SEQ ID NO: 543296 - protein, 16 aa, Homo sapiens
  CDR3 for beta chain variable domain of TCR clone 271648 (TRBV19, TRBJ2-2)
CASRSPGTGATGELFF

SEQ ID NO: 543297 - protein, 15 aa, Homo sapiens
  CDR3 for alpha chain variable domain of TCR clone 271649 (TRAV26-1, TRAJ29)
CIVRVEGPGNTPLVL

SEQ ID NO: 543298 - protein, 15 aa, Homo sapiens
  CDR3 for beta chain variable domain of TCR clone 271649 (TRBV7-9, TRBJ1-5)
CASSQGHQPNQPQHF

SEQ ID NO: 543299 - protein, 13 aa, Homo sapiens
  CDR3 for alpha chain variable domain of TCR clone 271650 (TRAV3, TRAJ27)
CAVRPLGAGKSTF

SEQ ID NO: 543300 - protein, 13 aa, Homo sapiens
  CDR3 for beta chain variable domain of TCR clone 271650 (TRBV20-1, TRBJ1-1)
CSARLGQGTEAFF

SEQ ID NO: 543301 - protein, 15 aa, Homo sapiens
  CDR3 for alpha chain variable domain of TCR clone 271651 (TRAV12-1, TRAJ52)
CVGNAGGNSYGKLTF

SEQ ID NO: 543302 - protein, 14 aa, Homo sapiens
  CDR3 for beta chain variable domain of TCR clone 271651 (TRBV7-3, TRBJ2-2)
CASSPDPSGRELFF

SEQ ID NO: 543303 - protein, 14 aa, Homo sapiens
  CDR3 for alpha chain variable domain of TCR clone 271652 (TRAV12-2, TRAJ13)
CAVKKPGGYQKVTF

SEQ ID NO: 543304 - protein, 17 aa, Homo sapiens
  CDR3 for beta chain variable domain of TCR clone 271652 (TRBV15, TRBJ2-4)
CATSRDNPQTGLDIQYF

SEQ ID NO: 543305 - protein, 14 aa, Homo sapiens
  CDR3 for alpha chain variable domain of TCR clone 271653 (TRAV35, TRAJ22)
CAGLRPGSARQLTF

SEQ ID NO: 543306 - protein, 13 aa, Homo sapiens
  CDR3 for beta chain variable domain of TCR clone 271653 (TRBV27, TRBJ2-7)
CASSLTTGYEQYF

SEQ ID NO: 543307 - protein, 15 aa, Homo sapiens
  CDR3 for alpha chain variable domain of TCR clone 271654 (TRAV2, TRAJ26)
TVLGPPGDYGQNFVF

SEQ ID NO: 543308 - protein, 17 aa, Homo sapiens
  CDR3 for beta chain variable domain of TCR clone 271654 (TRBV11-2, TRBJ2-1)
CASSLYPPGVEYNEQFF

SEQ ID NO: 543309 - protein, 12 aa, Homo sapiens
  CDR3 for alpha chain variable domain of TCR clone 271655 (TRAV13-1, TRAJ15)
CAASQEGTALIF

SEQ ID NO: 543310 - protein, 18 aa, Homo sapiens
  CDR3 for beta chain variable domain of TCR clone 271655 (TRBV7-9, TRBJ2-3)
CASSLPINGQISTDTQYF

SEQ ID NO: 543311 - protein, 14 aa, Homo sapiens
  CDR3 for alpha chain variable domain of TCR clone 271656 (TRAV12-3, TRAJ10)
SHLPLTGGGNKFTF

SEQ ID NO: 543312 - protein, 14 aa, Homo sapiens
  CDR3 for beta chain variable domain of TCR clone 271656 (TRBV19, TRBJ2-7)
CASTVQGRPYEQYF

SEQ ID NO: 543313 - protein, 14 aa, Homo sapiens
  CDR3 for alpha chain variable domain of TCR clone 271657 (TRAV20, TRAJ29)
CAVQAWVGNTPLVF

SEQ ID NO: 543314 - protein, 15 aa, Homo sapiens
  CDR3 for beta chain variable domain of TCR clone 271657 (TRBV4-1, TRBJ2-7)
CASSQNTGRLYEQYF

SEQ ID NO: 543315 - protein, 16 aa, Homo sapiens
  CDR3 for alpha chain variable domain of TCR clone 271658 (TRAV17, TRAJ52)
CATGIIGGTSYGKLTF

SEQ ID NO: 543316 - protein, 16 aa, Homo sapiens
  CDR3 for beta chain variable domain of TCR clone 271658 (TRBV19, TRBJ2-2)
CASRSPGTGATGELFV

SEQ ID NO: 543317 - protein, 17 aa, Homo sapiens
  CDR3 for alpha chain variable domain of TCR clone 271659 (TRAV3, TRAJ6)
CAVRDGPRAGGSYIPTF

SEQ ID NO: 543318 - protein, 12 aa, Homo sapiens
  CDR3 for beta chain variable domain of TCR clone 271659 (TRBV7-9, TRBJ2-7)
CASSSKREEQYF

SEQ ID NO: 543319 - protein, 15 aa, Homo sapiens
  CDR3 for alpha chain variable domain of TCR clone 271660 (TRAV29/DV5, TRAJ29)
CAASERSSGKTPLVF

SEQ ID NO: 543320 - protein, 17 aa, Homo sapiens
  CDR3 for beta chain variable domain of TCR clone 271660 (TRBV4-1, TRBJ1-4)
CASSQEGPRGVEEKLLF

SEQ ID NO: 543321 - protein, 18 aa, Homo sapiens
  CDR3 for alpha chain variable domain of TCR clone 271661 (TRAV12-3, TRAJ52)
CAMSRTNAGGTRYGKLTF

SEQ ID NO: 543322 - protein, 15 aa, Homo sapiens
  CDR3 for beta chain variable domain of TCR clone 271661 (TRBV19, TRBJ1-2)
CASSVGQVLNYGYTF

SEQ ID NO: 543323 - protein, 12 aa, Homo sapiens
  CDR3 for alpha chain variable domain of TCR clone 271662 (TRAV13-2, TRAJ24)
CAETDSWGKLQF

SEQ ID NO: 543324 - protein, 17 aa, Homo sapiens
  CDR3 for beta chain variable domain of TCR clone 271662 (TRBV5-1, TRBJ2-1)
CASSLGQISFSYNEQFF

SEQ ID NO: 543325 - protein, 12 aa, Homo sapiens
  CDR3 for alpha chain variable domain of TCR clone 271663 (TRAV2, TRAJ24)
CAATDSWGKFQF

SEQ ID NO: 543326 - protein, 13 aa, Homo sapiens
  CDR3 for beta chain variable domain of TCR clone 271663 (TRBV20-1, TRBJ2-7)
CSATHTSGYEQYF

SEQ ID NO: 543327 - protein, 18 aa, Homo sapiens
  CDR3 for alpha chain variable domain of TCR clone 271664 (TRAV21, TRAJ52)
CAVRPSPAGGTSYGKLTF

SEQ ID NO: 543328 - protein, 12 aa, Homo sapiens
  CDR3 for beta chain variable domain of TCR clone 271664 (TRBV7-8, TRBJ2-7)
CARSLGDREQYF

SEQ ID NO: 543329 - protein, 15 aa, Homo sapiens
  CDR3 for alpha chain variable domain of TCR clone 271665 (TRAV38-1, TRAJ37)
CAFIFGSGNTGKLIF

SEQ ID NO: 543330 - protein, 17 aa, Homo sapiens
  CDR3 for beta chain variable domain of TCR clone 271665 (TRBV20-1, TRBJ2-1)
CSARDPLAGVWDNEQFF

SEQ ID NO: 543331 - protein, 14 aa, Homo sapiens
  CDR3 for alpha chain variable domain of TCR clone 271666 (TRAV8-1, TRAJ34)
CAVITTYNTEKLIF

SEQ ID NO: 543332 - protein, 14 aa, Homo sapiens
  CDR3 for beta chain variable domain of TCR clone 271666 (TRBV11-3, TRBJ1-3)
CASSHDGQGNTIYF

SEQ ID NO: 543333 - protein, 12 aa, Homo sapiens
  CDR3 for alpha chain variable domain of TCR clone 271667 (TRAV29/DV5, TRAJ49)
CAATDTGNQFYF

SEQ ID NO: 543334 - protein, 17 aa, Homo sapiens
  CDR3 for beta chain variable domain of TCR clone 271667 (TRBV10-3, TRBJ1-2)
CAISETRDRGLEYGYTF

SEQ ID NO: 543335 - protein, 19 aa, Homo sapiens
  CDR3 for alpha chain variable domain of TCR clone 271668 (TRAV12-1, TRAJ42)
SVVQPPTSVKGGSQGNLIF

SEQ ID NO: 543336 - protein, 12 aa, Homo sapiens
  CDR3 for beta chain variable domain of TCR clone 271668 (TRBV18, TRBJ2-1)
CASSSDEDEQFF

SEQ ID NO: 543337 - protein, 13 aa, Homo sapiens
  CDR3 for alpha chain variable domain of TCR clone 271669 (TRAV21, TRAJ27)
CAARPGNAGKSTF

SEQ ID NO: 543338 - protein, 12 aa, Homo sapiens
  CDR3 for beta chain variable domain of TCR clone 271669 (TRBV7-2, TRBJ2-4)
CASSIRGNIQYF

SEQ ID NO: 543339 - protein, 15 aa, Homo sapiens
  CDR3 for alpha chain variable domain of TCR clone 271670 (TRAV12-1, TRAJ42)
CVVTRAGGSEGNLIF

SEQ ID NO: 543340 - protein, 14 aa, Homo sapiens
  CDR3 for beta chain variable domain of TCR clone 271670 (TRBV11-2, TRBJ2-3)
CASSLGGGANTQYF

SEQ ID NO: 543341 - protein, 12 aa, Homo sapiens
  CDR3 for alpha chain variable domain of TCR clone 271671 (TRAV30, TRAJ43)
CGTEERGNDMRF

SEQ ID NO: 543342 - protein, 13 aa, Homo sapiens
  CDR3 for beta chain variable domain of TCR clone 271671 (TRBV12-4, TRBJ1-2)
CASSSGSKDGYTY

SEQ ID NO: 543343 - protein, 15 aa, Homo sapiens
  CDR3 for alpha chain variable domain of TCR clone 271672 (TRAV1-2, TRAJ30)
CAVRPHGNRDDKIIF

SEQ ID NO: 543344 - protein, 15 aa, Homo sapiens
  CDR3 for beta chain variable domain of TCR clone 271672 (TRBV7-9, TRBJ1-1)
CASSLLEQGGTEAFF

SEQ ID NO: 543345 - protein, 14 aa, Homo sapiens
  CDR3 for alpha chain variable domain of TCR clone 271673 (TRAV3, TRAJ9)
CAVRLNTGVFKTTF

SEQ ID NO: 543346 - protein, 16 aa, Homo sapiens
  CDR3 for beta chain variable domain of TCR clone 271673 (TRBV12-5, TRBJ2-5)
CASGPRTSGNQETQYF

SEQ ID NO: 543347 - protein, 11 aa, Homo sapiens
  CDR3 for alpha chain variable domain of TCR clone 271674 (TRAV35, TRAJ34)
CWARNTDKLIF

SEQ ID NO: 543348 - protein, 16 aa, Homo sapiens
  CDR3 for beta chain variable domain of TCR clone 271674 (TRBV14, TRBJ2-2)
CASSRSLGDDTGELFF

SEQ ID NO: 543349 - protein, 13 aa, Homo sapiens
  CDR3 for alpha chain variable domain of TCR clone 271675 (TRAV21, TRAJ15)
CAVANQAGTALIF

SEQ ID NO: 543350 - protein, 14 aa, Homo sapiens
  CDR3 for beta chain variable domain of TCR clone 271675 (TRBV27, TRBJ2-2)
CASSIGAATGELFF

SEQ ID NO: 543351 - protein, 15 aa, Homo sapiens
  CDR3 for alpha chain variable domain of TCR clone 271676 (TRAV12-1, TRAJ45)
CVVLSGGGGADGLTF

SEQ ID NO: 543352 - protein, 20 aa, Homo sapiens
  CDR3 for beta chain variable domain of TCR clone 271676 (TRBV7-8, TRBJ2-2)
CASSHLFPGPTIHITGELFF

SEQ ID NO: 543353 - protein, 14 aa, Homo sapiens
  CDR3 for alpha chain variable domain of TCR clone 271677 (TRAV38-1, TRAJ31)
CAFMNHDNNARLMF

SEQ ID NO: 543354 - protein, 16 aa, Homo sapiens
  CDR3 for beta chain variable domain of TCR clone 271677 (TRBV23-1, TRBJ2-1)
CISAPATGPTYNEQFF

SEQ ID NO: 543355 - protein, 11 aa, Homo sapiens
  CDR3 for alpha chain variable domain of TCR clone 271678 (TRAV17, TRAJ31)
CATSNNARLMF

SEQ ID NO: 543356 - protein, 18 aa, Homo sapiens
  CDR3 for beta chain variable domain of TCR clone 271678 (TRBV11-2, TRBJ2-3)
CASSLGGASRGAPNTQYF

SEQ ID NO: 543357 - protein, 15 aa, Homo sapiens
  CDR3 for alpha chain variable domain of TCR clone 271679 (TRAV3, TRAJ17)
CAVSPKEAAGNKLTL

SEQ ID NO: 543358 - protein, 14 aa, Homo sapiens
  CDR3 for beta chain variable domain of TCR clone 271679 (TRBV5-1, TRBJ2-3)
CASSLFGPTDTQYF

SEQ ID NO: 543359 - protein, 15 aa, Homo sapiens
  CDR3 for alpha chain variable domain of TCR clone 271680 (TRAV26-1, TRAJ29)
CVVRVEGSGNTPLVF

SEQ ID NO: 543360 - protein, 15 aa, Homo sapiens
  CDR3 for beta chain variable domain of TCR clone 271680 (TRBV7-9, TRBJ1-5)
CASSQGHQPNQHQHF

SEQ ID NO: 543361 - protein, 15 aa, Homo sapiens
  CDR3 for alpha chain variable domain of TCR clone 271681 (TRAV3, TRAJ22)
CAVRDRGGSARQLTF

SEQ ID NO: 543362 - protein, 15 aa, Homo sapiens
  CDR3 for beta chain variable domain of TCR clone 271681 (TRBV5-4, TRBJ2-7)
CASSRFGTGSYEQYF

SEQ ID NO: 543363 - protein, 17 aa, Homo sapiens
  CDR3 for alpha chain variable domain of TCR clone 271682 (TRAV21, TRAJ10)
CAVRVYILTGGGNKLTF

SEQ ID NO: 543364 - protein, 15 aa, Homo sapiens
  CDR3 for beta chain variable domain of TCR clone 271682 (TRBV6-3, TRBJ2-7)
CASSSPGTVFYEQYF

SEQ ID NO: 543365 - protein, 16 aa, Homo sapiens
  CDR3 for alpha chain variable domain of TCR clone 271683 (TRAV3, TRAJ37)
CAVRPHGPGNTGKLIF

SEQ ID NO: 543366 - protein, 18 aa, Homo sapiens
  CDR3 for beta chain variable domain of TCR clone 271683 (TRBV12-4, TRBJ1-2)
CVSSPNPGQAGPYYGYTF

SEQ ID NO: 543367 - protein, 14 aa, Homo sapiens
  CDR3 for alpha chain variable domain of TCR clone 271684 (TRAV12-2, TRAJ45)
CALPVRGGADGLTF

SEQ ID NO: 543368 - protein, 14 aa, Homo sapiens
  CDR3 for beta chain variable domain of TCR clone 271684 (TRBV18, TRBJ1-5)
CASSPGNSNQPQHF

SEQ ID NO: 543369 - protein, 20 aa, Homo sapiens
  CDR3 for alpha chain variable domain of TCR clone 271685 (TRAV8-3, )
CAVGAGDIQNPDPAVYQLTD

SEQ ID NO: 543370 - protein, 14 aa, Homo sapiens
  CDR3 for beta chain variable domain of TCR clone 271685 (TRBV5-1, TRBJ1-5)
CASSLGQGAQPQHF

SEQ ID NO: 543371 - protein, 13 aa, Homo sapiens
  CDR3 for alpha chain variable domain of TCR clone 271686 (TRAV12-1, TRAJ21)
CVVTRYNFNKFYF

SEQ ID NO: 543372 - protein, 20 aa, Homo sapiens
  CDR3 for beta chain variable domain of TCR clone 271686 (TRBV7-8, TRBJ2-1)
CASSLANRLAGVRSYNEQFF

SEQ ID NO: 543373 - protein, 15 aa, Homo sapiens
  CDR3 for alpha chain variable domain of TCR clone 271687 (TRAV4, TRAJ39)
CLVGPNNNSGNMLNF

SEQ ID NO: 543374 - protein, 14 aa, Homo sapiens
  CDR3 for beta chain variable domain of TCR clone 271687 (TRBV19, TRBJ2-7)
CASNFRDTFTGMYF

SEQ ID NO: 543375 - protein, 16 aa, Homo sapiens
  CDR3 for alpha chain variable domain of TCR clone 271688 (TRAV21, TRAJ45)
CAVSWGSGGGADGLTF

SEQ ID NO: 543376 - protein, 14 aa, Homo sapiens
  CDR3 for beta chain variable domain of TCR clone 271688 (TRBV7-8, TRBJ2-3)
CASSFKSSTDTQYF

SEQ ID NO: 543377 - protein, 18 aa, Homo sapiens
  CDR3 for alpha chain variable domain of TCR clone 271689 (TRAV21, TRAJ52)
CAVRPSPAGGTSYGKLTL

SEQ ID NO: 543378 - protein, 16 aa, Homo sapiens
  CDR3 for beta chain variable domain of TCR clone 271689 (TRBV7-3, TRBJ2-2)
CASSLKRGTLSGELFF

SEQ ID NO: 543379 - protein, 14 aa, Homo sapiens
  CDR3 for alpha chain variable domain of TCR clone 271690 (TRAV12-3, TRAJ29)
CAMSPYSGNTPLVF

SEQ ID NO: 543380 - protein, 13 aa, Homo sapiens
  CDR3 for beta chain variable domain of TCR clone 271690 (TRBV11-3, TRBJ2-3)
CASSHDTKDTQYF

SEQ ID NO: 543381 - protein, 15 aa, Homo sapiens
  CDR3 for alpha chain variable domain of TCR clone 271691 (TRAV12-2, TRAJ53)
CAVNGGGGSNHKLTF

SEQ ID NO: 543382 - protein, 13 aa, Homo sapiens
  CDR3 for beta chain variable domain of TCR clone 271691 (TRBV3-1, TRBJ1-1)
CASSLGVITEAFF

SEQ ID NO: 543383 - protein, 15 aa, Homo sapiens
  CDR3 for alpha chain variable domain of TCR clone 271692 (TRAV8-4, TRAJ37)
CAVSRGSGNTGKLLF

SEQ ID NO: 543384 - protein, 16 aa, Homo sapiens
  CDR3 for beta chain variable domain of TCR clone 271692 (TRBV13, TRBJ2-2)
CASSPRTGEHTGELFF

SEQ ID NO: 543385 - protein, 11 aa, Homo sapiens
  CDR3 for alpha chain variable domain of TCR clone 271693 (TRAV12-3, TRAJ27)
CAMANAGKSTV

SEQ ID NO: 543386 - protein, 12 aa, Homo sapiens
  CDR3 for beta chain variable domain of TCR clone 271693 (TRBV11-2, TRBJ2-2)
CASSLGGGELFF

SEQ ID NO: 543387 - protein, 11 aa, Homo sapiens
  CDR3 for alpha chain variable domain of TCR clone 271694 (TRAV3, TRAJ21)
CAVGNFNKFYF

SEQ ID NO: 543388 - protein, 16 aa, Homo sapiens
  CDR3 for beta chain variable domain of TCR clone 271694 (TRBV19, TRBJ2-1)
CASSRAGPSSYNEQFF

SEQ ID NO: 543389 - protein, 12 aa, Homo sapiens
  CDR3 for alpha chain variable domain of TCR clone 271695 (TRAV12-3, TRAJ17)
CAMTLTGNKLTF

SEQ ID NO: 543390 - protein, 13 aa, Homo sapiens
  CDR3 for beta chain variable domain of TCR clone 271695 (TRBV12-5, TRBJ2-3)
CDSGDRQSDTQYF

SEQ ID NO: 543391 - protein, 14 aa, Homo sapiens
  CDR3 for alpha chain variable domain of TCR clone 271696 (TRAV12-2, TRAJ3)
CAVNGYSSASKITF

SEQ ID NO: 543392 - protein, 16 aa, Homo sapiens
  CDR3 for beta chain variable domain of TCR clone 271696 (TRBV4-2, TRBJ2-2)
CASSQDPSGREGELFF

SEQ ID NO: 543393 - protein, 14 aa, Homo sapiens
  CDR3 for alpha chain variable domain of TCR clone 271697 (TRAV35, TRAJ22)
CAGLRPGSARQLTF

SEQ ID NO: 543394 - protein, 13 aa, Homo sapiens
  CDR3 for beta chain variable domain of TCR clone 271697 (TRBV12-5, TRBJ2-3)
CASQNRGTDTQYF

SEQ ID NO: 543395 - protein, 16 aa, Homo sapiens
  CDR3 for alpha chain variable domain of TCR clone 271698 (TRAV23/DV6, TRAJ22)
CAASSRGRRFCEATDL

SEQ ID NO: 543396 - protein, 15 aa, Homo sapiens
  CDR3 for beta chain variable domain of TCR clone 271698 (TRBV10-3, TRBJ2-3)
CAIDTSGRRTDTQYF

SEQ ID NO: 543397 - protein, 14 aa, Homo sapiens
  CDR3 for alpha chain variable domain of TCR clone 271699 (TRAV36/DV7, TRAJ40)
CAVETTSGTYKYIF

SEQ ID NO: 543398 - protein, 17 aa, Homo sapiens
  CDR3 for beta chain variable domain of TCR clone 271699 (TRBV11-2, TRBJ2-1)
CASSLYPPGVEYNEQFF

SEQ ID NO: 543399 - protein, 14 aa, Homo sapiens
  CDR3 for alpha chain variable domain of TCR clone 271700 (TRAV8-3, TRAJ11)
CVVSEKSGYSTLTF

SEQ ID NO: 543400 - protein, 16 aa, Homo sapiens
  CDR3 for beta chain variable domain of TCR clone 271700 (TRBV28, TRBJ2-1)
CASSSPECPRDNEQFF

SEQ ID NO: 543401 - protein, 19 aa, Homo sapiens
  CDR3 for alpha chain variable domain of TCR clone 271701 (TRAV2, TRAJ8)
CAVEHRLSENCIWNWHPTS

SEQ ID NO: 543402 - protein, 15 aa, Homo sapiens
  CDR3 for beta chain variable domain of TCR clone 271701 (TRBV15, TRBJ2-7)
CATSSRQESSYEQYF

SEQ ID NO: 543403 - protein, 13 aa, Homo sapiens
  CDR3 for alpha chain variable domain of TCR clone 271702 (TRAV4, TRAJ42)
CLVGGGSQGNLIF

SEQ ID NO: 543404 - protein, 16 aa, Homo sapiens
  CDR3 for beta chain variable domain of TCR clone 271702 (TRBV5-1, TRBJ2-3)
CASSLKGRVGADTQYF

SEQ ID NO: 543405 - protein, 14 aa, Homo sapiens
  CDR3 for alpha chain variable domain of TCR clone 271703 (TRAV13-1, TRAJ44)
CAAKATGTASKLTF

SEQ ID NO: 543406 - protein, 13 aa, Homo sapiens
  CDR3 for beta chain variable domain of TCR clone 271703 (TRBV14, TRBJ1-2)
CASSEDRRYGYTF

SEQ ID NO: 543407 - protein, 13 aa, Homo sapiens
  CDR3 for alpha chain variable domain of TCR clone 271704 (TRAV29/DV5, TRAJ31)
CAASRNNNARLMF

SEQ ID NO: 543408 - protein, 14 aa, Homo sapiens
  CDR3 for beta chain variable domain of TCR clone 271704 (TRBV15, TRBJ1-2)
CATSRDFDRVGYTF

SEQ ID NO: 543409 - protein, 12 aa, Homo sapiens
  CDR3 for alpha chain variable domain of TCR clone 271705 (TRAV13-2, TRAJ23)
CAERHRGVKLIF

SEQ ID NO: 543410 - protein, 13 aa, Homo sapiens
  CDR3 for beta chain variable domain of TCR clone 271705 (TRBV15, TRBJ1-6)
CATSGGLNSPLHF

SEQ ID NO: 543411 - protein, 14 aa, Homo sapiens
  CDR3 for alpha chain variable domain of TCR clone 271706 (TRAV12-1, TRAJ37)
RVVTGSSNTGKLIF

SEQ ID NO: 543412 - protein, 20 aa, Homo sapiens
  CDR3 for beta chain variable domain of TCR clone 271706 (TRBV23-1, TRBJ2-5)
CISAPAVPERVLLIQETQYF

SEQ ID NO: 543413 - protein, 13 aa, Homo sapiens
  CDR3 for alpha chain variable domain of TCR clone 271707 (TRAV13-1, TRAJ11)
CAAVLAGYSTLTF

SEQ ID NO: 543414 - protein, 17 aa, Homo sapiens
  CDR3 for beta chain variable domain of TCR clone 271707 (TRBV25-1, TRBJ2-7)
CARSDARVVFSSYEQYF

SEQ ID NO: 543415 - protein, 13 aa, Homo sapiens
  CDR3 for alpha chain variable domain of TCR clone 271708 (TRAV2, TRAJ15)
CAVASQAGTALIF

SEQ ID NO: 543416 - protein, 14 aa, Homo sapiens
  CDR3 for beta chain variable domain of TCR clone 271708 (TRBV5-1, TRBJ2-1)
CASSLDDRFDEQFF

SEQ ID NO: 543417 - protein, 14 aa, Homo sapiens
  CDR3 for alpha chain variable domain of TCR clone 271709 (TRAV26-2, TRAJ38)
CILYNAGNNRKLIW

SEQ ID NO: 543418 - protein, 12 aa, Homo sapiens
  CDR3 for beta chain variable domain of TCR clone 271709 (TRBV11-2, TRBJ2-2)
CASSLGGGELFF

SEQ ID NO: 543419 - protein, 14 aa, Homo sapiens
  CDR3 for alpha chain variable domain of TCR clone 271710 (TRAV1-2, TRAJ16)
CSVNRFSDGQKLLF

SEQ ID NO: 543420 - protein, 12 aa, Homo sapiens
  CDR3 for beta chain variable domain of TCR clone 271710 (TRBV14, TRBJ1-1)
CASSQLKGRAFF

SEQ ID NO: 543421 - protein, 16 aa, Homo sapiens
  CDR3 for alpha chain variable domain of TCR clone 271711 (TRAV3, TRAJ10)
CAVRDMRAGGGNKLTF

SEQ ID NO: 543422 - protein, 14 aa, Homo sapiens
  CDR3 for beta chain variable domain of TCR clone 271711 (TRBV25-1, TRBJ1-1)
CASPHLGVNPEAFF

SEQ ID NO: 543423 - protein, 12 aa, Homo sapiens
  CDR3 for alpha chain variable domain of TCR clone 271712 (TRAV3, TRAJ43)
CAVRDPNNDMRF

SEQ ID NO: 543424 - protein, 15 aa, Homo sapiens
  CDR3 for beta chain variable domain of TCR clone 271712 (TRBV6-5, TRBJ2-1)
CASSYDAGAGNEQFS

SEQ ID NO: 543425 - protein, 14 aa, Homo sapiens
  CDR3 for alpha chain variable domain of TCR clone 271713 (TRAV2, TRAJ23)
CAVGLRNQGGKLIF

SEQ ID NO: 543426 - protein, 13 aa, Homo sapiens
  CDR3 for beta chain variable domain of TCR clone 271713 (TRBV7-6, TRBJ2-3)
CASSLRSDNTQYF

SEQ ID NO: 543427 - protein, 15 aa, Homo sapiens
  CDR3 for alpha chain variable domain of TCR clone 271714 (TRAV38-2/DV8, TRAJ37)
CAYRVGSGNTGKLIF

SEQ ID NO: 543428 - protein, 15 aa, Homo sapiens
  CDR3 for beta chain variable domain of TCR clone 271714 (TRBV7-2, TRBJ2-7)
CASSWGQGAIYEQYF

SEQ ID NO: 543429 - protein, 16 aa, Homo sapiens
  CDR3 for alpha chain variable domain of TCR clone 271715 (TRAV12-1, TRAJ42)
CVVTPYYGGSQGNLIF

SEQ ID NO: 543430 - protein, 13 aa, Homo sapiens
  CDR3 for beta chain variable domain of TCR clone 271715 (TRBV7-3, TRBJ1-1)
CASSQDWGAEAFF

SEQ ID NO: 543431 - protein, 17 aa, Homo sapiens
  CDR3 for alpha chain variable domain of TCR clone 271716 (TRAV4, TRAJ18)
CLVGERSVGSTLGRLYF

SEQ ID NO: 543432 - protein, 16 aa, Homo sapiens
  CDR3 for beta chain variable domain of TCR clone 271716 (TRBV6-5, TRBJ1-5)
RASSRPVGGSNQPQHF

SEQ ID NO: 543433 - protein, 16 aa, Homo sapiens
  CDR3 for alpha chain variable domain of TCR clone 271717 (TRAV30, TRAJ24)
CGTEIVDSDSWGKFQF

SEQ ID NO: 543434 - protein, 12 aa, Homo sapiens
  CDR3 for beta chain variable domain of TCR clone 271717 (TRBV7-9, TRBJ1-4)
CASSTDREKLFF

SEQ ID NO: 543435 - protein, 15 aa, Homo sapiens
  CDR3 for alpha chain variable domain of TCR clone 271718 (TRAV9-2, TRAJ36)
CALPWRTGKQPLLWD

SEQ ID NO: 543436 - protein, 14 aa, Homo sapiens
  CDR3 for beta chain variable domain of TCR clone 271718 (TRBV2, TRBJ1-2)
CASSELQVNYGYTF

SEQ ID NO: 543437 - protein, 15 aa, Homo sapiens
  CDR3 for alpha chain variable domain of TCR clone 271719 (TRAV8-3, TRAJ40)
CAAPSLGSGTCRYIF

SEQ ID NO: 543438 - protein, 13 aa, Homo sapiens
  CDR3 for beta chain variable domain of TCR clone 271719 (TRBV15, TRBJ2-7)
CATSTTGHYEQYF

SEQ ID NO: 543439 - protein, 15 aa, Homo sapiens
  CDR3 for alpha chain variable domain of TCR clone 271720 (TRAV13-1, TRAJ43)
CAASGGFGAGTRLTV

SEQ ID NO: 543440 - protein, 18 aa, Homo sapiens
  CDR3 for beta chain variable domain of TCR clone 271720 (TRBV11-2, TRBJ1-6)
CASSLAVQGLSLNSPLHF

SEQ ID NO: 543441 - protein, 11 aa, Homo sapiens
  CDR3 for alpha chain variable domain of TCR clone 271721 (TRAV12-3, TRAJ27)
CAMANAGKSTF

SEQ ID NO: 543442 - protein, 14 aa, Homo sapiens
  CDR3 for beta chain variable domain of TCR clone 271721 (TRBV27, TRBJ2-5)
CQQFIPAGGEAQYF

SEQ ID NO: 543443 - protein, 13 aa, Homo sapiens
  CDR3 for alpha chain variable domain of TCR clone 271722 (TRAV21, TRAJ27)
CAARPGNAGKSTF

SEQ ID NO: 543444 - protein, 15 aa, Homo sapiens
  CDR3 for beta chain variable domain of TCR clone 271722 (TRBV20-1, TRBJ2-7)
CSARDRVSRMDEQYF

SEQ ID NO: 543445 - protein, 13 aa, Homo sapiens
  CDR3 for alpha chain variable domain of TCR clone 271723 (TRAV4, TRAJ34)
CLVGDYNTDKLIF

SEQ ID NO: 543446 - protein, 23 aa, Homo sapiens
  CDR3 for beta chain variable domain of TCR clone 271723 (TRBV4-2, TRBJ2-3)
CASSQDPPRASSSSGGRGDTQYF

SEQ ID NO: 543447 - protein, 15 aa, Homo sapiens
  CDR3 for alpha chain variable domain of TCR clone 271724 (TRAV4, TRAJ36)
CLVGDRQTGTNNLFF

SEQ ID NO: 543448 - protein, 14 aa, Homo sapiens
  CDR3 for beta chain variable domain of TCR clone 271724 (TRBV19, TRBJ2-1)
CASPTFVLSGEKFF

SEQ ID NO: 543449 - protein, 11 aa, Homo sapiens
  CDR3 for alpha chain variable domain of TCR clone 271725 (TRAV21, TRAJ31)
CPWGNNARLMF

SEQ ID NO: 543450 - protein, 16 aa, Homo sapiens
  CDR3 for beta chain variable domain of TCR clone 271725 (TRBV27, TRBJ2-5)
CASSFGPGGTKETQYF

SEQ ID NO: 543451 - protein, 15 aa, Homo sapiens
  CDR3 for alpha chain variable domain of TCR clone 271726 (TRAV21, TRAJ24)
CAARSSTDSWGKLQF

SEQ ID NO: 543452 - protein, 16 aa, Homo sapiens
  CDR3 for beta chain variable domain of TCR clone 271726 (TRBV19, TRBJ2-3)
CASSPGLLASTDTQYF

SEQ ID NO: 543453 - protein, 13 aa, Homo sapiens
  CDR3 for alpha chain variable domain of TCR clone 271727 (TRAV20, TRAJ49)
CSVQARTGNQFYF

SEQ ID NO: 543454 - protein, 14 aa, Homo sapiens
  CDR3 for beta chain variable domain of TCR clone 271727 (TRBV5-1, TRBJ1-1)
CASSLQGASTEAFF

SEQ ID NO: 543455 - protein, 15 aa, Homo sapiens
  CDR3 for alpha chain variable domain of TCR clone 271728 (TRAV38-1, TRAJ57)
CAFMDSQGGSEKLVF

SEQ ID NO: 543456 - protein, 16 aa, Homo sapiens
  CDR3 for beta chain variable domain of TCR clone 271728 (TRBV10-3, TRBJ2-1)
CSIRGGGRGDYNEQFF

SEQ ID NO: 543457 - protein, 15 aa, Homo sapiens
  CDR3 for alpha chain variable domain of TCR clone 271729 (TRAV3, TRAJ3)
CCERPRYSSASKIIF

SEQ ID NO: 543458 - protein, 16 aa, Homo sapiens
  CDR3 for beta chain variable domain of TCR clone 271729 (TRBV19, TRBJ1-5)
CASSIDRGGPRQTQHF

SEQ ID NO: 543459 - protein, 15 aa, Homo sapiens
  CDR3 for alpha chain variable domain of TCR clone 271730 (TRAV3, TRAJ20)
CAVRDIKLSDYKLSF

SEQ ID NO: 543460 - protein, 12 aa, Homo sapiens
  CDR3 for beta chain variable domain of TCR clone 271730 (TRBV14, TRBJ2-7)
CASSSLKGEQYF

SEQ ID NO: 543461 - protein, 12 aa, Homo sapiens
  CDR3 for alpha chain variable domain of TCR clone 271731 (TRAV25, TRAJ11)
CAGASGYSTLTF

SEQ ID NO: 543462 - protein, 11 aa, Homo sapiens
  CDR3 for beta chain variable domain of TCR clone 271731 (TRBV19, TRBJ1-1)
CASSIGSEAFF

SEQ ID NO: 543463 - protein, 18 aa, Homo sapiens
  CDR3 for alpha chain variable domain of TCR clone 271732 (TRAV12-3, TRAJ10)
SPVIQHLPLTGGGNKLTF

SEQ ID NO: 543464 - protein, 15 aa, Homo sapiens
  CDR3 for beta chain variable domain of TCR clone 271732 (TRBV6-5, TRBJ2-1)
CASSYDAGSGNEQFF

SEQ ID NO: 543465 - protein, 14 aa, Homo sapiens
  CDR3 for alpha chain variable domain of TCR clone 271733 (TRAV8-6, TRAJ54)
CAVTEGRGAQKLVF

SEQ ID NO: 543466 - protein, 14 aa, Homo sapiens
  CDR3 for beta chain variable domain of TCR clone 271733 (TRBV25-1, TRBJ2-7)
CASSIGQGAQKQYF

SEQ ID NO: 543467 - protein, 16 aa, Homo sapiens
  CDR3 for alpha chain variable domain of TCR clone 271734 (TRAV12-3, TRAJ53)
CAMSPGSGGSNYKLTF

SEQ ID NO: 543468 - protein, 15 aa, Homo sapiens
  CDR3 for beta chain variable domain of TCR clone 271734 (TRBV12-4, TRBJ1-6)
CASSLGGQGTSALHF

SEQ ID NO: 543469 - protein, 11 aa, Homo sapiens
  CDR3 for alpha chain variable domain of TCR clone 271735 (TRAV3, TRAJ21)
CAVGNFNNFYF

SEQ ID NO: 543470 - protein, 16 aa, Homo sapiens
  CDR3 for beta chain variable domain of TCR clone 271735 (TRBV5-4, TRBJ2-3)
CASQQPGAGGADTQYF

SEQ ID NO: 543471 - protein, 13 aa, Homo sapiens
  CDR3 for alpha chain variable domain of TCR clone 271736 (TRAV36/DV7, TRAJ54)
CAVDIQGAQKLVF

SEQ ID NO: 543472 - protein, 13 aa, Homo sapiens
  CDR3 for beta chain variable domain of TCR clone 271736 (TRBV27, TRBJ1-4)
CASSLMGDEKLFF

SEQ ID NO: 543473 - protein, 14 aa, Homo sapiens
  CDR3 for alpha chain variable domain of TCR clone 271737 (TRAV8-6, TRAJ37)
CAVRLSGNTGKLIF

SEQ ID NO: 543474 - protein, 14 aa, Homo sapiens
  CDR3 for beta chain variable domain of TCR clone 271737 (TRBV7-9, TRBJ1-2)
CASSRQGANYGYTF

SEQ ID NO: 543475 - protein, 14 aa, Homo sapiens
  CDR3 for alpha chain variable domain of TCR clone 271738 (TRAV12-1, TRAJ22)
CVAFSSGSARQMTF

SEQ ID NO: 543476 - protein, 21 aa, Homo sapiens
  CDR3 for beta chain variable domain of TCR clone 271738 (TRBV15, TRBJ2-1)
AWGTQPCTCVPPAEVDTARFF

SEQ ID NO: 543477 - protein, 14 aa, Homo sapiens
  CDR3 for alpha chain variable domain of TCR clone 271739 (TRAV4, TRAJ9)
CLVGSGTGGFKTIF

SEQ ID NO: 543478 - protein, 18 aa, Homo sapiens
  CDR3 for beta chain variable domain of TCR clone 271739 (TRBV7-2, TRBJ2-3)
CASSLKREGSGITDTQYF

SEQ ID NO: 543479 - protein, 14 aa, Homo sapiens
  CDR3 for alpha chain variable domain of TCR clone 271740 (TRAV8-4, TRAJ37)
CAVSDPSNTGKLIF

SEQ ID NO: 543480 - protein, 14 aa, Homo sapiens
  CDR3 for beta chain variable domain of TCR clone 271740 (TRBV28, TRBJ2-1)
CAIHRTGARTEQFF

SEQ ID NO: 543481 - protein, 11 aa, Homo sapiens
  CDR3 for alpha chain variable domain of TCR clone 271741 (TRAV3, TRAJ49)
CAPITCNQFYF

SEQ ID NO: 543482 - protein, 16 aa, Homo sapiens
  CDR3 for beta chain variable domain of TCR clone 271741 (TRBV5-1, TRBJ2-3)
CASSVFPMSSTDTQYF

SEQ ID NO: 543483 - protein, 13 aa, Homo sapiens
  CDR3 for alpha chain variable domain of TCR clone 271742 (TRAV27, TRAJ41)
CAGEGNSGYALNF

SEQ ID NO: 543484 - protein, 14 aa, Homo sapiens
  CDR3 for beta chain variable domain of TCR clone 271742 (TRBV7-2, TRBJ2-7)
CASSPKTSSYEQYF

SEQ ID NO: 543485 - protein, 14 aa, Homo sapiens
  CDR3 for alpha chain variable domain of TCR clone 271743 (TRAV8-3, TRAJ35)
CDVVPQGFGNVLHC

SEQ ID NO: 543486 - protein, 15 aa, Homo sapiens
  CDR3 for beta chain variable domain of TCR clone 271743 (TRBV6-1, TRBJ2-2)
CASSAGQGYTGELFF

SEQ ID NO: 543487 - protein, 13 aa, Homo sapiens
  CDR3 for alpha chain variable domain of TCR clone 271744 (TRAV29/DV5, TRAJ31)
WAASRNNNARLMF

SEQ ID NO: 543488 - protein, 15 aa, Homo sapiens
  CDR3 for beta chain variable domain of TCR clone 271744 (TRBV2, TRBJ2-1)
CASSELAGSYNEQFF

SEQ ID NO: 543489 - protein, 16 aa, Homo sapiens
  CDR3 for alpha chain variable domain of TCR clone 271745 (TRAV3, TRAJ37)
CAVRPHGSGNTGKLIF

SEQ ID NO: 543490 - protein, 19 aa, Homo sapiens
  CDR3 for beta chain variable domain of TCR clone 271745 (TRBV28, TRBJ2-7)
CASSYSGTSRLGWVYEQYF

SEQ ID NO: 543491 - protein, 15 aa, Homo sapiens
  CDR3 for alpha chain variable domain of TCR clone 271746 (TRAV3, TRAJ22)
CAVRDRGGSARQLTF

SEQ ID NO: 543492 - protein, 17 aa, Homo sapiens
  CDR3 for beta chain variable domain of TCR clone 271746 (TRBV11-2, TRBJ2-1)
CASSLYPPGVEYNEQSF

SEQ ID NO: 543493 - protein, 17 aa, Homo sapiens
  CDR3 for alpha chain variable domain of TCR clone 271747 (TRAV26-2, TRAJ42)
CILRDVGYGGSQGNLIF

SEQ ID NO: 543494 - protein, 16 aa, Homo sapiens
  CDR3 for beta chain variable domain of TCR clone 271747 (TRBV12-4, TRBJ2-1)
CASSLIGGTGTYEQYF

SEQ ID NO: 543495 - protein, 13 aa, Homo sapiens
  CDR3 for alpha chain variable domain of TCR clone 271748 (TRAV27, TRAJ9)
CAGRDTGGFKTIF

SEQ ID NO: 543496 - protein, 14 aa, Homo sapiens
  CDR3 for beta chain variable domain of TCR clone 271748 (TRBV7-9, TRBJ2-5)
CASSPAQDQETQYF

SEQ ID NO: 543497 - protein, 13 aa, Homo sapiens
  CDR3 for alpha chain variable domain of TCR clone 271749 (TRAV21, TRAJ57)
CAVTKGGSEKRVF

SEQ ID NO: 543498 - protein, 16 aa, Homo sapiens
  CDR3 for beta chain variable domain of TCR clone 271749 (TRBV29-1, TRBJ2-7)
CSVEDAEDGTAYEQYF

SEQ ID NO: 543499 - protein, 17 aa, Homo sapiens
  CDR3 for alpha chain variable domain of TCR clone 271750 (TRAV26-1, TRAJ58)
CIVRVGAEETSGYRLTF

SEQ ID NO: 543500 - protein, 18 aa, Homo sapiens
  CDR3 for beta chain variable domain of TCR clone 271750 (TRBV7-9, TRBJ2-7)
CASSLTTSGSRTWYEQYF

SEQ ID NO: 543501 - protein, 13 aa, Homo sapiens
  CDR3 for alpha chain variable domain of TCR clone 271751 (TRAV21, TRAJ57)
CAVTQGGSEKLVF

SEQ ID NO: 543502 - protein, 11 aa, Homo sapiens
  CDR3 for beta chain variable domain of TCR clone 271751 (TRBV11-2, TRBJ2-2)
CASSLPGELFS

SEQ ID NO: 543503 - protein, 17 aa, Homo sapiens
  CDR3 for alpha chain variable domain of TCR clone 271752 (TRAV9-2, TRAJ17)
CALSKPTCRQQANLWRR

SEQ ID NO: 543504 - protein, 15 aa, Homo sapiens
  CDR3 for beta chain variable domain of TCR clone 271752 (TRBV5-5, TRBJ2-2)
CASSRQASGAGELSF

SEQ ID NO: 543505 - protein, 14 aa, Homo sapiens
  CDR3 for alpha chain variable domain of TCR clone 271753 (TRAV12-3, TRAJ10)
SHLPLTGGGNKLTF

SEQ ID NO: 543506 - protein, 13 aa, Homo sapiens
  CDR3 for beta chain variable domain of TCR clone 271753 (TRBV7-9, TRBJ1-2)
CSSSLKQNYGYTF

SEQ ID NO: 543507 - protein, 12 aa, Homo sapiens
  CDR3 for alpha chain variable domain of TCR clone 271754 (TRAV29/DV5, TRAJ27)
CAASTIAGKSTF

SEQ ID NO: 543508 - protein, 13 aa, Homo sapiens
  CDR3 for beta chain variable domain of TCR clone 271754 (TRBV6-5, TRBJ2-7)
CASSYSGQYEQYF

SEQ ID NO: 543509 - protein, 13 aa, Homo sapiens
  CDR3 for alpha chain variable domain of TCR clone 271755 (TRAV17, TRAJ7)
CATDNYGNNRLAF

SEQ ID NO: 543510 - protein, 16 aa, Homo sapiens
  CDR3 for beta chain variable domain of TCR clone 271755 (TRBV12-5, TRBJ2-5)
CASGPRTSGNQETQYF

SEQ ID NO: 543511 - protein, 15 aa, Homo sapiens
  CDR3 for alpha chain variable domain of TCR clone 271756 (TRAV8-3, TRAJ45)
CASSYSGGGADGLTL

SEQ ID NO: 543512 - protein, 13 aa, Homo sapiens
  CDR3 for beta chain variable domain of TCR clone 271756 (TRBV10-3, TRBJ2-7)
CASNLAVNYEQYF

SEQ ID NO: 543513 - protein, 13 aa, Homo sapiens
  CDR3 for alpha chain variable domain of TCR clone 271757 (TRAV2, TRAJ15)
CAVASQAGTALIF

SEQ ID NO: 543514 - protein, 15 aa, Homo sapiens
  CDR3 for beta chain variable domain of TCR clone 271757 (TRBV11-3, TRBJ2-3)
CQQLWERGGTDTQYF

SEQ ID NO: 543515 - protein, 17 aa, Homo sapiens
  CDR3 for alpha chain variable domain of TCR clone 271758 (TRAV4, TRAJ13)
CLVGVQGSSGGYQKVTF

SEQ ID NO: 543516 - protein, 13 aa, Homo sapiens
  CDR3 for beta chain variable domain of TCR clone 271758 (TRBV10-3, TRBJ2-7)
CASKLEVNYEQYF

SEQ ID NO: 543517 - protein, 15 aa, Homo sapiens
  CDR3 for alpha chain variable domain of TCR clone 271759 (TRAV36/DV7, TRAJ54)
CAVEKPVQGAQKLAF

SEQ ID NO: 543518 - protein, 17 aa, Homo sapiens
  CDR3 for beta chain variable domain of TCR clone 271759 (TRBV6-5, TRBJ1-2)
CASSSPWEGAFDYGYTF

SEQ ID NO: 543519 - protein, 20 aa, Homo sapiens
  CDR3 for alpha chain variable domain of TCR clone 271760 (TRAV21, TRAJ22)
SLVTQQPTLKSSGSARQLTF

SEQ ID NO: 543520 - protein, 16 aa, Homo sapiens
  CDR3 for beta chain variable domain of TCR clone 271760 (TRBV7-3, TRBJ2-2)
CASSLKRGTLSGELFF

SEQ ID NO: 543521 - protein, 14 aa, Homo sapiens
  CDR3 for alpha chain variable domain of TCR clone 271761 (TRAV9-2, TRAJ39)
CPLYIYNAGNMLTF

SEQ ID NO: 543522 - protein, 20 aa, Homo sapiens
  CDR3 for beta chain variable domain of TCR clone 271761 (TRBV7-8, TRBJ2-2)
CASSHLFPGPTIHITGELFF

SEQ ID NO: 543523 - protein, 12 aa, Homo sapiens
  CDR3 for alpha chain variable domain of TCR clone 271762 (TRAV36/DV7, TRAJ37)
CACYGNTGKLIF

SEQ ID NO: 543524 - protein, 13 aa, Homo sapiens
  CDR3 for beta chain variable domain of TCR clone 271762 (TRBV10-3, TRBJ2-7)
CASKLAVNYEQFF

SEQ ID NO: 543525 - protein, 14 aa, Homo sapiens
  CDR3 for alpha chain variable domain of TCR clone 271763 (TRAV12-3, TRAJ21)
CAMEGHQGFNKFYF

SEQ ID NO: 543526 - protein, 14 aa, Homo sapiens
  CDR3 for beta chain variable domain of TCR clone 271763 (TRBV5-1, TRAJ31)
CASSLGDRNEKLFF

SEQ ID NO: 543527 - protein, 17 aa, Homo sapiens
  CDR3 for alpha chain variable domain of TCR clone 271764 (TRAV29/DV5, TRAJ40)
CAASVIYTTSGTYKYIL

SEQ ID NO: 543528 - protein, 13 aa, Homo sapiens
  CDR3 for beta chain variable domain of TCR clone 271764 (TRBV6-1, TRBJ2-1)
CASSHDRNNEQFF

SEQ ID NO: 543529 - protein, 13 aa, Homo sapiens
  CDR3 for alpha chain variable domain of TCR clone 271765 (TRAV12-1, TRAJ49)
CVVILNTGNQFYF

SEQ ID NO: 543530 - protein, 13 aa, Homo sapiens
  CDR3 for beta chain variable domain of TCR clone 271765 (TRBV10-3, TRBJ2-7)
CASKLAVNYAQYF

SEQ ID NO: 543531 - protein, 14 aa, Homo sapiens
  CDR3 for alpha chain variable domain of TCR clone 271766 (TRAV3, TRAJ28)
CAVRRGDGSYQLTF

SEQ ID NO: 543532 - protein, 17 aa, Homo sapiens
  CDR3 for beta chain variable domain of TCR clone 271766 (TRBV19, TRBJ2-7)
CASSISFYDSYPYEQYF

SEQ ID NO: 543533 - protein, 15 aa, Homo sapiens
  CDR3 for alpha chain variable domain of TCR clone 271767 (TRAV29/DV5, TRAJ53)
CAASASGGSNYKLTF

SEQ ID NO: 543534 - protein, 14 aa, Homo sapiens
  CDR3 for beta chain variable domain of TCR clone 271767 (TRBV18, TRBJ1-4)
CASTQDRRDEKLFF

SEQ ID NO: 543535 - protein, 13 aa, Homo sapiens
  CDR3 for alpha chain variable domain of TCR clone 271768 (TRAV17, TRAJ5)
CALRGTGRRALTF

SEQ ID NO: 543536 - protein, 13 aa, Homo sapiens
  CDR3 for beta chain variable domain of TCR clone 271768 (TRBV7-9, TRBJ2-1)
CASSWESYNEQFF

SEQ ID NO: 543537 - protein, 19 aa, Homo sapiens
  CDR3 for alpha chain variable domain of TCR clone 271769 (TRAV2, TRAJ20)
ILQVREADAAVYRDCKLSF

SEQ ID NO: 543538 - protein, 15 aa, Homo sapiens
  CDR3 for beta chain variable domain of TCR clone 271769 (TRBV20-1, TRBJ2-1)
WSASSAGSSYNEQFF

SEQ ID NO: 543539 - protein, 23 aa, Homo sapiens
  CDR3 for alpha chain variable domain of TCR clone 271770 (TRAV26-1, TRAJ38)
CIADNAGNNHIQNPDPAVYQLRD

SEQ ID NO: 543540 - protein, 17 aa, Homo sapiens
  CDR3 for beta chain variable domain of TCR clone 271770 (TRBV11-2, TRBJ2-6)
CASSQRDIFSGANDLTF

SEQ ID NO: 543541 - protein, 15 aa, Homo sapiens
  CDR3 for alpha chain variable domain of TCR clone 271771 (TRAV26-2, TRAJ28)
CILVESGAGSYQLTF

SEQ ID NO: 543542 - protein, 11 aa, Homo sapiens
  CDR3 for beta chain variable domain of TCR clone 271771 (TRBV25-1, TRBJ2-7)
CASSTSCEQYF

SEQ ID NO: 543543 - protein, 10 aa, Homo sapiens
  CDR3 for alpha chain variable domain of TCR clone 271772 (TRAV16, TRAJ22)
SAMHLRQLIF

SEQ ID NO: 543544 - protein, 15 aa, Homo sapiens
  CDR3 for beta chain variable domain of TCR clone 271772 (TRBV7-9, TRBJ1-6)
CASSSPGRGNSPLHF

SEQ ID NO: 543545 - protein, 14 aa, Homo sapiens
  CDR3 for alpha chain variable domain of TCR clone 271773 (TRAV16, TRAJ48)
CALTPGFGNEKLTF

SEQ ID NO: 543546 - protein, 13 aa, Homo sapiens
  CDR3 for beta chain variable domain of TCR clone 271773 (TRBV11-2, TRBJ2-1)
CASSLGLAGGRFF

SEQ ID NO: 543547 - protein, 13 aa, Homo sapiens
  CDR3 for alpha chain variable domain of TCR clone 271774 (TRAV17, TRAJ9)
CATGLTGGFKTIF

SEQ ID NO: 543548 - protein, 15 aa, Homo sapiens
  CDR3 for beta chain variable domain of TCR clone 271774 (TRBV7-3, TRBJ2-2)
CASSETGQGTGELFF

SEQ ID NO: 543549 - protein, 16 aa, Homo sapiens
  CDR3 for alpha chain variable domain of TCR clone 271775 (TRAV21, TRAJ37)
CAVRTACSSNTGKLIF

SEQ ID NO: 543550 - protein, 13 aa, Homo sapiens
  CDR3 for beta chain variable domain of TCR clone 271775 (TRBV7-9, TRBJ2-5)
CASLPAGRETQYF

SEQ ID NO: 543551 - protein, 13 aa, Homo sapiens
  CDR3 for alpha chain variable domain of TCR clone 271776 (TRAV17, TRAJ9)
CATGSTGGFKTIF

SEQ ID NO: 543552 - protein, 15 aa, Homo sapiens
  CDR3 for beta chain variable domain of TCR clone 271776 (TRBV12-4, TRBJ2-5)
CASSPPTGLQETQYF

SEQ ID NO: 543553 - protein, 11 aa, Homo sapiens
  CDR3 for alpha chain variable domain of TCR clone 271777 (TRAV21, TRAJ34)
CAVTNTDKLIF

SEQ ID NO: 543554 - protein, 15 aa, Homo sapiens
  CDR3 for beta chain variable domain of TCR clone 271777 (TRBV20-1, TRBJ2-1)
CSARSPSGGPPTMSS

SEQ ID NO: 543555 - protein, 14 aa, Homo sapiens
  CDR3 for alpha chain variable domain of TCR clone 271778 (TRAV12-2, TRAJ40)
CAVKIPSGTHKYIF

SEQ ID NO: 543556 - protein, 16 aa, Homo sapiens
  CDR3 for beta chain variable domain of TCR clone 271778 (TRBV28, TRBJ2-7)
CASSPWVATGDLSQYF

SEQ ID NO: 543557 - protein, 14 aa, Homo sapiens
  CDR3 for alpha chain variable domain of TCR clone 271779 (TRAV13-2, TRAJ43)
CAEIPTYNNNDMRF

SEQ ID NO: 543558 - protein, 18 aa, Homo sapiens
  CDR3 for beta chain variable domain of TCR clone 271779 (TRBV11-2, TRBJ2-3)
CASSLGGASRGAPNTQYF

SEQ ID NO: 543559 - protein, 12 aa, Homo sapiens
  CDR3 for alpha chain variable domain of TCR clone 271780 (TRAV16, TRAJ39)
CSPGNAGNMLTF

SEQ ID NO: 543560 - protein, 11 aa, Homo sapiens
  CDR3 for beta chain variable domain of TCR clone 271780 (TRBV11-2, TRBJ1-1)
CASSINTEAFF

SEQ ID NO: 543561 - protein, 16 aa, Homo sapiens
  CDR3 for alpha chain variable domain of TCR clone 271781 (TRAV4, TRAJ22)
CLVGDLYSGSARQLTF

SEQ ID NO: 543562 - protein, 14 aa, Homo sapiens
  CDR3 for beta chain variable domain of TCR clone 271781 (TRBV28, TRBJ2-3)
CASSWSGRADTQYF

SEQ ID NO: 543563 - protein, 12 aa, Homo sapiens
  CDR3 for alpha chain variable domain of TCR clone 271782 (TRAV16, TRAJ27)
CAQNTNAGKSTF

SEQ ID NO: 543564 - protein, 14 aa, Homo sapiens
  CDR3 for beta chain variable domain of TCR clone 271782 (TRBV5-1, TRBJ2-7)
CASSLGVGAYEQYF

SEQ ID NO: 543565 - protein, 13 aa, Homo sapiens
  CDR3 for alpha chain variable domain of TCR clone 271783 (TRAV29/DV5, TRAJ31)
CTASRNNNARLMF

SEQ ID NO: 543566 - protein, 15 aa, Homo sapiens
  CDR3 for beta chain variable domain of TCR clone 271783 (TRBV2, TRBJ2-1)
CASSELAGSYNEQFF

SEQ ID NO: 543567 - protein, 13 aa, Homo sapiens
  CDR3 for alpha chain variable domain of TCR clone 271784 (TRAV3, TRAJ15)
CAVRDQAGTALIF

SEQ ID NO: 543568 - protein, 13 aa, Homo sapiens
  CDR3 for beta chain variable domain of TCR clone 271784 (TRBV10-2, TRBJ2-7)
CASGASGGYEQYF

SEQ ID NO: 543569 - protein, 16 aa, Homo sapiens
  CDR3 for alpha chain variable domain of TCR clone 271785 (TRAV30, TRAJ24)
CCTEIVDADSWGKFQF

SEQ ID NO: 543570 - protein, 14 aa, Homo sapiens
  CDR3 for beta chain variable domain of TCR clone 271785 (TRBV7-2, TRBJ2-7)
CASSPKTSFYEQYF

SEQ ID NO: 543571 - protein, 12 aa, Homo sapiens
  CDR3 for alpha chain variable domain of TCR clone 271786 (TRAV26-1, TRAJ26)
CIVFIYGQNFVF

SEQ ID NO: 543572 - protein, 16 aa, Homo sapiens
  CDR3 for beta chain variable domain of TCR clone 271786 (TRBV24-1, TRBJ2-3)
CATSDPGTGATDTQYF

SEQ ID NO: 543573 - protein, 14 aa, Homo sapiens
  CDR3 for alpha chain variable domain of TCR clone 271787 (TRAV2, TRAJ16)
CAVERGSDGLKLLF

SEQ ID NO: 543574 - protein, 12 aa, Homo sapiens
  CDR3 for beta chain variable domain of TCR clone 271787 (TRBV6-5, TRBJ2-7)
CASYIYGYEQYF

SEQ ID NO: 543575 - protein, 12 aa, Homo sapiens
  CDR3 for alpha chain variable domain of TCR clone 271788 (TRAV12-1, TRAJ42)
CAVGGSQGNLIF

SEQ ID NO: 543576 - protein, 16 aa, Homo sapiens
  CDR3 for beta chain variable domain of TCR clone 271788 (TRBV7-3, TRBJ2-2)
CASSLKRGTLSGELFF

SEQ ID NO: 543577 - protein, 15 aa, Homo sapiens
  CDR3 for alpha chain variable domain of TCR clone 271789 (TRAV12-2, TRAJ43)
CAFDMRFGAGTRLTV

SEQ ID NO: 543578 - protein, 14 aa, Homo sapiens
  CDR3 for beta chain variable domain of TCR clone 271789 (TRBV5-4, TRBJ2-7)
CASSLIGQGYEQYF

SEQ ID NO: 543579 - protein, 12 aa, Homo sapiens
  CDR3 for alpha chain variable domain of TCR clone 271790 (TRAV12-3, TRAJ5)
CAMDTGRRALTF

SEQ ID NO: 543580 - protein, 15 aa, Homo sapiens
  CDR3 for beta chain variable domain of TCR clone 271790 (TRBV12-4, TRBJ2-5)
CASSPPTGLQETQYF

SEQ ID NO: 543581 - protein, 10 aa, Homo sapiens
  CDR3 for alpha chain variable domain of TCR clone 271791 (TRAV36/DV7, TRAJ48)
CAVGNEKLTF

SEQ ID NO: 543582 - protein, 13 aa, Homo sapiens
  CDR3 for beta chain variable domain of TCR clone 271791 (TRBV7-3, TRBJ2-5)
CASSFRGGETQYF

SEQ ID NO: 543583 - protein, 14 aa, Homo sapiens
  CDR3 for alpha chain variable domain of TCR clone 271792 (TRAV2, TRAJ37)
CAVDSTSNTGKLLF

SEQ ID NO: 543584 - protein, 15 aa, Homo sapiens
  CDR3 for beta chain variable domain of TCR clone 271792 (TRBV20-1, TRBJ1-1)
CSASRGVTGNTEAFF

SEQ ID NO: 543585 - protein, 11 aa, Homo sapiens
  CDR3 for alpha chain variable domain of TCR clone 271793 (TRAV1-1, TRAJ23)
CAVRQGGKLIF

SEQ ID NO: 543586 - protein, 20 aa, Homo sapiens
  CDR3 for beta chain variable domain of TCR clone 271793 (TRBV7-8, TRBJ2-2)
CSSSHLFPGPTVHITGELFF

SEQ ID NO: 543587 - protein, 14 aa, Homo sapiens
  CDR3 for alpha chain variable domain of TCR clone 271794 (TRAV21, TRAJ54)
CAVRPLQGAQKLVF

SEQ ID NO: 543588 - protein, 19 aa, Homo sapiens
  CDR3 for beta chain variable domain of TCR clone 271794 (TRBV19, TRBJ2-5)
CASSIGQVTDFFLGETQYF

SEQ ID NO: 543589 - protein, 15 aa, Homo sapiens
  CDR3 for alpha chain variable domain of TCR clone 271795 (TRAV4, TRAJ39)
CLVGPNNNAGNMLTF

SEQ ID NO: 543590 - protein, 15 aa, Homo sapiens
  CDR3 for beta chain variable domain of TCR clone 271795 (TRBV11-2, TRBJ2-6)
CASSPTVAGANVLTF

SEQ ID NO: 543591 - protein, 14 aa, Homo sapiens
  CDR3 for alpha chain variable domain of TCR clone 271796 (TRAV12-3, TRAJ10)
SHLPLTGGGNKLTF

SEQ ID NO: 543592 - protein, 14 aa, Homo sapiens
  CDR3 for beta chain variable domain of TCR clone 271796 (TRBV29-1, TRBJ2-3)
CSARAGAGTDTQYF

SEQ ID NO: 543593 - protein, 17 aa, Homo sapiens
  CDR3 for alpha chain variable domain of TCR clone 271797 (TRAV13-1, TRAJ52)
CAAGRNAGGTSSGKLTF

SEQ ID NO: 543594 - protein, 12 aa, Homo sapiens
  CDR3 for beta chain variable domain of TCR clone 271797 (TRBV7-2, TRBJ1-1)
CQQSKGAKVAFF

SEQ ID NO: 543595 - protein, 12 aa, Homo sapiens
  CDR3 for alpha chain variable domain of TCR clone 271798 (TRAV16, TRAJ27)
CALNTNAGKSTF

SEQ ID NO: 543596 - protein, 12 aa, Homo sapiens
  CDR3 for beta chain variable domain of TCR clone 271798 (TRBV19, TRBJ2-1)
CASSRQGAEQFF

SEQ ID NO: 543597 - protein, 16 aa, Homo sapiens
  CDR3 for alpha chain variable domain of TCR clone 271799 (TRAV17, TRAJ52)
CATGIIGGTSYGKLTF

SEQ ID NO: 543598 - protein, 12 aa, Homo sapiens
  CDR3 for beta chain variable domain of TCR clone 271799 (TRBV7-3, TRBJ2-1)
CASSFINNEQFV

SEQ ID NO: 543599 - protein, 16 aa, Homo sapiens
  CDR3 for alpha chain variable domain of TCR clone 271800 (TRAV1-2, TRAJ10)
CAVRGVLTGGGNKLTF

SEQ ID NO: 543600 - protein, 16 aa, Homo sapiens
  CDR3 for beta chain variable domain of TCR clone 271800 (TRBV18, TRBJ2-7)
CASSPRSQGISYEQYF

SEQ ID NO: 543601 - protein, 16 aa, Homo sapiens
  CDR3 for alpha chain variable domain of TCR clone 271801 (TRAV38-1, TRAJ37)
CAFKGDASSNTGKLIF

SEQ ID NO: 543602 - protein, 13 aa, Homo sapiens
  CDR3 for beta chain variable domain of TCR clone 271801 (TRBV12-4, TRBJ2-5)
CASSLFRRETQYF

SEQ ID NO: 543603 - protein, 18 aa, Homo sapiens
  CDR3 for alpha chain variable domain of TCR clone 271802 (TRAV35, TRAJ28)
CAGHNYPLSGAGRYQLTF

SEQ ID NO: 543604 - protein, 12 aa, Homo sapiens
  CDR3 for beta chain variable domain of TCR clone 271802 (TRBV7-9, TRBJ1-1)
CASSSEGTEAFF

SEQ ID NO: 543605 - protein, 15 aa, Homo sapiens
  CDR3 for alpha chain variable domain of TCR clone 271803 (TRAV25, TRAJ53)
CAATGGGGSNYKLTF

SEQ ID NO: 543606 - protein, 17 aa, Homo sapiens
  CDR3 for beta chain variable domain of TCR clone 271803 (TRBV7-2, TRBJ2-3)
CASSARSSGSPTDTQYF

SEQ ID NO: 543607 - protein, 18 aa, Homo sapiens
  CDR3 for alpha chain variable domain of TCR clone 271804 (TRAV21, TRAJ52)
CAVRPSPAGGTSYGKLTF

SEQ ID NO: 543608 - protein, 12 aa, Homo sapiens
  CDR3 for beta chain variable domain of TCR clone 271804 (TRBV7-9, TRBJ2-7)
CATRTDAYEQYF

SEQ ID NO: 543609 - protein, 12 aa, Homo sapiens
  CDR3 for alpha chain variable domain of TCR clone 271805 (TRAV17, TRAJ57)
CATDGGSEKLVF

SEQ ID NO: 543610 - protein, 14 aa, Homo sapiens
  CDR3 for beta chain variable domain of TCR clone 271805 (TRBV7-9, TRBJ2-1)
CASGLDRAYNEQFF

SEQ ID NO: 543611 - protein, 14 aa, Homo sapiens
  CDR3 for alpha chain variable domain of TCR clone 271806 (TRAV12-1, TRAJ23)
CVVIVHNQGGKLIF

SEQ ID NO: 543612 - protein, 15 aa, Homo sapiens
  CDR3 for beta chain variable domain of TCR clone 271806 (TRBV20-1, TRBJ1-5)
CSAKPPGQGPQPQHF

SEQ ID NO: 543613 - protein, 14 aa, Homo sapiens
  CDR3 for alpha chain variable domain of TCR clone 271807 (TRAV1-2, TRAJ16)
CAVNRFSDRQKLLF

SEQ ID NO: 543614 - protein, 15 aa, Homo sapiens
  CDR3 for beta chain variable domain of TCR clone 271807 (TRBV6-6, TRBJ2-7)
CASSYSYGGSYEQYF

SEQ ID NO: 543615 - protein, 14 aa, Homo sapiens
  CDR3 for alpha chain variable domain of TCR clone 271808 (TRAV23/DV6, TRAJ24)
CAASLGDSWGNCSL

SEQ ID NO: 543616 - protein, 15 aa, Homo sapiens
  CDR3 for beta chain variable domain of TCR clone 271808 (TRBV9, TRBJ1-6)
CASSVAGTGDSPLHF

SEQ ID NO: 543617 - protein, 12 aa, Homo sapiens
  CDR3 for alpha chain variable domain of TCR clone 271809 (TRAV27, TRAJ35)
CAGADFGNVLHC

SEQ ID NO: 543618 - protein, 15 aa, Homo sapiens
  CDR3 for beta chain variable domain of TCR clone 271809 (TRBV20-1, TRBJ2-7)
CGARDRVSGMDEQYF

SEQ ID NO: 543619 - protein, 14 aa, Homo sapiens
  CDR3 for alpha chain variable domain of TCR clone 271810 (TRAV12-2, TRAJ53)
CAVKGGGSNYKLTF

SEQ ID NO: 543620 - protein, 15 aa, Homo sapiens
  CDR3 for beta chain variable domain of TCR clone 271810 (TRBV12-4, TRBJ2-7)
CAGSPPTGLQETQYF

SEQ ID NO: 543621 - protein, 16 aa, Homo sapiens
  CDR3 for alpha chain variable domain of TCR clone 271811 (TRAV1-2, TRAJ10)
CAVRGVLTGGGNKFTF

SEQ ID NO: 543622 - protein, 15 aa, Homo sapiens
  CDR3 for beta chain variable domain of TCR clone 271811 (TRBV27, TRBJ2-7)
CASSPIVTGAYEQYF

SEQ ID NO: 543623 - protein, 15 aa, Homo sapiens
  CDR3 for alpha chain variable domain of TCR clone 271812 (TRAV3, TRAJ32)
CAVSSYGGATNKLIF

SEQ ID NO: 543624 - protein, 13 aa, Homo sapiens
  CDR3 for beta chain variable domain of TCR clone 271812 (TRBV20-1, TRBJ2-7)
CSARPSTNCEQYF

SEQ ID NO: 543625 - protein, 14 aa, Homo sapiens
  CDR3 for alpha chain variable domain of TCR clone 271813 (TRAV1-2, TRAJ16)
CAVNRFSDSQKLLF

SEQ ID NO: 543626 - protein, 13 aa, Homo sapiens
  CDR3 for beta chain variable domain of TCR clone 271813 (TRBV7-3, TRBJ1-1)
CASSQDWGAEAFF

SEQ ID NO: 543627 - protein, 16 aa, Homo sapiens
  CDR3 for alpha chain variable domain of TCR clone 271814 (TRAV27, TRAJ13)
CAGAKSDSGGYQKVTF

SEQ ID NO: 543628 - protein, 17 aa, Homo sapiens
  CDR3 for beta chain variable domain of TCR clone 271814 (TRBV18, TRBJ2-6)
CASSPRQGAVGANVLTF

SEQ ID NO: 543629 - protein, 16 aa, Homo sapiens
  CDR3 for alpha chain variable domain of TCR clone 271815 (TRAV30, TRAJ24)
CGTDIVAADSWGKFQF

SEQ ID NO: 543630 - protein, 14 aa, Homo sapiens
  CDR3 for beta chain variable domain of TCR clone 271815 (TRBV12-5, TRBJ2-5)
CASGSRTHQETQYF

SEQ ID NO: 543631 - protein, 19 aa, Homo sapiens
  CDR3 for alpha chain variable domain of TCR clone 271816 (TRAV2, TRAJ20)
ILQVREADAAVYRDCKLSF

SEQ ID NO: 543632 - protein, 13 aa, Homo sapiens
  CDR3 for beta chain variable domain of TCR clone 271816 (TRBV15, TRBJ1-6)
CATSGGLTSPLHF

SEQ ID NO: 543633 - protein, 14 aa, Homo sapiens
  CDR3 for alpha chain variable domain of TCR clone 271817 (TRAV17, TRAJ16)
CATADFSDGQKLLF

SEQ ID NO: 543634 - protein, 16 aa, Homo sapiens
  CDR3 for beta chain variable domain of TCR clone 271817 (TRBV7-3, TRBJ2-2)
CASSLKRGTLSGELFF

SEQ ID NO: 543635 - protein, 15 aa, Homo sapiens
  CDR3 for alpha chain variable domain of TCR clone 271818 (TRAV12-3, TRAJ48)
CAMNAKNFGNEKLPF

SEQ ID NO: 543636 - protein, 14 aa, Homo sapiens
  CDR3 for beta chain variable domain of TCR clone 271818 (TRBV2, TRBJ1-6)
CASSESRNNSPLHF

SEQ ID NO: 543637 - protein, 16 aa, Homo sapiens
  CDR3 for alpha chain variable domain of TCR clone 271819 (TRAV12-3, TRAJ53)
CAMSPGSGGSNYKLTF

SEQ ID NO: 543638 - protein, 11 aa, Homo sapiens
  CDR3 for beta chain variable domain of TCR clone 271819 (TRBV29-1, TRBJ2-5)
CSEDRSGTQYF

SEQ ID NO: 543639 - protein, 11 aa, Homo sapiens
  CDR3 for alpha chain variable domain of TCR clone 271820 (TRAV2, TRAJ33)
CAVESNYQLIW

SEQ ID NO: 543640 - protein, 13 aa, Homo sapiens
  CDR3 for beta chain variable domain of TCR clone 271820 (TRBV11-2, TRBJ1-2)
CASSLGTNYGYTF

SEQ ID NO: 543641 - protein, 15 aa, Homo sapiens
  CDR3 for alpha chain variable domain of TCR clone 271821 (TRAV12-2, TRAJ50)
CAVNGLETSYDKVIF

SEQ ID NO: 543642 - protein, 15 aa, Homo sapiens
  CDR3 for beta chain variable domain of TCR clone 271821 (TRBV7-9, TRBJ1-6)
CASSSPGRGNSPLHF

SEQ ID NO: 543643 - protein, 14 aa, Homo sapiens
  CDR3 for alpha chain variable domain of TCR clone 271822 (TRAV12-2, TRAJ17)
CAVLFKAAGNKLTF

SEQ ID NO: 543644 - protein, 15 aa, Homo sapiens
  CDR3 for beta chain variable domain of TCR clone 271822 (TRBV6-1, TRBJ2-4)
CASSEAVWTINMQYF

SEQ ID NO: 543645 - protein, 16 aa, Homo sapiens
  CDR3 for alpha chain variable domain of TCR clone 271823 (TRAV30, TRAJ26)
CGTESVGDNYGQNFVF

SEQ ID NO: 543646 - protein, 13 aa, Homo sapiens
  CDR3 for beta chain variable domain of TCR clone 271823 (TRBV19, TRBJ1-2)
CGSSISEDYGYTF

SEQ ID NO: 543647 - protein, 13 aa, Homo sapiens
  CDR3 for alpha chain variable domain of TCR clone 271824 (TRAV3, TRAJ36)
CAVSDTGANNLFF

SEQ ID NO: 543648 - protein, 15 aa, Homo sapiens
  CDR3 for beta chain variable domain of TCR clone 271824 (TRBV24-1, TRBJ2-1)
CATSGSGGFYNEQFF

SEQ ID NO: 543649 - protein, 13 aa, Homo sapiens
  CDR3 for alpha chain variable domain of TCR clone 271825 (TRAV3, TRAJ20)
CAVRDTPRYKLSF

SEQ ID NO: 543650 - protein, 15 aa, Homo sapiens
  CDR3 for beta chain variable domain of TCR clone 271825 (TRBV7-9, TRBJ2-1)
CASSLGLAGGTEQFF

SEQ ID NO: 543651 - protein, 14 aa, Homo sapiens
  CDR3 for alpha chain variable domain of TCR clone 271826 (TRAV12-2, TRAJ11)
CAVEGGSGYSTLTF

SEQ ID NO: 543652 - protein, 16 aa, Homo sapiens
  CDR3 for beta chain variable domain of TCR clone 271826 (TRBV6-1, TRBJ1-2)
CASSVAWQGRSHGYTF

SEQ ID NO: 543653 - protein, 14 aa, Homo sapiens
  CDR3 for alpha chain variable domain of TCR clone 271827 (TRAV34, TRAJ44)
CGADRTGTASKLTF

SEQ ID NO: 543654 - protein, 13 aa, Homo sapiens
  CDR3 for beta chain variable domain of TCR clone 271827 (TRBV7-3, TRBJ1-1)
CASSQDWGAEAFF

SEQ ID NO: 543655 - protein, 14 aa, Homo sapiens
  CDR3 for alpha chain variable domain of TCR clone 271828 (TRAV12-3, TRAJ58)
CAMSTETSGSRLTF

SEQ ID NO: 543656 - protein, 12 aa, Homo sapiens
  CDR3 for beta chain variable domain of TCR clone 271828 (TRBV11-2, TRBJ2-1)
CASSPGNNEQFF

SEQ ID NO: 543657 - protein, 14 aa, Homo sapiens
  CDR3 for alpha chain variable domain of TCR clone 271829 (TRAV13-1, TRAJ35)
CAASKGGFGNVLHF

SEQ ID NO: 543658 - protein, 15 aa, Homo sapiens
  CDR3 for beta chain variable domain of TCR clone 271829 (TRBV28, TRBJ2-1)
CASSGLAEVDNEQFF

SEQ ID NO: 543659 - protein, 10 aa, Homo sapiens
  CDR3 for alpha chain variable domain of TCR clone 271830 (TRAV21, TRAJ31)
CAVDNARLMF

SEQ ID NO: 543660 - protein, 16 aa, Homo sapiens
  CDR3 for beta chain variable domain of TCR clone 271830 (TRBV7-2, TRBJ2-5)
CASSLGSAGGRETQYF

SEQ ID NO: 543661 - protein, 16 aa, Homo sapiens
  CDR3 for alpha chain variable domain of TCR clone 271831 (TRAV3, TRAJ37)
CAVRPHGSGNTGKLIF

SEQ ID NO: 543662 - protein, 15 aa, Homo sapiens
  CDR3 for beta chain variable domain of TCR clone 271831 (TRBV4-1, TRBJ2-5)
CASSQWDLYQETQYF

SEQ ID NO: 543663 - protein, 16 aa, Homo sapiens
  CDR3 for alpha chain variable domain of TCR clone 271832 (TRAV13-1, TRAJ10)
CAAGYILTGGGNKLTF

SEQ ID NO: 543664 - protein, 15 aa, Homo sapiens
  CDR3 for beta chain variable domain of TCR clone 271832 (TRBV12-4, TRBJ2-7)
CASSQTGAISYEKYF

SEQ ID NO: 543665 - protein, 16 aa, Homo sapiens
  CDR3 for alpha chain variable domain of TCR clone 271833 (TRAV35, TRAJ28)
CAGQKYSGAGSYQLTF

SEQ ID NO: 543666 - protein, 14 aa, Homo sapiens
  CDR3 for beta chain variable domain of TCR clone 271833 (TRBV7-9, TRBJ2-1)
CASSPRDSLYEQFF

SEQ ID NO: 543667 - protein, 16 aa, Homo sapiens
  CDR3 for alpha chain variable domain of TCR clone 271834 (TRAV30, TRAJ24)
CGTEIVDDDSWGKFQF

SEQ ID NO: 543668 - protein, 14 aa, Homo sapiens
  CDR3 for beta chain variable domain of TCR clone 271834 (TRBV13, TRBJ2-1)
CASSPRPRYNEQFF

SEQ ID NO: 543669 - protein, 12 aa, Homo sapiens
  CDR3 for alpha chain variable domain of TCR clone 271835 (TRAV1-1, TRAJ39)
CAVPVVGNMLTF

SEQ ID NO: 543670 - protein, 14 aa, Homo sapiens
  CDR3 for beta chain variable domain of TCR clone 271835 (TRBV12-4, TRBJ1-1)
CASSLGTGGTEAFF

SEQ ID NO: 543671 - protein, 14 aa, Homo sapiens
  CDR3 for alpha chain variable domain of TCR clone 271836 (TRAV17, TRAJ56)
CATVPAGANSKLTF

SEQ ID NO: 543672 - protein, 16 aa, Homo sapiens
  CDR3 for beta chain variable domain of TCR clone 271836 (TRBV9, TRBJ2-1)
CASSVGGGGNYNEQFF

SEQ ID NO: 543673 - protein, 14 aa, Homo sapiens
  CDR3 for alpha chain variable domain of TCR clone 271837 (TRAV34, TRAJ22)
CGADTSGSARQLTF

SEQ ID NO: 543674 - protein, 17 aa, Homo sapiens
  CDR3 for beta chain variable domain of TCR clone 271837 (TRBV13, TRBJ2-3)
CASSRSRVAGGRNTQYF

SEQ ID NO: 543675 - protein, 12 aa, Homo sapiens
  CDR3 for alpha chain variable domain of TCR clone 271838 (TRAV4, TRAJ26)
CLVGDYGQNFVF

SEQ ID NO: 543676 - protein, 16 aa, Homo sapiens
  CDR3 for beta chain variable domain of TCR clone 271838 (TRBV5-1, TRBJ2-7)
CASSWGTGGRAWEQYF

SEQ ID NO: 543677 - protein, 14 aa, Homo sapiens
  CDR3 for alpha chain variable domain of TCR clone 271839 (TRAV1-2, TRAJ8)
CAVREDTGFQKLVF

SEQ ID NO: 543678 - protein, 14 aa, Homo sapiens
  CDR3 for beta chain variable domain of TCR clone 271839 (TRBV20-1, TRBJ2-3)
CSARGGTITDTQYF

SEQ ID NO: 543679 - protein, 13 aa, Homo sapiens
  CDR3 for alpha chain variable domain of TCR clone 271840 (TRAV23/DV6, TRAJ34)
CAAIENNTDKLIF

SEQ ID NO: 543680 - protein, 18 aa, Homo sapiens
  CDR3 for beta chain variable domain of TCR clone 271840 (TRBV20-1, TRBJ2-6)
CSAETTPTHGSGANDLTF

SEQ ID NO: 543681 - protein, 15 aa, Homo sapiens
  CDR3 for alpha chain variable domain of TCR clone 271841 (TRAV34, TRAJ38)
CGADFTPGNNRKLIW

SEQ ID NO: 543682 - protein, 16 aa, Homo sapiens
  CDR3 for beta chain variable domain of TCR clone 271841 (TRBV12-5, TRBJ2-5)
CASGPRTSGNQETQFF

SEQ ID NO: 543683 - protein, 13 aa, Homo sapiens
  CDR3 for alpha chain variable domain of TCR clone 271842 (TRAV21, TRAJ57)
CAVTQGGSEKLVF

SEQ ID NO: 543684 - protein, 15 aa, Homo sapiens
  CDR3 for beta chain variable domain of TCR clone 271842 (TRBV25-1, TRBJ1-4)
CASSPGDSTNEKLFF

SEQ ID NO: 543685 - protein, 15 aa, Homo sapiens
  CDR3 for alpha chain variable domain of TCR clone 271843 (TRAV23/DV6, TRAJ13)
CAAWPGGGGYQKVNF

SEQ ID NO: 543686 - protein, 17 aa, Homo sapiens
  CDR3 for beta chain variable domain of TCR clone 271843 (TRBV19, TRBJ2-7)
CASSISFYDSYPYEQYF

SEQ ID NO: 543687 - protein, 15 aa, Homo sapiens
  CDR3 for alpha chain variable domain of TCR clone 271844 (TRAV14/DV4, TRAJ39)
CAMRESYNAGNMLTF

SEQ ID NO: 543688 - protein, 12 aa, Homo sapiens
  CDR3 for beta chain variable domain of TCR clone 271844 (TRBV5-1, TRBJ2-7)
CASSFRGYEQYF

SEQ ID NO: 543689 - protein, 12 aa, Homo sapiens
  CDR3 for alpha chain variable domain of TCR clone 271845 (TRAV8-3, TRAJ43)
CAVGRTDNDMRF

SEQ ID NO: 543690 - protein, 14 aa, Homo sapiens
  CDR3 for beta chain variable domain of TCR clone 271845 (TRBV5-1, TRBJ2-7)
CASSFASGVNEQYF

SEQ ID NO: 543691 - protein, 14 aa, Homo sapiens
  CDR3 for alpha chain variable domain of TCR clone 271846 (TRAV12-3, TRAJ22)
CAMSLFGSARQLTF

SEQ ID NO: 543692 - protein, 15 aa, Homo sapiens
  CDR3 for beta chain variable domain of TCR clone 271846 (TRBV20-1, TRBJ2-7)
CSARDRVYGMDEQYF

SEQ ID NO: 543693 - protein, 18 aa, Homo sapiens
  CDR3 for alpha chain variable domain of TCR clone 271847 (TRAV21, TRAJ52)
CAVRPSPADGTSYGKLTF

SEQ ID NO: 543694 - protein, 17 aa, Homo sapiens
  CDR3 for beta chain variable domain of TCR clone 271847 (TRBV13, TRBJ2-3)
CASSLSRGAGGRNTQYF

SEQ ID NO: 543695 - protein, 12 aa, Homo sapiens
  CDR3 for alpha chain variable domain of TCR clone 271848 (TRAV4, TRAJ26)
CLVGDYGQNFVF

SEQ ID NO: 543696 - protein, 12 aa, Homo sapiens
  CDR3 for beta chain variable domain of TCR clone 271848 (TRBV7-2, TRBJ2-7)
CASSLGDREQYF

SEQ ID NO: 543697 - protein, 14 aa, Homo sapiens
  CDR3 for alpha chain variable domain of TCR clone 271849 (TRAV12-2, TRAJ40)
CAVKIPSGTYKYIF

SEQ ID NO: 543698 - protein, 12 aa, Homo sapiens
  CDR3 for beta chain variable domain of TCR clone 271849 (TRBV11-2, TRBJ2-5)
CASSLGQETQYF

SEQ ID NO: 543699 - protein, 14 aa, Homo sapiens
  CDR3 for alpha chain variable domain of TCR clone 271850 (TRAV12-3, TRAJ10)
SHLPLPGGGNKLTF

SEQ ID NO: 543700 - protein, 15 aa, Homo sapiens
  CDR3 for beta chain variable domain of TCR clone 271850 (TRBV29-1, TRBJ2-7)
CSVEFFDRGSYEQYF

SEQ ID NO: 543701 - protein, 13 aa, Homo sapiens
  CDR3 for alpha chain variable domain of TCR clone 271851 (TRAV26-2, TRAJ43)
CILRAVNNNDMRF

SEQ ID NO: 543702 - protein, 13 aa, Homo sapiens
  CDR3 for beta chain variable domain of TCR clone 271851 (TRBV7-2, TRBJ2-4)
CASSREHANIQYF

SEQ ID NO: 543703 - protein, 11 aa, Homo sapiens
  CDR3 for alpha chain variable domain of TCR clone 271852 (TRAV2, TRAJ13)
CASGGYQKVTF

SEQ ID NO: 543704 - protein, 13 aa, Homo sapiens
  CDR3 for beta chain variable domain of TCR clone 271852 (TRBV7-2, TRBJ2-7)
CASSSPSGSEQYF

SEQ ID NO: 543705 - protein, 13 aa, Homo sapiens
  CDR3 for alpha chain variable domain of TCR clone 271853 (TRAV20, TRAJ37)
CAGCSSNTGKLIF

SEQ ID NO: 543706 - protein, 14 aa, Homo sapiens
  CDR3 for beta chain variable domain of TCR clone 271853 (TRBV12-4, TRBJ2-3)
CASTIAGWGDTQYF

SEQ ID NO: 543707 - protein, 14 aa, Homo sapiens
  CDR3 for alpha chain variable domain of TCR clone 271854 (TRAV12-2, TRAJ23)
CAVGGYNQRGKLIF

SEQ ID NO: 543708 - protein, 15 aa, Homo sapiens
  CDR3 for beta chain variable domain of TCR clone 271854 (TRBV20-1, TRBJ2-3)
CSASSGGPRTDTQYF

SEQ ID NO: 543709 - protein, 14 aa, Homo sapiens
  CDR3 for alpha chain variable domain of TCR clone 271855 (TRAV1-2, TRAJ8)
CAVREDTGFQKLVF

SEQ ID NO: 543710 - protein, 21 aa, Homo sapiens
  CDR3 for beta chain variable domain of TCR clone 271855 (TRBV6-1, TRBJ1-1)
CASSGVGNYKGISGFDTEAFF

SEQ ID NO: 543711 - protein, 12 aa, Homo sapiens
  CDR3 for alpha chain variable domain of TCR clone 271856 (TRAV27, TRAJ35)
CAGADFGNVLHC

SEQ ID NO: 543712 - protein, 14 aa, Homo sapiens
  CDR3 for beta chain variable domain of TCR clone 271856 (TRBV7-2, TRBJ2-7)
CASSSISGFSEQYF

SEQ ID NO: 543713 - protein, 15 aa, Homo sapiens
  CDR3 for alpha chain variable domain of TCR clone 271857 (TRAV17, TRAJ56)
CAKEPFTGANSKLTF

SEQ ID NO: 543714 - protein, 14 aa, Homo sapiens
  CDR3 for beta chain variable domain of TCR clone 271857 (TRBV19, TRBJ2-1)
CASPTFVLSGEQFF

SEQ ID NO: 543715 - protein, 14 aa, Homo sapiens
  CDR3 for alpha chain variable domain of TCR clone 271858 (TRAV8-1, TRAJ6)
CAVTASGGSYIPTF

SEQ ID NO: 543716 - protein, 14 aa, Homo sapiens
  CDR3 for beta chain variable domain of TCR clone 271858 (TRBV11-2, TRBJ1-2)
CASILGTANYGYTF

SEQ ID NO: 543717 - protein, 15 aa, Homo sapiens
  CDR3 for alpha chain variable domain of TCR clone 271859 (TRAV3, TRAJ22)
CAVRGRGGSARQLTF

SEQ ID NO: 543718 - protein, 14 aa, Homo sapiens
  CDR3 for beta chain variable domain of TCR clone 271859 (TRBV20-1, TRBJ2-5)
CSALVPGYQETQYF

SEQ ID NO: 543719 - protein, 14 aa, Homo sapiens
  CDR3 for alpha chain variable domain of TCR clone 271860 (TRAV12-2, TRAJ17)
CAVNIKAAGNKLTF

SEQ ID NO: 543720 - protein, 15 aa, Homo sapiens
  CDR3 for beta chain variable domain of TCR clone 271860 (TRBV2, TRBJ2-1)
CASSELAGSYNEQVF

SEQ ID NO: 543721 - protein, 12 aa, Homo sapiens
  CDR3 for alpha chain variable domain of TCR clone 271861 (TRAV36/DV7, TRAJ54)
PPAARRAQKLVF

SEQ ID NO: 543722 - protein, 14 aa, Homo sapiens
  CDR3 for beta chain variable domain of TCR clone 271861 (TRBV7-3, TRBJ1-1)
CASSLKGGNTEAFF

SEQ ID NO: 543723 - protein, 13 aa, Homo sapiens
  CDR3 for alpha chain variable domain of TCR clone 271862 (TRAV8-3, TRAJ21)
CAVGIYNFKKFYF

SEQ ID NO: 543724 - protein, 13 aa, Homo sapiens
  CDR3 for beta chain variable domain of TCR clone 271862 (TRBV7-7, TRBJ2-5)
CASSLRAIETQYF

SEQ ID NO: 543725 - protein, 10 aa, Homo sapiens
  CDR3 for alpha chain variable domain of TCR clone 271863 (TRAV8-1, TRAJ21)
CAVNGTKFYF

SEQ ID NO: 543726 - protein, 14 aa, Homo sapiens
  CDR3 for beta chain variable domain of TCR clone 271863 (TRBV19, TRBJ2-7)
CASTVQGRPYEQYF

SEQ ID NO: 543727 - protein, 14 aa, Homo sapiens
  CDR3 for alpha chain variable domain of TCR clone 271864 (TRAV12-2, TRAJ15)
CAPHTGQAGTALIF

SEQ ID NO: 543728 - protein, 13 aa, Homo sapiens
  CDR3 for beta chain variable domain of TCR clone 271864 (TRBV12-4, TRBJ1-5)
CASSPDRAQPQHF

SEQ ID NO: 543729 - protein, 16 aa, Homo sapiens
  CDR3 for alpha chain variable domain of TCR clone 271865 (TRAV23/DV6, TRAJ9)
CAASIGGNTGGFKTIL

SEQ ID NO: 543730 - protein, 16 aa, Homo sapiens
  CDR3 for beta chain variable domain of TCR clone 271865 (TRBV11-2, TRBJ2-2)
CASSTHRGSDTGELFF

SEQ ID NO: 543731 - protein, 17 aa, Homo sapiens
  CDR3 for alpha chain variable domain of TCR clone 271866 (TRAV3, TRAJ42)
CAVRDGDYGGSQGNLIF

SEQ ID NO: 543732 - protein, 14 aa, Homo sapiens
  CDR3 for beta chain variable domain of TCR clone 271866 (TRBV4-1, TRBJ2-2)
CASSQAVNTGELFF

SEQ ID NO: 543733 - protein, 14 aa, Homo sapiens
  CDR3 for alpha chain variable domain of TCR clone 271867 (TRAV8-4, TRAJ13)
CAVTLSGGYQKVTF

SEQ ID NO: 543734 - protein, 12 aa, Homo sapiens
  CDR3 for beta chain variable domain of TCR clone 271867 (TRBV7-2, TRBJ2-5)
CASSQYQETQYF

SEQ ID NO: 543735 - protein, 13 aa, Homo sapiens
  CDR3 for alpha chain variable domain of TCR clone 271868 (TRAV13-1, TRAJ20)
CAARVSNDYKLSF

SEQ ID NO: 543736 - protein, 15 aa, Homo sapiens
  CDR3 for beta chain variable domain of TCR clone 271868 (TRBV3-1, TRBJ2-7)
CASSQVRQGAYEQYF

SEQ ID NO: 543737 - protein, 15 aa, Homo sapiens
  CDR3 for alpha chain variable domain of TCR clone 271869 (TRAV2, TRAJ22)
CAIPSRGGSARQLTF

SEQ ID NO: 543738 - protein, 11 aa, Homo sapiens
  CDR3 for beta chain variable domain of TCR clone 271869 (TRBV27, TRBJ2-3)
CASSLGDTQYF

SEQ ID NO: 543739 - protein, 13 aa, Homo sapiens
  CDR3 for alpha chain variable domain of TCR clone 271870 (TRAV21, TRAJ15)
CAVRNQAGTALIF

SEQ ID NO: 543740 - protein, 19 aa, Homo sapiens
  CDR3 for beta chain variable domain of TCR clone 271870 (TRBV28, TRBJ2-7)
CASSYSGTSRLGWVYEQYS

SEQ ID NO: 543741 - protein, 11 aa, Homo sapiens
  CDR3 for alpha chain variable domain of TCR clone 271871 (TRAV2, TRAJ33)
CAVESNYQLIW

SEQ ID NO: 543742 - protein, 14 aa, Homo sapiens
  CDR3 for beta chain variable domain of TCR clone 271871 (TRBV4-3, TRBJ1-5)
CASSQGGQGWPQHF

SEQ ID NO: 543743 - protein, 14 aa, Homo sapiens
  CDR3 for alpha chain variable domain of TCR clone 271872 (TRAV22, TRAJ6)
FAGVGPGGSYIPTF

SEQ ID NO: 543744 - protein, 10 aa, Homo sapiens
  CDR3 for beta chain variable domain of TCR clone 271872 (TRBV9, TRBJ2-1)
AGVGGNEQFF

SEQ ID NO: 543745 - protein, 11 aa, Homo sapiens
  CDR3 for alpha chain variable domain of TCR clone 271873 (TRAV17, TRAJ43)
CGFTGGFKTIF

SEQ ID NO: 543746 - protein, 14 aa, Homo sapiens
  CDR3 for beta chain variable domain of TCR clone 271873 (TRBV7-9, TRBJ2-2)
CASRLVQDTGELFF

SEQ ID NO: 543747 - protein, 13 aa, Homo sapiens
  CDR3 for alpha chain variable domain of TCR clone 271874 (TRAV12-2, TRAJ24)
CAVSTDSWGKLQF

SEQ ID NO: 543748 - protein, 15 aa, Homo sapiens
  CDR3 for beta chain variable domain of TCR clone 271874 (TRBV4-1, TRBJ2-2)
CASSEGQGITGELFF

SEQ ID NO: 543749 - protein, 13 aa, Homo sapiens
  CDR3 for alpha chain variable domain of TCR clone 271875 (TRAV12-1, TRAJ20)
CVVNRETDYKLSF

SEQ ID NO: 543750 - protein, 19 aa, Homo sapiens
  CDR3 for beta chain variable domain of TCR clone 271875 (TRBV25-1, TRBJ2-2)
CAILVYRVDRGRKTGELFF

SEQ ID NO: 543751 - protein, 17 aa, Homo sapiens
  CDR3 for alpha chain variable domain of TCR clone 271876 (TRAV3, TRAJ12)
CAVRDGGRMDSSYKLIF

SEQ ID NO: 543752 - protein, 16 aa, Homo sapiens
  CDR3 for beta chain variable domain of TCR clone 271876 (TRBV19, TRBJ2-1)
CASSIQGGGSYNEQFF

SEQ ID NO: 543753 - protein, 12 aa, Homo sapiens
  CDR3 for alpha chain variable domain of TCR clone 271877 (TRAV8-4, TRAJ49)
CAVSEAGNQFYF

SEQ ID NO: 543754 - protein, 16 aa, Homo sapiens
  CDR3 for beta chain variable domain of TCR clone 271877 (TRBV7-2, TRBJ1-4)
CASSPVGRFDREKLFF

SEQ ID NO: 543755 - protein, 23 aa, Homo sapiens
  CDR3 for alpha chain variable domain of TCR clone 271878 (TRAV26-1, )
CIADNAGYNHIQNPDPAVYQLRD

SEQ ID NO: 543756 - protein, 13 aa, Homo sapiens
  CDR3 for beta chain variable domain of TCR clone 271878 (TRBV20-1, TRBJ1-1)
CSARGGGNTEAFF

SEQ ID NO: 543757 - protein, 14 aa, Homo sapiens
  CDR3 for alpha chain variable domain of TCR clone 271879 (TRAV2, TRAJ9)
CAVEDRSGGVKTIF

SEQ ID NO: 543758 - protein, 16 aa, Homo sapiens
  CDR3 for beta chain variable domain of TCR clone 271879 (TRBV27, TRBJ2-2)
CASSFRGLVRTGELFF

SEQ ID NO: 543759 - protein, 14 aa, Homo sapiens
  CDR3 for alpha chain variable domain of TCR clone 271880 (TRAV35, TRAJ22)
CAGLRPGSARQLTF

SEQ ID NO: 543760 - protein, 13 aa, Homo sapiens
  CDR3 for beta chain variable domain of TCR clone 271880 (TRBV10-2, TRBJ2-5)
CASGRLARETQYF

SEQ ID NO: 543761 - protein, 10 aa, Homo sapiens
  CDR3 for alpha chain variable domain of TCR clone 271881 (TRAV30, TRAJ32)
CGTEKDMVVL

SEQ ID NO: 543762 - protein, 13 aa, Homo sapiens
  CDR3 for beta chain variable domain of TCR clone 271881 (TRBV10-3, TRBJ2-7)
CASKLALNYEQYF

SEQ ID NO: 543763 - protein, 14 aa, Homo sapiens
  CDR3 for alpha chain variable domain of TCR clone 271882 (TRAV1-2, TRAJ8)
CAVREDTGFQKLVV

SEQ ID NO: 543764 - protein, 15 aa, Homo sapiens
  CDR3 for beta chain variable domain of TCR clone 271882 (TRBV6-3, TRBJ2-7)
CASSFPGTVFYEQYF

SEQ ID NO: 543765 - protein, 15 aa, Homo sapiens
  CDR3 for alpha chain variable domain of TCR clone 271883 (TRAV8-3, TRAJ27)
CAVCPSKTNAGKSTF

SEQ ID NO: 543766 - protein, 13 aa, Homo sapiens
  CDR3 for beta chain variable domain of TCR clone 271883 (TRBV12-5, TRBJ1-2)
CASGVRTGNGYTF

SEQ ID NO: 543767 - protein, 12 aa, Homo sapiens
  CDR3 for alpha chain variable domain of TCR clone 271884 (TRAV21, TRAJ31)
CVLAGNNARLMF

SEQ ID NO: 543768 - protein, 16 aa, Homo sapiens
  CDR3 for beta chain variable domain of TCR clone 271884 (TRBV27, TRBJ2-5)
CASSFGPGGTKETKYF

SEQ ID NO: 543769 - protein, 15 aa, Homo sapiens
  CDR3 for alpha chain variable domain of TCR clone 271885 (TRAV21, TRAJ24)
CAARSSTDSWVKLQF

SEQ ID NO: 543770 - protein, 15 aa, Homo sapiens
  CDR3 for beta chain variable domain of TCR clone 271885 (TRBV4-1, TRBJ2-7)
CASSQNTGRLYEQYF

SEQ ID NO: 543771 - protein, 13 aa, Homo sapiens
  CDR3 for alpha chain variable domain of TCR clone 271886 (TRAV2, TRAJ40)
CAVVTSGTYKYIF

SEQ ID NO: 543772 - protein, 13 aa, Homo sapiens
  CDR3 for beta chain variable domain of TCR clone 271886 (TRBV5-7, TRBJ2-6)
CASTSSGANVLTF

SEQ ID NO: 543773 - protein, 14 aa, Homo sapiens
  CDR3 for alpha chain variable domain of TCR clone 271887 (TRAV27, TRAJ44)
CAASFTGTASKLTF

SEQ ID NO: 543774 - protein, 15 aa, Homo sapiens
  CDR3 for beta chain variable domain of TCR clone 271887 (TRBV28, TRBJ2-1)
CASSLDTSSYNEQFF

SEQ ID NO: 543775 - protein, 13 aa, Homo sapiens
  CDR3 for alpha chain variable domain of TCR clone 271888 (TRAV26-1, TRAJ35)
CIVSRRVGEMLHC

SEQ ID NO: 543776 - protein, 17 aa, Homo sapiens
  CDR3 for beta chain variable domain of TCR clone 271888 (TRBV7-9, TRBJ2-7)
CASSFDGSRGGAYEQCF

SEQ ID NO: 543777 - protein, 14 aa, Homo sapiens
  CDR3 for alpha chain variable domain of TCR clone 271889 (TRAV26-1, TRAJ21)
CIVRVLGNFNKFYF

SEQ ID NO: 543778 - protein, 18 aa, Homo sapiens
  CDR3 for beta chain variable domain of TCR clone 271889 (TRBV20-1, TRBJ2-1)
CSARGDRGPLGIQNEQFF

SEQ ID NO: 543779 - protein, 13 aa, Homo sapiens
  CDR3 for alpha chain variable domain of TCR clone 271890 (TRAV30, TRAJ24)
CGTVTDSWGKLHF

SEQ ID NO: 543780 - protein, 11 aa, Homo sapiens
  CDR3 for beta chain variable domain of TCR clone 271890 (TRBV29-1, TRBJ2-5)
CSEDRTGTQYF

SEQ ID NO: 543781 - protein, 15 aa, Homo sapiens
  CDR3 for alpha chain variable domain of TCR clone 271891 (TRAV3, TRAJ22)
CAVRDRGGSARQQTF

SEQ ID NO: 543782 - protein, 15 aa, Homo sapiens
  CDR3 for beta chain variable domain of TCR clone 271891 (TRBV20-1, TRBJ1-1)
CSASRGVTGNTEAFF

SEQ ID NO: 543783 - protein, 12 aa, Homo sapiens
  CDR3 for alpha chain variable domain of TCR clone 271892 (TRAV12-3, TRAJ5)
CAMDTGRRALTF

SEQ ID NO: 543784 - protein, 14 aa, Homo sapiens
  CDR3 for beta chain variable domain of TCR clone 271892 (TRBV20-1, TRBJ2-1)
CSAQIGGAANEQFF

SEQ ID NO: 543785 - protein, 14 aa, Homo sapiens
  CDR3 for alpha chain variable domain of TCR clone 271893 (TRAV4, TRAJ9)
RLVGSGTGGFKTIF

SEQ ID NO: 543786 - protein, 15 aa, Homo sapiens
  CDR3 for beta chain variable domain of TCR clone 271893 (TRBV7-2, TRBJ2-1)
CASSLASGRVNEQFF

SEQ ID NO: 543787 - protein, 10 aa, Homo sapiens
  CDR3 for alpha chain variable domain of TCR clone 271894 (TRAV1-2, TRAJ31)
CVSEDARLMF

SEQ ID NO: 543788 - protein, 14 aa, Homo sapiens
  CDR3 for beta chain variable domain of TCR clone 271894 (TRBV19, TRBJ2-1)
CASPPFVLSGEQFF

SEQ ID NO: 543789 - protein, 15 aa, Homo sapiens
  CDR3 for alpha chain variable domain of TCR clone 271895 (TRAV35, TRAJ50)
CAGQLRKTSSDKVIF

SEQ ID NO: 543790 - protein, 12 aa, Homo sapiens
  CDR3 for beta chain variable domain of TCR clone 271895 (TRBV5-1, TRBJ2-5)
CASSLGLETQYF

SEQ ID NO: 543791 - protein, 11 aa, Homo sapiens
  CDR3 for alpha chain variable domain of TCR clone 271896 (TRAV27, TRAJ45)
CAGAQEEVLTD

SEQ ID NO: 543792 - protein, 14 aa, Homo sapiens
  CDR3 for beta chain variable domain of TCR clone 271896 (TRBV7-8, TRBJ2-3)
CASSSRDSTDTQYF

SEQ ID NO: 543793 - protein, 12 aa, Homo sapiens
  CDR3 for alpha chain variable domain of TCR clone 271897 (TRAV8-3, TRAJ20)
CAVGANDYKHSF

SEQ ID NO: 543794 - protein, 14 aa, Homo sapiens
  CDR3 for beta chain variable domain of TCR clone 271897 (TRBV7-2, TRBJ2-7)
CASSPKTSFYEQYF

SEQ ID NO: 543795 - protein, 12 aa, Homo sapiens
  CDR3 for alpha chain variable domain of TCR clone 271898 (TRAV36/DV7, TRAJ54)
CAVVRGAQKLVF

SEQ ID NO: 543796 - protein, 12 aa, Homo sapiens
  CDR3 for beta chain variable domain of TCR clone 271898 (TRBV11-2, TRBJ2-2)
CASSLPTGELFF

SEQ ID NO: 543797 - protein, 16 aa, Homo sapiens
  CDR3 for alpha chain variable domain of TCR clone 271899 (TRAV30, TRAJ24)
CGTEIVDADSWGKFQF

SEQ ID NO: 543798 - protein, 12 aa, Homo sapiens
  CDR3 for beta chain variable domain of TCR clone 271899 (TRBV18, TRBJ1-4)
CASSPSREKLFF

SEQ ID NO: 543799 - protein, 14 aa, Homo sapiens
  CDR3 for alpha chain variable domain of TCR clone 271900 (TRAV12-3, TRAJ10)
SHLPLTGGGNKLTF

SEQ ID NO: 543800 - protein, 15 aa, Homo sapiens
  CDR3 for beta chain variable domain of TCR clone 271900 (TRBV27, TRBJ2-1)
CASSNGGGSSNGQFF

SEQ ID NO: 543801 - protein, 13 aa, Homo sapiens
  CDR3 for alpha chain variable domain of TCR clone 271901 (TRAV2, TRAJ36)
CAVDQTGANNLFF

SEQ ID NO: 543802 - protein, 12 aa, Homo sapiens
  CDR3 for beta chain variable domain of TCR clone 271901 (TRBV19, TRBJ1-1)
CARMNRYTEAFF

SEQ ID NO: 543803 - protein, 23 aa, Homo sapiens
  CDR3 for alpha chain variable domain of TCR clone 271902 (TRAV21, )
CAVMGAGNYHIQNPDPAVYQLRD

SEQ ID NO: 543804 - protein, 13 aa, Homo sapiens
  CDR3 for beta chain variable domain of TCR clone 271902 (TRBV7-3, TRBJ2-5)
CASSIGFFETQYF

SEQ ID NO: 543805 - protein, 13 aa, Homo sapiens
  CDR3 for alpha chain variable domain of TCR clone 271903 (TRAV25, TRAJ54)
CAGTIQGAQKLVF

SEQ ID NO: 543806 - protein, 15 aa, Homo sapiens
  CDR3 for beta chain variable domain of TCR clone 271903 (TRBV19, TRBJ1-5)
CASSILTGEKQPQHF

SEQ ID NO: 543807 - protein, 14 aa, Homo sapiens
  CDR3 for alpha chain variable domain of TCR clone 271904 (TRAV12-2, TRAJ40)
CAVKIPSGTHKYIF

SEQ ID NO: 543808 - protein, 17 aa, Homo sapiens
  CDR3 for beta chain variable domain of TCR clone 271904 (TRBV13, TRBJ2-3)
CASSLSGVAGGRNTQYF

SEQ ID NO: 543809 - protein, 14 aa, Homo sapiens
  CDR3 for alpha chain variable domain of TCR clone 271905 (TRAV36/DV7, TRAJ57)
CAIGFPGGSEKLVF

SEQ ID NO: 543810 - protein, 12 aa, Homo sapiens
  CDR3 for beta chain variable domain of TCR clone 271905 (TRBV19, TRBJ2-7)
CASTSGTYEQYF

SEQ ID NO: 543811 - protein, 16 aa, Homo sapiens
  CDR3 for alpha chain variable domain of TCR clone 271906 (TRAV30, TRAJ24)
CGKEIVDADSWGKFQF

SEQ ID NO: 543812 - protein, 15 aa, Homo sapiens
  CDR3 for beta chain variable domain of TCR clone 271906 (TRBV20-1, TRBJ2-4)
CSARDLTGGPNIQYF

SEQ ID NO: 543813 - protein, 12 aa, Homo sapiens
  CDR3 for alpha chain variable domain of TCR clone 271907 (TRAV29/DV5, TRAJ49)
CPATDTGNQFYF

SEQ ID NO: 543814 - protein, 12 aa, Homo sapiens
  CDR3 for beta chain variable domain of TCR clone 271907 (TRBV12-4, TRBJ2-7)
CASSLGGYEQYF

SEQ ID NO: 543815 - protein, 13 aa, Homo sapiens
  CDR3 for alpha chain variable domain of TCR clone 271908 (TRAV20, TRAJ31)
CAVQAWNNARLMF

SEQ ID NO: 543816 - protein, 15 aa, Homo sapiens
  CDR3 for beta chain variable domain of TCR clone 271908 (TRBV2, TRBJ2-1)
CASSELAGSYNDQFF

SEQ ID NO: 543817 - protein, 15 aa, Homo sapiens
  CDR3 for alpha chain variable domain of TCR clone 271909 (TRAV25, TRAJ53)
CPTSNSGGSNYKLTF

SEQ ID NO: 543818 - protein, 16 aa, Homo sapiens
  CDR3 for beta chain variable domain of TCR clone 271909 (TRBV5-4, TRBJ2-3)
CASQQPGAGGADTQYF

SEQ ID NO: 543819 - protein, 12 aa, Homo sapiens
  CDR3 for alpha chain variable domain of TCR clone 271910 (TRAV12-1, TRAJ40)
CVVYSGTYKYIF

SEQ ID NO: 543820 - protein, 14 aa, Homo sapiens
  CDR3 for beta chain variable domain of TCR clone 271910 (TRBV7-2, TRBJ2-7)
CASRSQGAAYEQYF

SEQ ID NO: 543821 - protein, 17 aa, Homo sapiens
  CDR3 for alpha chain variable domain of TCR clone 271911 (TRAV26-1, TRAJ47)
CIVPSLLYMESGNKLVF

SEQ ID NO: 543822 - protein, 14 aa, Homo sapiens
  CDR3 for beta chain variable domain of TCR clone 271911 (TRBV7-3, TRBJ1-5)
RASSFSGCNQPRHF

SEQ ID NO: 543823 - protein, 14 aa, Homo sapiens
  CDR3 for alpha chain variable domain of TCR clone 271912 (TRAV12-1, TRAJ17)
CVVNFEAAGNKLTF

SEQ ID NO: 543824 - protein, 17 aa, Homo sapiens
  CDR3 for beta chain variable domain of TCR clone 271912 (TRBV20-1, TRBJ2-1)
CSASASGLAGSYNEQFF

SEQ ID NO: 543825 - protein, 16 aa, Homo sapiens
  CDR3 for alpha chain variable domain of TCR clone 271913 (TRAV21, TRAJ37)
CAVRTAGSSNTGKLTF

SEQ ID NO: 543826 - protein, 14 aa, Homo sapiens
  CDR3 for beta chain variable domain of TCR clone 271913 (TRBV7-2, TRBJ2-7)
CASSPKTSFYEQYF

SEQ ID NO: 543827 - protein, 14 aa, Homo sapiens
  CDR3 for alpha chain variable domain of TCR clone 271914 (TRAV8-6, TRAJ49)
CAVSDPGTGNQFYF

SEQ ID NO: 543828 - protein, 16 aa, Homo sapiens
  CDR3 for beta chain variable domain of TCR clone 271914 (TRBV24-1, TRBJ2-1)
CATSGVAGANYDEQFF

SEQ ID NO: 543829 - protein, 16 aa, Homo sapiens
  CDR3 for alpha chain variable domain of TCR clone 271915 (TRAV12-1, TRAJ43)
CVVNPHRFGAGTRLTV

SEQ ID NO: 543830 - protein, 14 aa, Homo sapiens
  CDR3 for beta chain variable domain of TCR clone 271915 (TRBV7-2, TRBJ2-7)
CASRSQGAAYAQYF

SEQ ID NO: 543831 - protein, 13 aa, Homo sapiens
  CDR3 for alpha chain variable domain of TCR clone 271916 (TRAV27, TRAJ40)
CAGPPSGTYKYIF

SEQ ID NO: 543832 - protein, 14 aa, Homo sapiens
  CDR3 for beta chain variable domain of TCR clone 271916 (TRBV20-1, TRBJ2-4)
CSARDRGQGGIQYF

SEQ ID NO: 543833 - protein, 19 aa, Homo sapiens
  CDR3 for alpha chain variable domain of TCR clone 271917 (TRAV1-1, TRAJ6)
CAVRDLRGQEEATYLHLEE

SEQ ID NO: 543834 - protein, 13 aa, Homo sapiens
  CDR3 for beta chain variable domain of TCR clone 271917 (TRBV10-2, TRBJ2-7)
CASGASGGYEQYF

SEQ ID NO: 543835 - protein, 17 aa, Homo sapiens
  CDR3 for alpha chain variable domain of TCR clone 271918 (TRAV13-1, TRAJ52)
CAAERNAGGTSYGKLTF

SEQ ID NO: 543836 - protein, 13 aa, Homo sapiens
  CDR3 for beta chain variable domain of TCR clone 271918 (TRBV7-2, TRBJ1-1)
CASNLKGAKVAFF

SEQ ID NO: 543837 - protein, 15 aa, Homo sapiens
  CDR3 for alpha chain variable domain of TCR clone 271919 (TRAV3, TRAJ5)
CAVRDLDTGRRALTF

SEQ ID NO: 543838 - protein, 16 aa, Homo sapiens
  CDR3 for beta chain variable domain of TCR clone 271919 (TRBV7-9, TRBJ2-1)
CASSLVSGPSYNEQFF

SEQ ID NO: 543839 - protein, 14 aa, Homo sapiens
  CDR3 for alpha chain variable domain of TCR clone 271920 (TRAV1-2, TRAJ8)
CAVREDTGFQKLVF

SEQ ID NO: 543840 - protein, 16 aa, Homo sapiens
  CDR3 for beta chain variable domain of TCR clone 271920 (TRBV5-4, TRBJ2-3)
CASQHPGAGGADTQYF

SEQ ID NO: 543841 - protein, 20 aa, Homo sapiens
  CDR3 for alpha chain variable domain of TCR clone 271921 (TRAV12-1, TRAJ42)
SSVIQPPTSVKGGSQGNLIF

SEQ ID NO: 543842 - protein, 16 aa, Homo sapiens
  CDR3 for beta chain variable domain of TCR clone 271921 (TRBV29-1, TRBJ2-6)
CSVEDITYSGANVLTF

SEQ ID NO: 543843 - protein, 16 aa, Homo sapiens
  CDR3 for alpha chain variable domain of TCR clone 271922 (TRAV4, TRAJ22)
CLVGDLYSGSARQLTF

SEQ ID NO: 543844 - protein, 17 aa, Homo sapiens
  CDR3 for beta chain variable domain of TCR clone 271922 (TRBV24-1, TRBJ2-4)
CATSDAEARGVRNMQYF

SEQ ID NO: 543845 - protein, 14 aa, Homo sapiens
  CDR3 for alpha chain variable domain of TCR clone 271923 (TRAV12-2, TRAJ13)
CAVKKTGGCQKVTL

SEQ ID NO: 543846 - protein, 15 aa, Homo sapiens
  CDR3 for beta chain variable domain of TCR clone 271923 (TRBV27, TRBJ2-1)
CASSNGGGSSNEQFF

SEQ ID NO: 543847 - protein, 16 aa, Homo sapiens
  CDR3 for alpha chain variable domain of TCR clone 271924 (TRAV30, TRAJ24)
CGTETVDADSWGKFQF

SEQ ID NO: 543848 - protein, 15 aa, Homo sapiens
  CDR3 for beta chain variable domain of TCR clone 271924 (TRBV6-1, TRBJ2-1)
CASSELRGQYNEQFF

SEQ ID NO: 543849 - protein, 12 aa, Homo sapiens
  CDR3 for alpha chain variable domain of TCR clone 271925 (TRAV3, TRAJ20)
CAVRDPDYKLSF

SEQ ID NO: 543850 - protein, 14 aa, Homo sapiens
  CDR3 for beta chain variable domain of TCR clone 271925 (TRBV7-9, TRBJ2-5)
CASSLAPDQETQYF

SEQ ID NO: 543851 - protein, 14 aa, Homo sapiens
  CDR3 for alpha chain variable domain of TCR clone 271926 (TRAV12-3, TRAJ29)
CAMILLSGNTPLVF

SEQ ID NO: 543852 - protein, 13 aa, Homo sapiens
  CDR3 for beta chain variable domain of TCR clone 271926 (TRBV7-9, TRBJ2-7)
CATRRADTYEQYF

SEQ ID NO: 543853 - protein, 14 aa, Homo sapiens
  CDR3 for alpha chain variable domain of TCR clone 271927 (TRAV12-3, TRAJ9)
CAKSPNTGGFKTIF

SEQ ID NO: 543854 - protein, 12 aa, Homo sapiens
  CDR3 for beta chain variable domain of TCR clone 271927 (TRBV19, TRBJ1-5)
CASSMAQQPQHF

SEQ ID NO: 543855 - protein, 14 aa, Homo sapiens
  CDR3 for alpha chain variable domain of TCR clone 271928 (TRAV1-2, TRAJ33)
CALRAPDSNYQLIW

SEQ ID NO: 543856 - protein, 12 aa, Homo sapiens
  CDR3 for beta chain variable domain of TCR clone 271928 (TRBV18, TRBJ2-1)
CASSSDEDEQFF

SEQ ID NO: 543857 - protein, 17 aa, Homo sapiens
  CDR3 for alpha chain variable domain of TCR clone 271929 (TRAV13-1, TRAJ52)
CAAGRNAGGTSYGKLTF

SEQ ID NO: 543858 - protein, 14 aa, Homo sapiens
  CDR3 for beta chain variable domain of TCR clone 271929 (TRBV7-2, TRBJ2-7)
CASRSQGAAYEQYF

SEQ ID NO: 543859 - protein, 17 aa, Homo sapiens
  CDR3 for alpha chain variable domain of TCR clone 271930 (TRAV26-2, TRAJ28)
FILRPLLIVAGRYQLTF

SEQ ID NO: 543860 - protein, 16 aa, Homo sapiens
  CDR3 for beta chain variable domain of TCR clone 271930 (TRBV6-4, TRBJ1-4)
CASSETGQDPNEKLFF

SEQ ID NO: 543861 - protein, 15 aa, Homo sapiens
  CDR3 for alpha chain variable domain of TCR clone 271931 (TRAV12-2, TRAJ50)
CAVNGLETSYDKVIF

SEQ ID NO: 543862 - protein, 15 aa, Homo sapiens
  CDR3 for beta chain variable domain of TCR clone 271931 (TRBV5-4, TRBJ2-3)
CQPAAGAGGADTQYF

SEQ ID NO: 543863 - protein, 14 aa, Homo sapiens
  CDR3 for alpha chain variable domain of TCR clone 271932 (TRAV12-3, TRAJ10)
SHLPLTGGGNKLTF

SEQ ID NO: 543864 - protein, 17 aa, Homo sapiens
  CDR3 for beta chain variable domain of TCR clone 271932 (TRBV6-1, TRBJ1-3)
CTSGPACKGGGGNTIYF

SEQ ID NO: 543865 - protein, 13 aa, Homo sapiens
  CDR3 for alpha chain variable domain of TCR clone 271933 (TRAV1-2, TRAJ9)
CAVLNTGGFKTIF

SEQ ID NO: 543866 - protein, 14 aa, Homo sapiens
  CDR3 for beta chain variable domain of TCR clone 271933 (TRBV3-1, TRBJ2-5)
CASSQGPDQETQYF

SEQ ID NO: 543867 - protein, 12 aa, Homo sapiens
  CDR3 for alpha chain variable domain of TCR clone 271934 (TRAV12-3, TRAJ5)
CAMDTGRRALTF

SEQ ID NO: 543868 - protein, 14 aa, Homo sapiens
  CDR3 for beta chain variable domain of TCR clone 271934 (TRBV6-5, TRBJ1-2)
CASSYDGTGGGYTF

SEQ ID NO: 543869 - protein, 13 aa, Homo sapiens
  CDR3 for alpha chain variable domain of TCR clone 271935 (TRAV3, TRAJ9)
CAFWNTGGFKTIS

SEQ ID NO: 543870 - protein, 14 aa, Homo sapiens
  CDR3 for beta chain variable domain of TCR clone 271935 (TRBV7-3, TRBJ2-1)
CASSLSGSYNEQFF

SEQ ID NO: 543871 - protein, 14 aa, Homo sapiens
  CDR3 for alpha chain variable domain of TCR clone 271936 (TRAV23/DV6, TRAJ40)
CAASLTPGTYKYLF

SEQ ID NO: 543872 - protein, 14 aa, Homo sapiens
  CDR3 for beta chain variable domain of TCR clone 271936 (TRBV5-1, TRBJ2-3)
CASSRGQGGGTQYF

SEQ ID NO: 543873 - protein, 14 aa, Homo sapiens
  CDR3 for alpha chain variable domain of TCR clone 271937 (TRAV14/DV4, TRAJ34)
CAMREGRPHRQAHL

SEQ ID NO: 543874 - protein, 14 aa, Homo sapiens
  CDR3 for beta chain variable domain of TCR clone 271937 (TRBV7-2, TRBJ2-7)
CASSPKTSFYEQYF

SEQ ID NO: 543875 - protein, 18 aa, Homo sapiens
  CDR3 for alpha chain variable domain of TCR clone 271938 (TRAV12-3, TRAJ52)
CAMSVGGAGGTSYGKLTF

SEQ ID NO: 543876 - protein, 15 aa, Homo sapiens
  CDR3 for beta chain variable domain of TCR clone 271938 (TRBV27, TRBJ1-6)
CASCFDRGLGSPLHF

SEQ ID NO: 543877 - protein, 15 aa, Homo sapiens
  CDR3 for alpha chain variable domain of TCR clone 271939 (TRAV3, TRAJ9)
CAVRDLNTGGFKTIF

SEQ ID NO: 543878 - protein, 15 aa, Homo sapiens
  CDR3 for beta chain variable domain of TCR clone 271939 (TRBV9, TRBJ1-6)
CASSVAGTGDSPLHF

SEQ ID NO: 543879 - protein, 15 aa, Homo sapiens
  CDR3 for alpha chain variable domain of TCR clone 271940 (TRAV14/DV4, TRAJ33)
CAMREGRDSNYQLIW

SEQ ID NO: 543880 - protein, 15 aa, Homo sapiens
  CDR3 for beta chain variable domain of TCR clone 271940 (TRBV5-5, TRBJ1-5)
CASSSTPRSNQPQHF

SEQ ID NO: 543881 - protein, 14 aa, Homo sapiens
  CDR3 for alpha chain variable domain of TCR clone 271941 (TRAV12-1, TRAJ10)
CVAILTGGGNKLTF

SEQ ID NO: 543882 - protein, 15 aa, Homo sapiens
  CDR3 for beta chain variable domain of TCR clone 271941 (TRBV20-1, TRBJ2-7)
CSSRGFRPQTYEQYF

SEQ ID NO: 543883 - protein, 18 aa, Homo sapiens
  CDR3 for alpha chain variable domain of TCR clone 271942 (TRAV1-2, TRAJ18)
CAVRDMGDRGSTLGRLYF

SEQ ID NO: 543884 - protein, 16 aa, Homo sapiens
  CDR3 for beta chain variable domain of TCR clone 271942 (TRBV29-1, TRBJ1-2)
CSVEANRNRANYGYTF

SEQ ID NO: 543885 - protein, 15 aa, Homo sapiens
  CDR3 for alpha chain variable domain of TCR clone 271943 (TRAV25, TRAJ52)
CAGTSGGTSYGKLTF

SEQ ID NO: 543886 - protein, 17 aa, Homo sapiens
  CDR3 for beta chain variable domain of TCR clone 271943 (TRBV7-3, TRBJ2-3)
CASSLMKRMRGADTQYF

SEQ ID NO: 543887 - protein, 13 aa, Homo sapiens
  CDR3 for alpha chain variable domain of TCR clone 271944 (TRAV3, TRAJ20)
CCEAFCNDYKLSF

SEQ ID NO: 543888 - protein, 15 aa, Homo sapiens
  CDR3 for beta chain variable domain of TCR clone 271944 (TRBV6-5, TRBJ2-1)
CASSYDAGAGNEQFL

SEQ ID NO: 543889 - protein, 14 aa, Homo sapiens
  CDR3 for alpha chain variable domain of TCR clone 271945 (TRAV12-2, TRAJ39)
SATYLRAVNNMLTF

SEQ ID NO: 543890 - protein, 16 aa, Homo sapiens
  CDR3 for beta chain variable domain of TCR clone 271945 (TRBV9, TRBJ2-7)
CASSAGPDRSPYEQYF

SEQ ID NO: 543891 - protein, 11 aa, Homo sapiens
  CDR3 for alpha chain variable domain of TCR clone 271946 (TRAV3, TRAJ21)
CDAGNFNKFYF

SEQ ID NO: 543892 - protein, 16 aa, Homo sapiens
  CDR3 for beta chain variable domain of TCR clone 271946 (TRBV19, TRBJ2-1)
CASSKAGPSSYNEQFF

SEQ ID NO: 543893 - protein, 15 aa, Homo sapiens
  CDR3 for alpha chain variable domain of TCR clone 271947 (TRAV23/DV6, TRAJ44)
CSARTLTGTASKLTF

SEQ ID NO: 543894 - protein, 17 aa, Homo sapiens
  CDR3 for beta chain variable domain of TCR clone 271947 (TRBV24-1, TRBJ2-1)
CATSDVSTSGTYNEQFF

SEQ ID NO: 543895 - protein, 15 aa, Homo sapiens
  CDR3 for alpha chain variable domain of TCR clone 271948 (TRAV12-3, TRAJ6)
FAMSATTGGSYIPTF

SEQ ID NO: 543896 - protein, 12 aa, Homo sapiens
  CDR3 for beta chain variable domain of TCR clone 271948 (TRBV11-2, TRBJ2-2)
CASSLGGGELFF

SEQ ID NO: 543897 - protein, 15 aa, Homo sapiens
  CDR3 for alpha chain variable domain of TCR clone 271949 (TRAV12-3, TRAJ6)
CAMSATSGGSYIPTF

SEQ ID NO: 543898 - protein, 14 aa, Homo sapiens
  CDR3 for beta chain variable domain of TCR clone 271949 (TRBV11-2, TRBJ2-5)
CASRPLAGRETQYF

SEQ ID NO: 543899 - protein, 14 aa, Homo sapiens
  CDR3 for alpha chain variable domain of TCR clone 271950 (TRAV26-1, TRAJ38)
CIADNAGNNRKLIW

SEQ ID NO: 543900 - protein, 14 aa, Homo sapiens
  CDR3 for beta chain variable domain of TCR clone 271950 (TRBV7-2, TRBJ2-5)
CASSLSGGGETQYF

SEQ ID NO: 543901 - protein, 23 aa, Homo sapiens
  CDR3 for alpha chain variable domain of TCR clone 271951 (TRAV26-1, TRAJ28)
CCVLLHRQSRPCILWGWELQLTF

SEQ ID NO: 543902 - protein, 17 aa, Homo sapiens
  CDR3 for beta chain variable domain of TCR clone 271951 (TRBV9, TRBJ2-2)
CASSVGGQGTDTGELFF

SEQ ID NO: 543903 - protein, 16 aa, Homo sapiens
  CDR3 for alpha chain variable domain of TCR clone 271952 (TRAV16, TRAJ4)
CALSRMFSGGYNKLIF

SEQ ID NO: 543904 - protein, 16 aa, Homo sapiens
  CDR3 for beta chain variable domain of TCR clone 271952 (TRBV24-1, TRBJ2-3)
CATSDPGTGATDTQNF

SEQ ID NO: 543905 - protein, 14 aa, Homo sapiens
  CDR3 for alpha chain variable domain of TCR clone 271953 (TRAV2, TRAJ9)
CAVEDRSGGLQTIF

SEQ ID NO: 543906 - protein, 12 aa, Homo sapiens
  CDR3 for beta chain variable domain of TCR clone 271953 (TRBV11-2, TRBJ2-1)
CASSPGNNEQFF

SEQ ID NO: 543907 - protein, 16 aa, Homo sapiens
  CDR3 for alpha chain variable domain of TCR clone 271954 (TRAV30, TRAJ24)
CGTEIVDADSWGKFQL

SEQ ID NO: 543908 - protein, 11 aa, Homo sapiens
  CDR3 for beta chain variable domain of TCR clone 271954 (TRBV12-4, TRBJ2-5)
CASSFQGAQYF

SEQ ID NO: 543909 - protein, 13 aa, Homo sapiens
  CDR3 for alpha chain variable domain of TCR clone 271955 (TRAV27, TRAJ6)
CAGGTRGSYIPIF

SEQ ID NO: 543910 - protein, 14 aa, Homo sapiens
  CDR3 for beta chain variable domain of TCR clone 271955 (TRBV6-3, TRBJ1-1)
CASSYQRRDTEAFF

SEQ ID NO: 543911 - protein, 14 aa, Homo sapiens
  CDR3 for alpha chain variable domain of TCR clone 271956 (TRAV13-1, TRAJ35)
CAASKGGFGNVLHR

SEQ ID NO: 543912 - protein, 13 aa, Homo sapiens
  CDR3 for beta chain variable domain of TCR clone 271956 (TRBV7-2, TRBJ2-2)
CASSSVRAGELFF

SEQ ID NO: 543913 - protein, 12 aa, Homo sapiens
  CDR3 for alpha chain variable domain of TCR clone 271957 (TRAV12-3, TRAJ17)
CAMTLTGNKLTF

SEQ ID NO: 543914 - protein, 13 aa, Homo sapiens
  CDR3 for beta chain variable domain of TCR clone 271957 (TRBV7-9, TRBJ1-2)
CASSLKQNYGCAF

SEQ ID NO: 543915 - protein, 13 aa, Homo sapiens
  CDR3 for alpha chain variable domain of TCR clone 271958 (TRAV38-2/DV8, TRAJ45)
CAYVGGGADGLTF

SEQ ID NO: 543916 - protein, 13 aa, Homo sapiens
  CDR3 for beta chain variable domain of TCR clone 271958 (TRBV12-4, TRBJ2-1)
CASSLGTDNEQFF

SEQ ID NO: 543917 - protein, 13 aa, Homo sapiens
  CDR3 for alpha chain variable domain of TCR clone 271959 (TRAV8-3, TRAJ5)
CAVGPRGRRALTF

SEQ ID NO: 543918 - protein, 16 aa, Homo sapiens
  CDR3 for beta chain variable domain of TCR clone 271959 (TRBV11-3, TRBJ2-3)
CASSPGGLLVTDTQYF

SEQ ID NO: 543919 - protein, 13 aa, Homo sapiens
  CDR3 for alpha chain variable domain of TCR clone 271960 (TRAV12-2, TRAJ13)
WVKKTGGYQKVTF

SEQ ID NO: 543920 - protein, 15 aa, Homo sapiens
  CDR3 for beta chain variable domain of TCR clone 271960 (TRBV27, TRBJ2-1)
CASSNGGGSSNEQFF

SEQ ID NO: 543921 - protein, 12 aa, Homo sapiens
  CDR3 for alpha chain variable domain of TCR clone 271961 (TRAV12-2, TRAJ8)
CAVNTGFQKLVF

SEQ ID NO: 543922 - protein, 13 aa, Homo sapiens
  CDR3 for beta chain variable domain of TCR clone 271961 (TRBV12-5, TRBJ2-3)
CASGDRQSDTQYF

SEQ ID NO: 543923 - protein, 17 aa, Homo sapiens
  CDR3 for alpha chain variable domain of TCR clone 271962 (TRAV21, TRAJ40)
CAVRPQSGTSGTYKYIF

SEQ ID NO: 543924 - protein, 13 aa, Homo sapiens
  CDR3 for beta chain variable domain of TCR clone 271962 (TRBV12-4, TRBJ2-7)
CASSPSRDTPGSF

SEQ ID NO: 543925 - protein, 15 aa, Homo sapiens
  CDR3 for alpha chain variable domain of TCR clone 271963 (TRAV23/DV6, TRAJ23)
CAASERGNQGGKLIF

SEQ ID NO: 543926 - protein, 17 aa, Homo sapiens
  CDR3 for beta chain variable domain of TCR clone 271963 (TRBV13, TRBJ2-3)
CASSLSRVAGGRNTQYF

SEQ ID NO: 543927 - protein, 14 aa, Homo sapiens
  CDR3 for alpha chain variable domain of TCR clone 271964 (TRAV1-1, TRAJ35)
CAVRSIGFGNVLHC

SEQ ID NO: 543928 - protein, 14 aa, Homo sapiens
  CDR3 for beta chain variable domain of TCR clone 271964 (TRBV11-2, TRBJ1-2)
CASSLGTANYGYTF

SEQ ID NO: 543929 - protein, 16 aa, Homo sapiens
  CDR3 for alpha chain variable domain of TCR clone 271965 (TRAV13-1, TRAJ48)
CAASIFGNFGNEKLTF

SEQ ID NO: 543930 - protein, 16 aa, Homo sapiens
  CDR3 for beta chain variable domain of TCR clone 271965 (TRBV18, TRBJ1-5)
CASSPSRVEGNQPQHF

SEQ ID NO: 543931 - protein, 15 aa, Homo sapiens
  CDR3 for alpha chain variable domain of TCR clone 271966 (TRAV12-1, TRAJ44)
CVADLPTGTASKLTF

SEQ ID NO: 543932 - protein, 13 aa, Homo sapiens
  CDR3 for beta chain variable domain of TCR clone 271966 (TRBV6-5, TRBJ2-5)
CASSPHGGETQYF

SEQ ID NO: 543933 - protein, 14 aa, Homo sapiens
  CDR3 for alpha chain variable domain of TCR clone 271967 (TRAV16, TRAJ17)
CALSGRAAGNKLTF

SEQ ID NO: 543934 - protein, 17 aa, Homo sapiens
  CDR3 for beta chain variable domain of TCR clone 271967 (TRBV18, TRBJ2-6)
CASSPRQGAVGANDLSF

SEQ ID NO: 543935 - protein, 20 aa, Homo sapiens
  CDR3 for alpha chain variable domain of TCR clone 271968 (TRAV12-3, TRAJ41)
SLFIRDSQPSDSATPEALNF

SEQ ID NO: 543936 - protein, 12 aa, Homo sapiens
  CDR3 for beta chain variable domain of TCR clone 271968 (TRBV6-3, TRBJ2-7)
CASSEPGFEQYF

SEQ ID NO: 543937 - protein, 13 aa, Homo sapiens
  CDR3 for alpha chain variable domain of TCR clone 271969 (TRAV27, TRAJ45)
CRSSGGGADGLTF

SEQ ID NO: 543938 - protein, 14 aa, Homo sapiens
  CDR3 for beta chain variable domain of TCR clone 271969 (TRBV27, TRBJ2-5)
CASSRTFLVDTQYF

SEQ ID NO: 543939 - protein, 14 aa, Homo sapiens
  CDR3 for alpha chain variable domain of TCR clone 271970 (TRAV17, TRAJ9)
CATGECGGDWRLQN

SEQ ID NO: 543940 - protein, 15 aa, Homo sapiens
  CDR3 for beta chain variable domain of TCR clone 271970 (TRBV20-1, TRBJ1-2)
CSARDSRGRNYGYTF

SEQ ID NO: 543941 - protein, 19 aa, Homo sapiens
  CDR3 for alpha chain variable domain of TCR clone 271971 (TRAV38-1, TRAJ53)
CAFMKHGLESGGSNYKLTF

SEQ ID NO: 543942 - protein, 15 aa, Homo sapiens
  CDR3 for beta chain variable domain of TCR clone 271971 (TRBV5-5, TRBJ1-5)
CASSSTPGSNQPQHF

SEQ ID NO: 543943 - protein, 14 aa, Homo sapiens
  CDR3 for alpha chain variable domain of TCR clone 271972 (TRAV2, TRAJ9)
CAVEDRRGGFKTIF

SEQ ID NO: 543944 - protein, 15 aa, Homo sapiens
  CDR3 for beta chain variable domain of TCR clone 271972 (TRBV6-5, TRBJ2-1)
CASSYDAGAGNEQFF

SEQ ID NO: 543945 - protein, 16 aa, Homo sapiens
  CDR3 for alpha chain variable domain of TCR clone 271973 (TRAV3, TRAJ21)
CAVRDIERGNFNKFYF

SEQ ID NO: 543946 - protein, 15 aa, Homo sapiens
  CDR3 for beta chain variable domain of TCR clone 271973 (TRBV2, TRBJ2-1)
CASSELAGSYNEQFF

SEQ ID NO: 543947 - protein, 14 aa, Homo sapiens
  CDR3 for alpha chain variable domain of TCR clone 271974 (TRAV38-1, TRAJ40)
CALRPTSGTYKYIF

SEQ ID NO: 543948 - protein, 16 aa, Homo sapiens
  CDR3 for beta chain variable domain of TCR clone 271974 (TRBV25-1, TRBJ1-1)
CASTHLGGNTKLSLDK

SEQ ID NO: 543949 - protein, 17 aa, Homo sapiens
  CDR3 for alpha chain variable domain of TCR clone 271975 (TRAV3, TRAJ6)
CAVRDGPRAGGRYRPTF

SEQ ID NO: 543950 - protein, 14 aa, Homo sapiens
  CDR3 for beta chain variable domain of TCR clone 271975 (TRBV7-2, TRBJ2-7)
CASSPKTSFYEQYF

SEQ ID NO: 543951 - protein, 14 aa, Homo sapiens
  CDR3 for alpha chain variable domain of TCR clone 271976 (TRAV16, TRAJ33)
CALSAMDSNYQLIW

SEQ ID NO: 543952 - protein, 11 aa, Homo sapiens
  CDR3 for beta chain variable domain of TCR clone 271976 (TRBV24-1, TRBJ2-3)
CATASTDTQYF

SEQ ID NO: 543953 - protein, 14 aa, Homo sapiens
  CDR3 for alpha chain variable domain of TCR clone 271977 (TRAV1-2, TRAJ16)
CAVRSASDGQKLLF

SEQ ID NO: 543954 - protein, 16 aa, Homo sapiens
  CDR3 for beta chain variable domain of TCR clone 271977 (TRBV19, TRBJ2-2)
CASRSPGTGATGELFF

SEQ ID NO: 543955 - protein, 23 aa, Homo sapiens
  CDR3 for alpha chain variable domain of TCR clone 271978 (TRAV12-2, TRAJ36)
SLLIRDSQPSDSATLERANNLLF

SEQ ID NO: 543956 - protein, 16 aa, Homo sapiens
  CDR3 for beta chain variable domain of TCR clone 271978 (TRBV7-3, TRBJ2-2)
CASSLKRGTLSGELFF

SEQ ID NO: 543957 - protein, 18 aa, Homo sapiens
  CDR3 for alpha chain variable domain of TCR clone 271979 (TRAV16, TRAJ10)
CAPHGRRKQTHLWDRHSA

SEQ ID NO: 543958 - protein, 15 aa, Homo sapiens
  CDR3 for beta chain variable domain of TCR clone 271979 (TRBV6-3, TRBJ2-7)
CASSSPGTVFYEQYF

SEQ ID NO: 543959 - protein, 13 aa, Homo sapiens
  CDR3 for alpha chain variable domain of TCR clone 271980 (TRAV12-3, TRAJ33)
CAMSVNSNYQLIW

SEQ ID NO: 543960 - protein, 16 aa, Homo sapiens
  CDR3 for beta chain variable domain of TCR clone 271980 (TRBV7-3, TRBJ2-3)
CASRLSGYRPEDTQYF

SEQ ID NO: 543961 - protein, 13 aa, Homo sapiens
  CDR3 for alpha chain variable domain of TCR clone 271981 (TRAV12-1, TRAJ6)
CVLASGGSYIPTF

SEQ ID NO: 543962 - protein, 15 aa, Homo sapiens
  CDR3 for beta chain variable domain of TCR clone 271981 (TRBV11-3, TRBJ2-3)
CASLKDGREGDTQYF

SEQ ID NO: 543963 - protein, 11 aa, Homo sapiens
  CDR3 for alpha chain variable domain of TCR clone 271982 (TRAV22, TRAJ20)
CAPLHDYKLSF

SEQ ID NO: 543964 - protein, 13 aa, Homo sapiens
  CDR3 for beta chain variable domain of TCR clone 271982 (TRBV19, TRBJ2-1)
CASCPGSYNEQFF

SEQ ID NO: 543965 - protein, 14 aa, Homo sapiens
  CDR3 for alpha chain variable domain of TCR clone 271983 (TRAV12-2, TRAJ45)
CAVYSGGGADGLTF

SEQ ID NO: 543966 - protein, 14 aa, Homo sapiens
  CDR3 for beta chain variable domain of TCR clone 271983 (TRBV6-5, TRBJ1-2)
CASTRGGGSEGYTF

SEQ ID NO: 543967 - protein, 11 aa, Homo sapiens
  CDR3 for alpha chain variable domain of TCR clone 271984 (TRAV12-1, TRAJ43)
CVEYDNNDMRF

SEQ ID NO: 543968 - protein, 13 aa, Homo sapiens
  CDR3 for beta chain variable domain of TCR clone 271984 (TRBV20-1, TRBJ1-1)
CSARVGGNTEAFF

SEQ ID NO: 543969 - protein, 14 aa, Homo sapiens
  CDR3 for alpha chain variable domain of TCR clone 271985 (TRAV8-3, TRAJ6)
CAVGASGGSYIPTF

SEQ ID NO: 543970 - protein, 17 aa, Homo sapiens
  CDR3 for beta chain variable domain of TCR clone 271985 (TRBV18, TRBJ2-2)
CASSPSDPWQNTGEMFF

SEQ ID NO: 543971 - protein, 14 aa, Homo sapiens
  CDR3 for alpha chain variable domain of TCR clone 271986 (TRAV8-2, TRAJ23)
CVVSDDNQGGKLIF

SEQ ID NO: 543972 - protein, 16 aa, Homo sapiens
  CDR3 for beta chain variable domain of TCR clone 271986 (TRBV9, TRBJ2-2)
CASSGPSGTGIGELFF

SEQ ID NO: 543973 - protein, 16 aa, Homo sapiens
  CDR3 for alpha chain variable domain of TCR clone 271987 (TRAV3, TRAJ5)
CAVRNLMDTGRRALTF

SEQ ID NO: 543974 - protein, 12 aa, Homo sapiens
  CDR3 for beta chain variable domain of TCR clone 271987 (TRBV14, TRBJ2-7)
CASSLYKDEQYF

SEQ ID NO: 543975 - protein, 13 aa, Homo sapiens
  CDR3 for alpha chain variable domain of TCR clone 271988 (TRAV8-3, TRAJ44)
CAVVPGTASKLTF

SEQ ID NO: 543976 - protein, 15 aa, Homo sapiens
  CDR3 for beta chain variable domain of TCR clone 271988 (TRBV5-1, TRBJ2-3)
CASSVTSGSTDTQYF

SEQ ID NO: 543977 - protein, 13 aa, Homo sapiens
  CDR3 for alpha chain variable domain of TCR clone 271989 (TRAV20, TRAJ45)
CTVKKRRCRRTHL

SEQ ID NO: 543978 - protein, 14 aa, Homo sapiens
  CDR3 for beta chain variable domain of TCR clone 271989 (TRBV15, TRBJ2-5)
CATSIGGLGETQYF

SEQ ID NO: 543979 - protein, 11 aa, Homo sapiens
  CDR3 for alpha chain variable domain of TCR clone 271990 (TRAV3, TRAJ21)
CAVGNFNKFYF

SEQ ID NO: 543980 - protein, 16 aa, Homo sapiens
  CDR3 for beta chain variable domain of TCR clone 271990 (TRBV9, TRBJ2-7)
CASSVGLGGGTYEQYF

SEQ ID NO: 543981 - protein, 14 aa, Homo sapiens
  CDR3 for alpha chain variable domain of TCR clone 271991 (TRAV13-1, TRAJ5)
CAASPGSRRRALTF

SEQ ID NO: 543982 - protein, 17 aa, Homo sapiens
  CDR3 for beta chain variable domain of TCR clone 271991 (TRBV20-1, TRBJ2-1)
CSASSSVLAGSYNEQFF

SEQ ID NO: 543983 - protein, 13 aa, Homo sapiens
  CDR3 for alpha chain variable domain of TCR clone 271992 (TRAV21, TRAJ20)
CAVGLRVDYKPSF

SEQ ID NO: 543984 - protein, 13 aa, Homo sapiens
  CDR3 for beta chain variable domain of TCR clone 271992 (TRBV6-1, TRBJ1-1)
CVSSRQGNTEAFF

SEQ ID NO: 543985 - protein, 15 aa, Homo sapiens
  CDR3 for alpha chain variable domain of TCR clone 271993 (TRAV12-2, TRAJ52)
CVGNAGGTSYGKLSF

SEQ ID NO: 543986 - protein, 14 aa, Homo sapiens
  CDR3 for beta chain variable domain of TCR clone 271993 (TRBV7-3, TRBJ2-2)
CASSPDPSGRELFF

SEQ ID NO: 543987 - protein, 13 aa, Homo sapiens
  CDR3 for alpha chain variable domain of TCR clone 271994 (TRAV20, TRAJ37)
CAGCSSNTGKLIF

SEQ ID NO: 543988 - protein, 11 aa, Homo sapiens
  CDR3 for beta chain variable domain of TCR clone 271994 (TRBV12-4, TRBJ2-3)
CASTATDTQYF

SEQ ID NO: 543989 - protein, 14 aa, Homo sapiens
  CDR3 for alpha chain variable domain of TCR clone 271995 (TRAV35, TRAJ22)
CAGLRPGSARQLTF

SEQ ID NO: 543990 - protein, 13 aa, Homo sapiens
  CDR3 for beta chain variable domain of TCR clone 271995 (TRBV7-8, TRBJ2-1)
CASTRDAVDEQFF

SEQ ID NO: 543991 - protein, 15 aa, Homo sapiens
  CDR3 for alpha chain variable domain of TCR clone 271996 (TRAV26-1, TRAJ22)
CIVRVSFWFCKATDL

SEQ ID NO: 543992 - protein, 15 aa, Homo sapiens
  CDR3 for beta chain variable domain of TCR clone 271996 (TRBV15, TRBJ2-7)
CHQQRPIQQAYEQYF

SEQ ID NO: 543993 - protein, 15 aa, Homo sapiens
  CDR3 for alpha chain variable domain of TCR clone 271997 (TRAV27, TRAJ38)
CAARRNAGNNRTLIW

SEQ ID NO: 543994 - protein, 13 aa, Homo sapiens
  CDR3 for beta chain variable domain of TCR clone 271997 (TRBV12-5, TRBJ2-3)
CASGDRQSDTQYL

SEQ ID NO: 543995 - protein, 17 aa, Homo sapiens
  CDR3 for alpha chain variable domain of TCR clone 271998 (TRAV8-4, TRAJ11)
CAVSDRGENSGYSTLTF

SEQ ID NO: 543996 - protein, 17 aa, Homo sapiens
  CDR3 for beta chain variable domain of TCR clone 271998 (TRBV4-3, TRBJ2-1)
CASSQELAIVSSNEQFF

SEQ ID NO: 543997 - protein, 13 aa, Homo sapiens
  CDR3 for alpha chain variable domain of TCR clone 271999 (TRAV8-1, TRAJ30)
SAVNGRRDDKIIF

SEQ ID NO: 543998 - protein, 15 aa, Homo sapiens
  CDR3 for beta chain variable domain of TCR clone 271999 (TRBV5-7, TRBJ1-5)
CASSYGKLWDQPQHF

SEQ ID NO: 543999 - protein, 14 aa, Homo sapiens
  CDR3 for alpha chain variable domain of TCR clone 272000 (TRAV9-2, TRAJ39)
CALYIYNAGNMLTF

SEQ ID NO: 544000 - protein, 13 aa, Homo sapiens
  CDR3 for beta chain variable domain of TCR clone 272000 (TRBV15, TRBJ2-1)
CTSGVEDYNEQFF

SEQ ID NO: 544001 - protein, 13 aa, Homo sapiens
  CDR3 for alpha chain variable domain of TCR clone 272001 (TRAV13-1, TRAJ39)
CSKHSNAGNMLTF

SEQ ID NO: 544002 - protein, 16 aa, Homo sapiens
  CDR3 for beta chain variable domain of TCR clone 272001 (TRBV7-2, TRBJ2-3)
CASSLVALYSTDTQYF

SEQ ID NO: 544003 - protein, 12 aa, Homo sapiens
  CDR3 for alpha chain variable domain of TCR clone 272002 (TRAV12-3, TRAJ17)
CAMTLTGNKLTF

SEQ ID NO: 544004 - protein, 15 aa, Homo sapiens
  CDR3 for beta chain variable domain of TCR clone 272002 (TRBV12-4, TRBJ2-5)
CARSPPTGLQETQYF

SEQ ID NO: 544005 - protein, 14 aa, Homo sapiens
  CDR3 for alpha chain variable domain of TCR clone 272003 (TRAV12-3, TRAJ12)
CAMSEVDSSYKLIF

SEQ ID NO: 544006 - protein, 12 aa, Homo sapiens
  CDR3 for beta chain variable domain of TCR clone 272003 (TRBV18, TRBJ1-4)
CGSSPSREKLFF

SEQ ID NO: 544007 - protein, 13 aa, Homo sapiens
  CDR3 for alpha chain variable domain of TCR clone 272004 (TRAV21, TRAJ27)
CAARPGNAGKSTF

SEQ ID NO: 544008 - protein, 15 aa, Homo sapiens
  CDR3 for beta chain variable domain of TCR clone 272004 (TRBV6-1, TRBJ2-5)
CASSEGWGIQETQYF

SEQ ID NO: 544009 - protein, 14 aa, Homo sapiens
  CDR3 for alpha chain variable domain of TCR clone 272005 (TRAV8-2, TRAJ11)
CVVSENSGYSTLTV

SEQ ID NO: 544010 - protein, 16 aa, Homo sapiens
  CDR3 for beta chain variable domain of TCR clone 272005 (TRBV28, TRBJ2-1)
CASSSPEYPRDNEQFF

SEQ ID NO: 544011 - protein, 14 aa, Homo sapiens
  CDR3 for alpha chain variable domain of TCR clone 272006 (TRAV13-1, TRAJ10)
CAALFTGGGNKLTF

SEQ ID NO: 544012 - protein, 15 aa, Homo sapiens
  CDR3 for beta chain variable domain of TCR clone 272006 (TRBV13, TRBJ1-2)
CASSLGRQPGYGYTF

SEQ ID NO: 544013 - protein, 14 aa, Homo sapiens
  CDR3 for alpha chain variable domain of TCR clone 272007 (TRAV1-1, TRAJ27)
CAVIYNTNTGKSTF

SEQ ID NO: 544014 - protein, 14 aa, Homo sapiens
  CDR3 for beta chain variable domain of TCR clone 272007 (TRBV5-1, TRBJ2-3)
CASSLFGPTDTQYF

SEQ ID NO: 544015 - protein, 14 aa, Homo sapiens
  CDR3 for alpha chain variable domain of TCR clone 272008 (TRAV12-2, TRAJ13)
CAVKKTGGYQKVTF

SEQ ID NO: 544016 - protein, 14 aa, Homo sapiens
  CDR3 for beta chain variable domain of TCR clone 272008 (TRBV5-1, TRBJ1-2)
CASSLAADSNGYTF

SEQ ID NO: 544017 - protein, 16 aa, Homo sapiens
  CDR3 for alpha chain variable domain of TCR clone 272009 (TRAV12-3, TRAJ53)
CAMSPGSGGSNYKLTF

SEQ ID NO: 544018 - protein, 16 aa, Homo sapiens
  CDR3 for beta chain variable domain of TCR clone 272009 (TRBV7-2, TRBJ2-6)
CASSLAGRSGANVLTF

SEQ ID NO: 544019 - protein, 15 aa, Homo sapiens
  CDR3 for alpha chain variable domain of TCR clone 272010 (TRAV27, TRAJ38)
CAGRFNAGNNRKLIW

SEQ ID NO: 544020 - protein, 15 aa, Homo sapiens
  CDR3 for beta chain variable domain of TCR clone 272010 (TRBV4-1, TRBJ2-3)
CASRSTRAGTDTQYF

SEQ ID NO: 544021 - protein, 17 aa, Homo sapiens
  CDR3 for alpha chain variable domain of TCR clone 272011 (TRAV14/DV4, TRAJ28)
CAMREVSSGAGSYQLTF

SEQ ID NO: 544022 - protein, 15 aa, Homo sapiens
  CDR3 for beta chain variable domain of TCR clone 272011 (TRBV11-2, TRBJ1-6)
CASTLRETGNSPLLF

SEQ ID NO: 544023 - protein, 13 aa, Homo sapiens
  CDR3 for alpha chain variable domain of TCR clone 272012 (TRAV2, TRAJ40)
CAVVTSGTYKYIF

SEQ ID NO: 544024 - protein, 16 aa, Homo sapiens
  CDR3 for beta chain variable domain of TCR clone 272012 (TRBV7-6, TRBJ2-1)
CASSAPGPSSYNEQFF

SEQ ID NO: 544025 - protein, 20 aa, Homo sapiens
  CDR3 for alpha chain variable domain of TCR clone 272013 (TRAV12-3, TRAJ41)
SLFIRDSQPSDSATPEALNF

SEQ ID NO: 544026 - protein, 12 aa, Homo sapiens
  CDR3 for beta chain variable domain of TCR clone 272013 (TRBV6-1, TRBJ2-7)
CASSEPLYEQYF

SEQ ID NO: 544027 - protein, 15 aa, Homo sapiens
  CDR3 for alpha chain variable domain of TCR clone 272014 (TRAV36/DV7, TRAJ53)
CAVEGSGGSNYKLTF

SEQ ID NO: 544028 - protein, 14 aa, Homo sapiens
  CDR3 for beta chain variable domain of TCR clone 272014 (TRBV7-6, TRBJ2-3)
CASSLGTVTDTQYF

SEQ ID NO: 544029 - protein, 11 aa, Homo sapiens
  CDR3 for alpha chain variable domain of TCR clone 272015 (TRAV1-2, TRAJ31)
CAVNNNARLMF

SEQ ID NO: 544030 - protein, 17 aa, Homo sapiens
  CDR3 for beta chain variable domain of TCR clone 272015 (TRBV28, TRBJ2-1)
CTSVPSIIAGGRSEQFF

SEQ ID NO: 544031 - protein, 13 aa, Homo sapiens
  CDR3 for alpha chain variable domain of TCR clone 272016 (TRAV21, TRAJ27)
CAARPGNAGKSTF

SEQ ID NO: 544032 - protein, 14 aa, Homo sapiens
  CDR3 for beta chain variable domain of TCR clone 272016 (TRBV7-2, TRBJ1-2)
CASSQTGSTYGYNF

SEQ ID NO: 544033 - protein, 14 aa, Homo sapiens
  CDR3 for alpha chain variable domain of TCR clone 272017 (TRAV12-2, TRAJ13)
CAVKKTGGYPKVTF

SEQ ID NO: 544034 - protein, 16 aa, Homo sapiens
  CDR3 for beta chain variable domain of TCR clone 272017 (TRBV2, TRBJ2-1)
CASRSPAGGKYNEQFF

SEQ ID NO: 544035 - protein, 13 aa, Homo sapiens
  CDR3 for alpha chain variable domain of TCR clone 272018 (TRAV3, TRAJ20)
CCEAFCNDYKLSF

SEQ ID NO: 544036 - protein, 11 aa, Homo sapiens
  CDR3 for beta chain variable domain of TCR clone 272018 (TRBV11-2, TRBJ1-1)
CASSINTEAFF

SEQ ID NO: 544037 - protein, 15 aa, Homo sapiens
  CDR3 for alpha chain variable domain of TCR clone 272019 (TRAV23/DV6, TRAJ12)
CAALDLGAMDSSYNL

SEQ ID NO: 544038 - protein, 12 aa, Homo sapiens
  CDR3 for beta chain variable domain of TCR clone 272019 (TRBV10-3, TRBJ2-2)
CAIRENTGELFF

SEQ ID NO: 544039 - protein, 14 aa, Homo sapiens
  CDR3 for alpha chain variable domain of TCR clone 272020 (TRAV12-1, TRAJ17)
CVVNPKAAGNKLTF

SEQ ID NO: 544040 - protein, 16 aa, Homo sapiens
  CDR3 for beta chain variable domain of TCR clone 272020 (TRBV20-1, TRBJ2-1)
CSASASGYRSYNEQFF

SEQ ID NO: 544041 - protein, 15 aa, Homo sapiens
  CDR3 for alpha chain variable domain of TCR clone 272021 (TRAV13-1, TRAJ44)
CAASRGGGTASKLTF

SEQ ID NO: 544042 - protein, 12 aa, Homo sapiens
  CDR3 for beta chain variable domain of TCR clone 272021 (TRBV11-2, TRBJ2-4)
CASSSASGSEYF

SEQ ID NO: 544043 - protein, 14 aa, Homo sapiens
  CDR3 for alpha chain variable domain of TCR clone 272022 (TRAV29/DV5, TRAJ36)
CAARRKTGANDLFF

SEQ ID NO: 544044 - protein, 17 aa, Homo sapiens
  CDR3 for beta chain variable domain of TCR clone 272022 (TRBV13, TRBJ2-3)
CASSLSRVAGGRNTQYF

SEQ ID NO: 544045 - protein, 15 aa, Homo sapiens
  CDR3 for alpha chain variable domain of TCR clone 272023 (TRAV3, TRAJ32)
CAVSSYGGATNKLIF

SEQ ID NO: 544046 - protein, 13 aa, Homo sapiens
  CDR3 for beta chain variable domain of TCR clone 272023 (TRBV20-1, TRBJ2-7)
CSASPSTNYEQYF

SEQ ID NO: 544047 - protein, 17 aa, Homo sapiens
  CDR3 for alpha chain variable domain of TCR clone 272024 (TRAV13-1, TRAJ52)
CAASSGAGGTSYGNLTF

SEQ ID NO: 544048 - protein, 12 aa, Homo sapiens
  CDR3 for beta chain variable domain of TCR clone 272024 (TRBV7-8, TRBJ2-7)
CASSLGDREQYF

SEQ ID NO: 544049 - protein, 14 aa, Homo sapiens
  CDR3 for alpha chain variable domain of TCR clone 272025 (TRAV13-1, TRAJ44)
CPAKATGTASKLTF

SEQ ID NO: 544050 - protein, 17 aa, Homo sapiens
  CDR3 for beta chain variable domain of TCR clone 272025 (TRBV7-3, TRBJ2-3)
CASSLMKRMRGADTQYF

SEQ ID NO: 544051 - protein, 14 aa, Homo sapiens
  CDR3 for alpha chain variable domain of TCR clone 272026 (TRAV13-1, TRAJ44)
CAAKATGTASKLTF

SEQ ID NO: 544052 - protein, 16 aa, Homo sapiens
  CDR3 for beta chain variable domain of TCR clone 272026 (TRBV29-1, TRBJ2-7)
CSVEVVGTSGSYEQYF

SEQ ID NO: 544053 - protein, 16 aa, Homo sapiens
  CDR3 for alpha chain variable domain of TCR clone 272027 (TRAV14/DV4, TRAJ53)
CAMREVGGGSNYKLTF

SEQ ID NO: 544054 - protein, 15 aa, Homo sapiens
  CDR3 for beta chain variable domain of TCR clone 272027 (TRBV20-1, TRBJ2-7)
CSARDRVSGMDEQYF

SEQ ID NO: 544055 - protein, 11 aa, Homo sapiens
  CDR3 for alpha chain variable domain of TCR clone 272028 (TRAV1-1, TRAJ5)
CAVRVRRALTF

SEQ ID NO: 544056 - protein, 14 aa, Homo sapiens
  CDR3 for beta chain variable domain of TCR clone 272028 (TRBV12-4, TRBJ1-1)
CASSLGTGGTEAFF

SEQ ID NO: 544057 - protein, 17 aa, Homo sapiens
  CDR3 for alpha chain variable domain of TCR clone 272029 (TRAV3, TRAJ28)
CAVREAYSGAGSYQITF

SEQ ID NO: 544058 - protein, 17 aa, Homo sapiens
  CDR3 for beta chain variable domain of TCR clone 272029 (TRBV20-1, TRBJ2-1)
CSASSSGLAGSYNEQFF

SEQ ID NO: 544059 - protein, 17 aa, Homo sapiens
  CDR3 for alpha chain variable domain of TCR clone 272030 (TRAV13-2, TRAJ42)
CAEKGKNYGGSHGNLIF

SEQ ID NO: 544060 - protein, 16 aa, Homo sapiens
  CDR3 for beta chain variable domain of TCR clone 272030 (TRBV7-9, TRBJ2-1)
CASSLGTGWDYNEQFF

SEQ ID NO: 544061 - protein, 15 aa, Homo sapiens
  CDR3 for alpha chain variable domain of TCR clone 272031 (TRAV12-2, TRAJ8)
CAVREGNTGFQKLVF

SEQ ID NO: 544062 - protein, 16 aa, Homo sapiens
  CDR3 for beta chain variable domain of TCR clone 272031 (TRBV28, TRBJ2-3)
CASSLFTGVSTDTQYF

SEQ ID NO: 544063 - protein, 14 aa, Homo sapiens
  CDR3 for alpha chain variable domain of TCR clone 272032 (TRAV26-1, TRAJ45)
CIEVTGGGADGLTF

SEQ ID NO: 544064 - protein, 14 aa, Homo sapiens
  CDR3 for beta chain variable domain of TCR clone 272032 (TRBV6-6, TRBJ2-3)
CASRLQREADTQYF

SEQ ID NO: 544065 - protein, 20 aa, Homo sapiens
  CDR3 for alpha chain variable domain of TCR clone 272033 (TRAV25, TRAJ21)
TATQTTDVGTYPLSFNKFYF

SEQ ID NO: 544066 - protein, 13 aa, Homo sapiens
  CDR3 for beta chain variable domain of TCR clone 272033 (TRBV4-2, TRBJ1-1)
CASSQAGNTEAFF

SEQ ID NO: 544067 - protein, 15 aa, Homo sapiens
  CDR3 for alpha chain variable domain of TCR clone 272034 (TRAV12-1, TRAJ10)
CVVNKLTGGGNKLNF

SEQ ID NO: 544068 - protein, 17 aa, Homo sapiens
  CDR3 for beta chain variable domain of TCR clone 272034 (TRBV5-1, TRBJ1-6)
CASSPSLQGSDNSPLHF

SEQ ID NO: 544069 - protein, 14 aa, Homo sapiens
  CDR3 for alpha chain variable domain of TCR clone 272035 (TRAV17, TRAJ57)
CATDPQGGSEKLVF

SEQ ID NO: 544070 - protein, 12 aa, Homo sapiens
  CDR3 for beta chain variable domain of TCR clone 272035 (TRBV6-3, TRBJ2-7)
CASSLTPYEQYF

SEQ ID NO: 544071 - protein, 14 aa, Homo sapiens
  CDR3 for alpha chain variable domain of TCR clone 272036 (TRAV2, TRAJ3)
CAVRPYSSASKIIF

SEQ ID NO: 544072 - protein, 13 aa, Homo sapiens
  CDR3 for beta chain variable domain of TCR clone 272036 (TRBV7-9, TRBJ1-2)
CASSLKQNYGYTF

SEQ ID NO: 544073 - protein, 18 aa, Homo sapiens
  CDR3 for alpha chain variable domain of TCR clone 272037 (TRAV3, TRAJ17)
CAVRARRGGRSCRQQANF

SEQ ID NO: 544074 - protein, 14 aa, Homo sapiens
  CDR3 for beta chain variable domain of TCR clone 272037 (TRBV5-8, TRBJ2-3)
CASSLGQGTDTQYF

SEQ ID NO: 544075 - protein, 12 aa, Homo sapiens
  CDR3 for alpha chain variable domain of TCR clone 272038 (TRAV36/DV7, TRAJ40)
CAVGTGTYKYIF

SEQ ID NO: 544076 - protein, 14 aa, Homo sapiens
  CDR3 for beta chain variable domain of TCR clone 272038 (TRBV2, TRBJ2-1)
CASRAYGIYNEQFF

SEQ ID NO: 544077 - protein, 12 aa, Homo sapiens
  CDR3 for alpha chain variable domain of TCR clone 272039 (TRAV13-1, TRAJ21)
CAAKEGFNKFYF

SEQ ID NO: 544078 - protein, 15 aa, Homo sapiens
  CDR3 for beta chain variable domain of TCR clone 272039 (TRBV15, TRBJ1-5)
CAASRDPVSNQPQHF

SEQ ID NO: 544079 - protein, 15 aa, Homo sapiens
  CDR3 for alpha chain variable domain of TCR clone 272040 (TRAV21, TRAJ53)
CATLNSGGSNYKLTS

SEQ ID NO: 544080 - protein, 13 aa, Homo sapiens
  CDR3 for beta chain variable domain of TCR clone 272040 (TRBV7-9, TRBJ2-3)
CASRPGSTDTQYF

SEQ ID NO: 544081 - protein, 14 aa, Homo sapiens
  CDR3 for alpha chain variable domain of TCR clone 272041 (TRAV1-2, TRAJ16)
CAVNRFSEGQKLLF

SEQ ID NO: 544082 - protein, 12 aa, Homo sapiens
  CDR3 for beta chain variable domain of TCR clone 272041 (TRBV20-1, TRBJ2-5)
CSAPRSQETQYF

SEQ ID NO: 544083 - protein, 10 aa, Homo sapiens
  CDR3 for alpha chain variable domain of TCR clone 272042 (TRAV19, TRAJ54)
CALIDGEPRS

SEQ ID NO: 544084 - protein, 13 aa, Homo sapiens
  CDR3 for beta chain variable domain of TCR clone 272042 (TRBV10-3, TRBJ2-5)
CAMTSGAGETQYF

SEQ ID NO: 544085 - protein, 18 aa, Homo sapiens
  CDR3 for alpha chain variable domain of TCR clone 272043 (TRAV26-1, TRAJ42)
CIVRPIMEEAKEIPSLEN

SEQ ID NO: 544086 - protein, 16 aa, Homo sapiens
  CDR3 for beta chain variable domain of TCR clone 272043 (TRBV7-3, TRBJ2-2)
CASSLKRGTLSGELFF

SEQ ID NO: 544087 - protein, 14 aa, Homo sapiens
  CDR3 for alpha chain variable domain of TCR clone 272044 (TRAV3, TRAJ9)
CAVRLNTGGFKTII

SEQ ID NO: 544088 - protein, 15 aa, Homo sapiens
  CDR3 for beta chain variable domain of TCR clone 272044 (TRBV7-2, TRBJ2-1)
CASSLASGRVNEQFF

SEQ ID NO: 544089 - protein, 19 aa, Homo sapiens
  CDR3 for alpha chain variable domain of TCR clone 272045 (TRAV26-1, TRAJ42)
CALLRRQTYYGGSQGNLIF

SEQ ID NO: 544090 - protein, 16 aa, Homo sapiens
  CDR3 for beta chain variable domain of TCR clone 272045 (TRBV7-3, TRBJ2-2)
CASSLKRGTLSGELFF

SEQ ID NO: 544091 - protein, 14 aa, Homo sapiens
  CDR3 for alpha chain variable domain of TCR clone 272046 (TRAV4, TRAJ26)
CLVGPHNYVQNFVF

SEQ ID NO: 544092 - protein, 17 aa, Homo sapiens
  CDR3 for beta chain variable domain of TCR clone 272046 (TRBV20-1, TRBJ2-1)
CSASSSGLAGSYNEQFF

SEQ ID NO: 544093 - protein, 11 aa, Homo sapiens
  CDR3 for alpha chain variable domain of TCR clone 272047 (TRAV1-1, TRAJ23)
CAVRQGGKLIF

SEQ ID NO: 544094 - protein, 17 aa, Homo sapiens
  CDR3 for beta chain variable domain of TCR clone 272047 (TRBV27, TRBJ2-6)
CASSLTGFASGANVLTF

SEQ ID NO: 544095 - protein, 14 aa, Homo sapiens
  CDR3 for alpha chain variable domain of TCR clone 272048 (TRAV12-2, TRAJ13)
CAVKKTGGYQKVTL

SEQ ID NO: 544096 - protein, 12 aa, Homo sapiens
  CDR3 for beta chain variable domain of TCR clone 272048 (TRBV11-2, TRBJ2-1)
CASSPGNNEQFF

SEQ ID NO: 544097 - protein, 14 aa, Homo sapiens
  CDR3 for alpha chain variable domain of TCR clone 272049 (TRAV30, TRAJ50)
CGTALKTSYDKVIF

SEQ ID NO: 544098 - protein, 16 aa, Homo sapiens
  CDR3 for beta chain variable domain of TCR clone 272049 (TRBV7-9, TRBJ2-1)
CTSSDVAGGSYNEQFF

SEQ ID NO: 544099 - protein, 16 aa, Homo sapiens
  CDR3 for alpha chain variable domain of TCR clone 272050 (TRAV26-1, TRAJ45)
CIVEKYSGGGADGLTF

SEQ ID NO: 544100 - protein, 13 aa, Homo sapiens
  CDR3 for beta chain variable domain of TCR clone 272050 (TRBV7-9, TRBJ1-2)
CASSLKQNYGYTF

SEQ ID NO: 544101 - protein, 14 aa, Homo sapiens
  CDR3 for alpha chain variable domain of TCR clone 272051 (TRAV16, TRAJ8)
CALLLNTGFQKLVF

SEQ ID NO: 544102 - protein, 15 aa, Homo sapiens
  CDR3 for beta chain variable domain of TCR clone 272051 (TRBV19, TRBJ2-1)
CASIKGRGPYNEQFF

SEQ ID NO: 544103 - protein, 16 aa, Homo sapiens
  CDR3 for alpha chain variable domain of TCR clone 272052 (TRAV30, TRAJ24)
CGTEIVDADSWGKFQC

SEQ ID NO: 544104 - protein, 16 aa, Homo sapiens
  CDR3 for beta chain variable domain of TCR clone 272052 (TRBV2, TRBJ1-3)
CASSGGAGRSGNTIYF

SEQ ID NO: 544105 - protein, 13 aa, Homo sapiens
  CDR3 for alpha chain variable domain of TCR clone 272053 (TRAV29/DV5, TRAJ31)
CAASRNNNARLRF

SEQ ID NO: 544106 - protein, 20 aa, Homo sapiens
  CDR3 for beta chain variable domain of TCR clone 272053 (TRBV19, TRBJ2-1)
CASSISRTVTSTRLNNEQFF

SEQ ID NO: 544107 - protein, 12 aa, Homo sapiens
  CDR3 for alpha chain variable domain of TCR clone 272054 (TRAV12-1, TRAJ23)
CVVNIPAGKLIF

SEQ ID NO: 544108 - protein, 15 aa, Homo sapiens
  CDR3 for beta chain variable domain of TCR clone 272054 (TRBV7-2, TRBJ2-7)
CASSLVSSGSYEQYF

SEQ ID NO: 544109 - protein, 15 aa, Homo sapiens
  CDR3 for alpha chain variable domain of TCR clone 272055 (TRAV12-3, TRAJ27)
CAMRAYNTNAGKSTF

SEQ ID NO: 544110 - protein, 19 aa, Homo sapiens
  CDR3 for beta chain variable domain of TCR clone 272055 (TRBV7-2, TRBJ2-3)
CASSFLSRNWGGGTDTQYF

SEQ ID NO: 544111 - protein, 12 aa, Homo sapiens
  CDR3 for alpha chain variable domain of TCR clone 272056 (TRAV3, TRAJ20)
CAVRDGDYKLSF

SEQ ID NO: 544112 - protein, 15 aa, Homo sapiens
  CDR3 for beta chain variable domain of TCR clone 272056 (TRBV28, TRBJ2-3)
CASSPDRQGANTQYF

SEQ ID NO: 544113 - protein, 13 aa, Homo sapiens
  CDR3 for alpha chain variable domain of TCR clone 272057 (TRAV2, TRAJ40)
CAVVTSGTYKYIF

SEQ ID NO: 544114 - protein, 14 aa, Homo sapiens
  CDR3 for beta chain variable domain of TCR clone 272057 (TRBV7-2, TRBJ1-1)
CASRDWTRGTEAFF

SEQ ID NO: 544115 - protein, 15 aa, Homo sapiens
  CDR3 for alpha chain variable domain of TCR clone 272058 (TRAV39, TRAJ32)
CDVDMEGGATNKLIF

SEQ ID NO: 544116 - protein, 17 aa, Homo sapiens
  CDR3 for beta chain variable domain of TCR clone 272058 (TRBV7-2, TRBJ1-4)
CASSFKAGPTTNEKLFF

SEQ ID NO: 544117 - protein, 14 aa, Homo sapiens
  CDR3 for alpha chain variable domain of TCR clone 272059 (TRAV12-2, TRAJ13)
CAVKKTGGYQKVTF

SEQ ID NO: 544118 - protein, 12 aa, Homo sapiens
  CDR3 for beta chain variable domain of TCR clone 272059 (TRBV19, TRBJ1-1)
CASSIGTEEAFF

SEQ ID NO: 544119 - protein, 16 aa, Homo sapiens
  CDR3 for alpha chain variable domain of TCR clone 272060 (TRAV3, TRAJ37)
CAVRPHGSGNPGKPIF

SEQ ID NO: 544120 - protein, 15 aa, Homo sapiens
  CDR3 for beta chain variable domain of TCR clone 272060 (TRBV20-1, TRBJ2-7)
CSARDRVSGMDEQYF

SEQ ID NO: 544121 - protein, 17 aa, Homo sapiens
  CDR3 for alpha chain variable domain of TCR clone 272061 (TRAV4, TRAJ42)
CLVGVLNYGGSQGNLIV

SEQ ID NO: 544122 - protein, 12 aa, Homo sapiens
  CDR3 for beta chain variable domain of TCR clone 272061 (TRBV20-1, TRBJ2-1)
CSAQYTYNEQFF

SEQ ID NO: 544123 - protein, 11 aa, Homo sapiens
  CDR3 for alpha chain variable domain of TCR clone 272062 (TRAV3, TRAJ21)
CAVGNFNKFYF

SEQ ID NO: 544124 - protein, 13 aa, Homo sapiens
  CDR3 for beta chain variable domain of TCR clone 272062 (TRBV27, TRBJ2-1)
CASSSGSYNEQFF

SEQ ID NO: 544125 - protein, 11 aa, Homo sapiens
  CDR3 for alpha chain variable domain of TCR clone 272063 (TRAV13-1, TRAJ20)
CAASNYYKLSF

SEQ ID NO: 544126 - protein, 15 aa, Homo sapiens
  CDR3 for beta chain variable domain of TCR clone 272063 (TRBV27, TRBJ2-1)
CASSNGGGSSNEQFF

SEQ ID NO: 544127 - protein, 15 aa, Homo sapiens
  CDR3 for alpha chain variable domain of TCR clone 272064 (TRAV12-3, TRAJ27)
CAMRAYNTNAGKSTF

SEQ ID NO: 544128 - protein, 14 aa, Homo sapiens
  CDR3 for beta chain variable domain of TCR clone 272064 (TRBV7-2, TRBJ2-7)
CASSPKTSFYEQYF

SEQ ID NO: 544129 - protein, 16 aa, Homo sapiens
  CDR3 for alpha chain variable domain of TCR clone 272065 (TRAV30, TRAJ24)
CGTEIVDADSWGKFQF

SEQ ID NO: 544130 - protein, 15 aa, Homo sapiens
  CDR3 for beta chain variable domain of TCR clone 272065 (TRBV28, TRBJ1-1)
CASRIKGGLNTEAFF

SEQ ID NO: 544131 - protein, 16 aa, Homo sapiens
  CDR3 for alpha chain variable domain of TCR clone 272066 (TRAV1-1, TRAJ29)
CAVRSTRNLGNTPLVF

SEQ ID NO: 544132 - protein, 15 aa, Homo sapiens
  CDR3 for beta chain variable domain of TCR clone 272066 (TRBV29-1, TRBJ2-1)
CSVGRHALFYNEQFF

SEQ ID NO: 544133 - protein, 12 aa, Homo sapiens
  CDR3 for alpha chain variable domain of TCR clone 272067 (TRAV12-3, TRAJ34)
CAMCYNTDKLIF

SEQ ID NO: 544134 - protein, 14 aa, Homo sapiens
  CDR3 for beta chain variable domain of TCR clone 272067 (TRBV4-1, TRBJ2-2)
CASSQAVNTGELVF

SEQ ID NO: 544135 - protein, 13 aa, Homo sapiens
  CDR3 for alpha chain variable domain of TCR clone 272068 (TRAV2, TRAJ5)
CAVPDTGRRALTF

SEQ ID NO: 544136 - protein, 15 aa, Homo sapiens
  CDR3 for beta chain variable domain of TCR clone 272068 (TRBV7-2, TRBJ2-2)
CASSTRTVYTGELFF

SEQ ID NO: 544137 - protein, 18 aa, Homo sapiens
  CDR3 for alpha chain variable domain of TCR clone 272069 (TRAV21, TRAJ52)
CAVRPSPAGGTSYGKLIF

SEQ ID NO: 544138 - protein, 17 aa, Homo sapiens
  CDR3 for beta chain variable domain of TCR clone 272069 (TRBV13, TRBJ2-3)
CASGLSRVAGGRNTQYF

SEQ ID NO: 544139 - protein, 13 aa, Homo sapiens
  CDR3 for alpha chain variable domain of TCR clone 272070 (TRAV2, TRAJ15)
CAVASQAGTALIF

SEQ ID NO: 544140 - protein, 16 aa, Homo sapiens
  CDR3 for beta chain variable domain of TCR clone 272070 (TRBV18, TRBJ1-5)
CASSPRTGGGNQPQHF

SEQ ID NO: 544141 - protein, 13 aa, Homo sapiens
  CDR3 for alpha chain variable domain of TCR clone 272071 (TRAV21, TRAJ27)
CAALTPMQANHPL

SEQ ID NO: 544142 - protein, 14 aa, Homo sapiens
  CDR3 for beta chain variable domain of TCR clone 272071 (TRBV27, TRBJ1-1)
CASSLLSGLSEAFF

SEQ ID NO: 544143 - protein, 11 aa, Homo sapiens
  CDR3 for alpha chain variable domain of TCR clone 272072 (TRAV1-2, TRAJ20)
CAVSNDYKLSF

SEQ ID NO: 544144 - protein, 16 aa, Homo sapiens
  CDR3 for beta chain variable domain of TCR clone 272072 (TRBV11-2, TRBJ2-7)
CASSPTTGGVSYEQYF

SEQ ID NO: 544145 - protein, 13 aa, Homo sapiens
  CDR3 for alpha chain variable domain of TCR clone 272073 (TRAV8-3, TRAJ48)
FAVVPFGNEKLTF

SEQ ID NO: 544146 - protein, 14 aa, Homo sapiens
  CDR3 for beta chain variable domain of TCR clone 272073 (TRBV18, TRBJ2-7)
CASSPRGGAYEQYF

SEQ ID NO: 544147 - protein, 16 aa, Homo sapiens
  CDR3 for alpha chain variable domain of TCR clone 272074 (TRAV3, TRAJ37)
CAVRPHASGNTGKLIF

SEQ ID NO: 544148 - protein, 13 aa, Homo sapiens
  CDR3 for beta chain variable domain of TCR clone 272074 (TRBV2, TRBJ1-5)
CASGTGGYQPQHF

SEQ ID NO: 544149 - protein, 13 aa, Homo sapiens
  CDR3 for alpha chain variable domain of TCR clone 272075 (TRAV21, TRAJ57)
CAVTQGGSEKVVF

SEQ ID NO: 544150 - protein, 16 aa, Homo sapiens
  CDR3 for beta chain variable domain of TCR clone 272075 (TRBV29-1, TRBJ2-7)
CSVEDAEDGTAYEQYF

SEQ ID NO: 544151 - protein, 15 aa, Homo sapiens
  CDR3 for alpha chain variable domain of TCR clone 272076 (TRAV35, TRAJ40)
CAGQLWDSGTYKYIF

SEQ ID NO: 544152 - protein, 15 aa, Homo sapiens
  CDR3 for beta chain variable domain of TCR clone 272076 (TRBV7-9, TRBJ2-2)
CASGPLDTFPGELFF

SEQ ID NO: 544153 - protein, 12 aa, Homo sapiens
  CDR3 for alpha chain variable domain of TCR clone 272077 (TRAV14/DV4, TRAJ9)
CAMNPGGFKTIF

SEQ ID NO: 544154 - protein, 15 aa, Homo sapiens
  CDR3 for beta chain variable domain of TCR clone 272077 (TRBV7-9, TRBJ1-4)
CASSARTGGNEKLFF

SEQ ID NO: 544155 - protein, 14 aa, Homo sapiens
  CDR3 for alpha chain variable domain of TCR clone 272078 (TRAV8-6, TRAJ13)
CAVIRSGGYQKVTF

SEQ ID NO: 544156 - protein, 13 aa, Homo sapiens
  CDR3 for beta chain variable domain of TCR clone 272078 (TRBV6-5, TRBJ2-5)
CASSPQGGETQYF

SEQ ID NO: 544157 - protein, 12 aa, Homo sapiens
  CDR3 for alpha chain variable domain of TCR clone 272079 (TRAV30, TRAJ43)
CGTEARGNDMRF

SEQ ID NO: 544158 - protein, 15 aa, Homo sapiens
  CDR3 for beta chain variable domain of TCR clone 272079 (TRBV20-1, TRBJ2-7)
CSAESGTSGAYEQYF

SEQ ID NO: 544159 - protein, 22 aa, Homo sapiens
  CDR3 for alpha chain variable domain of TCR clone 272080 (TRAV40, )
CLLGDGIPDIQNPDPAVYQLRD

SEQ ID NO: 544160 - protein, 16 aa, Homo sapiens
  CDR3 for beta chain variable domain of TCR clone 272080 (TRBV20-1, TRBJ1-5)
WSAELPGQQTNQPQHF

SEQ ID NO: 544161 - protein, 12 aa, Homo sapiens
  CDR3 for alpha chain variable domain of TCR clone 272081 (TRAV2, TRAJ43)
CAVEVDNNDMRF

SEQ ID NO: 544162 - protein, 13 aa, Homo sapiens
  CDR3 for beta chain variable domain of TCR clone 272081 (TRBV12-4, TRBJ2-1)
CASRRGATYGQVF

SEQ ID NO: 544163 - protein, 14 aa, Homo sapiens
  CDR3 for alpha chain variable domain of TCR clone 272082 (TRAV21, TRAJ35)
CAVMPIGFGNVLHC

SEQ ID NO: 544164 - protein, 19 aa, Homo sapiens
  CDR3 for beta chain variable domain of TCR clone 272082 (TRBV25-1, TRBJ2-2)
CAILVYRVDRGRKTGELFF

SEQ ID NO: 544165 - protein, 11 aa, Homo sapiens
  CDR3 for alpha chain variable domain of TCR clone 272083 (TRAV3, TRAJ21)
CAAGNFNKFYF

SEQ ID NO: 544166 - protein, 11 aa, Homo sapiens
  CDR3 for beta chain variable domain of TCR clone 272083 (TRBV6-5, TRBJ1-6)
CASSPRDPQFT

SEQ ID NO: 544167 - protein, 16 aa, Homo sapiens
  CDR3 for alpha chain variable domain of TCR clone 272084 (TRAV4, TRAJ18)
CCVLLIGGSTLGRLYF

SEQ ID NO: 544168 - protein, 16 aa, Homo sapiens
  CDR3 for beta chain variable domain of TCR clone 272084 (TRBV19, TRBJ2-3)
CASSPGAASRTDTQYF

SEQ ID NO: 544169 - protein, 15 aa, Homo sapiens
  CDR3 for alpha chain variable domain of TCR clone 272085 (TRAV38-1, TRAJ37)
CAFIHGSGNTGKLIF

SEQ ID NO: 544170 - protein, 12 aa, Homo sapiens
  CDR3 for beta chain variable domain of TCR clone 272085 (TRBV7-9, TRBJ2-7)
CGSSFGSYEQYF

SEQ ID NO: 544171 - protein, 23 aa, Homo sapiens
  CDR3 for alpha chain variable domain of TCR clone 272086 (TRAV26-1, )
CIADNDGNNHIQNPDPAVYQLRD

SEQ ID NO: 544172 - protein, 12 aa, Homo sapiens
  CDR3 for beta chain variable domain of TCR clone 272086 (TRBV11-2, TRBJ2-2)
CASSLGGGELFF

SEQ ID NO: 544173 - protein, 12 aa, Homo sapiens
  CDR3 for alpha chain variable domain of TCR clone 272087 (TRAV17, TRAJ4)
CATDGGYNKLIF

SEQ ID NO: 544174 - protein, 16 aa, Homo sapiens
  CDR3 for beta chain variable domain of TCR clone 272087 (TRBV4-1, TRBJ2-5)
CASSQAIAASSATQYF

SEQ ID NO: 544175 - protein, 12 aa, Homo sapiens
  CDR3 for alpha chain variable domain of TCR clone 272088 (TRAV2, TRAJ9)
FSFFAGGFKTIF

SEQ ID NO: 544176 - protein, 16 aa, Homo sapiens
  CDR3 for beta chain variable domain of TCR clone 272088 (TRBV13, TRBJ2-2)
CASSPRTGEHTGELFF

SEQ ID NO: 544177 - protein, 14 aa, Homo sapiens
  CDR3 for alpha chain variable domain of TCR clone 272089 (TRAV17, TRAJ16)
CATADFSYGPKLLF

SEQ ID NO: 544178 - protein, 15 aa, Homo sapiens
  CDR3 for beta chain variable domain of TCR clone 272089 (TRBV18, TRBJ2-1)
CASSPPSASYNEQFF

SEQ ID NO: 544179 - protein, 17 aa, Homo sapiens
  CDR3 for alpha chain variable domain of TCR clone 272090 (TRAV21, TRAJ24)
CAGIRLRSTDSWGKFQF

SEQ ID NO: 544180 - protein, 15 aa, Homo sapiens
  CDR3 for beta chain variable domain of TCR clone 272090 (TRBV7-2, TRBJ2-3)
CASSPRGLSTDTQYF

SEQ ID NO: 544181 - protein, 15 aa, Homo sapiens
  CDR3 for alpha chain variable domain of TCR clone 272091 (TRAV3, TRAJ17)
CAVRDTGAAGNKLTF

SEQ ID NO: 544182 - protein, 12 aa, Homo sapiens
  CDR3 for beta chain variable domain of TCR clone 272091 (TRBV5-1, TRBJ2-5)
CASSLGLETQYL

SEQ ID NO: 544183 - protein, 12 aa, Homo sapiens
  CDR3 for alpha chain variable domain of TCR clone 272092 (TRAV21, TRAJ33)
CAKMDSNYQLIG

SEQ ID NO: 544184 - protein, 14 aa, Homo sapiens
  CDR3 for beta chain variable domain of TCR clone 272092 (TRBV2, TRBJ2-7)
CASRLTSGGYEQYF

SEQ ID NO: 544185 - protein, 12 aa, Homo sapiens
  CDR3 for alpha chain variable domain of TCR clone 272093 (TRAV21, TRAJ49)
CAVNDGGNQFDF

SEQ ID NO: 544186 - protein, 14 aa, Homo sapiens
  CDR3 for beta chain variable domain of TCR clone 272093 (TRBV18, TRBJ2-7)
CASSPRGGSYEQYF

SEQ ID NO: 544187 - protein, 16 aa, Homo sapiens
  CDR3 for alpha chain variable domain of TCR clone 272094 (TRAV12-2, TRAJ32)
CAVNLGQGGATNKLIF

SEQ ID NO: 544188 - protein, 13 aa, Homo sapiens
  CDR3 for beta chain variable domain of TCR clone 272094 (TRBV9, TRBJ2-2)
CASSARPAGELFF

SEQ ID NO: 544189 - protein, 13 aa, Homo sapiens
  CDR3 for alpha chain variable domain of TCR clone 272095 (TRAV3, TRAJ21)
CAVREPDFNKFYF

SEQ ID NO: 544190 - protein, 15 aa, Homo sapiens
  CDR3 for beta chain variable domain of TCR clone 272095 (TRBV5-7, TRBJ1-2)
CASSLGVAANYGYTF

SEQ ID NO: 544191 - protein, 17 aa, Homo sapiens
  CDR3 for alpha chain variable domain of TCR clone 272096 (TRAV29/DV5, TRAJ52)
CEATSTADGTSYGKLTF

SEQ ID NO: 544192 - protein, 15 aa, Homo sapiens
  CDR3 for beta chain variable domain of TCR clone 272096 (TRBV3-1, TRBJ2-7)
CASSQEWTGSYEQYF

SEQ ID NO: 544193 - protein, 12 aa, Homo sapiens
  CDR3 for alpha chain variable domain of TCR clone 272097 (TRAV13-1, TRAJ21)
CAAKEGFNKFYF

SEQ ID NO: 544194 - protein, 14 aa, Homo sapiens
  CDR3 for beta chain variable domain of TCR clone 272097 (TRBV19, TRBJ2-7)
CASNFRDTFTGMYF

SEQ ID NO: 544195 - protein, 19 aa, Homo sapiens
  CDR3 for alpha chain variable domain of TCR clone 272098 (TRAV26-1, TRAJ28)
CTVRVAHAYSGAGSYQLTF

SEQ ID NO: 544196 - protein, 17 aa, Homo sapiens
  CDR3 for beta chain variable domain of TCR clone 272098 (TRBV9, TRBJ2-2)
CASSVGGQGTDTGELFF

SEQ ID NO: 544197 - protein, 14 aa, Homo sapiens
  CDR3 for alpha chain variable domain of TCR clone 272099 (TRAV12-2, TRAJ23)
CDVGGYNQGGKLIF

SEQ ID NO: 544198 - protein, 15 aa, Homo sapiens
  CDR3 for beta chain variable domain of TCR clone 272099 (TRBV20-1, TRBJ2-3)
CSASSGGPRTDTQYF

SEQ ID NO: 544199 - protein, 10 aa, Homo sapiens
  CDR3 for alpha chain variable domain of TCR clone 272100 (TRAV29/DV5, TRAJ54)
LIQGAQKLGF

SEQ ID NO: 544200 - protein, 18 aa, Homo sapiens
  CDR3 for beta chain variable domain of TCR clone 272100 (TRBV3-1, TRBJ1-2)
CASSQDVIGWNGDYGYTF

SEQ ID NO: 544201 - protein, 14 aa, Homo sapiens
  CDR3 for alpha chain variable domain of TCR clone 272101 (TRAV27, TRAJ39)
RAGRPTGAGNMLTF

SEQ ID NO: 544202 - protein, 15 aa, Homo sapiens
  CDR3 for beta chain variable domain of TCR clone 272101 (TRBV18, TRBJ2-5)
CASTDRGPRQETQYF

SEQ ID NO: 544203 - protein, 14 aa, Homo sapiens
  CDR3 for alpha chain variable domain of TCR clone 272102 (TRAV8-3, TRAJ23)
CAVIIYNQGGKLIF

SEQ ID NO: 544204 - protein, 15 aa, Homo sapiens
  CDR3 for beta chain variable domain of TCR clone 272102 (TRBV18, TRBJ2-1)
CASSPPSASYNERFF

SEQ ID NO: 544205 - protein, 12 aa, Homo sapiens
  CDR3 for alpha chain variable domain of TCR clone 272103 (TRAV2, TRAJ33)
CAVPDSNYQLIW

SEQ ID NO: 544206 - protein, 15 aa, Homo sapiens
  CDR3 for beta chain variable domain of TCR clone 272103 (TRBV15, TRBJ1-5)
CATSRGPVSNQPQHF

SEQ ID NO: 544207 - protein, 12 aa, Homo sapiens
  CDR3 for alpha chain variable domain of TCR clone 272104 (TRAV27, TRAJ35)
CEGADFGNVLHC

SEQ ID NO: 544208 - protein, 15 aa, Homo sapiens
  CDR3 for beta chain variable domain of TCR clone 272104 (TRBV4-1, TRBJ1-2)
CASSLNTGQGYGYTF

SEQ ID NO: 544209 - protein, 15 aa, Homo sapiens
  CDR3 for alpha chain variable domain of TCR clone 272105 (TRAV12-1, TRAJ9)
CVVSFGATGGFKTIF

SEQ ID NO: 544210 - protein, 12 aa, Homo sapiens
  CDR3 for beta chain variable domain of TCR clone 272105 (TRBV12-4, TRBJ2-7)
CASSLGGYEQYF

SEQ ID NO: 544211 - protein, 11 aa, Homo sapiens
  CDR3 for alpha chain variable domain of TCR clone 272106 (TRAV12-2, TRAJ33)
CAVTSNSQLIW

SEQ ID NO: 544212 - protein, 14 aa, Homo sapiens
  CDR3 for beta chain variable domain of TCR clone 272106 (TRBV28, TRBJ2-2)
CASRIRSGTGELSF

SEQ ID NO: 544213 - protein, 11 aa, Homo sapiens
  CDR3 for alpha chain variable domain of TCR clone 272107 (TRAV3, TRAJ21)
CAVGNFNKFYF

SEQ ID NO: 544214 - protein, 16 aa, Homo sapiens
  CDR3 for beta chain variable domain of TCR clone 272107 (TRBV28, TRBJ2-3)
CASSSFGTGGTDTQYF

SEQ ID NO: 544215 - protein, 14 aa, Homo sapiens
  CDR3 for alpha chain variable domain of TCR clone 272108 (TRAV3, TRAJ8)
CAVSLNTGFQKLVF

SEQ ID NO: 544216 - protein, 14 aa, Homo sapiens
  CDR3 for beta chain variable domain of TCR clone 272108 (TRBV12-4, TRBJ1-1)
CASSLGTGGTEAFF

SEQ ID NO: 544217 - protein, 14 aa, Homo sapiens
  CDR3 for alpha chain variable domain of TCR clone 272109 (TRAV8-4, TRAJ9)
CAVRLNTGGFKTIF

SEQ ID NO: 544218 - protein, 14 aa, Homo sapiens
  CDR3 for beta chain variable domain of TCR clone 272109 (TRBV11-2, TRBJ2-3)
CASSRLARTDTQYF

SEQ ID NO: 544219 - protein, 18 aa, Homo sapiens
  CDR3 for alpha chain variable domain of TCR clone 272110 (TRAV26-2, )
CILLDIQNPDPAVYQLRD

SEQ ID NO: 544220 - protein, 14 aa, Homo sapiens
  CDR3 for beta chain variable domain of TCR clone 272110 (TRBV19, TRBJ2-1)
CASPTFVLSGEQFF

SEQ ID NO: 544221 - protein, 12 aa, Homo sapiens
  CDR3 for alpha chain variable domain of TCR clone 272111 (TRAV12-1, TRAJ30)
CVVNPRDDKIIF

SEQ ID NO: 544222 - protein, 16 aa, Homo sapiens
  CDR3 for beta chain variable domain of TCR clone 272111 (TRBV12-5, TRBJ2-5)
CASGPRTSGNQETQYF

SEQ ID NO: 544223 - protein, 14 aa, Homo sapiens
  CDR3 for alpha chain variable domain of TCR clone 272112 (TRAV1-2, TRAJ16)
CAVNRFSDGQKLLF

SEQ ID NO: 544224 - protein, 14 aa, Homo sapiens
  CDR3 for beta chain variable domain of TCR clone 272112 (TRBV12-4, TRBJ1-4)
CASSLGTGGEKLFF

SEQ ID NO: 544225 - protein, 14 aa, Homo sapiens
  CDR3 for alpha chain variable domain of TCR clone 272113 (TRAV8-3, TRAJ39)
CAVGANNAGNMLTF

SEQ ID NO: 544226 - protein, 13 aa, Homo sapiens
  CDR3 for beta chain variable domain of TCR clone 272113 (TRBV13, TRBJ2-7)
CASSGSDVYEQYF

SEQ ID NO: 544227 - protein, 11 aa, Homo sapiens
  CDR3 for alpha chain variable domain of TCR clone 272114 (TRAV35, TRAJ34)
CWARNTDKLIF

SEQ ID NO: 544228 - protein, 17 aa, Homo sapiens
  CDR3 for beta chain variable domain of TCR clone 272114 (TRBV13, TRBJ2-3)
CASSLSRVAGGRNTQYF

SEQ ID NO: 544229 - protein, 16 aa, Homo sapiens
  CDR3 for alpha chain variable domain of TCR clone 272115 (TRAV4, TRAJ22)
CLVGDLYSGSARQLTF

SEQ ID NO: 544230 - protein, 14 aa, Homo sapiens
  CDR3 for beta chain variable domain of TCR clone 272115 (TRBV5-4, TRBJ1-1)
CASSLDSRRDEAFF

SEQ ID NO: 544231 - protein, 15 aa, Homo sapiens
  CDR3 for alpha chain variable domain of TCR clone 272116 (TRAV3, TRAJ37)
CYERKGSGNTGKLIF

SEQ ID NO: 544232 - protein, 13 aa, Homo sapiens
  CDR3 for beta chain variable domain of TCR clone 272116 (TRBV14, TRBJ2-7)
CASSQDRRYEQYF

SEQ ID NO: 544233 - protein, 11 aa, Homo sapiens
  CDR3 for alpha chain variable domain of TCR clone 272117 (TRAV12-1, TRAJ15)
CVVNAGTALIF

SEQ ID NO: 544234 - protein, 13 aa, Homo sapiens
  CDR3 for beta chain variable domain of TCR clone 272117 (TRBV28, TRBJ2-7)
CASSLPSRYEQYF

SEQ ID NO: 544235 - protein, 12 aa, Homo sapiens
  CDR3 for alpha chain variable domain of TCR clone 272118 (TRAV8-3, TRAJ26)
CAGDNYGQNFVF

SEQ ID NO: 544236 - protein, 15 aa, Homo sapiens
  CDR3 for beta chain variable domain of TCR clone 272118 (TRBV7-9, TRBJ2-2)
CASRPEGTSTGELFF

SEQ ID NO: 544237 - protein, 14 aa, Homo sapiens
  CDR3 for alpha chain variable domain of TCR clone 272119 (TRAV38-1, TRAJ40)
CALRPTSGTYKYIF

SEQ ID NO: 544238 - protein, 12 aa, Homo sapiens
  CDR3 for beta chain variable domain of TCR clone 272119 (TRBV20-1, TRBJ2-1)
CSARLGTDEQFF

SEQ ID NO: 544239 - protein, 13 aa, Homo sapiens
  CDR3 for alpha chain variable domain of TCR clone 272120 (TRAV29/DV5, TRAJ31)
CAASRNNNARLLF

SEQ ID NO: 544240 - protein, 13 aa, Homo sapiens
  CDR3 for beta chain variable domain of TCR clone 272120 (TRBV7-2, TRBJ2-4)
CASSREHANIQYF

SEQ ID NO: 544241 - protein, 13 aa, Homo sapiens
  CDR3 for alpha chain variable domain of TCR clone 272121 (TRAV6, TRAJ16)
RALDDSDGQKLLF

SEQ ID NO: 544242 - protein, 14 aa, Homo sapiens
  CDR3 for beta chain variable domain of TCR clone 272121 (TRBV12-4, TRBJ1-6)
CASNLQGKGSPLHF

SEQ ID NO: 544243 - protein, 12 aa, Homo sapiens
  CDR3 for alpha chain variable domain of TCR clone 272122 (TRAV13-1, TRAJ49)
CAASIRSNQIYF

SEQ ID NO: 544244 - protein, 14 aa, Homo sapiens
  CDR3 for beta chain variable domain of TCR clone 272122 (TRBV7-2, TRBJ2-1)
CASSPGLAGNEQFF

SEQ ID NO: 544245 - protein, 14 aa, Homo sapiens
  CDR3 for alpha chain variable domain of TCR clone 272123 (TRAV1-2, TRAJ8)
CAVREDTGFQKIVF

SEQ ID NO: 544246 - protein, 13 aa, Homo sapiens
  CDR3 for beta chain variable domain of TCR clone 272123 (TRBV7-3, TRBJ1-1)
CASSQDWGAEASF

SEQ ID NO: 544247 - protein, 16 aa, Homo sapiens
  CDR3 for alpha chain variable domain of TCR clone 272124 (TRAV30, TRAJ24)
CGPEIVDADSWGKFQF

SEQ ID NO: 544248 - protein, 14 aa, Homo sapiens
  CDR3 for beta chain variable domain of TCR clone 272124 (TRBV9, TRBJ2-4)
CASSPSGTSGLQYF

SEQ ID NO: 544249 - protein, 12 aa, Homo sapiens
  CDR3 for alpha chain variable domain of TCR clone 272125 (TRAV26-1, TRAJ36)
CIVRVRADNLFF

SEQ ID NO: 544250 - protein, 13 aa, Homo sapiens
  CDR3 for beta chain variable domain of TCR clone 272125 (TRBV11-2, TRBJ2-5)
CASSRGPSESQYF

SEQ ID NO: 544251 - protein, 14 aa, Homo sapiens
  CDR3 for alpha chain variable domain of TCR clone 272126 (TRAV1-1, TRAJ27)
CAVIYNTNAGKSTF

SEQ ID NO: 544252 - protein, 14 aa, Homo sapiens
  CDR3 for beta chain variable domain of TCR clone 272126 (TRBV11-1, TRBJ2-7)
CASSFRQGSYEQYF

SEQ ID NO: 544253 - protein, 15 aa, Homo sapiens
  CDR3 for alpha chain variable domain of TCR clone 272127 (TRAV23/DV6, TRAJ18)
CAARYRGSTLGRLYF

SEQ ID NO: 544254 - protein, 13 aa, Homo sapiens
  CDR3 for beta chain variable domain of TCR clone 272127 (TRBV11-2, TRBJ2-7)
CASSLGDSYEQYF

SEQ ID NO: 544255 - protein, 11 aa, Homo sapiens
  CDR3 for alpha chain variable domain of TCR clone 272128 (TRAV13-1, TRAJ39)
CASHAGNMLTF

SEQ ID NO: 544256 - protein, 14 aa, Homo sapiens
  CDR3 for beta chain variable domain of TCR clone 272128 (TRBV11-2, TRBJ1-5)
CASSLDRGRKPQHF

SEQ ID NO: 544257 - protein, 16 aa, Homo sapiens
  CDR3 for alpha chain variable domain of TCR clone 272129 (TRAV3, TRAJ37)
CAVRPHGSGNTGKLIF

SEQ ID NO: 544258 - protein, 16 aa, Homo sapiens
  CDR3 for beta chain variable domain of TCR clone 272129 (TRBV20-1, TRBJ1-4)
CSAPGQGLLTNENLFL

SEQ ID NO: 544259 - protein, 18 aa, Homo sapiens
  CDR3 for alpha chain variable domain of TCR clone 272130 (TRAV21, TRAJ45)
CCGGPQGGSGGRADGLTF

SEQ ID NO: 544260 - protein, 10 aa, Homo sapiens
  CDR3 for beta chain variable domain of TCR clone 272130 (TRBV4-1, TRBJ2-7)
SRGDRHEQYF

SEQ ID NO: 544261 - protein, 14 aa, Homo sapiens
  CDR3 for alpha chain variable domain of TCR clone 272131 (TRAV26-1, TRAJ34)
CIVRESYNTDKLIF

SEQ ID NO: 544262 - protein, 15 aa, Homo sapiens
  CDR3 for beta chain variable domain of TCR clone 272131 (TRBV12-4, TRBJ2-5)
CASSPPTGLQETQYF

SEQ ID NO: 544263 - protein, 13 aa, Homo sapiens
  CDR3 for alpha chain variable domain of TCR clone 272132 (TRAV27, TRAJ6)
CAGGTRGSYIPTF

SEQ ID NO: 544264 - protein, 14 aa, Homo sapiens
  CDR3 for beta chain variable domain of TCR clone 272132 (TRBV20-1, TRBJ2-4)
CSASGRVGVNIQYF

SEQ ID NO: 544265 - protein, 11 aa, Homo sapiens
  CDR3 for alpha chain variable domain of TCR clone 272133 (TRAV12-2, TRAJ39)
CAVNNMLTFGG

SEQ ID NO: 544266 - protein, 15 aa, Homo sapiens
  CDR3 for beta chain variable domain of TCR clone 272133 (TRBV18, TRBJ2-5)
CASSPQGHPQETQYF

SEQ ID NO: 544267 - protein, 14 aa, Homo sapiens
  CDR3 for alpha chain variable domain of TCR clone 272134 (TRAV17, TRAJ34)
CATDSLEGTDKLIF

SEQ ID NO: 544268 - protein, 14 aa, Homo sapiens
  CDR3 for beta chain variable domain of TCR clone 272134 (TRBV28, TRBJ1-5)
CASSLDRLNQPQHF

SEQ ID NO: 544269 - protein, 14 aa, Homo sapiens
  CDR3 for alpha chain variable domain of TCR clone 272135 (TRAV12-1, TRAJ12)
CVVTSGDSSYKLIF

SEQ ID NO: 544270 - protein, 13 aa, Homo sapiens
  CDR3 for beta chain variable domain of TCR clone 272135 (TRBV27, TRBJ2-3)
CASSWGRTDTQYF

SEQ ID NO: 544271 - protein, 15 aa, Homo sapiens
  CDR3 for alpha chain variable domain of TCR clone 272136 (TRAV21, TRAJ45)
CAVSYSEGGADGLTF

SEQ ID NO: 544272 - protein, 12 aa, Homo sapiens
  CDR3 for beta chain variable domain of TCR clone 272136 (TRBV11-2, TRBJ2-1)
CASSPGDNEQFF

SEQ ID NO: 544273 - protein, 13 aa, Homo sapiens
  CDR3 for alpha chain variable domain of TCR clone 272137 (TRAV2, TRAJ15)
CAVASQAGTALIF

SEQ ID NO: 544274 - protein, 14 aa, Homo sapiens
  CDR3 for beta chain variable domain of TCR clone 272137 (TRBV7-9, TRBJ2-7)
CASSSRLVLHEQYF

SEQ ID NO: 544275 - protein, 16 aa, Homo sapiens
  CDR3 for alpha chain variable domain of TCR clone 272138 (TRAV3, TRAJ37)
CAVRGRGSGNTGKLIF

SEQ ID NO: 544276 - protein, 13 aa, Homo sapiens
  CDR3 for beta chain variable domain of TCR clone 272138 (TRBV7-9, TRBJ1-2)
CASSLKQNYGYTF

SEQ ID NO: 544277 - protein, 18 aa, Homo sapiens
  CDR3 for alpha chain variable domain of TCR clone 272139 (TRAV26-2, TRAJ45)
CILRVDKYSGGGADDLTF

SEQ ID NO: 544278 - protein, 16 aa, Homo sapiens
  CDR3 for beta chain variable domain of TCR clone 272139 (TRBV2, TRBJ1-4)
CASNLLQGATNEKLFF

SEQ ID NO: 544279 - protein, 13 aa, Homo sapiens
  CDR3 for alpha chain variable domain of TCR clone 272140 (TRAV36/DV7, TRAJ49)
CAGDSNTGNQFYF

SEQ ID NO: 544280 - protein, 17 aa, Homo sapiens
  CDR3 for beta chain variable domain of TCR clone 272140 (TRBV7-3, TRBJ2-3)
CASSLMKRMRGADTQYF

SEQ ID NO: 544281 - protein, 14 aa, Homo sapiens
  CDR3 for alpha chain variable domain of TCR clone 272141 (TRAV23/DV6, TRAJ57)
CAALAQGGSEKLVF

SEQ ID NO: 544282 - protein, 15 aa, Homo sapiens
  CDR3 for beta chain variable domain of TCR clone 272141 (TRBV20-1, TRBJ2-7)
CSARDRVSGMDEQYF

SEQ ID NO: 544283 - protein, 18 aa, Homo sapiens
  CDR3 for alpha chain variable domain of TCR clone 272142 (TRAV8-4, TRAJ52)
CAVTRANAGGTSYGKLTF

SEQ ID NO: 544284 - protein, 14 aa, Homo sapiens
  CDR3 for beta chain variable domain of TCR clone 272142 (TRBV28, TRBJ1-1)
CASSSEQGYTEAFF

SEQ ID NO: 544285 - protein, 12 aa, Homo sapiens
  CDR3 for alpha chain variable domain of TCR clone 272143 (TRAV12-1, TRAJ34)
CVVAGATDKLIF

SEQ ID NO: 544286 - protein, 12 aa, Homo sapiens
  CDR3 for beta chain variable domain of TCR clone 272143 (TRBV7-9, TRBJ1-1)
CASSLVRGEALF

SEQ ID NO: 544287 - protein, 17 aa, Homo sapiens
  CDR3 for alpha chain variable domain of TCR clone 272144 (TRAV3, TRAJ12)
CAVRDGGRMDSSYKLIF

SEQ ID NO: 544288 - protein, 15 aa, Homo sapiens
  CDR3 for beta chain variable domain of TCR clone 272144 (TRBV11-3, TRBJ2-7)
CASSPGPASSYEQYF

SEQ ID NO: 544289 - protein, 14 aa, Homo sapiens
  CDR3 for alpha chain variable domain of TCR clone 272145 (TRAV38-1, TRAJ45)
CAYYSGGGADGLIF

SEQ ID NO: 544290 - protein, 12 aa, Homo sapiens
  CDR3 for beta chain variable domain of TCR clone 272145 (TRBV11-2, TRBJ2-1)
CASSPGNNEQFF

SEQ ID NO: 544291 - protein, 15 aa, Homo sapiens
  CDR3 for alpha chain variable domain of TCR clone 272146 (TRAV8-3, TRAJ45)
CASSYSGGGAYGLTF

SEQ ID NO: 544292 - protein, 12 aa, Homo sapiens
  CDR3 for beta chain variable domain of TCR clone 272146 (TRBV12-4, TRBJ2-7)
CASSLGGYEQYF

SEQ ID NO: 544293 - protein, 13 aa, Homo sapiens
  CDR3 for alpha chain variable domain of TCR clone 272147 (TRAV30, TRAJ49)
CGTESQPVTSSIL

SEQ ID NO: 544294 - protein, 15 aa, Homo sapiens
  CDR3 for beta chain variable domain of TCR clone 272147 (TRBV5-5, TRBJ1-5)
CASSSTPGSNQPRHF

SEQ ID NO: 544295 - protein, 12 aa, Homo sapiens
  CDR3 for alpha chain variable domain of TCR clone 272148 (TRAV13-2, TRAJ23)
CAERRRGGKLIF

SEQ ID NO: 544296 - protein, 15 aa, Homo sapiens
  CDR3 for beta chain variable domain of TCR clone 272148 (TRBV11-3, TRBJ2-7)
CASSPGPASSYEQYF

SEQ ID NO: 544297 - protein, 16 aa, Homo sapiens
  CDR3 for alpha chain variable domain of TCR clone 272149 (TRAV21, TRAJ52)
CAVTNAGGTSYGKLTF

SEQ ID NO: 544298 - protein, 15 aa, Homo sapiens
  CDR3 for beta chain variable domain of TCR clone 272149 (TRBV20-1, TRBJ2-7)
CSARDRVPGMDEHYF

SEQ ID NO: 544299 - protein, 15 aa, Homo sapiens
  CDR3 for alpha chain variable domain of TCR clone 272150 (TRAV8-4, TRAJ6)
CAVTHASAGSYIPTF

SEQ ID NO: 544300 - protein, 15 aa, Homo sapiens
  CDR3 for beta chain variable domain of TCR clone 272150 (TRBV7-2, TRBJ2-3)
CASSLNGGGTDTQYF

SEQ ID NO: 544301 - protein, 17 aa, Homo sapiens
  CDR3 for alpha chain variable domain of TCR clone 272151 (TRAV8-6, TRAJ8)
CAVEEGIENTGFQKLVF

SEQ ID NO: 544302 - protein, 14 aa, Homo sapiens
  CDR3 for beta chain variable domain of TCR clone 272151 (TRBV19, TRBJ2-1)
CASPTFVLSGEQFF

SEQ ID NO: 544303 - protein, 13 aa, Homo sapiens
  CDR3 for alpha chain variable domain of TCR clone 272152 (TRAV8-2, TRAJ4)
CCESFGGYNKLIF

SEQ ID NO: 544304 - protein, 15 aa, Homo sapiens
  CDR3 for beta chain variable domain of TCR clone 272152 (TRBV4-1, TRBJ1-4)
CASSDTGGTNEKLFF

SEQ ID NO: 544305 - protein, 14 aa, Homo sapiens
  CDR3 for alpha chain variable domain of TCR clone 272153 (TRAV17, TRAJ57)
CATDPQGGSEKLVF

SEQ ID NO: 544306 - protein, 18 aa, Homo sapiens
  CDR3 for beta chain variable domain of TCR clone 272153 (TRBV25-1, TRBJ1-2)
CASSGLQNGQGLIFGYTF

SEQ ID NO: 544307 - protein, 15 aa, Homo sapiens
  CDR3 for alpha chain variable domain of TCR clone 272154 (TRAV2, TRAJ24)
CAVVRLKNSWGKLQF

SEQ ID NO: 544308 - protein, 15 aa, Homo sapiens
  CDR3 for beta chain variable domain of TCR clone 272154 (TRBV7-2, TRBJ1-2)
CASSLVSGGDYGYTF

SEQ ID NO: 544309 - protein, 14 aa, Homo sapiens
  CDR3 for alpha chain variable domain of TCR clone 272155 (TRAV12-3, TRAJ10)
SHLPMTGGGNKLTF

SEQ ID NO: 544310 - protein, 13 aa, Homo sapiens
  CDR3 for beta chain variable domain of TCR clone 272155 (TRBV20-1, TRBJ2-1)
CSASTGTSNEQFF

SEQ ID NO: 544311 - protein, 15 aa, Homo sapiens
  CDR3 for alpha chain variable domain of TCR clone 272156 (TRAV34, TRAJ38)
CGADFTPGNNRKLIW

SEQ ID NO: 544312 - protein, 16 aa, Homo sapiens
  CDR3 for beta chain variable domain of TCR clone 272156 (TRBV12-5, TRBJ2-5)
CASGPRTSGNEETQYF

SEQ ID NO: 544313 - protein, 12 aa, Homo sapiens
  CDR3 for alpha chain variable domain of TCR clone 272157 (TRAV30, TRAJ43)
CGTEERGNDMRF

SEQ ID NO: 544314 - protein, 13 aa, Homo sapiens
  CDR3 for beta chain variable domain of TCR clone 272157 (TRBV24-1, TRBJ2-2)
CATSDWSTGELFF

SEQ ID NO: 544315 - protein, 14 aa, Homo sapiens
  CDR3 for alpha chain variable domain of TCR clone 272158 (TRAV27, TRAJ13)
CRSSKSGGYQKVTF

SEQ ID NO: 544316 - protein, 12 aa, Homo sapiens
  CDR3 for beta chain variable domain of TCR clone 272158 (TRBV14, TRBJ2-5)
CASSQLKETQYF

SEQ ID NO: 544317 - protein, 17 aa, Homo sapiens
  CDR3 for alpha chain variable domain of TCR clone 272159 (TRAV8-6, TRAJ8)
CAVKEGTENTGFQKLVF

SEQ ID NO: 544318 - protein, 12 aa, Homo sapiens
  CDR3 for beta chain variable domain of TCR clone 272159 (TRBV19, TRBJ1-4)
CASKDWPGGPFF

SEQ ID NO: 544319 - protein, 15 aa, Homo sapiens
  CDR3 for alpha chain variable domain of TCR clone 272160 (TRAV3, TRAJ22)
CAERDRGGSARQLTF

SEQ ID NO: 544320 - protein, 16 aa, Homo sapiens
  CDR3 for beta chain variable domain of TCR clone 272160 (TRBV5-4, TRBJ2-3)
CASQQPGAGGADTQYF

SEQ ID NO: 544321 - protein, 12 aa, Homo sapiens
  CDR3 for alpha chain variable domain of TCR clone 272161 (TRAV4, TRAJ6)
CLAPGGSSIPTF

SEQ ID NO: 544322 - protein, 17 aa, Homo sapiens
  CDR3 for beta chain variable domain of TCR clone 272161 (TRBV20-1, TRBJ2-2)
CSAGGSGQGGLTGELFF

SEQ ID NO: 544323 - protein, 17 aa, Homo sapiens
  CDR3 for alpha chain variable domain of TCR clone 272162 (TRAV3, TRAJ6)
CAVRDGPSAGGSYIPPF

SEQ ID NO: 544324 - protein, 14 aa, Homo sapiens
  CDR3 for beta chain variable domain of TCR clone 272162 (TRBV7-2, TRBJ2-7)
CASSPKTSFYEQYF

SEQ ID NO: 544325 - protein, 14 aa, Homo sapiens
  CDR3 for alpha chain variable domain of TCR clone 272163 (TRAV16, TRAJ33)
CALSAMESNYQLIW

SEQ ID NO: 544326 - protein, 14 aa, Homo sapiens
  CDR3 for beta chain variable domain of TCR clone 272163 (TRBV4-2, TRBJ2-1)
CASGLDRAYNEQFF

SEQ ID NO: 544327 - protein, 17 aa, Homo sapiens
  CDR3 for alpha chain variable domain of TCR clone 272164 (TRAV3, TRAJ6)
CAVRDGPRAGGRYIPTF

SEQ ID NO: 544328 - protein, 14 aa, Homo sapiens
  CDR3 for beta chain variable domain of TCR clone 272164 (TRBV2, TRBJ2-7)
CASSLTSGGYEQYF

SEQ ID NO: 544329 - protein, 15 aa, Homo sapiens
  CDR3 for alpha chain variable domain of TCR clone 272165 (TRAV8-6, TRAJ45)
CAVSEQGGGADGLTF

SEQ ID NO: 544330 - protein, 14 aa, Homo sapiens
  CDR3 for beta chain variable domain of TCR clone 272165 (TRBV28, TRBJ2-5)
CASRGSSLWETQYF

SEQ ID NO: 544331 - protein, 14 aa, Homo sapiens
  CDR3 for alpha chain variable domain of TCR clone 272166 (TRAV17, TRAJ57)
CATDPQGGSEKLVF

SEQ ID NO: 544332 - protein, 14 aa, Homo sapiens
  CDR3 for beta chain variable domain of TCR clone 272166 (TRBV7-8, TRBJ2-3)
CASSLEAGTDTQYF

SEQ ID NO: 544333 - protein, 11 aa, Homo sapiens
  CDR3 for alpha chain variable domain of TCR clone 272167 (TRAV13-2, TRAJ23)
CAESPRGKLIF

SEQ ID NO: 544334 - protein, 20 aa, Homo sapiens
  CDR3 for beta chain variable domain of TCR clone 272167 (TRBV6-5, TRBJ1-1)
CASSYSAPGGTGALKLSLDK

SEQ ID NO: 544335 - protein, 14 aa, Homo sapiens
  CDR3 for alpha chain variable domain of TCR clone 272168 (TRAV12-3, TRAJ10)
SHLPLTGGGNELTF

SEQ ID NO: 544336 - protein, 19 aa, Homo sapiens
  CDR3 for beta chain variable domain of TCR clone 272168 (TRBV4-1, TRBJ1-1)
CASSRIILTPRGVNTEAFF

SEQ ID NO: 544337 - protein, 14 aa, Homo sapiens
  CDR3 for alpha chain variable domain of TCR clone 272169 (TRAV3, TRAJ17)
CAVRDAAAGTKLTF

SEQ ID NO: 544338 - protein, 13 aa, Homo sapiens
  CDR3 for beta chain variable domain of TCR clone 272169 (TRBV2, TRBJ1-1)
CASSVSGYTEAFF

SEQ ID NO: 544339 - protein, 13 aa, Homo sapiens
  CDR3 for alpha chain variable domain of TCR clone 272170 (TRAV9-2, TRAJ49)
CALIQIGGNQFYF

SEQ ID NO: 544340 - protein, 14 aa, Homo sapiens
  CDR3 for beta chain variable domain of TCR clone 272170 (TRBV5-5, TRBJ1-5)
CASSGQGVDQPQHF

SEQ ID NO: 544341 - protein, 12 aa, Homo sapiens
  CDR3 for alpha chain variable domain of TCR clone 272171 (TRAV13-2, TRAJ23)
CAELHRGGKLIF

SEQ ID NO: 544342 - protein, 19 aa, Homo sapiens
  CDR3 for beta chain variable domain of TCR clone 272171 (TRBV19, TRBJ2-5)
CASSIGQVTDFFLGETQYF

SEQ ID NO: 544343 - protein, 12 aa, Homo sapiens
  CDR3 for alpha chain variable domain of TCR clone 272172 (TRAV12-1, TRAJ20)
CVAHFNDYKLSF

SEQ ID NO: 544344 - protein, 15 aa, Homo sapiens
  CDR3 for beta chain variable domain of TCR clone 272172 (TRBV28, TRBJ2-1)
CASSIIAGGRSEQFF

SEQ ID NO: 544345 - protein, 15 aa, Homo sapiens
  CDR3 for alpha chain variable domain of TCR clone 272173 (TRAV17, TRAJ57)
CATGPSQGGSEKLVF

SEQ ID NO: 544346 - protein, 16 aa, Homo sapiens
  CDR3 for beta chain variable domain of TCR clone 272173 (TRBV4-1, TRBJ2-1)
CASSQEAGQGSDEQFF

SEQ ID NO: 544347 - protein, 14 aa, Homo sapiens
  CDR3 for alpha chain variable domain of TCR clone 272174 (TRAV17, TRAJ12)
CATDEKDSGYKLIF

SEQ ID NO: 544348 - protein, 18 aa, Homo sapiens
  CDR3 for beta chain variable domain of TCR clone 272174 (TRBV25-1, TRBJ1-2)
CASSGLQNGQGLIFGYTF

SEQ ID NO: 544349 - protein, 14 aa, Homo sapiens
  CDR3 for alpha chain variable domain of TCR clone 272175 (TRAV1-2, TRAJ8)
CAVRADTGFQKLVF

SEQ ID NO: 544350 - protein, 15 aa, Homo sapiens
  CDR3 for beta chain variable domain of TCR clone 272175 (TRBV20-1, TRBJ2-7)
CSARDRVSGMDEQYF

SEQ ID NO: 544351 - protein, 13 aa, Homo sapiens
  CDR3 for alpha chain variable domain of TCR clone 272176 (TRAV12-1, TRAJ16)
CVLNGPDGQKLLF

SEQ ID NO: 544352 - protein, 13 aa, Homo sapiens
  CDR3 for beta chain variable domain of TCR clone 272176 (TRBV2, TRBJ1-1)
CARNPTGGFHAFF

SEQ ID NO: 544353 - protein, 12 aa, Homo sapiens
  CDR3 for alpha chain variable domain of TCR clone 272177 (TRAV12-2, TRAJ6)
CAVKVGSYIPTF

SEQ ID NO: 544354 - protein, 16 aa, Homo sapiens
  CDR3 for beta chain variable domain of TCR clone 272177 (TRBV29-1, TRBJ1-2)
CSVEANRDIANYGYTF

SEQ ID NO: 544355 - protein, 13 aa, Homo sapiens
  CDR3 for alpha chain variable domain of TCR clone 272178 (TRAV13-1, TRAJ21)
CAASIYNFNKFYF

SEQ ID NO: 544356 - protein, 15 aa, Homo sapiens
  CDR3 for beta chain variable domain of TCR clone 272178 (TRBV5-5, TRBJ1-5)
CASSSKGGGEQPQHF

SEQ ID NO: 544357 - protein, 15 aa, Homo sapiens
  CDR3 for alpha chain variable domain of TCR clone 272179 (TRAV12-3, TRAJ6)
CAVSATSGGSYIPTF

SEQ ID NO: 544358 - protein, 11 aa, Homo sapiens
  CDR3 for beta chain variable domain of TCR clone 272179 (TRBV20-1, TRBJ1-5)
CSAQGDQPQHF

SEQ ID NO: 544359 - protein, 10 aa, Homo sapiens
  CDR3 for alpha chain variable domain of TCR clone 272180 (TRAV16, TRAJ22)
SAMYLRQLTF

SEQ ID NO: 544360 - protein, 16 aa, Homo sapiens
  CDR3 for beta chain variable domain of TCR clone 272180 (TRBV7-9, TRBJ1-3)
CASSQTSGLRMGTIYF

SEQ ID NO: 544361 - protein, 12 aa, Homo sapiens
  CDR3 for alpha chain variable domain of TCR clone 272181 (TRAV13-1, TRAJ52)
HAGGTSYGKLTF

SEQ ID NO: 544362 - protein, 12 aa, Homo sapiens
  CDR3 for beta chain variable domain of TCR clone 272181 (TRBV18, TRBJ2-7)
CASSPGSDEQYF

SEQ ID NO: 544363 - protein, 14 aa, Homo sapiens
  CDR3 for alpha chain variable domain of TCR clone 272182 (TRAV1-2, TRAJ8)
CAVREDTGFQKLVF

SEQ ID NO: 544364 - protein, 15 aa, Homo sapiens
  CDR3 for beta chain variable domain of TCR clone 272182 (TRBV5-7, TRBJ2-3)
YASSPGLATTDTQYF

SEQ ID NO: 544365 - protein, 13 aa, Homo sapiens
  CDR3 for alpha chain variable domain of TCR clone 272183 (TRAV30, TRAJ6)
CGFIEGGSYIPKF

SEQ ID NO: 544366 - protein, 16 aa, Homo sapiens
  CDR3 for beta chain variable domain of TCR clone 272183 (TRBV7-6, TRBJ2-3)
CASSARTSRGTDTQYF

SEQ ID NO: 544367 - protein, 13 aa, Homo sapiens
  CDR3 for alpha chain variable domain of TCR clone 272184 (TRAV27, TRAJ41)
CAGEGNSGYALNF

SEQ ID NO: 544368 - protein, 19 aa, Homo sapiens
  CDR3 for beta chain variable domain of TCR clone 272184 (TRBV7-2, TRBJ2-2)
CASSTRPGAKTTNTGELFF

SEQ ID NO: 544369 - protein, 16 aa, Homo sapiens
  CDR3 for alpha chain variable domain of TCR clone 272185 (TRAV13-1, TRAJ45)
CAASWESGGGADGLTF

SEQ ID NO: 544370 - protein, 15 aa, Homo sapiens
  CDR3 for beta chain variable domain of TCR clone 272185 (TRBV9, TRBJ1-6)
CASSVAGTGDSPLHF

SEQ ID NO: 544371 - protein, 16 aa, Homo sapiens
  CDR3 for alpha chain variable domain of TCR clone 272186 (TRAV3, TRAJ37)
CAVRPHGSGNTGQLIF

SEQ ID NO: 544372 - protein, 15 aa, Homo sapiens
  CDR3 for beta chain variable domain of TCR clone 272186 (TRBV4-1, TRBJ1-4)
CASSDTGGTNEKLFF

SEQ ID NO: 544373 - protein, 14 aa, Homo sapiens
  CDR3 for alpha chain variable domain of TCR clone 272187 (TRAV1-2, TRAJ16)
CAVNRFSDGQKLLF

SEQ ID NO: 544374 - protein, 17 aa, Homo sapiens
  CDR3 for beta chain variable domain of TCR clone 272187 (TRBV11-2, TRBJ2-4)
CASSLGEGEGGKNIQYF

SEQ ID NO: 544375 - protein, 13 aa, Homo sapiens
  CDR3 for alpha chain variable domain of TCR clone 272188 (TRAV20, TRAJ37)
CAGCSSNTGKLIL

SEQ ID NO: 544376 - protein, 17 aa, Homo sapiens
  CDR3 for beta chain variable domain of TCR clone 272188 (TRBV28, TRBJ2-5)
CASSRQGGLAGAETQYF

SEQ ID NO: 544377 - protein, 12 aa, Homo sapiens
  CDR3 for alpha chain variable domain of TCR clone 272189 (TRAV27, TRAJ11)
CAGASGYSTLTF

SEQ ID NO: 544378 - protein, 14 aa, Homo sapiens
  CDR3 for beta chain variable domain of TCR clone 272189 (TRBV12-5, TRBJ1-3)
CASGPAGSGNPIYF

SEQ ID NO: 544379 - protein, 12 aa, Homo sapiens
  CDR3 for alpha chain variable domain of TCR clone 272190 (TRAV5, TRAJ27)
CAEITNAGKSAF

SEQ ID NO: 544380 - protein, 14 aa, Homo sapiens
  CDR3 for beta chain variable domain of TCR clone 272190 (TRBV12-5, TRBJ2-5)
CASGSRTHQETQYF

SEQ ID NO: 544381 - protein, 11 aa, Homo sapiens
  CDR3 for alpha chain variable domain of TCR clone 272191 (TRAV27, TRAJ13)
CRSGRYQKVTF

SEQ ID NO: 544382 - protein, 15 aa, Homo sapiens
  CDR3 for beta chain variable domain of TCR clone 272191 (TRBV20-1, TRBJ2-6)
CSARDRGPGANVLTF

SEQ ID NO: 544383 - protein, 15 aa, Homo sapiens
  CDR3 for alpha chain variable domain of TCR clone 272192 (TRAV13-1, TRAJ32)
CAASIYGGATNKLIF

SEQ ID NO: 544384 - protein, 12 aa, Homo sapiens
  CDR3 for beta chain variable domain of TCR clone 272192 (TRBV7-6, TRBJ2-3)
CASSTGTETQYF

SEQ ID NO: 544385 - protein, 13 aa, Homo sapiens
  CDR3 for alpha chain variable domain of TCR clone 272193 (TRAV26-1, TRAJ48)
CIVRVVGDEKLAF

SEQ ID NO: 544386 - protein, 14 aa, Homo sapiens
  CDR3 for beta chain variable domain of TCR clone 272193 (TRBV12-5, TRBJ2-5)
CASGSRTHQETQYF

SEQ ID NO: 544387 - protein, 12 aa, Homo sapiens
  CDR3 for alpha chain variable domain of TCR clone 272194 (TRAV12-1, TRAJ40)
CVVSSGTYKYIF

SEQ ID NO: 544388 - protein, 14 aa, Homo sapiens
  CDR3 for beta chain variable domain of TCR clone 272194 (TRBV20-1, TRBJ2-2)
CSAPGTANTGELFF

SEQ ID NO: 544389 - protein, 16 aa, Homo sapiens
  CDR3 for alpha chain variable domain of TCR clone 272195 (TRAV30, TRAJ24)
CGTEIVDADSWGKFQF

SEQ ID NO: 544390 - protein, 18 aa, Homo sapiens
  CDR3 for beta chain variable domain of TCR clone 272195 (TRBV11-2, TRBJ2-6)
CASSLNTFLGTGANVLTF

SEQ ID NO: 544391 - protein, 14 aa, Homo sapiens
  CDR3 for alpha chain variable domain of TCR clone 272196 (TRAV1-2, TRAJ8)
CAVREDTGFPKLVF

SEQ ID NO: 544392 - protein, 16 aa, Homo sapiens
  CDR3 for beta chain variable domain of TCR clone 272196 (TRBV4-3, TRBJ2-1)
CASSPALDRGVNEQFF

SEQ ID NO: 544393 - protein, 16 aa, Homo sapiens
  CDR3 for alpha chain variable domain of TCR clone 272197 (TRAV30, TRAJ24)
CGTEIVDADSWGKFQF

SEQ ID NO: 544394 - protein, 14 aa, Homo sapiens
  CDR3 for beta chain variable domain of TCR clone 272197 (TRBV18, TRBJ2-3)
CASSRDRGTDTQYF

SEQ ID NO: 544395 - protein, 11 aa, Homo sapiens
  CDR3 for alpha chain variable domain of TCR clone 272198 (TRAV1-1, TRAJ16)
CAAGDSQKLLF

SEQ ID NO: 544396 - protein, 15 aa, Homo sapiens
  CDR3 for beta chain variable domain of TCR clone 272198 (TRBV28, TRBJ1-2)
CASIPQGSDDYGYTF

SEQ ID NO: 544397 - protein, 17 aa, Homo sapiens
  CDR3 for alpha chain variable domain of TCR clone 272199 (TRAV3, TRAJ12)
CAVRDGGRMDSSYKLIF

SEQ ID NO: 544398 - protein, 14 aa, Homo sapiens
  CDR3 for beta chain variable domain of TCR clone 272199 (TRBV27, TRBJ1-1)
CASSLLSGLSEAFF

SEQ ID NO: 544399 - protein, 22 aa, Homo sapiens
  CDR3 for alpha chain variable domain of TCR clone 272200 (TRAV13-1, TRAJ32)
CAASNGWWCYKQAHLWNWHSAF

SEQ ID NO: 544400 - protein, 15 aa, Homo sapiens
  CDR3 for beta chain variable domain of TCR clone 272200 (TRBV20-1, TRBJ1-2)
CSAIRTGAFNYGYTF

SEQ ID NO: 544401 - protein, 16 aa, Homo sapiens
  CDR3 for alpha chain variable domain of TCR clone 272201 (TRAV12-2, TRAJ45)
CAVIFLSGGGADGLTF

SEQ ID NO: 544402 - protein, 19 aa, Homo sapiens
  CDR3 for beta chain variable domain of TCR clone 272201 (TRBV28, TRBJ2-4)
CAGSFQPGGPAHSKNIQYF

SEQ ID NO: 544403 - protein, 16 aa, Homo sapiens
  CDR3 for alpha chain variable domain of TCR clone 272202 (TRAV12-2, TRAJ28)
CAVITDSGAGSFQLTF

SEQ ID NO: 544404 - protein, 12 aa, Homo sapiens
  CDR3 for beta chain variable domain of TCR clone 272202 (TRBV9, TRBJ2-2)
CASSLVTGELFF

SEQ ID NO: 544405 - protein, 15 aa, Homo sapiens
  CDR3 for alpha chain variable domain of TCR clone 272203 (TRAV17, TRAJ23)
CATDAEDNQGGKLIF

SEQ ID NO: 544406 - protein, 12 aa, Homo sapiens
  CDR3 for beta chain variable domain of TCR clone 272203 (TRBV7-9, TRBJ2-7)
CASSLEGYEQYF

SEQ ID NO: 544407 - protein, 17 aa, Homo sapiens
  CDR3 for alpha chain variable domain of TCR clone 272204 (TRAV8-3, TRAJ32)
CAVGPLDYGGATNKLIF

SEQ ID NO: 544408 - protein, 15 aa, Homo sapiens
  CDR3 for beta chain variable domain of TCR clone 272204 (TRBV18, TRBJ1-2)
CASAPGNGLGYGYTF

SEQ ID NO: 544409 - protein, 13 aa, Homo sapiens
  CDR3 for alpha chain variable domain of TCR clone 272205 (TRAV8-2, TRAJ26)
CVVSLGYGQNFVF

SEQ ID NO: 544410 - protein, 13 aa, Homo sapiens
  CDR3 for beta chain variable domain of TCR clone 272205 (TRBV4-2, TRBJ1-1)
CASSQAGNTEAFF

SEQ ID NO: 544411 - protein, 13 aa, Homo sapiens
  CDR3 for alpha chain variable domain of TCR clone 272206 (TRAV27, TRAJ6)
CAVGTRGSYIPTF

SEQ ID NO: 544412 - protein, 13 aa, Homo sapiens
  CDR3 for beta chain variable domain of TCR clone 272206 (TRBV4-1, TRBJ2-5)
CASSLTRGETQYF

SEQ ID NO: 544413 - protein, 18 aa, Homo sapiens
  CDR3 for alpha chain variable domain of TCR clone 272207 (TRAV29/DV5, TRAJ37)
CSVLLCSEGSGNTGQLIF

SEQ ID NO: 544414 - protein, 14 aa, Homo sapiens
  CDR3 for beta chain variable domain of TCR clone 272207 (TRBV5-1, TRBJ1-1)
CASSLAVGSGEAFF

SEQ ID NO: 544415 - protein, 11 aa, Homo sapiens
  CDR3 for alpha chain variable domain of TCR clone 272208 (TRAV4, TRAJ31)
CLVGDNARLML

SEQ ID NO: 544416 - protein, 14 aa, Homo sapiens
  CDR3 for beta chain variable domain of TCR clone 272208 (TRBV4-1, TRBJ2-2)
CASSQAVNTGELFF

SEQ ID NO: 544417 - protein, 15 aa, Homo sapiens
  CDR3 for alpha chain variable domain of TCR clone 272209 (TRAV12-1, TRAJ44)
CVVFVNTGTASKLTF

SEQ ID NO: 544418 - protein, 17 aa, Homo sapiens
  CDR3 for beta chain variable domain of TCR clone 272209 (TRBV7-8, TRBJ2-6)
CASSAGTGGGGANVLTF

SEQ ID NO: 544419 - protein, 12 aa, Homo sapiens
  CDR3 for alpha chain variable domain of TCR clone 272210 (TRAV27, TRAJ36)
CAGMTGANNLFF

SEQ ID NO: 544420 - protein, 14 aa, Homo sapiens
  CDR3 for beta chain variable domain of TCR clone 272210 (TRBV12-4, TRBJ2-3)
CASSLVPSTYTQYF

SEQ ID NO: 544421 - protein, 14 aa, Homo sapiens
  CDR3 for alpha chain variable domain of TCR clone 272211 (TRAV12-3, TRAJ10)
SHLPLTGGGNKLTF

SEQ ID NO: 544422 - protein, 13 aa, Homo sapiens
  CDR3 for beta chain variable domain of TCR clone 272211 (TRBV11-2, TRBJ2-1)
CASSSEAYNEQFF

SEQ ID NO: 544423 - protein, 22 aa, Homo sapiens
  CDR3 for alpha chain variable domain of TCR clone 272212 (TRAV26-1, TRAJ30)
CIVRVRTEMTRSSLEKGHDLIL

SEQ ID NO: 544424 - protein, 18 aa, Homo sapiens
  CDR3 for beta chain variable domain of TCR clone 272212 (TRBV4-1, TRBJ1-5)
CASSQDPRGQGLNQPQHF

SEQ ID NO: 544425 - protein, 12 aa, Homo sapiens
  CDR3 for alpha chain variable domain of TCR clone 272213 (TRAV13-1, TRAJ21)
CAAKEGFNKFYF

SEQ ID NO: 544426 - protein, 17 aa, Homo sapiens
  CDR3 for beta chain variable domain of TCR clone 272213 (TRBV19, TRBJ2-7)
CASSISFSDSYPYEQYF

SEQ ID NO: 544427 - protein, 13 aa, Homo sapiens
  CDR3 for alpha chain variable domain of TCR clone 272214 (TRAV13-1, TRAJ5)
CAASDTGRRALTF

SEQ ID NO: 544428 - protein, 17 aa, Homo sapiens
  CDR3 for beta chain variable domain of TCR clone 272214 (TRBV28, TRBJ2-5)
CASSTPEGDALQETQYF

SEQ ID NO: 544429 - protein, 19 aa, Homo sapiens
  CDR3 for alpha chain variable domain of TCR clone 272215 (TRAV8-4, )
CAGGEDIQNPDPAVYQLRD

SEQ ID NO: 544430 - protein, 15 aa, Homo sapiens
  CDR3 for beta chain variable domain of TCR clone 272215 (TRBV7-9, TRBJ2-2)
CASGPLDTFPGELFF

SEQ ID NO: 544431 - protein, 15 aa, Homo sapiens
  CDR3 for alpha chain variable domain of TCR clone 272216 (TRAV12-1, TRAJ44)
CVADLPTDTASKLTF

SEQ ID NO: 544432 - protein, 13 aa, Homo sapiens
  CDR3 for beta chain variable domain of TCR clone 272216 (TRBV7-9, TRBJ1-2)
CASSLKQNYGYTF

SEQ ID NO: 544433 - protein, 16 aa, Homo sapiens
  CDR3 for alpha chain variable domain of TCR clone 272217 (TRAV12-2, TRAJ32)
CAVNMNYGGATNKLIF

SEQ ID NO: 544434 - protein, 16 aa, Homo sapiens
  CDR3 for beta chain variable domain of TCR clone 272217 (TRBV7-8, TRBJ2-3)
CASSAEGQRETDTQYF

SEQ ID NO: 544435 - protein, 15 aa, Homo sapiens
  CDR3 for alpha chain variable domain of TCR clone 272218 (TRAV8-3, TRAJ37)
CAVGARASNTGKLIF

SEQ ID NO: 544436 - protein, 14 aa, Homo sapiens
  CDR3 for beta chain variable domain of TCR clone 272218 (TRBV25-1, TRBJ1-1)
CASTHLGGNTEAFF

SEQ ID NO: 544437 - protein, 14 aa, Homo sapiens
  CDR3 for alpha chain variable domain of TCR clone 272219 (TRAV1-2, TRAJ8)
CAVREDTGFQKLVS

SEQ ID NO: 544438 - protein, 13 aa, Homo sapiens
  CDR3 for beta chain variable domain of TCR clone 272219 (TRBV2, TRBJ1-1)
CARNPTGGFHAFF

SEQ ID NO: 544439 - protein, 13 aa, Homo sapiens
  CDR3 for alpha chain variable domain of TCR clone 272220 (TRAV26-1, TRAJ33)
CVVRVEGNYQLIW

SEQ ID NO: 544440 - protein, 16 aa, Homo sapiens
  CDR3 for beta chain variable domain of TCR clone 272220 (TRBV15, TRBJ2-7)
CATSRDRGRRRGEQYF

SEQ ID NO: 544441 - protein, 17 aa, Homo sapiens
  CDR3 for alpha chain variable domain of TCR clone 272221 (TRAV3, TRAJ13)
CAVRDMRRTGGYQKVTF

SEQ ID NO: 544442 - protein, 15 aa, Homo sapiens
  CDR3 for beta chain variable domain of TCR clone 272221 (TRBV20-1, TRBJ2-7)
CSARDRVSGMDEQYF

SEQ ID NO: 544443 - protein, 12 aa, Homo sapiens
  CDR3 for alpha chain variable domain of TCR clone 272222 (TRAV3, TRAJ43)
CAVRDPNNDMRF

SEQ ID NO: 544444 - protein, 14 aa, Homo sapiens
  CDR3 for beta chain variable domain of TCR clone 272222 (TRBV20-1, TRBJ2-1)
CSAQIGGSANEQFF

SEQ ID NO: 544445 - protein, 15 aa, Homo sapiens
  CDR3 for alpha chain variable domain of TCR clone 272223 (TRAV3, TRAJ3)
CAVRDRDSSASKIIF

SEQ ID NO: 544446 - protein, 15 aa, Homo sapiens
  CDR3 for beta chain variable domain of TCR clone 272223 (TRBV19, TRBJ1-6)
CASSTQGAVGSPLHF

SEQ ID NO: 544447 - protein, 14 aa, Homo sapiens
  CDR3 for alpha chain variable domain of TCR clone 272224 (TRAV26-1, TRAJ38)
CIADNAGNNRKLIW

SEQ ID NO: 544448 - protein, 16 aa, Homo sapiens
  CDR3 for beta chain variable domain of TCR clone 272224 (TRBV7-9, TRBJ2-2)
CASSLKRGTLSGELFF

SEQ ID NO: 544449 - protein, 12 aa, Homo sapiens
  CDR3 for alpha chain variable domain of TCR clone 272225 (TRAV12-1, TRAJ40)
CVVYSGTYKYIF

SEQ ID NO: 544450 - protein, 14 aa, Homo sapiens
  CDR3 for beta chain variable domain of TCR clone 272225 (TRBV7-9, TRBJ2-5)
CASSLDMAQETQYF

SEQ ID NO: 544451 - protein, 14 aa, Homo sapiens
  CDR3 for alpha chain variable domain of TCR clone 272226 (TRAV16, TRAJ57)
CALSGQGGSEKLVF

SEQ ID NO: 544452 - protein, 13 aa, Homo sapiens
  CDR3 for beta chain variable domain of TCR clone 272226 (TRBV12-5, TRBJ2-3)
CASGDRQSDTQYF

SEQ ID NO: 544453 - protein, 15 aa, Homo sapiens
  CDR3 for alpha chain variable domain of TCR clone 272227 (TRAV35, TRAJ20)
CVGQLVGSNDYKLSF

SEQ ID NO: 544454 - protein, 13 aa, Homo sapiens
  CDR3 for beta chain variable domain of TCR clone 272227 (TRBV19, TRBJ2-7)
CASSKTGTHEQYF

SEQ ID NO: 544455 - protein, 16 aa, Homo sapiens
  CDR3 for alpha chain variable domain of TCR clone 272228 (TRAV1-2, TRAJ10)
CAVREVLTGGGNKLTF

SEQ ID NO: 544456 - protein, 15 aa, Homo sapiens
  CDR3 for beta chain variable domain of TCR clone 272228 (TRBV20-1, TRBJ2-7)
CSARDRVSGMDEQYF

SEQ ID NO: 544457 - protein, 13 aa, Homo sapiens
  CDR3 for alpha chain variable domain of TCR clone 272229 (TRAV17, TRAJ26)
CATVDNYGQNFVF

SEQ ID NO: 544458 - protein, 14 aa, Homo sapiens
  CDR3 for beta chain variable domain of TCR clone 272229 (TRBV4-2, TRBJ2-1)
CASGLDRAYNEQFF

SEQ ID NO: 544459 - protein, 12 aa, Homo sapiens
  CDR3 for alpha chain variable domain of TCR clone 272230 (TRAV13-2, TRAJ23)
CAERHKGGKLIF

SEQ ID NO: 544460 - protein, 16 aa, Homo sapiens
  CDR3 for beta chain variable domain of TCR clone 272230 (TRBV4-1, TRBJ2-5)
CASSHADRAGGETQYF

SEQ ID NO: 544461 - protein, 12 aa, Homo sapiens
  CDR3 for alpha chain variable domain of TCR clone 272231 (TRAV13-1, TRAJ43)
CAAGRFNNDMRF

SEQ ID NO: 544462 - protein, 11 aa, Homo sapiens
  CDR3 for beta chain variable domain of TCR clone 272231 (TRBV7-2, TRBJ2-7)
CASSSGLWQYF

SEQ ID NO: 544463 - protein, 16 aa, Homo sapiens
  CDR3 for alpha chain variable domain of TCR clone 272232 (TRAV3, TRAJ10)
CAVRDMRAGGGNKLTF

SEQ ID NO: 544464 - protein, 13 aa, Homo sapiens
  CDR3 for beta chain variable domain of TCR clone 272232 (TRBV12-4, TRBJ2-7)
CASSLERVREQYF

SEQ ID NO: 544465 - protein, 13 aa, Homo sapiens
  CDR3 for alpha chain variable domain of TCR clone 272233 (TRAV38-2/DV8, TRAJ34)
CAYRTWNTEKLIF

SEQ ID NO: 544466 - protein, 18 aa, Homo sapiens
  CDR3 for beta chain variable domain of TCR clone 272233 (TRBV6-6, TRBJ1-3)
CASSYSKWDSISGNTIYF

SEQ ID NO: 544467 - protein, 14 aa, Homo sapiens
  CDR3 for alpha chain variable domain of TCR clone 272234 (TRAV26-2, TRAJ32)
CCVGYGGATNKLIF

SEQ ID NO: 544468 - protein, 16 aa, Homo sapiens
  CDR3 for beta chain variable domain of TCR clone 272234 (TRBV5-4, TRBJ2-3)
CASQQPGAGGADTQYF

SEQ ID NO: 544469 - protein, 13 aa, Homo sapiens
  CDR3 for alpha chain variable domain of TCR clone 272235 (TRAV16, TRAJ31)
CALSAHKNARLIF

SEQ ID NO: 544470 - protein, 17 aa, Homo sapiens
  CDR3 for beta chain variable domain of TCR clone 272235 (TRBV12-4, TRBJ2-1)
CASSPGLAGGRINEQFF

SEQ ID NO: 544471 - protein, 15 aa, Homo sapiens
  CDR3 for alpha chain variable domain of TCR clone 272236 (TRAV8-3, TRAJ45)
GAASYSGGGADGLTF

SEQ ID NO: 544472 - protein, 13 aa, Homo sapiens
  CDR3 for beta chain variable domain of TCR clone 272236 (TRBV10-3, TRBJ2-7)
CASKLAVNYEQYF

SEQ ID NO: 544473 - protein, 16 aa, Homo sapiens
  CDR3 for alpha chain variable domain of TCR clone 272237 (TRAV12-3, TRAJ53)
WAMSPGRGGSNYKLTF

SEQ ID NO: 544474 - protein, 14 aa, Homo sapiens
  CDR3 for beta chain variable domain of TCR clone 272237 (TRBV12-5, TRBJ2-5)
CASGSRTHQETQYF

SEQ ID NO: 544475 - protein, 12 aa, Homo sapiens
  CDR3 for alpha chain variable domain of TCR clone 272238 (TRAV3, TRAJ27)
CAVRDGAGKSTF

SEQ ID NO: 544476 - protein, 13 aa, Homo sapiens
  CDR3 for beta chain variable domain of TCR clone 272238 (TRBV10-3, TRBJ1-2)
CAINAGLNYGYTF

SEQ ID NO: 544477 - protein, 10 aa, Homo sapiens
  CDR3 for alpha chain variable domain of TCR clone 272239 (TRAV30, TRAJ16)
CGTGGQKLLF

SEQ ID NO: 544478 - protein, 15 aa, Homo sapiens
  CDR3 for beta chain variable domain of TCR clone 272239 (TRBV7-2, TRBJ2-7)
CASSFTGQGAQEQYF

SEQ ID NO: 544479 - protein, 15 aa, Homo sapiens
  CDR3 for alpha chain variable domain of TCR clone 272240 (TRAV13-1, TRAJ45)
CAASGSGGGADGLTF

SEQ ID NO: 544480 - protein, 15 aa, Homo sapiens
  CDR3 for beta chain variable domain of TCR clone 272240 (TRBV20-1, TRBJ2-7)
CSARDRVSGMDEQYF

SEQ ID NO: 544481 - protein, 14 aa, Homo sapiens
  CDR3 for alpha chain variable domain of TCR clone 272241 (TRAV4, TRAJ17)
CLVGDMAAGNKLTY

SEQ ID NO: 544482 - protein, 14 aa, Homo sapiens
  CDR3 for beta chain variable domain of TCR clone 272241 (TRBV4-1, TRBJ2-7)
CASSPVAGGDEQYF

SEQ ID NO: 544483 - protein, 15 aa, Homo sapiens
  CDR3 for alpha chain variable domain of TCR clone 272242 (TRAV12-1, TRAJ44)
CVVFVNTGTASKLTF

SEQ ID NO: 544484 - protein, 13 aa, Homo sapiens
  CDR3 for beta chain variable domain of TCR clone 272242 (TRBV11-2, TRBJ2-5)
CASSSTGEETQYF

SEQ ID NO: 544485 - protein, 16 aa, Homo sapiens
  CDR3 for alpha chain variable domain of TCR clone 272243 (TRAV13-1, TRAJ48)
CAANIFGNFGNEKLTF

SEQ ID NO: 544486 - protein, 13 aa, Homo sapiens
  CDR3 for beta chain variable domain of TCR clone 272243 (TRBV2, TRBJ1-1)
CASSVSGYTEAFF

SEQ ID NO: 544487 - protein, 12 aa, Homo sapiens
  CDR3 for alpha chain variable domain of TCR clone 272244 (TRAV16, TRAJ10)
CSRTGGGNKLTF

SEQ ID NO: 544488 - protein, 15 aa, Homo sapiens
  CDR3 for beta chain variable domain of TCR clone 272244 (TRBV6-3, TRBJ2-7)
CASSTPGTVFYEQYF

SEQ ID NO: 544489 - protein, 13 aa, Homo sapiens
  CDR3 for alpha chain variable domain of TCR clone 272245 (TRAV29/DV5, TRAJ31)
CAASRNNSARLMF

SEQ ID NO: 544490 - protein, 12 aa, Homo sapiens
  CDR3 for beta chain variable domain of TCR clone 272245 (TRBV14, TRBJ2-5)
CASSQLKETQYF

SEQ ID NO: 544491 - protein, 16 aa, Homo sapiens
  CDR3 for alpha chain variable domain of TCR clone 272246 (TRAV12-3, TRAJ28)
CAMKANSGAGSYQLTF

SEQ ID NO: 544492 - protein, 16 aa, Homo sapiens
  CDR3 for beta chain variable domain of TCR clone 272246 (TRBV7-2, TRBJ1-3)
CASSRLEASSGNTIYF

SEQ ID NO: 544493 - protein, 14 aa, Homo sapiens
  CDR3 for alpha chain variable domain of TCR clone 272247 (TRAV17, TRAJ16)
CATADFSDGQKLPL

SEQ ID NO: 544494 - protein, 12 aa, Homo sapiens
  CDR3 for beta chain variable domain of TCR clone 272247 (TRBV24-1, TRBJ1-1)
CATLYPDTEAFF

SEQ ID NO: 544495 - protein, 15 aa, Homo sapiens
  CDR3 for alpha chain variable domain of TCR clone 272248 (TRAV26-1, TRAJ38)
CIASSNAGNNRKLLW

SEQ ID NO: 544496 - protein, 12 aa, Homo sapiens
  CDR3 for beta chain variable domain of TCR clone 272248 (TRBV5-8, TRBJ1-2)
CASSFGVYGYTF

SEQ ID NO: 544497 - protein, 15 aa, Homo sapiens
  CDR3 for alpha chain variable domain of TCR clone 272249 (TRAV8-3, TRAJ27)
CAVGPSKTNAGKSTF

SEQ ID NO: 544498 - protein, 15 aa, Homo sapiens
  CDR3 for beta chain variable domain of TCR clone 272249 (TRBV7-2, TRBJ2-1)
CASSSGLAGGIEQFF

SEQ ID NO: 544499 - protein, 13 aa, Homo sapiens
  CDR3 for alpha chain variable domain of TCR clone 272250 (TRAV36/DV7, TRAJ34)
CAGRPYNADKLIF

SEQ ID NO: 544500 - protein, 15 aa, Homo sapiens
  CDR3 for beta chain variable domain of TCR clone 272250 (TRBV27, TRBJ1-6)
CASSFDRGLGSPLHF

SEQ ID NO: 544501 - protein, 12 aa, Homo sapiens
  CDR3 for alpha chain variable domain of TCR clone 272251 (TRAV36/DV7, TRAJ40)
CAVGTGNYKYIF

SEQ ID NO: 544502 - protein, 14 aa, Homo sapiens
  CDR3 for beta chain variable domain of TCR clone 272251 (TRBV19, TRBJ2-3)
CASSIDLGGDTQYF

SEQ ID NO: 544503 - protein, 12 aa, Homo sapiens
  CDR3 for alpha chain variable domain of TCR clone 272252 (TRAV26-1, TRAJ26)
CIVFIYGQNFVF

SEQ ID NO: 544504 - protein, 13 aa, Homo sapiens
  CDR3 for beta chain variable domain of TCR clone 272252 (TRBV27, TRBJ1-1)
CASSLSLGAEAFF

SEQ ID NO: 544505 - protein, 16 aa, Homo sapiens
  CDR3 for alpha chain variable domain of TCR clone 272253 (TRAV30, TRAJ24)
CGTEIVDADSWGKFQF

SEQ ID NO: 544506 - protein, 13 aa, Homo sapiens
  CDR3 for beta chain variable domain of TCR clone 272253 (TRBV14, TRBJ1-2)
CASSQDRRYGYTF

SEQ ID NO: 544507 - protein, 15 aa, Homo sapiens
  CDR3 for alpha chain variable domain of TCR clone 272254 (TRAV8-3, TRAJ6)
CAVGPLGGGSYLRTF

SEQ ID NO: 544508 - protein, 14 aa, Homo sapiens
  CDR3 for beta chain variable domain of TCR clone 272254 (TRBV19, TRBJ2-2)
CASSTGQGAGELFF

SEQ ID NO: 544509 - protein, 14 aa, Homo sapiens
  CDR3 for alpha chain variable domain of TCR clone 272255 (TRAV12-2, TRAJ40)
CAVKTPSGTYKYIF

SEQ ID NO: 544510 - protein, 14 aa, Homo sapiens
  CDR3 for beta chain variable domain of TCR clone 272255 (TRBV20-1, TRBJ1-1)
CSAQTRIGGTEAFC

SEQ ID NO: 544511 - protein, 15 aa, Homo sapiens
  CDR3 for alpha chain variable domain of TCR clone 272256 (TRAV20, TRAJ53)
CAVQASGGSHYKLTF

SEQ ID NO: 544512 - protein, 12 aa, Homo sapiens
  CDR3 for beta chain variable domain of TCR clone 272256 (TRBV7-6, TRBJ2-5)
CASSLSQETQYF

SEQ ID NO: 544513 - protein, 14 aa, Homo sapiens
  CDR3 for alpha chain variable domain of TCR clone 272257 (TRAV26-1, TRAJ38)
CIADNAGNNRRLVW

SEQ ID NO: 544514 - protein, 13 aa, Homo sapiens
  CDR3 for beta chain variable domain of TCR clone 272257 (TRBV20-1, TRBJ1-1)
CNARGGGNTEAFF

SEQ ID NO: 544515 - protein, 13 aa, Homo sapiens
  CDR3 for alpha chain variable domain of TCR clone 272258 (TRAV12-3, TRAJ33)
CAMSVNSNYQLIL

SEQ ID NO: 544516 - protein, 13 aa, Homo sapiens
  CDR3 for beta chain variable domain of TCR clone 272258 (TRBV4-1, TRBJ2-2)
CASSQENTGELFF

SEQ ID NO: 544517 - protein, 11 aa, Homo sapiens
  CDR3 for alpha chain variable domain of TCR clone 272259 (TRAV2, TRAJ33)
CAVESNYQLIW

SEQ ID NO: 544518 - protein, 18 aa, Homo sapiens
  CDR3 for beta chain variable domain of TCR clone 272259 (TRBV12-4, TRBJ2-2)
CASSLVAGTRGRSGELFF

SEQ ID NO: 544519 - protein, 14 aa, Homo sapiens
  CDR3 for alpha chain variable domain of TCR clone 272260 (TRAV29/DV5, TRAJ45)
CAASFRGGADGLTF

SEQ ID NO: 544520 - protein, 15 aa, Homo sapiens
  CDR3 for beta chain variable domain of TCR clone 272260 (TRBV4-1, TRBJ1-4)
CASSDTGGTNEKLFF

SEQ ID NO: 544521 - protein, 13 aa, Homo sapiens
  CDR3 for alpha chain variable domain of TCR clone 272261 (TRAV8-4, TRAJ30)
CAVSVKRDDKNLF

SEQ ID NO: 544522 - protein, 13 aa, Homo sapiens
  CDR3 for beta chain variable domain of TCR clone 272261 (TRBV3-1, TRBJ2-2)
CASLARGSGELFF

SEQ ID NO: 544523 - protein, 13 aa, Homo sapiens
  CDR3 for alpha chain variable domain of TCR clone 272262 (TRAV26-1, TRAJ34)
CIVRPWITDKLIF

SEQ ID NO: 544524 - protein, 14 aa, Homo sapiens
  CDR3 for beta chain variable domain of TCR clone 272262 (TRBV7-2, TRBJ2-7)
CASRSQAAAYEQYF

SEQ ID NO: 544525 - protein, 11 aa, Homo sapiens
  CDR3 for alpha chain variable domain of TCR clone 272263 (TRAV21, TRAJ34)
CAHYNTDKLNF

SEQ ID NO: 544526 - protein, 13 aa, Homo sapiens
  CDR3 for beta chain variable domain of TCR clone 272263 (TRBV20-1, TRBJ2-7)
CSADPGATYEQYF

SEQ ID NO: 544527 - protein, 13 aa, Homo sapiens
  CDR3 for alpha chain variable domain of TCR clone 272264 (TRAV3, TRAJ43)
CAVRDTRGGDMLF

SEQ ID NO: 544528 - protein, 15 aa, Homo sapiens
  CDR3 for beta chain variable domain of TCR clone 272264 (TRBV6-5, TRBJ1-5)
CASSYSRRSNQPQHF

SEQ ID NO: 544529 - protein, 13 aa, Homo sapiens
  CDR3 for alpha chain variable domain of TCR clone 272265 (TRAV13-2, TRAJ15)
RAEKNQAGTALIF

SEQ ID NO: 544530 - protein, 12 aa, Homo sapiens
  CDR3 for beta chain variable domain of TCR clone 272265 (TRBV11-3, TRBJ2-2)
CASSLGGGELFF

SEQ ID NO: 544531 - protein, 13 aa, Homo sapiens
  CDR3 for alpha chain variable domain of TCR clone 272266 (TRAV19, TRAJ26)
CALTFDCGQNFVF

SEQ ID NO: 544532 - protein, 14 aa, Homo sapiens
  CDR3 for beta chain variable domain of TCR clone 272266 (TRBV7-8, TRBJ2-3)
CASSLEAGTDTQYF

SEQ ID NO: 544533 - protein, 15 aa, Homo sapiens
  CDR3 for alpha chain variable domain of TCR clone 272267 (TRAV29/DV5, TRAJ24)
CAASGATASWGKFQF

SEQ ID NO: 544534 - protein, 20 aa, Homo sapiens
  CDR3 for beta chain variable domain of TCR clone 272267 (TRBV11-2, TRBJ2-2)
LRTRPCISVPAASLPGSCFF

SEQ ID NO: 544535 - protein, 13 aa, Homo sapiens
  CDR3 for alpha chain variable domain of TCR clone 272268 (TRAV13-1, TRAJ21)
CAASIYNFNKFYF

SEQ ID NO: 544536 - protein, 17 aa, Homo sapiens
  CDR3 for beta chain variable domain of TCR clone 272268 (TRBV20-1, TRBJ2-2)
CSASGSGQGGLTGELFF

SEQ ID NO: 544537 - protein, 13 aa, Homo sapiens
  CDR3 for alpha chain variable domain of TCR clone 272269 (TRAV14/DV4, TRAJ23)
CAMREVKGGKLIF

SEQ ID NO: 544538 - protein, 12 aa, Homo sapiens
  CDR3 for beta chain variable domain of TCR clone 272269 (TRBV11-2, TRBJ2-2)
CASSLGGGELFF

SEQ ID NO: 544539 - protein, 13 aa, Homo sapiens
  CDR3 for alpha chain variable domain of TCR clone 272270 (TRAV1-2, TRAJ9)
GAVLNTGGFKTIF

SEQ ID NO: 544540 - protein, 14 aa, Homo sapiens
  CDR3 for beta chain variable domain of TCR clone 272270 (TRBV20-1, TRBJ2-3)
CSARGGTSTDTQYF

SEQ ID NO: 544541 - protein, 12 aa, Homo sapiens
  CDR3 for alpha chain variable domain of TCR clone 272271 (TRAV17, TRAJ13)
CATDGGYQKVTF

SEQ ID NO: 544542 - protein, 14 aa, Homo sapiens
  CDR3 for beta chain variable domain of TCR clone 272271 (TRBV2, TRBJ2-7)
CASSLTSGGYEQYF

SEQ ID NO: 544543 - protein, 11 aa, Homo sapiens
  CDR3 for alpha chain variable domain of TCR clone 272272 (TRAV29/DV5, TRAJ47)
CAATYGNKLVF

SEQ ID NO: 544544 - protein, 16 aa, Homo sapiens
  CDR3 for beta chain variable domain of TCR clone 272272 (TRBV11-2, TRBJ1-2)
CASSPSGREANYGYTF

SEQ ID NO: 544545 - protein, 12 aa, Homo sapiens
  CDR3 for alpha chain variable domain of TCR clone 272273 (TRAV12-1, TRAJ20)
CVVNPDDYKLSF

SEQ ID NO: 544546 - protein, 15 aa, Homo sapiens
  CDR3 for beta chain variable domain of TCR clone 272273 (TRBV11-2, TRBJ2-1)
CASSLGTSGLNEQFF

SEQ ID NO: 544547 - protein, 13 aa, Homo sapiens
  CDR3 for alpha chain variable domain of TCR clone 272274 (TRAV21, TRAJ56)
CAVRTGANSKLTC

SEQ ID NO: 544548 - protein, 15 aa, Homo sapiens
  CDR3 for beta chain variable domain of TCR clone 272274 (TRBV7-9, TRBJ1-1)
CASSHRGTVNTEAFF

SEQ ID NO: 544549 - protein, 14 aa, Homo sapiens
  CDR3 for alpha chain variable domain of TCR clone 272275 (TRAV26-1, TRAJ39)
CIVRAYNAGNMLTV

SEQ ID NO: 544550 - protein, 16 aa, Homo sapiens
  CDR3 for beta chain variable domain of TCR clone 272275 (TRBV15, TRBJ2-7)
CATSRDFGAAVYEQYF

SEQ ID NO: 544551 - protein, 16 aa, Homo sapiens
  CDR3 for alpha chain variable domain of TCR clone 272276 (TRAV14/DV4, TRAJ28)
CAMREGPGAGSYQLTF

SEQ ID NO: 544552 - protein, 14 aa, Homo sapiens
  CDR3 for beta chain variable domain of TCR clone 272276 (TRBV6-4, TRBJ2-2)
CATRREKEVGELFF

SEQ ID NO: 544553 - protein, 12 aa, Homo sapiens
  CDR3 for alpha chain variable domain of TCR clone 272277 (TRAV16, TRAJ49)
CALNEGGNQFYF

SEQ ID NO: 544554 - protein, 14 aa, Homo sapiens
  CDR3 for beta chain variable domain of TCR clone 272277 (TRBV7-9, TRBJ2-1)
CASRPAGLRNEQFF

SEQ ID NO: 544555 - protein, 14 aa, Homo sapiens
  CDR3 for alpha chain variable domain of TCR clone 272278 (TRAV12-3, TRAJ22)
CAMSLFGSARQLTF

SEQ ID NO: 544556 - protein, 15 aa, Homo sapiens
  CDR3 for beta chain variable domain of TCR clone 272278 (TRBV28, TRBJ2-1)
CASSIIAGGRSEQFF

SEQ ID NO: 544557 - protein, 12 aa, Homo sapiens
  CDR3 for alpha chain variable domain of TCR clone 272279 (TRAV16, TRAJ10)
CAFTGGGDKLTF

SEQ ID NO: 544558 - protein, 14 aa, Homo sapiens
  CDR3 for beta chain variable domain of TCR clone 272279 (TRBV12-4, TRBJ1-5)
CASSPTGPRGGTYF

SEQ ID NO: 544559 - protein, 11 aa, Homo sapiens
  CDR3 for alpha chain variable domain of TCR clone 272280 (TRAV14/DV4, TRAJ26)
CAMRGPSEFCL

SEQ ID NO: 544560 - protein, 15 aa, Homo sapiens
  CDR3 for beta chain variable domain of TCR clone 272280 (TRBV20-1, TRBJ2-7)
CSARDRVSGMDEQYF

SEQ ID NO: 544561 - protein, 12 aa, Homo sapiens
  CDR3 for alpha chain variable domain of TCR clone 272281 (TRAV21, TRAJ11)
CAATSGYSTLTF

SEQ ID NO: 544562 - protein, 18 aa, Homo sapiens
  CDR3 for beta chain variable domain of TCR clone 272281 (TRBV7-3, TRBJ2-5)
CASSLGGAAQGRWETQYF

SEQ ID NO: 544563 - protein, 14 aa, Homo sapiens
  CDR3 for alpha chain variable domain of TCR clone 272282 (TRAV3, TRAJ21)
CAVESQANSNKFYF

SEQ ID NO: 544564 - protein, 12 aa, Homo sapiens
  CDR3 for beta chain variable domain of TCR clone 272282 (TRBV6-3, TRBJ2-7)
CASSLTPYEQYF

SEQ ID NO: 544565 - protein, 22 aa, Homo sapiens
  CDR3 for alpha chain variable domain of TCR clone 272283 (TRAV4, )
CLGGRVKPNIQNPDPAVYQLRD

SEQ ID NO: 544566 - protein, 16 aa, Homo sapiens
  CDR3 for beta chain variable domain of TCR clone 272283 (TRBV13, TRBJ2-2)
CASSPRTGEHTGELFF

SEQ ID NO: 544567 - protein, 13 aa, Homo sapiens
  CDR3 for alpha chain variable domain of TCR clone 272284 (TRAV12-1, TRAJ21)
CVVTPYNFNKFYF

SEQ ID NO: 544568 - protein, 20 aa, Homo sapiens
  CDR3 for beta chain variable domain of TCR clone 272284 (TRBV7-8, TRBJ2-1)
CASSLAHRLAGVRSYNEQFF

SEQ ID NO: 544569 - protein, 17 aa, Homo sapiens
  CDR3 for alpha chain variable domain of TCR clone 272285 (TRAV4, TRAJ22)
CCVLLPRGGGSARQLTF

SEQ ID NO: 544570 - protein, 14 aa, Homo sapiens
  CDR3 for beta chain variable domain of TCR clone 272285 (TRBV20-1, TRBJ1-1)
CSDRAVNGYTEAFF

SEQ ID NO: 544571 - protein, 12 aa, Homo sapiens
  CDR3 for alpha chain variable domain of TCR clone 272286 (TRAV12-1, TRAJ40)
CVVPSGTYKYIF

SEQ ID NO: 544572 - protein, 15 aa, Homo sapiens
  CDR3 for beta chain variable domain of TCR clone 272286 (TRBV12-4, TRBJ2-1)
CAGSPLSGRNSEQFC

SEQ ID NO: 544573 - protein, 13 aa, Homo sapiens
  CDR3 for alpha chain variable domain of TCR clone 272287 (TRAV26-1, TRAJ34)
CIVRPWITGKLIF

SEQ ID NO: 544574 - protein, 13 aa, Homo sapiens
  CDR3 for beta chain variable domain of TCR clone 272287 (TRBV5-1, TRBJ2-1)
CASSLGSYNEQFF

SEQ ID NO: 544575 - protein, 15 aa, Homo sapiens
  CDR3 for alpha chain variable domain of TCR clone 272288 (TRAV17, TRAJ56)
CATDANTGATSKLTF

SEQ ID NO: 544576 - protein, 16 aa, Homo sapiens
  CDR3 for beta chain variable domain of TCR clone 272288 (TRBV7-3, TRBJ2-2)
CASSLKRGTLSGELFF

SEQ ID NO: 544577 - protein, 14 aa, Homo sapiens
  CDR3 for alpha chain variable domain of TCR clone 272289 (TRAV3, TRAJ28)
CAVRRGAGSYQLTF

SEQ ID NO: 544578 - protein, 17 aa, Homo sapiens
  CDR3 for beta chain variable domain of TCR clone 272289 (TRBV13, TRBJ2-3)
CASSLSRVAGGRNTQYF

SEQ ID NO: 544579 - protein, 17 aa, Homo sapiens
  CDR3 for alpha chain variable domain of TCR clone 272290 (TRAV1-1, TRAJ4)
CALYNKLIFGTGTRLAV

SEQ ID NO: 544580 - protein, 16 aa, Homo sapiens
  CDR3 for beta chain variable domain of TCR clone 272290 (TRBV7-3, TRBJ2-2)
CASSLKRGTLSGELFF

SEQ ID NO: 544581 - protein, 13 aa, Homo sapiens
  CDR3 for alpha chain variable domain of TCR clone 272291 (TRAV12-3, TRAJ9)
CAMRNTGGFKTIF

SEQ ID NO: 544582 - protein, 15 aa, Homo sapiens
  CDR3 for beta chain variable domain of TCR clone 272291 (TRBV20-1, TRBJ2-7)
CSARDRVAGKDEQYF

SEQ ID NO: 544583 - protein, 14 aa, Homo sapiens
  CDR3 for alpha chain variable domain of TCR clone 272292 (TRAV3, TRAJ6)
CAVRDPWGSFIPTF

SEQ ID NO: 544584 - protein, 14 aa, Homo sapiens
  CDR3 for beta chain variable domain of TCR clone 272292 (TRBV7-2, TRBJ2-7)
CASSPKTSFYEQYF

SEQ ID NO: 544585 - protein, 17 aa, Homo sapiens
  CDR3 for alpha chain variable domain of TCR clone 272293 (TRAV2, TRAJ32)
CLLLCLHYGGATNKLIF

SEQ ID NO: 544586 - protein, 16 aa, Homo sapiens
  CDR3 for beta chain variable domain of TCR clone 272293 (TRBV7-9, TRBJ2-7)
CASSYPDREGGYEQYF

SEQ ID NO: 544587 - protein, 15 aa, Homo sapiens
  CDR3 for alpha chain variable domain of TCR clone 272294 (TRAV21, TRAJ24)
CATRSSTDSWGKLQL

SEQ ID NO: 544588 - protein, 13 aa, Homo sapiens
  CDR3 for beta chain variable domain of TCR clone 272294 (TRBV11-2, TRBJ2-5)
CASSSTGEETQYF

SEQ ID NO: 544589 - protein, 12 aa, Homo sapiens
  CDR3 for alpha chain variable domain of TCR clone 272295 (TRAV30, TRAJ39)
CGRGNAGNMLTF

SEQ ID NO: 544590 - protein, 16 aa, Homo sapiens
  CDR3 for beta chain variable domain of TCR clone 272295 (TRBV12-5, TRBJ2-5)
CASGPRTSGSQETQYF

SEQ ID NO: 544591 - protein, 13 aa, Homo sapiens
  CDR3 for alpha chain variable domain of TCR clone 272296 (TRAV3, TRAJ33)
CAVRDRSNYQLIW

SEQ ID NO: 544592 - protein, 16 aa, Homo sapiens
  CDR3 for beta chain variable domain of TCR clone 272296 (TRBV4-2, TRBJ2-7)
CASSQDRRTSSCEQYF

SEQ ID NO: 544593 - protein, 13 aa, Homo sapiens
  CDR3 for alpha chain variable domain of TCR clone 272297 (TRAV23/DV6, TRAJ22)
CAPYSGSARQLTF

SEQ ID NO: 544594 - protein, 15 aa, Homo sapiens
  CDR3 for beta chain variable domain of TCR clone 272297 (TRBV11-2, TRBJ1-6)
CASSFDPWAVSPLHF

SEQ ID NO: 544595 - protein, 14 aa, Homo sapiens
  CDR3 for alpha chain variable domain of TCR clone 272298 (TRAV1-1, TRAJ27)
CAVIYNTNAGKSTF

SEQ ID NO: 544596 - protein, 15 aa, Homo sapiens
  CDR3 for beta chain variable domain of TCR clone 272298 (TRBV7-3, TRBJ2-3)
CASSLGLTLGDTQYF

SEQ ID NO: 544597 - protein, 18 aa, Homo sapiens
  CDR3 for alpha chain variable domain of TCR clone 272299 (TRAV13-1, TRAJ52)
CSASKRSAGGTSYGKMTF

SEQ ID NO: 544598 - protein, 13 aa, Homo sapiens
  CDR3 for beta chain variable domain of TCR clone 272299 (TRBV12-4, TRBJ1-2)
CASSLRQGKGYTV

SEQ ID NO: 544599 - protein, 16 aa, Homo sapiens
  CDR3 for alpha chain variable domain of TCR clone 272300 (TRAV30, TRAJ24)
CGTEIVDADSWGKFQF

SEQ ID NO: 544600 - protein, 17 aa, Homo sapiens
  CDR3 for beta chain variable domain of TCR clone 272300 (TRBV28, TRBJ2-5)
CASSTPEGDALQEAQYF

SEQ ID NO: 544601 - protein, 15 aa, Homo sapiens
  CDR3 for alpha chain variable domain of TCR clone 272301 (TRAV3, TRAJ27)
CAVRDPLTNAGKSTF

SEQ ID NO: 544602 - protein, 14 aa, Homo sapiens
  CDR3 for beta chain variable domain of TCR clone 272301 (TRBV5-7, TRBJ1-5)
CASSRTGGGQTQHF

SEQ ID NO: 544603 - protein, 17 aa, Homo sapiens
  CDR3 for alpha chain variable domain of TCR clone 272302 (TRAV13-1, TRAJ52)
CAASSGAGGTSYGKLTF

SEQ ID NO: 544604 - protein, 15 aa, Homo sapiens
  CDR3 for beta chain variable domain of TCR clone 272302 (TRBV2, TRBJ2-7)
CASTLLGSGATEQYF

SEQ ID NO: 544605 - protein, 15 aa, Homo sapiens
  CDR3 for alpha chain variable domain of TCR clone 272303 (TRAV17, TRAJ57)
CATGPSQGGSEKLVF

SEQ ID NO: 544606 - protein, 14 aa, Homo sapiens
  CDR3 for beta chain variable domain of TCR clone 272303 (TRBV12-5, TRBJ2-5)
CASGSRTHQETQNF

SEQ ID NO: 544607 - protein, 15 aa, Homo sapiens
  CDR3 for alpha chain variable domain of TCR clone 272304 (TRAV21, TRAJ53)
CATLNSGGSNYKLTF

SEQ ID NO: 544608 - protein, 16 aa, Homo sapiens
  CDR3 for beta chain variable domain of TCR clone 272304 (TRBV20-1, TRBJ1-2)
CSASMGQSVANYGYTF

SEQ ID NO: 544609 - protein, 16 aa, Homo sapiens
  CDR3 for alpha chain variable domain of TCR clone 272305 (TRAV14/DV4, TRAJ54)
CAMREGRIQGAQKLVF

SEQ ID NO: 544610 - protein, 14 aa, Homo sapiens
  CDR3 for beta chain variable domain of TCR clone 272305 (TRBV2, TRBJ1-5)
CASSGTGFNQPQHF

SEQ ID NO: 544611 - protein, 15 aa, Homo sapiens
  CDR3 for alpha chain variable domain of TCR clone 272306 (TRAV4, TRAJ39)
CLVGPNNNAGNMLTL

SEQ ID NO: 544612 - protein, 14 aa, Homo sapiens
  CDR3 for beta chain variable domain of TCR clone 272306 (TRBV19, TRBJ2-1)
CASPTFVLSGEQFF

SEQ ID NO: 544613 - protein, 14 aa, Homo sapiens
  CDR3 for alpha chain variable domain of TCR clone 272307 (TRAV1-2, TRAJ8)
CAVREATGFQRLVF

SEQ ID NO: 544614 - protein, 15 aa, Homo sapiens
  CDR3 for beta chain variable domain of TCR clone 272307 (TRBV6-3, TRBJ2-7)
CASSSPGTVFYEQYF

SEQ ID NO: 544615 - protein, 19 aa, Homo sapiens
  CDR3 for alpha chain variable domain of TCR clone 272308 (TRAV2, TRAJ20)
ILQVREADAAVYRDCKLSF

SEQ ID NO: 544616 - protein, 13 aa, Homo sapiens
  CDR3 for beta chain variable domain of TCR clone 272308 (TRBV15, TRBJ1-6)
CATSGGLHSPLHF

SEQ ID NO: 544617 - protein, 14 aa, Homo sapiens
  CDR3 for alpha chain variable domain of TCR clone 272309 (TRAV36/DV7, )
CALTDIQNPDPAVY

SEQ ID NO: 544618 - protein, 13 aa, Homo sapiens
  CDR3 for beta chain variable domain of TCR clone 272309 (TRBV4-1, TRBJ2-7)
CASSQGQAYEQYF

SEQ ID NO: 544619 - protein, 15 aa, Homo sapiens
  CDR3 for alpha chain variable domain of TCR clone 272310 (TRAV23/DV6, TRAJ18)
CAARPRGSTLGRLYV

SEQ ID NO: 544620 - protein, 13 aa, Homo sapiens
  CDR3 for beta chain variable domain of TCR clone 272310 (TRBV7-2, TRBJ2-7)
CASSSPSGSEQYF

SEQ ID NO: 544621 - protein, 17 aa, Homo sapiens
  CDR3 for alpha chain variable domain of TCR clone 272311 (TRAV4, TRAJ42)
CLVGVLNYGGSQGNLIF

SEQ ID NO: 544622 - protein, 15 aa, Homo sapiens
  CDR3 for beta chain variable domain of TCR clone 272311 (TRBV28, TRBJ2-7)
CASSPGGRGFYEQYV

SEQ ID NO: 544623 - protein, 14 aa, Homo sapiens
  CDR3 for alpha chain variable domain of TCR clone 272312 (TRAV12-3, TRAJ10)
SHLPLMGGGNKLTF

SEQ ID NO: 544624 - protein, 14 aa, Homo sapiens
  CDR3 for beta chain variable domain of TCR clone 272312 (TRBV6-1, TRBJ1-3)
CASVQGGGGNTIYL

SEQ ID NO: 544625 - protein, 14 aa, Homo sapiens
  CDR3 for alpha chain variable domain of TCR clone 272313 (TRAV1-2, TRAJ16)
CAVNRFSDGQKLLF

SEQ ID NO: 544626 - protein, 16 aa, Homo sapiens
  CDR3 for beta chain variable domain of TCR clone 272313 (TRBV2, TRBJ2-3)
CASSTSVEGVTNTQYF

SEQ ID NO: 544627 - protein, 18 aa, Homo sapiens
  CDR3 for alpha chain variable domain of TCR clone 272314 (TRAV13-1, TRAJ52)
CAASKRGAGGTSYGKLTF

SEQ ID NO: 544628 - protein, 13 aa, Homo sapiens
  CDR3 for beta chain variable domain of TCR clone 272314 (TRBV12-4, TRBJ1-2)
CASSVRQGKGYTF

SEQ ID NO: 544629 - protein, 16 aa, Homo sapiens
  CDR3 for alpha chain variable domain of TCR clone 272315 (TRAV23/DV6, TRAJ9)
CAATIGGNTGGFKTIF

SEQ ID NO: 544630 - protein, 14 aa, Homo sapiens
  CDR3 for beta chain variable domain of TCR clone 272315 (TRBV9, TRBJ2-7)
CASSVGVGSYEQYF

SEQ ID NO: 544631 - protein, 13 aa, Homo sapiens
  CDR3 for alpha chain variable domain of TCR clone 272316 (TRAV8-3, TRAJ28)
CAVGAVGSYQLTF

SEQ ID NO: 544632 - protein, 18 aa, Homo sapiens
  CDR3 for beta chain variable domain of TCR clone 272316 (TRBV5-5, TRBJ1-5)
CASSLRQVKGSSNQPQHF

SEQ ID NO: 544633 - protein, 15 aa, Homo sapiens
  CDR3 for alpha chain variable domain of TCR clone 272317 (TRAV3, TRAJ20)
CAVRDIKLSDYKLSF

SEQ ID NO: 544634 - protein, 18 aa, Homo sapiens
  CDR3 for beta chain variable domain of TCR clone 272317 (TRBV20-1, TRBJ2-5)
CSQTGDSGRLGGKETHYF

SEQ ID NO: 544635 - protein, 13 aa, Homo sapiens
  CDR3 for alpha chain variable domain of TCR clone 272318 (TRAV1-2, TRAJ9)
CAALNTGGFKTIF

SEQ ID NO: 544636 - protein, 19 aa, Homo sapiens
  CDR3 for beta chain variable domain of TCR clone 272318 (TRBV28, TRBJ2-1)
CASSFSIRGSGRTRYEQFF

SEQ ID NO: 544637 - protein, 15 aa, Homo sapiens
  CDR3 for alpha chain variable domain of TCR clone 272319 (TRAV14/DV4, TRAJ26)
CAMREGQNYGQNFVF

SEQ ID NO: 544638 - protein, 13 aa, Homo sapiens
  CDR3 for beta chain variable domain of TCR clone 272319 (TRBV24-1, TRBJ2-2)
CATSDWSTGELFC

SEQ ID NO: 544639 - protein, 14 aa, Homo sapiens
  CDR3 for alpha chain variable domain of TCR clone 272320 (TRAV17, TRAJ37)
CATDGSSNTGKLII

SEQ ID NO: 544640 - protein, 13 aa, Homo sapiens
  CDR3 for beta chain variable domain of TCR clone 272320 (TRBV11-2, TRBJ2-1)
CASSLDLVNEQFF

SEQ ID NO: 544641 - protein, 12 aa, Homo sapiens
  CDR3 for alpha chain variable domain of TCR clone 272321 (TRAV36/DV7, TRAJ54)
CAVVRGAQKLVF

SEQ ID NO: 544642 - protein, 11 aa, Homo sapiens
  CDR3 for beta chain variable domain of TCR clone 272321 (TRBV7-8, TRBJ2-7)
CASSLSLEQYF

SEQ ID NO: 544643 - protein, 16 aa, Homo sapiens
  CDR3 for alpha chain variable domain of TCR clone 272322 (TRAV35, TRAJ28)
CAEQRYSGAGSYQLTF

SEQ ID NO: 544644 - protein, 13 aa, Homo sapiens
  CDR3 for beta chain variable domain of TCR clone 272322 (TRBV19, TRBJ1-2)
CASSQGQVYGYTF

SEQ ID NO: 544645 - protein, 16 aa, Homo sapiens
  CDR3 for alpha chain variable domain of TCR clone 272323 (TRAV3, TRAJ10)
CSVRDMRAGGGNKLTF

SEQ ID NO: 544646 - protein, 20 aa, Homo sapiens
  CDR3 for beta chain variable domain of TCR clone 272323 (TRBV11-3, TRBJ2-7)
CASSQRTSGSLRAVLRAGHQ

SEQ ID NO: 544647 - protein, 14 aa, Homo sapiens
  CDR3 for alpha chain variable domain of TCR clone 272324 (TRAV1-2, TRAJ16)
CAVNRFSDGQKLLF

SEQ ID NO: 544648 - protein, 15 aa, Homo sapiens
  CDR3 for beta chain variable domain of TCR clone 272324 (TRBV19, TRBJ2-7)
CASSIRQGARYEQYF

SEQ ID NO: 544649 - protein, 12 aa, Homo sapiens
  CDR3 for alpha chain variable domain of TCR clone 272325 (TRAV17, TRAJ30)
CATDARDDKIIF

SEQ ID NO: 544650 - protein, 15 aa, Homo sapiens
  CDR3 for beta chain variable domain of TCR clone 272325 (TRBV4-1, TRBJ2-1)
CASSQGGELYNEQSF

SEQ ID NO: 544651 - protein, 17 aa, Homo sapiens
  CDR3 for alpha chain variable domain of TCR clone 272326 (TRAV8-6, TRAJ58)
CAVSSWVGETSGSRLTF

SEQ ID NO: 544652 - protein, 14 aa, Homo sapiens
  CDR3 for beta chain variable domain of TCR clone 272326 (TRBV4-2, TRBJ2-1)
CASGLDRTYNEQFF

SEQ ID NO: 544653 - protein, 17 aa, Homo sapiens
  CDR3 for alpha chain variable domain of TCR clone 272327 (TRAV3, TRAJ42)
CAVRDRDYGGSQGNLII

SEQ ID NO: 544654 - protein, 12 aa, Homo sapiens
  CDR3 for beta chain variable domain of TCR clone 272327 (TRBV11-2, TRBJ2-1)
CASSPGNNEQFF

SEQ ID NO: 544655 - protein, 10 aa, Homo sapiens
  CDR3 for alpha chain variable domain of TCR clone 272328 (TRAV1-2, TRAJ20)
CACSDYKLSF

SEQ ID NO: 544656 - protein, 16 aa, Homo sapiens
  CDR3 for beta chain variable domain of TCR clone 272328 (TRBV12-5, TRBJ2-5)
CASGPRTSGNQETQYF

SEQ ID NO: 544657 - protein, 12 aa, Homo sapiens
  CDR3 for alpha chain variable domain of TCR clone 272329 (TRAV17, TRAJ53)
CAFGGSNYKLTF

SEQ ID NO: 544658 - protein, 15 aa, Homo sapiens
  CDR3 for beta chain variable domain of TCR clone 272329 (TRBV11-2, TRBJ2-4)
PAAKRGGGGLDIQYF

SEQ ID NO: 544659 - protein, 12 aa, Homo sapiens
  CDR3 for alpha chain variable domain of TCR clone 272330 (TRAV12-2, TRAJ10)
WGVTGGGNKLTF

SEQ ID NO: 544660 - protein, 16 aa, Homo sapiens
  CDR3 for beta chain variable domain of TCR clone 272330 (TRBV27, TRBJ2-5)
CASSFGPGGTKETQYF

SEQ ID NO: 544661 - protein, 12 aa, Homo sapiens
  CDR3 for alpha chain variable domain of TCR clone 272331 (TRAV35, TRAJ39)
LALNNAGNMLTF

SEQ ID NO: 544662 - protein, 13 aa, Homo sapiens
  CDR3 for beta chain variable domain of TCR clone 272331 (TRBV19, TRBJ1-3)
CASRLSLGNTIYF

SEQ ID NO: 544663 - protein, 13 aa, Homo sapiens
  CDR3 for alpha chain variable domain of TCR clone 272332 (TRAV12-1, TRAJ33)
CGDAPDSNFQLIW

SEQ ID NO: 544664 - protein, 15 aa, Homo sapiens
  CDR3 for beta chain variable domain of TCR clone 272332 (TRBV27, TRBJ2-1)
CASSNGGGSSNEQFF

SEQ ID NO: 544665 - protein, 15 aa, Homo sapiens
  CDR3 for alpha chain variable domain of TCR clone 272333 (TRAV26-1, TRAJ11)
CIVRASSSGYSTLTF

SEQ ID NO: 544666 - protein, 16 aa, Homo sapiens
  CDR3 for beta chain variable domain of TCR clone 272333 (TRBV4-1, TRBJ1-2)
CASSQDRAVPVGGYTF

SEQ ID NO: 544667 - protein, 14 aa, Homo sapiens
  CDR3 for alpha chain variable domain of TCR clone 272334 (TRAV12-1, TRAJ17)
CVVNYKAAGNKLTF

SEQ ID NO: 544668 - protein, 14 aa, Homo sapiens
  CDR3 for beta chain variable domain of TCR clone 272334 (TRBV28, TRBJ2-1)
CASSSSTGYNEQFF

SEQ ID NO: 544669 - protein, 14 aa, Homo sapiens
  CDR3 for alpha chain variable domain of TCR clone 272335 (TRAV12-2, TRAJ45)
CAVYSGGGADGLTF

SEQ ID NO: 544670 - protein, 14 aa, Homo sapiens
  CDR3 for beta chain variable domain of TCR clone 272335 (TRBV6-5, TRBJ1-2)
CASTRGGGYDGYTF

SEQ ID NO: 544671 - protein, 13 aa, Homo sapiens
  CDR3 for alpha chain variable domain of TCR clone 272336 (TRAV21, TRAJ27)
CAARPGNAGKSTF

SEQ ID NO: 544672 - protein, 19 aa, Homo sapiens
  CDR3 for beta chain variable domain of TCR clone 272336 (TRBV19, TRBJ2-5)
CASSIGQVTDFFLGETQYF

SEQ ID NO: 544673 - protein, 13 aa, Homo sapiens
  CDR3 for alpha chain variable domain of TCR clone 272337 (TRAV20, TRAJ37)
CAGCSSNTGKLIF

SEQ ID NO: 544674 - protein, 12 aa, Homo sapiens
  CDR3 for beta chain variable domain of TCR clone 272337 (TRBV12-4, TRBJ2-5)
CASGQGVETQYF

SEQ ID NO: 544675 - protein, 18 aa, Homo sapiens
  CDR3 for alpha chain variable domain of TCR clone 272338 (TRAV29/DV5, TRAJ52)
CAAGFRGAGGTSYGKLTF

SEQ ID NO: 544676 - protein, 13 aa, Homo sapiens
  CDR3 for beta chain variable domain of TCR clone 272338 (TRBV2, TRBJ1-4)
CASSELGVEKLFF

SEQ ID NO: 544677 - protein, 15 aa, Homo sapiens
  CDR3 for alpha chain variable domain of TCR clone 272339 (TRAV10, TRAJ42)
SLLHLWGGSQGNLIF

SEQ ID NO: 544678 - protein, 13 aa, Homo sapiens
  CDR3 for beta chain variable domain of TCR clone 272339 (TRBV27, TRBJ2-7)
CASGRGGAYEQYF

SEQ ID NO: 544679 - protein, 15 aa, Homo sapiens
  CDR3 for alpha chain variable domain of TCR clone 272340 (TRAV12-2, TRAJ10)
GRGCRLTGGGNKLTF

SEQ ID NO: 544680 - protein, 17 aa, Homo sapiens
  CDR3 for beta chain variable domain of TCR clone 272340 (TRBV13, TRBJ2-3)
CASSLSRVAGGRNTQYF

SEQ ID NO: 544681 - protein, 11 aa, Homo sapiens
  CDR3 for alpha chain variable domain of TCR clone 272341 (TRAV1-2, TRAJ20)
CAVANDYKLSF

SEQ ID NO: 544682 - protein, 15 aa, Homo sapiens
  CDR3 for beta chain variable domain of TCR clone 272341 (TRBV27, TRBJ2-7)
CASSPQREGQREQYF

SEQ ID NO: 544683 - protein, 23 aa, Homo sapiens
  CDR3 for alpha chain variable domain of TCR clone 272342 (TRAV26-1, )
CIADNAGNNNIQNPDPAVYKLRD

SEQ ID NO: 544684 - protein, 13 aa, Homo sapiens
  CDR3 for beta chain variable domain of TCR clone 272342 (TRBV20-1, TRBJ1-1)
CSARGGGNTEAFF

SEQ ID NO: 544685 - protein, 15 aa, Homo sapiens
  CDR3 for alpha chain variable domain of TCR clone 272343 (TRAV12-1, TRAJ44)
CVVFVNTGTASKLTF

SEQ ID NO: 544686 - protein, 13 aa, Homo sapiens
  CDR3 for beta chain variable domain of TCR clone 272343 (TRBV9, TRBJ2-7)
CASSVAEYYEQYF

SEQ ID NO: 544687 - protein, 15 aa, Homo sapiens
  CDR3 for alpha chain variable domain of TCR clone 272344 (TRAV25, TRAJ52)
CAGTSGGTSYGKLTF

SEQ ID NO: 544688 - protein, 13 aa, Homo sapiens
  CDR3 for beta chain variable domain of TCR clone 272344 (TRBV6-5, TRBJ2-5)
CASSPQGGEAQYF

SEQ ID NO: 544689 - protein, 15 aa, Homo sapiens
  CDR3 for alpha chain variable domain of TCR clone 272345 (TRAV3, TRAJ22)
CAVRDRGGSARQVTF

SEQ ID NO: 544690 - protein, 14 aa, Homo sapiens
  CDR3 for beta chain variable domain of TCR clone 272345 (TRBV19, TRBJ2-1)
CASSRLASINEQFF

SEQ ID NO: 544691 - protein, 15 aa, Homo sapiens
  CDR3 for alpha chain variable domain of TCR clone 272346 (TRAV23/DV6, TRAJ30)
CAASSPESRDDKIIF

SEQ ID NO: 544692 - protein, 12 aa, Homo sapiens
  CDR3 for beta chain variable domain of TCR clone 272346 (TRBV19, TRBJ1-1)
CASGTGWTEAFF

SEQ ID NO: 544693 - protein, 18 aa, Homo sapiens
  CDR3 for alpha chain variable domain of TCR clone 272347 (TRAV26-2, TRAJ45)
CILRVDKYSGGGADGLTF

SEQ ID NO: 544694 - protein, 12 aa, Homo sapiens
  CDR3 for beta chain variable domain of TCR clone 272347 (TRBV11-2, TRBJ2-2)
CASSLGGGELFF

SEQ ID NO: 544695 - protein, 16 aa, Homo sapiens
  CDR3 for alpha chain variable domain of TCR clone 272348 (TRAV12-2, TRAJ6)
CAAPLAGSGGSYIPTF

SEQ ID NO: 544696 - protein, 15 aa, Homo sapiens
  CDR3 for beta chain variable domain of TCR clone 272348 (TRBV10-3, TRBJ2-1)
CAIRNGTSGHNEQFF

SEQ ID NO: 544697 - protein, 14 aa, Homo sapiens
  CDR3 for alpha chain variable domain of TCR clone 272349 (TRAV13-2, TRAJ17)
CAENSKAAGNKLTF

SEQ ID NO: 544698 - protein, 14 aa, Homo sapiens
  CDR3 for beta chain variable domain of TCR clone 272349 (TRBV19, TRBJ2-5)
CASSMTGQQETQYF

SEQ ID NO: 544699 - protein, 14 aa, Homo sapiens
  CDR3 for alpha chain variable domain of TCR clone 272350 (TRAV1-1, TRAJ28)
CAAPSGAGSYQLTF

SEQ ID NO: 544700 - protein, 14 aa, Homo sapiens
  CDR3 for beta chain variable domain of TCR clone 272350 (TRBV12-4, TRBJ1-1)
CASSLGTGGTEAFF

SEQ ID NO: 544701 - protein, 14 aa, Homo sapiens
  CDR3 for alpha chain variable domain of TCR clone 272351 (TRAV17, TRAJ4)
CATAPLGGHNKLMF

SEQ ID NO: 544702 - protein, 13 aa, Homo sapiens
  CDR3 for beta chain variable domain of TCR clone 272351 (TRBV12-4, TRBJ1-3)
CASSLASGNTIYF

SEQ ID NO: 544703 - protein, 13 aa, Homo sapiens
  CDR3 for alpha chain variable domain of TCR clone 272352 (TRAV9-2, TRAJ37)
CALHSSNTGKLIF

SEQ ID NO: 544704 - protein, 14 aa, Homo sapiens
  CDR3 for beta chain variable domain of TCR clone 272352 (TRBV11-2, TRBJ1-2)
CASSSGTANYGYTF

SEQ ID NO: 544705 - protein, 14 aa, Homo sapiens
  CDR3 for alpha chain variable domain of TCR clone 272353 (TRAV12-2, TRAJ13)
CAVKKTGGYQTVTF

SEQ ID NO: 544706 - protein, 15 aa, Homo sapiens
  CDR3 for beta chain variable domain of TCR clone 272353 (TRBV19, TRBJ1-6)
CASSTQGAVGSPLHF

SEQ ID NO: 544707 - protein, 13 aa, Homo sapiens
  CDR3 for alpha chain variable domain of TCR clone 272354 (TRAV13-1, TRAJ12)
CSKYMGSSYKLIF

SEQ ID NO: 544708 - protein, 12 aa, Homo sapiens
  CDR3 for beta chain variable domain of TCR clone 272354 (TRBV11-2, TRBJ2-2)
CASSLGGGELFF

SEQ ID NO: 544709 - protein, 14 aa, Homo sapiens
  CDR3 for alpha chain variable domain of TCR clone 272355 (TRAV23/DV6, TRAJ12)
CAASRMDSSYKLIF

SEQ ID NO: 544710 - protein, 16 aa, Homo sapiens
  CDR3 for beta chain variable domain of TCR clone 272355 (TRBV13, TRBJ2-5)
CASSRGAGIRQETQYF

SEQ ID NO: 544711 - protein, 14 aa, Homo sapiens
  CDR3 for alpha chain variable domain of TCR clone 272356 (TRAV13-1, TRAJ45)
CAATSGGGADGLTF

SEQ ID NO: 544712 - protein, 14 aa, Homo sapiens
  CDR3 for beta chain variable domain of TCR clone 272356 (TRBV7-2, TRBJ2-7)
CASRSQGAAYEQYF

SEQ ID NO: 544713 - protein, 16 aa, Homo sapiens
  CDR3 for alpha chain variable domain of TCR clone 272357 (TRAV16, TRAJ24)
CALSGGSTDSWGKLQF

SEQ ID NO: 544714 - protein, 15 aa, Homo sapiens
  CDR3 for beta chain variable domain of TCR clone 272357 (TRBV27, TRBJ2-1)
CASSNRGGSSNEQFF

SEQ ID NO: 544715 - protein, 18 aa, Homo sapiens
  CDR3 for alpha chain variable domain of TCR clone 272358 (TRAV8-3, TRAJ6)
CAVGAEHQEEATYLHLEE

SEQ ID NO: 544716 - protein, 13 aa, Homo sapiens
  CDR3 for beta chain variable domain of TCR clone 272358 (TRBV6-6, TRBJ2-7)
CSSDSGAGYEQYF

SEQ ID NO: 544717 - protein, 11 aa, Homo sapiens
  CDR3 for alpha chain variable domain of TCR clone 272359 (TRAV12-1, TRAJ34)
CVVNKGRELIF

SEQ ID NO: 544718 - protein, 14 aa, Homo sapiens
  CDR3 for beta chain variable domain of TCR clone 272359 (TRBV7-2, TRBJ1-1)
CASSFLTGTTEAFF

SEQ ID NO: 544719 - protein, 16 aa, Homo sapiens
  CDR3 for alpha chain variable domain of TCR clone 272360 (TRAV1-2, TRAJ10)
CAVRGVLTGGGNKLTF

SEQ ID NO: 544720 - protein, 13 aa, Homo sapiens
  CDR3 for beta chain variable domain of TCR clone 272360 (TRBV10-3, TRBJ2-7)
CASKLAVNYEQCF

SEQ ID NO: 544721 - protein, 15 aa, Homo sapiens
  CDR3 for alpha chain variable domain of TCR clone 272361 (TRAV17, TRAJ57)
CATGPSQGGAEKLVF

SEQ ID NO: 544722 - protein, 18 aa, Homo sapiens
  CDR3 for beta chain variable domain of TCR clone 272361 (TRBV7-9, TRBJ2-7)
CASSLTTSGSRTWYEQYF

SEQ ID NO: 544723 - protein, 13 aa, Homo sapiens
  CDR3 for alpha chain variable domain of TCR clone 272362 (TRAV20, TRAJ34)
CAVRSYNTDTLIF

SEQ ID NO: 544724 - protein, 12 aa, Homo sapiens
  CDR3 for beta chain variable domain of TCR clone 272362 (TRBV11-2, TRBJ2-1)
CASSPGNNEQFF

SEQ ID NO: 544725 - protein, 15 aa, Homo sapiens
  CDR3 for alpha chain variable domain of TCR clone 272363 (TRAV14/DV4, TRAJ33)
CAMREGRASNYRLIW

SEQ ID NO: 544726 - protein, 15 aa, Homo sapiens
  CDR3 for beta chain variable domain of TCR clone 272363 (TRBV5-5, TRBJ1-5)
CASSSTPGSNQPQHF

SEQ ID NO: 544727 - protein, 12 aa, Homo sapiens
  CDR3 for alpha chain variable domain of TCR clone 272364 (TRAV8-2, TRAJ45)
CVQGGGADGLTF

SEQ ID NO: 544728 - protein, 15 aa, Homo sapiens
  CDR3 for beta chain variable domain of TCR clone 272364 (TRBV5-1, TRBJ2-7)
CASSLMTSGSNEQHF

SEQ ID NO: 544729 - protein, 16 aa, Homo sapiens
  CDR3 for alpha chain variable domain of TCR clone 272365 (TRAV3, TRAJ5)
CAVRNLMDTGRRALTF

SEQ ID NO: 544730 - protein, 16 aa, Homo sapiens
  CDR3 for beta chain variable domain of TCR clone 272365 (TRBV12-5, TRBJ2-5)
CASGARTSGNKETQYF

SEQ ID NO: 544731 - protein, 18 aa, Homo sapiens
  CDR3 for alpha chain variable domain of TCR clone 272366 (TRAV8-6, TRAJ52)
CAVSRVGAGGTSYGKLTF

SEQ ID NO: 544732 - protein, 14 aa, Homo sapiens
  CDR3 for beta chain variable domain of TCR clone 272366 (TRBV7-2, TRBJ1-4)
CASSHSKTSEKLFF

SEQ ID NO: 544733 - protein, 14 aa, Homo sapiens
  CDR3 for alpha chain variable domain of TCR clone 272367 (TRAV25, TRAJ20)
CAGKGRWDDYKLSL

SEQ ID NO: 544734 - protein, 12 aa, Homo sapiens
  CDR3 for beta chain variable domain of TCR clone 272367 (TRBV12-5, TRBJ2-3)
CASQASTDTQYF

SEQ ID NO: 544735 - protein, 13 aa, Homo sapiens
  CDR3 for alpha chain variable domain of TCR clone 272368 (TRAV12-2, TRAJ40)
CREDPLGTYKYIF

SEQ ID NO: 544736 - protein, 15 aa, Homo sapiens
  CDR3 for beta chain variable domain of TCR clone 272368 (TRBV11-3, TRBJ2-3)
CASLKDGREGDTQYF

SEQ ID NO: 544737 - protein, 18 aa, Homo sapiens
  CDR3 for alpha chain variable domain of TCR clone 272369 (TRAV13-1, TRAJ52)
CAASKRSAGGTSYGKLTF

SEQ ID NO: 544738 - protein, 13 aa, Homo sapiens
  CDR3 for beta chain variable domain of TCR clone 272369 (TRBV20-1, TRBJ1-1)
CSARAGGNTEAFF

SEQ ID NO: 544739 - protein, 12 aa, Homo sapiens
  CDR3 for alpha chain variable domain of TCR clone 272370 (TRAV17, TRAJ4)
CATDGGYNKMIF

SEQ ID NO: 544740 - protein, 13 aa, Homo sapiens
  CDR3 for beta chain variable domain of TCR clone 272370 (TRBV29-1, TRBJ2-2)
CSTTGVNTGELFF

SEQ ID NO: 544741 - protein, 14 aa, Homo sapiens
  CDR3 for alpha chain variable domain of TCR clone 272371 (TRAV13-1, TRAJ31)
CAASSRPNNARLMI

SEQ ID NO: 544742 - protein, 15 aa, Homo sapiens
  CDR3 for beta chain variable domain of TCR clone 272371 (TRBV4-2, TRBJ2-4)
CASSPLGAAKNIQYF

SEQ ID NO: 544743 - protein, 13 aa, Homo sapiens
  CDR3 for alpha chain variable domain of TCR clone 272372 (TRAV2, TRAJ40)
CAVVTSGTYKYIF

SEQ ID NO: 544744 - protein, 13 aa, Homo sapiens
  CDR3 for beta chain variable domain of TCR clone 272372 (TRBV7-9, TRBJ2-5)
CASLPSGRETQYY

SEQ ID NO: 544745 - protein, 16 aa, Homo sapiens
  CDR3 for alpha chain variable domain of TCR clone 272373 (TRAV6, TRAJ43)
CARHKPRFGAGTRLTV

SEQ ID NO: 544746 - protein, 16 aa, Homo sapiens
  CDR3 for beta chain variable domain of TCR clone 272373 (TRBV6-5, TRBJ2-1)
CASGYSLAGGYNEQFF

SEQ ID NO: 544747 - protein, 11 aa, Homo sapiens
  CDR3 for alpha chain variable domain of TCR clone 272374 (TRAV21, TRAJ49)
CAVSFGNQFYF

SEQ ID NO: 544748 - protein, 14 aa, Homo sapiens
  CDR3 for beta chain variable domain of TCR clone 272374 (TRBV4-2, TRBJ2-1)
CASGLDRAYNEQFF

SEQ ID NO: 544749 - protein, 14 aa, Homo sapiens
  CDR3 for alpha chain variable domain of TCR clone 272375 (TRAV3, TRAJ8)
CAALMNTGVQKLVF

SEQ ID NO: 544750 - protein, 17 aa, Homo sapiens
  CDR3 for beta chain variable domain of TCR clone 272375 (TRBV13, TRBJ2-3)
CASSLSRVAGGRNTQYF

SEQ ID NO: 544751 - protein, 10 aa, Homo sapiens
  CDR3 for alpha chain variable domain of TCR clone 272376 (TRAV1-2, TRAJ20)
CACNDYKLSF

SEQ ID NO: 544752 - protein, 16 aa, Homo sapiens
  CDR3 for beta chain variable domain of TCR clone 272376 (TRBV20-1, TRBJ2-1)
CSARDLKQGMNNEQSF

SEQ ID NO: 544753 - protein, 13 aa, Homo sapiens
  CDR3 for alpha chain variable domain of TCR clone 272377 (TRAV12-2, TRAJ20)
CAVYPSNDYKLSF

SEQ ID NO: 544754 - protein, 15 aa, Homo sapiens
  CDR3 for beta chain variable domain of TCR clone 272377 (TRBV7-2, TRBJ1-2)
CASSPRAGWNYGYTF

SEQ ID NO: 544755 - protein, 15 aa, Homo sapiens
  CDR3 for alpha chain variable domain of TCR clone 272378 (TRAV17, TRAJ57)
CSTGPSQCGSEKLVF

SEQ ID NO: 544756 - protein, 16 aa, Homo sapiens
  CDR3 for beta chain variable domain of TCR clone 272378 (TRBV12-4, TRBJ1-5)
CASSRPVGGSNQPQHF

SEQ ID NO: 544757 - protein, 15 aa, Homo sapiens
  CDR3 for alpha chain variable domain of TCR clone 272379 (TRAV26-2, TRAJ45)
CILRDRVDQEEVLTD

SEQ ID NO: 544758 - protein, 15 aa, Homo sapiens
  CDR3 for beta chain variable domain of TCR clone 272379 (TRBV7-6, TRBJ2-5)
CASSKPTGPQETQFF

SEQ ID NO: 544759 - protein, 15 aa, Homo sapiens
  CDR3 for alpha chain variable domain of TCR clone 272380 (TRAV3, TRAJ22)
CAVRYRGGSARQLTF

SEQ ID NO: 544760 - protein, 14 aa, Homo sapiens
  CDR3 for beta chain variable domain of TCR clone 272380 (TRBV25-1, TRBJ1-1)
CASTHLGGNTEAFF

SEQ ID NO: 544761 - protein, 18 aa, Homo sapiens
  CDR3 for alpha chain variable domain of TCR clone 272381 (TRAV21, TRAJ52)
CAVRPSPAGGTSYGKLTF

SEQ ID NO: 544762 - protein, 18 aa, Homo sapiens
  CDR3 for beta chain variable domain of TCR clone 272381 (TRBV11-2, TRBJ2-6)
CASSLNPFLGTGAHVLPF

SEQ ID NO: 544763 - protein, 14 aa, Homo sapiens
  CDR3 for alpha chain variable domain of TCR clone 272382 (TRAV23/DV6, TRAJ22)
CAASVSGSARQLTF

SEQ ID NO: 544764 - protein, 16 aa, Homo sapiens
  CDR3 for beta chain variable domain of TCR clone 272382 (TRBV19, TRBJ2-2)
CARSFPGQGLAGELFF

SEQ ID NO: 544765 - protein, 16 aa, Homo sapiens
  CDR3 for alpha chain variable domain of TCR clone 272383 (TRAV23/DV6, TRAJ9)
CAASIGGNTGGVKTIF

SEQ ID NO: 544766 - protein, 15 aa, Homo sapiens
  CDR3 for beta chain variable domain of TCR clone 272383 (TRBV6-3, TRBJ2-7)
CASSSPGTVLYEQYF

SEQ ID NO: 544767 - protein, 12 aa, Homo sapiens
  CDR3 for alpha chain variable domain of TCR clone 272384 (TRAV3, TRAJ20)
CAVRDGDYKLSF

SEQ ID NO: 544768 - protein, 16 aa, Homo sapiens
  CDR3 for beta chain variable domain of TCR clone 272384 (TRBV2, TRBJ2-1)
CASSANPRDWQAEQFC

SEQ ID NO: 544769 - protein, 12 aa, Homo sapiens
  CDR3 for alpha chain variable domain of TCR clone 272385 (TRAV1-1, TRAJ8)
CAGGTVFQKLVF

SEQ ID NO: 544770 - protein, 13 aa, Homo sapiens
  CDR3 for beta chain variable domain of TCR clone 272385 (TRBV20-1, TRBJ1-6)
CSARAPPEGPLHF

SEQ ID NO: 544771 - protein, 13 aa, Homo sapiens
  CDR3 for alpha chain variable domain of TCR clone 272386 (TRAV1-2, TRAJ9)
CAALNTGGFKTIF

SEQ ID NO: 544772 - protein, 12 aa, Homo sapiens
  CDR3 for beta chain variable domain of TCR clone 272386 (TRBV14, TRBJ2-7)
CASSRLKGEQYF

SEQ ID NO: 544773 - protein, 14 aa, Homo sapiens
  CDR3 for alpha chain variable domain of TCR clone 272387 (TRAV2, TRAJ9)
CAVEDRSGGSKTIF

SEQ ID NO: 544774 - protein, 17 aa, Homo sapiens
  CDR3 for beta chain variable domain of TCR clone 272387 (TRBV24-1, TRBJ2-1)
CATSDVSTSGTYNEQFF

SEQ ID NO: 544775 - protein, 13 aa, Homo sapiens
  CDR3 for alpha chain variable domain of TCR clone 272388 (TRAV1-2, TRAJ39)
CAVKDNAGNMLTF

SEQ ID NO: 544776 - protein, 14 aa, Homo sapiens
  CDR3 for beta chain variable domain of TCR clone 272388 (TRBV19, TRBJ2-1)
CASPTFVLSGEQFF

SEQ ID NO: 544777 - protein, 12 aa, Homo sapiens
  CDR3 for alpha chain variable domain of TCR clone 272389 (TRAV13-1, TRAJ27)
CAAHTNAGKSTF

SEQ ID NO: 544778 - protein, 22 aa, Homo sapiens
  CDR3 for beta chain variable domain of TCR clone 272389 (TRBV7-9, TRBJ1-6)
CASSSPGRGNSPLLWERDQAHC

SEQ ID NO: 544779 - protein, 14 aa, Homo sapiens
  CDR3 for alpha chain variable domain of TCR clone 272390 (TRAV12-1, TRAJ13)
CVVIDSGGYQKVTF

SEQ ID NO: 544780 - protein, 14 aa, Homo sapiens
  CDR3 for beta chain variable domain of TCR clone 272390 (TRBV4-1, TRBJ2-2)
SASSQAVNTGELFF

SEQ ID NO: 544781 - protein, 11 aa, Homo sapiens
  CDR3 for alpha chain variable domain of TCR clone 272391 (TRAV27, TRAJ20)
CAGLDDYKLSF

SEQ ID NO: 544782 - protein, 14 aa, Homo sapiens
  CDR3 for beta chain variable domain of TCR clone 272391 (TRBV6-1, TRBJ1-1)
CASTPLQMNTEAFF

SEQ ID NO: 544783 - protein, 13 aa, Homo sapiens
  CDR3 for alpha chain variable domain of TCR clone 272392 (TRAV21, TRAJ11)
CAVPNSGYSTLTF

SEQ ID NO: 544784 - protein, 15 aa, Homo sapiens
  CDR3 for beta chain variable domain of TCR clone 272392 (TRBV28, TRBJ1-3)
CASSMGWASGNTIYF

SEQ ID NO: 544785 - protein, 13 aa, Homo sapiens
  CDR3 for alpha chain variable domain of TCR clone 272393 (TRAV17, TRAJ15)
CATANQAGTALIF

SEQ ID NO: 544786 - protein, 13 aa, Homo sapiens
  CDR3 for beta chain variable domain of TCR clone 272393 (TRBV7-3, TRBJ1-1)
RASSQDWGAEAFF

SEQ ID NO: 544787 - protein, 16 aa, Homo sapiens
  CDR3 for alpha chain variable domain of TCR clone 272394 (TRAV3, TRAJ37)
CAVRQHGSGNTGKLIF

SEQ ID NO: 544788 - protein, 14 aa, Homo sapiens
  CDR3 for beta chain variable domain of TCR clone 272394 (TRBV25-1, TRBJ1-1)
CASTHLGGNAEAFF

SEQ ID NO: 544789 - protein, 14 aa, Homo sapiens
  CDR3 for alpha chain variable domain of TCR clone 272395 (TRAV13-1, TRAJ45)
CAAIGGGGADGLTF

SEQ ID NO: 544790 - protein, 16 aa, Homo sapiens
  CDR3 for beta chain variable domain of TCR clone 272395 (TRBV7-2, TRBJ1-1)
CASSLGTGWTNTEAFF

SEQ ID NO: 544791 - protein, 10 aa, Homo sapiens
  CDR3 for alpha chain variable domain of TCR clone 272396 (TRAV2, TRAJ34)
CAVVNDKLIF

SEQ ID NO: 544792 - protein, 20 aa, Homo sapiens
  CDR3 for beta chain variable domain of TCR clone 272396 (TRBV19, TRBJ2-1)
CACSISRTVTSTRLNNEQFF

SEQ ID NO: 544793 - protein, 14 aa, Homo sapiens
  CDR3 for alpha chain variable domain of TCR clone 272397 (TRAV2, TRAJ37)
CAVDFTSSTGKLIF

SEQ ID NO: 544794 - protein, 15 aa, Homo sapiens
  CDR3 for beta chain variable domain of TCR clone 272397 (TRBV11-2, TRBJ1-6)
CASTGFGTAVSPLHF

SEQ ID NO: 544795 - protein, 14 aa, Homo sapiens
  CDR3 for alpha chain variable domain of TCR clone 272398 (TRAV17, TRAJ56)
CATVPAGANSKLTF

SEQ ID NO: 544796 - protein, 13 aa, Homo sapiens
  CDR3 for beta chain variable domain of TCR clone 272398 (TRBV12-4, TRBJ2-2)
CASSIRGSGELFF

SEQ ID NO: 544797 - protein, 13 aa, Homo sapiens
  CDR3 for alpha chain variable domain of TCR clone 272399 (TRAV27, TRAJ54)
CAGAGQGAQKLVF

SEQ ID NO: 544798 - protein, 15 aa, Homo sapiens
  CDR3 for beta chain variable domain of TCR clone 272399 (TRBV18, TRBJ2-6)
CASSPSCAGANVLTF

SEQ ID NO: 544799 - protein, 15 aa, Homo sapiens
  CDR3 for alpha chain variable domain of TCR clone 272400 (TRAV27, TRAJ38)
CAARRNAGNNRKLIW

SEQ ID NO: 544800 - protein, 17 aa, Homo sapiens
  CDR3 for beta chain variable domain of TCR clone 272400 (TRBV13, TRBJ2-3)
CASRLSRVAGGRNTQYF

SEQ ID NO: 544801 - protein, 13 aa, Homo sapiens
  CDR3 for alpha chain variable domain of TCR clone 272401 (TRAV27, TRAJ49)
CAPRPYTGNQFYF

SEQ ID NO: 544802 - protein, 16 aa, Homo sapiens
  CDR3 for beta chain variable domain of TCR clone 272401 (TRBV5-1, TRBJ2-3)
CASSLGLAVYTDTQYF

SEQ ID NO: 544803 - protein, 14 aa, Homo sapiens
  CDR3 for alpha chain variable domain of TCR clone 272402 (TRAV26-1, TRAJ38)
CIADNASNNRKLIW

SEQ ID NO: 544804 - protein, 13 aa, Homo sapiens
  CDR3 for beta chain variable domain of TCR clone 272402 (TRBV20-1, TRBJ1-1)
CSARGGGNTEAFL

SEQ ID NO: 544805 - protein, 11 aa, Homo sapiens
  CDR3 for alpha chain variable domain of TCR clone 272403 (TRAV12-3, TRAJ27)
CAMANAGKSTF

SEQ ID NO: 544806 - protein, 12 aa, Homo sapiens
  CDR3 for beta chain variable domain of TCR clone 272403 (TRBV20-1, TRBJ2-1)
CSARLGTDEQFF

SEQ ID NO: 544807 - protein, 15 aa, Homo sapiens
  CDR3 for alpha chain variable domain of TCR clone 272404 (TRAV8-4, TRAJ37)
CAVTYGSSNTGKLIF

SEQ ID NO: 544808 - protein, 13 aa, Homo sapiens
  CDR3 for beta chain variable domain of TCR clone 272404 (TRBV12-4, TRBJ2-5)
CASSWGGSRTQYF

SEQ ID NO: 544809 - protein, 14 aa, Homo sapiens
  CDR3 for alpha chain variable domain of TCR clone 272405 (TRAV12-2, TRAJ33)
CAVKRARSNYQLIW

SEQ ID NO: 544810 - protein, 14 aa, Homo sapiens
  CDR3 for beta chain variable domain of TCR clone 272405 (TRBV13, TRBJ2-7)
CASSLKGAIYEQYF

SEQ ID NO: 544811 - protein, 15 aa, Homo sapiens
  CDR3 for alpha chain variable domain of TCR clone 272406 (TRAV17, TRAJ57)
CATGPSQGGSEKLVF

SEQ ID NO: 544812 - protein, 15 aa, Homo sapiens
  CDR3 for beta chain variable domain of TCR clone 272406 (TRBV27, TRBJ2-3)
CASSLGLAATDTQYF

SEQ ID NO: 544813 - protein, 14 aa, Homo sapiens
  CDR3 for alpha chain variable domain of TCR clone 272407 (TRAV29/DV5, TRAJ45)
CAASFRGGADGLTF

SEQ ID NO: 544814 - protein, 11 aa, Homo sapiens
  CDR3 for beta chain variable domain of TCR clone 272407 (TRBV11-2, TRBJ2-2)
CASSLPGELFI

SEQ ID NO: 544815 - protein, 13 aa, Homo sapiens
  CDR3 for alpha chain variable domain of TCR clone 272408 (TRAV17, TRAJ40)
CAGAQGGTYKYIF

SEQ ID NO: 544816 - protein, 16 aa, Homo sapiens
  CDR3 for beta chain variable domain of TCR clone 272408 (TRBV11-2, TRBJ1-2)
CASSLDTGGADYGYTF

SEQ ID NO: 544817 - protein, 11 aa, Homo sapiens
  CDR3 for alpha chain variable domain of TCR clone 272409 (TRAV2, TRAJ23)
CAVETRGKLIF

SEQ ID NO: 544818 - protein, 15 aa, Homo sapiens
  CDR3 for beta chain variable domain of TCR clone 272409 (TRBV19, TRBJ1-2)
CASSVGQVLNYGYTF

SEQ ID NO: 544819 - protein, 11 aa, Homo sapiens
  CDR3 for alpha chain variable domain of TCR clone 272410 (TRAV3, TRAJ13)
CAVTSYQKVTF

SEQ ID NO: 544820 - protein, 15 aa, Homo sapiens
  CDR3 for beta chain variable domain of TCR clone 272410 (TRBV7-9, TRBJ2-7)
CASSCSGLAVYEQYF

SEQ ID NO: 544821 - protein, 16 aa, Homo sapiens
  CDR3 for alpha chain variable domain of TCR clone 272411 (TRAV26-1, TRAJ32)
CIVRTNYGGATNKLIF

SEQ ID NO: 544822 - protein, 22 aa, Homo sapiens
  CDR3 for beta chain variable domain of TCR clone 272411 (TRBV6-1, TRBJ1-3)
CASVQGGGWKHHIFWRGKLAHC

SEQ ID NO: 544823 - protein, 14 aa, Homo sapiens
  CDR3 for alpha chain variable domain of TCR clone 272412 (TRAV13-1, TRAJ13)
CAASRVGGYQKVTF

SEQ ID NO: 544824 - protein, 17 aa, Homo sapiens
  CDR3 for beta chain variable domain of TCR clone 272412 (TRBV15, TRBJ1-5)
CATSRAPPGARNQPQHF

SEQ ID NO: 544825 - protein, 14 aa, Homo sapiens
  CDR3 for alpha chain variable domain of TCR clone 272413 (TRAV1-2, TRAJ16)
CAVNRFSDGPKLLF

SEQ ID NO: 544826 - protein, 16 aa, Homo sapiens
  CDR3 for beta chain variable domain of TCR clone 272413 (TRBV27, TRBJ2-2)
CASSFRGLVRTGELFF

SEQ ID NO: 544827 - protein, 11 aa, Homo sapiens
  CDR3 for alpha chain variable domain of TCR clone 272414 (TRAV12-1, TRAJ21)
CVVNNFNKFYF

SEQ ID NO: 544828 - protein, 14 aa, Homo sapiens
  CDR3 for beta chain variable domain of TCR clone 272414 (TRBV15, TRBJ1-5)
CATSRGQSNQPQHF

SEQ ID NO: 544829 - protein, 14 aa, Homo sapiens
  CDR3 for alpha chain variable domain of TCR clone 272415 (TRAV12-1, TRAJ10)
CVVNSAGGGNKLTF

SEQ ID NO: 544830 - protein, 17 aa, Homo sapiens
  CDR3 for beta chain variable domain of TCR clone 272415 (TRBV6-4, TRBJ2-4)
CASSDSRDRVPKNIQYF

SEQ ID NO: 544831 - protein, 16 aa, Homo sapiens
  CDR3 for alpha chain variable domain of TCR clone 272416 (TRAV12-1, TRAJ53)
CVVTSVAGGSNYTMTF

SEQ ID NO: 544832 - protein, 17 aa, Homo sapiens
  CDR3 for beta chain variable domain of TCR clone 272416 (TRBV7-3, TRBJ2-3)
CASSPRGQGYGTDTQYF

SEQ ID NO: 544833 - protein, 16 aa, Homo sapiens
  CDR3 for alpha chain variable domain of TCR clone 272417 (TRAV26-1, TRAJ36)
CIVRAPDQTGANNLFF

SEQ ID NO: 544834 - protein, 15 aa, Homo sapiens
  CDR3 for beta chain variable domain of TCR clone 272417 (TRBV19, TRBJ2-4)
CASRGPRRGENIQYF

SEQ ID NO: 544835 - protein, 14 aa, Homo sapiens
  CDR3 for alpha chain variable domain of TCR clone 272418 (TRAV2, TRAJ9)
CAVEDQSGGFKTIF

SEQ ID NO: 544836 - protein, 18 aa, Homo sapiens
  CDR3 for beta chain variable domain of TCR clone 272418 (TRBV11-2, TRBJ2-3)
CASSLGGASRGAPNTQYF

SEQ ID NO: 544837 - protein, 11 aa, Homo sapiens
  CDR3 for alpha chain variable domain of TCR clone 272419 (TRAV2, TRAJ13)
CASGGYQKVTF

SEQ ID NO: 544838 - protein, 14 aa, Homo sapiens
  CDR3 for beta chain variable domain of TCR clone 272419 (TRBV19, TRBJ2-1)
CASPTFVLSGEEFF

SEQ ID NO: 544839 - protein, 13 aa, Homo sapiens
  CDR3 for alpha chain variable domain of TCR clone 272420 (TRAV12-1, TRAJ26)
CVVRRNYGQNFVF

SEQ ID NO: 544840 - protein, 15 aa, Homo sapiens
  CDR3 for beta chain variable domain of TCR clone 272420 (TRBV7-2, TRBJ1-2)
CASSPRAGWNYGYTF

SEQ ID NO: 544841 - protein, 13 aa, Homo sapiens
  CDR3 for alpha chain variable domain of TCR clone 272421 (TRAV8-3, TRAJ4)
WVVYLGGYNKLIF

SEQ ID NO: 544842 - protein, 14 aa, Homo sapiens
  CDR3 for beta chain variable domain of TCR clone 272421 (TRBV7-9, TRBJ2-3)
CASSLEDGTDTQYF

SEQ ID NO: 544843 - protein, 13 aa, Homo sapiens
  CDR3 for alpha chain variable domain of TCR clone 272422 (TRAV1-2, TRAJ9)
CAALNTGGFKTIF

SEQ ID NO: 544844 - protein, 13 aa, Homo sapiens
  CDR3 for beta chain variable domain of TCR clone 272422 (TRBV7-9, TRBJ1-2)
CASSLKQNYGYNF

SEQ ID NO: 544845 - protein, 16 aa, Homo sapiens
  CDR3 for alpha chain variable domain of TCR clone 272423 (TRAV17, TRAJ35)
CATAEGGIGFGNVLHC

SEQ ID NO: 544846 - protein, 14 aa, Homo sapiens
  CDR3 for beta chain variable domain of TCR clone 272423 (TRBV24-1, TRBJ1-1)
CATSIPRGDTEAFF

SEQ ID NO: 544847 - protein, 15 aa, Homo sapiens
  CDR3 for alpha chain variable domain of TCR clone 272424 (TRAV29/DV5, TRAJ42)
CAAKTVGGSQGNLIF

SEQ ID NO: 544848 - protein, 12 aa, Homo sapiens
  CDR3 for beta chain variable domain of TCR clone 272424 (TRBV11-2, TRBJ2-1)
CASSPGNNEQFF

SEQ ID NO: 544849 - protein, 12 aa, Homo sapiens
  CDR3 for alpha chain variable domain of TCR clone 272425 (TRAV25, TRAJ11)
CAGASGYSTLTF

SEQ ID NO: 544850 - protein, 16 aa, Homo sapiens
  CDR3 for beta chain variable domain of TCR clone 272425 (TRBV3-1, TRBJ2-5)
CASSQDWASGQETQYF

SEQ ID NO: 544851 - protein, 13 aa, Homo sapiens
  CDR3 for alpha chain variable domain of TCR clone 272426 (TRAV8-1, TRAJ34)
CAERPYNTDKLIF

SEQ ID NO: 544852 - protein, 15 aa, Homo sapiens
  CDR3 for beta chain variable domain of TCR clone 272426 (TRBV7-9, TRBJ1-3)
CASSLRSGSGNTMYF

SEQ ID NO: 544853 - protein, 13 aa, Homo sapiens
  CDR3 for alpha chain variable domain of TCR clone 272427 (TRAV21, TRAJ27)
CAARPGNAGKSSF

SEQ ID NO: 544854 - protein, 15 aa, Homo sapiens
  CDR3 for beta chain variable domain of TCR clone 272427 (TRBV20-1, TRBJ2-7)
CSAGDRVSGMDEQYF

SEQ ID NO: 544855 - protein, 17 aa, Homo sapiens
  CDR3 for alpha chain variable domain of TCR clone 272428 (TRAV3, TRAJ12)
CAVRDGGRMDSSYKLIF

SEQ ID NO: 544856 - protein, 15 aa, Homo sapiens
  CDR3 for beta chain variable domain of TCR clone 272428 (TRBV6-5, TRBJ2-5)
CASSPLAEGIETQYF

SEQ ID NO: 544857 - protein, 14 aa, Homo sapiens
  CDR3 for alpha chain variable domain of TCR clone 272429 (TRAV1-2, TRAJ16)
CAVNRFSDGQKLLF

SEQ ID NO: 544858 - protein, 16 aa, Homo sapiens
  CDR3 for beta chain variable domain of TCR clone 272429 (TRBV19, TRBJ2-1)
CARSKAGPSSYNEQFF

SEQ ID NO: 544859 - protein, 14 aa, Homo sapiens
  CDR3 for alpha chain variable domain of TCR clone 272430 (TRAV23/DV6, TRAJ6)
RAAIPSGGSYIPTF

SEQ ID NO: 544860 - protein, 17 aa, Homo sapiens
  CDR3 for beta chain variable domain of TCR clone 272430 (TRBV7-2, TRBJ2-3)
CASSLGGRAAWRDTQYF

SEQ ID NO: 544861 - protein, 13 aa, Homo sapiens
  CDR3 for alpha chain variable domain of TCR clone 272431 (TRAV21, TRAJ24)
GLMTTDSWGKLQF

SEQ ID NO: 544862 - protein, 12 aa, Homo sapiens
  CDR3 for beta chain variable domain of TCR clone 272431 (TRBV11-2, TRBJ2-7)
CASSPPANEQYF

SEQ ID NO: 544863 - protein, 17 aa, Homo sapiens
  CDR3 for alpha chain variable domain of TCR clone 272432 (TRAV26-2, TRAJ28)
CILRPLLIVAGSYQLTF

SEQ ID NO: 544864 - protein, 14 aa, Homo sapiens
  CDR3 for beta chain variable domain of TCR clone 272432 (TRBV25-1, TRBJ1-1)
CASTHLGGNTEAFF

SEQ ID NO: 544865 - protein, 15 aa, Homo sapiens
  CDR3 for alpha chain variable domain of TCR clone 272433 (TRAV14/DV4, TRAJ26)
CAMREGQNYGQNFVF

SEQ ID NO: 544866 - protein, 13 aa, Homo sapiens
  CDR3 for beta chain variable domain of TCR clone 272433 (TRBV24-1, TRBJ2-2)
CATSDWSTGELFV

SEQ ID NO: 544867 - protein, 16 aa, Homo sapiens
  CDR3 for alpha chain variable domain of TCR clone 272434 (TRAV30, TRAJ24)
CGTEIVDADSWGKFQF

SEQ ID NO: 544868 - protein, 14 aa, Homo sapiens
  CDR3 for beta chain variable domain of TCR clone 272434 (TRBV12-5, TRBJ2-5)
CASGLRTHQETQYC

SEQ ID NO: 544869 - protein, 11 aa, Homo sapiens
  CDR3 for alpha chain variable domain of TCR clone 272435 (TRAV35, TRAJ30)
CAGPGDDKIIF

SEQ ID NO: 544870 - protein, 18 aa, Homo sapiens
  CDR3 for beta chain variable domain of TCR clone 272435 (TRBV7-6, TRBJ2-1)
CASSTRTSGMSSYNEQFF

SEQ ID NO: 544871 - protein, 13 aa, Homo sapiens
  CDR3 for alpha chain variable domain of TCR clone 272436 (TRAV8-1, TRAJ30)
CAVIMNRDDKIFF

SEQ ID NO: 544872 - protein, 14 aa, Homo sapiens
  CDR3 for beta chain variable domain of TCR clone 272436 (TRBV7-2, TRBJ1-6)
CASSLQGANSPLHF

SEQ ID NO: 544873 - protein, 18 aa, Homo sapiens
  CDR3 for alpha chain variable domain of TCR clone 272437 (TRAV13-1, TRAJ52)
CAAKNPNAGGTSYGKLTF

SEQ ID NO: 544874 - protein, 18 aa, Homo sapiens
  CDR3 for beta chain variable domain of TCR clone 272437 (TRBV4-1, TRBJ1-4)
CASSPRTGGAWTSEKLFF

SEQ ID NO: 544875 - protein, 13 aa, Homo sapiens
  CDR3 for alpha chain variable domain of TCR clone 272438 (TRAV13-1, TRAJ21)
CAASIYNFNKFYF

SEQ ID NO: 544876 - protein, 12 aa, Homo sapiens
  CDR3 for beta chain variable domain of TCR clone 272438 (TRBV11-2, TRBJ2-1)
CASSPGNNEQLF

SEQ ID NO: 544877 - protein, 14 aa, Homo sapiens
  CDR3 for alpha chain variable domain of TCR clone 272439 (TRAV13-1, TRAJ44)
CAAKATGTASKLTF

SEQ ID NO: 544878 - protein, 15 aa, Homo sapiens
  CDR3 for beta chain variable domain of TCR clone 272439 (TRBV19, TRBJ2-1)
CASIKGRGPYNEQFF

SEQ ID NO: 544879 - protein, 15 aa, Homo sapiens
  CDR3 for alpha chain variable domain of TCR clone 272440 (TRAV8-3, TRAJ45)
CASSYSGGGADGLTF

SEQ ID NO: 544880 - protein, 16 aa, Homo sapiens
  CDR3 for beta chain variable domain of TCR clone 272440 (TRBV12-4, TRBJ2-5)
CASSFFVRGRQETQYF

SEQ ID NO: 544881 - protein, 12 aa, Homo sapiens
  CDR3 for alpha chain variable domain of TCR clone 272441 (TRAV21, TRAJ8)
CAVNTGFHKLVF

SEQ ID NO: 544882 - protein, 13 aa, Homo sapiens
  CDR3 for beta chain variable domain of TCR clone 272441 (TRBV6-3, TRBJ2-1)
CASSYDNYNDQFF

SEQ ID NO: 544883 - protein, 14 aa, Homo sapiens
  CDR3 for alpha chain variable domain of TCR clone 272442 (TRAV26-1, TRAJ38)
CITDNAGNNRKLIW

SEQ ID NO: 544884 - protein, 13 aa, Homo sapiens
  CDR3 for beta chain variable domain of TCR clone 272442 (TRBV7-9, TRBJ1-2)
CASSLKQNYGYTF

SEQ ID NO: 544885 - protein, 18 aa, Homo sapiens
  CDR3 for alpha chain variable domain of TCR clone 272443 (TRAV1-1, TRAJ42)
CAVSPSAFYGGSQGNLIF

SEQ ID NO: 544886 - protein, 14 aa, Homo sapiens
  CDR3 for beta chain variable domain of TCR clone 272443 (TRBV4-1, TRBJ2-2)
CASSQAVNTGELFF

SEQ ID NO: 544887 - protein, 16 aa, Homo sapiens
  CDR3 for alpha chain variable domain of TCR clone 272444 (TRAV17, TRAJ52)
CATGIIGGTSYGKLTF

SEQ ID NO: 544888 - protein, 11 aa, Homo sapiens
  CDR3 for beta chain variable domain of TCR clone 272444 (TRBV7-3, TRBJ2-1)
CHSFINNEQFF

SEQ ID NO: 544889 - protein, 13 aa, Homo sapiens
  CDR3 for alpha chain variable domain of TCR clone 272445 (TRAV1-2, TRAJ12)
CAVSMDSSYKLIF

SEQ ID NO: 544890 - protein, 15 aa, Homo sapiens
  CDR3 for beta chain variable domain of TCR clone 272445 (TRBV27, TRBJ2-5)
CASSLIPSGGETQYY

SEQ ID NO: 544891 - protein, 12 aa, Homo sapiens
  CDR3 for alpha chain variable domain of TCR clone 272446 (TRAV13-2, TRAJ8)
CAPWLGFQKLVF

SEQ ID NO: 544892 - protein, 14 aa, Homo sapiens
  CDR3 for beta chain variable domain of TCR clone 272446 (TRBV7-2, TRBJ2-7)
CASSLYPGRYEQYF

SEQ ID NO: 544893 - protein, 15 aa, Homo sapiens
  CDR3 for alpha chain variable domain of TCR clone 272447 (TRAV35, TRAJ58)
YAGRRQETSGSRLTF

SEQ ID NO: 544894 - protein, 11 aa, Homo sapiens
  CDR3 for beta chain variable domain of TCR clone 272447 (TRBV11-2, TRBJ1-1)
CASSINTEAFF

SEQ ID NO: 544895 - protein, 16 aa, Homo sapiens
  CDR3 for alpha chain variable domain of TCR clone 272448 (TRAV12-3, TRAJ53)
CAMSPGSGGSNYKLTF

SEQ ID NO: 544896 - protein, 20 aa, Homo sapiens
  CDR3 for beta chain variable domain of TCR clone 272448 (TRBV7-8, TRBJ2-2)
CANSHLFPGPTIHNTGELFF

SEQ ID NO: 544897 - protein, 15 aa, Homo sapiens
  CDR3 for alpha chain variable domain of TCR clone 272449 (TRAV3, TRAJ20)
CAVRDIKLSEYKLSF

SEQ ID NO: 544898 - protein, 15 aa, Homo sapiens
  CDR3 for beta chain variable domain of TCR clone 272449 (TRBV7-9, TRBJ1-6)
CASSSPGRGNSPLHV

SEQ ID NO: 544899 - protein, 14 aa, Homo sapiens
  CDR3 for alpha chain variable domain of TCR clone 272450 (TRAV26-1, TRAJ54)
CIVRRTQGAQKLVF

SEQ ID NO: 544900 - protein, 16 aa, Homo sapiens
  CDR3 for beta chain variable domain of TCR clone 272450 (TRBV13, TRBJ2-3)
CQRPLQGSGGRNTQYF

SEQ ID NO: 544901 - protein, 13 aa, Homo sapiens
  CDR3 for alpha chain variable domain of TCR clone 272451 (TRAV8-3, TRAJ36)
CAVGAPGANNLFF

SEQ ID NO: 544902 - protein, 13 aa, Homo sapiens
  CDR3 for beta chain variable domain of TCR clone 272451 (TRBV12-4, TRBJ1-2)
CASSLRQGKGYTF

SEQ ID NO: 544903 - protein, 13 aa, Homo sapiens
  CDR3 for alpha chain variable domain of TCR clone 272452 (TRAV8-3, TRAJ43)
CAVVPYNNNDMRF

SEQ ID NO: 544904 - protein, 16 aa, Homo sapiens
  CDR3 for beta chain variable domain of TCR clone 272452 (TRBV7-2, TRBJ2-5)
CPSSPFPTGGEETQYF

SEQ ID NO: 544905 - protein, 21 aa, Homo sapiens
  CDR3 for alpha chain variable domain of TCR clone 272453 (TRAV8-3, TRAJ10)
CAVGHTHGRRKQTHLWDRQSA

SEQ ID NO: 544906 - protein, 10 aa, Homo sapiens
  CDR3 for beta chain variable domain of TCR clone 272453 (TRBV20-1, TRBJ2-5)
CSARFETQYF

SEQ ID NO: 544907 - protein, 10 aa, Homo sapiens
  CDR3 for alpha chain variable domain of TCR clone 272454 (TRAV14/DV4, TRAJ48)
CAPRREKLTF

SEQ ID NO: 544908 - protein, 15 aa, Homo sapiens
  CDR3 for beta chain variable domain of TCR clone 272454 (TRBV9, TRBJ1-6)
CASSVAGTGDSPLHF

SEQ ID NO: 544909 - protein, 15 aa, Homo sapiens
  CDR3 for alpha chain variable domain of TCR clone 272455 (TRAV8-2, TRAJ40)
CVVLGTTSGTYKYIF

SEQ ID NO: 544910 - protein, 14 aa, Homo sapiens
  CDR3 for beta chain variable domain of TCR clone 272455 (TRBV13, TRBJ1-1)
CASTVITVNTEAFF

SEQ ID NO: 544911 - protein, 17 aa, Homo sapiens
  CDR3 for alpha chain variable domain of TCR clone 272456 (TRAV3, TRAJ6)
CAVRDGPRAGGSSIPTF

SEQ ID NO: 544912 - protein, 14 aa, Homo sapiens
  CDR3 for beta chain variable domain of TCR clone 272456 (TRBV7-3, TRBJ1-1)
CASSLKGGNTEAFF

SEQ ID NO: 544913 - protein, 12 aa, Homo sapiens
  CDR3 for alpha chain variable domain of TCR clone 272457 (TRAV22, TRAJ22)
CAPGGSARQLTF

SEQ ID NO: 544914 - protein, 13 aa, Homo sapiens
  CDR3 for beta chain variable domain of TCR clone 272457 (TRBV15, TRBJ1-6)
CATSGGLNSALHF

SEQ ID NO: 544915 - protein, 10 aa, Homo sapiens
  CDR3 for alpha chain variable domain of TCR clone 272458 (TRAV38-1, TRAJ34)
CAFMDDKLIF

SEQ ID NO: 544916 - protein, 17 aa, Homo sapiens
  CDR3 for beta chain variable domain of TCR clone 272458 (TRBV11-3, TRBJ2-3)
FASSLGLTGGGTDTQYF

SEQ ID NO: 544917 - protein, 15 aa, Homo sapiens
  CDR3 for alpha chain variable domain of TCR clone 272459 (TRAV17, TRAJ4)
WATGTWSGGYNKLIL

SEQ ID NO: 544918 - protein, 13 aa, Homo sapiens
  CDR3 for beta chain variable domain of TCR clone 272459 (TRBV6-6, TRBJ2-7)
CASSPKHLAEQYF

SEQ ID NO: 544919 - protein, 12 aa, Homo sapiens
  CDR3 for alpha chain variable domain of TCR clone 272460 (TRAV12-3, TRAJ17)
CAMTLTGNKLTF

SEQ ID NO: 544920 - protein, 15 aa, Homo sapiens
  CDR3 for beta chain variable domain of TCR clone 272460 (TRBV20-1, TRBJ2-7)
CSARNRVSGMDELYF

SEQ ID NO: 544921 - protein, 12 aa, Homo sapiens
  CDR3 for alpha chain variable domain of TCR clone 272461 (TRAV13-2, TRAJ23)
CAERHRGGKLIF

SEQ ID NO: 544922 - protein, 14 aa, Homo sapiens
  CDR3 for beta chain variable domain of TCR clone 272461 (TRBV11-2, TRBJ1-2)
CASSLGTANHGYTF

SEQ ID NO: 544923 - protein, 15 aa, Homo sapiens
  CDR3 for alpha chain variable domain of TCR clone 272462 (TRAV4, TRAJ10)
CLVGDGSGGGNKLTF

SEQ ID NO: 544924 - protein, 13 aa, Homo sapiens
  CDR3 for beta chain variable domain of TCR clone 272462 (TRBV4-2, TRBJ1-1)
CASSQAGNTEAFF

SEQ ID NO: 544925 - protein, 19 aa, Homo sapiens
  CDR3 for alpha chain variable domain of TCR clone 272463 (TRAV17, TRAJ40)
TASRAADTASYFCASKYNF

SEQ ID NO: 544926 - protein, 17 aa, Homo sapiens
  CDR3 for beta chain variable domain of TCR clone 272463 (TRBV11-2, TRBJ2-4)
CASSFLALGGAGDIQYF

SEQ ID NO: 544927 - protein, 16 aa, Homo sapiens
  CDR3 for alpha chain variable domain of TCR clone 272464 (TRAV3, TRAJ37)
CAVRPHGSGNTGKLIF

SEQ ID NO: 544928 - protein, 17 aa, Homo sapiens
  CDR3 for beta chain variable domain of TCR clone 272464 (TRBV7-2, TRBJ2-7)
FASSFETSGSTSSTSGR

SEQ ID NO: 544929 - protein, 15 aa, Homo sapiens
  CDR3 for alpha chain variable domain of TCR clone 272465 (TRAV14/DV4, TRAJ22)
CAMSRLSGSARQLTF

SEQ ID NO: 544930 - protein, 15 aa, Homo sapiens
  CDR3 for beta chain variable domain of TCR clone 272465 (TRBV28, TRBJ2-5)
CASSCRQGALETQYF

SEQ ID NO: 544931 - protein, 20 aa, Homo sapiens
  CDR3 for alpha chain variable domain of TCR clone 272466 (TRAV12-1, TRAJ42)
SSVIQPPPSVKGGSQGNLIF

SEQ ID NO: 544932 - protein, 15 aa, Homo sapiens
  CDR3 for beta chain variable domain of TCR clone 272466 (TRBV4-1, TRBJ2-7)
CASSQNTGRLYEQYF

SEQ ID NO: 544933 - protein, 13 aa, Homo sapiens
  CDR3 for alpha chain variable domain of TCR clone 272467 (TRAV12-1, TRAJ34)
CGEPPRNTDKLIF

SEQ ID NO: 544934 - protein, 20 aa, Homo sapiens
  CDR3 for beta chain variable domain of TCR clone 272467 (TRBV28, TRBJ2-1)
CASTPIGRSPGLAGGNEQFF

SEQ ID NO: 544935 - protein, 14 aa, Homo sapiens
  CDR3 for alpha chain variable domain of TCR clone 272468 (TRAV26-1, TRAJ38)
CVADNAGNNRKLIW

SEQ ID NO: 544936 - protein, 13 aa, Homo sapiens
  CDR3 for beta chain variable domain of TCR clone 272468 (TRBV4-1, TRBJ2-7)
CASSQGQAYEQYF

SEQ ID NO: 544937 - protein, 21 aa, Homo sapiens
  CDR3 for alpha chain variable domain of TCR clone 272469 (TRAV1-1, TRAJ9)
CAAKNTEASKLSLEQEQDYLL

SEQ ID NO: 544938 - protein, 14 aa, Homo sapiens
  CDR3 for beta chain variable domain of TCR clone 272469 (TRBV20-1, TRBJ2-1)
CSAQIGGSANEQFF

SEQ ID NO: 544939 - protein, 11 aa, Homo sapiens
  CDR3 for alpha chain variable domain of TCR clone 272470 (TRAV3, TRAJ21)
CAVGDFNKFYF

SEQ ID NO: 544940 - protein, 17 aa, Homo sapiens
  CDR3 for beta chain variable domain of TCR clone 272470 (TRBV24-1, TRBJ2-1)
CATSDVSTSGTYNEQFF

SEQ ID NO: 544941 - protein, 15 aa, Homo sapiens
  CDR3 for alpha chain variable domain of TCR clone 272471 (TRAV27, TRAJ38)
CSARRNAGNNRKLIL

SEQ ID NO: 544942 - protein, 13 aa, Homo sapiens
  CDR3 for beta chain variable domain of TCR clone 272471 (TRBV12-5, TRBJ2-3)
CASGDRQSDKQYF

SEQ ID NO: 544943 - protein, 11 aa, Homo sapiens
  CDR3 for alpha chain variable domain of TCR clone 272472 (TRAV17, TRAJ9)
CGFTGGFKTIF

SEQ ID NO: 544944 - protein, 14 aa, Homo sapiens
  CDR3 for beta chain variable domain of TCR clone 272472 (TRBV7-9, TRBJ2-2)
CASSIVQDTGELFF

SEQ ID NO: 544945 - protein, 12 aa, Homo sapiens
  CDR3 for alpha chain variable domain of TCR clone 272473 (TRAV27, TRAJ42)
CAGGGSQGNLIF

SEQ ID NO: 544946 - protein, 14 aa, Homo sapiens
  CDR3 for beta chain variable domain of TCR clone 272473 (TRBV19, TRBJ2-1)
CASPTFVLSGEQFF

SEQ ID NO: 544947 - protein, 14 aa, Homo sapiens
  CDR3 for alpha chain variable domain of TCR clone 272474 (TRAV8-3, TRAJ13)
CAVGEQEGYQKVTF

SEQ ID NO: 544948 - protein, 13 aa, Homo sapiens
  CDR3 for beta chain variable domain of TCR clone 272474 (TRBV11-2, TRBJ2-5)
CASSSTGEETQYF

SEQ ID NO: 544949 - protein, 12 aa, Homo sapiens
  CDR3 for alpha chain variable domain of TCR clone 272475 (TRAV12-2, TRAJ10)
WGVTGGGNKLTF

SEQ ID NO: 544950 - protein, 12 aa, Homo sapiens
  CDR3 for beta chain variable domain of TCR clone 272475 (TRBV12-4, TRBJ2-1)
CASSPGRNEQFF

SEQ ID NO: 544951 - protein, 16 aa, Homo sapiens
  CDR3 for alpha chain variable domain of TCR clone 272476 (TRAV26-1, TRAJ23)
CIVRVHPYYQGGKLIF

SEQ ID NO: 544952 - protein, 13 aa, Homo sapiens
  CDR3 for beta chain variable domain of TCR clone 272476 (TRBV20-1, TRBJ2-5)
CSARGDYQETQYF

SEQ ID NO: 544953 - protein, 15 aa, Homo sapiens
  CDR3 for alpha chain variable domain of TCR clone 272477 (TRAV2, TRAJ9)
CAVAALNTGGFKTIF

SEQ ID NO: 544954 - protein, 14 aa, Homo sapiens
  CDR3 for beta chain variable domain of TCR clone 272477 (TRBV7-8, TRBJ2-5)
CASSATGGQETQYL

SEQ ID NO: 544955 - protein, 14 aa, Homo sapiens
  CDR3 for alpha chain variable domain of TCR clone 272478 (TRAV26-1, TRAJ38)
CIAGNAGNNRKLIW

SEQ ID NO: 544956 - protein, 13 aa, Homo sapiens
  CDR3 for beta chain variable domain of TCR clone 272478 (TRBV20-1, TRBJ1-1)
CSARGGGNTEALF

SEQ ID NO: 544957 - protein, 12 aa, Homo sapiens
  CDR3 for alpha chain variable domain of TCR clone 272479 (TRAV12-3, TRAJ17)
CAMTLTGNKLTF

SEQ ID NO: 544958 - protein, 12 aa, Homo sapiens
  CDR3 for beta chain variable domain of TCR clone 272479 (TRBV11-2, TRBJ2-2)
CASSLGGWELFF

SEQ ID NO: 544959 - protein, 14 aa, Homo sapiens
  CDR3 for alpha chain variable domain of TCR clone 272480 (TRAV35, TRAJ22)
CAGLRPGSARQLTF

SEQ ID NO: 544960 - protein, 13 aa, Homo sapiens
  CDR3 for beta chain variable domain of TCR clone 272480 (TRBV20-1, TRBJ1-1)
CSARGGGNTEAFS

SEQ ID NO: 544961 - protein, 13 aa, Homo sapiens
  CDR3 for alpha chain variable domain of TCR clone 272481 (TRAV2, TRAJ29)
CAAQNSVNTPLVF

SEQ ID NO: 544962 - protein, 14 aa, Homo sapiens
  CDR3 for beta chain variable domain of TCR clone 272481 (TRBV7-9, TRBJ2-4)
CASSLAMGGNIQHF

SEQ ID NO: 544963 - protein, 16 aa, Homo sapiens
  CDR3 for alpha chain variable domain of TCR clone 272482 (TRAV3, TRAJ3)
CAVRDKAKSSASKIIF

SEQ ID NO: 544964 - protein, 16 aa, Homo sapiens
  CDR3 for beta chain variable domain of TCR clone 272482 (TRBV20-1, TRBJ2-4)
CSATSLAELAKNMQYF

SEQ ID NO: 544965 - protein, 10 aa, Homo sapiens
  CDR3 for alpha chain variable domain of TCR clone 272483 (TRAV21, TRAJ31)
CAVDNARLMF

SEQ ID NO: 544966 - protein, 12 aa, Homo sapiens
  CDR3 for beta chain variable domain of TCR clone 272483 (TRBV11-2, TRBJ2-5)
CASSLGQETQYF

SEQ ID NO: 544967 - protein, 13 aa, Homo sapiens
  CDR3 for alpha chain variable domain of TCR clone 272484 (TRAV2, TRAJ3)
CAVEDSSASKTIF

SEQ ID NO: 544968 - protein, 16 aa, Homo sapiens
  CDR3 for beta chain variable domain of TCR clone 272484 (TRBV6-1, TRBJ2-7)
CASRAPRRSPSYEQYF

SEQ ID NO: 544969 - protein, 18 aa, Homo sapiens
  CDR3 for alpha chain variable domain of TCR clone 272485 (TRAV8-6, TRAJ52)
CAVSRANAGGTSYGKLPF

SEQ ID NO: 544970 - protein, 19 aa, Homo sapiens
  CDR3 for beta chain variable domain of TCR clone 272485 (TRBV7-2, TRBJ2-3)
CASSSQGGPRLAGADTQYF

SEQ ID NO: 544971 - protein, 11 aa, Homo sapiens
  CDR3 for alpha chain variable domain of TCR clone 272486 (TRAV1-2, TRAJ40)
CAVPGTYKYIF

SEQ ID NO: 544972 - protein, 16 aa, Homo sapiens
  CDR3 for beta chain variable domain of TCR clone 272486 (TRBV7-3, TRBJ2-2)
CASSLKRGTLSGELFL

SEQ ID NO: 544973 - protein, 16 aa, Homo sapiens
  CDR3 for alpha chain variable domain of TCR clone 272487 (TRAV30, TRAJ24)
CGTEIVDADSWGKFKF

SEQ ID NO: 544974 - protein, 11 aa, Homo sapiens
  CDR3 for beta chain variable domain of TCR clone 272487 (TRBV6-3, TRBJ2-3)
CATGQADTQYF

SEQ ID NO: 544975 - protein, 14 aa, Homo sapiens
  CDR3 for alpha chain variable domain of TCR clone 272488 (TRAV16, TRAJ42)
CALLAGGSQGNLIF

SEQ ID NO: 544976 - protein, 13 aa, Homo sapiens
  CDR3 for beta chain variable domain of TCR clone 272488 (TRBV7-9, TRBJ1-2)
CASSLKQNDGYTF

SEQ ID NO: 544977 - protein, 15 aa, Homo sapiens
  CDR3 for alpha chain variable domain of TCR clone 272489 (TRAV26-1, TRAJ22)
CIVRVSFWFCKATNL

SEQ ID NO: 544978 - protein, 16 aa, Homo sapiens
  CDR3 for beta chain variable domain of TCR clone 272489 (TRBV24-1, TRBJ2-3)
CATSDPGTGATDTQYF

SEQ ID NO: 544979 - protein, 15 aa, Homo sapiens
  CDR3 for alpha chain variable domain of TCR clone 272490 (TRAV3, TRAJ5)
CAVRDLDTGRRALTF

SEQ ID NO: 544980 - protein, 13 aa, Homo sapiens
  CDR3 for beta chain variable domain of TCR clone 272490 (TRBV7-6, TRBJ2-1)
CQQLGGGADEQFF

SEQ ID NO: 544981 - protein, 17 aa, Homo sapiens
  CDR3 for alpha chain variable domain of TCR clone 272491 (TRAV4, TRAJ42)
CLVGVLNYGGSQGNLIF

SEQ ID NO: 544982 - protein, 13 aa, Homo sapiens
  CDR3 for beta chain variable domain of TCR clone 272491 (TRBV4-2, TRBJ1-2)
CASSPLYGYGYTF

SEQ ID NO: 544983 - protein, 15 aa, Homo sapiens
  CDR3 for alpha chain variable domain of TCR clone 272492 (TRAV2, TRAJ9)
CAVDDRGTGGFKTIF

SEQ ID NO: 544984 - protein, 16 aa, Homo sapiens
  CDR3 for beta chain variable domain of TCR clone 272492 (TRBV24-1, TRBJ2-3)
CATGDPGTGATDTQYF

SEQ ID NO: 544985 - protein, 15 aa, Homo sapiens
  CDR3 for alpha chain variable domain of TCR clone 272493 (TRAV8-3, TRAJ27)
CAVGPSKTNAGNSTF

SEQ ID NO: 544986 - protein, 13 aa, Homo sapiens
  CDR3 for beta chain variable domain of TCR clone 272493 (TRBV7-9, TRBJ1-2)
CASSLKQNYGYTF

SEQ ID NO: 544987 - protein, 14 aa, Homo sapiens
  CDR3 for alpha chain variable domain of TCR clone 272494 (TRAV1-1, TRAJ35)
CAVRSIGFGNVLHC

SEQ ID NO: 544988 - protein, 14 aa, Homo sapiens
  CDR3 for beta chain variable domain of TCR clone 272494 (TRBV5-7, TRBJ2-7)
CASSGGMSSYEQYF

SEQ ID NO: 544989 - protein, 12 aa, Homo sapiens
  CDR3 for alpha chain variable domain of TCR clone 272495 (TRAV21, TRAJ49)
CAVNDGGNQFYF

SEQ ID NO: 544990 - protein, 14 aa, Homo sapiens
  CDR3 for beta chain variable domain of TCR clone 272495 (TRBV12-5, TRBJ2-5)
CASGSRTQQETQYF

SEQ ID NO: 544991 - protein, 14 aa, Homo sapiens
  CDR3 for alpha chain variable domain of TCR clone 272496 (TRAV8-4, TRAJ13)
CAVTLSGGYQKVTF

SEQ ID NO: 544992 - protein, 16 aa, Homo sapiens
  CDR3 for beta chain variable domain of TCR clone 272496 (TRBV19, TRBJ2-2)
CASRSPGTGATWELFF

SEQ ID NO: 544993 - protein, 12 aa, Homo sapiens
  CDR3 for alpha chain variable domain of TCR clone 272497 (TRAV12-1, TRAJ40)
LVVYSGTYKYIF

SEQ ID NO: 544994 - protein, 18 aa, Homo sapiens
  CDR3 for beta chain variable domain of TCR clone 272497 (TRBV11-2, TRBJ2-3)
CASSLGGASRGAPNTQYF

SEQ ID NO: 544995 - protein, 14 aa, Homo sapiens
  CDR3 for alpha chain variable domain of TCR clone 272498 (TRAV21, TRAJ35)
CAVMPIGFGNVLHC

SEQ ID NO: 544996 - protein, 16 aa, Homo sapiens
  CDR3 for beta chain variable domain of TCR clone 272498 (TRBV7-3, TRBJ2-2)
CASSLKRGTLSGELFF

SEQ ID NO: 544997 - protein, 12 aa, Homo sapiens
  CDR3 for alpha chain variable domain of TCR clone 272499 (TRAV17, TRAJ39)
CATGAAGNMLTF

SEQ ID NO: 544998 - protein, 14 aa, Homo sapiens
  CDR3 for beta chain variable domain of TCR clone 272499 (TRBV2, TRBJ2-7)
CASSLTSGGYEQYF

SEQ ID NO: 544999 - protein, 11 aa, Homo sapiens
  CDR3 for alpha chain variable domain of TCR clone 272500 (TRAV3, TRAJ21)
SAVGNFNKFYF

SEQ ID NO: 545000 - protein, 14 aa, Homo sapiens
  CDR3 for beta chain variable domain of TCR clone 272500 (TRBV29-1, TRBJ2-2)
CSGRGSGNTGELFF

SEQ ID NO: 545001 - protein, 15 aa, Homo sapiens
  CDR3 for alpha chain variable domain of TCR clone 272501 (TRAV2, TRAJ42)
CAVEGYGGSQGNLIF

SEQ ID NO: 545002 - protein, 16 aa, Homo sapiens
  CDR3 for beta chain variable domain of TCR clone 272501 (TRBV28, TRBJ2-5)
CASSFSPAGGWETQYF

SEQ ID NO: 545003 - protein, 14 aa, Homo sapiens
  CDR3 for alpha chain variable domain of TCR clone 272502 (TRAV13-2, TRAJ43)
CAEIPTYNNNDMRF

SEQ ID NO: 545004 - protein, 15 aa, Homo sapiens
  CDR3 for beta chain variable domain of TCR clone 272502 (TRBV7-9, TRBJ2-2)
CASGPLDTFPGELIF

SEQ ID NO: 545005 - protein, 10 aa, Homo sapiens
  CDR3 for alpha chain variable domain of TCR clone 272503 (TRAV13-1, TRAJ15)
INQAGTALIF

SEQ ID NO: 545006 - protein, 14 aa, Homo sapiens
  CDR3 for beta chain variable domain of TCR clone 272503 (TRBV7-9, TRBJ2-1)
CASSDNSGYNEQYF

SEQ ID NO: 545007 - protein, 13 aa, Homo sapiens
  CDR3 for alpha chain variable domain of TCR clone 272504 (TRAV12-2, TRAJ20)
CAVYPSNDYKLSF

SEQ ID NO: 545008 - protein, 12 aa, Homo sapiens
  CDR3 for beta chain variable domain of TCR clone 272504 (TRBV14, TRBJ2-4)
CASSNLKSIQYF

SEQ ID NO: 545009 - protein, 16 aa, Homo sapiens
  CDR3 for alpha chain variable domain of TCR clone 272505 (TRAV1-2, TRAJ10)
CAVRGVLTGGGNELTF

SEQ ID NO: 545010 - protein, 12 aa, Homo sapiens
  CDR3 for beta chain variable domain of TCR clone 272505 (TRBV11-2, TRBJ2-1)
CASSPGNNEQFF

SEQ ID NO: 545011 - protein, 13 aa, Homo sapiens
  CDR3 for alpha chain variable domain of TCR clone 272506 (TRAV12-3, TRAJ33)
CAMSVNSNYQLIW

SEQ ID NO: 545012 - protein, 13 aa, Homo sapiens
  CDR3 for beta chain variable domain of TCR clone 272506 (TRBV4-1, TRBJ2-2)
CASSQENTGELVF

SEQ ID NO: 545013 - protein, 12 aa, Homo sapiens
  CDR3 for alpha chain variable domain of TCR clone 272507 (TRAV13-2, TRAJ23)
CAERHRGGKLIF

SEQ ID NO: 545014 - protein, 15 aa, Homo sapiens
  CDR3 for beta chain variable domain of TCR clone 272507 (TRBV7-8, TRBJ2-1)
CASSLADSLYNEQFF

SEQ ID NO: 545015 - protein, 14 aa, Homo sapiens
  CDR3 for alpha chain variable domain of TCR clone 272508 (TRAV1-2, TRAJ6)
CAVSLSGGSYIPAF

SEQ ID NO: 545016 - protein, 16 aa, Homo sapiens
  CDR3 for beta chain variable domain of TCR clone 272508 (TRBV7-9, TRBJ2-3)
CASSARTSRGTDTQYF

SEQ ID NO: 545017 - protein, 15 aa, Homo sapiens
  CDR3 for alpha chain variable domain of TCR clone 272509 (TRAV34, TRAJ38)
CGADFTPGNNRKLFW

SEQ ID NO: 545018 - protein, 16 aa, Homo sapiens
  CDR3 for beta chain variable domain of TCR clone 272509 (TRBV12-5, TRBJ2-5)
CASGPRTNGNQETQYF

SEQ ID NO: 545019 - protein, 12 aa, Homo sapiens
  CDR3 for alpha chain variable domain of TCR clone 272510 (TRAV10, TRAJ43)
CVVVRVGNYMRF

SEQ ID NO: 545020 - protein, 15 aa, Homo sapiens
  CDR3 for beta chain variable domain of TCR clone 272510 (TRBV2, TRBJ2-7)
CASSEGLARSYEQYF

SEQ ID NO: 545021 - protein, 14 aa, Homo sapiens
  CDR3 for alpha chain variable domain of TCR clone 272511 (TRAV13-1, TRAJ35)
CAASKGGFGNVLHC

SEQ ID NO: 545022 - protein, 13 aa, Homo sapiens
  CDR3 for beta chain variable domain of TCR clone 272511 (TRBV20-1, TRBJ2-3)
CSAIYPGADTQYF

SEQ ID NO: 545023 - protein, 14 aa, Homo sapiens
  CDR3 for alpha chain variable domain of TCR clone 272512 (TRAV12-2, TRAJ40)
CAVKIPSGTSKYIF

SEQ ID NO: 545024 - protein, 14 aa, Homo sapiens
  CDR3 for beta chain variable domain of TCR clone 272512 (TRBV20-1, TRBJ1-1)
CSAQTRIGGTEALF

SEQ ID NO: 545025 - protein, 13 aa, Homo sapiens
  CDR3 for alpha chain variable domain of TCR clone 272513 (TRAV3, TRAJ29)
CAVRDLIDIPLVF

SEQ ID NO: 545026 - protein, 14 aa, Homo sapiens
  CDR3 for beta chain variable domain of TCR clone 272513 (TRBV27, TRBJ2-1)
CASSATGGYNEQFF

SEQ ID NO: 545027 - protein, 12 aa, Homo sapiens
  CDR3 for alpha chain variable domain of TCR clone 272514 (TRAV17, TRAJ20)
CATQTNDYKLSF

SEQ ID NO: 545028 - protein, 12 aa, Homo sapiens
  CDR3 for beta chain variable domain of TCR clone 272514 (TRBV6-1, TRBJ1-1)
CASNSPTAEAFF

SEQ ID NO: 545029 - protein, 13 aa, Homo sapiens
  CDR3 for alpha chain variable domain of TCR clone 272515 (TRAV27, TRAJ45)
CRSSGGGADGLTF

SEQ ID NO: 545030 - protein, 13 aa, Homo sapiens
  CDR3 for beta chain variable domain of TCR clone 272515 (TRBV7-7, TRBJ2-5)
CASSGSGQETQYF

SEQ ID NO: 545031 - protein, 14 aa, Homo sapiens
  CDR3 for alpha chain variable domain of TCR clone 272516 (TRAV12-2, TRAJ40)
CAVRIPSGTYKYIF

SEQ ID NO: 545032 - protein, 18 aa, Homo sapiens
  CDR3 for beta chain variable domain of TCR clone 272516 (TRBV20-1, TRBJ2-6)
CSAETTPTHGSGANVLTF

SEQ ID NO: 545033 - protein, 13 aa, Homo sapiens
  CDR3 for alpha chain variable domain of TCR clone 272517 (TRAV29/DV5, TRAJ44)
CAASTGTASKLTF

SEQ ID NO: 545034 - protein, 17 aa, Homo sapiens
  CDR3 for beta chain variable domain of TCR clone 272517 (TRBV13, TRBJ2-3)
CASSLSRVAGGRNTQYF

SEQ ID NO: 545035 - protein, 15 aa, Homo sapiens
  CDR3 for alpha chain variable domain of TCR clone 272518 (TRAV3, TRAJ5)
CAVRDLDTGRRALTF

SEQ ID NO: 545036 - protein, 15 aa, Homo sapiens
  CDR3 for beta chain variable domain of TCR clone 272518 (TRBV4-3, TRBJ2-7)
CASSQGGRGIYEQYF

SEQ ID NO: 545037 - protein, 15 aa, Homo sapiens
  CDR3 for alpha chain variable domain of TCR clone 272519 (TRAV21, TRAJ53)
CATLNSGGSNYKLTF

SEQ ID NO: 545038 - protein, 11 aa, Homo sapiens
  CDR3 for beta chain variable domain of TCR clone 272519 (TRBV19, TRBJ1-2)
CASSISSGYTF

SEQ ID NO: 545039 - protein, 16 aa, Homo sapiens
  CDR3 for alpha chain variable domain of TCR clone 272520 (TRAV20, TRAJ16)
CAVQDKRFSDGQKLLF

SEQ ID NO: 545040 - protein, 14 aa, Homo sapiens
  CDR3 for beta chain variable domain of TCR clone 272520 (TRBV12-4, TRBJ2-7)
CASTFGLSTYEQYF

SEQ ID NO: 545041 - protein, 14 aa, Homo sapiens
  CDR3 for alpha chain variable domain of TCR clone 272521 (TRAV16, TRAJ32)
CALKSGGATNKLIF

SEQ ID NO: 545042 - protein, 13 aa, Homo sapiens
  CDR3 for beta chain variable domain of TCR clone 272521 (TRBV15, TRBJ1-6)
CATSGGLNSPLLF

SEQ ID NO: 545043 - protein, 16 aa, Homo sapiens
  CDR3 for alpha chain variable domain of TCR clone 272522 (TRAV26-1, TRAJ36)
CIVRVSYQTGANNIFF

SEQ ID NO: 545044 - protein, 16 aa, Homo sapiens
  CDR3 for beta chain variable domain of TCR clone 272522 (TRBV27, TRBJ2-5)
CASSYGPGGQKETQYF

SEQ ID NO: 545045 - protein, 15 aa, Homo sapiens
  CDR3 for alpha chain variable domain of TCR clone 272523 (TRAV8-2, TRAJ16)
CVVSDGFSDGQKLLF

SEQ ID NO: 545046 - protein, 14 aa, Homo sapiens
  CDR3 for beta chain variable domain of TCR clone 272523 (TRBV7-3, TRBJ1-1)
CASSLGTGFTEAFF

SEQ ID NO: 545047 - protein, 13 aa, Homo sapiens
  CDR3 for alpha chain variable domain of TCR clone 272524 (TRAV12-3, TRAJ5)
CAMRPTGRRTLTF

SEQ ID NO: 545048 - protein, 13 aa, Homo sapiens
  CDR3 for beta chain variable domain of TCR clone 272524 (TRBV2, TRBJ2-7)
CASSVVEAYEQYF

SEQ ID NO: 545049 - protein, 14 aa, Homo sapiens
  CDR3 for alpha chain variable domain of TCR clone 272525 (TRAV1-2, TRAJ8)
CAVGEDTGFQKLVF

SEQ ID NO: 545050 - protein, 15 aa, Homo sapiens
  CDR3 for beta chain variable domain of TCR clone 272525 (TRBV7-3, TRBJ2-1)
CASILDGNSYNEQFF

SEQ ID NO: 545051 - protein, 15 aa, Homo sapiens
  CDR3 for alpha chain variable domain of TCR clone 272526 (TRAV17, TRAJ45)
TSVLRTGGGADGLTF

SEQ ID NO: 545052 - protein, 15 aa, Homo sapiens
  CDR3 for beta chain variable domain of TCR clone 272526 (TRBV7-2, TRBJ2-3)
CASSSTGLETDTQYF

SEQ ID NO: 545053 - protein, 15 aa, Homo sapiens
  CDR3 for alpha chain variable domain of TCR clone 272527 (TRAV17, TRAJ37)
CATDHGSSNTGKLIF

SEQ ID NO: 545054 - protein, 17 aa, Homo sapiens
  CDR3 for beta chain variable domain of TCR clone 272527 (TRBV7-8, TRBJ2-6)
CASSAGTGGAGANVLTF

SEQ ID NO: 545055 - protein, 14 aa, Homo sapiens
  CDR3 for alpha chain variable domain of TCR clone 272528 (TRAV12-3, TRAJ58)
CAMSTETSGSRLTF

SEQ ID NO: 545056 - protein, 17 aa, Homo sapiens
  CDR3 for beta chain variable domain of TCR clone 272528 (TRBV4-1, TRBJ1-4)
CASSDTGGTNEKLFLAV

SEQ ID NO: 545057 - protein, 13 aa, Homo sapiens
  CDR3 for alpha chain variable domain of TCR clone 272529 (TRAV1-2, TRAJ20)
CAVPRSNDYKLNF

SEQ ID NO: 545058 - protein, 14 aa, Homo sapiens
  CDR3 for beta chain variable domain of TCR clone 272529 (TRBV20-1, TRBJ2-7)
CSARYGTTYYEQYF

SEQ ID NO: 545059 - protein, 14 aa, Homo sapiens
  CDR3 for alpha chain variable domain of TCR clone 272530 (TRAV12-2, TRAJ40)
CAVKIPSGTYKYIF

SEQ ID NO: 545060 - protein, 20 aa, Homo sapiens
  CDR3 for beta chain variable domain of TCR clone 272530 (TRBV28, TRBJ2-1)
CASTPIGPSPGLAGGNEQFF

SEQ ID NO: 545061 - protein, 10 aa, Homo sapiens
  CDR3 for alpha chain variable domain of TCR clone 272531 (TRAV26-2, TRAJ22)
LQGSARQLTF

SEQ ID NO: 545062 - protein, 15 aa, Homo sapiens
  CDR3 for beta chain variable domain of TCR clone 272531 (TRBV5-1, TRBJ2-5)
CASSFKGGDQETQYF

SEQ ID NO: 545063 - protein, 13 aa, Homo sapiens
  CDR3 for alpha chain variable domain of TCR clone 272532 (TRAV8-6, TRAJ50)
CAVIKTSYYKVIF

SEQ ID NO: 545064 - protein, 15 aa, Homo sapiens
  CDR3 for beta chain variable domain of TCR clone 272532 (TRBV7-2, TRBJ2-2)
CASRRPGQNTGELFF

SEQ ID NO: 545065 - protein, 15 aa, Homo sapiens
  CDR3 for alpha chain variable domain of TCR clone 272533 (TRAV3, TRAJ22)
CAVRDRGGSARRLPF

SEQ ID NO: 545066 - protein, 16 aa, Homo sapiens
  CDR3 for beta chain variable domain of TCR clone 272533 (TRBV5-4, TRBJ2-3)
CASQQPGAGGADTQYF

SEQ ID NO: 545067 - protein, 14 aa, Homo sapiens
  CDR3 for alpha chain variable domain of TCR clone 272534 (TRAV10, TRAJ36)
CVVKYEGVANNLFF

SEQ ID NO: 545068 - protein, 16 aa, Homo sapiens
  CDR3 for beta chain variable domain of TCR clone 272534 (TRBV7-3, TRBJ2-2)
CASSLKRGTLSGELFF

SEQ ID NO: 545069 - protein, 13 aa, Homo sapiens
  CDR3 for alpha chain variable domain of TCR clone 272535 (TRAV13-1, TRAJ12)
CAASPDSSYKLIF

SEQ ID NO: 545070 - protein, 16 aa, Homo sapiens
  CDR3 for beta chain variable domain of TCR clone 272535 (TRBV15, TRBJ2-1)
CATSRERLAGANEQFF

SEQ ID NO: 545071 - protein, 14 aa, Homo sapiens
  CDR3 for alpha chain variable domain of TCR clone 272536 (TRAV26-1, TRAJ39)
CIVRGSRAGNMLTF

SEQ ID NO: 545072 - protein, 15 aa, Homo sapiens
  CDR3 for beta chain variable domain of TCR clone 272536 (TRBV19, TRBJ1-2)
CASSVGQVLNYGYTF

SEQ ID NO: 545073 - protein, 16 aa, Homo sapiens
  CDR3 for alpha chain variable domain of TCR clone 272537 (TRAV12-2, TRAJ32)
CAVNLGQGGATNKLIF

SEQ ID NO: 545074 - protein, 15 aa, Homo sapiens
  CDR3 for beta chain variable domain of TCR clone 272537 (TRBV7-9, TRBJ1-4)
CASSRTGGFNEKLFF

SEQ ID NO: 545075 - protein, 14 aa, Homo sapiens
  CDR3 for alpha chain variable domain of TCR clone 272538 (TRAV12-2, TRAJ9)
CAVSFGTGGFKTIF

SEQ ID NO: 545076 - protein, 17 aa, Homo sapiens
  CDR3 for beta chain variable domain of TCR clone 272538 (TRBV20-1, TRBJ2-2)
CSASGSGQGGLTGELFF

SEQ ID NO: 545077 - protein, 13 aa, Homo sapiens
  CDR3 for alpha chain variable domain of TCR clone 272539 (TRAV2, TRAJ36)
CAVDQTGANNLFF

SEQ ID NO: 545078 - protein, 12 aa, Homo sapiens
  CDR3 for beta chain variable domain of TCR clone 272539 (TRBV19, TRBJ1-1)
CASMSRYTEAFF

SEQ ID NO: 545079 - protein, 17 aa, Homo sapiens
  CDR3 for alpha chain variable domain of TCR clone 272540 (TRAV38-2/DV8, TRAJ38)
CAYRSARGAGNNSKLFW

SEQ ID NO: 545080 - protein, 13 aa, Homo sapiens
  CDR3 for beta chain variable domain of TCR clone 272540 (TRBV15, TRBJ1-6)
CATSGGLNSPLHF

SEQ ID NO: 545081 - protein, 17 aa, Homo sapiens
  CDR3 for alpha chain variable domain of TCR clone 272541 (TRAV23/DV6, TRAJ57)
CAASPTLSQGGSEQLVF

SEQ ID NO: 545082 - protein, 14 aa, Homo sapiens
  CDR3 for beta chain variable domain of TCR clone 272541 (TRBV25-1, TRBJ1-1)
CASTHLGGNTEAFF

SEQ ID NO: 545083 - protein, 13 aa, Homo sapiens
  CDR3 for alpha chain variable domain of TCR clone 272542 (TRAV17, TRAJ40)
CATDYSGTYKYIF

SEQ ID NO: 545084 - protein, 16 aa, Homo sapiens
  CDR3 for beta chain variable domain of TCR clone 272542 (TRBV7-7, TRBJ2-1)
CASNSNQGTPYNEQFF

SEQ ID NO: 545085 - protein, 15 aa, Homo sapiens
  CDR3 for alpha chain variable domain of TCR clone 272543 (TRAV27, TRAJ38)
CAARRNAGNNRKLIW

SEQ ID NO: 545086 - protein, 14 aa, Homo sapiens
  CDR3 for beta chain variable domain of TCR clone 272543 (TRBV7-2, TRBJ2-7)
CASSPRDRAYEQYF

SEQ ID NO: 545087 - protein, 15 aa, Homo sapiens
  CDR3 for alpha chain variable domain of TCR clone 272544 (TRAV21, TRAJ45)
CAVSYSGGGADGLTF

SEQ ID NO: 545088 - protein, 15 aa, Homo sapiens
  CDR3 for beta chain variable domain of TCR clone 272544 (TRBV7-3, TRBJ2-7)
CASSPPVALNYEQYF

SEQ ID NO: 545089 - protein, 14 aa, Homo sapiens
  CDR3 for alpha chain variable domain of TCR clone 272545 (TRAV8-1, TRAJ24)
CAVSAADSWGKLQF

SEQ ID NO: 545090 - protein, 16 aa, Homo sapiens
  CDR3 for beta chain variable domain of TCR clone 272545 (TRBV4-3, TRBJ2-1)
CASSPALDRGVNEQFF

SEQ ID NO: 545091 - protein, 14 aa, Homo sapiens
  CDR3 for alpha chain variable domain of TCR clone 272546 (TRAV12-3, TRAJ35)
CAMSLIGFGNVLHC

SEQ ID NO: 545092 - protein, 11 aa, Homo sapiens
  CDR3 for beta chain variable domain of TCR clone 272546 (TRBV7-8, TRBJ2-7)
CASSLSLEQYF

SEQ ID NO: 545093 - protein, 16 aa, Homo sapiens
  CDR3 for alpha chain variable domain of TCR clone 272547 (TRAV3, TRAJ37)
CAVRFRGSGNTGKLIF

SEQ ID NO: 545094 - protein, 16 aa, Homo sapiens
  CDR3 for beta chain variable domain of TCR clone 272547 (TRBV19, TRBJ2-1)
CASSKAGPSSYNEQFF

SEQ ID NO: 545095 - protein, 17 aa, Homo sapiens
  CDR3 for alpha chain variable domain of TCR clone 272548 (TRAV23/DV6, TRAJ57)
CAASSTLSQGGSEKLVF

SEQ ID NO: 545096 - protein, 16 aa, Homo sapiens
  CDR3 for beta chain variable domain of TCR clone 272548 (TRBV28, TRBJ2-1)
CASSSSYSGSLNEQFF

SEQ ID NO: 545097 - protein, 12 aa, Homo sapiens
  CDR3 for alpha chain variable domain of TCR clone 272549 (TRAV13-2, TRAJ23)
CAERHRGGKLIF

SEQ ID NO: 545098 - protein, 12 aa, Homo sapiens
  CDR3 for beta chain variable domain of TCR clone 272549 (TRBV11-2, TRBJ2-1)
CASSPGNNGQFF

SEQ ID NO: 545099 - protein, 18 aa, Homo sapiens
  CDR3 for alpha chain variable domain of TCR clone 272550 (TRAV21, TRAJ52)
CAVRPSPAGGTSYGKLTF

SEQ ID NO: 545100 - protein, 12 aa, Homo sapiens
  CDR3 for beta chain variable domain of TCR clone 272550 (TRBV11-2, TRBJ2-2)
CASSLGGGELFF

SEQ ID NO: 545101 - protein, 16 aa, Homo sapiens
  CDR3 for alpha chain variable domain of TCR clone 272551 (TRAV30, TRAJ24)
CGTEIVDADSWGKFQF

SEQ ID NO: 545102 - protein, 17 aa, Homo sapiens
  CDR3 for beta chain variable domain of TCR clone 272551 (TRBV20-1, TRBJ2-2)
CSASGSGQGGLTGELFF

SEQ ID NO: 545103 - protein, 14 aa, Homo sapiens
  CDR3 for alpha chain variable domain of TCR clone 272552 (TRAV30, TRAJ33)
CVTVAPRSNYQLIW

SEQ ID NO: 545104 - protein, 18 aa, Homo sapiens
  CDR3 for beta chain variable domain of TCR clone 272552 (TRBV11-2, TRBJ2-3)
CASSLGGASRGAPNTQYF

SEQ ID NO: 545105 - protein, 10 aa, Homo sapiens
  CDR3 for alpha chain variable domain of TCR clone 272553 (TRAV5, TRAJ34)
CAEDTDKLIF

SEQ ID NO: 545106 - protein, 16 aa, Homo sapiens
  CDR3 for beta chain variable domain of TCR clone 272553 (TRBV28, TRBJ1-6)
CASSPLGGEDNSPLHF

SEQ ID NO: 545107 - protein, 12 aa, Homo sapiens
  CDR3 for alpha chain variable domain of TCR clone 272554 (TRAV8-3, TRAJ20)
CAVDFNDYKLSF

SEQ ID NO: 545108 - protein, 17 aa, Homo sapiens
  CDR3 for beta chain variable domain of TCR clone 272554 (TRBV7-8, TRBJ2-6)
GASSAGTGGAGANVLTF

SEQ ID NO: 545109 - protein, 11 aa, Homo sapiens
  CDR3 for alpha chain variable domain of TCR clone 272555 (TRAV12-1, TRAJ43)
WVEYDNNDMRF

SEQ ID NO: 545110 - protein, 14 aa, Homo sapiens
  CDR3 for beta chain variable domain of TCR clone 272555 (TRBV10-2, TRBJ2-1)
SASSEGTSEDEQFF

SEQ ID NO: 545111 - protein, 11 aa, Homo sapiens
  CDR3 for alpha chain variable domain of TCR clone 272556 (TRAV21, TRAJ39)
LLVHAGNMLTF

SEQ ID NO: 545112 - protein, 18 aa, Homo sapiens
  CDR3 for beta chain variable domain of TCR clone 272556 (TRBV7-2, TRBJ2-7)
CASSLSGRGLAGGYEQYF

SEQ ID NO: 545113 - protein, 12 aa, Homo sapiens
  CDR3 for alpha chain variable domain of TCR clone 272557 (TRAV12-3, TRAJ17)
CAMTLTGNKLTF

SEQ ID NO: 545114 - protein, 16 aa, Homo sapiens
  CDR3 for beta chain variable domain of TCR clone 272557 (TRBV28, TRBJ2-7)
CASGPWVATGDLSQYF

SEQ ID NO: 545115 - protein, 14 aa, Homo sapiens
  CDR3 for alpha chain variable domain of TCR clone 272558 (TRAV12-3, TRAJ10)
SHLPLTGGGNELTF

SEQ ID NO: 545116 - protein, 15 aa, Homo sapiens
  CDR3 for beta chain variable domain of TCR clone 272558 (TRBV10-3, TRBJ2-1)
CAISDVQDRAYEQFF

SEQ ID NO: 545117 - protein, 14 aa, Homo sapiens
  CDR3 for alpha chain variable domain of TCR clone 272559 (TRAV13-1, TRAJ20)
CAARPGSNDYNLSF

SEQ ID NO: 545118 - protein, 15 aa, Homo sapiens
  CDR3 for beta chain variable domain of TCR clone 272559 (TRBV4-1, TRBJ2-7)
CASSQQGQGFDEQYF

SEQ ID NO: 545119 - protein, 13 aa, Homo sapiens
  CDR3 for alpha chain variable domain of TCR clone 272560 (TRAV21, TRAJ57)
CAVTQGGSEELVF

SEQ ID NO: 545120 - protein, 16 aa, Homo sapiens
  CDR3 for beta chain variable domain of TCR clone 272560 (TRBV29-1, TRBJ2-7)
CSVEDAEDATAYEQYF

SEQ ID NO: 545121 - protein, 16 aa, Homo sapiens
  CDR3 for alpha chain variable domain of TCR clone 272561 (TRAV3, TRAJ22)
CAVRDMGSGSARQLTF

SEQ ID NO: 545122 - protein, 14 aa, Homo sapiens
  CDR3 for beta chain variable domain of TCR clone 272561 (TRBV6-6, TRBJ2-3)
CASRLQREADTQYF

SEQ ID NO: 545123 - protein, 16 aa, Homo sapiens
  CDR3 for alpha chain variable domain of TCR clone 272562 (TRAV35, TRAJ52)
CAGQGSGGTSYGKLTF

SEQ ID NO: 545124 - protein, 18 aa, Homo sapiens
  CDR3 for beta chain variable domain of TCR clone 272562 (TRBV4-1, TRBJ1-1)
CASSQDSSGGGFWTEAFF

SEQ ID NO: 545125 - protein, 16 aa, Homo sapiens
  CDR3 for alpha chain variable domain of TCR clone 272563 (TRAV27, TRAJ53)
CAAPVGSGGSNYKLTF

SEQ ID NO: 545126 - protein, 16 aa, Homo sapiens
  CDR3 for beta chain variable domain of TCR clone 272563 (TRBV7-3, TRBJ2-2)
CASSLKRGTLSGELFF

SEQ ID NO: 545127 - protein, 15 aa, Homo sapiens
  CDR3 for alpha chain variable domain of TCR clone 272564 (TRAV3, TRAJ36)
CAVRASQTGANNLFF

SEQ ID NO: 545128 - protein, 13 aa, Homo sapiens
  CDR3 for beta chain variable domain of TCR clone 272564 (TRBV7-9, TRBJ1-2)
CASSLKQNYGYTF

SEQ ID NO: 545129 - protein, 17 aa, Homo sapiens
  CDR3 for alpha chain variable domain of TCR clone 272565 (TRAV3, TRAJ42)
CAVRARDYGGSQGNLIF

SEQ ID NO: 545130 - protein, 17 aa, Homo sapiens
  CDR3 for beta chain variable domain of TCR clone 272565 (TRBV7-9, TRBJ2-3)
CASSPTVAGDLTDTQYF

SEQ ID NO: 545131 - protein, 17 aa, Homo sapiens
  CDR3 for alpha chain variable domain of TCR clone 272566 (TRAV3, TRAJ6)
CAVRDGPRAGGSYIPTF

SEQ ID NO: 545132 - protein, 14 aa, Homo sapiens
  CDR3 for beta chain variable domain of TCR clone 272566 (TRBV7-2, TRBJ1-2)
CASSQTGSTYGYTC

SEQ ID NO: 545133 - protein, 14 aa, Homo sapiens
  CDR3 for alpha chain variable domain of TCR clone 272567 (TRAV2, TRAJ39)
CAVVGNNAGNMLTF

SEQ ID NO: 545134 - protein, 16 aa, Homo sapiens
  CDR3 for beta chain variable domain of TCR clone 272567 (TRBV4-2, TRBJ2-1)
CASSQDGTGGYNEQFF

SEQ ID NO: 545135 - protein, 12 aa, Homo sapiens
  CDR3 for alpha chain variable domain of TCR clone 272568 (TRAV4, TRAJ26)
SLVGDYGQNFVF

SEQ ID NO: 545136 - protein, 16 aa, Homo sapiens
  CDR3 for beta chain variable domain of TCR clone 272568 (TRBV7-2, TRBJ1-2)
CASSSNQDRRGHGYTF

SEQ ID NO: 545137 - protein, 12 aa, Homo sapiens
  CDR3 for alpha chain variable domain of TCR clone 272569 (TRAV1-1, TRAJ39)
CAVPVVGNMLTF

SEQ ID NO: 545138 - protein, 17 aa, Homo sapiens
  CDR3 for beta chain variable domain of TCR clone 272569 (TRBV28, TRBJ2-3)
CASSPTPAGGRVDTQYF

SEQ ID NO: 545139 - protein, 14 aa, Homo sapiens
  CDR3 for alpha chain variable domain of TCR clone 272570 (TRAV35, TRAJ22)
CAGLRPGCARQLTF

SEQ ID NO: 545140 - protein, 15 aa, Homo sapiens
  CDR3 for beta chain variable domain of TCR clone 272570 (TRBV12-4, TRBJ2-5)
CASSPPTGLQETQYF

SEQ ID NO: 545141 - protein, 15 aa, Homo sapiens
  CDR3 for alpha chain variable domain of TCR clone 272571 (TRAV8-3, TRAJ40)
CAAPSLGSGTYTYIF

SEQ ID NO: 545142 - protein, 12 aa, Homo sapiens
  CDR3 for beta chain variable domain of TCR clone 272571 (TRBV11-2, TRBJ2-2)
CASSLGGGELFF

SEQ ID NO: 545143 - protein, 14 aa, Homo sapiens
  CDR3 for alpha chain variable domain of TCR clone 272572 (TRAV1-2, TRAJ27)
CAVRSGTNAGKSTF

SEQ ID NO: 545144 - protein, 15 aa, Homo sapiens
  CDR3 for beta chain variable domain of TCR clone 272572 (TRBV18, TRBJ2-7)
CASSPLQGRTYDQYF

SEQ ID NO: 545145 - protein, 12 aa, Homo sapiens
  CDR3 for alpha chain variable domain of TCR clone 272573 (TRAV3, TRAJ27)
CAVRDGAGKSTF

SEQ ID NO: 545146 - protein, 12 aa, Homo sapiens
  CDR3 for beta chain variable domain of TCR clone 272573 (TRBV7-9, TRBJ2-7)
CASSLEGYEQYF

SEQ ID NO: 545147 - protein, 15 aa, Homo sapiens
  CDR3 for alpha chain variable domain of TCR clone 272574 (TRAV12-3, TRAJ5)
CAMSGLGTGRRALTF

SEQ ID NO: 545148 - protein, 16 aa, Homo sapiens
  CDR3 for beta chain variable domain of TCR clone 272574 (TRBV20-1, TRBJ2-3)
CSARLHGAGAIDTQYF

SEQ ID NO: 545149 - protein, 16 aa, Homo sapiens
  CDR3 for alpha chain variable domain of TCR clone 272575 (TRAV17, TRAJ28)
CATASVSGAGSYQLTF

SEQ ID NO: 545150 - protein, 11 aa, Homo sapiens
  CDR3 for beta chain variable domain of TCR clone 272575 (TRBV7-9, TRBJ2-5)
CANSLGETQYF

SEQ ID NO: 545151 - protein, 15 aa, Homo sapiens
  CDR3 for alpha chain variable domain of TCR clone 272576 (TRAV8-6, TRAJ26)
CAVSDQSPGGQNFVF

SEQ ID NO: 545152 - protein, 13 aa, Homo sapiens
  CDR3 for beta chain variable domain of TCR clone 272576 (TRBV27, TRBJ2-7)
CASSLRHSYEQYF

SEQ ID NO: 545153 - protein, 13 aa, Homo sapiens
  CDR3 for alpha chain variable domain of TCR clone 272577 (TRAV2, TRAJ40)
CAVVTSGTYKYIF

SEQ ID NO: 545154 - protein, 16 aa, Homo sapiens
  CDR3 for beta chain variable domain of TCR clone 272577 (TRBV28, TRBJ1-5)
CASLPGGQGSAQPQHF

SEQ ID NO: 545155 - protein, 13 aa, Homo sapiens
  CDR3 for alpha chain variable domain of TCR clone 272578 (TRAV12-2, TRAJ16)
CVVNGPDGQKLLF

SEQ ID NO: 545156 - protein, 13 aa, Homo sapiens
  CDR3 for beta chain variable domain of TCR clone 272578 (TRBV2, TRBJ1-1)
CARNPTGGFHAFF

SEQ ID NO: 545157 - protein, 11 aa, Homo sapiens
  CDR3 for alpha chain variable domain of TCR clone 272579 (TRAV13-1, TRAJ6)
CATLGSYIPTF

SEQ ID NO: 545158 - protein, 12 aa, Homo sapiens
  CDR3 for beta chain variable domain of TCR clone 272579 (TRBV11-2, TRBJ2-1)
CASSPGNNEEFF

SEQ ID NO: 545159 - protein, 15 aa, Homo sapiens
  CDR3 for alpha chain variable domain of TCR clone 272580 (TRAV2, TRAJ9)
CAVAALNTGGFKTIF

SEQ ID NO: 545160 - protein, 19 aa, Homo sapiens
  CDR3 for beta chain variable domain of TCR clone 272580 (TRBV28, TRBJ2-4)
CASSFQPGGPAHSKNIQYF

SEQ ID NO: 545161 - protein, 16 aa, Homo sapiens
  CDR3 for alpha chain variable domain of TCR clone 272581 (TRAV3, TRAJ37)
CAVRVRGSGNTGKLIF

SEQ ID NO: 545162 - protein, 16 aa, Homo sapiens
  CDR3 for beta chain variable domain of TCR clone 272581 (TRBV11-2, TRBJ2-7)
CASSPTTGVVSYEQYF

SEQ ID NO: 545163 - protein, 12 aa, Homo sapiens
  CDR3 for alpha chain variable domain of TCR clone 272582 (TRAV1-2, TRAJ29)
CAVPSGNTPLVF

SEQ ID NO: 545164 - protein, 12 aa, Homo sapiens
  CDR3 for beta chain variable domain of TCR clone 272582 (TRBV7-9, TRBJ2-7)
WASSFGSYEQYF

SEQ ID NO: 545165 - protein, 14 aa, Homo sapiens
  CDR3 for alpha chain variable domain of TCR clone 272583 (TRAV12-2, TRAJ45)
CALPERGGADGLIF

SEQ ID NO: 545166 - protein, 14 aa, Homo sapiens
  CDR3 for beta chain variable domain of TCR clone 272583 (TRBV18, TRBJ1-5)
CASSPGNSNQPQHF

SEQ ID NO: 545167 - protein, 14 aa, Homo sapiens
  CDR3 for alpha chain variable domain of TCR clone 272584 (TRAV17, TRAJ31)
CATVPLSGNARLMF

SEQ ID NO: 545168 - protein, 15 aa, Homo sapiens
  CDR3 for beta chain variable domain of TCR clone 272584 (TRBV15, TRBJ2-2)
CATNGTGGRVGELFF

SEQ ID NO: 545169 - protein, 12 aa, Homo sapiens
  CDR3 for alpha chain variable domain of TCR clone 272585 (TRAV12-3, TRAJ17)
CAMTLTGNKLTF

SEQ ID NO: 545170 - protein, 14 aa, Homo sapiens
  CDR3 for beta chain variable domain of TCR clone 272585 (TRBV6-1, TRBJ1-1)
CASSGTGLNTEAFF

SEQ ID NO: 545171 - protein, 14 aa, Homo sapiens
  CDR3 for alpha chain variable domain of TCR clone 272586 (TRAV12-1, TRAJ23)
CVVIVCNQGGKLIF

SEQ ID NO: 545172 - protein, 15 aa, Homo sapiens
  CDR3 for beta chain variable domain of TCR clone 272586 (TRBV20-1, TRBJ1-5)
CSAKPPGQGPQPQHF

SEQ ID NO: 545173 - protein, 14 aa, Homo sapiens
  CDR3 for alpha chain variable domain of TCR clone 272587 (TRAV25, TRAJ22)
CAVSSSGSARQLTF

SEQ ID NO: 545174 - protein, 16 aa, Homo sapiens
  CDR3 for beta chain variable domain of TCR clone 272587 (TRBV4-2, TRBJ1-1)
CASSPSPGRAAPEAFF

SEQ ID NO: 545175 - protein, 12 aa, Homo sapiens
  CDR3 for alpha chain variable domain of TCR clone 272588 (TRAV12-1, TRAJ16)
CVVFRDGQKLLF

SEQ ID NO: 545176 - protein, 16 aa, Homo sapiens
  CDR3 for beta chain variable domain of TCR clone 272588 (TRBV27, TRBJ2-5)
GASSYGPGGQKETQYF

SEQ ID NO: 545177 - protein, 11 aa, Homo sapiens
  CDR3 for alpha chain variable domain of TCR clone 272589 (TRAV14/DV4, TRAJ3)
RLGSSASKIIF

SEQ ID NO: 545178 - protein, 13 aa, Homo sapiens
  CDR3 for beta chain variable domain of TCR clone 272589 (TRBV7-9, TRBJ2-5)
CASLPSGRETQYF

SEQ ID NO: 545179 - protein, 12 aa, Homo sapiens
  CDR3 for alpha chain variable domain of TCR clone 272590 (TRAV8-3, TRAJ27)
CSVGAEAGKSTF

SEQ ID NO: 545180 - protein, 14 aa, Homo sapiens
  CDR3 for beta chain variable domain of TCR clone 272590 (TRBV2, TRBJ2-1)
CASRLIVGHDEQFF

SEQ ID NO: 545181 - protein, 15 aa, Homo sapiens
  CDR3 for alpha chain variable domain of TCR clone 272591 (TRAV17, TRAJ57)
CATGPSQGGSEKLVF

SEQ ID NO: 545182 - protein, 16 aa, Homo sapiens
  CDR3 for beta chain variable domain of TCR clone 272591 (TRBV12-4, TRBJ1-5)
WASSRPVGGSNQTQHF

SEQ ID NO: 545183 - protein, 14 aa, Homo sapiens
  CDR3 for alpha chain variable domain of TCR clone 272592 (TRAV29/DV5, TRAJ32)
CAAAYGGATNKLIF

SEQ ID NO: 545184 - protein, 11 aa, Homo sapiens
  CDR3 for beta chain variable domain of TCR clone 272592 (TRBV11-2, TRBJ2-2)
CASNLPGELFF

SEQ ID NO: 545185 - protein, 17 aa, Homo sapiens
  CDR3 for alpha chain variable domain of TCR clone 272593 (TRAV3, TRAJ42)
CAVRDRDYGGSQGNLIF

SEQ ID NO: 545186 - protein, 14 aa, Homo sapiens
  CDR3 for beta chain variable domain of TCR clone 272593 (TRBV19, TRBJ1-1)
ISVPVPAGGGEAFF

SEQ ID NO: 545187 - protein, 13 aa, Homo sapiens
  CDR3 for alpha chain variable domain of TCR clone 272594 (TRAV23/DV6, TRAJ36)
CVASQTGANNLFF

SEQ ID NO: 545188 - protein, 13 aa, Homo sapiens
  CDR3 for beta chain variable domain of TCR clone 272594 (TRBV5-4, TRBJ1-5)
CASSLGGDQPQHF

SEQ ID NO: 545189 - protein, 12 aa, Homo sapiens
  CDR3 for alpha chain variable domain of TCR clone 272595 (TRAV35, TRAJ54)
CADLQGAQKLVF

SEQ ID NO: 545190 - protein, 14 aa, Homo sapiens
  CDR3 for beta chain variable domain of TCR clone 272595 (TRBV4-1, TRBJ2-2)
CASSQAVNTGELFF

SEQ ID NO: 545191 - protein, 14 aa, Homo sapiens
  CDR3 for alpha chain variable domain of TCR clone 272596 (TRAV1-1, TRAJ27)
CAVIYNTNAGKSTF

SEQ ID NO: 545192 - protein, 17 aa, Homo sapiens
  CDR3 for beta chain variable domain of TCR clone 272596 (TRBV7-3, TRBJ2-1)
CQQLNVGWREGHGEQFF

SEQ ID NO: 545193 - protein, 14 aa, Homo sapiens
  CDR3 for alpha chain variable domain of TCR clone 272597 (TRAV14/DV4, TRAJ15)
CAMRRDQAGTALIF

SEQ ID NO: 545194 - protein, 13 aa, Homo sapiens
  CDR3 for beta chain variable domain of TCR clone 272597 (TRBV12-4, TRBJ1-1)
CASSLIGDTEAFF

SEQ ID NO: 545195 - protein, 13 aa, Homo sapiens
  CDR3 for alpha chain variable domain of TCR clone 272598 (TRAV27, TRAJ41)
CAGEGNSGYALNF

SEQ ID NO: 545196 - protein, 14 aa, Homo sapiens
  CDR3 for beta chain variable domain of TCR clone 272598 (TRBV7-2, TRBJ1-1)
CASSFLTGTTEGFF

SEQ ID NO: 545197 - protein, 12 aa, Homo sapiens
  CDR3 for alpha chain variable domain of TCR clone 272599 (TRAV3, TRAJ20)
CAVRDPDYQLSF

SEQ ID NO: 545198 - protein, 13 aa, Homo sapiens
  CDR3 for beta chain variable domain of TCR clone 272599 (TRBV9, TRBJ2-1)
CASSVGQGGEQFF

SEQ ID NO: 545199 - protein, 15 aa, Homo sapiens
  CDR3 for alpha chain variable domain of TCR clone 272600 (TRAV21, TRAJ13)
CVVRPTSGGYQQVTF

SEQ ID NO: 545200 - protein, 18 aa, Homo sapiens
  CDR3 for beta chain variable domain of TCR clone 272600 (TRBV11-3, TRBJ2-1)
CASSSYPGGRDSYNEQFF

SEQ ID NO: 545201 - protein, 14 aa, Homo sapiens
  CDR3 for alpha chain variable domain of TCR clone 272601 (TRAV12-2, TRAJ17)
CAVLFKAAGNKLTF

SEQ ID NO: 545202 - protein, 11 aa, Homo sapiens
  CDR3 for beta chain variable domain of TCR clone 272601 (TRBV29-1, TRBJ2-5)
CSEDRPGTQYF

SEQ ID NO: 545203 - protein, 14 aa, Homo sapiens
  CDR3 for alpha chain variable domain of TCR clone 272602 (TRAV27, TRAJ42)
CAGGKVGSQGNLIF

SEQ ID NO: 545204 - protein, 15 aa, Homo sapiens
  CDR3 for beta chain variable domain of TCR clone 272602 (TRBV7-2, TRBJ2-2)
CASSLVAGSAGELFF

SEQ ID NO: 545205 - protein, 14 aa, Homo sapiens
  CDR3 for alpha chain variable domain of TCR clone 272603 (TRAV35, TRAJ13)
CAGSPSGGYQKVTF

SEQ ID NO: 545206 - protein, 17 aa, Homo sapiens
  CDR3 for beta chain variable domain of TCR clone 272603 (TRBV7-3, TRBJ2-2)
CASSLSGTSGGTGELFF

SEQ ID NO: 545207 - protein, 15 aa, Homo sapiens
  CDR3 for alpha chain variable domain of TCR clone 272604 (TRAV23/DV6, TRAJ18)
CAGRYRGSTLRRLYF

SEQ ID NO: 545208 - protein, 13 aa, Homo sapiens
  CDR3 for beta chain variable domain of TCR clone 272604 (TRBV7-2, TRBJ2-7)
CASSSPSGSEQYF

SEQ ID NO: 545209 - protein, 13 aa, Homo sapiens
  CDR3 for alpha chain variable domain of TCR clone 272605 (TRAV1-1, TRAJ9)
CAANNTGGFKTIF

SEQ ID NO: 545210 - protein, 14 aa, Homo sapiens
  CDR3 for beta chain variable domain of TCR clone 272605 (TRBV20-1, TRBJ2-1)
CRAQIGGSANEQFF

SEQ ID NO: 545211 - protein, 15 aa, Homo sapiens
  CDR3 for alpha chain variable domain of TCR clone 272606 (TRAV12-1, TRAJ6)
CVVTPTSGGSYIPTF

SEQ ID NO: 545212 - protein, 17 aa, Homo sapiens
  CDR3 for beta chain variable domain of TCR clone 272606 (TRBV18, TRBJ2-1)
CASSPPLTASSYNEQFF

SEQ ID NO: 545213 - protein, 12 aa, Homo sapiens
  CDR3 for alpha chain variable domain of TCR clone 272607 (TRAV12-1, TRAJ40)
CVVYSGTYKYIF

SEQ ID NO: 545214 - protein, 15 aa, Homo sapiens
  CDR3 for beta chain variable domain of TCR clone 272607 (TRBV10-3, TRBJ2-3)
CAISLTSGGTDTQYF

SEQ ID NO: 545215 - protein, 12 aa, Homo sapiens
  CDR3 for alpha chain variable domain of TCR clone 272608 (TRAV13-2, TRAJ23)
CAERHRGGKLIF

SEQ ID NO: 545216 - protein, 13 aa, Homo sapiens
  CDR3 for beta chain variable domain of TCR clone 272608 (TRBV19, TRBJ2-2)
CASKVSAAGELFF

SEQ ID NO: 545217 - protein, 18 aa, Homo sapiens
  CDR3 for alpha chain variable domain of TCR clone 272609 (TRAV21, TRAJ52)
CAVRPSPAGGTSYGQLTF

SEQ ID NO: 545218 - protein, 17 aa, Homo sapiens
  CDR3 for beta chain variable domain of TCR clone 272609 (TRBV7-8, TRBJ2-6)
CASSAGTGGAGANVLTF

SEQ ID NO: 545219 - protein, 15 aa, Homo sapiens
  CDR3 for alpha chain variable domain of TCR clone 272610 (TRAV8-3, TRAJ40)
CAAPSLGSGTYKYVF

SEQ ID NO: 545220 - protein, 16 aa, Homo sapiens
  CDR3 for beta chain variable domain of TCR clone 272610 (TRBV7-3, TRBJ2-3)
CASSLSGYRPEDTQYF

SEQ ID NO: 545221 - protein, 14 aa, Homo sapiens
  CDR3 for alpha chain variable domain of TCR clone 272611 (TRAV12-2, TRAJ40)
CAVKIPSGTYKYIF

SEQ ID NO: 545222 - protein, 13 aa, Homo sapiens
  CDR3 for beta chain variable domain of TCR clone 272611 (TRBV4-1, TRBJ2-7)
CASSHGQAYEQYF

SEQ ID NO: 545223 - protein, 17 aa, Homo sapiens
  CDR3 for alpha chain variable domain of TCR clone 272612 (TRAV3, TRAJ12)
CAVGDGGRMDSSYKLSF

SEQ ID NO: 545224 - protein, 15 aa, Homo sapiens
  CDR3 for beta chain variable domain of TCR clone 272612 (TRBV2, TRBJ2-5)
CASSGTVAAGETQYF

SEQ ID NO: 545225 - protein, 16 aa, Homo sapiens
  CDR3 for alpha chain variable domain of TCR clone 272613 (TRAV4, TRAJ22)
CLVGDLYSGSARQLTF

SEQ ID NO: 545226 - protein, 16 aa, Homo sapiens
  CDR3 for beta chain variable domain of TCR clone 272613 (TRBV7-9, TRBJ2-1)
CASSDVTGGSYNEQFF

SEQ ID NO: 545227 - protein, 15 aa, Homo sapiens
  CDR3 for alpha chain variable domain of TCR clone 272614 (TRAV16, TRAJ12)
CSNWPLRDSSYKLIF

SEQ ID NO: 545228 - protein, 13 aa, Homo sapiens
  CDR3 for beta chain variable domain of TCR clone 272614 (TRBV4-2, TRBJ1-1)
CASSQAGNTEAFF

SEQ ID NO: 545229 - protein, 14 aa, Homo sapiens
  CDR3 for alpha chain variable domain of TCR clone 272615 (TRAV8-2, TRAJ11)
CVVREKSGYSTLTL

SEQ ID NO: 545230 - protein, 16 aa, Homo sapiens
  CDR3 for beta chain variable domain of TCR clone 272615 (TRBV28, TRBJ2-1)
CASSSPEYPRDNEQFF

SEQ ID NO: 545231 - protein, 11 aa, Homo sapiens
  CDR3 for alpha chain variable domain of TCR clone 272616 (TRAV3, TRAJ21)
CAVGNFNKFYF

SEQ ID NO: 545232 - protein, 16 aa, Homo sapiens
  CDR3 for beta chain variable domain of TCR clone 272616 (TRBV19, TRBJ2-1)
CASSKAGPNSYKEQFF

SEQ ID NO: 545233 - protein, 13 aa, Homo sapiens
  CDR3 for alpha chain variable domain of TCR clone 272617 (TRAV3, TRAJ27)
CAVRPLGAGQSTF

SEQ ID NO: 545234 - protein, 13 aa, Homo sapiens
  CDR3 for beta chain variable domain of TCR clone 272617 (TRBV7-9, TRBJ2-3)
CASSPRSTDTQYF

SEQ ID NO: 545235 - protein, 13 aa, Homo sapiens
  CDR3 for alpha chain variable domain of TCR clone 272618 (TRAV21, TRAJ27)
CAARPGNAGKSTC

SEQ ID NO: 545236 - protein, 13 aa, Homo sapiens
  CDR3 for beta chain variable domain of TCR clone 272618 (TRBV13, TRBJ2-1)
CASILGGRGEQFF

SEQ ID NO: 545237 - protein, 15 aa, Homo sapiens
  CDR3 for alpha chain variable domain of TCR clone 272619 (TRAV8-4, TRAJ13)
CAVSDWGGGYQKATF

SEQ ID NO: 545238 - protein, 15 aa, Homo sapiens
  CDR3 for beta chain variable domain of TCR clone 272619 (TRBV25-1, TRBJ1-4)
CASSPGDSTNEKLFF

SEQ ID NO: 545239 - protein, 12 aa, Homo sapiens
  CDR3 for alpha chain variable domain of TCR clone 272620 (TRAV3, TRAJ39)
CAVIEWSNMPTF

SEQ ID NO: 545240 - protein, 14 aa, Homo sapiens
  CDR3 for beta chain variable domain of TCR clone 272620 (TRBV7-8, TRBJ2-3)
CASSFPDGQDTQYS

SEQ ID NO: 545241 - protein, 13 aa, Homo sapiens
  CDR3 for alpha chain variable domain of TCR clone 272621 (TRAV8-3, TRAJ6)
CAVGSGGSYIPTL

SEQ ID NO: 545242 - protein, 14 aa, Homo sapiens
  CDR3 for beta chain variable domain of TCR clone 272621 (TRBV11-2, TRBJ1-1)
CASSTQRGRTEAFF

SEQ ID NO: 545243 - protein, 14 aa, Homo sapiens
  CDR3 for alpha chain variable domain of TCR clone 272622 (TRAV12-2, TRAJ13)
CAVKKTGGYHKVTF

SEQ ID NO: 545244 - protein, 14 aa, Homo sapiens
  CDR3 for beta chain variable domain of TCR clone 272622 (TRBV12-5, TRBJ2-5)
CASGSRTHHETQYF

SEQ ID NO: 545245 - protein, 10 aa, Homo sapiens
  CDR3 for alpha chain variable domain of TCR clone 272623 (TRAV30, TRAJ48)
CGIVKEKLTF

SEQ ID NO: 545246 - protein, 16 aa, Homo sapiens
  CDR3 for beta chain variable domain of TCR clone 272623 (TRBV27, TRBJ2-1)
SMNVEPGTSGDNEQFF

SEQ ID NO: 545247 - protein, 14 aa, Homo sapiens
  CDR3 for alpha chain variable domain of TCR clone 272624 (TRAV2, TRAJ9)
CAVEDRSGGFKIIF

SEQ ID NO: 545248 - protein, 14 aa, Homo sapiens
  CDR3 for beta chain variable domain of TCR clone 272624 (TRBV7-3, TRBJ2-1)
CASSLAGGTNEQFF

SEQ ID NO: 545249 - protein, 17 aa, Homo sapiens
  CDR3 for alpha chain variable domain of TCR clone 272625 (TRAV3, TRAJ6)
CAVRDGPRAGGSYIPAI

SEQ ID NO: 545250 - protein, 12 aa, Homo sapiens
  CDR3 for beta chain variable domain of TCR clone 272625 (TRBV11-2, TRBJ2-2)
CASSLGGGELFF

SEQ ID NO: 545251 - protein, 14 aa, Homo sapiens
  CDR3 for alpha chain variable domain of TCR clone 272626 (TRAV5, TRAJ36)
CAEISGTGANNLFF

SEQ ID NO: 545252 - protein, 14 aa, Homo sapiens
  CDR3 for beta chain variable domain of TCR clone 272626 (TRBV25-1, TRBJ2-4)
CASSRNSAKNMQYF

SEQ ID NO: 545253 - protein, 14 aa, Homo sapiens
  CDR3 for alpha chain variable domain of TCR clone 272627 (TRAV1-2, TRAJ16)
CAVNRFSDGQKLLF

SEQ ID NO: 545254 - protein, 15 aa, Homo sapiens
  CDR3 for beta chain variable domain of TCR clone 272627 (TRBV7-2, TRBJ2-7)
CASSLAVGQVYEQYF

SEQ ID NO: 545255 - protein, 14 aa, Homo sapiens
  CDR3 for alpha chain variable domain of TCR clone 272628 (TRAV26-1, TRAJ21)
CIVRPPYNFNKFYF

SEQ ID NO: 545256 - protein, 14 aa, Homo sapiens
  CDR3 for beta chain variable domain of TCR clone 272628 (TRBV11-3, TRBJ2-1)
CASRATTSGSIQFF

SEQ ID NO: 545257 - protein, 12 aa, Homo sapiens
  CDR3 for alpha chain variable domain of TCR clone 272629 (TRAV6, TRAJ37)
CALGSNTGKLIF

SEQ ID NO: 545258 - protein, 17 aa, Homo sapiens
  CDR3 for beta chain variable domain of TCR clone 272629 (TRBV19, TRBJ2-2)
CASSTIVGDRVSGELFF

SEQ ID NO: 545259 - protein, 16 aa, Homo sapiens
  CDR3 for alpha chain variable domain of TCR clone 272630 (TRAV12-2, TRAJ40)
CAVIRGGTSGTYKYII

SEQ ID NO: 545260 - protein, 14 aa, Homo sapiens
  CDR3 for beta chain variable domain of TCR clone 272630 (TRBV20-1, TRBJ2-5)
CSARDGRAGETQYF

SEQ ID NO: 545261 - protein, 14 aa, Homo sapiens
  CDR3 for alpha chain variable domain of TCR clone 272631 (TRAV17, TRAJ39)
CATDPVRAGNMLTS

SEQ ID NO: 545262 - protein, 15 aa, Homo sapiens
  CDR3 for beta chain variable domain of TCR clone 272631 (TRBV13, TRBJ1-5)
CASSFGQGGVQPQHF

SEQ ID NO: 545263 - protein, 17 aa, Homo sapiens
  CDR3 for alpha chain variable domain of TCR clone 272632 (TRAV16, TRAJ58)
CITVLSNGETSGSRLTF

SEQ ID NO: 545264 - protein, 14 aa, Homo sapiens
  CDR3 for beta chain variable domain of TCR clone 272632 (TRBV20-1, TRBJ2-2)
SAVLVPRAPGELFF

SEQ ID NO: 545265 - protein, 18 aa, Homo sapiens
  CDR3 for alpha chain variable domain of TCR clone 272633 (TRAV26-1, TRAJ52)
CIVRVEGAGGTSSGKLTF

SEQ ID NO: 545266 - protein, 13 aa, Homo sapiens
  CDR3 for beta chain variable domain of TCR clone 272633 (TRBV7-3, TRBJ1-2)
CASSLKRGYGYTF

SEQ ID NO: 545267 - protein, 12 aa, Homo sapiens
  CDR3 for alpha chain variable domain of TCR clone 272634 (TRAV12-3, TRAJ17)
CAMTLTGNKLTF

SEQ ID NO: 545268 - protein, 20 aa, Homo sapiens
  CDR3 for beta chain variable domain of TCR clone 272634 (TRBV6-6, TRBJ2-5)
CASSPGGGLRGDPVLRAGHA

SEQ ID NO: 545269 - protein, 10 aa, Homo sapiens
  CDR3 for alpha chain variable domain of TCR clone 272635 (TRAV1-2, TRAJ18)
CAVRGEAQPG

SEQ ID NO: 545270 - protein, 15 aa, Homo sapiens
  CDR3 for beta chain variable domain of TCR clone 272635 (TRBV20-1, TRBJ2-1)
CSAEGGLLAGDEQFF

SEQ ID NO: 545271 - protein, 15 aa, Homo sapiens
  CDR3 for alpha chain variable domain of TCR clone 272636 (TRAV8-4, TRAJ37)
CAVTYGSSNTGKLIF

SEQ ID NO: 545272 - protein, 14 aa, Homo sapiens
  CDR3 for beta chain variable domain of TCR clone 272636 (TRBV20-1, TRBJ2-1)
CSAHPGLPYNEQFF

SEQ ID NO: 545273 - protein, 14 aa, Homo sapiens
  CDR3 for alpha chain variable domain of TCR clone 272637 (TRAV8-1, TRAJ32)
CAVNARGVTNKLIF

SEQ ID NO: 545274 - protein, 14 aa, Homo sapiens
  CDR3 for beta chain variable domain of TCR clone 272637 (TRBV9, TRBJ2-7)
CASSVGVGSYEQYF

SEQ ID NO: 545275 - protein, 16 aa, Homo sapiens
  CDR3 for alpha chain variable domain of TCR clone 272638 (TRAV8-3, TRAJ45)
CAVGDGSGGGADGLTF

SEQ ID NO: 545276 - protein, 14 aa, Homo sapiens
  CDR3 for beta chain variable domain of TCR clone 272638 (TRBV13, TRBJ2-1)
CASSAGQGAYEQFF

SEQ ID NO: 545277 - protein, 16 aa, Homo sapiens
  CDR3 for alpha chain variable domain of TCR clone 272639 (TRAV27, TRAJ13)
CAGAKSDSGGYQKVTF

SEQ ID NO: 545278 - protein, 15 aa, Homo sapiens
  CDR3 for beta chain variable domain of TCR clone 272639 (TRBV29-1, TRBJ2-1)
CSVGRHALFYNKQFF

SEQ ID NO: 545279 - protein, 12 aa, Homo sapiens
  CDR3 for alpha chain variable domain of TCR clone 272640 (TRAV16, TRAJ10)
CSRTGGGNKLTF

SEQ ID NO: 545280 - protein, 16 aa, Homo sapiens
  CDR3 for beta chain variable domain of TCR clone 272640 (TRBV7-3, TRBJ2-2)
CASSLKRGTLTGELFF

SEQ ID NO: 545281 - protein, 13 aa, Homo sapiens
  CDR3 for alpha chain variable domain of TCR clone 272641 (TRAV36/DV7, TRAJ54)
CAVDIQGAQQLVF

SEQ ID NO: 545282 - protein, 14 aa, Homo sapiens
  CDR3 for beta chain variable domain of TCR clone 272641 (TRBV19, TRBJ2-7)
CASNFRDTFTGMYF

SEQ ID NO: 545283 - protein, 14 aa, Homo sapiens
  CDR3 for alpha chain variable domain of TCR clone 272642 (TRAV1-2, TRAJ8)
CAVREDTGFQKLVF

SEQ ID NO: 545284 - protein, 13 aa, Homo sapiens
  CDR3 for beta chain variable domain of TCR clone 272642 (TRBV20-1, TRBJ1-1)
CSARGGGNTEAFC

SEQ ID NO: 545285 - protein, 11 aa, Homo sapiens
  CDR3 for alpha chain variable domain of TCR clone 272643 (TRAV35, TRAJ13)
VPLLGVTKVTF

SEQ ID NO: 545286 - protein, 13 aa, Homo sapiens
  CDR3 for beta chain variable domain of TCR clone 272643 (TRBV29-1, TRBJ1-1)
CSVGDSRNTEAFF

SEQ ID NO: 545287 - protein, 13 aa, Homo sapiens
  CDR3 for alpha chain variable domain of TCR clone 272644 (TRAV8-3, TRAJ36)
CAVGATGANNLFF

SEQ ID NO: 545288 - protein, 16 aa, Homo sapiens
  CDR3 for beta chain variable domain of TCR clone 272644 (TRBV11-2, TRBJ1-2)
CASSLDRGGNNYGYTF

SEQ ID NO: 545289 - protein, 12 aa, Homo sapiens
  CDR3 for alpha chain variable domain of TCR clone 272645 (TRAV38-1, TRAJ57)
CAFMKLPPSLVF

SEQ ID NO: 545290 - protein, 13 aa, Homo sapiens
  CDR3 for beta chain variable domain of TCR clone 272645 (TRBV19, TRBJ2-7)
CASSTSGSYEQYF

SEQ ID NO: 545291 - protein, 17 aa, Homo sapiens
  CDR3 for alpha chain variable domain of TCR clone 272646 (TRAV3, TRAJ12)
CAVRDGGRVDSSYKLIF

SEQ ID NO: 545292 - protein, 15 aa, Homo sapiens
  CDR3 for beta chain variable domain of TCR clone 272646 (TRBV20-1, TRBJ2-5)
CSAGGTGGLQETQYF

SEQ ID NO: 545293 - protein, 15 aa, Homo sapiens
  CDR3 for alpha chain variable domain of TCR clone 272647 (TRAV27, TRAJ38)
CAARRNAGNNRKLIW

SEQ ID NO: 545294 - protein, 13 aa, Homo sapiens
  CDR3 for beta chain variable domain of TCR clone 272647 (TRBV7-3, TRBJ2-1)
FASSLDSHNEQFF

SEQ ID NO: 545295 - protein, 17 aa, Homo sapiens
  CDR3 for alpha chain variable domain of TCR clone 272648 (TRAV36/DV7, TRAJ52)
CAVAQRAGGTSYGKLTF

SEQ ID NO: 545296 - protein, 16 aa, Homo sapiens
  CDR3 for beta chain variable domain of TCR clone 272648 (TRBV7-3, TRBJ2-1)
CASSLSGGVHYNEQFF

SEQ ID NO: 545297 - protein, 15 aa, Homo sapiens
  CDR3 for alpha chain variable domain of TCR clone 272649 (TRAV8-3, TRAJ40)
CAAPSLGSVTSKYIF

SEQ ID NO: 545298 - protein, 16 aa, Homo sapiens
  CDR3 for beta chain variable domain of TCR clone 272649 (TRBV7-3, TRBJ2-3)
CASSLSGYRPEDTQYF

SEQ ID NO: 545299 - protein, 14 aa, Homo sapiens
  CDR3 for alpha chain variable domain of TCR clone 272650 (TRAV12-3, TRAJ22)
CAMSLFGSARQLTF

SEQ ID NO: 545300 - protein, 14 aa, Homo sapiens
  CDR3 for beta chain variable domain of TCR clone 272650 (TRBV12-4, TRBJ2-2)
CASSQAVNTGELFF

SEQ ID NO: 545301 - protein, 13 aa, Homo sapiens
  CDR3 for alpha chain variable domain of TCR clone 272651 (TRAV2, TRAJ15)
CAVEAQAGTALIL

SEQ ID NO: 545302 - protein, 14 aa, Homo sapiens
  CDR3 for beta chain variable domain of TCR clone 272651 (TRBV6-5, TRBJ2-7)
CASVASGGAHEQYF

SEQ ID NO: 545303 - protein, 14 aa, Homo sapiens
  CDR3 for alpha chain variable domain of TCR clone 272652 (TRAV12-2, TRAJ13)
CAVKKTGGYQKVTF

SEQ ID NO: 545304 - protein, 15 aa, Homo sapiens
  CDR3 for beta chain variable domain of TCR clone 272652 (TRBV12-4, TRBJ1-5)
CASSLSLAGNQPQHF

SEQ ID NO: 545305 - protein, 16 aa, Homo sapiens
  CDR3 for alpha chain variable domain of TCR clone 272653 (TRAV30, TRAJ24)
CGTEIVDAASWGKFQF

SEQ ID NO: 545306 - protein, 14 aa, Homo sapiens
  CDR3 for beta chain variable domain of TCR clone 272653 (TRBV12-5, TRBJ2-5)
CASGSRKHQETQYF

SEQ ID NO: 545307 - protein, 14 aa, Homo sapiens
  CDR3 for alpha chain variable domain of TCR clone 272654 (TRAV3, TRAJ47)
CCERHRGIWKQLVF

SEQ ID NO: 545308 - protein, 14 aa, Homo sapiens
  CDR3 for beta chain variable domain of TCR clone 272654 (TRBV13, TRBJ2-5)
CASSLERVGETQYF

SEQ ID NO: 545309 - protein, 13 aa, Homo sapiens
  CDR3 for alpha chain variable domain of TCR clone 272655 (TRAV20, TRAJ42)
CAVQGGSQGNHIF

SEQ ID NO: 545310 - protein, 15 aa, Homo sapiens
  CDR3 for beta chain variable domain of TCR clone 272655 (TRBV10-1, TRBJ2-1)
CASSEWRGTYNEQFF

SEQ ID NO: 545311 - protein, 14 aa, Homo sapiens
  CDR3 for alpha chain variable domain of TCR clone 272656 (TRAV1-2, TRAJ8)
CAVGEDTGFQKLVF

SEQ ID NO: 545312 - protein, 17 aa, Homo sapiens
  CDR3 for beta chain variable domain of TCR clone 272656 (TRBV20-1, TRBJ2-2)
CSASGSVQGGLTGELFF

SEQ ID NO: 545313 - protein, 15 aa, Homo sapiens
  CDR3 for alpha chain variable domain of TCR clone 272657 (TRAV4, TRAJ39)
CLVGPNNNAGNMLTF

SEQ ID NO: 545314 - protein, 14 aa, Homo sapiens
  CDR3 for beta chain variable domain of TCR clone 272657 (TRBV19, TRBJ2-1)
CASPTFVLSCEQFF

SEQ ID NO: 545315 - protein, 11 aa, Homo sapiens
  CDR3 for alpha chain variable domain of TCR clone 272658 (TRAV13-1, TRAJ52)
PGGTSYVKLTF

SEQ ID NO: 545316 - protein, 16 aa, Homo sapiens
  CDR3 for beta chain variable domain of TCR clone 272658 (TRBV28, TRBJ2-7)
CASSPWVATGDLSQYF

SEQ ID NO: 545317 - protein, 17 aa, Homo sapiens
  CDR3 for alpha chain variable domain of TCR clone 272659 (TRAV8-3, TRAJ52)
CAVGAEAGGTSYGKLTC

SEQ ID NO: 545318 - protein, 15 aa, Homo sapiens
  CDR3 for beta chain variable domain of TCR clone 272659 (TRBV5-1, TRBJ2-5)
CASSRQGLGQETQYF

SEQ ID NO: 545319 - protein, 12 aa, Homo sapiens
  CDR3 for alpha chain variable domain of TCR clone 272660 (TRAV17, TRAJ57)
RATDGGSEELVF

SEQ ID NO: 545320 - protein, 12 aa, Homo sapiens
  CDR3 for beta chain variable domain of TCR clone 272660 (TRBV29-1, TRBJ2-2)
CSADKYTGELFF

SEQ ID NO: 545321 - protein, 16 aa, Homo sapiens
  CDR3 for alpha chain variable domain of TCR clone 272661 (TRAV3, TRAJ37)
CALRGKGSGNTGKLTF

SEQ ID NO: 545322 - protein, 16 aa, Homo sapiens
  CDR3 for beta chain variable domain of TCR clone 272661 (TRBV28, TRBJ1-5)
CASSFRGGYSNQPQHF

SEQ ID NO: 545323 - protein, 15 aa, Homo sapiens
  CDR3 for alpha chain variable domain of TCR clone 272662 (TRAV12-3, TRAJ6)
CAMSAASGGSYIPTF

SEQ ID NO: 545324 - protein, 13 aa, Homo sapiens
  CDR3 for beta chain variable domain of TCR clone 272662 (TRBV20-1, TRBJ1-2)
CSASPGFNYGYTF

SEQ ID NO: 545325 - protein, 17 aa, Homo sapiens
  CDR3 for alpha chain variable domain of TCR clone 272663 (TRAV27, TRAJ42)
CAERVIYYGGSQGNPIF

SEQ ID NO: 545326 - protein, 14 aa, Homo sapiens
  CDR3 for beta chain variable domain of TCR clone 272663 (TRBV20-1, TRBJ1-1)
CSAQTRIGGTEAFF

SEQ ID NO: 545327 - protein, 14 aa, Homo sapiens
  CDR3 for alpha chain variable domain of TCR clone 272664 (TRAV1-2, TRAJ16)
CAVNRFSDGQKLLF

SEQ ID NO: 545328 - protein, 16 aa, Homo sapiens
  CDR3 for beta chain variable domain of TCR clone 272664 (TRBV29-1, TRBJ2-7)
CSVEVVGTSGSYEQYF

SEQ ID NO: 545329 - protein, 14 aa, Homo sapiens
  CDR3 for alpha chain variable domain of TCR clone 272665 (TRAV8-4, TRAJ15)
CAVTIREAGTALIF

SEQ ID NO: 545330 - protein, 12 aa, Homo sapiens
  CDR3 for beta chain variable domain of TCR clone 272665 (TRBV11-2, TRBJ2-2)
CASSLPTGELFF

SEQ ID NO: 545331 - protein, 15 aa, Homo sapiens
  CDR3 for alpha chain variable domain of TCR clone 272666 (TRAV35, TRAJ40)
CAGQLGQAGTYKYIF

SEQ ID NO: 545332 - protein, 14 aa, Homo sapiens
  CDR3 for beta chain variable domain of TCR clone 272666 (TRBV7-3, TRBJ2-1)
CASSLTGGANEQLF

SEQ ID NO: 545333 - protein, 13 aa, Homo sapiens
  CDR3 for alpha chain variable domain of TCR clone 272667 (TRAV29/DV5, TRAJ31)
CAASRNNNARLLF

SEQ ID NO: 545334 - protein, 15 aa, Homo sapiens
  CDR3 for beta chain variable domain of TCR clone 272667 (TRBV19, TRBJ2-7)
CASSPAGSGEALRYF

SEQ ID NO: 545335 - protein, 14 aa, Homo sapiens
  CDR3 for alpha chain variable domain of TCR clone 272668 (TRAV12-1, TRAJ13)
CVVIDSGGYQKVTF

SEQ ID NO: 545336 - protein, 15 aa, Homo sapiens
  CDR3 for beta chain variable domain of TCR clone 272668 (TRBV5-1, TRBJ2-3)
CASSVTSGSTDTQYF

SEQ ID NO: 545337 - protein, 17 aa, Homo sapiens
  CDR3 for alpha chain variable domain of TCR clone 272669 (TRAV38-2/DV8, TRAJ28)
CAFLTLYSGAGSYQLTF

SEQ ID NO: 545338 - protein, 14 aa, Homo sapiens
  CDR3 for beta chain variable domain of TCR clone 272669 (TRBV25-1, TRBJ1-1)
CASTHLGGNTEAFF

SEQ ID NO: 545339 - protein, 16 aa, Homo sapiens
  CDR3 for alpha chain variable domain of TCR clone 272670 (TRAV30, TRAJ24)
CGTEIVDADSWGKFQF

SEQ ID NO: 545340 - protein, 15 aa, Homo sapiens
  CDR3 for beta chain variable domain of TCR clone 272670 (TRBV20-1, TRBJ2-7)
CSAMPQAGASYEQYF

SEQ ID NO: 545341 - protein, 16 aa, Homo sapiens
  CDR3 for alpha chain variable domain of TCR clone 272671 (TRAV17, TRAJ28)
CATASVSGTGSYQLTF

SEQ ID NO: 545342 - protein, 11 aa, Homo sapiens
  CDR3 for beta chain variable domain of TCR clone 272671 (TRBV7-9, TRBJ2-5)
CASSLGETQYF

SEQ ID NO: 545343 - protein, 14 aa, Homo sapiens
  CDR3 for alpha chain variable domain of TCR clone 272672 (TRAV12-2, TRAJ44)
CAVNPAGPASKLTF

SEQ ID NO: 545344 - protein, 12 aa, Homo sapiens
  CDR3 for beta chain variable domain of TCR clone 272672 (TRBV27, TRBJ2-5)
CASSPTGETQYF

SEQ ID NO: 545345 - protein, 16 aa, Homo sapiens
  CDR3 for alpha chain variable domain of TCR clone 272673 (TRAV14/DV4, TRAJ54)
CAMREGRIQGAQKLVC

SEQ ID NO: 545346 - protein, 15 aa, Homo sapiens
  CDR3 for beta chain variable domain of TCR clone 272673 (TRBV20-1, TRBJ2-7)
CSARDRVSGMDEQYF

SEQ ID NO: 545347 - protein, 12 aa, Homo sapiens
  CDR3 for alpha chain variable domain of TCR clone 272674 (TRAV12-3, TRAJ17)
CAMTLTGNKLTF

SEQ ID NO: 545348 - protein, 15 aa, Homo sapiens
  CDR3 for beta chain variable domain of TCR clone 272674 (TRBV20-1, TRBJ2-7)
HSARDRVSGMDEQYF

SEQ ID NO: 545349 - protein, 13 aa, Homo sapiens
  CDR3 for alpha chain variable domain of TCR clone 272675 (TRAV30, TRAJ24)
CGTVTDSWGKLQF

SEQ ID NO: 545350 - protein, 14 aa, Homo sapiens
  CDR3 for beta chain variable domain of TCR clone 272675 (TRBV7-9, TRBJ2-5)
CASSPAQDQETQYF

SEQ ID NO: 545351 - protein, 14 aa, Homo sapiens
  CDR3 for alpha chain variable domain of TCR clone 272676 (TRAV1-2, TRAJ8)
CAVREDTGFQKLVF

SEQ ID NO: 545352 - protein, 16 aa, Homo sapiens
  CDR3 for beta chain variable domain of TCR clone 272676 (TRBV12-4, TRBJ1-5)
CASSRPVGGSNQPQYF

SEQ ID NO: 545353 - protein, 14 aa, Homo sapiens
  CDR3 for alpha chain variable domain of TCR clone 272677 (TRAV20, TRAJ42)
CAVQAGGSQGNLIF

SEQ ID NO: 545354 - protein, 15 aa, Homo sapiens
  CDR3 for beta chain variable domain of TCR clone 272677 (TRBV10-2, TRBJ2-6)
CASSEQGTGANVLTF

SEQ ID NO: 545355 - protein, 12 aa, Homo sapiens
  CDR3 for alpha chain variable domain of TCR clone 272678 (TRAV21, TRAJ27)
CAANTNAGKSTF

SEQ ID NO: 545356 - protein, 15 aa, Homo sapiens
  CDR3 for beta chain variable domain of TCR clone 272678 (TRBV6-6, TRBJ2-5)
CASSYGKIIQETQYF

SEQ ID NO: 545357 - protein, 14 aa, Homo sapiens
  CDR3 for alpha chain variable domain of TCR clone 272679 (TRAV1-2, TRAJ16)
CAVNWFSDGQKLLF

SEQ ID NO: 545358 - protein, 13 aa, Homo sapiens
  CDR3 for beta chain variable domain of TCR clone 272679 (TRBV7-2, TRBJ1-1)
CASNLKGAKVAFF

SEQ ID NO: 545359 - protein, 13 aa, Homo sapiens
  CDR3 for alpha chain variable domain of TCR clone 272680 (TRAV16, TRAJ26)
CALLDNYGQNVVF

SEQ ID NO: 545360 - protein, 13 aa, Homo sapiens
  CDR3 for beta chain variable domain of TCR clone 272680 (TRBV7-9, TRBJ1-2)
CASSLKQNYGYTF

SEQ ID NO: 545361 - protein, 15 aa, Homo sapiens
  CDR3 for alpha chain variable domain of TCR clone 272681 (TRAV23/DV6, TRAJ45)
CAASARGGGADGLTF

SEQ ID NO: 545362 - protein, 14 aa, Homo sapiens
  CDR3 for beta chain variable domain of TCR clone 272681 (TRBV7-2, TRBJ2-2)
CASRGQGAAGELFF

SEQ ID NO: 545363 - protein, 17 aa, Homo sapiens
  CDR3 for alpha chain variable domain of TCR clone 272682 (TRAV3, TRAJ42)
CAVRDRDYGGSQGNLIF

SEQ ID NO: 545364 - protein, 14 aa, Homo sapiens
  CDR3 for beta chain variable domain of TCR clone 272682 (TRBV25-1, TRBJ1-1)
CASTPLGGNTEAFF

SEQ ID NO: 545365 - protein, 14 aa, Homo sapiens
  CDR3 for alpha chain variable domain of TCR clone 272683 (TRAV12-1, TRAJ17)
CVVNYNSAGNKLTF

SEQ ID NO: 545366 - protein, 17 aa, Homo sapiens
  CDR3 for beta chain variable domain of TCR clone 272683 (TRBV20-1, TRBJ2-1)
CSASSSGLAGSYNEQFF

SEQ ID NO: 545367 - protein, 16 aa, Homo sapiens
  CDR3 for alpha chain variable domain of TCR clone 272684 (TRAV3, TRAJ10)
CAVRDMRAGGGHKLTF

SEQ ID NO: 545368 - protein, 15 aa, Homo sapiens
  CDR3 for beta chain variable domain of TCR clone 272684 (TRBV5-1, TRBJ2-1)
CASSPPRAPYNEQFF

SEQ ID NO: 545369 - protein, 15 aa, Homo sapiens
  CDR3 for alpha chain variable domain of TCR clone 272685 (TRAV12-3, TRAJ6)
CAMSATTGGSYIPTF

SEQ ID NO: 545370 - protein, 15 aa, Homo sapiens
  CDR3 for beta chain variable domain of TCR clone 272685 (TRBV2, TRBJ1-3)
CASSISPRSGSTIYF

SEQ ID NO: 545371 - protein, 17 aa, Homo sapiens
  CDR3 for alpha chain variable domain of TCR clone 272686 (TRAV3, TRAJ42)
CSVRDRDYGGSQGNLIF

SEQ ID NO: 545372 - protein, 14 aa, Homo sapiens
  CDR3 for beta chain variable domain of TCR clone 272686 (TRBV6-1, TRBJ1-3)
CASVQGGGGNTIYF

SEQ ID NO: 545373 - protein, 15 aa, Homo sapiens
  CDR3 for alpha chain variable domain of TCR clone 272687 (TRAV16, TRAJ16)
CALQGGGSDGQKLLF

SEQ ID NO: 545374 - protein, 16 aa, Homo sapiens
  CDR3 for beta chain variable domain of TCR clone 272687 (TRBV15, TRBJ2-3)
CATRLSGGRAPDTQYF

SEQ ID NO: 545375 - protein, 14 aa, Homo sapiens
  CDR3 for alpha chain variable domain of TCR clone 272688 (TRAV12-3, TRAJ10)
SHLPLTGGGNKLTF

SEQ ID NO: 545376 - protein, 16 aa, Homo sapiens
  CDR3 for beta chain variable domain of TCR clone 272688 (TRBV28, TRBJ2-6)
CASSNRRGSGANVLTF

SEQ ID NO: 545377 - protein, 13 aa, Homo sapiens
  CDR3 for alpha chain variable domain of TCR clone 272689 (TRAV1-2, TRAJ16)
CAVNRFSDGQAAL

SEQ ID NO: 545378 - protein, 14 aa, Homo sapiens
  CDR3 for beta chain variable domain of TCR clone 272689 (TRBV19, TRBJ2-2)
CASSTLHRSGELFF

SEQ ID NO: 545379 - protein, 11 aa, Homo sapiens
  CDR3 for alpha chain variable domain of TCR clone 272690 (TRAV2, TRAJ13)
CASGGYQKVTF

SEQ ID NO: 545380 - protein, 14 aa, Homo sapiens
  CDR3 for beta chain variable domain of TCR clone 272690 (TRBV28, TRBJ1-1)
CASSESGRGTEAFF

SEQ ID NO: 545381 - protein, 13 aa, Homo sapiens
  CDR3 for alpha chain variable domain of TCR clone 272691 (TRAV17, TRAJ9)
CATDYTGGFKTIL

SEQ ID NO: 545382 - protein, 13 aa, Homo sapiens
  CDR3 for beta chain variable domain of TCR clone 272691 (TRBV7-9, TRBJ1-2)
CASSLKQNYGYTF

SEQ ID NO: 545383 - protein, 17 aa, Homo sapiens
  CDR3 for alpha chain variable domain of TCR clone 272692 (TRAV13-2, TRAJ42)
CAEGASHYGGSQGNLIF

SEQ ID NO: 545384 - protein, 16 aa, Homo sapiens
  CDR3 for beta chain variable domain of TCR clone 272692 (TRBV28, TRBJ1-1)
CASSSGGQPVATEAFF

SEQ ID NO: 545385 - protein, 16 aa, Homo sapiens
  CDR3 for alpha chain variable domain of TCR clone 272693 (TRAV16, TRAJ4)
CALSRMFSGGYNKLIF

SEQ ID NO: 545386 - protein, 17 aa, Homo sapiens
  CDR3 for beta chain variable domain of TCR clone 272693 (TRBV4-3, TRBJ1-5)
CASSQWGDGGPNQPQHF

SEQ ID NO: 545387 - protein, 12 aa, Homo sapiens
  CDR3 for alpha chain variable domain of TCR clone 272694 (TRAV4, TRAJ26)
CLVGDYGQNFVF

SEQ ID NO: 545388 - protein, 15 aa, Homo sapiens
  CDR3 for beta chain variable domain of TCR clone 272694 (TRBV7-9, TRBJ1-4)
CASSRTGGFNEKLFF

SEQ ID NO: 545389 - protein, 14 aa, Homo sapiens
  CDR3 for alpha chain variable domain of TCR clone 272695 (TRAV8-4, TRAJ9)
CAVTFNAGGFKTIF

SEQ ID NO: 545390 - protein, 15 aa, Homo sapiens
  CDR3 for beta chain variable domain of TCR clone 272695 (TRBV7-9, TRBJ2-2)
CASSPETGAGGELFF

SEQ ID NO: 545391 - protein, 12 aa, Homo sapiens
  CDR3 for alpha chain variable domain of TCR clone 272696 (TRAV21, TRAJ33)
CAKMDSNYQLIW

SEQ ID NO: 545392 - protein, 12 aa, Homo sapiens
  CDR3 for beta chain variable domain of TCR clone 272696 (TRBV11-2, TRBJ2-5)
CASSLVGETQYF

SEQ ID NO: 545393 - protein, 13 aa, Homo sapiens
  CDR3 for alpha chain variable domain of TCR clone 272697 (TRAV12-3, TRAJ6)
CANPSGGSYIPTF

SEQ ID NO: 545394 - protein, 16 aa, Homo sapiens
  CDR3 for beta chain variable domain of TCR clone 272697 (TRBV20-1, TRBJ1-4)
CSARPYGGELNEKLFF

SEQ ID NO: 545395 - protein, 17 aa, Homo sapiens
  CDR3 for alpha chain variable domain of TCR clone 272698 (TRAV36/DV7, TRAJ52)
CAVAQRAGGTSYGKLTF

SEQ ID NO: 545396 - protein, 14 aa, Homo sapiens
  CDR3 for beta chain variable domain of TCR clone 272698 (TRBV4-2, TRBJ1-4)
CASSPSSGNEKLFF

SEQ ID NO: 545397 - protein, 14 aa, Homo sapiens
  CDR3 for alpha chain variable domain of TCR clone 272699 (TRAV12-1, TRAJ17)
CVVNYKAAGNKLTF

SEQ ID NO: 545398 - protein, 15 aa, Homo sapiens
  CDR3 for beta chain variable domain of TCR clone 272699 (TRBV20-1, TRBJ1-1)
CSASRGVTGNTEAFF

SEQ ID NO: 545399 - protein, 16 aa, Homo sapiens
  CDR3 for alpha chain variable domain of TCR clone 272700 (TRAV23/DV6, TRAJ9)
CAASIGGNTGGFKTIF

SEQ ID NO: 545400 - protein, 15 aa, Homo sapiens
  CDR3 for beta chain variable domain of TCR clone 272700 (TRBV6-3, TRBJ2-7)
CASSSPGTVRYEQYF

SEQ ID NO: 545401 - protein, 14 aa, Homo sapiens
  CDR3 for alpha chain variable domain of TCR clone 272701 (TRAV17, TRAJ57)
CATEAQGGSEKLVF

SEQ ID NO: 545402 - protein, 15 aa, Homo sapiens
  CDR3 for beta chain variable domain of TCR clone 272701 (TRBV6-3, TRBJ2-7)
CASSSPGTVFYEQYF

SEQ ID NO: 545403 - protein, 15 aa, Homo sapiens
  CDR3 for alpha chain variable domain of TCR clone 272702 (TRAV4, TRAJ39)
CLVCPNNNAGNMLTF

SEQ ID NO: 545404 - protein, 15 aa, Homo sapiens
  CDR3 for beta chain variable domain of TCR clone 272702 (TRBV7-9, TRBJ1-6)
CASSSPGRGNSPLHF

SEQ ID NO: 545405 - protein, 14 aa, Homo sapiens
  CDR3 for alpha chain variable domain of TCR clone 272703 (TRAV12-2, TRAJ13)
CAVKKTGGYQNVTF

SEQ ID NO: 545406 - protein, 15 aa, Homo sapiens
  CDR3 for beta chain variable domain of TCR clone 272703 (TRBV9, TRBJ1-6)
CASSVAGTGDSPLHF

SEQ ID NO: 545407 - protein, 15 aa, Homo sapiens
  CDR3 for alpha chain variable domain of TCR clone 272704 (TRAV23/DV6, TRAJ57)
CAASSTLSQGGSENL

SEQ ID NO: 545408 - protein, 14 aa, Homo sapiens
  CDR3 for beta chain variable domain of TCR clone 272704 (TRBV25-1, TRBJ1-1)
CASTHLGGNTEAFF

SEQ ID NO: 545409 - protein, 14 aa, Homo sapiens
  CDR3 for alpha chain variable domain of TCR clone 272705 (TRAV1-2, TRAJ16)
CAVNRFSDGQKLLF

SEQ ID NO: 545410 - protein, 13 aa, Homo sapiens
  CDR3 for beta chain variable domain of TCR clone 272705 (TRBV7-9, TRBJ2-3)
CQQLRGCTDTQYF

SEQ ID NO: 545411 - protein, 12 aa, Homo sapiens
  CDR3 for alpha chain variable domain of TCR clone 272706 (TRAV1-2, TRAJ17)
CAMRAAGNKLTF

SEQ ID NO: 545412 - protein, 16 aa, Homo sapiens
  CDR3 for beta chain variable domain of TCR clone 272706 (TRBV20-1, TRBJ2-1)
SSAPGLAGSYSDEQFF

SEQ ID NO: 545413 - protein, 15 aa, Homo sapiens
  CDR3 for alpha chain variable domain of TCR clone 272707 (TRAV8-3, TRAJ11)
CAVGLLNSGYSTLTF

SEQ ID NO: 545414 - protein, 15 aa, Homo sapiens
  CDR3 for beta chain variable domain of TCR clone 272707 (TRBV6-3, TRBJ2-7)
CASSSPGTVFYEQYF

SEQ ID NO: 545415 - protein, 14 aa, Homo sapiens
  CDR3 for alpha chain variable domain of TCR clone 272708 (TRAV12-2, TRAJ13)
CAVKKTGGYQKVTF

SEQ ID NO: 545416 - protein, 12 aa, Homo sapiens
  CDR3 for beta chain variable domain of TCR clone 272708 (TRBV14, TRBJ2-7)
CASSLYKDEQYF

SEQ ID NO: 545417 - protein, 16 aa, Homo sapiens
  CDR3 for alpha chain variable domain of TCR clone 272709 (TRAV38-1, TRAJ32)
CAFMKGGGGATNKLIF

SEQ ID NO: 545418 - protein, 13 aa, Homo sapiens
  CDR3 for beta chain variable domain of TCR clone 272709 (TRBV6-1, TRBJ1-1)
CASSRQGNTEAFF

SEQ ID NO: 545419 - protein, 12 aa, Homo sapiens
  CDR3 for alpha chain variable domain of TCR clone 272710 (TRAV1-2, TRAJ33)
CAALDSNYQLIW

SEQ ID NO: 545420 - protein, 14 aa, Homo sapiens
  CDR3 for beta chain variable domain of TCR clone 272710 (TRBV7-8, TRBJ2-3)
CASGFPDGQDTQYF

SEQ ID NO: 545421 - protein, 13 aa, Homo sapiens
  CDR3 for alpha chain variable domain of TCR clone 272711 (TRAV9-2, TRAJ53)
CALSGGSNYKLTF

SEQ ID NO: 545422 - protein, 17 aa, Homo sapiens
  CDR3 for beta chain variable domain of TCR clone 272711 (TRBV11-2, TRBJ2-1)
CASSLYPPGVEYNEKFF

SEQ ID NO: 545423 - protein, 13 aa, Homo sapiens
  CDR3 for alpha chain variable domain of TCR clone 272712 (TRAV8-4, TRAJ9)
CAVSETGGFKTIF

SEQ ID NO: 545424 - protein, 20 aa, Homo sapiens
  CDR3 for beta chain variable domain of TCR clone 272712 (TRBV7-8, TRBJ2-2)
CASSHLFPGPTIHITGELFF

SEQ ID NO: 545425 - protein, 13 aa, Homo sapiens
  CDR3 for alpha chain variable domain of TCR clone 272713 (TRAV23/DV6, TRAJ22)
CAPYSGSARQLTF

SEQ ID NO: 545426 - protein, 15 aa, Homo sapiens
  CDR3 for beta chain variable domain of TCR clone 272713 (TRBV11-2, TRBJ1-6)
CASSLDPWTVSPLHF

SEQ ID NO: 545427 - protein, 15 aa, Homo sapiens
  CDR3 for alpha chain variable domain of TCR clone 272714 (TRAV12-3, TRAJ27)
SAMRAYNTNAGKSTF

SEQ ID NO: 545428 - protein, 13 aa, Homo sapiens
  CDR3 for beta chain variable domain of TCR clone 272714 (TRBV11-2, TRBJ2-5)
CASSRGPSETQYF

SEQ ID NO: 545429 - protein, 11 aa, Homo sapiens
  CDR3 for alpha chain variable domain of TCR clone 272715 (TRAV2, TRAJ21)
CAVFNFNKFYF

SEQ ID NO: 545430 - protein, 14 aa, Homo sapiens
  CDR3 for beta chain variable domain of TCR clone 272715 (TRBV12-4, TRBJ1-3)
CASTLTGAGNTIYF

SEQ ID NO: 545431 - protein, 13 aa, Homo sapiens
  CDR3 for alpha chain variable domain of TCR clone 272716 (TRAV8-3, TRAJ28)
CAVGAVGSYHLTF

SEQ ID NO: 545432 - protein, 15 aa, Homo sapiens
  CDR3 for beta chain variable domain of TCR clone 272716 (TRBV7-8, TRBJ2-1)
CASSSRLAAYNEQFF

SEQ ID NO: 545433 - protein, 15 aa, Homo sapiens
  CDR3 for alpha chain variable domain of TCR clone 272717 (TRAV12-1, TRAJ45)
CVVLSGGGGADGLTF

SEQ ID NO: 545434 - protein, 16 aa, Homo sapiens
  CDR3 for beta chain variable domain of TCR clone 272717 (TRBV12-5, TRBJ2-5)
CASGPRTSGNQGTQYF

SEQ ID NO: 545435 - protein, 12 aa, Homo sapiens
  CDR3 for alpha chain variable domain of TCR clone 272718 (TRAV12-3, TRAJ17)
CAMTLTGNKLTF

SEQ ID NO: 545436 - protein, 14 aa, Homo sapiens
  CDR3 for beta chain variable domain of TCR clone 272718 (TRBV28, TRBJ2-1)
CASSPATGYNEQFF

SEQ ID NO: 545437 - protein, 14 aa, Homo sapiens
  CDR3 for alpha chain variable domain of TCR clone 272719 (TRAV8-2, TRAJ23)
CVVSGENQGGKLIF

SEQ ID NO: 545438 - protein, 16 aa, Homo sapiens
  CDR3 for beta chain variable domain of TCR clone 272719 (TRBV4-3, TRBJ2-1)
CASSQERLAGFNEQFF

SEQ ID NO: 545439 - protein, 13 aa, Homo sapiens
  CDR3 for alpha chain variable domain of TCR clone 272720 (TRAV12-2, TRAJ52)
CNAGGTSYGKLTF

SEQ ID NO: 545440 - protein, 12 aa, Homo sapiens
  CDR3 for beta chain variable domain of TCR clone 272720 (TRBV12-4, TRBJ2-7)
CASSLGGYEQYF

SEQ ID NO: 545441 - protein, 14 aa, Homo sapiens
  CDR3 for alpha chain variable domain of TCR clone 272721 (TRAV1-2, TRAJ16)
CAVNRFSDGQRLLF

SEQ ID NO: 545442 - protein, 11 aa, Homo sapiens
  CDR3 for beta chain variable domain of TCR clone 272721 (TRBV29-1, TRBJ2-5)
CSGDRTGTQYF

SEQ ID NO: 545443 - protein, 15 aa, Homo sapiens
  CDR3 for alpha chain variable domain of TCR clone 272722 (TRAV8-1, TRAJ23)
CAVNSHYNQGGKLIF

SEQ ID NO: 545444 - protein, 14 aa, Homo sapiens
  CDR3 for beta chain variable domain of TCR clone 272722 (TRBV7-6, TRBJ2-3)
CASSLGTVTDTQYF

SEQ ID NO: 545445 - protein, 13 aa, Homo sapiens
  CDR3 for alpha chain variable domain of TCR clone 272723 (TRAV27, TRAJ41)
CAGEGNSGYALNF

SEQ ID NO: 545446 - protein, 13 aa, Homo sapiens
  CDR3 for beta chain variable domain of TCR clone 272723 (TRBV4-1, TRBJ2-1)
CASSQAGGDEQFF

SEQ ID NO: 545447 - protein, 11 aa, Homo sapiens
  CDR3 for alpha chain variable domain of TCR clone 272724 (TRAV2, TRAJ13)
CASGGYQKVTF

SEQ ID NO: 545448 - protein, 14 aa, Homo sapiens
  CDR3 for beta chain variable domain of TCR clone 272724 (TRBV12-4, TRBJ2-3)
CASSLVPSTDTQYF

SEQ ID NO: 545449 - protein, 14 aa, Homo sapiens
  CDR3 for alpha chain variable domain of TCR clone 272725 (TRAV12-2, TRAJ13)
CDVKKTGGYQKVTF

SEQ ID NO: 545450 - protein, 14 aa, Homo sapiens
  CDR3 for beta chain variable domain of TCR clone 272725 (TRBV10-3, TRBJ2-1)
CAISSDLAYNEQFF

SEQ ID NO: 545451 - protein, 14 aa, Homo sapiens
  CDR3 for alpha chain variable domain of TCR clone 272726 (TRAV12-2, TRAJ17)
CAVNIKAAGNKLTF

SEQ ID NO: 545452 - protein, 13 aa, Homo sapiens
  CDR3 for beta chain variable domain of TCR clone 272726 (TRBV19, TRBJ1-2)
CASSVPGQDGYTF

SEQ ID NO: 545453 - protein, 13 aa, Homo sapiens
  CDR3 for alpha chain variable domain of TCR clone 272727 (TRAV35, TRAJ21)
CAGQLSNFNKFYF

SEQ ID NO: 545454 - protein, 11 aa, Homo sapiens
  CDR3 for beta chain variable domain of TCR clone 272727 (TRBV7-6, TRBJ2-5)
CASSSQETQYV

SEQ ID NO: 545455 - protein, 18 aa, Homo sapiens
  CDR3 for alpha chain variable domain of TCR clone 272728 (TRAV29/DV5, TRAJ52)
CAAGFRGPGGTSYGKLTF

SEQ ID NO: 545456 - protein, 16 aa, Homo sapiens
  CDR3 for beta chain variable domain of TCR clone 272728 (TRBV7-3, TRBJ2-2)
CASSLKRGTLSGELFF

SEQ ID NO: 545457 - protein, 15 aa, Homo sapiens
  CDR3 for alpha chain variable domain of TCR clone 272729 (TRAV13-1, TRAJ17)
CAASKERAAGNKLTF

SEQ ID NO: 545458 - protein, 15 aa, Homo sapiens
  CDR3 for beta chain variable domain of TCR clone 272729 (TRBV6-3, TRBJ2-7)
CASSSPGTVFYEQYF

SEQ ID NO: 545459 - protein, 14 aa, Homo sapiens
  CDR3 for alpha chain variable domain of TCR clone 272730 (TRAV4, TRAJ43)
CLVGPMYNNNDMRF

SEQ ID NO: 545460 - protein, 21 aa, Homo sapiens
  CDR3 for beta chain variable domain of TCR clone 272730 (TRBV11-1, TRBJ2-1)
CASSARERLRPEGPSYNERFF

SEQ ID NO: 545461 - protein, 14 aa, Homo sapiens
  CDR3 for alpha chain variable domain of TCR clone 272731 (TRAV1-2, TRAJ16)
CAFNRFSDGQKLLF

SEQ ID NO: 545462 - protein, 14 aa, Homo sapiens
  CDR3 for beta chain variable domain of TCR clone 272731 (TRBV7-9, TRBJ2-3)
CASSLEDGTDTQYF

SEQ ID NO: 545463 - protein, 16 aa, Homo sapiens
  CDR3 for alpha chain variable domain of TCR clone 272732 (TRAV16, TRAJ57)
CAPYFITQGGSEKLVF

SEQ ID NO: 545464 - protein, 17 aa, Homo sapiens
  CDR3 for beta chain variable domain of TCR clone 272732 (TRBV24-1, TRBJ2-4)
CATSDAEARGVRNMQYF

SEQ ID NO: 545465 - protein, 13 aa, Homo sapiens
  CDR3 for alpha chain variable domain of TCR clone 272733 (TRAV1-1, TRAJ27)
CAVRKHQCRQINL

SEQ ID NO: 545466 - protein, 14 aa, Homo sapiens
  CDR3 for beta chain variable domain of TCR clone 272733 (TRBV7-6, TRBJ2-6)
CASSLSGGANALTF

SEQ ID NO: 545467 - protein, 12 aa, Homo sapiens
  CDR3 for alpha chain variable domain of TCR clone 272734 (TRAV12-2, TRAJ47)
CAVAEYGNKLVF

SEQ ID NO: 545468 - protein, 14 aa, Homo sapiens
  CDR3 for beta chain variable domain of TCR clone 272734 (TRBV20-1, TRBJ1-1)
CSAMGGTANTDAFF

SEQ ID NO: 545469 - protein, 14 aa, Homo sapiens
  CDR3 for alpha chain variable domain of TCR clone 272735 (TRAV13-1, TRAJ4)
CAATLPSGYNKLIF

SEQ ID NO: 545470 - protein, 14 aa, Homo sapiens
  CDR3 for beta chain variable domain of TCR clone 272735 (TRBV25-1, TRBJ1-1)
CASTHLGGNTEAFF

SEQ ID NO: 545471 - protein, 14 aa, Homo sapiens
  CDR3 for alpha chain variable domain of TCR clone 272736 (TRAV12-2, TRAJ44)
CAVNPAGTASKLTF

SEQ ID NO: 545472 - protein, 15 aa, Homo sapiens
  CDR3 for beta chain variable domain of TCR clone 272736 (TRBV9, TRBJ2-1)
CASSLAGSSYNEQFF

SEQ ID NO: 545473 - protein, 13 aa, Homo sapiens
  CDR3 for alpha chain variable domain of TCR clone 272737 (TRAV21, TRAJ27)
CAARPGNAGKSTF

SEQ ID NO: 545474 - protein, 15 aa, Homo sapiens
  CDR3 for beta chain variable domain of TCR clone 272737 (TRBV5-7, TRBJ1-5)
CASSCGKLWDQPQHF

SEQ ID NO: 545475 - protein, 13 aa, Homo sapiens
  CDR3 for alpha chain variable domain of TCR clone 272738 (TRAV16, TRAJ11)
FALTQSGYSTLTF

SEQ ID NO: 545476 - protein, 17 aa, Homo sapiens
  CDR3 for beta chain variable domain of TCR clone 272738 (TRBV5-1, TRBJ1-5)
CASSLAFLTRGNQPQHF

SEQ ID NO: 545477 - protein, 12 aa, Homo sapiens
  CDR3 for alpha chain variable domain of TCR clone 272739 (TRAV12-2, TRAJ7)
CAVMRGNNRLAF

SEQ ID NO: 545478 - protein, 17 aa, Homo sapiens
  CDR3 for beta chain variable domain of TCR clone 272739 (TRBV7-9, TRBJ2-3)
CASSPTVVGDLTDTQYF

SEQ ID NO: 545479 - protein, 14 aa, Homo sapiens
  CDR3 for alpha chain variable domain of TCR clone 272740 (TRAV9-2, TRAJ39)
CALYIYNAGNILTF

SEQ ID NO: 545480 - protein, 12 aa, Homo sapiens
  CDR3 for beta chain variable domain of TCR clone 272740 (TRBV28, TRBJ2-3)
CASSLYRDTQYF

SEQ ID NO: 545481 - protein, 14 aa, Homo sapiens
  CDR3 for alpha chain variable domain of TCR clone 272741 (TRAV12-2, TRAJ13)
GALKKTGGYQKVTF

SEQ ID NO: 545482 - protein, 15 aa, Homo sapiens
  CDR3 for beta chain variable domain of TCR clone 272741 (TRBV27, TRBJ2-1)
CASSNGGGSSNEQFF

SEQ ID NO: 545483 - protein, 19 aa, Homo sapiens
  CDR3 for alpha chain variable domain of TCR clone 272742 (TRAV26-1, TRAJ52)
CIVRAHRNAGGTSYGKLTF

SEQ ID NO: 545484 - protein, 15 aa, Homo sapiens
  CDR3 for beta chain variable domain of TCR clone 272742 (TRBV29-1, TRBJ2-1)
CSGRDRKSAYNEQLF

SEQ ID NO: 545485 - protein, 14 aa, Homo sapiens
  CDR3 for alpha chain variable domain of TCR clone 272743 (TRAV1-2, TRAJ16)
CAVNRFSDGQKLRF

SEQ ID NO: 545486 - protein, 13 aa, Homo sapiens
  CDR3 for beta chain variable domain of TCR clone 272743 (TRBV12-4, TRBJ2-5)
CASSLGGSRTQYF

SEQ ID NO: 545487 - protein, 14 aa, Homo sapiens
  CDR3 for alpha chain variable domain of TCR clone 272744 (TRAV8-6, TRAJ10)
CAVTSTGGGNKLTF

SEQ ID NO: 545488 - protein, 14 aa, Homo sapiens
  CDR3 for beta chain variable domain of TCR clone 272744 (TRBV19, TRBJ2-1)
CASPTFVVSGEQFF

SEQ ID NO: 545489 - protein, 19 aa, Homo sapiens
  CDR3 for alpha chain variable domain of TCR clone 272745 (TRAV26-1, TRAJ52)
CIVRVANNAGGTSYGKLTF

SEQ ID NO: 545490 - protein, 12 aa, Homo sapiens
  CDR3 for beta chain variable domain of TCR clone 272745 (TRBV7-6, TRBJ2-5)
CASSLSQETQYF

SEQ ID NO: 545491 - protein, 14 aa, Homo sapiens
  CDR3 for alpha chain variable domain of TCR clone 272746 (TRAV12-3, TRAJ10)
SHLPLTGGGNKLTF

SEQ ID NO: 545492 - protein, 14 aa, Homo sapiens
  CDR3 for beta chain variable domain of TCR clone 272746 (TRBV19, TRBJ2-1)
CASRGDPTGNEQFF

SEQ ID NO: 545493 - protein, 13 aa, Homo sapiens
  CDR3 for alpha chain variable domain of TCR clone 272747 (TRAV12-1, TRAJ9)
CVVLNTGGFKTIF

SEQ ID NO: 545494 - protein, 14 aa, Homo sapiens
  CDR3 for beta chain variable domain of TCR clone 272747 (TRBV13, TRBJ2-5)
CASSLGPRGETQYL

SEQ ID NO: 545495 - protein, 12 aa, Homo sapiens
  CDR3 for alpha chain variable domain of TCR clone 272748 (TRAV1-1, TRAJ23)
CAVTNQGGKLIF

SEQ ID NO: 545496 - protein, 13 aa, Homo sapiens
  CDR3 for beta chain variable domain of TCR clone 272748 (TRBV4-2, TRBJ1-1)
CASSQAGNTEAFF

SEQ ID NO: 545497 - protein, 14 aa, Homo sapiens
  CDR3 for alpha chain variable domain of TCR clone 272749 (TRAV12-2, TRAJ24)
CAVTPADSWGKLQF

SEQ ID NO: 545498 - protein, 12 aa, Homo sapiens
  CDR3 for beta chain variable domain of TCR clone 272749 (TRBV3-1, TRBJ2-1)
CASSQGSSGRFF

SEQ ID NO: 545499 - protein, 12 aa, Homo sapiens
  CDR3 for alpha chain variable domain of TCR clone 272750 (TRAV1-1, TRAJ39)
CTVPVVGNMLTF

SEQ ID NO: 545500 - protein, 15 aa, Homo sapiens
  CDR3 for beta chain variable domain of TCR clone 272750 (TRBV19, TRBJ1-6)
CASSTQGAVGSPLHF

SEQ ID NO: 545501 - protein, 13 aa, Homo sapiens
  CDR3 for alpha chain variable domain of TCR clone 272751 (TRAV3, TRAJ30)
CAVRDRGDDKIIF

SEQ ID NO: 545502 - protein, 16 aa, Homo sapiens
  CDR3 for beta chain variable domain of TCR clone 272751 (TRBV7-3, TRBJ2-2)
CASSLKRGTLAGELFF

SEQ ID NO: 545503 - protein, 17 aa, Homo sapiens
  CDR3 for alpha chain variable domain of TCR clone 272752 (TRAV8-6, TRAJ58)
CAVSSWVGETSGARLTF

SEQ ID NO: 545504 - protein, 14 aa, Homo sapiens
  CDR3 for beta chain variable domain of TCR clone 272752 (TRBV4-2, TRBJ2-3)
CASRETRAPGMQYF

SEQ ID NO: 545505 - protein, 15 aa, Homo sapiens
  CDR3 for alpha chain variable domain of TCR clone 272753 (TRAV25, TRAJ53)
CAATGGGGSNYKLTC

SEQ ID NO: 545506 - protein, 11 aa, Homo sapiens
  CDR3 for beta chain variable domain of TCR clone 272753 (TRBV11-3, TRBJ2-2)
CASSSGGELFF

SEQ ID NO: 545507 - protein, 14 aa, Homo sapiens
  CDR3 for alpha chain variable domain of TCR clone 272754 (TRAV21, TRAJ28)
CAVSSGAGSYQLTF

SEQ ID NO: 545508 - protein, 14 aa, Homo sapiens
  CDR3 for beta chain variable domain of TCR clone 272754 (TRBV18, TRBJ1-4)
CASSPGPNGEKLFF

SEQ ID NO: 545509 - protein, 15 aa, Homo sapiens
  CDR3 for alpha chain variable domain of TCR clone 272755 (TRAV3, TRAJ9)
CAVRARNTGGFKTIF

SEQ ID NO: 545510 - protein, 12 aa, Homo sapiens
  CDR3 for beta chain variable domain of TCR clone 272755 (TRBV11-2, TRBJ2-7)
CVSSLPTYEQYF

SEQ ID NO: 545511 - protein, 15 aa, Homo sapiens
  CDR3 for alpha chain variable domain of TCR clone 272756 (TRAV12-1, TRAJ44)
CVVSVNTGTASKLTF

SEQ ID NO: 545512 - protein, 17 aa, Homo sapiens
  CDR3 for beta chain variable domain of TCR clone 272756 (TRBV7-8, TRBJ2-6)
CAISAGTGGAGANVLTF

SEQ ID NO: 545513 - protein, 13 aa, Homo sapiens
  CDR3 for alpha chain variable domain of TCR clone 272757 (TRAV27, TRAJ29)
CAGAHSGNTPLVF

SEQ ID NO: 545514 - protein, 18 aa, Homo sapiens
  CDR3 for beta chain variable domain of TCR clone 272757 (TRBV20-1, TRBJ2-3)
CSASGLAGGPGTTDTQYF

SEQ ID NO: 545515 - protein, 16 aa, Homo sapiens
  CDR3 for alpha chain variable domain of TCR clone 272758 (TRAV12-3, TRAJ53)
CAMSPGSGGSNYKLTF

SEQ ID NO: 545516 - protein, 12 aa, Homo sapiens
  CDR3 for beta chain variable domain of TCR clone 272758 (TRBV7-8, TRBJ2-7)
CASSLGDKEQYF

SEQ ID NO: 545517 - protein, 12 aa, Homo sapiens
  CDR3 for alpha chain variable domain of TCR clone 272759 (TRAV17, TRAJ40)
CWALGGTYKYIF

SEQ ID NO: 545518 - protein, 16 aa, Homo sapiens
  CDR3 for beta chain variable domain of TCR clone 272759 (TRBV11-2, TRBJ1-2)
CASSLDTGGADYGYTF

SEQ ID NO: 545519 - protein, 15 aa, Homo sapiens
  CDR3 for alpha chain variable domain of TCR clone 272760 (TRAV3, TRAJ17)
CAVRNGPAAGNRRTL

SEQ ID NO: 545520 - protein, 12 aa, Homo sapiens
  CDR3 for beta chain variable domain of TCR clone 272760 (TRBV12-4, TRBJ2-1)
CASSPGRNEQFF

SEQ ID NO: 545521 - protein, 14 aa, Homo sapiens
  CDR3 for alpha chain variable domain of TCR clone 272761 (TRAV1-2, TRAJ8)
CAVREDTGFQKLVF

SEQ ID NO: 545522 - protein, 14 aa, Homo sapiens
  CDR3 for beta chain variable domain of TCR clone 272761 (TRBV12-5, TRBJ2-5)
CASGSRTDQENQYF

SEQ ID NO: 545523 - protein, 12 aa, Homo sapiens
  CDR3 for alpha chain variable domain of TCR clone 272762 (TRAV13-2, TRAJ23)
CAERHRGGKLIF

SEQ ID NO: 545524 - protein, 16 aa, Homo sapiens
  CDR3 for beta chain variable domain of TCR clone 272762 (TRBV20-1, TRBJ2-7)
CSASTSGRLSSYEQYL

SEQ ID NO: 545525 - protein, 15 aa, Homo sapiens
  CDR3 for alpha chain variable domain of TCR clone 272763 (TRAV3, TRAJ5)
CAVRDLDTGSRALTF

SEQ ID NO: 545526 - protein, 13 aa, Homo sapiens
  CDR3 for beta chain variable domain of TCR clone 272763 (TRBV12-4, TRBJ2-7)
CASSPTDTYEQYF

SEQ ID NO: 545527 - protein, 12 aa, Homo sapiens
  CDR3 for alpha chain variable domain of TCR clone 272764 (TRAV12-1, TRAJ40)
CVVPSGTYKYIF

SEQ ID NO: 545528 - protein, 15 aa, Homo sapiens
  CDR3 for beta chain variable domain of TCR clone 272764 (TRBV12-4, TRBJ2-1)
CASSPLSGRNNKQFF

SEQ ID NO: 545529 - protein, 17 aa, Homo sapiens
  CDR3 for alpha chain variable domain of TCR clone 272765 (TRAV38-2/DV8, TRAJ23)
CALSRKLIFGQGAELSV

SEQ ID NO: 545530 - protein, 12 aa, Homo sapiens
  CDR3 for beta chain variable domain of TCR clone 272765 (TRBV11-2, TRBJ2-2)
CASSLGGGELFF

SEQ ID NO: 545531 - protein, 11 aa, Homo sapiens
  CDR3 for alpha chain variable domain of TCR clone 272766 (TRAV12-2, TRAJ29)
CAVTLRSPLVF

SEQ ID NO: 545532 - protein, 14 aa, Homo sapiens
  CDR3 for beta chain variable domain of TCR clone 272766 (TRBV7-3, TRBJ2-1)
CASSLAGGTNEQFF

SEQ ID NO: 545533 - protein, 10 aa, Homo sapiens
  CDR3 for alpha chain variable domain of TCR clone 272767 (TRAV12-3, TRAJ4)
CAMTGAGTRL

SEQ ID NO: 545534 - protein, 14 aa, Homo sapiens
  CDR3 for beta chain variable domain of TCR clone 272767 (TRBV10-3, TRBJ1-1)
CAISDTDRGVESFF

SEQ ID NO: 545535 - protein, 12 aa, Homo sapiens
  CDR3 for alpha chain variable domain of TCR clone 272768 (TRAV12-1, TRAJ40)
CVVYSGTYKYIF

SEQ ID NO: 545536 - protein, 18 aa, Homo sapiens
  CDR3 for beta chain variable domain of TCR clone 272768 (TRBV11-2, TRBJ2-3)
CASSLGGAARGAPKTQYF

SEQ ID NO: 545537 - protein, 12 aa, Homo sapiens
  CDR3 for alpha chain variable domain of TCR clone 272769 (TRAV27, TRAJ34)
CAGAKNTDKLIF

SEQ ID NO: 545538 - protein, 16 aa, Homo sapiens
  CDR3 for beta chain variable domain of TCR clone 272769 (TRBV11-2, TRBJ2-7)
CASSPTTGGVSYEQYF

SEQ ID NO: 545539 - protein, 12 aa, Homo sapiens
  CDR3 for alpha chain variable domain of TCR clone 272770 (TRAV3, TRAJ20)
CAVRDPDYKLSF

SEQ ID NO: 545540 - protein, 16 aa, Homo sapiens
  CDR3 for beta chain variable domain of TCR clone 272770 (TRBV5-1, TRBJ2-1)
CASSLEGRGLYNEQFF

SEQ ID NO: 545541 - protein, 14 aa, Homo sapiens
  CDR3 for alpha chain variable domain of TCR clone 272771 (TRAV8-6, TRAJ48)
CAVSESFGNEKLTF

SEQ ID NO: 545542 - protein, 14 aa, Homo sapiens
  CDR3 for beta chain variable domain of TCR clone 272771 (TRBV19, TRBJ2-1)
CARGARSFQWEQFF

SEQ ID NO: 545543 - protein, 15 aa, Homo sapiens
  CDR3 for alpha chain variable domain of TCR clone 272772 (TRAV2, TRAJ15)
SAVEDRGQAGTALIF

SEQ ID NO: 545544 - protein, 14 aa, Homo sapiens
  CDR3 for beta chain variable domain of TCR clone 272772 (TRBV7-2, TRBJ2-3)
CQQLVVRGPDTQYF

SEQ ID NO: 545545 - protein, 11 aa, Homo sapiens
  CDR3 for alpha chain variable domain of TCR clone 272773 (TRAV21, TRAJ39)
LLANAGNMLTF

SEQ ID NO: 545546 - protein, 18 aa, Homo sapiens
  CDR3 for beta chain variable domain of TCR clone 272773 (TRBV7-2, TRBJ2-7)
CASSLSGRGLAGGYEQYF

SEQ ID NO: 545547 - protein, 14 aa, Homo sapiens
  CDR3 for alpha chain variable domain of TCR clone 272774 (TRAV9-2, TRAJ45)
CALPSRGGADGLPF

SEQ ID NO: 545548 - protein, 21 aa, Homo sapiens
  CDR3 for beta chain variable domain of TCR clone 272774 (TRBV4-1, TRBJ2-2)
CASSQEGMSRGGPKDTGELFF

SEQ ID NO: 545549 - protein, 14 aa, Homo sapiens
  CDR3 for alpha chain variable domain of TCR clone 272775 (TRAV1-2, TRAJ16)
CAVNRFSDGQKLLF

SEQ ID NO: 545550 - protein, 12 aa, Homo sapiens
  CDR3 for beta chain variable domain of TCR clone 272775 (TRBV28, TRBJ2-6)
CAIQARANVLTF

SEQ ID NO: 545551 - protein, 13 aa, Homo sapiens
  CDR3 for alpha chain variable domain of TCR clone 272776 (TRAV13-1, TRAJ41)
CADAPNSGYALNF

SEQ ID NO: 545552 - protein, 13 aa, Homo sapiens
  CDR3 for beta chain variable domain of TCR clone 272776 (TRBV19, TRBJ2-7)
CASEGTKTYEQYF

SEQ ID NO: 545553 - protein, 14 aa, Homo sapiens
  CDR3 for alpha chain variable domain of TCR clone 272777 (TRAV34, TRAJ44)
CGADGTGTASKLTF

SEQ ID NO: 545554 - protein, 15 aa, Homo sapiens
  CDR3 for beta chain variable domain of TCR clone 272777 (TRBV18, TRBJ1-1)
CASSPRQGENTEAFF

SEQ ID NO: 545555 - protein, 11 aa, Homo sapiens
  CDR3 for alpha chain variable domain of TCR clone 272778 (TRAV21, TRAJ48)
CAVDGNEKLTF

SEQ ID NO: 545556 - protein, 16 aa, Homo sapiens
  CDR3 for beta chain variable domain of TCR clone 272778 (TRBV19, TRBJ2-1)
CVSSSKGTRSYNEQFF

SEQ ID NO: 545557 - protein, 13 aa, Homo sapiens
  CDR3 for alpha chain variable domain of TCR clone 272779 (TRAV12-3, TRAJ13)
CAMTSGGYQKVTF

SEQ ID NO: 545558 - protein, 13 aa, Homo sapiens
  CDR3 for beta chain variable domain of TCR clone 272779 (TRBV20-1, TRBJ1-5)
CSASQQVVQPQHF

SEQ ID NO: 545559 - protein, 14 aa, Homo sapiens
  CDR3 for alpha chain variable domain of TCR clone 272780 (TRAV17, TRAJ54)
CATDANQGAQKLVF

SEQ ID NO: 545560 - protein, 14 aa, Homo sapiens
  CDR3 for beta chain variable domain of TCR clone 272780 (TRBV25-1, TRBJ1-1)
CASTHLGGNTEAFV

SEQ ID NO: 545561 - protein, 15 aa, Homo sapiens
  CDR3 for alpha chain variable domain of TCR clone 272781 (TRAV8-1, TRAJ6)
CAVNAGAGGSYIPTF

SEQ ID NO: 545562 - protein, 16 aa, Homo sapiens
  CDR3 for beta chain variable domain of TCR clone 272781 (TRBV7-8, TRBJ2-5)
WASSFPGGPDPETQYF

SEQ ID NO: 545563 - protein, 14 aa, Homo sapiens
  CDR3 for alpha chain variable domain of TCR clone 272782 (TRAV38-1, TRAJ29)
CAFITPSGNTPLVF

SEQ ID NO: 545564 - protein, 15 aa, Homo sapiens
  CDR3 for beta chain variable domain of TCR clone 272782 (TRBV4-1, TRBJ2-7)
CASSQQGQGFDEQYF

SEQ ID NO: 545565 - protein, 16 aa, Homo sapiens
  CDR3 for alpha chain variable domain of TCR clone 272783 (TRAV12-2, TRAJ45)
CAVIFLSGGGADGLTF

SEQ ID NO: 545566 - protein, 19 aa, Homo sapiens
  CDR3 for beta chain variable domain of TCR clone 272783 (TRBV28, TRBJ2-4)
CASSFQPGGPAHAKNIQYF

SEQ ID NO: 545567 - protein, 21 aa, Homo sapiens
  CDR3 for alpha chain variable domain of TCR clone 272784 (TRAV10, TRAJ34)
CVVSGKHRQAHLWDWDQITSL

SEQ ID NO: 545568 - protein, 14 aa, Homo sapiens
  CDR3 for beta chain variable domain of TCR clone 272784 (TRBV19, TRBJ2-1)
CASPTFALSGEQFF

SEQ ID NO: 545569 - protein, 12 aa, Homo sapiens
  CDR3 for alpha chain variable domain of TCR clone 272785 (TRAV29/DV5, TRAJ49)
CAATDTGNQFYF

SEQ ID NO: 545570 - protein, 13 aa, Homo sapiens
  CDR3 for beta chain variable domain of TCR clone 272785 (TRBV28, TRBJ2-7)
CASSVTWDREMYF

SEQ ID NO: 545571 - protein, 14 aa, Homo sapiens
  CDR3 for alpha chain variable domain of TCR clone 272786 (TRAV3, TRAJ9)
CCESPKYWRLKTIF

SEQ ID NO: 545572 - protein, 12 aa, Homo sapiens
  CDR3 for beta chain variable domain of TCR clone 272786 (TRBV11-2, TRBJ2-7)
CASSLPTYEQYF

SEQ ID NO: 545573 - protein, 16 aa, Homo sapiens
  CDR3 for alpha chain variable domain of TCR clone 272787 (TRAV4, TRAJ22)
CLVGDPYSGSARQLTF

SEQ ID NO: 545574 - protein, 16 aa, Homo sapiens
  CDR3 for beta chain variable domain of TCR clone 272787 (TRBV7-9, TRBJ2-3)
CASSPWRGVGTDTQYF

SEQ ID NO: 545575 - protein, 12 aa, Homo sapiens
  CDR3 for alpha chain variable domain of TCR clone 272788 (TRAV12-1, TRAJ40)
RVVYSGTYKYIF

SEQ ID NO: 545576 - protein, 14 aa, Homo sapiens
  CDR3 for beta chain variable domain of TCR clone 272788 (TRBV7-9, TRBJ2-5)
CASSLDTAQETQYF

SEQ ID NO: 545577 - protein, 14 aa, Homo sapiens
  CDR3 for alpha chain variable domain of TCR clone 272789 (TRAV12-2, TRAJ29)
CAVRRNSGNTPLVF

SEQ ID NO: 545578 - protein, 13 aa, Homo sapiens
  CDR3 for beta chain variable domain of TCR clone 272789 (TRBV12-4, TRBJ2-1)
CVSSHYTDNEQFF

SEQ ID NO: 545579 - protein, 15 aa, Homo sapiens
  CDR3 for alpha chain variable domain of TCR clone 272790 (TRAV4, TRAJ39)
CLVGPNNNAGNMLTF

SEQ ID NO: 545580 - protein, 15 aa, Homo sapiens
  CDR3 for beta chain variable domain of TCR clone 272790 (TRBV5-1, TRBJ2-1)
CASSPPRAPYNEQLF

SEQ ID NO: 545581 - protein, 13 aa, Homo sapiens
  CDR3 for alpha chain variable domain of TCR clone 272791 (TRAV13-2, TRAJ22)
CLWWISSARQLTF

SEQ ID NO: 545582 - protein, 15 aa, Homo sapiens
  CDR3 for beta chain variable domain of TCR clone 272791 (TRBV7-2, TRBJ2-3)
CASSSTGLATDTQYF

SEQ ID NO: 545583 - protein, 11 aa, Homo sapiens
  CDR3 for alpha chain variable domain of TCR clone 272792 (TRAV8-3, TRAJ4)
CYSGGYNKLIF

SEQ ID NO: 545584 - protein, 14 aa, Homo sapiens
  CDR3 for beta chain variable domain of TCR clone 272792 (TRBV7-9, TRBJ2-3)
CASSLEDGTDTQYF

SEQ ID NO: 545585 - protein, 12 aa, Homo sapiens
  CDR3 for alpha chain variable domain of TCR clone 272793 (TRAV3, TRAJ31)
CAVRDGNARLMF

SEQ ID NO: 545586 - protein, 18 aa, Homo sapiens
  CDR3 for beta chain variable domain of TCR clone 272793 (TRBV7-2, TRBJ2-3)
CSSSLKREGSGITDTQYF

SEQ ID NO: 545587 - protein, 17 aa, Homo sapiens
  CDR3 for alpha chain variable domain of TCR clone 272794 (TRAV8-6, TRAJ4)
CAVSDPGVAGGYNKLIF

SEQ ID NO: 545588 - protein, 15 aa, Homo sapiens
  CDR3 for beta chain variable domain of TCR clone 272794 (TRBV10-3, TRBJ2-1)
CAIRNGTSGHNEQFF

SEQ ID NO: 545589 - protein, 13 aa, Homo sapiens
  CDR3 for alpha chain variable domain of TCR clone 272795 (TRAV12-1, TRAJ39)
CVARSGAGNLLTF

SEQ ID NO: 545590 - protein, 13 aa, Homo sapiens
  CDR3 for beta chain variable domain of TCR clone 272795 (TRBV7-9, TRBJ2-3)
CASSPGSTDTQYF

SEQ ID NO: 545591 - protein, 13 aa, Homo sapiens
  CDR3 for alpha chain variable domain of TCR clone 272796 (TRAV30, TRAJ20)
CGTVASNDYKLSF

SEQ ID NO: 545592 - protein, 13 aa, Homo sapiens
  CDR3 for beta chain variable domain of TCR clone 272796 (TRBV7-9, TRBJ2-5)
CASLPSGRETQYF

SEQ ID NO: 545593 - protein, 14 aa, Homo sapiens
  CDR3 for alpha chain variable domain of TCR clone 272797 (TRAV12-3, TRAJ29)
CAMSTYSGNTPLVF

SEQ ID NO: 545594 - protein, 14 aa, Homo sapiens
  CDR3 for beta chain variable domain of TCR clone 272797 (TRBV12-4, TRBJ2-5)
CASSLWQKQETQYF

SEQ ID NO: 545595 - protein, 13 aa, Homo sapiens
  CDR3 for alpha chain variable domain of TCR clone 272798 (TRAV3, TRAJ36)
CAVRDTGANNLFF

SEQ ID NO: 545596 - protein, 16 aa, Homo sapiens
  CDR3 for beta chain variable domain of TCR clone 272798 (TRBV7-2, TRBJ2-3)
CASSLVALYSTDTQYF

SEQ ID NO: 545597 - protein, 15 aa, Homo sapiens
  CDR3 for alpha chain variable domain of TCR clone 272799 (TRAV12-3, TRAJ52)
CNVGAGGTSYGKLTF

SEQ ID NO: 545598 - protein, 13 aa, Homo sapiens
  CDR3 for beta chain variable domain of TCR clone 272799 (TRBV20-1, TRBJ2-5)
CSARGDYQETQYF

SEQ ID NO: 545599 - protein, 14 aa, Homo sapiens
  CDR3 for alpha chain variable domain of TCR clone 272800 (TRAV1-2, TRAJ16)
CAVNRFSEGQKLLF

SEQ ID NO: 545600 - protein, 14 aa, Homo sapiens
  CDR3 for beta chain variable domain of TCR clone 272800 (TRBV12-5, TRBJ2-5)
CASGSRTHQETQYF

SEQ ID NO: 545601 - protein, 14 aa, Homo sapiens
  CDR3 for alpha chain variable domain of TCR clone 272801 (TRAV35, TRAJ22)
CAGLRPGSARQLTF

SEQ ID NO: 545602 - protein, 13 aa, Homo sapiens
  CDR3 for beta chain variable domain of TCR clone 272801 (TRBV20-1, TRBJ2-7)
CSATHTRGYEQYF

SEQ ID NO: 545603 - protein, 17 aa, Homo sapiens
  CDR3 for alpha chain variable domain of TCR clone 272802 (TRAV3, TRAJ42)
CAVRDRDYGGSKGNRIF

SEQ ID NO: 545604 - protein, 14 aa, Homo sapiens
  CDR3 for beta chain variable domain of TCR clone 272802 (TRBV7-2, TRBJ2-5)
CASSPRGSSETQYF

SEQ ID NO: 545605 - protein, 16 aa, Homo sapiens
  CDR3 for alpha chain variable domain of TCR clone 272803 (TRAV8-3, TRAJ13)
CAVGAYPSGGYQKVTF

SEQ ID NO: 545606 - protein, 13 aa, Homo sapiens
  CDR3 for beta chain variable domain of TCR clone 272803 (TRBV7-9, TRBJ1-2)
CASSLKQNYGYTS

SEQ ID NO: 545607 - protein, 11 aa, Homo sapiens
  CDR3 for alpha chain variable domain of TCR clone 272804 (TRAV26-1, TRAJ27)
CIVRVLTPMQA

SEQ ID NO: 545608 - protein, 13 aa, Homo sapiens
  CDR3 for beta chain variable domain of TCR clone 272804 (TRBV20-1, TRBJ2-7)
CSATHTSGYEQYF

SEQ ID NO: 545609 - protein, 15 aa, Homo sapiens
  CDR3 for alpha chain variable domain of TCR clone 272805 (TRAV26-1, TRAJ56)
CIFRVATGANSKLTF

SEQ ID NO: 545610 - protein, 15 aa, Homo sapiens
  CDR3 for beta chain variable domain of TCR clone 272805 (TRBV27, TRBJ2-7)
CASSPQREGQLEQYF

SEQ ID NO: 545611 - protein, 16 aa, Homo sapiens
  CDR3 for alpha chain variable domain of TCR clone 272806 (TRAV17, TRAJ28)
CATASVSGAGSYQLTF

SEQ ID NO: 545612 - protein, 11 aa, Homo sapiens
  CDR3 for beta chain variable domain of TCR clone 272806 (TRBV7-9, TRBJ2-5)
CGSSWGETQYF

SEQ ID NO: 545613 - protein, 11 aa, Homo sapiens
  CDR3 for alpha chain variable domain of TCR clone 272807 (TRAV12-1, TRAJ34)
CVVNKGRELIS

SEQ ID NO: 545614 - protein, 12 aa, Homo sapiens
  CDR3 for beta chain variable domain of TCR clone 272807 (TRBV2, TRBJ2-1)
CAYGPPGNEQFF

SEQ ID NO: 545615 - protein, 12 aa, Homo sapiens
  CDR3 for alpha chain variable domain of TCR clone 272808 (TRAV17, TRAJ12)
CAGGDSSYKLIF

SEQ ID NO: 545616 - protein, 12 aa, Homo sapiens
  CDR3 for beta chain variable domain of TCR clone 272808 (TRBV29-1, TRBJ1-1)
CSESDGYTEAFF

SEQ ID NO: 545617 - protein, 13 aa, Homo sapiens
  CDR3 for alpha chain variable domain of TCR clone 272809 (TRAV8-6, TRAJ5)
CAVLDTGRRALTL

SEQ ID NO: 545618 - protein, 12 aa, Homo sapiens
  CDR3 for beta chain variable domain of TCR clone 272809 (TRBV7-9, TRBJ1-6)
CASSASESPLHF

SEQ ID NO: 545619 - protein, 16 aa, Homo sapiens
  CDR3 for alpha chain variable domain of TCR clone 272810 (TRAV4, TRAJ5)
CLVGPDHGHGQESTYF

SEQ ID NO: 545620 - protein, 20 aa, Homo sapiens
  CDR3 for beta chain variable domain of TCR clone 272810 (TRBV6-1, TRBJ1-4)
CASSESLAGGMRATNEKLFF

SEQ ID NO: 545621 - protein, 13 aa, Homo sapiens
  CDR3 for alpha chain variable domain of TCR clone 272811 (TRAV21, TRAJ20)
CAVGVFADYKLSF

SEQ ID NO: 545622 - protein, 16 aa, Homo sapiens
  CDR3 for beta chain variable domain of TCR clone 272811 (TRBV19, TRBJ2-2)
CASTIGARAGAGELFF

SEQ ID NO: 545623 - protein, 18 aa, Homo sapiens
  CDR3 for alpha chain variable domain of TCR clone 272812 (TRAV35, TRAJ28)
CAGHNYPLSGAGSYQLTF

SEQ ID NO: 545624 - protein, 12 aa, Homo sapiens
  CDR3 for beta chain variable domain of TCR clone 272812 (TRBV7-9, TRBJ1-1)
CASSLEGTEALF

SEQ ID NO: 545625 - protein, 15 aa, Homo sapiens
  CDR3 for alpha chain variable domain of TCR clone 272813 (TRAV12-2, TRAJ50)
FAVNGLETSYDKVIF

SEQ ID NO: 545626 - protein, 16 aa, Homo sapiens
  CDR3 for beta chain variable domain of TCR clone 272813 (TRBV5-4, TRBJ2-3)
CASQQPGAGGADTQYF

SEQ ID NO: 545627 - protein, 17 aa, Homo sapiens
  CDR3 for alpha chain variable domain of TCR clone 272814 (TRAV23/DV6, TRAJ58)
CAARLLRGETSGSRLNF

SEQ ID NO: 545628 - protein, 13 aa, Homo sapiens
  CDR3 for beta chain variable domain of TCR clone 272814 (TRBV6-4, TRBJ1-5)
CASGADLNQPQHF

SEQ ID NO: 545629 - protein, 13 aa, Homo sapiens
  CDR3 for alpha chain variable domain of TCR clone 272815 (TRAV26-1, TRAJ36)
CIVVGTGSNNLFF

SEQ ID NO: 545630 - protein, 16 aa, Homo sapiens
  CDR3 for beta chain variable domain of TCR clone 272815 (TRBV10-3, TRBJ2-1)
CAISGVGDGGGGEQFF

SEQ ID NO: 545631 - protein, 14 aa, Homo sapiens
  CDR3 for alpha chain variable domain of TCR clone 272816 (TRAV1-2, TRAJ16)
CAVNRFSDGQKLLF

SEQ ID NO: 545632 - protein, 16 aa, Homo sapiens
  CDR3 for beta chain variable domain of TCR clone 272816 (TRBV7-9, TRBJ1-2)
CASSLGFSSGEDGCTF

SEQ ID NO: 545633 - protein, 17 aa, Homo sapiens
  CDR3 for alpha chain variable domain of TCR clone 272817 (TRAV1-1, TRAJ32)
CAVRVDELWWCYKQAHL

SEQ ID NO: 545634 - protein, 18 aa, Homo sapiens
  CDR3 for beta chain variable domain of TCR clone 272817 (TRBV18, TRBJ2-3)
CASSYTSGAAGGTDTQYF

SEQ ID NO: 545635 - protein, 15 aa, Homo sapiens
  CDR3 for alpha chain variable domain of TCR clone 272818 (TRAV16, TRAJ12)
CSKWPQRDSSYKLIF

SEQ ID NO: 545636 - protein, 13 aa, Homo sapiens
  CDR3 for beta chain variable domain of TCR clone 272818 (TRBV4-2, TRBJ1-1)
CASSQAGNTEAFF

SEQ ID NO: 545637 - protein, 16 aa, Homo sapiens
  CDR3 for alpha chain variable domain of TCR clone 272819 (TRAV3, TRAJ37)
CAVRGKGCGNTGKLIF

SEQ ID NO: 545638 - protein, 14 aa, Homo sapiens
  CDR3 for beta chain variable domain of TCR clone 272819 (TRBV7-2, TRBJ2-7)
CASSPKTSFYEQYF

SEQ ID NO: 545639 - protein, 16 aa, Homo sapiens
  CDR3 for alpha chain variable domain of TCR clone 272820 (TRAV30, TRAJ24)
CGTEIVDADSWGKFQF

SEQ ID NO: 545640 - protein, 16 aa, Homo sapiens
  CDR3 for beta chain variable domain of TCR clone 272820 (TRBV5-1, TRBJ2-1)
CASSQTLAGGRNEQYF

SEQ ID NO: 545641 - protein, 15 aa, Homo sapiens
  CDR3 for alpha chain variable domain of TCR clone 272821 (TRAV3, TRAJ5)
CAVRDLDTGRRALTF

SEQ ID NO: 545642 - protein, 13 aa, Homo sapiens
  CDR3 for beta chain variable domain of TCR clone 272821 (TRBV20-1, TRBJ1-6)
CSAPLGVGSPLHF

SEQ ID NO: 545643 - protein, 18 aa, Homo sapiens
  CDR3 for alpha chain variable domain of TCR clone 272822 (TRAV13-1, TRAJ52)
CAAKNPNASGTSYRKLTF

SEQ ID NO: 545644 - protein, 16 aa, Homo sapiens
  CDR3 for beta chain variable domain of TCR clone 272822 (TRBV27, TRBJ2-2)
CASSFRGLVRTGELFF

SEQ ID NO: 545645 - protein, 12 aa, Homo sapiens
  CDR3 for alpha chain variable domain of TCR clone 272823 (TRAV25, TRAJ31)
CAGHLNNARLMF

SEQ ID NO: 545646 - protein, 14 aa, Homo sapiens
  CDR3 for beta chain variable domain of TCR clone 272823 (TRBV6-1, TRBJ1-3)
CASVQGGGGNTMYF

SEQ ID NO: 545647 - protein, 16 aa, Homo sapiens
  CDR3 for alpha chain variable domain of TCR clone 272824 (TRAV16, TRAJ52)
CALSGVGGTSYGKLTF

SEQ ID NO: 545648 - protein, 11 aa, Homo sapiens
  CDR3 for beta chain variable domain of TCR clone 272824 (TRBV6-3, TRBJ2-7)
CASSFSYEQYF

SEQ ID NO: 545649 - protein, 13 aa, Homo sapiens
  CDR3 for alpha chain variable domain of TCR clone 272825 (TRAV23/DV6, TRAJ52)
CAATLLSAGGTSY

SEQ ID NO: 545650 - protein, 13 aa, Homo sapiens
  CDR3 for beta chain variable domain of TCR clone 272825 (TRBV7-9, TRBJ2-2)
CASSLDPTGEPFF

SEQ ID NO: 545651 - protein, 17 aa, Homo sapiens
  CDR3 for alpha chain variable domain of TCR clone 272826 (TRAV20, TRAJ52)
CAVQANAGGTSYGKLTF

SEQ ID NO: 545652 - protein, 14 aa, Homo sapiens
  CDR3 for beta chain variable domain of TCR clone 272826 (TRBV18, TRBJ2-7)
CASSPRGGAYGQYF

SEQ ID NO: 545653 - protein, 12 aa, Homo sapiens
  CDR3 for alpha chain variable domain of TCR clone 272827 (TRAV21, TRAJ13)
PGPSGGYQKVTF

SEQ ID NO: 545654 - protein, 17 aa, Homo sapiens
  CDR3 for beta chain variable domain of TCR clone 272827 (TRBV28, TRBJ2-5)
CASSTPEGDALQETQYF

SEQ ID NO: 545655 - protein, 11 aa, Homo sapiens
  CDR3 for alpha chain variable domain of TCR clone 272828 (TRAV12-2, TRAJ39)
CAVNNMLTFGG

SEQ ID NO: 545656 - protein, 13 aa, Homo sapiens
  CDR3 for beta chain variable domain of TCR clone 272828 (TRBV7-2, TRBJ2-2)
CASSLAVTGELFF

SEQ ID NO: 545657 - protein, 15 aa, Homo sapiens
  CDR3 for alpha chain variable domain of TCR clone 272829 (TRAV13-2, TRAJ22)
CAENSRPGSARQLTF

SEQ ID NO: 545658 - protein, 17 aa, Homo sapiens
  CDR3 for beta chain variable domain of TCR clone 272829 (TRBV20-1, TRBJ2-6)
CSATRDRGPSGANVLTC

SEQ ID NO: 545659 - protein, 15 aa, Homo sapiens
  CDR3 for alpha chain variable domain of TCR clone 272830 (TRAV3, TRAJ36)
CAVRASQTGANNLFF

SEQ ID NO: 545660 - protein, 15 aa, Homo sapiens
  CDR3 for beta chain variable domain of TCR clone 272830 (TRBV3-1, TRBJ2-1)
CASSQDYPPRGEQFF

SEQ ID NO: 545661 - protein, 13 aa, Homo sapiens
  CDR3 for alpha chain variable domain of TCR clone 272831 (TRAV9-2, TRAJ15)
CALLGDAGTALIF

SEQ ID NO: 545662 - protein, 14 aa, Homo sapiens
  CDR3 for beta chain variable domain of TCR clone 272831 (TRBV5-1, TRBJ2-7)
CASSLTSGGYEQYF

SEQ ID NO: 545663 - protein, 15 aa, Homo sapiens
  CDR3 for alpha chain variable domain of TCR clone 272832 (TRAV20, TRAJ6)
CAVQPASGGSYIPTF

SEQ ID NO: 545664 - protein, 15 aa, Homo sapiens
  CDR3 for beta chain variable domain of TCR clone 272832 (TRBV7-9, TRBJ1-2)
CASSSNYRVGYDYTF

SEQ ID NO: 545665 - protein, 13 aa, Homo sapiens
  CDR3 for alpha chain variable domain of TCR clone 272833 (TRAV13-1, TRAJ5)
CAASDTGRRALTF

SEQ ID NO: 545666 - protein, 14 aa, Homo sapiens
  CDR3 for beta chain variable domain of TCR clone 272833 (TRBV19, TRBJ2-5)
CASSMTGQQETQYF

SEQ ID NO: 545667 - protein, 15 aa, Homo sapiens
  CDR3 for alpha chain variable domain of TCR clone 272834 (TRAV8-3, TRAJ45)
CASSYSGGGADGLTF

SEQ ID NO: 545668 - protein, 12 aa, Homo sapiens
  CDR3 for beta chain variable domain of TCR clone 272834 (TRBV12-4, TRBJ1-5)
CASSLGRQPQHF

SEQ ID NO: 545669 - protein, 15 aa, Homo sapiens
  CDR3 for alpha chain variable domain of TCR clone 272835 (TRAV35, TRAJ40)
CAGQLGQAETYKYIF

SEQ ID NO: 545670 - protein, 14 aa, Homo sapiens
  CDR3 for beta chain variable domain of TCR clone 272835 (TRBV7-3, TRBJ2-1)
CASSLTGGANEQFF

SEQ ID NO: 545671 - protein, 14 aa, Homo sapiens
  CDR3 for alpha chain variable domain of TCR clone 272836 (TRAV13-2, TRAJ43)
CAEVPTYHNNDMRF

SEQ ID NO: 545672 - protein, 15 aa, Homo sapiens
  CDR3 for beta chain variable domain of TCR clone 272836 (TRBV7-9, TRBJ2-2)
CASGPLDTFPGELFF

SEQ ID NO: 545673 - protein, 12 aa, Homo sapiens
  CDR3 for alpha chain variable domain of TCR clone 272837 (TRAV13-1, TRAJ15)
CAASQAGTALIF

SEQ ID NO: 545674 - protein, 14 aa, Homo sapiens
  CDR3 for beta chain variable domain of TCR clone 272837 (TRBV20-1, TRBJ2-5)
CSARYRGLQETQYF

SEQ ID NO: 545675 - protein, 11 aa, Homo sapiens
  CDR3 for alpha chain variable domain of TCR clone 272838 (TRAV12-3, TRAJ27)
CAMANAGKSTF

SEQ ID NO: 545676 - protein, 13 aa, Homo sapiens
  CDR3 for beta chain variable domain of TCR clone 272838 (TRBV19, TRBJ2-5)
CASSMGGAGTQYF

SEQ ID NO: 545677 - protein, 12 aa, Homo sapiens
  CDR3 for alpha chain variable domain of TCR clone 272839 (TRAV16, TRAJ9)
CALSSGGFKTIF

SEQ ID NO: 545678 - protein, 14 aa, Homo sapiens
  CDR3 for beta chain variable domain of TCR clone 272839 (TRBV7-9, TRBJ2-1)
CASSLSGPYNEQFF

SEQ ID NO: 545679 - protein, 16 aa, Homo sapiens
  CDR3 for alpha chain variable domain of TCR clone 272840 (TRAV3, TRAJ5)
CAVRNLMDTGRRALTF

SEQ ID NO: 545680 - protein, 17 aa, Homo sapiens
  CDR3 for beta chain variable domain of TCR clone 272840 (TRBV11-2, TRBJ2-1)
CASSLYPPGVEYNEQFF

SEQ ID NO: 545681 - protein, 14 aa, Homo sapiens
  CDR3 for alpha chain variable domain of TCR clone 272841 (TRAV17, TRAJ24)
CATLTTDSWGKFQF

SEQ ID NO: 545682 - protein, 16 aa, Homo sapiens
  CDR3 for beta chain variable domain of TCR clone 272841 (TRBV12-5, TRBJ2-5)
CASGPRTSGNQETQYF

SEQ ID NO: 545683 - protein, 16 aa, Homo sapiens
  CDR3 for alpha chain variable domain of TCR clone 272842 (TRAV12-3, TRAJ53)
CAMSPGSGGSNYKLTF

SEQ ID NO: 545684 - protein, 20 aa, Homo sapiens
  CDR3 for beta chain variable domain of TCR clone 272842 (TRBV7-8, TRBJ2-2)
CASSHLCPGPTIHITGELFF

SEQ ID NO: 545685 - protein, 16 aa, Homo sapiens
  CDR3 for alpha chain variable domain of TCR clone 272843 (TRAV26-1, TRAJ32)
CIVRTNYGGATNKLIF

SEQ ID NO: 545686 - protein, 14 aa, Homo sapiens
  CDR3 for beta chain variable domain of TCR clone 272843 (TRBV6-6, TRBJ2-7)
CASSDSGAGYEQYF

SEQ ID NO: 545687 - protein, 18 aa, Homo sapiens
  CDR3 for alpha chain variable domain of TCR clone 272844 (TRAV21, TRAJ52)
CAVRPSPAGGTSYGKLTF

SEQ ID NO: 545688 - protein, 14 aa, Homo sapiens
  CDR3 for beta chain variable domain of TCR clone 272844 (TRBV15, TRBJ2-5)
CATSGDRGQETQYF

SEQ ID NO: 545689 - protein, 11 aa, Homo sapiens
  CDR3 for alpha chain variable domain of TCR clone 272845 (TRAV21, TRAJ11)
CAVNGYSTFTF

SEQ ID NO: 545690 - protein, 11 aa, Homo sapiens
  CDR3 for beta chain variable domain of TCR clone 272845 (TRBV11-2, TRBJ2-7)
CASSSDYEQYF

SEQ ID NO: 545691 - protein, 15 aa, Homo sapiens
  CDR3 for alpha chain variable domain of TCR clone 272846 (TRAV17, TRAJ52)
CATEAGGTSYGKLPF

SEQ ID NO: 545692 - protein, 14 aa, Homo sapiens
  CDR3 for beta chain variable domain of TCR clone 272846 (TRBV28, TRBJ1-5)
CASSLGVLVKPQHF

SEQ ID NO: 545693 - protein, 23 aa, Homo sapiens
  CDR3 for alpha chain variable domain of TCR clone 272847 (TRAV12-3, TRAJ17)
SLSIRDSQPSDSATYLCAMTLTF

SEQ ID NO: 545694 - protein, 15 aa, Homo sapiens
  CDR3 for beta chain variable domain of TCR clone 272847 (TRBV20-1, TRBJ2-7)
CSARDRVSGMDEQYF

SEQ ID NO: 545695 - protein, 13 aa, Homo sapiens
  CDR3 for alpha chain variable domain of TCR clone 272848 (TRAV13-1, TRAJ39)
CSKYSNAGNLLTF

SEQ ID NO: 545696 - protein, 16 aa, Homo sapiens
  CDR3 for beta chain variable domain of TCR clone 272848 (TRBV20-1, TRBJ1-4)
CSAPGQGLLTNEKLFF

SEQ ID NO: 545697 - protein, 18 aa, Homo sapiens
  CDR3 for alpha chain variable domain of TCR clone 272849 (TRAV3, TRAJ42)
CAVRDEGTGGGSQGNLIF

SEQ ID NO: 545698 - protein, 17 aa, Homo sapiens
  CDR3 for beta chain variable domain of TCR clone 272849 (TRBV7-3, TRBJ2-3)
CASSLMKRMRGADTQYF

SEQ ID NO: 545699 - protein, 16 aa, Homo sapiens
  CDR3 for alpha chain variable domain of TCR clone 272850 (TRAV3, TRAJ37)
CAVRGKGSGNTGKLIF

SEQ ID NO: 545700 - protein, 13 aa, Homo sapiens
  CDR3 for beta chain variable domain of TCR clone 272850 (TRBV5-8, TRBJ1-1)
CASSLGGGTEAFF

SEQ ID NO: 545701 - protein, 13 aa, Homo sapiens
  CDR3 for alpha chain variable domain of TCR clone 272851 (TRAV29/DV5, TRAJ31)
CAASRNNNARLMF

SEQ ID NO: 545702 - protein, 13 aa, Homo sapiens
  CDR3 for beta chain variable domain of TCR clone 272851 (TRBV7-3, TRBJ2-1)
CASSLDSYNEQFF

SEQ ID NO: 545703 - protein, 17 aa, Homo sapiens
  CDR3 for alpha chain variable domain of TCR clone 272852 (TRAV3, TRAJ42)
CAVRDRDYGGSQGNLIF

SEQ ID NO: 545704 - protein, 20 aa, Homo sapiens
  CDR3 for beta chain variable domain of TCR clone 272852 (TRBV11-2, TRBJ1-6)
CASSLVFATEGSVHPSSLGT

SEQ ID NO: 545705 - protein, 15 aa, Homo sapiens
  CDR3 for alpha chain variable domain of TCR clone 272853 (TRAV23/DV6, TRAJ44)
CAARLLTGTASKLTL

SEQ ID NO: 545706 - protein, 15 aa, Homo sapiens
  CDR3 for beta chain variable domain of TCR clone 272853 (TRBV12-4, TRBJ1-5)
CASTLNRVSNQPQHF

SEQ ID NO: 545707 - protein, 15 aa, Homo sapiens
  CDR3 for alpha chain variable domain of TCR clone 272854 (TRAV39, TRAJ32)
CAVAMEGGATNKLIF

SEQ ID NO: 545708 - protein, 17 aa, Homo sapiens
  CDR3 for beta chain variable domain of TCR clone 272854 (TRBV7-2, TRBJ1-4)
CASSFKAGPTTNEKLLF

SEQ ID NO: 545709 - protein, 16 aa, Homo sapiens
  CDR3 for alpha chain variable domain of TCR clone 272855 (TRAV3, TRAJ23)
CAVEIGIYNQGGKLIF

SEQ ID NO: 545710 - protein, 17 aa, Homo sapiens
  CDR3 for beta chain variable domain of TCR clone 272855 (TRBV10-3, TRBJ2-6)
CAISESTAPSGANVLTF

SEQ ID NO: 545711 - protein, 19 aa, Homo sapiens
  CDR3 for alpha chain variable domain of TCR clone 272856 (TRAV3, TRAJ6)
CAVRDGPGQEEATYLHLEE

SEQ ID NO: 545712 - protein, 14 aa, Homo sapiens
  CDR3 for beta chain variable domain of TCR clone 272856 (TRBV15, TRBJ2-5)
CATSIGGLGETQYF

SEQ ID NO: 545713 - protein, 20 aa, Homo sapiens
  CDR3 for alpha chain variable domain of TCR clone 272857 (TRAV21, TRAJ4)
AASQPGDSATLAGGYNKLIF

SEQ ID NO: 545714 - protein, 19 aa, Homo sapiens
  CDR3 for beta chain variable domain of TCR clone 272857 (TRBV18, TRBJ1-3)
CASSPLSRTGMSAGNTIYF

SEQ ID NO: 545715 - protein, 12 aa, Homo sapiens
  CDR3 for alpha chain variable domain of TCR clone 272858 (TRAV13-2, TRAJ8)
CAPWLGFQKLVF

SEQ ID NO: 545716 - protein, 15 aa, Homo sapiens
  CDR3 for beta chain variable domain of TCR clone 272858 (TRBV5-1, TRBJ1-2)
CASSYPGTGSSGYTF

SEQ ID NO: 545717 - protein, 13 aa, Homo sapiens
  CDR3 for alpha chain variable domain of TCR clone 272859 (TRAV17, TRAJ54)
CATDAGGAHKLVF

SEQ ID NO: 545718 - protein, 17 aa, Homo sapiens
  CDR3 for beta chain variable domain of TCR clone 272859 (TRBV25-1, TRBJ1-6)
CASSEYIGERGNSPLHF

SEQ ID NO: 545719 - protein, 13 aa, Homo sapiens
  CDR3 for alpha chain variable domain of TCR clone 272860 (TRAV8-3, TRAJ36)
CAVGATWANNLFF

SEQ ID NO: 545720 - protein, 15 aa, Homo sapiens
  CDR3 for beta chain variable domain of TCR clone 272860 (TRBV7-2, TRBJ1-2)
CAGSPRAGWKYGYTF

SEQ ID NO: 545721 - protein, 13 aa, Homo sapiens
  CDR3 for alpha chain variable domain of TCR clone 272861 (TRAV12-1, TRAJ9)
CVVLNTGGFKTIF

SEQ ID NO: 545722 - protein, 16 aa, Homo sapiens
  CDR3 for beta chain variable domain of TCR clone 272861 (TRBV7-6, TRBJ2-1)
CASSLNEGPSYNEQFF

SEQ ID NO: 545723 - protein, 13 aa, Homo sapiens
  CDR3 for alpha chain variable domain of TCR clone 272862 (TRAV8-3, TRAJ21)
CAVGAYNFNKFYF

SEQ ID NO: 545724 - protein, 17 aa, Homo sapiens
  CDR3 for beta chain variable domain of TCR clone 272862 (TRBV19, TRBJ2-7)
CASSISFYDSYPYEQYF

SEQ ID NO: 545725 - protein, 10 aa, Homo sapiens
  CDR3 for alpha chain variable domain of TCR clone 272863 (TRAV36/DV7, TRAJ56)
CAGPAVELTF

SEQ ID NO: 545726 - protein, 13 aa, Homo sapiens
  CDR3 for beta chain variable domain of TCR clone 272863 (TRBV7-9, TRBJ2-7)
CASSFGSSYEQYF

SEQ ID NO: 545727 - protein, 15 aa, Homo sapiens
  CDR3 for alpha chain variable domain of TCR clone 272864 (TRAV26-1, TRAJ39)
CIVRVARNAGNMLTF

SEQ ID NO: 545728 - protein, 14 aa, Homo sapiens
  CDR3 for beta chain variable domain of TCR clone 272864 (TRBV7-6, TRBJ2-3)
CASSLGTVTDTQYF

SEQ ID NO: 545729 - protein, 13 aa, Homo sapiens
  CDR3 for alpha chain variable domain of TCR clone 272865 (TRAV8-6, TRAJ49)
CAVITNTGNQFYF

SEQ ID NO: 545730 - protein, 15 aa, Homo sapiens
  CDR3 for beta chain variable domain of TCR clone 272865 (TRBV4-3, TRBJ1-2)
CASSRGQGRNYGYTF

SEQ ID NO: 545731 - protein, 13 aa, Homo sapiens
  CDR3 for alpha chain variable domain of TCR clone 272866 (TRAV26-1, TRAJ47)
CIVRVRNGNKLVF

SEQ ID NO: 545732 - protein, 15 aa, Homo sapiens
  CDR3 for beta chain variable domain of TCR clone 272866 (TRBV7-9, TRBJ1-5)
CASSFGTGNNQPQHF

SEQ ID NO: 545733 - protein, 11 aa, Homo sapiens
  CDR3 for alpha chain variable domain of TCR clone 272867 (TRAV8-4, TRAJ52)
AGGTSYGKLTF

SEQ ID NO: 545734 - protein, 13 aa, Homo sapiens
  CDR3 for beta chain variable domain of TCR clone 272867 (TRBV28, TRBJ2-2)
CASIGGLGGELFS

SEQ ID NO: 545735 - protein, 11 aa, Homo sapiens
  CDR3 for alpha chain variable domain of TCR clone 272868 (TRAV2, TRAJ13)
CASGGYQKVTF

SEQ ID NO: 545736 - protein, 15 aa, Homo sapiens
  CDR3 for beta chain variable domain of TCR clone 272868 (TRBV6-5, TRBJ2-1)
CASSYDAGGGNEQFF

SEQ ID NO: 545737 - protein, 16 aa, Homo sapiens
  CDR3 for alpha chain variable domain of TCR clone 272869 (TRAV3, TRAJ3)
CAVRDRAKSSASKIIF

SEQ ID NO: 545738 - protein, 15 aa, Homo sapiens
  CDR3 for beta chain variable domain of TCR clone 272869 (TRBV10-2, TRBJ2-5)
CASRGSGGPQETQYF

SEQ ID NO: 545739 - protein, 16 aa, Homo sapiens
  CDR3 for alpha chain variable domain of TCR clone 272870 (TRAV1-2, TRAJ10)
CAVRGVLTEGGNKLTF

SEQ ID NO: 545740 - protein, 13 aa, Homo sapiens
  CDR3 for beta chain variable domain of TCR clone 272870 (TRBV10-3, TRBJ2-7)
CASKLAVNYEQYF

SEQ ID NO: 545741 - protein, 14 aa, Homo sapiens
  CDR3 for alpha chain variable domain of TCR clone 272871 (TRAV26-1, TRAJ44)
CIARTTGTSSKLTF

SEQ ID NO: 545742 - protein, 14 aa, Homo sapiens
  CDR3 for beta chain variable domain of TCR clone 272871 (TRBV19, TRBJ2-7)
CASSIEASSYEQYF

SEQ ID NO: 545743 - protein, 11 aa, Homo sapiens
  CDR3 for alpha chain variable domain of TCR clone 272872 (TRAV1-2, TRAJ20)
CAVANDYKLSF

SEQ ID NO: 545744 - protein, 14 aa, Homo sapiens
  CDR3 for beta chain variable domain of TCR clone 272872 (TRBV11-2, TRBJ2-3)
CASSRLARTDTQYF

SEQ ID NO: 545745 - protein, 14 aa, Homo sapiens
  CDR3 for alpha chain variable domain of TCR clone 272873 (TRAV8-3, TRAJ39)
CAVGANNAGIMLTF

SEQ ID NO: 545746 - protein, 15 aa, Homo sapiens
  CDR3 for beta chain variable domain of TCR clone 272873 (TRBV4-3, TRBJ1-1)
CASSQELGRGTEAFF

SEQ ID NO: 545747 - protein, 16 aa, Homo sapiens
  CDR3 for alpha chain variable domain of TCR clone 272874 (TRAV8-1, TRAJ18)
CAVNAGRGPTLGRLYF

SEQ ID NO: 545748 - protein, 15 aa, Homo sapiens
  CDR3 for beta chain variable domain of TCR clone 272874 (TRBV7-2, TRBJ2-5)
CASTPRGASGETQYV

SEQ ID NO: 545749 - protein, 12 aa, Homo sapiens
  CDR3 for alpha chain variable domain of TCR clone 272875 (TRAV12-2, TRAJ10)
WGVTGGGNKLTF

SEQ ID NO: 545750 - protein, 16 aa, Homo sapiens
  CDR3 for beta chain variable domain of TCR clone 272875 (TRBV6-4, TRBJ1-2)
CASGEAVGDPNYGYTF

SEQ ID NO: 545751 - protein, 14 aa, Homo sapiens
  CDR3 for alpha chain variable domain of TCR clone 272876 (TRAV12-3, TRAJ9)
CAMSPNPGGFKTIF

SEQ ID NO: 545752 - protein, 15 aa, Homo sapiens
  CDR3 for beta chain variable domain of TCR clone 272876 (TRBV20-1, TRBJ2-7)
CSAREGRDSLYEQYF

SEQ ID NO: 545753 - protein, 13 aa, Homo sapiens
  CDR3 for alpha chain variable domain of TCR clone 272877 (TRAV8-3, TRAJ44)
CAVVPGPASKLTF

SEQ ID NO: 545754 - protein, 14 aa, Homo sapiens
  CDR3 for beta chain variable domain of TCR clone 272877 (TRBV11-2, TRBJ2-3)
CASSRLARTDTRYF

SEQ ID NO: 545755 - protein, 12 aa, Homo sapiens
  CDR3 for alpha chain variable domain of TCR clone 272878 (TRAV1-1, TRAJ8)
CAGGTGFQKLVF

SEQ ID NO: 545756 - protein, 15 aa, Homo sapiens
  CDR3 for beta chain variable domain of TCR clone 272878 (TRBV7-2, TRBJ1-2)
CASSPRAGWNYGYTF

SEQ ID NO: 545757 - protein, 15 aa, Homo sapiens
  CDR3 for alpha chain variable domain of TCR clone 272879 (TRAV12-2, TRAJ50)
CAVNGLETSYAKVIF

SEQ ID NO: 545758 - protein, 16 aa, Homo sapiens
  CDR3 for beta chain variable domain of TCR clone 272879 (TRBV5-4, TRBJ2-3)
CASQQPGAGGADTQYF

SEQ ID NO: 545759 - protein, 18 aa, Homo sapiens
  CDR3 for alpha chain variable domain of TCR clone 272880 (TRAV13-1, TRAJ52)
CAAKNPNAGGTSYGKLTF

SEQ ID NO: 545760 - protein, 18 aa, Homo sapiens
  CDR3 for beta chain variable domain of TCR clone 272880 (TRBV4-1, TRBJ1-4)
CASSPRTGCAWTNEKLFF

SEQ ID NO: 545761 - protein, 11 aa, Homo sapiens
  CDR3 for alpha chain variable domain of TCR clone 272881 (TRAV13-1, TRAJ39)
CASHAGNMLTF

SEQ ID NO: 545762 - protein, 16 aa, Homo sapiens
  CDR3 for beta chain variable domain of TCR clone 272881 (TRBV13, TRBJ2-2)
CASSPRTGEHTGELFF

SEQ ID NO: 545763 - protein, 11 aa, Homo sapiens
  CDR3 for alpha chain variable domain of TCR clone 272882 (TRAV12-3, TRAJ27)
CAMANAGKSTF

SEQ ID NO: 545764 - protein, 14 aa, Homo sapiens
  CDR3 for beta chain variable domain of TCR clone 272882 (TRBV12-5, TRBJ2-5)
CASGSRTHPETQYF

SEQ ID NO: 545765 - protein, 11 aa, Homo sapiens
  CDR3 for alpha chain variable domain of TCR clone 272883 (TRAV13-2, TRAJ20)
CADSKDYKLSF

SEQ ID NO: 545766 - protein, 12 aa, Homo sapiens
  CDR3 for beta chain variable domain of TCR clone 272883 (TRBV11-2, TRBJ2-2)
CASSLGGGELFF

SEQ ID NO: 545767 - protein, 22 aa, Homo sapiens
  CDR3 for alpha chain variable domain of TCR clone 272884 (TRAV26-2, TRAJ45)
CCVLPHPERQGRSGGGADGLNF

SEQ ID NO: 545768 - protein, 15 aa, Homo sapiens
  CDR3 for beta chain variable domain of TCR clone 272884 (TRBV7-6, TRBJ2-5)
CASSKPTGPQETQYF

SEQ ID NO: 545769 - protein, 14 aa, Homo sapiens
  CDR3 for alpha chain variable domain of TCR clone 272885 (TRAV36/DV7, TRAJ57)
CAVGFPGGSEKLVF

SEQ ID NO: 545770 - protein, 12 aa, Homo sapiens
  CDR3 for beta chain variable domain of TCR clone 272885 (TRBV19, TRBJ2-7)
CASTSGTYEQFF

SEQ ID NO: 545771 - protein, 17 aa, Homo sapiens
  CDR3 for alpha chain variable domain of TCR clone 272886 (TRAV3, TRAJ12)
CAVRDGGRMDSGYKLIF

SEQ ID NO: 545772 - protein, 13 aa, Homo sapiens
  CDR3 for beta chain variable domain of TCR clone 272886 (TRBV4-2, TRBJ1-1)
CASSQAGNTEAFF

SEQ ID NO: 545773 - protein, 15 aa, Homo sapiens
  CDR3 for alpha chain variable domain of TCR clone 272887 (TRAV8-6, TRAJ20)
CAVTRPGSNDYNLSF

SEQ ID NO: 545774 - protein, 14 aa, Homo sapiens
  CDR3 for beta chain variable domain of TCR clone 272887 (TRBV11-2, TRBJ2-7)
CASSLGAGAYEQYF

SEQ ID NO: 545775 - protein, 14 aa, Homo sapiens
  CDR3 for alpha chain variable domain of TCR clone 272888 (TRAV1-2, TRAJ8)
CSVREDTGFQKLVF

SEQ ID NO: 545776 - protein, 14 aa, Homo sapiens
  CDR3 for beta chain variable domain of TCR clone 272888 (TRBV29-1, TRBJ2-5)
CSVETSGSGETQYF

SEQ ID NO: 545777 - protein, 15 aa, Homo sapiens
  CDR3 for alpha chain variable domain of TCR clone 272889 (TRAV17, TRAJ57)
CATGPSQGRSKKLVF

SEQ ID NO: 545778 - protein, 16 aa, Homo sapiens
  CDR3 for beta chain variable domain of TCR clone 272889 (TRBV12-4, TRBJ1-5)
CASSRPVGGSNQPQHF

SEQ ID NO: 545779 - protein, 15 aa, Homo sapiens
  CDR3 for alpha chain variable domain of TCR clone 272890 (TRAV8-3, TRAJ11)
CAVGLLNSGYSTLTF

SEQ ID NO: 545780 - protein, 16 aa, Homo sapiens
  CDR3 for beta chain variable domain of TCR clone 272890 (TRBV7-9, TRBJ1-2)
CVSSLGFSSGEDGYTF

SEQ ID NO: 545781 - protein, 15 aa, Homo sapiens
  CDR3 for alpha chain variable domain of TCR clone 272891 (TRAV12-1, TRAJ44)
CVVDEYTGTASKLTF

SEQ ID NO: 545782 - protein, 14 aa, Homo sapiens
  CDR3 for beta chain variable domain of TCR clone 272891 (TRBV5-1, TRBJ1-2)
CASSLEPVNYCYTF

SEQ ID NO: 545783 - protein, 14 aa, Homo sapiens
  CDR3 for alpha chain variable domain of TCR clone 272892 (TRAV17, TRAJ16)
CATADFSDGQKLLF

SEQ ID NO: 545784 - protein, 13 aa, Homo sapiens
  CDR3 for beta chain variable domain of TCR clone 272892 (TRBV11-2, TRBJ1-1)
CASSLGNGAEAFF

SEQ ID NO: 545785 - protein, 14 aa, Homo sapiens
  CDR3 for alpha chain variable domain of TCR clone 272893 (TRAV13-1, TRAJ35)
CAASKGGFGNVLHF

SEQ ID NO: 545786 - protein, 17 aa, Homo sapiens
  CDR3 for beta chain variable domain of TCR clone 272893 (TRBV15, TRBJ1-2)
CATSGREIDVVNYGYTF

SEQ ID NO: 545787 - protein, 11 aa, Homo sapiens
  CDR3 for alpha chain variable domain of TCR clone 272894 (TRAV8-6, TRAJ13)
CALGIYRKVTF

SEQ ID NO: 545788 - protein, 13 aa, Homo sapiens
  CDR3 for beta chain variable domain of TCR clone 272894 (TRBV7-9, TRBJ1-2)
CASSLKQNYGYTF

SEQ ID NO: 545789 - protein, 15 aa, Homo sapiens
  CDR3 for alpha chain variable domain of TCR clone 272895 (TRAV13-1, TRAJ17)
CSASIHGGCRQQAKF

SEQ ID NO: 545790 - protein, 14 aa, Homo sapiens
  CDR3 for beta chain variable domain of TCR clone 272895 (TRBV20-1, TRBJ2-4)
CSARDRGQGGIQYF

SEQ ID NO: 545791 - protein, 14 aa, Homo sapiens
  CDR3 for alpha chain variable domain of TCR clone 272896 (TRAV1-2, TRAJ8)
CAVREDTGFQKLVF

SEQ ID NO: 545792 - protein, 19 aa, Homo sapiens
  CDR3 for beta chain variable domain of TCR clone 272896 (TRBV28, TRBJ2-1)
CASSFSIRGSGRTRNEQFF

SEQ ID NO: 545793 - protein, 13 aa, Homo sapiens
  CDR3 for alpha chain variable domain of TCR clone 272897 (TRAV13-1, TRAJ28)
CAANEAGSYQLTF

SEQ ID NO: 545794 - protein, 15 aa, Homo sapiens
  CDR3 for beta chain variable domain of TCR clone 272897 (TRBV7-9, TRBJ1-6)
CASSSPGRGNSPLYF

SEQ ID NO: 545795 - protein, 15 aa, Homo sapiens
  CDR3 for alpha chain variable domain of TCR clone 272898 (TRAV26-1, TRAJ29)
CIVRVEGSGNTHLVF

SEQ ID NO: 545796 - protein, 15 aa, Homo sapiens
  CDR3 for beta chain variable domain of TCR clone 272898 (TRBV7-9, TRBJ1-5)
CASSQGHQPNQPKHF

SEQ ID NO: 545797 - protein, 17 aa, Homo sapiens
  CDR3 for alpha chain variable domain of TCR clone 272899 (TRAV23/DV6, TRAJ57)
CAASSTLSQGGSEKLVF

SEQ ID NO: 545798 - protein, 15 aa, Homo sapiens
  CDR3 for beta chain variable domain of TCR clone 272899 (TRBV6-1, TRBJ2-3)
CASSERGGITDTQYF

SEQ ID NO: 545799 - protein, 16 aa, Homo sapiens
  CDR3 for alpha chain variable domain of TCR clone 272900 (TRAV1-2, TRAJ10)
CAVRGVLTGGGNKLSF

SEQ ID NO: 545800 - protein, 16 aa, Homo sapiens
  CDR3 for beta chain variable domain of TCR clone 272900 (TRBV24-1, TRBJ2-3)
CATSDAISGITDTQYF

SEQ ID NO: 545801 - protein, 11 aa, Homo sapiens
  CDR3 for alpha chain variable domain of TCR clone 272901 (TRAV21, TRAJ11)
CAVNGYSTLTF

SEQ ID NO: 545802 - protein, 15 aa, Homo sapiens
  CDR3 for beta chain variable domain of TCR clone 272901 (TRBV15, TRBJ2-2)
CATSGTGGRVGELFL

SEQ ID NO: 545803 - protein, 13 aa, Homo sapiens
  CDR3 for alpha chain variable domain of TCR clone 272902 (TRAV8-3, TRAJ36)
CAVGATGANNLFF

SEQ ID NO: 545804 - protein, 17 aa, Homo sapiens
  CDR3 for beta chain variable domain of TCR clone 272902 (TRBV20-1, TRBJ2-4)
CSARDWASGGRENIQYF

SEQ ID NO: 545805 - protein, 17 aa, Homo sapiens
  CDR3 for alpha chain variable domain of TCR clone 272903 (TRAV3, TRAJ42)
CAVRERDYGGSQGNLIF

SEQ ID NO: 545806 - protein, 14 aa, Homo sapiens
  CDR3 for beta chain variable domain of TCR clone 272903 (TRBV25-1, TRBJ1-1)
CASTHLGGNTEAFF

SEQ ID NO: 545807 - protein, 14 aa, Homo sapiens
  CDR3 for alpha chain variable domain of TCR clone 272904 (TRAV12-2, TRAJ5)
CAVNRSPGRRALPF

SEQ ID NO: 545808 - protein, 12 aa, Homo sapiens
  CDR3 for beta chain variable domain of TCR clone 272904 (TRBV19, TRBJ1-5)
CASSIAQQPQHF

SEQ ID NO: 545809 - protein, 15 aa, Homo sapiens
  CDR3 for alpha chain variable domain of TCR clone 272905 (TRAV12-3, TRAJ27)
CAMRAYNTNAGKSTF

SEQ ID NO: 545810 - protein, 17 aa, Homo sapiens
  CDR3 for beta chain variable domain of TCR clone 272905 (TRBV7-8, TRBJ2-7)
CASSFTSGRPPSYEQYF

SEQ ID NO: 545811 - protein, 15 aa, Homo sapiens
  CDR3 for alpha chain variable domain of TCR clone 272906 (TRAV8-6, TRAJ6)
CAVSGESGGSYIPTF

SEQ ID NO: 545812 - protein, 14 aa, Homo sapiens
  CDR3 for beta chain variable domain of TCR clone 272906 (TRBV19, TRBJ2-1)
CASPTFVLSGEQFF

SEQ ID NO: 545813 - protein, 11 aa, Homo sapiens
  CDR3 for alpha chain variable domain of TCR clone 272907 (TRAV13-1, TRAJ20)
CAAKRRLQAQL

SEQ ID NO: 545814 - protein, 14 aa, Homo sapiens
  CDR3 for beta chain variable domain of TCR clone 272907 (TRBV19, TRBJ2-1)
CASPTFVLSGEQFF

SEQ ID NO: 545815 - protein, 15 aa, Homo sapiens
  CDR3 for alpha chain variable domain of TCR clone 272908 (TRAV3, TRAJ13)
CAVRVYSGGYQKGTF

SEQ ID NO: 545816 - protein, 13 aa, Homo sapiens
  CDR3 for beta chain variable domain of TCR clone 272908 (TRBV7-9, TRBJ1-2)
CASSLKQNYGYTF

SEQ ID NO: 545817 - protein, 18 aa, Homo sapiens
  CDR3 for alpha chain variable domain of TCR clone 272909 (TRAV12-3, TRAJ28)
CAMSARGYSGAGSYQLTF

SEQ ID NO: 545818 - protein, 12 aa, Homo sapiens
  CDR3 for beta chain variable domain of TCR clone 272909 (TRBV6-1, TRBJ2-7)
CASSDYSYEQYF

SEQ ID NO: 545819 - protein, 16 aa, Homo sapiens
  CDR3 for alpha chain variable domain of TCR clone 272910 (TRAV3, TRAJ28)
CAVLPRSGAGSYQLTF

SEQ ID NO: 545820 - protein, 13 aa, Homo sapiens
  CDR3 for beta chain variable domain of TCR clone 272910 (TRBV12-4, TRBJ2-5)
CASRLAVQETQYL

SEQ ID NO: 545821 - protein, 13 aa, Homo sapiens
  CDR3 for alpha chain variable domain of TCR clone 272911 (TRAV21, TRAJ57)
CAVTQGGSEKLVF

SEQ ID NO: 545822 - protein, 16 aa, Homo sapiens
  CDR3 for beta chain variable domain of TCR clone 272911 (TRBV4-3, TRBJ2-1)
CASSPALDRGVNEQFF

SEQ ID NO: 545823 - protein, 14 aa, Homo sapiens
  CDR3 for alpha chain variable domain of TCR clone 272912 (TRAV1-2, TRAJ8)
CAVREDTVFQKLVF

SEQ ID NO: 545824 - protein, 15 aa, Homo sapiens
  CDR3 for beta chain variable domain of TCR clone 272912 (TRBV28, TRBJ2-4)
CAAGSGTLLMGIQYF

SEQ ID NO: 545825 - protein, 13 aa, Homo sapiens
  CDR3 for alpha chain variable domain of TCR clone 272913 (TRAV21, TRAJ57)
RAVTQGGSEELVF

SEQ ID NO: 545826 - protein, 16 aa, Homo sapiens
  CDR3 for beta chain variable domain of TCR clone 272913 (TRBV29-1, TRBJ2-7)
CSVEDAEDGTAYEQYF

SEQ ID NO: 545827 - protein, 14 aa, Homo sapiens
  CDR3 for alpha chain variable domain of TCR clone 272914 (TRAV1-2, TRAJ15)
CAVRDRQAGTALIF

SEQ ID NO: 545828 - protein, 14 aa, Homo sapiens
  CDR3 for beta chain variable domain of TCR clone 272914 (TRBV7-8, TRBJ2-3)
CASSLEAGTDTQYF

SEQ ID NO: 545829 - protein, 17 aa, Homo sapiens
  CDR3 for alpha chain variable domain of TCR clone 272915 (TRAV4, TRAJ28)
CLVGDRALGLGVTNSLS

SEQ ID NO: 545830 - protein, 16 aa, Homo sapiens
  CDR3 for beta chain variable domain of TCR clone 272915 (TRBV4-1, TRBJ2-7)
CASSQEWTSGPLEQYF

SEQ ID NO: 545831 - protein, 16 aa, Homo sapiens
  CDR3 for alpha chain variable domain of TCR clone 272916 (TRAV12-1, TRAJ42)
CVVTPYYGGSQGNLIF

SEQ ID NO: 545832 - protein, 18 aa, Homo sapiens
  CDR3 for beta chain variable domain of TCR clone 272916 (TRBV24-1, TRBJ2-3)
CATSDFPILAGGADTQYF

SEQ ID NO: 545833 - protein, 14 aa, Homo sapiens
  CDR3 for alpha chain variable domain of TCR clone 272917 (TRAV1-2, TRAJ16)
CAVNRFSDGHKLLF

SEQ ID NO: 545834 - protein, 14 aa, Homo sapiens
  CDR3 for beta chain variable domain of TCR clone 272917 (TRBV19, TRBJ2-7)
CASSVDSESYEQYF

SEQ ID NO: 545835 - protein, 12 aa, Homo sapiens
  CDR3 for alpha chain variable domain of TCR clone 272918 (TRAV27, TRAJ35)
CEGADFGHVLHC

SEQ ID NO: 545836 - protein, 16 aa, Homo sapiens
  CDR3 for beta chain variable domain of TCR clone 272918 (TRBV6-1, TRBJ2-1)
CASILRQGSSYNEQFF

SEQ ID NO: 545837 - protein, 10 aa, Homo sapiens
  CDR3 for alpha chain variable domain of TCR clone 272919 (TRAV8-4, TRAJ43)
CAVSADDMRF

SEQ ID NO: 545838 - protein, 13 aa, Homo sapiens
  CDR3 for beta chain variable domain of TCR clone 272919 (TRBV7-2, TRBJ2-1)
CASSLGQLNEQFF

SEQ ID NO: 545839 - protein, 14 aa, Homo sapiens
  CDR3 for alpha chain variable domain of TCR clone 272920 (TRAV2, TRAJ9)
CAVEDRSGGFKTIF

SEQ ID NO: 545840 - protein, 12 aa, Homo sapiens
  CDR3 for beta chain variable domain of TCR clone 272920 (TRBV7-2, TRBJ2-3)
CASSLEQGIQYF

SEQ ID NO: 545841 - protein, 15 aa, Homo sapiens
  CDR3 for alpha chain variable domain of TCR clone 272921 (TRAV3, TRAJ32)
CAVSSYGGATTKPFF

SEQ ID NO: 545842 - protein, 13 aa, Homo sapiens
  CDR3 for beta chain variable domain of TCR clone 272921 (TRBV20-1, TRBJ2-7)
CSARPSTNYEQYF

SEQ ID NO: 545843 - protein, 15 aa, Homo sapiens
  CDR3 for alpha chain variable domain of TCR clone 272922 (TRAV13-1, TRAJ57)
WAASNTQGGSEKLVF

SEQ ID NO: 545844 - protein, 16 aa, Homo sapiens
  CDR3 for beta chain variable domain of TCR clone 272922 (TRBV19, TRBJ2-1)
CASSKAGPSSYNEQFF

SEQ ID NO: 545845 - protein, 16 aa, Homo sapiens
  CDR3 for alpha chain variable domain of TCR clone 272923 (TRAV16, TRAJ21)
CACGWTTTSTNFTLDL

SEQ ID NO: 545846 - protein, 15 aa, Homo sapiens
  CDR3 for beta chain variable domain of TCR clone 272923 (TRBV19, TRBJ2-1)
CASSIQATSYNEQFF

SEQ ID NO: 545847 - protein, 16 aa, Homo sapiens
  CDR3 for alpha chain variable domain of TCR clone 272924 (TRAV3, TRAJ5)
CAVRNLMDTGSRALTF

SEQ ID NO: 545848 - protein, 16 aa, Homo sapiens
  CDR3 for beta chain variable domain of TCR clone 272924 (TRBV4-2, TRBJ2-7)
CASSQEGLANSYEQYF

SEQ ID NO: 545849 - protein, 12 aa, Homo sapiens
  CDR3 for alpha chain variable domain of TCR clone 272925 (TRAV26-1, TRAJ36)
CIVRVRADNLFF

SEQ ID NO: 545850 - protein, 13 aa, Homo sapiens
  CDR3 for beta chain variable domain of TCR clone 272925 (TRBV20-1, TRBJ1-1)
CSAPPGGHTEAFF

SEQ ID NO: 545851 - protein, 13 aa, Homo sapiens
  CDR3 for alpha chain variable domain of TCR clone 272926 (TRAV2, TRAJ40)
FAVATSGTYKYIF

SEQ ID NO: 545852 - protein, 14 aa, Homo sapiens
  CDR3 for beta chain variable domain of TCR clone 272926 (TRBV19, TRBJ2-1)
CASPTFVLSGEQFF

SEQ ID NO: 545853 - protein, 15 aa, Homo sapiens
  CDR3 for alpha chain variable domain of TCR clone 272927 (TRAV26-2, TRAJ13)
CILRDLSGGYQKVTF

SEQ ID NO: 545854 - protein, 11 aa, Homo sapiens
  CDR3 for beta chain variable domain of TCR clone 272927 (TRBV7-9, TRBJ2-5)
RASSLSATQYF

SEQ ID NO: 545855 - protein, 13 aa, Homo sapiens
  CDR3 for alpha chain variable domain of TCR clone 272928 (TRAV12-3, TRAJ7)
CAMTPYGNNRLAF

SEQ ID NO: 545856 - protein, 13 aa, Homo sapiens
  CDR3 for beta chain variable domain of TCR clone 272928 (TRBV4-1, TRBJ2-7)
CASSQGQAYEQYF

SEQ ID NO: 545857 - protein, 14 aa, Homo sapiens
  CDR3 for alpha chain variable domain of TCR clone 272929 (TRAV23/DV6, TRAJ22)
CAASVSGSARPLTF

SEQ ID NO: 545858 - protein, 13 aa, Homo sapiens
  CDR3 for beta chain variable domain of TCR clone 272929 (TRBV11-2, TRBJ2-5)
CASSRGPSETQYF

SEQ ID NO: 545859 - protein, 14 aa, Homo sapiens
  CDR3 for alpha chain variable domain of TCR clone 272930 (TRAV1-2, TRAJ16)
CAFNRFSDGQKLLF

SEQ ID NO: 545860 - protein, 14 aa, Homo sapiens
  CDR3 for beta chain variable domain of TCR clone 272930 (TRBV12-5, TRBJ2-5)
CASGSRTHQETQYF

SEQ ID NO: 545861 - protein, 11 aa, Homo sapiens
  CDR3 for alpha chain variable domain of TCR clone 272931 (TRAV23/DV6, TRAJ58)
CAARLLRGENS

SEQ ID NO: 545862 - protein, 14 aa, Homo sapiens
  CDR3 for beta chain variable domain of TCR clone 272931 (TRBV7-3, TRBJ2-1)
CASSLAGGTNEQFF

SEQ ID NO: 545863 - protein, 16 aa, Homo sapiens
  CDR3 for alpha chain variable domain of TCR clone 272932 (TRAV17, TRAJ35)
CATAEGGIGFGNVLHC

SEQ ID NO: 545864 - protein, 12 aa, Homo sapiens
  CDR3 for beta chain variable domain of TCR clone 272932 (TRBV29-1, TRBJ2-3)
CSVTGGADTQYF

SEQ ID NO: 545865 - protein, 14 aa, Homo sapiens
  CDR3 for alpha chain variable domain of TCR clone 272933 (TRAV8-3, TRAJ39)
CAVGAYNAGNMLTF

SEQ ID NO: 545866 - protein, 12 aa, Homo sapiens
  CDR3 for beta chain variable domain of TCR clone 272933 (TRBV28, TRBJ1-3)
CASVSSGNTIYF

SEQ ID NO: 545867 - protein, 13 aa, Homo sapiens
  CDR3 for alpha chain variable domain of TCR clone 272934 (TRAV12-1, TRAJ26)
CVVRRNYGQNFVL

SEQ ID NO: 545868 - protein, 14 aa, Homo sapiens
  CDR3 for beta chain variable domain of TCR clone 272934 (TRBV4-2, TRBJ2-1)
CANGLDRAYNEQFF

SEQ ID NO: 545869 - protein, 13 aa, Homo sapiens
  CDR3 for alpha chain variable domain of TCR clone 272935 (TRAV13-2, TRAJ13)
CAERPGGYQKVTF

SEQ ID NO: 545870 - protein, 15 aa, Homo sapiens
  CDR3 for beta chain variable domain of TCR clone 272935 (TRBV4-1, TRBJ1-4)
CASSDTGGTNEELFF

SEQ ID NO: 545871 - protein, 14 aa, Homo sapiens
  CDR3 for alpha chain variable domain of TCR clone 272936 (TRAV1-2, TRAJ8)
CAVREDTGFQKLVF

SEQ ID NO: 545872 - protein, 12 aa, Homo sapiens
  CDR3 for beta chain variable domain of TCR clone 272936 (TRBV11-2, TRBJ2-2)
CASSLATGELFF

SEQ ID NO: 545873 - protein, 15 aa, Homo sapiens
  CDR3 for alpha chain variable domain of TCR clone 272937 (TRAV36/DV7, TRAJ53)
WEGENSGGSNYKLTF

SEQ ID NO: 545874 - protein, 15 aa, Homo sapiens
  CDR3 for beta chain variable domain of TCR clone 272937 (TRBV29-1, TRBJ2-1)
CSVEGGPASYNEQFF

SEQ ID NO: 545875 - protein, 16 aa, Homo sapiens
  CDR3 for alpha chain variable domain of TCR clone 272938 (TRAV4, TRAJ22)
CLVGGLYSGSARQLTF

SEQ ID NO: 545876 - protein, 16 aa, Homo sapiens
  CDR3 for beta chain variable domain of TCR clone 272938 (TRBV7-9, TRBJ2-1)
CASGDVAGGSYNEQFF

SEQ ID NO: 545877 - protein, 13 aa, Homo sapiens
  CDR3 for alpha chain variable domain of TCR clone 272939 (TRAV21, TRAJ27)
RAARPGNAGKSTF

SEQ ID NO: 545878 - protein, 14 aa, Homo sapiens
  CDR3 for beta chain variable domain of TCR clone 272939 (TRBV7-6, TRBJ2-3)
CASSVGTVTDTQYF

SEQ ID NO: 545879 - protein, 13 aa, Homo sapiens
  CDR3 for alpha chain variable domain of TCR clone 272940 (TRAV2, TRAJ40)
CAVVTSGAYKYIF

SEQ ID NO: 545880 - protein, 16 aa, Homo sapiens
  CDR3 for beta chain variable domain of TCR clone 272940 (TRBV29-1, TRBJ2-6)
CSVEDITYSGANVLTF

SEQ ID NO: 545881 - protein, 16 aa, Homo sapiens
  CDR3 for alpha chain variable domain of TCR clone 272941 (TRAV3, TRAJ37)
CAVKPHGSGNTGKLIF

SEQ ID NO: 545882 - protein, 14 aa, Homo sapiens
  CDR3 for beta chain variable domain of TCR clone 272941 (TRBV7-6, TRBJ2-3)
CASSLGTVTDTQYF

SEQ ID NO: 545883 - protein, 16 aa, Homo sapiens
  CDR3 for alpha chain variable domain of TCR clone 272942 (TRAV26-1, TRAJ44)
IASPESPFGTASKLTF

SEQ ID NO: 545884 - protein, 17 aa, Homo sapiens
  CDR3 for beta chain variable domain of TCR clone 272942 (TRBV24-1, TRBJ2-4)
CATSDAEARGVRNIQYF

SEQ ID NO: 545885 - protein, 15 aa, Homo sapiens
  CDR3 for alpha chain variable domain of TCR clone 272943 (TRAV4, TRAJ39)
CIVGPNNNAGNMLTF

SEQ ID NO: 545886 - protein, 14 aa, Homo sapiens
  CDR3 for beta chain variable domain of TCR clone 272943 (TRBV19, TRBJ2-1)
CASPTFVLSGEQFF

SEQ ID NO: 545887 - protein, 14 aa, Homo sapiens
  CDR3 for alpha chain variable domain of TCR clone 272944 (TRAV1-2, TRAJ16)
CAVNRFSDGQKLLF

SEQ ID NO: 545888 - protein, 11 aa, Homo sapiens
  CDR3 for beta chain variable domain of TCR clone 272944 (TRBV11-2, TRBJ1-1)
CASSINTAAFF

SEQ ID NO: 545889 - protein, 14 aa, Homo sapiens
  CDR3 for alpha chain variable domain of TCR clone 272945 (TRAV12-2, TRAJ13)
CAVKKTGGYQKVTF

SEQ ID NO: 545890 - protein, 14 aa, Homo sapiens
  CDR3 for beta chain variable domain of TCR clone 272945 (TRBV5-5, TRBJ1-2)
CASSLDPYNYGYTF

SEQ ID NO: 545891 - protein, 10 aa, Homo sapiens
  CDR3 for alpha chain variable domain of TCR clone 272946 (TRAV36/DV7, TRAJ56)
CAGPAVELTF

SEQ ID NO: 545892 - protein, 14 aa, Homo sapiens
  CDR3 for beta chain variable domain of TCR clone 272946 (TRBV20-1, TRBJ2-7)
CSAPELAGVGEQYF

SEQ ID NO: 545893 - protein, 17 aa, Homo sapiens
  CDR3 for alpha chain variable domain of TCR clone 272947 (TRAV4, TRAJ42)
CLVGVLNYGGSQGNLIF

SEQ ID NO: 545894 - protein, 12 aa, Homo sapiens
  CDR3 for beta chain variable domain of TCR clone 272947 (TRBV20-1, TRBJ2-1)
CSVQYTYNEQFF

SEQ ID NO: 545895 - protein, 13 aa, Homo sapiens
  CDR3 for alpha chain variable domain of TCR clone 272948 (TRAV3, TRAJ34)
CAVRDIGSDKLIF

SEQ ID NO: 545896 - protein, 17 aa, Homo sapiens
  CDR3 for beta chain variable domain of TCR clone 272948 (TRBV13, TRBJ2-3)
CASSLSRVAGGRNTQYF

SEQ ID NO: 545897 - protein, 18 aa, Homo sapiens
  CDR3 for alpha chain variable domain of TCR clone 272949 (TRAV21, TRAJ52)
CAVRPSPAGGTSYGKLTF

SEQ ID NO: 545898 - protein, 14 aa, Homo sapiens
  CDR3 for beta chain variable domain of TCR clone 272949 (TRBV10-3, TRBJ2-5)
CAISERDYQETQYF

SEQ ID NO: 545899 - protein, 14 aa, Homo sapiens
  CDR3 for alpha chain variable domain of TCR clone 272950 (TRAV12-1, TRAJ27)
CGEHIRTNAGKSTF

SEQ ID NO: 545900 - protein, 16 aa, Homo sapiens
  CDR3 for beta chain variable domain of TCR clone 272950 (TRBV10-3, TRBJ2-1)
CAISGVGDGGGGEQFF

SEQ ID NO: 545901 - protein, 13 aa, Homo sapiens
  CDR3 for alpha chain variable domain of TCR clone 272951 (TRAV36/DV7, TRAJ37)
CAVFSSKTGKLIF

SEQ ID NO: 545902 - protein, 15 aa, Homo sapiens
  CDR3 for beta chain variable domain of TCR clone 272951 (TRBV12-4, TRBJ2-5)
CQQFFVRGRQETQYF

SEQ ID NO: 545903 - protein, 14 aa, Homo sapiens
  CDR3 for alpha chain variable domain of TCR clone 272952 (TRAV23/DV6, TRAJ45)
RAASWGGGDDGLPF

SEQ ID NO: 545904 - protein, 15 aa, Homo sapiens
  CDR3 for beta chain variable domain of TCR clone 272952 (TRBV4-2, TRBJ1-2)
CASSRNTGAGYGYTF

SEQ ID NO: 545905 - protein, 14 aa, Homo sapiens
  CDR3 for alpha chain variable domain of TCR clone 272953 (TRAV16, TRAJ17)
CALSGRAAGNRLTF

SEQ ID NO: 545906 - protein, 14 aa, Homo sapiens
  CDR3 for beta chain variable domain of TCR clone 272953 (TRBV11-3, TRBJ2-1)
CASSATTSGSIQFF

SEQ ID NO: 545907 - protein, 20 aa, Homo sapiens
  CDR3 for alpha chain variable domain of TCR clone 272954 (TRAV21, TRAJ4)
AASQPCDSATLAGGYNKLIF

SEQ ID NO: 545908 - protein, 19 aa, Homo sapiens
  CDR3 for beta chain variable domain of TCR clone 272954 (TRBV18, TRBJ1-3)
CASSPLSRTGMSSGNTIYF

SEQ ID NO: 545909 - protein, 16 aa, Homo sapiens
  CDR3 for alpha chain variable domain of TCR clone 272955 (TRAV12-3, TRAJ53)
CAMSPGSGGGHYKLTF

SEQ ID NO: 545910 - protein, 16 aa, Homo sapiens
  CDR3 for beta chain variable domain of TCR clone 272955 (TRBV4-2, TRBJ1-1)
CASSQAGFGMNTEAFF

SEQ ID NO: 545911 - protein, 17 aa, Homo sapiens
  CDR3 for alpha chain variable domain of TCR clone 272956 (TRAV3, TRAJ12)
CAVRDGGRMDSSYKLIF

SEQ ID NO: 545912 - protein, 15 aa, Homo sapiens
  CDR3 for beta chain variable domain of TCR clone 272956 (TRBV5-1, TRBJ2-3)
CASSVTSGSTDTRYF

SEQ ID NO: 545913 - protein, 15 aa, Homo sapiens
  CDR3 for alpha chain variable domain of TCR clone 272957 (TRAV25, TRAJ53)
CAGSRSGGSNYKLTF

SEQ ID NO: 545914 - protein, 15 aa, Homo sapiens
  CDR3 for beta chain variable domain of TCR clone 272957 (TRBV7-9, TRBJ1-6)
CASSSPGRGNSPLHF

SEQ ID NO: 545915 - protein, 11 aa, Homo sapiens
  CDR3 for alpha chain variable domain of TCR clone 272958 (TRAV3, TRAJ21)
CAVGNFNKFHF

SEQ ID NO: 545916 - protein, 16 aa, Homo sapiens
  CDR3 for beta chain variable domain of TCR clone 272958 (TRBV19, TRBJ2-1)
CASSKAGPSSYNEQFL

SEQ ID NO: 545917 - protein, 13 aa, Homo sapiens
  CDR3 for alpha chain variable domain of TCR clone 272959 (TRAV36/DV7, TRAJ54)
CAVDIQGAQKLVF

SEQ ID NO: 545918 - protein, 15 aa, Homo sapiens
  CDR3 for beta chain variable domain of TCR clone 272959 (TRBV11-2, TRBJ2-1)
CASSLGPDSYNEQFF

SEQ ID NO: 545919 - protein, 11 aa, Homo sapiens
  CDR3 for alpha chain variable domain of TCR clone 272960 (TRAV1-2, TRAJ20)
CAVSNDYKLSF

SEQ ID NO: 545920 - protein, 15 aa, Homo sapiens
  CDR3 for beta chain variable domain of TCR clone 272960 (TRBV7-6, TRBJ1-5)
CASSQSSGINQPQHF

SEQ ID NO: 545921 - protein, 11 aa, Homo sapiens
  CDR3 for alpha chain variable domain of TCR clone 272961 (TRAV12-3, TRAJ43)
CAMSVSNDIRF

SEQ ID NO: 545922 - protein, 13 aa, Homo sapiens
  CDR3 for beta chain variable domain of TCR clone 272961 (TRBV20-1, TRBJ1-1)
CSAPLGEGTEAFF

SEQ ID NO: 545923 - protein, 15 aa, Homo sapiens
  CDR3 for alpha chain variable domain of TCR clone 272962 (TRAV3, TRAJ20)
CAVRDIKLRDYKLSF

SEQ ID NO: 545924 - protein, 15 aa, Homo sapiens
  CDR3 for beta chain variable domain of TCR clone 272962 (TRBV7-9, TRBJ1-6)
CASSSPGRGNSPLLF

SEQ ID NO: 545925 - protein, 15 aa, Homo sapiens
  CDR3 for alpha chain variable domain of TCR clone 272963 (TRAV26-1, TRAJ44)
CIVRANTGTASKLTF

SEQ ID NO: 545926 - protein, 15 aa, Homo sapiens
  CDR3 for beta chain variable domain of TCR clone 272963 (TRBV5-5, TRBJ1-5)
CASSSTPGSNQPQHF

SEQ ID NO: 545927 - protein, 15 aa, Homo sapiens
  CDR3 for alpha chain variable domain of TCR clone 272964 (TRAV12-1, TRAJ44)
CVADLPTGTASKLTF

SEQ ID NO: 545928 - protein, 13 aa, Homo sapiens
  CDR3 for beta chain variable domain of TCR clone 272964 (TRBV7-3, TRBJ2-5)
CASSSDREETQYF

SEQ ID NO: 545929 - protein, 14 aa, Homo sapiens
  CDR3 for alpha chain variable domain of TCR clone 272965 (TRAV13-2, TRAJ29)
CAENIEPGNTPIVF

SEQ ID NO: 545930 - protein, 14 aa, Homo sapiens
  CDR3 for beta chain variable domain of TCR clone 272965 (TRBV19, TRBJ2-2)
CATTGHANTGELFF

SEQ ID NO: 545931 - protein, 14 aa, Homo sapiens
  CDR3 for alpha chain variable domain of TCR clone 272966 (TRAV29/DV5, TRAJ20)
CAASAPIEDYKLSF

SEQ ID NO: 545932 - protein, 14 aa, Homo sapiens
  CDR3 for beta chain variable domain of TCR clone 272966 (TRBV7-2, TRBJ2-7)
CASSPKTSFYEQYF

SEQ ID NO: 545933 - protein, 10 aa, Homo sapiens
  CDR3 for alpha chain variable domain of TCR clone 272967 (TRAV16, TRAJ26)
CAPEELWSEF

SEQ ID NO: 545934 - protein, 15 aa, Homo sapiens
  CDR3 for beta chain variable domain of TCR clone 272967 (TRBV7-2, TRBJ2-3)
CASSLAGTSTDTQYF

SEQ ID NO: 545935 - protein, 14 aa, Homo sapiens
  CDR3 for alpha chain variable domain of TCR clone 272968 (TRAV12-2, TRAJ40)
CAVKIPSGTYKYIF

SEQ ID NO: 545936 - protein, 14 aa, Homo sapiens
  CDR3 for beta chain variable domain of TCR clone 272968 (TRBV20-1, TRBJ1-1)
CSARTRSGGTEAFF

SEQ ID NO: 545937 - protein, 14 aa, Homo sapiens
  CDR3 for alpha chain variable domain of TCR clone 272969 (TRAV1-2, TRAJ16)
CAVNRFSDGQKLLF

SEQ ID NO: 545938 - protein, 13 aa, Homo sapiens
  CDR3 for beta chain variable domain of TCR clone 272969 (TRBV5-1, TRBJ1-2)
CASSSTGVYGYTF

SEQ ID NO: 545939 - protein, 14 aa, Homo sapiens
  CDR3 for alpha chain variable domain of TCR clone 272970 (TRAV12-1, TRAJ23)
CVVIVYNQGGKLIF

SEQ ID NO: 545940 - protein, 15 aa, Homo sapiens
  CDR3 for beta chain variable domain of TCR clone 272970 (TRBV20-1, TRBJ1-5)
CSAKPPGQGPQPQHL

SEQ ID NO: 545941 - protein, 15 aa, Homo sapiens
  CDR3 for alpha chain variable domain of TCR clone 272971 (TRAV4, TRAJ15)
CLVGDGNQAGTALIF

SEQ ID NO: 545942 - protein, 10 aa, Homo sapiens
  CDR3 for beta chain variable domain of TCR clone 272971 (TRBV7-9, TRBJ1-1)
CASSFTEAFF

SEQ ID NO: 545943 - protein, 11 aa, Homo sapiens
  CDR3 for alpha chain variable domain of TCR clone 272972 (TRAV23/DV6, TRAJ9)
CFHTGGFKTIF

SEQ ID NO: 545944 - protein, 17 aa, Homo sapiens
  CDR3 for beta chain variable domain of TCR clone 272972 (TRBV20-1, TRBJ2-1)
CSARDPLAGVWDNEQFF

SEQ ID NO: 545945 - protein, 12 aa, Homo sapiens
  CDR3 for alpha chain variable domain of TCR clone 272973 (TRAV1-2, TRAJ17)
CAVRAAGNKLPF

SEQ ID NO: 545946 - protein, 16 aa, Homo sapiens
  CDR3 for beta chain variable domain of TCR clone 272973 (TRBV20-1, TRBJ2-1)
CSAPGLAGSYSDEQFF

SEQ ID NO: 545947 - protein, 13 aa, Homo sapiens
  CDR3 for alpha chain variable domain of TCR clone 272974 (TRAV12-1, TRAJ6)
CVVFPGGSYIPTF

SEQ ID NO: 545948 - protein, 15 aa, Homo sapiens
  CDR3 for beta chain variable domain of TCR clone 272974 (TRBV6-3, TRBJ2-1)
CASSYASDSYNEQFF

SEQ ID NO: 545949 - protein, 14 aa, Homo sapiens
  CDR3 for alpha chain variable domain of TCR clone 272975 (TRAV12-3, TRAJ10)
SHLPLTGGGNKLTF

SEQ ID NO: 545950 - protein, 16 aa, Homo sapiens
  CDR3 for beta chain variable domain of TCR clone 272975 (TRBV7-2, TRBJ2-3)
CASSESGPTGTDTQYF

SEQ ID NO: 545951 - protein, 14 aa, Homo sapiens
  CDR3 for alpha chain variable domain of TCR clone 272976 (TRAV16, TRAJ39)
CALSKNNAGNMLTF

SEQ ID NO: 545952 - protein, 14 aa, Homo sapiens
  CDR3 for beta chain variable domain of TCR clone 272976 (TRBV5-1, TRBJ1-1)
CASSCTGRNTEAFF

SEQ ID NO: 545953 - protein, 22 aa, Homo sapiens
  CDR3 for alpha chain variable domain of TCR clone 272977 (TRAV39, TRAJ49)
PCMTSLPPTSVPWTNTSNQFYF

SEQ ID NO: 545954 - protein, 17 aa, Homo sapiens
  CDR3 for beta chain variable domain of TCR clone 272977 (TRBV20-1, TRBJ2-1)
CSASDRRRASSYNEQFF

SEQ ID NO: 545955 - protein, 12 aa, Homo sapiens
  CDR3 for alpha chain variable domain of TCR clone 272978 (TRAV21, TRAJ31)
CVLAGNNARLMF

SEQ ID NO: 545956 - protein, 14 aa, Homo sapiens
  CDR3 for beta chain variable domain of TCR clone 272978 (TRBV25-1, TRBJ2-3)
CASSVHRERDTQYF

SEQ ID NO: 545957 - protein, 12 aa, Homo sapiens
  CDR3 for alpha chain variable domain of TCR clone 272979 (TRAV3, TRAJ43)
CAVRGPDNDMRF

SEQ ID NO: 545958 - protein, 15 aa, Homo sapiens
  CDR3 for beta chain variable domain of TCR clone 272979 (TRBV7-9, TRBJ1-6)
CASSSPGRGNSPLHF

SEQ ID NO: 545959 - protein, 14 aa, Homo sapiens
  CDR3 for alpha chain variable domain of TCR clone 272980 (TRAV8-2, TRAJ4)
CVVSPSVGYNKLIF

SEQ ID NO: 545960 - protein, 14 aa, Homo sapiens
  CDR3 for beta chain variable domain of TCR clone 272980 (TRBV10-3, TRBJ2-2)
CAISEVSHSGELFF

SEQ ID NO: 545961 - protein, 14 aa, Homo sapiens
  CDR3 for alpha chain variable domain of TCR clone 272981 (TRAV16, TRAJ39)
CALSKNNAGNMLTF

SEQ ID NO: 545962 - protein, 16 aa, Homo sapiens
  CDR3 for beta chain variable domain of TCR clone 272981 (TRBV6-6, TRBJ2-1)
CASSYSLSGSYNEQFF

SEQ ID NO: 545963 - protein, 12 aa, Homo sapiens
  CDR3 for alpha chain variable domain of TCR clone 272982 (TRAV3, TRAJ43)
CAVRDPNNDMRV

SEQ ID NO: 545964 - protein, 13 aa, Homo sapiens
  CDR3 for beta chain variable domain of TCR clone 272982 (TRBV19, TRBJ1-2)
CASSVPGQDGYTF

SEQ ID NO: 545965 - protein, 12 aa, Homo sapiens
  CDR3 for alpha chain variable domain of TCR clone 272983 (TRAV12-1, TRAJ40)
CVFYSGTYKYIF

SEQ ID NO: 545966 - protein, 18 aa, Homo sapiens
  CDR3 for beta chain variable domain of TCR clone 272983 (TRBV12-4, TRBJ2-2)
CASSLVAGTRGRTGVLFF

SEQ ID NO: 545967 - protein, 13 aa, Homo sapiens
  CDR3 for alpha chain variable domain of TCR clone 272984 (TRAV23/DV6, TRAJ21)
GAASREQLQQILL

SEQ ID NO: 545968 - protein, 16 aa, Homo sapiens
  CDR3 for beta chain variable domain of TCR clone 272984 (TRBV20-1, TRBJ2-3)
CSAVRDRGPIADTQYF

SEQ ID NO: 545969 - protein, 16 aa, Homo sapiens
  CDR3 for alpha chain variable domain of TCR clone 272985 (TRAV21, TRAJ37)
CAVRPRGSSDTGKLIF

SEQ ID NO: 545970 - protein, 13 aa, Homo sapiens
  CDR3 for beta chain variable domain of TCR clone 272985 (TRBV7-9, TRBJ2-5)
CASLSPGQETQYF

SEQ ID NO: 545971 - protein, 15 aa, Homo sapiens
  CDR3 for alpha chain variable domain of TCR clone 272986 (TRAV3, TRAJ29)
CAVRDLYSGNTPLVF

SEQ ID NO: 545972 - protein, 17 aa, Homo sapiens
  CDR3 for beta chain variable domain of TCR clone 272986 (TRBV20-1, TRBJ2-1)
CSARDPLAGVWDNEEFF

SEQ ID NO: 545973 - protein, 15 aa, Homo sapiens
  CDR3 for alpha chain variable domain of TCR clone 272987 (TRAV26-1, TRAJ38)
CIVRAEGGNNRKMIW

SEQ ID NO: 545974 - protein, 14 aa, Homo sapiens
  CDR3 for beta chain variable domain of TCR clone 272987 (TRBV7-6, TRBJ2-5)
CASSSPSGSETQYF

SEQ ID NO: 545975 - protein, 14 aa, Homo sapiens
  CDR3 for alpha chain variable domain of TCR clone 272988 (TRAV27, TRAJ23)
CAGLSYNQGGKLLF

SEQ ID NO: 545976 - protein, 15 aa, Homo sapiens
  CDR3 for beta chain variable domain of TCR clone 272988 (TRBV20-1, TRBJ2-7)
CSARDRVSGMDEQYF

SEQ ID NO: 545977 - protein, 12 aa, Homo sapiens
  CDR3 for alpha chain variable domain of TCR clone 272989 (TRAV23/DV6, TRAJ16)
CAATGTGQKLLF

SEQ ID NO: 545978 - protein, 15 aa, Homo sapiens
  CDR3 for beta chain variable domain of TCR clone 272989 (TRBV28, TRBJ1-2)
CASSSYRGLVYGYAF

SEQ ID NO: 545979 - protein, 16 aa, Homo sapiens
  CDR3 for alpha chain variable domain of TCR clone 272990 (TRAV30, TRAJ24)
CGTEIVDADSWGKFQF

SEQ ID NO: 545980 - protein, 17 aa, Homo sapiens
  CDR3 for beta chain variable domain of TCR clone 272990 (TRBV20-1, TRBJ2-1)
CRAPPRLAGTRYNEQFF

SEQ ID NO: 545981 - protein, 15 aa, Homo sapiens
  CDR3 for alpha chain variable domain of TCR clone 272991 (TRAV8-4, TRAJ3)
CAVSEPYSSASKLIF

SEQ ID NO: 545982 - protein, 13 aa, Homo sapiens
  CDR3 for beta chain variable domain of TCR clone 272991 (TRBV12-4, TRBJ2-7)
CASSLERVREQYF

SEQ ID NO: 545983 - protein, 16 aa, Homo sapiens
  CDR3 for alpha chain variable domain of TCR clone 272992 (TRAV25, TRAJ52)
CAGPRAGGTSYGKLTF

SEQ ID NO: 545984 - protein, 15 aa, Homo sapiens
  CDR3 for beta chain variable domain of TCR clone 272992 (TRBV10-3, TRBJ2-2)
CAICTGGTGTGELFF

SEQ ID NO: 545985 - protein, 15 aa, Homo sapiens
  CDR3 for alpha chain variable domain of TCR clone 272993 (TRAV2, TRAJ37)
CAVGVGSSNTGKLIF

SEQ ID NO: 545986 - protein, 13 aa, Homo sapiens
  CDR3 for beta chain variable domain of TCR clone 272993 (TRBV20-1, TRBJ2-7)
CSAQTGLSYEQYF

SEQ ID NO: 545987 - protein, 11 aa, Homo sapiens
  CDR3 for alpha chain variable domain of TCR clone 272994 (TRAV3, TRAJ21)
WSVGNFNKFYF

SEQ ID NO: 545988 - protein, 16 aa, Homo sapiens
  CDR3 for beta chain variable domain of TCR clone 272994 (TRBV19, TRBJ2-1)
CASSKAGPSSYNEQFF

SEQ ID NO: 545989 - protein, 10 aa, Homo sapiens
  CDR3 for alpha chain variable domain of TCR clone 272995 (TRAV12-3, TRAJ18)
CAMSAEAQPW

SEQ ID NO: 545990 - protein, 15 aa, Homo sapiens
  CDR3 for beta chain variable domain of TCR clone 272995 (TRBV10-3, TRBJ2-5)
CAISEFGRGQETQYF

SEQ ID NO: 545991 - protein, 16 aa, Homo sapiens
  CDR3 for alpha chain variable domain of TCR clone 272996 (TRAV8-3, TRAJ42)
CAVGEGNGGSQGNLIF

SEQ ID NO: 545992 - protein, 14 aa, Homo sapiens
  CDR3 for beta chain variable domain of TCR clone 272996 (TRBV7-2, TRBJ2-1)
RASSRGGARNEQFF

SEQ ID NO: 545993 - protein, 14 aa, Homo sapiens
  CDR3 for alpha chain variable domain of TCR clone 272997 (TRAV12-1, TRAJ38)
CVVTPGGNNRKLIW

SEQ ID NO: 545994 - protein, 14 aa, Homo sapiens
  CDR3 for beta chain variable domain of TCR clone 272997 (TRBV28, TRBJ1-2)
CASSLTRTGPGDTF

SEQ ID NO: 545995 - protein, 11 aa, Homo sapiens
  CDR3 for alpha chain variable domain of TCR clone 272998 (TRAV2, TRAJ21)
CAVFNFNKFYF

SEQ ID NO: 545996 - protein, 14 aa, Homo sapiens
  CDR3 for beta chain variable domain of TCR clone 272998 (TRBV15, TRBJ2-3)
CATRSGTSTDMQYF

SEQ ID NO: 545997 - protein, 15 aa, Homo sapiens
  CDR3 for alpha chain variable domain of TCR clone 272999 (TRAV8-4, TRAJ37)
CAVTYGSSNTGKLIF

SEQ ID NO: 545998 - protein, 13 aa, Homo sapiens
  CDR3 for beta chain variable domain of TCR clone 272999 (TRBV12-4, TRBJ2-5)
CASSLGGSRTQYA

SEQ ID NO: 545999 - protein, 16 aa, Homo sapiens
  CDR3 for alpha chain variable domain of TCR clone 273000 (TRAV12-3, TRAJ53)
CAMSPGSGGSNDKLTF

SEQ ID NO: 546000 - protein, 15 aa, Homo sapiens
  CDR3 for beta chain variable domain of TCR clone 273000 (TRBV25-1, TRBJ1-4)
CASSKRIATNEKLFF

SEQ ID NO: 546001 - protein, 16 aa, Homo sapiens
  CDR3 for alpha chain variable domain of TCR clone 273001 (TRAV27, TRAJ34)
CAGGGWGDYNTDKVIF

SEQ ID NO: 546002 - protein, 15 aa, Homo sapiens
  CDR3 for beta chain variable domain of TCR clone 273001 (TRBV9, TRBJ1-4)
CASSVGGSTNEKLFF

SEQ ID NO: 546003 - protein, 13 aa, Homo sapiens
  CDR3 for alpha chain variable domain of TCR clone 273002 (TRAV2, TRAJ15)
CAVASQAGTALIF

SEQ ID NO: 546004 - protein, 12 aa, Homo sapiens
  CDR3 for beta chain variable domain of TCR clone 273002 (TRBV11-2, TRBJ2-2)
CASSRPTGELFF

SEQ ID NO: 546005 - protein, 15 aa, Homo sapiens
  CDR3 for alpha chain variable domain of TCR clone 273003 (TRAV26-1, TRAJ29)
CIVRVEGSGNTTLVC

SEQ ID NO: 546006 - protein, 14 aa, Homo sapiens
  CDR3 for beta chain variable domain of TCR clone 273003 (TRBV18, TRBJ2-5)
CASSPGVSQETQYF

SEQ ID NO: 546007 - protein, 11 aa, Homo sapiens
  CDR3 for alpha chain variable domain of TCR clone 273004 (TRAV16, TRAJ49)
CSLNTGNPFYF

SEQ ID NO: 546008 - protein, 12 aa, Homo sapiens
  CDR3 for beta chain variable domain of TCR clone 273004 (TRBV7-9, TRBJ1-4)
CASSTDREKLFF

SEQ ID NO: 546009 - protein, 14 aa, Homo sapiens
  CDR3 for alpha chain variable domain of TCR clone 273005 (TRAV20, TRAJ42)
CAVQAGGSQGNLIF

SEQ ID NO: 546010 - protein, 14 aa, Homo sapiens
  CDR3 for beta chain variable domain of TCR clone 273005 (TRBV7-2, TRBJ2-3)
CASSQTGSSYTQYF

SEQ ID NO: 546011 - protein, 18 aa, Homo sapiens
  CDR3 for alpha chain variable domain of TCR clone 273006 (TRAV21, TRAJ52)
CAVRPSPAGGTSYGKLTF

SEQ ID NO: 546012 - protein, 13 aa, Homo sapiens
  CDR3 for beta chain variable domain of TCR clone 273006 (TRBV20-1, TRBJ1-1)
CSARVGGNTEAVF

SEQ ID NO: 546013 - protein, 13 aa, Homo sapiens
  CDR3 for alpha chain variable domain of TCR clone 273007 (TRAV21, TRAJ27)
CAARPGSAGKSTF

SEQ ID NO: 546014 - protein, 15 aa, Homo sapiens
  CDR3 for beta chain variable domain of TCR clone 273007 (TRBV7-2, TRBJ2-1)
CASSSGLAGGNEQFF

SEQ ID NO: 546015 - protein, 15 aa, Homo sapiens
  CDR3 for alpha chain variable domain of TCR clone 273008 (TRAV3, TRAJ29)
CAVRDLYSGNTPLVF

SEQ ID NO: 546016 - protein, 14 aa, Homo sapiens
  CDR3 for beta chain variable domain of TCR clone 273008 (TRBV7-2, TRBJ2-3)
CASSQTGSSYTQYF

SEQ ID NO: 546017 - protein, 10 aa, Homo sapiens
  CDR3 for alpha chain variable domain of TCR clone 273009 (TRAV1-2, TRAJ23)
CAGQGGKLIF

SEQ ID NO: 546018 - protein, 17 aa, Homo sapiens
  CDR3 for beta chain variable domain of TCR clone 273009 (TRBV13, TRBJ2-3)
CASSLSRVAGGRNTQYF

SEQ ID NO: 546019 - protein, 17 aa, Homo sapiens
  CDR3 for alpha chain variable domain of TCR clone 273010 (TRAV3, TRAJ38)
CAVRDCLNAGNNRKLMW

SEQ ID NO: 546020 - protein, 13 aa, Homo sapiens
  CDR3 for beta chain variable domain of TCR clone 273010 (TRBV7-3, TRBJ1-1)
CASSQDWGAEAFF

SEQ ID NO: 546021 - protein, 14 aa, Homo sapiens
  CDR3 for alpha chain variable domain of TCR clone 273011 (TRAV12-3, TRAJ33)
CAMSVPGSNYQLIW

SEQ ID NO: 546022 - protein, 14 aa, Homo sapiens
  CDR3 for beta chain variable domain of TCR clone 273011 (TRBV7-8, TRBJ1-3)
CASSSDRVRNTIYF

SEQ ID NO: 546023 - protein, 13 aa, Homo sapiens
  CDR3 for alpha chain variable domain of TCR clone 273012 (TRAV27, TRAJ6)
CAGGTRGSYIPTF

SEQ ID NO: 546024 - protein, 13 aa, Homo sapiens
  CDR3 for beta chain variable domain of TCR clone 273012 (TRBV18, TRBJ1-1)
CASSPGPSGEAFF

SEQ ID NO: 546025 - protein, 11 aa, Homo sapiens
  CDR3 for alpha chain variable domain of TCR clone 273013 (TRAV17, TRAJ36)
RAPTGANNLFF

SEQ ID NO: 546026 - protein, 13 aa, Homo sapiens
  CDR3 for beta chain variable domain of TCR clone 273013 (TRBV12-4, TRBJ2-7)
CASSPTETYEQYF

SEQ ID NO: 546027 - protein, 11 aa, Homo sapiens
  CDR3 for alpha chain variable domain of TCR clone 273014 (TRAV17, TRAJ49)
CATDAGNQFYF

SEQ ID NO: 546028 - protein, 14 aa, Homo sapiens
  CDR3 for beta chain variable domain of TCR clone 273014 (TRBV11-2, TRBJ2-7)
CASSSTGEGYEQYF

SEQ ID NO: 546029 - protein, 15 aa, Homo sapiens
  CDR3 for alpha chain variable domain of TCR clone 273015 (TRAV21, TRAJ52)
CAVRGGGTSYEKLTF

SEQ ID NO: 546030 - protein, 13 aa, Homo sapiens
  CDR3 for beta chain variable domain of TCR clone 273015 (TRBV24-1, TRBJ2-2)
CATSDWSTGELFF

SEQ ID NO: 546031 - protein, 13 aa, Homo sapiens
  CDR3 for alpha chain variable domain of TCR clone 273016 (TRAV4, TRAJ37)
CLVGSGNTGKLIF

SEQ ID NO: 546032 - protein, 15 aa, Homo sapiens
  CDR3 for beta chain variable domain of TCR clone 273016 (TRBV7-9, TRBJ1-5)
CASSQGHQPNQPQHF

SEQ ID NO: 546033 - protein, 12 aa, Homo sapiens
  CDR3 for alpha chain variable domain of TCR clone 273017 (TRAV12-2, TRAJ4)
GWPEGGYNKLIF

SEQ ID NO: 546034 - protein, 14 aa, Homo sapiens
  CDR3 for beta chain variable domain of TCR clone 273017 (TRBV19, TRBJ2-1)
CASPTFVLSGEQFF

SEQ ID NO: 546035 - protein, 13 aa, Homo sapiens
  CDR3 for alpha chain variable domain of TCR clone 273018 (TRAV20, TRAJ29)
CAVQAVGNTPLVF

SEQ ID NO: 546036 - protein, 15 aa, Homo sapiens
  CDR3 for beta chain variable domain of TCR clone 273018 (TRBV10-2, TRBJ2-5)
CASRGSGGTQETQYF

SEQ ID NO: 546037 - protein, 16 aa, Homo sapiens
  CDR3 for alpha chain variable domain of TCR clone 273019 (TRAV30, TRAJ24)
CGTEIVDADSWGKVQF

SEQ ID NO: 546038 - protein, 13 aa, Homo sapiens
  CDR3 for beta chain variable domain of TCR clone 273019 (TRBV20-1, TRBJ1-1)
CSAPPGGHTEAFF

SEQ ID NO: 546039 - protein, 15 aa, Homo sapiens
  CDR3 for alpha chain variable domain of TCR clone 273020 (TRAV3, TRAJ5)
CAVRDLDTGRRALTF

SEQ ID NO: 546040 - protein, 14 aa, Homo sapiens
  CDR3 for beta chain variable domain of TCR clone 273020 (TRBV20-1, TRBJ2-7)
CSARRGNGIYEQYF

SEQ ID NO: 546041 - protein, 17 aa, Homo sapiens
  CDR3 for alpha chain variable domain of TCR clone 273021 (TRAV3, TRAJ42)
CAVRDRDYGGSQGNLTF

SEQ ID NO: 546042 - protein, 12 aa, Homo sapiens
  CDR3 for beta chain variable domain of TCR clone 273021 (TRBV11-2, TRBJ2-1)
CASSPGNNELFF

SEQ ID NO: 546043 - protein, 19 aa, Homo sapiens
  CDR3 for alpha chain variable domain of TCR clone 273022 (TRAV1-2, TRAJ26)
CLLPLCCERPDNYGQNFVF

SEQ ID NO: 546044 - protein, 20 aa, Homo sapiens
  CDR3 for beta chain variable domain of TCR clone 273022 (TRBV7-8, TRBJ2-2)
CASSHLFPGPTIHITGELFF

SEQ ID NO: 546045 - protein, 14 aa, Homo sapiens
  CDR3 for alpha chain variable domain of TCR clone 273023 (TRAV38-1, TRAJ45)
CAFYSGGGADGLTF

SEQ ID NO: 546046 - protein, 20 aa, Homo sapiens
  CDR3 for beta chain variable domain of TCR clone 273023 (TRBV28, TRBJ2-1)
CASTPIGRSPGLAGGNEQFF

SEQ ID NO: 546047 - protein, 18 aa, Homo sapiens
  CDR3 for alpha chain variable domain of TCR clone 273024 (TRAV21, TRAJ52)
CAVWPSPAGGTSYGKLTF

SEQ ID NO: 546048 - protein, 15 aa, Homo sapiens
  CDR3 for beta chain variable domain of TCR clone 273024 (TRBV27, TRBJ2-1)
CASSNGGGSSNEQFF

SEQ ID NO: 546049 - protein, 13 aa, Homo sapiens
  CDR3 for alpha chain variable domain of TCR clone 273025 (TRAV17, TRAJ6)
CATDGGGSYIPTF

SEQ ID NO: 546050 - protein, 13 aa, Homo sapiens
  CDR3 for beta chain variable domain of TCR clone 273025 (TRBV19, TRBJ1-2)
CASSQGQVYGYTF

SEQ ID NO: 546051 - protein, 10 aa, Homo sapiens
  CDR3 for alpha chain variable domain of TCR clone 273026 (TRAV1-2, TRAJ20)
CACNDYKLSF

SEQ ID NO: 546052 - protein, 14 aa, Homo sapiens
  CDR3 for beta chain variable domain of TCR clone 273026 (TRBV18, TRBJ2-7)
CASSPRGGAYEQYF

SEQ ID NO: 546053 - protein, 14 aa, Homo sapiens
  CDR3 for alpha chain variable domain of TCR clone 273027 (TRAV8-2, TRAJ37)
CVVSISGNTGKLTF

SEQ ID NO: 546054 - protein, 16 aa, Homo sapiens
  CDR3 for beta chain variable domain of TCR clone 273027 (TRBV20-1, TRBJ2-1)
CSARDLKQGMNNEQFF

SEQ ID NO: 546055 - protein, 18 aa, Homo sapiens
  CDR3 for alpha chain variable domain of TCR clone 273028 (TRAV30, TRAJ24)
CGTEIVDADSWGNSSLEQ

SEQ ID NO: 546056 - protein, 14 aa, Homo sapiens
  CDR3 for beta chain variable domain of TCR clone 273028 (TRBV12-5, TRBJ2-5)
CASGSRTHQETQYF

SEQ ID NO: 546057 - protein, 14 aa, Homo sapiens
  CDR3 for alpha chain variable domain of TCR clone 273029 (TRAV12-2, TRAJ17)
CAALFKAAGNKLTF

SEQ ID NO: 546058 - protein, 16 aa, Homo sapiens
  CDR3 for beta chain variable domain of TCR clone 273029 (TRBV20-1, TRBJ2-2)
CSASASGIPGAGEQFF

SEQ ID NO: 546059 - protein, 12 aa, Homo sapiens
  CDR3 for alpha chain variable domain of TCR clone 273030 (TRAV13-1, TRAJ53)
AASGGSNYNLTF

SEQ ID NO: 546060 - protein, 13 aa, Homo sapiens
  CDR3 for beta chain variable domain of TCR clone 273030 (TRBV4-2, TRBJ1-1)
CASSQAGNTEAFF

SEQ ID NO: 546061 - protein, 12 aa, Homo sapiens
  CDR3 for alpha chain variable domain of TCR clone 273031 (TRAV12-3, TRAJ17)
CAMTLTGTKLTF

SEQ ID NO: 546062 - protein, 13 aa, Homo sapiens
  CDR3 for beta chain variable domain of TCR clone 273031 (TRBV7-2, TRBJ2-2)
CASSLAVTGELFF

SEQ ID NO: 546063 - protein, 16 aa, Homo sapiens
  CDR3 for alpha chain variable domain of TCR clone 273032 (TRAV30, TRAJ24)
CGTEIVDADSWGKFQF

SEQ ID NO: 546064 - protein, 14 aa, Homo sapiens
  CDR3 for beta chain variable domain of TCR clone 273032 (TRBV20-1, TRBJ2-1)
CSAQIGGSANEQFS

SEQ ID NO: 546065 - protein, 18 aa, Homo sapiens
  CDR3 for alpha chain variable domain of TCR clone 273033 (TRAV13-1, TRAJ52)
CAAKNPNAGGTSYGKLTF

SEQ ID NO: 546066 - protein, 17 aa, Homo sapiens
  CDR3 for beta chain variable domain of TCR clone 273033 (TRBV25-1, TRBJ2-5)
CASSRRGGRGGQETQYF

SEQ ID NO: 546067 - protein, 12 aa, Homo sapiens
  CDR3 for alpha chain variable domain of TCR clone 273034 (TRAV12-3, TRAJ17)
CAMTLTGNKLTF

SEQ ID NO: 546068 - protein, 16 aa, Homo sapiens
  CDR3 for beta chain variable domain of TCR clone 273034 (TRBV7-3, TRBJ2-1)
CAISLEGYRSYNEQFF

SEQ ID NO: 546069 - protein, 15 aa, Homo sapiens
  CDR3 for alpha chain variable domain of TCR clone 273035 (TRAV26-1, TRAJ48)
CIVRVGDVGNEKLTF

SEQ ID NO: 546070 - protein, 16 aa, Homo sapiens
  CDR3 for beta chain variable domain of TCR clone 273035 (TRBV4-1, TRBJ2-3)
CASSQRAGVLTDTQYF

SEQ ID NO: 546071 - protein, 18 aa, Homo sapiens
  CDR3 for alpha chain variable domain of TCR clone 273036 (TRAV26-1, TRAJ23)
CIVRVGLEVWNQGAKLIF

SEQ ID NO: 546072 - protein, 16 aa, Homo sapiens
  CDR3 for beta chain variable domain of TCR clone 273036 (TRBV12-4, TRBJ2-5)
CASSFFVRGRQETQYF

SEQ ID NO: 546073 - protein, 13 aa, Homo sapiens
  CDR3 for alpha chain variable domain of TCR clone 273037 (TRAV27, TRAJ57)
CAGFQGGSQKLVF

SEQ ID NO: 546074 - protein, 14 aa, Homo sapiens
  CDR3 for beta chain variable domain of TCR clone 273037 (TRBV20-1, TRBJ1-2)
CSGRKDGRAYGYTF

SEQ ID NO: 546075 - protein, 12 aa, Homo sapiens
  CDR3 for alpha chain variable domain of TCR clone 273038 (TRAV13-1, TRAJ27)
CAAHTNAGKSTF

SEQ ID NO: 546076 - protein, 14 aa, Homo sapiens
  CDR3 for beta chain variable domain of TCR clone 273038 (TRBV7-2, TRBJ1-2)
CASSSQGAHYGYTF

SEQ ID NO: 546077 - protein, 17 aa, Homo sapiens
  CDR3 for alpha chain variable domain of TCR clone 273039 (TRAV36/DV7, TRAJ52)
CAVAQRAGGTSFGKLTF

SEQ ID NO: 546078 - protein, 15 aa, Homo sapiens
  CDR3 for beta chain variable domain of TCR clone 273039 (TRBV7-2, TRBJ2-7)
CASSLALGSAYEQYF

SEQ ID NO: 546079 - protein, 12 aa, Homo sapiens
  CDR3 for alpha chain variable domain of TCR clone 273040 (TRAV1-1, TRAJ24)
CAVRGSWGKFQF

SEQ ID NO: 546080 - protein, 14 aa, Homo sapiens
  CDR3 for beta chain variable domain of TCR clone 273040 (TRBV6-1, TRBJ1-3)
CASVQGGGGNTIYF

SEQ ID NO: 546081 - protein, 16 aa, Homo sapiens
  CDR3 for alpha chain variable domain of TCR clone 273041 (TRAV1-2, TRAJ33)
CAVRAISMDSNYQLIW

SEQ ID NO: 546082 - protein, 13 aa, Homo sapiens
  CDR3 for beta chain variable domain of TCR clone 273041 (TRBV7-9, TRBJ1-2)
CASSLKQNYGYTF

SEQ ID NO: 546083 - protein, 12 aa, Homo sapiens
  CDR3 for alpha chain variable domain of TCR clone 273042 (TRAV20, TRAJ36)
CAVLTGANNLFF

SEQ ID NO: 546084 - protein, 14 aa, Homo sapiens
  CDR3 for beta chain variable domain of TCR clone 273042 (TRBV4-1, TRBJ1-1)
CASSHGQGRTEAFF

SEQ ID NO: 546085 - protein, 12 aa, Homo sapiens
  CDR3 for alpha chain variable domain of TCR clone 273043 (TRAV12-3, TRAJ17)
CAMTLTGNKLTF

SEQ ID NO: 546086 - protein, 15 aa, Homo sapiens
  CDR3 for beta chain variable domain of TCR clone 273043 (TRBV4-2, TRBJ2-3)
CASSPSRRPTDTQYF

SEQ ID NO: 546087 - protein, 12 aa, Homo sapiens
  CDR3 for alpha chain variable domain of TCR clone 273044 (TRAV21, TRAJ11)
CAVRGGNSTLTF

SEQ ID NO: 546088 - protein, 15 aa, Homo sapiens
  CDR3 for beta chain variable domain of TCR clone 273044 (TRBV6-1, TRBJ2-7)
CASSEPIAATTEQYV

SEQ ID NO: 546089 - protein, 13 aa, Homo sapiens
  CDR3 for alpha chain variable domain of TCR clone 273045 (TRAV2, TRAJ15)
CAVASQAGTALIF

SEQ ID NO: 546090 - protein, 15 aa, Homo sapiens
  CDR3 for beta chain variable domain of TCR clone 273045 (TRBV27, TRBJ2-1)
CASGNGGGSSNEQFF

SEQ ID NO: 546091 - protein, 18 aa, Homo sapiens
  CDR3 for alpha chain variable domain of TCR clone 273046 (TRAV13-1, TRAJ52)
CAAKNPNAGGTSYGKLTF

SEQ ID NO: 546092 - protein, 13 aa, Homo sapiens
  CDR3 for beta chain variable domain of TCR clone 273046 (TRBV20-1, TRBJ1-1)
CGARGGGNTEAFF

SEQ ID NO: 546093 - protein, 14 aa, Homo sapiens
  CDR3 for alpha chain variable domain of TCR clone 273047 (TRAV26-2, TRAJ32)
CCVGYGGATNKLIF

SEQ ID NO: 546094 - protein, 13 aa, Homo sapiens
  CDR3 for beta chain variable domain of TCR clone 273047 (TRBV20-1, TRBJ1-1)
CSARGGGNTEAFF

SEQ ID NO: 546095 - protein, 15 aa, Homo sapiens
  CDR3 for alpha chain variable domain of TCR clone 273048 (TRAV8-3, TRAJ41)
CAVGSNSNSGYALNF

SEQ ID NO: 546096 - protein, 17 aa, Homo sapiens
  CDR3 for beta chain variable domain of TCR clone 273048 (TRBV25-1, TRBJ2-1)
CASSAYGQGRGVYERFF

SEQ ID NO: 546097 - protein, 20 aa, Homo sapiens
  CDR3 for alpha chain variable domain of TCR clone 273049 (TRAV4, TRAJ29)
CCVLLPRGCVTFSGNTPLVF

SEQ ID NO: 546098 - protein, 12 aa, Homo sapiens
  CDR3 for beta chain variable domain of TCR clone 273049 (TRBV6-1, TRBJ2-7)
CASSDYSYEQYF

SEQ ID NO: 546099 - protein, 13 aa, Homo sapiens
  CDR3 for alpha chain variable domain of TCR clone 273050 (TRAV2, TRAJ40)
CAVVTSGTYKYIF

SEQ ID NO: 546100 - protein, 12 aa, Homo sapiens
  CDR3 for beta chain variable domain of TCR clone 273050 (TRBV20-1, TRBJ1-1)
CSASLTSAEAFF

SEQ ID NO: 546101 - protein, 16 aa, Homo sapiens
  CDR3 for alpha chain variable domain of TCR clone 273051 (TRAV20, TRAJ22)
CAVQASSSGSARQLTF

SEQ ID NO: 546102 - protein, 16 aa, Homo sapiens
  CDR3 for beta chain variable domain of TCR clone 273051 (TRBV20-1, TRBJ1-4)
CSAPGQGLLTNEKLFF

SEQ ID NO: 546103 - protein, 16 aa, Homo sapiens
  CDR3 for alpha chain variable domain of TCR clone 273052 (TRAV21, TRAJ52)
CAVTNAGGTSYGKLTC

SEQ ID NO: 546104 - protein, 11 aa, Homo sapiens
  CDR3 for beta chain variable domain of TCR clone 273052 (TRBV2, TRBJ1-1)
CASREGTEAFF

SEQ ID NO: 546105 - protein, 12 aa, Homo sapiens
  CDR3 for alpha chain variable domain of TCR clone 273053 (TRAV12-1, TRAJ31)
CVSWNNNARLMF

SEQ ID NO: 546106 - protein, 15 aa, Homo sapiens
  CDR3 for beta chain variable domain of TCR clone 273053 (TRBV6-5, TRBJ2-1)
CASSYDAGAGNEQFF

SEQ ID NO: 546107 - protein, 13 aa, Homo sapiens
  CDR3 for alpha chain variable domain of TCR clone 273054 (TRAV6, TRAJ16)
CALDDSDVQKLLF

SEQ ID NO: 546108 - protein, 16 aa, Homo sapiens
  CDR3 for beta chain variable domain of TCR clone 273054 (TRBV12-4, TRBJ1-6)
CASNLQGKGSPLHLGT

SEQ ID NO: 546109 - protein, 15 aa, Homo sapiens
  CDR3 for alpha chain variable domain of TCR clone 273055 (TRAV34, TRAJ38)
CGADFPPGNNRKLIW

SEQ ID NO: 546110 - protein, 16 aa, Homo sapiens
  CDR3 for beta chain variable domain of TCR clone 273055 (TRBV12-5, TRBJ2-5)
CASGPRTSGNQETQYF

SEQ ID NO: 546111 - protein, 12 aa, Homo sapiens
  CDR3 for alpha chain variable domain of TCR clone 273056 (TRAV8-3, TRAJ26)
CAGDNYGQNFFF

SEQ ID NO: 546112 - protein, 12 aa, Homo sapiens
  CDR3 for beta chain variable domain of TCR clone 273056 (TRBV11-2, TRBJ2-1)
CASRPGNNEQFF

SEQ ID NO: 546113 - protein, 13 aa, Homo sapiens
  CDR3 for alpha chain variable domain of TCR clone 273057 (TRAV23/DV6, TRAJ12)
CAPRVDSSYKLIF

SEQ ID NO: 546114 - protein, 16 aa, Homo sapiens
  CDR3 for beta chain variable domain of TCR clone 273057 (TRBV12-5, TRBJ2-5)
CASGPRTSGNQETQYF

SEQ ID NO: 546115 - protein, 13 aa, Homo sapiens
  CDR3 for alpha chain variable domain of TCR clone 273058 (TRAV26-1, TRAJ12)
CIVRPDSSYKLIF

SEQ ID NO: 546116 - protein, 16 aa, Homo sapiens
  CDR3 for beta chain variable domain of TCR clone 273058 (TRBV29-1, TRBJ2-7)
CSVEDAEDGTAYEQYF

SEQ ID NO: 546117 - protein, 15 aa, Homo sapiens
  CDR3 for alpha chain variable domain of TCR clone 273059 (TRAV8-3, TRAJ40)
FAAPSLGSGTYRYIF

SEQ ID NO: 546118 - protein, 16 aa, Homo sapiens
  CDR3 for beta chain variable domain of TCR clone 273059 (TRBV7-3, TRBJ2-3)
CASSLSGYRPEDTQYF

SEQ ID NO: 546119 - protein, 11 aa, Homo sapiens
  CDR3 for alpha chain variable domain of TCR clone 273060 (TRAV13-1, TRAJ49)
CACVGGNQFYF

SEQ ID NO: 546120 - protein, 16 aa, Homo sapiens
  CDR3 for beta chain variable domain of TCR clone 273060 (TRBV11-2, TRBJ2-2)
CASSLRTGNLIGGLFF

SEQ ID NO: 546121 - protein, 18 aa, Homo sapiens
  CDR3 for alpha chain variable domain of TCR clone 273061 (TRAV12-3, TRAJ52)
CAMSVGGAGGTSYGKLTF

SEQ ID NO: 546122 - protein, 15 aa, Homo sapiens
  CDR3 for beta chain variable domain of TCR clone 273061 (TRBV27, TRBJ1-6)
CASSFDSGLGSPLLF

SEQ ID NO: 546123 - protein, 13 aa, Homo sapiens
  CDR3 for alpha chain variable domain of TCR clone 273062 (TRAV3, TRAJ15)
CAVRDQAGTALIF

SEQ ID NO: 546124 - protein, 11 aa, Homo sapiens
  CDR3 for beta chain variable domain of TCR clone 273062 (TRBV10-3, TRBJ2-7)
CAISEGLEQYF

SEQ ID NO: 546125 - protein, 16 aa, Homo sapiens
  CDR3 for alpha chain variable domain of TCR clone 273063 (TRAV30, TRAJ24)
CGTEIADADSWGKFQF

SEQ ID NO: 546126 - protein, 13 aa, Homo sapiens
  CDR3 for beta chain variable domain of TCR clone 273063 (TRBV20-1, TRBJ1-1)
CSARGGGNTEAFF

SEQ ID NO: 546127 - protein, 16 aa, Homo sapiens
  CDR3 for alpha chain variable domain of TCR clone 273064 (TRAV3, TRAJ37)
CAVRPHGSGNTVKLIF

SEQ ID NO: 546128 - protein, 14 aa, Homo sapiens
  CDR3 for beta chain variable domain of TCR clone 273064 (TRBV25-1, TRBJ1-1)
CASTHLGGNTEAFF

SEQ ID NO: 546129 - protein, 18 aa, Homo sapiens
  CDR3 for alpha chain variable domain of TCR clone 273065 (TRAV26-1, TRAJ52)
CIVRVEGAGGTSYGKPTF

SEQ ID NO: 546130 - protein, 13 aa, Homo sapiens
  CDR3 for beta chain variable domain of TCR clone 273065 (TRBV7-3, TRBJ1-2)
CASSLKRGYGYTF

SEQ ID NO: 546131 - protein, 14 aa, Homo sapiens
  CDR3 for alpha chain variable domain of TCR clone 273066 (TRAV12-3, TRAJ10)
SHLPLTGGGNKLTF

SEQ ID NO: 546132 - protein, 12 aa, Homo sapiens
  CDR3 for beta chain variable domain of TCR clone 273066 (TRBV28, TRBJ1-3)
CASVSSGNTIYF

SEQ ID NO: 546133 - protein, 12 aa, Homo sapiens
  CDR3 for alpha chain variable domain of TCR clone 273067 (TRAV13-2, TRAJ23)
CAERHRGGKLIF

SEQ ID NO: 546134 - protein, 13 aa, Homo sapiens
  CDR3 for beta chain variable domain of TCR clone 273067 (TRBV7-9, TRBJ2-5)
CASLSPGQETQYF

SEQ ID NO: 546135 - protein, 14 aa, Homo sapiens
  CDR3 for alpha chain variable domain of TCR clone 273068 (TRAV3, TRAJ8)
CAALMNTGFQKLVF

SEQ ID NO: 546136 - protein, 14 aa, Homo sapiens
  CDR3 for beta chain variable domain of TCR clone 273068 (TRBV29-1, TRBJ2-2)
CSGRGSGNTGELFF

SEQ ID NO: 546137 - protein, 14 aa, Homo sapiens
  CDR3 for alpha chain variable domain of TCR clone 273069 (TRAV8-3, TRAJ39)
CAVGANNAGNMLTF

SEQ ID NO: 546138 - protein, 16 aa, Homo sapiens
  CDR3 for beta chain variable domain of TCR clone 273069 (TRBV12-5, TRBJ2-5)
CASGPRTSGNQETQYL

SEQ ID NO: 546139 - protein, 14 aa, Homo sapiens
  CDR3 for alpha chain variable domain of TCR clone 273070 (TRAV1-2, TRAJ16)
CAVNLFSDGQKLLF

SEQ ID NO: 546140 - protein, 17 aa, Homo sapiens
  CDR3 for beta chain variable domain of TCR clone 273070 (TRBV20-1, TRBJ2-1)
CSASSSGLAGSYNEQFF

SEQ ID NO: 546141 - protein, 14 aa, Homo sapiens
  CDR3 for alpha chain variable domain of TCR clone 273071 (TRAV1-2, TRAJ16)
GAVNRFSDGQKLRF

SEQ ID NO: 546142 - protein, 16 aa, Homo sapiens
  CDR3 for beta chain variable domain of TCR clone 273071 (TRBV4-2, TRBJ1-1)
CASSQAGFGMNTEAFF

SEQ ID NO: 546143 - protein, 16 aa, Homo sapiens
  CDR3 for alpha chain variable domain of TCR clone 273072 (TRAV16, TRAJ52)
CALSGVGGTSYGKLTF

SEQ ID NO: 546144 - protein, 14 aa, Homo sapiens
  CDR3 for beta chain variable domain of TCR clone 273072 (TRBV7-6, TRBJ2-3)
CASSLGTVTDTQYF

SEQ ID NO: 546145 - protein, 15 aa, Homo sapiens
  CDR3 for alpha chain variable domain of TCR clone 273073 (TRAV12-2, TRAJ52)
CAAPGGGTSYGKLTF

SEQ ID NO: 546146 - protein, 15 aa, Homo sapiens
  CDR3 for beta chain variable domain of TCR clone 273073 (TRBV7-2, TRBJ2-3)
CASSSTGLETDTQYF

SEQ ID NO: 546147 - protein, 12 aa, Homo sapiens
  CDR3 for alpha chain variable domain of TCR clone 273074 (TRAV8-3, TRAJ26)
CAGDNYGQNFVF

SEQ ID NO: 546148 - protein, 15 aa, Homo sapiens
  CDR3 for beta chain variable domain of TCR clone 273074 (TRBV28, TRBJ2-3)
CASSQELGGTDTQYF

SEQ ID NO: 546149 - protein, 15 aa, Homo sapiens
  CDR3 for alpha chain variable domain of TCR clone 273075 (TRAV19, TRAJ9)
CALSLPDTGGFKTIF

SEQ ID NO: 546150 - protein, 16 aa, Homo sapiens
  CDR3 for beta chain variable domain of TCR clone 273075 (TRBV7-3, TRBJ2-2)
CASSLKRGTLSGELFF

SEQ ID NO: 546151 - protein, 14 aa, Homo sapiens
  CDR3 for alpha chain variable domain of TCR clone 273076 (TRAV2, TRAJ37)
CAVDFTSNTGKLIF

SEQ ID NO: 546152 - protein, 14 aa, Homo sapiens
  CDR3 for beta chain variable domain of TCR clone 273076 (TRBV11-2, TRBJ1-5)
CASSLDRGRQPQHF

SEQ ID NO: 546153 - protein, 14 aa, Homo sapiens
  CDR3 for alpha chain variable domain of TCR clone 273077 (TRAV13-1, TRAJ35)
CAASKGGFGNELHC

SEQ ID NO: 546154 - protein, 16 aa, Homo sapiens
  CDR3 for beta chain variable domain of TCR clone 273077 (TRBV2, TRBJ1-4)
CASNLLQGATNEKLFF

SEQ ID NO: 546155 - protein, 12 aa, Homo sapiens
  CDR3 for alpha chain variable domain of TCR clone 273078 (TRAV12-1, TRAJ40)
CVFYSGTYKYIF

SEQ ID NO: 546156 - protein, 13 aa, Homo sapiens
  CDR3 for beta chain variable domain of TCR clone 273078 (TRBV19, TRBJ1-2)
CASSQGQVYGYTF

SEQ ID NO: 546157 - protein, 13 aa, Homo sapiens
  CDR3 for alpha chain variable domain of TCR clone 273079 (TRAV20, TRAJ35)
CAVQEGFGNVLHC

SEQ ID NO: 546158 - protein, 14 aa, Homo sapiens
  CDR3 for beta chain variable domain of TCR clone 273079 (TRBV5-1, TRBJ1-1)
CASSLATGGTEAFF

SEQ ID NO: 546159 - protein, 16 aa, Homo sapiens
  CDR3 for alpha chain variable domain of TCR clone 273080 (TRAV23/DV6, TRAJ52)
CAARPSGGTSYGKPTF

SEQ ID NO: 546160 - protein, 14 aa, Homo sapiens
  CDR3 for beta chain variable domain of TCR clone 273080 (TRBV20-1, TRBJ2-3)
CSARDASSTDTQYF

SEQ ID NO: 546161 - protein, 15 aa, Homo sapiens
  CDR3 for alpha chain variable domain of TCR clone 273081 (TRAV1-2, TRAJ16)
CAVRARFSDGQELLF

SEQ ID NO: 546162 - protein, 19 aa, Homo sapiens
  CDR3 for beta chain variable domain of TCR clone 273081 (TRBV11-3, TRBJ2-3)
CASGFGTSGGPRGGGTQYF

SEQ ID NO: 546163 - protein, 14 aa, Homo sapiens
  CDR3 for alpha chain variable domain of TCR clone 273082 (TRAV12-2, TRAJ6)
CASKWGGGSYIPTF

SEQ ID NO: 546164 - protein, 14 aa, Homo sapiens
  CDR3 for beta chain variable domain of TCR clone 273082 (TRBV28, TRBJ2-3)
CASSFVQGTDTQYF

SEQ ID NO: 546165 - protein, 12 aa, Homo sapiens
  CDR3 for alpha chain variable domain of TCR clone 273083 (TRAV8-4, TRAJ37)
CAVRSKTGKLIF

SEQ ID NO: 546166 - protein, 16 aa, Homo sapiens
  CDR3 for beta chain variable domain of TCR clone 273083 (TRBV7-2, TRBJ2-3)
CASSLVGDASTDTQYF

SEQ ID NO: 546167 - protein, 15 aa, Homo sapiens
  CDR3 for alpha chain variable domain of TCR clone 273084 (TRAV8-4, TRAJ37)
CAVSRGSGNTGQLIF

SEQ ID NO: 546168 - protein, 15 aa, Homo sapiens
  CDR3 for beta chain variable domain of TCR clone 273084 (TRBV5-1, TRBJ2-7)
CASSLDLTSSYEQYF

SEQ ID NO: 546169 - protein, 12 aa, Homo sapiens
  CDR3 for alpha chain variable domain of TCR clone 273085 (TRAV21, TRAJ12)
CAVMDSSYKLIF

SEQ ID NO: 546170 - protein, 16 aa, Homo sapiens
  CDR3 for beta chain variable domain of TCR clone 273085 (TRBV7-9, TRBJ2-5)
CASRLKIGTRKETQYF

SEQ ID NO: 546171 - protein, 17 aa, Homo sapiens
  CDR3 for alpha chain variable domain of TCR clone 273086 (TRAV17, TRAJ7)
CATLGRPAFGKGDQVVV

SEQ ID NO: 546172 - protein, 13 aa, Homo sapiens
  CDR3 for beta chain variable domain of TCR clone 273086 (TRBV12-4, TRBJ2-7)
CASSLERVREQYF

SEQ ID NO: 546173 - protein, 16 aa, Homo sapiens
  CDR3 for alpha chain variable domain of TCR clone 273087 (TRAV3, TRAJ37)
CAVRPHGFGNTGKLIF

SEQ ID NO: 546174 - protein, 16 aa, Homo sapiens
  CDR3 for beta chain variable domain of TCR clone 273087 (TRBV7-9, TRBJ2-3)
CASSPWREVGTDTQYF

SEQ ID NO: 546175 - protein, 12 aa, Homo sapiens
  CDR3 for alpha chain variable domain of TCR clone 273088 (TRAV13-1, TRAJ53)
AASGGSNYKLIF

SEQ ID NO: 546176 - protein, 15 aa, Homo sapiens
  CDR3 for beta chain variable domain of TCR clone 273088 (TRBV5-1, TRBJ2-1)
CASSPPRAPYNEQFF

SEQ ID NO: 546177 - protein, 17 aa, Homo sapiens
  CDR3 for alpha chain variable domain of TCR clone 273089 (TRAV3, TRAJ6)
CAVRDGPRAGGGYIPTF

SEQ ID NO: 546178 - protein, 15 aa, Homo sapiens
  CDR3 for beta chain variable domain of TCR clone 273089 (TRBV7-6, TRBJ2-3)
CASSPIIYSTDTQYF

SEQ ID NO: 546179 - protein, 15 aa, Homo sapiens
  CDR3 for alpha chain variable domain of TCR clone 273090 (TRAV17, TRAJ57)
CATGPSQGGSEKLCF

SEQ ID NO: 546180 - protein, 16 aa, Homo sapiens
  CDR3 for beta chain variable domain of TCR clone 273090 (TRBV12-4, TRBJ1-5)
CASSRPVGGSNQPQHF

SEQ ID NO: 546181 - protein, 14 aa, Homo sapiens
  CDR3 for alpha chain variable domain of TCR clone 273091 (TRAV2, TRAJ9)
CAVEDRSGGFKTIL

SEQ ID NO: 546182 - protein, 14 aa, Homo sapiens
  CDR3 for beta chain variable domain of TCR clone 273091 (TRBV7-6, TRBJ2-3)
CASSLGTVTDTQYC

SEQ ID NO: 546183 - protein, 14 aa, Homo sapiens
  CDR3 for alpha chain variable domain of TCR clone 273092 (TRAV13-1, TRAJ3)
CAAEGYSSASKIIF

SEQ ID NO: 546184 - protein, 13 aa, Homo sapiens
  CDR3 for beta chain variable domain of TCR clone 273092 (TRBV19, TRBJ2-5)
CQLVQGIQETQYF

SEQ ID NO: 546185 - protein, 15 aa, Homo sapiens
  CDR3 for alpha chain variable domain of TCR clone 273093 (TRAV35, TRAJ24)
CAGQSAQGSWGKLQF

SEQ ID NO: 546186 - protein, 14 aa, Homo sapiens
  CDR3 for beta chain variable domain of TCR clone 273093 (TRBV12-5, TRBJ2-5)
CASGSRTHQETQYF

SEQ ID NO: 546187 - protein, 14 aa, Homo sapiens
  CDR3 for alpha chain variable domain of TCR clone 273094 (TRAV9-2, TRAJ39)
CALYIYNAGNMLTF

SEQ ID NO: 546188 - protein, 16 aa, Homo sapiens
  CDR3 for beta chain variable domain of TCR clone 273094 (TRBV12-5, TRBJ2-5)
CASGPRTSGKQETQYF

SEQ ID NO: 546189 - protein, 14 aa, Homo sapiens
  CDR3 for alpha chain variable domain of TCR clone 273095 (TRAV13-1, TRAJ35)
CAASKGGFGNVLHC

SEQ ID NO: 546190 - protein, 14 aa, Homo sapiens
  CDR3 for beta chain variable domain of TCR clone 273095 (TRBV4-1, TRBJ2-2)
CSSSQAVNTGELFF

SEQ ID NO: 546191 - protein, 12 aa, Homo sapiens
  CDR3 for alpha chain variable domain of TCR clone 273096 (TRAV12-1, TRAJ40)
CVVPPGTYKYIF

SEQ ID NO: 546192 - protein, 15 aa, Homo sapiens
  CDR3 for beta chain variable domain of TCR clone 273096 (TRBV12-4, TRBJ2-1)
CASSPLSGRNSEQFF

SEQ ID NO: 546193 - protein, 11 aa, Homo sapiens
  CDR3 for alpha chain variable domain of TCR clone 273097 (TRAV27, TRAJ45)
CAGAEEEVLTD

SEQ ID NO: 546194 - protein, 14 aa, Homo sapiens
  CDR3 for beta chain variable domain of TCR clone 273097 (TRBV7-9, TRBJ2-1)
CASSSMVGFGEQFF

SEQ ID NO: 546195 - protein, 14 aa, Homo sapiens
  CDR3 for alpha chain variable domain of TCR clone 273098 (TRAV2, TRAJ9)
CAVEDRNGGFKTIF

SEQ ID NO: 546196 - protein, 14 aa, Homo sapiens
  CDR3 for beta chain variable domain of TCR clone 273098 (TRBV6-1, TRBJ1-3)
CASVQGGGGNTIYF

SEQ ID NO: 546197 - protein, 13 aa, Homo sapiens
  CDR3 for alpha chain variable domain of TCR clone 273099 (TRAV1-2, TRAJ26)
CAVRPNYGQNFVF

SEQ ID NO: 546198 - protein, 15 aa, Homo sapiens
  CDR3 for beta chain variable domain of TCR clone 273099 (TRBV28, TRBJ2-1)
CASSIIAGGRSEQFF

SEQ ID NO: 546199 - protein, 16 aa, Homo sapiens
  CDR3 for alpha chain variable domain of TCR clone 273100 (TRAV23/DV6, TRAJ9)
CAACIGGNTGGFKTIF

SEQ ID NO: 546200 - protein, 14 aa, Homo sapiens
  CDR3 for beta chain variable domain of TCR clone 273100 (TRBV9, TRBJ2-7)
CASSVGVGSYEQYF

SEQ ID NO: 546201 - protein, 12 aa, Homo sapiens
  CDR3 for alpha chain variable domain of TCR clone 273101 (TRAV12-1, TRAJ40)
CVVYSGTYKYIF

SEQ ID NO: 546202 - protein, 13 aa, Homo sapiens
  CDR3 for beta chain variable domain of TCR clone 273101 (TRBV7-9, TRBJ2-7)
CASSLQGSYEQYF

SEQ ID NO: 546203 - protein, 13 aa, Homo sapiens
  CDR3 for alpha chain variable domain of TCR clone 273102 (TRAV21, TRAJ10)
CAVPTGGGNKITF

SEQ ID NO: 546204 - protein, 22 aa, Homo sapiens
  CDR3 for beta chain variable domain of TCR clone 273102 (TRBV19, TRBJ2-1)
CASSVRDRVTGTSGRIYNEQFF

SEQ ID NO: 546205 - protein, 12 aa, Homo sapiens
  CDR3 for alpha chain variable domain of TCR clone 273103 (TRAV13-2, TRAJ23)
CAERHRGGKLIF

SEQ ID NO: 546206 - protein, 13 aa, Homo sapiens
  CDR3 for beta chain variable domain of TCR clone 273103 (TRBV7-9, TRBJ1-2)
CASSLNQNYGYTF

SEQ ID NO: 546207 - protein, 13 aa, Homo sapiens
  CDR3 for alpha chain variable domain of TCR clone 273104 (TRAV21, TRAJ27)
CAARPGNAGKSTF

SEQ ID NO: 546208 - protein, 12 aa, Homo sapiens
  CDR3 for beta chain variable domain of TCR clone 273104 (TRBV5-4, TRBJ2-7)
CASSLEAYEQYF

SEQ ID NO: 546209 - protein, 11 aa, Homo sapiens
  CDR3 for alpha chain variable domain of TCR clone 273105 (TRAV13-1, TRAJ43)
CAACGANDMRF

SEQ ID NO: 546210 - protein, 14 aa, Homo sapiens
  CDR3 for beta chain variable domain of TCR clone 273105 (TRBV4-1, TRBJ1-1)
CASSPPGVNTEAFF

SEQ ID NO: 546211 - protein, 15 aa, Homo sapiens
  CDR3 for alpha chain variable domain of TCR clone 273106 (TRAV8-3, TRAJ27)
CAVGPSNTNAGKSTF

SEQ ID NO: 546212 - protein, 16 aa, Homo sapiens
  CDR3 for beta chain variable domain of TCR clone 273106 (TRBV6-6, TRBJ2-1)
CASSLLSDSSYNEQFF

SEQ ID NO: 546213 - protein, 16 aa, Homo sapiens
  CDR3 for alpha chain variable domain of TCR clone 273107 (TRAV14/DV4, TRAJ53)
CAMREGGGGSNYKLTF

SEQ ID NO: 546214 - protein, 10 aa, Homo sapiens
  CDR3 for beta chain variable domain of TCR clone 273107 (TRBV4-2, TRBJ1-1)
CASSQAGNTE

SEQ ID NO: 546215 - protein, 13 aa, Homo sapiens
  CDR3 for alpha chain variable domain of TCR clone 273108 (TRAV2, TRAJ15)
CAVASQAGTALIF

SEQ ID NO: 546216 - protein, 16 aa, Homo sapiens
  CDR3 for beta chain variable domain of TCR clone 273108 (TRBV19, TRBJ2-5)
CASSIGTSGSQETQYF

SEQ ID NO: 546217 - protein, 14 aa, Homo sapiens
  CDR3 for alpha chain variable domain of TCR clone 273109 (TRAV13-1, TRAJ9)
CAACALTGGFKTIF

SEQ ID NO: 546218 - protein, 15 aa, Homo sapiens
  CDR3 for beta chain variable domain of TCR clone 273109 (TRBV7-2, TRBJ2-1)
CASSFRESSYNEQLF

SEQ ID NO: 546219 - protein, 13 aa, Homo sapiens
  CDR3 for alpha chain variable domain of TCR clone 273110 (TRAV38-1, TRAJ57)
CALVQGGSEKLVF

SEQ ID NO: 546220 - protein, 17 aa, Homo sapiens
  CDR3 for beta chain variable domain of TCR clone 273110 (TRBV29-1, TRBJ2-3)
CSVDSPPRRARTDTQYF

SEQ ID NO: 546221 - protein, 18 aa, Homo sapiens
  CDR3 for alpha chain variable domain of TCR clone 273111 (TRAV26-2, TRAJ45)
CILRVEKYSGGGADGLTF

SEQ ID NO: 546222 - protein, 14 aa, Homo sapiens
  CDR3 for beta chain variable domain of TCR clone 273111 (TRBV7-2, TRBJ2-7)
CASRSQGAAYEQYF

SEQ ID NO: 546223 - protein, 11 aa, Homo sapiens
  CDR3 for alpha chain variable domain of TCR clone 273112 (TRAV17, TRAJ9)
CGFTGGFKTII

SEQ ID NO: 546224 - protein, 12 aa, Homo sapiens
  CDR3 for beta chain variable domain of TCR clone 273112 (TRBV29-1, TRBJ2-3)
CSVTGGADTQYF

SEQ ID NO: 546225 - protein, 14 aa, Homo sapiens
  CDR3 for alpha chain variable domain of TCR clone 273113 (TRAV8-1, TRAJ24)
CAVNAADSWGKWQF

SEQ ID NO: 546226 - protein, 16 aa, Homo sapiens
  CDR3 for beta chain variable domain of TCR clone 273113 (TRBV4-3, TRBJ2-1)
CASSPAQDRGVNEQFF

SEQ ID NO: 546227 - protein, 12 aa, Homo sapiens
  CDR3 for alpha chain variable domain of TCR clone 273114 (TRAV2, TRAJ33)
CAVEDSNYQLIW

SEQ ID NO: 546228 - protein, 14 aa, Homo sapiens
  CDR3 for beta chain variable domain of TCR clone 273114 (TRBV19, TRBJ1-4)
CASSVNRGGEKLFF

SEQ ID NO: 546229 - protein, 17 aa, Homo sapiens
  CDR3 for alpha chain variable domain of TCR clone 273115 (TRAV35, TRAJ47)
GLLDCRTHTEYGNKLVF

SEQ ID NO: 546230 - protein, 11 aa, Homo sapiens
  CDR3 for beta chain variable domain of TCR clone 273115 (TRBV29-1, TRBJ1-1)
CSVEVGPRTFF

SEQ ID NO: 546231 - protein, 16 aa, Homo sapiens
  CDR3 for alpha chain variable domain of TCR clone 273116 (TRAV21, TRAJ52)
CAVTNAGGTSYGKLTF

SEQ ID NO: 546232 - protein, 11 aa, Homo sapiens
  CDR3 for beta chain variable domain of TCR clone 273116 (TRBV11-2, TRBJ2-1)
PPGVEYNEQFF

SEQ ID NO: 546233 - protein, 12 aa, Homo sapiens
  CDR3 for alpha chain variable domain of TCR clone 273117 (TRAV12-2, TRAJ10)
WGVTGGGNKLTF

SEQ ID NO: 546234 - protein, 13 aa, Homo sapiens
  CDR3 for beta chain variable domain of TCR clone 273117 (TRBV12-4, TRBJ2-7)
CASSRQASYEQYF

SEQ ID NO: 546235 - protein, 12 aa, Homo sapiens
  CDR3 for alpha chain variable domain of TCR clone 273118 (TRAV8-3, TRAJ20)
CAVDFNDYKLSF

SEQ ID NO: 546236 - protein, 13 aa, Homo sapiens
  CDR3 for beta chain variable domain of TCR clone 273118 (TRBV5-7, TRBJ2-3)
CASSLDRTDTQYF

SEQ ID NO: 546237 - protein, 18 aa, Homo sapiens
  CDR3 for alpha chain variable domain of TCR clone 273119 (TRAV21, TRAJ52)
CAVRPSAAGGTSYGKLTF

SEQ ID NO: 546238 - protein, 14 aa, Homo sapiens
  CDR3 for beta chain variable domain of TCR clone 273119 (TRBV4-2, TRBJ2-1)
CASGLDRAYNEQFF

SEQ ID NO: 546239 - protein, 10 aa, Homo sapiens
  CDR3 for alpha chain variable domain of TCR clone 273120 (TRAV36/DV7, TRAJ48)
CAVGNEKLTL

SEQ ID NO: 546240 - protein, 12 aa, Homo sapiens
  CDR3 for beta chain variable domain of TCR clone 273120 (TRBV20-1, TRBJ2-5)
CSAGGAGETQYF

SEQ ID NO: 546241 - protein, 16 aa, Homo sapiens
  CDR3 for alpha chain variable domain of TCR clone 273121 (TRAV17, TRAJ53)
CATDALSGGSNYKLTF

SEQ ID NO: 546242 - protein, 12 aa, Homo sapiens
  CDR3 for beta chain variable domain of TCR clone 273121 (TRBV5-1, TRBJ2-7)
CASSFRGYEQYV

SEQ ID NO: 546243 - protein, 14 aa, Homo sapiens
  CDR3 for alpha chain variable domain of TCR clone 273122 (TRAV8-3, TRAJ9)
CAVVYNTGVFKTIY

SEQ ID NO: 546244 - protein, 14 aa, Homo sapiens
  CDR3 for beta chain variable domain of TCR clone 273122 (TRBV7-3, TRBJ2-2)
CASSSGGYTGELFF

SEQ ID NO: 546245 - protein, 13 aa, Homo sapiens
  CDR3 for alpha chain variable domain of TCR clone 273123 (TRAV12-2, TRAJ10)
CAVPTGGGNKLTF

SEQ ID NO: 546246 - protein, 14 aa, Homo sapiens
  CDR3 for beta chain variable domain of TCR clone 273123 (TRBV7-3, TRBJ2-7)
CASSLSGVSYEQYF

SEQ ID NO: 546247 - protein, 14 aa, Homo sapiens
  CDR3 for alpha chain variable domain of TCR clone 273124 (TRAV38-1, TRAJ45)
CASHSGGGADGLTF

SEQ ID NO: 546248 - protein, 15 aa, Homo sapiens
  CDR3 for beta chain variable domain of TCR clone 273124 (TRBV20-1, TRBJ1-1)
CSASRGVTGNTEAFF

SEQ ID NO: 546249 - protein, 14 aa, Homo sapiens
  CDR3 for alpha chain variable domain of TCR clone 273125 (TRAV12-2, TRAJ40)
CAVKIPSGNYKYIF

SEQ ID NO: 546250 - protein, 12 aa, Homo sapiens
  CDR3 for beta chain variable domain of TCR clone 273125 (TRBV11-2, TRBJ2-2)
CASSLGGGELFF

SEQ ID NO: 546251 - protein, 14 aa, Homo sapiens
  CDR3 for alpha chain variable domain of TCR clone 273126 (TRAV1-2, TRAJ8)
CAVREDTGFQKLVF

SEQ ID NO: 546252 - protein, 15 aa, Homo sapiens
  CDR3 for beta chain variable domain of TCR clone 273126 (TRBV7-9, TRBJ2-2)
CASGPLDTVPGELFF

SEQ ID NO: 546253 - protein, 14 aa, Homo sapiens
  CDR3 for alpha chain variable domain of TCR clone 273127 (TRAV23/DV6, TRAJ37)
CAASTSSNTGKPIF

SEQ ID NO: 546254 - protein, 13 aa, Homo sapiens
  CDR3 for beta chain variable domain of TCR clone 273127 (TRBV7-7, TRBJ1-1)
CASSLGANTEAFF

SEQ ID NO: 546255 - protein, 15 aa, Homo sapiens
  CDR3 for alpha chain variable domain of TCR clone 273128 (TRAV12-3, TRAJ6)
CAMSATTGGSYIPAF

SEQ ID NO: 546256 - protein, 15 aa, Homo sapiens
  CDR3 for beta chain variable domain of TCR clone 273128 (TRBV5-1, TRBJ2-7)
CASSLNGGPAREQYF

SEQ ID NO: 546257 - protein, 13 aa, Homo sapiens
  CDR3 for alpha chain variable domain of TCR clone 273129 (TRAV3, TRAJ8)
CAVRFTGFQKLVF

SEQ ID NO: 546258 - protein, 17 aa, Homo sapiens
  CDR3 for beta chain variable domain of TCR clone 273129 (TRBV20-1, TRBJ2-7)
CSARDGSLGWTSSTSGR

SEQ ID NO: 546259 - protein, 13 aa, Homo sapiens
  CDR3 for alpha chain variable domain of TCR clone 273130 (TRAV26-1, TRAJ29)
CLVRRSGNTPLVF

SEQ ID NO: 546260 - protein, 14 aa, Homo sapiens
  CDR3 for beta chain variable domain of TCR clone 273130 (TRBV25-1, TRBJ1-1)
CASTHLGGNTEAFF

SEQ ID NO: 546261 - protein, 10 aa, Homo sapiens
  CDR3 for alpha chain variable domain of TCR clone 273131 (TRAV13-1, TRAJ27)
CAPLARQINL

SEQ ID NO: 546262 - protein, 13 aa, Homo sapiens
  CDR3 for beta chain variable domain of TCR clone 273131 (TRBV28, TRBJ1-1)
CASSNQGWTEAFF

SEQ ID NO: 546263 - protein, 14 aa, Homo sapiens
  CDR3 for alpha chain variable domain of TCR clone 273132 (TRAV13-1, TRAJ44)
CAAKATGTASKLTF

SEQ ID NO: 546264 - protein, 14 aa, Homo sapiens
  CDR3 for beta chain variable domain of TCR clone 273132 (TRBV11-3, TRBJ1-5)
LTGDRLYYNQPQHF

SEQ ID NO: 546265 - protein, 15 aa, Homo sapiens
  CDR3 for alpha chain variable domain of TCR clone 273133 (TRAV3, TRAJ22)
CAVRDRGGSARQLTF

SEQ ID NO: 546266 - protein, 13 aa, Homo sapiens
  CDR3 for beta chain variable domain of TCR clone 273133 (TRBV20-1, TRBJ1-1)
CSARVGGNTESFL

SEQ ID NO: 546267 - protein, 14 aa, Homo sapiens
  CDR3 for alpha chain variable domain of TCR clone 273134 (TRAV12-2, TRAJ17)
CAVLFKAAGNELTF

SEQ ID NO: 546268 - protein, 14 aa, Homo sapiens
  CDR3 for beta chain variable domain of TCR clone 273134 (TRBV12-5, TRBJ2-5)
CASGSRTHQETQYF

SEQ ID NO: 546269 - protein, 13 aa, Homo sapiens
  CDR3 for alpha chain variable domain of TCR clone 273135 (TRAV8-3, TRAJ6)
CAVGSGGSYIPTF

SEQ ID NO: 546270 - protein, 14 aa, Homo sapiens
  CDR3 for beta chain variable domain of TCR clone 273135 (TRBV11-2, TRBJ1-1)
CASSTQRGRTEACF

SEQ ID NO: 546271 - protein, 12 aa, Homo sapiens
  CDR3 for alpha chain variable domain of TCR clone 273136 (TRAV13-1, TRAJ21)
CAAKEGFNKFHF

SEQ ID NO: 546272 - protein, 17 aa, Homo sapiens
  CDR3 for beta chain variable domain of TCR clone 273136 (TRBV20-1, TRBJ2-1)
CSASSSGLAGSYNEQFF

SEQ ID NO: 546273 - protein, 18 aa, Homo sapiens
  CDR3 for alpha chain variable domain of TCR clone 273137 (TRAV17, TRAJ45)
CATSLDLYSGGGADGLTV

SEQ ID NO: 546274 - protein, 15 aa, Homo sapiens
  CDR3 for beta chain variable domain of TCR clone 273137 (TRBV11-2, TRBJ2-1)
CASSKNRGLIYEQFF

SEQ ID NO: 546275 - protein, 12 aa, Homo sapiens
  CDR3 for alpha chain variable domain of TCR clone 273138 (TRAV12-1, TRAJ40)
CVVSSGTFKYIF

SEQ ID NO: 546276 - protein, 14 aa, Homo sapiens
  CDR3 for beta chain variable domain of TCR clone 273138 (TRBV20-1, TRBJ2-2)
CSAPDTANTGELFF

SEQ ID NO: 546277 - protein, 17 aa, Homo sapiens
  CDR3 for alpha chain variable domain of TCR clone 273139 (TRAV3, TRAJ12)
CAVRDGGRLDSSYKLIL

SEQ ID NO: 546278 - protein, 14 aa, Homo sapiens
  CDR3 for beta chain variable domain of TCR clone 273139 (TRBV7-9, TRBJ1-2)
CASSRQGANYGYTF

SEQ ID NO: 546279 - protein, 15 aa, Homo sapiens
  CDR3 for alpha chain variable domain of TCR clone 273140 (TRAV21, TRAJ53)
CATLNSGGSNYKLTF

SEQ ID NO: 546280 - protein, 12 aa, Homo sapiens
  CDR3 for beta chain variable domain of TCR clone 273140 (TRBV11-2, TRBJ2-5)
CASSLGQETQYF

SEQ ID NO: 546281 - protein, 12 aa, Homo sapiens
  CDR3 for alpha chain variable domain of TCR clone 273141 (TRAV30, TRAJ39)
CGRGNAGNMLTF

SEQ ID NO: 546282 - protein, 17 aa, Homo sapiens
  CDR3 for beta chain variable domain of TCR clone 273141 (TRBV20-1, TRBJ2-7)
CSAAGTSGGGSSYEQYF

SEQ ID NO: 546283 - protein, 11 aa, Homo sapiens
  CDR3 for alpha chain variable domain of TCR clone 273142 (TRAV12-2, TRAJ21)
CAVINFNKFYF

SEQ ID NO: 546284 - protein, 15 aa, Homo sapiens
  CDR3 for beta chain variable domain of TCR clone 273142 (TRBV7-2, TRBJ2-1)
CASSLVAGRYNEQFF

SEQ ID NO: 546285 - protein, 12 aa, Homo sapiens
  CDR3 for alpha chain variable domain of TCR clone 273143 (TRAV12-3, TRAJ17)
CAMTLTGKKLTS

SEQ ID NO: 546286 - protein, 17 aa, Homo sapiens
  CDR3 for beta chain variable domain of TCR clone 273143 (TRBV11-2, TRBJ2-1)
CASSLYPPGVEYNEQFF

SEQ ID NO: 546287 - protein, 11 aa, Homo sapiens
  CDR3 for alpha chain variable domain of TCR clone 273144 (TRAV17, TRAJ31)
CATSNNARLMF

SEQ ID NO: 546288 - protein, 16 aa, Homo sapiens
  CDR3 for beta chain variable domain of TCR clone 273144 (TRBV7-8, TRBJ2-4)
CPSSAERTLAKNIQYF

SEQ ID NO: 546289 - protein, 15 aa, Homo sapiens
  CDR3 for alpha chain variable domain of TCR clone 273145 (TRAV8-4, TRAJ37)
CAVSRGSGNTGKLIF

SEQ ID NO: 546290 - protein, 16 aa, Homo sapiens
  CDR3 for beta chain variable domain of TCR clone 273145 (TRBV7-3, TRBJ2-3)
CASSLSGYRPEDTKYF

SEQ ID NO: 546291 - protein, 16 aa, Homo sapiens
  CDR3 for alpha chain variable domain of TCR clone 273146 (TRAV23/DV6, TRAJ9)
CAASIGGNTGGFKTIF

SEQ ID NO: 546292 - protein, 13 aa, Homo sapiens
  CDR3 for beta chain variable domain of TCR clone 273146 (TRBV20-1, TRBJ1-6)
CSAPLGVGSPLHF

SEQ ID NO: 546293 - protein, 15 aa, Homo sapiens
  CDR3 for alpha chain variable domain of TCR clone 273147 (TRAV34, TRAJ38)
CGADFTPGNNRKLIW

SEQ ID NO: 546294 - protein, 16 aa, Homo sapiens
  CDR3 for beta chain variable domain of TCR clone 273147 (TRBV19, TRBJ1-1)
CASRVDVTGAAWGAFF

SEQ ID NO: 546295 - protein, 13 aa, Homo sapiens
  CDR3 for alpha chain variable domain of TCR clone 273148 (TRAV3, TRAJ20)
CAVRDTPRYKLSF

SEQ ID NO: 546296 - protein, 13 aa, Homo sapiens
  CDR3 for beta chain variable domain of TCR clone 273148 (TRBV20-1, TRBJ2-7)
CSASPFSSYEQYF

SEQ ID NO: 546297 - protein, 14 aa, Homo sapiens
  CDR3 for alpha chain variable domain of TCR clone 273149 (TRAV23/DV6, TRAJ4)
CAANISGGYNKLIF

SEQ ID NO: 546298 - protein, 11 aa, Homo sapiens
  CDR3 for beta chain variable domain of TCR clone 273149 (TRBV7-9, TRBJ2-3)
CDSSPTDTQYF

SEQ ID NO: 546299 - protein, 12 aa, Homo sapiens
  CDR3 for alpha chain variable domain of TCR clone 273150 (TRAV12-1, TRAJ40)
CVFYSGTYKYIF

SEQ ID NO: 546300 - protein, 15 aa, Homo sapiens
  CDR3 for beta chain variable domain of TCR clone 273150 (TRBV20-1, TRBJ2-7)
CSARDRVSGMDEQYV

SEQ ID NO: 546301 - protein, 13 aa, Homo sapiens
  CDR3 for alpha chain variable domain of TCR clone 273151 (TRAV20, TRAJ57)
CAVHPGGSEKLVF

SEQ ID NO: 546302 - protein, 17 aa, Homo sapiens
  CDR3 for beta chain variable domain of TCR clone 273151 (TRBV11-2, TRBJ2-1)
CASSLYPPGVEYNEQFF

SEQ ID NO: 546303 - protein, 13 aa, Homo sapiens
  CDR3 for alpha chain variable domain of TCR clone 273152 (TRAV3, TRAJ21)
CAVREPDFNKFYF

SEQ ID NO: 546304 - protein, 15 aa, Homo sapiens
  CDR3 for beta chain variable domain of TCR clone 273152 (TRBV27, TRBJ2-1)
CASSNGGGPPMSSSS

SEQ ID NO: 546305 - protein, 16 aa, Homo sapiens
  CDR3 for alpha chain variable domain of TCR clone 273153 (TRAV3, TRAJ37)
CAVRPHGSGNTGKLIF

SEQ ID NO: 546306 - protein, 17 aa, Homo sapiens
  CDR3 for beta chain variable domain of TCR clone 273153 (TRBV5-1, TRBJ2-5)
CASSPVALGQNQGTQYF

SEQ ID NO: 546307 - protein, 18 aa, Homo sapiens
  CDR3 for alpha chain variable domain of TCR clone 273154 (TRAV26-2, TRAJ45)
CILRLWGYSGGGADGLTF

SEQ ID NO: 546308 - protein, 14 aa, Homo sapiens
  CDR3 for beta chain variable domain of TCR clone 273154 (TRBV19, TRBJ2-1)
CASPTFVLSGEQFF

SEQ ID NO: 546309 - protein, 14 aa, Homo sapiens
  CDR3 for alpha chain variable domain of TCR clone 273155 (TRAV2, TRAJ20)
CAVEDVVNDYKLSF

SEQ ID NO: 546310 - protein, 14 aa, Homo sapiens
  CDR3 for beta chain variable domain of TCR clone 273155 (TRBV7-6, TRBJ2-7)
CASSFRQGADEQYF

SEQ ID NO: 546311 - protein, 13 aa, Homo sapiens
  CDR3 for alpha chain variable domain of TCR clone 273156 (TRAV8-4, TRAJ30)
CAVSVNRDDKIIS

SEQ ID NO: 546312 - protein, 13 aa, Homo sapiens
  CDR3 for beta chain variable domain of TCR clone 273156 (TRBV28, TRBJ2-5)
CAGVRRGEETQYF

SEQ ID NO: 546313 - protein, 13 aa, Homo sapiens
  CDR3 for alpha chain variable domain of TCR clone 273157 (TRAV3, TRAJ30)
CAVRDRGDDKIIF

SEQ ID NO: 546314 - protein, 16 aa, Homo sapiens
  CDR3 for beta chain variable domain of TCR clone 273157 (TRBV7-3, TRBJ2-2)
CASSLNRGTLSGELFF

SEQ ID NO: 546315 - protein, 15 aa, Homo sapiens
  CDR3 for alpha chain variable domain of TCR clone 273158 (TRAV8-3, TRAJ23)
CAVGDRYNQGGKLIF

SEQ ID NO: 546316 - protein, 22 aa, Homo sapiens
  CDR3 for beta chain variable domain of TCR clone 273158 (TRBV29-1, TRBJ2-5)
TVSNMSPEDSSIYLCRAGTQYF

SEQ ID NO: 546317 - protein, 13 aa, Homo sapiens
  CDR3 for alpha chain variable domain of TCR clone 273159 (TRAV16, TRAJ10)
CALLTGRGNKLTF

SEQ ID NO: 546318 - protein, 12 aa, Homo sapiens
  CDR3 for beta chain variable domain of TCR clone 273159 (TRBV28, TRBJ2-7)
CASTGNHYEQYF

SEQ ID NO: 546319 - protein, 14 aa, Homo sapiens
  CDR3 for alpha chain variable domain of TCR clone 273160 (TRAV13-1, TRAJ35)
CAASKGGFGNVLHC

SEQ ID NO: 546320 - protein, 13 aa, Homo sapiens
  CDR3 for beta chain variable domain of TCR clone 273160 (TRBV7-3, TRBJ1-1)
CASSQDCGAESFF

SEQ ID NO: 546321 - protein, 12 aa, Homo sapiens
  CDR3 for alpha chain variable domain of TCR clone 273161 (TRAV13-2, TRAJ13)
CRDGGGYQKVTF

SEQ ID NO: 546322 - protein, 15 aa, Homo sapiens
  CDR3 for beta chain variable domain of TCR clone 273161 (TRBV20-1, TRBJ1-5)
CSARVGRVVSQHQHF

SEQ ID NO: 546323 - protein, 20 aa, Homo sapiens
  CDR3 for alpha chain variable domain of TCR clone 273162 (TRAV8-3, TRAJ45)
LSTSVLWGSYSGGGADGLTF

SEQ ID NO: 546324 - protein, 11 aa, Homo sapiens
  CDR3 for beta chain variable domain of TCR clone 273162 (TRBV20-1, TRBJ2-5)
CSADRPETQYF

SEQ ID NO: 546325 - protein, 12 aa, Homo sapiens
  CDR3 for alpha chain variable domain of TCR clone 273163 (TRAV21, TRAJ42)
CAVGGSQGNLIF

SEQ ID NO: 546326 - protein, 14 aa, Homo sapiens
  CDR3 for beta chain variable domain of TCR clone 273163 (TRBV12-4, TRBJ1-1)
CASSLGTRGTEAFF

SEQ ID NO: 546327 - protein, 15 aa, Homo sapiens
  CDR3 for alpha chain variable domain of TCR clone 273164 (TRAV20, TRAJ58)
CAVQDLETSGPRLTF

SEQ ID NO: 546328 - protein, 12 aa, Homo sapiens
  CDR3 for beta chain variable domain of TCR clone 273164 (TRBV9, TRBJ2-2)
CASSARTRELFF

SEQ ID NO: 546329 - protein, 16 aa, Homo sapiens
  CDR3 for alpha chain variable domain of TCR clone 273165 (TRAV3, TRAJ37)
CAVRPHGSGNTGKLIF

SEQ ID NO: 546330 - protein, 18 aa, Homo sapiens
  CDR3 for beta chain variable domain of TCR clone 273165 (TRBV18, TRBJ1-3)
CASSPRGGAGPSGNTMYF

SEQ ID NO: 546331 - protein, 15 aa, Homo sapiens
  CDR3 for alpha chain variable domain of TCR clone 273166 (TRAV12-3, TRAJ49)
CAMAVTPNTGNQFYF

SEQ ID NO: 546332 - protein, 15 aa, Homo sapiens
  CDR3 for beta chain variable domain of TCR clone 273166 (TRBV4-1, TRBJ2-7)
CASSQGRGGDLEQYF

SEQ ID NO: 546333 - protein, 11 aa, Homo sapiens
  CDR3 for alpha chain variable domain of TCR clone 273167 (TRAV21, TRAJ11)
CAVNGYSTLTF

SEQ ID NO: 546334 - protein, 16 aa, Homo sapiens
  CDR3 for beta chain variable domain of TCR clone 273167 (TRBV19, TRBJ1-6)
CASSVAPVAGNSPLHF

SEQ ID NO: 546335 - protein, 13 aa, Homo sapiens
  CDR3 for alpha chain variable domain of TCR clone 273168 (TRAV13-1, TRAJ39)
CSKNSNAGNMLTF

SEQ ID NO: 546336 - protein, 14 aa, Homo sapiens
  CDR3 for beta chain variable domain of TCR clone 273168 (TRBV12-4, TRBJ2-7)
CASSPRQDLYEQYF

SEQ ID NO: 546337 - protein, 16 aa, Homo sapiens
  CDR3 for alpha chain variable domain of TCR clone 273169 (TRAV4, TRAJ9)
CLAGDPNRPGGFKPIF

SEQ ID NO: 546338 - protein, 16 aa, Homo sapiens
  CDR3 for beta chain variable domain of TCR clone 273169 (TRBV28, TRBJ1-4)
CASSPPYRGRSEKLFF

SEQ ID NO: 546339 - protein, 18 aa, Homo sapiens
  CDR3 for alpha chain variable domain of TCR clone 273170 (TRAV21, TRAJ52)
CAVRPSPAGGTSYGKLTF

SEQ ID NO: 546340 - protein, 13 aa, Homo sapiens
  CDR3 for beta chain variable domain of TCR clone 273170 (TRBV7-2, TRBJ2-1)
CASSLGVYNEQFF

SEQ ID NO: 546341 - protein, 14 aa, Homo sapiens
  CDR3 for alpha chain variable domain of TCR clone 273171 (TRAV12-2, TRAJ11)
CAVNRESGYSTLTF

SEQ ID NO: 546342 - protein, 10 aa, Homo sapiens
  CDR3 for beta chain variable domain of TCR clone 273171 (TRBV20-1, TRBJ2-5)
WSARFETQYF

SEQ ID NO: 546343 - protein, 12 aa, Homo sapiens
  CDR3 for alpha chain variable domain of TCR clone 273172 (TRAV8-3, TRAJ26)
CAGDSYGQNFVF

SEQ ID NO: 546344 - protein, 13 aa, Homo sapiens
  CDR3 for beta chain variable domain of TCR clone 273172 (TRBV7-2, TRBJ2-7)
CASSSPSGSEQYF

SEQ ID NO: 546345 - protein, 17 aa, Homo sapiens
  CDR3 for alpha chain variable domain of TCR clone 273173 (TRAV26-2, TRAJ42)
CILRDVGYGGSQGNLIF

SEQ ID NO: 546346 - protein, 16 aa, Homo sapiens
  CDR3 for beta chain variable domain of TCR clone 273173 (TRBV12-4, TRBJ2-7)
CASSWIGGTGTYERYF

SEQ ID NO: 546347 - protein, 18 aa, Homo sapiens
  CDR3 for alpha chain variable domain of TCR clone 273174 (TRAV17, TRAJ45)
CATSLDLYSGGGADGLTF

SEQ ID NO: 546348 - protein, 15 aa, Homo sapiens
  CDR3 for beta chain variable domain of TCR clone 273174 (TRBV28, TRBJ2-1)
CASSIIAGGRSEQFF

SEQ ID NO: 546349 - protein, 18 aa, Homo sapiens
  CDR3 for alpha chain variable domain of TCR clone 273175 (TRAV29/DV5, TRAJ52)
CAAGFRGAGGTSYGKLTF

SEQ ID NO: 546350 - protein, 13 aa, Homo sapiens
  CDR3 for beta chain variable domain of TCR clone 273175 (TRBV19, TRBJ1-2)
CASSVPGQDGYTF

SEQ ID NO: 546351 - protein, 12 aa, Homo sapiens
  CDR3 for alpha chain variable domain of TCR clone 273176 (TRAV17, TRAJ20)
CATALNDYKLSF

SEQ ID NO: 546352 - protein, 12 aa, Homo sapiens
  CDR3 for beta chain variable domain of TCR clone 273176 (TRBV10-3, TRBJ2-7)
CADGADSGEQYF

SEQ ID NO: 546353 - protein, 15 aa, Homo sapiens
  CDR3 for alpha chain variable domain of TCR clone 273177 (TRAV21, TRAJ21)
CAVRRRTSTNFTLYL

SEQ ID NO: 546354 - protein, 16 aa, Homo sapiens
  CDR3 for beta chain variable domain of TCR clone 273177 (TRBV28, TRBJ2-7)
CASSLFFETGGPEQYF

SEQ ID NO: 546355 - protein, 15 aa, Homo sapiens
  CDR3 for alpha chain variable domain of TCR clone 273178 (TRAV27, TRAJ45)
CAPVGSGGGADGLTF

SEQ ID NO: 546356 - protein, 15 aa, Homo sapiens
  CDR3 for beta chain variable domain of TCR clone 273178 (TRBV23-1, TRBJ1-5)
CASSQSRGQGWGAYI

SEQ ID NO: 546357 - protein, 13 aa, Homo sapiens
  CDR3 for alpha chain variable domain of TCR clone 273179 (TRAV12-1, TRAJ37)
CVVNAGNTGKLIF

SEQ ID NO: 546358 - protein, 14 aa, Homo sapiens
  CDR3 for beta chain variable domain of TCR clone 273179 (TRBV7-6, TRBJ2-3)
CASSLGTVADTQYF

SEQ ID NO: 546359 - protein, 16 aa, Homo sapiens
  CDR3 for alpha chain variable domain of TCR clone 273180 (TRAV12-1, TRAJ48)
CVVNMRDNFGNEKLTF

SEQ ID NO: 546360 - protein, 16 aa, Homo sapiens
  CDR3 for beta chain variable domain of TCR clone 273180 (TRBV7-6, TRBJ2-1)
CAGSSVVAGTYNEQFF

SEQ ID NO: 546361 - protein, 15 aa, Homo sapiens
  CDR3 for alpha chain variable domain of TCR clone 273181 (TRAV12-2, TRAJ42)
CAVNSHGGSQGNLIL

SEQ ID NO: 546362 - protein, 13 aa, Homo sapiens
  CDR3 for beta chain variable domain of TCR clone 273181 (TRBV7-9, TRBJ1-2)
CASSLKQNYGYTF

SEQ ID NO: 546363 - protein, 18 aa, Homo sapiens
  CDR3 for alpha chain variable domain of TCR clone 273182 (TRAV26-2, TRAJ45)
CILRVDKYSRGGADGLTF

SEQ ID NO: 546364 - protein, 14 aa, Homo sapiens
  CDR3 for beta chain variable domain of TCR clone 273182 (TRBV7-2, TRBJ2-7)
CASRSQGAAYEQYF

SEQ ID NO: 546365 - protein, 16 aa, Homo sapiens
  CDR3 for alpha chain variable domain of TCR clone 273183 (TRAV12-2, TRAJ32)
CAVNLGQGDATNKLIF

SEQ ID NO: 546366 - protein, 15 aa, Homo sapiens
  CDR3 for beta chain variable domain of TCR clone 273183 (TRBV20-1, TRBJ2-7)
CSARGPLAGGREQYF

SEQ ID NO: 546367 - protein, 14 aa, Homo sapiens
  CDR3 for alpha chain variable domain of TCR clone 273184 (TRAV21, TRAJ35)
CAVMPIGFGNVLHC

SEQ ID NO: 546368 - protein, 12 aa, Homo sapiens
  CDR3 for beta chain variable domain of TCR clone 273184 (TRBV7-9, TRBJ2-7)
YARSIKREEQYF

SEQ ID NO: 546369 - protein, 14 aa, Homo sapiens
  CDR3 for alpha chain variable domain of TCR clone 273185 (TRAV12-1, TRAJ17)
CVVNYKAASNKLTF

SEQ ID NO: 546370 - protein, 13 aa, Homo sapiens
  CDR3 for beta chain variable domain of TCR clone 273185 (TRBV7-9, TRBJ1-2)
CASSLKQNYGYTF

SEQ ID NO: 546371 - protein, 14 aa, Homo sapiens
  CDR3 for alpha chain variable domain of TCR clone 273186 (TRAV3, TRAJ36)
CAVRDGPGANNLFF

SEQ ID NO: 546372 - protein, 16 aa, Homo sapiens
  CDR3 for beta chain variable domain of TCR clone 273186 (TRBV7-3, TRBJ2-5)
CASIQPGGSVQETQYF

SEQ ID NO: 546373 - protein, 16 aa, Homo sapiens
  CDR3 for alpha chain variable domain of TCR clone 273187 (TRAV17, TRAJ36)
CATVSLNWGKQPLLWD

SEQ ID NO: 546374 - protein, 13 aa, Homo sapiens
  CDR3 for beta chain variable domain of TCR clone 273187 (TRBV4-1, TRBJ1-1)
CVSSQLGTGEAFF

SEQ ID NO: 546375 - protein, 18 aa, Homo sapiens
  CDR3 for alpha chain variable domain of TCR clone 273188 (TRAV21, TRAJ52)
CAVRPSPAGGTSYGKLTL

SEQ ID NO: 546376 - protein, 14 aa, Homo sapiens
  CDR3 for beta chain variable domain of TCR clone 273188 (TRBV28, TRBJ1-1)
CASSPRTRWAEAFF

SEQ ID NO: 546377 - protein, 14 aa, Homo sapiens
  CDR3 for alpha chain variable domain of TCR clone 273189 (TRAV3, TRAJ17)
CAVRDAAAGNKLTF

SEQ ID NO: 546378 - protein, 13 aa, Homo sapiens
  CDR3 for beta chain variable domain of TCR clone 273189 (TRBV2, TRBJ1-1)
CASSVSGYTEAIF

SEQ ID NO: 546379 - protein, 13 aa, Homo sapiens
  CDR3 for alpha chain variable domain of TCR clone 273190 (TRAV2, TRAJ40)
CAVVTSGTYKYIF

SEQ ID NO: 546380 - protein, 16 aa, Homo sapiens
  CDR3 for beta chain variable domain of TCR clone 273190 (TRBV29-1, TRBJ1-2)
CSVDANRDIANYGYTF

SEQ ID NO: 546381 - protein, 13 aa, Homo sapiens
  CDR3 for alpha chain variable domain of TCR clone 273191 (TRAV12-1, TRAJ9)
CVVLNTGGFKTIF

SEQ ID NO: 546382 - protein, 13 aa, Homo sapiens
  CDR3 for beta chain variable domain of TCR clone 273191 (TRBV19, TRBJ1-2)
CASSGPGQDGYTF

SEQ ID NO: 546383 - protein, 14 aa, Homo sapiens
  CDR3 for alpha chain variable domain of TCR clone 273192 (TRAV12-3, TRAJ10)
SHLPLTGGGNKLTF

SEQ ID NO: 546384 - protein, 13 aa, Homo sapiens
  CDR3 for beta chain variable domain of TCR clone 273192 (TRBV10-3, TRBJ2-7)
CASKLAVNYVQYF

SEQ ID NO: 546385 - protein, 16 aa, Homo sapiens
  CDR3 for alpha chain variable domain of TCR clone 273193 (TRAV26-1, TRAJ23)
CIVRVHPYNQGGKLIF

SEQ ID NO: 546386 - protein, 13 aa, Homo sapiens
  CDR3 for beta chain variable domain of TCR clone 273193 (TRBV20-1, TRBJ2-5)
CGARGDYQETQYF

SEQ ID NO: 546387 - protein, 12 aa, Homo sapiens
  CDR3 for alpha chain variable domain of TCR clone 273194 (TRAV17, TRAJ39)
CATGAAGHMLTF

SEQ ID NO: 546388 - protein, 14 aa, Homo sapiens
  CDR3 for beta chain variable domain of TCR clone 273194 (TRBV7-9, TRBJ1-2)
CASSRQGANYGYTF

SEQ ID NO: 546389 - protein, 11 aa, Homo sapiens
  CDR3 for alpha chain variable domain of TCR clone 273195 (TRAV17, TRAJ31)
CATDRTARLMF

SEQ ID NO: 546390 - protein, 13 aa, Homo sapiens
  CDR3 for beta chain variable domain of TCR clone 273195 (TRBV27, TRBJ1-4)
CASSLMGDEKLFF

SEQ ID NO: 546391 - protein, 15 aa, Homo sapiens
  CDR3 for alpha chain variable domain of TCR clone 273196 (TRAV34, TRAJ38)
CGADFTPGNNRKLIW

SEQ ID NO: 546392 - protein, 15 aa, Homo sapiens
  CDR3 for beta chain variable domain of TCR clone 273196 (TRBV7-3, TRBJ2-1)
CASILDGNSYNEQFF

SEQ ID NO: 546393 - protein, 12 aa, Homo sapiens
  CDR3 for alpha chain variable domain of TCR clone 273197 (TRAV38-2/DV8, TRAJ48)
CALLIGNEKLTF

SEQ ID NO: 546394 - protein, 15 aa, Homo sapiens
  CDR3 for beta chain variable domain of TCR clone 273197 (TRBV6-1, TRBJ2-1)
CASSELRGQYNEQFF

SEQ ID NO: 546395 - protein, 12 aa, Homo sapiens
  CDR3 for alpha chain variable domain of TCR clone 273198 (TRAV27, TRAJ41)
CAGRNSGYALNF

SEQ ID NO: 546396 - protein, 15 aa, Homo sapiens
  CDR3 for beta chain variable domain of TCR clone 273198 (TRBV20-1, TRBJ1-5)
CSATSDRCLGQPHHF

SEQ ID NO: 546397 - protein, 14 aa, Homo sapiens
  CDR3 for alpha chain variable domain of TCR clone 273199 (TRAV2, TRAJ37)
CAVDFTSNTGKLIF

SEQ ID NO: 546398 - protein, 15 aa, Homo sapiens
  CDR3 for beta chain variable domain of TCR clone 273199 (TRBV20-1, TRBJ1-1)
CSATRGVTGNTEAFF

SEQ ID NO: 546399 - protein, 17 aa, Homo sapiens
  CDR3 for alpha chain variable domain of TCR clone 273200 (TRAV3, TRAJ6)
CAVRDGPRAGGSYISTF

SEQ ID NO: 546400 - protein, 14 aa, Homo sapiens
  CDR3 for beta chain variable domain of TCR clone 273200 (TRBV7-2, TRBJ2-7)
CASSPNTSFYEQYF

SEQ ID NO: 546401 - protein, 14 aa, Homo sapiens
  CDR3 for alpha chain variable domain of TCR clone 273201 (TRAV12-2, TRAJ32)
CAPPESGATNKLIF

SEQ ID NO: 546402 - protein, 14 aa, Homo sapiens
  CDR3 for beta chain variable domain of TCR clone 273201 (TRBV4-2, TRBJ2-3)
CASRETRAPGMQYF

SEQ ID NO: 546403 - protein, 16 aa, Homo sapiens
  CDR3 for alpha chain variable domain of TCR clone 273202 (TRAV30, TRAJ24)
CGTEIVDADSWGKFQF

SEQ ID NO: 546404 - protein, 20 aa, Homo sapiens
  CDR3 for beta chain variable domain of TCR clone 273202 (TRBV11-3, TRBJ2-7)
CASSQRTSGSLRAVLRAGHQ

SEQ ID NO: 546405 - protein, 18 aa, Homo sapiens
  CDR3 for alpha chain variable domain of TCR clone 273203 (TRAV21, TRAJ52)
CAVRPSPAGGTSCGKLTF

SEQ ID NO: 546406 - protein, 17 aa, Homo sapiens
  CDR3 for beta chain variable domain of TCR clone 273203 (TRBV25-1, TRBJ2-1)
CASSAYGQGRGVYEQFF

SEQ ID NO: 546407 - protein, 14 aa, Homo sapiens
  CDR3 for alpha chain variable domain of TCR clone 273204 (TRAV17, TRAJ57)
CATDPQGGSEKLVF

SEQ ID NO: 546408 - protein, 17 aa, Homo sapiens
  CDR3 for beta chain variable domain of TCR clone 273204 (TRBV19, TRBJ2-7)
CASSISFYDSYPYEQYF

SEQ ID NO: 546409 - protein, 11 aa, Homo sapiens
  CDR3 for alpha chain variable domain of TCR clone 273205 (TRAV1-1, TRAJ23)
CAVRQGGKLIF

SEQ ID NO: 546410 - protein, 14 aa, Homo sapiens
  CDR3 for beta chain variable domain of TCR clone 273205 (TRBV28, TRBJ1-1)
CASSESGRGTEAFF

SEQ ID NO: 546411 - protein, 16 aa, Homo sapiens
  CDR3 for alpha chain variable domain of TCR clone 273206 (TRAV12-3, TRAJ53)
CAMSPGSGGSNYTLTF

SEQ ID NO: 546412 - protein, 12 aa, Homo sapiens
  CDR3 for beta chain variable domain of TCR clone 273206 (TRBV11-2, TRBJ2-2)
CASSLGGGELFF

SEQ ID NO: 546413 - protein, 12 aa, Homo sapiens
  CDR3 for alpha chain variable domain of TCR clone 273207 (TRAV13-1, TRAJ15)
CAANQAGTALIF

SEQ ID NO: 546414 - protein, 14 aa, Homo sapiens
  CDR3 for beta chain variable domain of TCR clone 273207 (TRBV20-1, TRBJ2-5)
CSARYRGLQETHYF

SEQ ID NO: 546415 - protein, 15 aa, Homo sapiens
  CDR3 for alpha chain variable domain of TCR clone 273208 (TRAV2, TRAJ9)
CAVAALNTGGFKTIF

SEQ ID NO: 546416 - protein, 14 aa, Homo sapiens
  CDR3 for beta chain variable domain of TCR clone 273208 (TRBV7-8, TRBJ2-5)
CASSATGGKETQYF

SEQ ID NO: 546417 - protein, 16 aa, Homo sapiens
  CDR3 for alpha chain variable domain of TCR clone 273209 (TRAV30, TRAJ24)
CGTEIVDADSSGKFQF

SEQ ID NO: 546418 - protein, 15 aa, Homo sapiens
  CDR3 for beta chain variable domain of TCR clone 273209 (TRBV12-4, TRBJ2-7)
CASSQRTSGNYEQYF

SEQ ID NO: 546419 - protein, 13 aa, Homo sapiens
  CDR3 for alpha chain variable domain of TCR clone 273210 (TRAV16, TRAJ26)
CSKLGELWSEFCL

SEQ ID NO: 546420 - protein, 12 aa, Homo sapiens
  CDR3 for beta chain variable domain of TCR clone 273210 (TRBV6-5, TRBJ2-2)
CASRTGTGELFF

SEQ ID NO: 546421 - protein, 15 aa, Homo sapiens
  CDR3 for alpha chain variable domain of TCR clone 273211 (TRAV38-1, TRAJ37)
CAFIHGSGNPGKLIF

SEQ ID NO: 546422 - protein, 14 aa, Homo sapiens
  CDR3 for beta chain variable domain of TCR clone 273211 (TRBV29-1, TRBJ2-5)
CSVETSGSGETQYF

SEQ ID NO: 546423 - protein, 13 aa, Homo sapiens
  CDR3 for alpha chain variable domain of TCR clone 273212 (TRAV30, TRAJ20)
CGTEDRSDYKLSF

SEQ ID NO: 546424 - protein, 15 aa, Homo sapiens
  CDR3 for beta chain variable domain of TCR clone 273212 (TRBV9, TRBJ1-6)
CASSVAGTGDSPLHF

SEQ ID NO: 546425 - protein, 11 aa, Homo sapiens
  CDR3 for alpha chain variable domain of TCR clone 273213 (TRAV2, TRAJ13)
CASGGYQKVTF

SEQ ID NO: 546426 - protein, 14 aa, Homo sapiens
  CDR3 for beta chain variable domain of TCR clone 273213 (TRBV20-1, TRBJ2-4)
CSARDRGQGGIQYF

SEQ ID NO: 546427 - protein, 22 aa, Homo sapiens
  CDR3 for alpha chain variable domain of TCR clone 273214 (TRAV8-2, TRAJ45)
HLTKPSAHMSDAAEYSADGLTF

SEQ ID NO: 546428 - protein, 13 aa, Homo sapiens
  CDR3 for beta chain variable domain of TCR clone 273214 (TRBV7-3, TRBJ2-1)
CASSPVAYNEQFL

SEQ ID NO: 546429 - protein, 15 aa, Homo sapiens
  CDR3 for alpha chain variable domain of TCR clone 273215 (TRAV21, TRAJ24)
CAARSSTDSWGKLQF

SEQ ID NO: 546430 - protein, 18 aa, Homo sapiens
  CDR3 for beta chain variable domain of TCR clone 273215 (TRBV6-6, TRBJ1-3)
CASSYSKWDSISGNTIYF

SEQ ID NO: 546431 - protein, 16 aa, Homo sapiens
  CDR3 for alpha chain variable domain of TCR clone 273216 (TRAV17, TRAJ17)
CATALQEEAAGNKLTF

SEQ ID NO: 546432 - protein, 11 aa, Homo sapiens
  CDR3 for beta chain variable domain of TCR clone 273216 (TRBV4-2, TRBJ2-5)
CQRGAQETQYF

SEQ ID NO: 546433 - protein, 13 aa, Homo sapiens
  CDR3 for alpha chain variable domain of TCR clone 273217 (TRAV12-2, TRAJ20)
CAVYPSNDYKLSF

SEQ ID NO: 546434 - protein, 15 aa, Homo sapiens
  CDR3 for beta chain variable domain of TCR clone 273217 (TRBV27, TRBJ2-5)
CASSLYPRGGETQYY

SEQ ID NO: 546435 - protein, 14 aa, Homo sapiens
  CDR3 for alpha chain variable domain of TCR clone 273218 (TRAV12-2, TRAJ17)
CAVNIKAAGNKLTF

SEQ ID NO: 546436 - protein, 20 aa, Homo sapiens
  CDR3 for beta chain variable domain of TCR clone 273218 (TRBV19, TRBJ2-1)
CASSISRTVTSTRLNNEQFF

SEQ ID NO: 546437 - protein, 12 aa, Homo sapiens
  CDR3 for alpha chain variable domain of TCR clone 273219 (TRAV12-3, TRAJ21)
FAMFNNFNKFYF

SEQ ID NO: 546438 - protein, 14 aa, Homo sapiens
  CDR3 for beta chain variable domain of TCR clone 273219 (TRBV28, TRBJ2-1)
CASSIQGTVGERFF
